United States Patent Application Publication US 2005/0287559 A1 - sequence listing, part 2

SEQ ID NO: 2905 - DNA, 23704 bp, Homo sapiens
  misc_feature 20194, 20195, 20196, 20197, 20198, 20199, 20200, 20201, 20202,20203, 20204, 20205, 20206, 20207, 20208, 20209, 20210,20211, 20212, 20213, 20214, 20215, 20216, 20217, 20218,20219, 20220, 20221, 20222, 20223, 20224, 20225, 20226: n = A,T,C or G
  misc_feature 20227, 20228, 20229, 20230, 20231, 20232, 20233, 20234, 20235,20236, 20237, 20238, 20239, 20240, 20241, 20242, 20243,20244, 20245, 20246, 20247, 20248, 20249, 20250, 20251,20252, 20253, 20254, 20255, 20256, 20257, 20258, 20259: n = A,T,C or G
  misc_feature 20260, 20261, 20262, 20263, 20264, 20265, 20266, 20267, 20268,20269, 20270, 20271, 20272, 20273, 20274, 20275, 20276,20277, 20278, 20279, 20280, 20281, 20282, 20283, 20284,20285, 20286, 20287, 20288, 20289, 20290, 20291, 20292: n = A,T,C or G
  misc_feature 20293, 20294, 20295, 20296, 20297, 20298, 20299, 20300, 20301,20302, 20303, 20304, 20305, 20306, 20307, 20308, 20309,20310, 20311, 20312, 20313, 20314, 20315, 20316, 20317,20318, 20319, 20320, 20321, 20322, 20323, 20324, 20325: n = A,T,C or G
  misc_feature 20326, 20327, 20328, 20329, 20330, 20331, 20332, 20333, 20334,20335, 20336, 20337, 20338, 20339, 20340, 20341, 20342,20343, 20344, 20345, 20346, 20347, 20348, 20349, 20350,20351, 20352, 20353, 20354, 20355, 20356, 20357, 20358: n = A,T,C or G
  misc_feature 20359, 20360, 20361, 20362, 20363, 20364, 20365, 20366, 20367,20368, 20369, 20370, 20371, 20372, 20373, 20374, 20375,20376, 20377, 20378, 20379, 20380, 20381, 20382, 20383,20384, 20385, 20386, 20387, 20388, 20389, 20390, 20391: n = A,T,C or G
ccttctctttgtcctctcggtcctttcccttacacagacacgccatgttctctcttgctagagcctccgaccttgccattccctgtgcctgcaacgctcttccccaggcacaaatatgtgggctcccctttcctccttagctcttgggtgaaatgcctcttcctgagagacctacccttctgctcctcacccttcacacatagacccagttattctctaccacagggtcaaataaagagaaaaaattaagctttttaaagaatgaatgctagttgtattcagaagtcttacagagactatagattgaggcctccagcccaggagcaggctctggcacaatgtttcagcccattgttatatacatctgggggctaaaggtggaggttccgtatgtgcaaaatcccatcagacttctcagaattacatgacagcagaatcacagcaagatttgggtcctagatcacagaggcatatcactaacctcgtcagatgtcatcttggaaatgttctgtgtcagaaaagccagggactggattatttctcttttaagaaacgtgaagactcaagccgggcgcagtggctcacatctgaatcccagcagtttgggaggccgaggagggtggatcactttaggtcaggtgctcgagacagcctggccaacaaggtgaaaccccgtctctactaaaaatacaaaatttagccaggcattgcctgtagtcctggctactcgggaggctgaggcaggagaattgcttgaacccgggaggagaggttgcagtgagccaagattgcgccatgacactccagcctgggcaacagaacaagatctctttcaaagaaaaaaaaaaagaagaagaaaagaaaagtagtgactcagccaagagaatgggagggcctcaggctctctcctgtgctgtcttcaaagcatctttccggagggctgccgtctgtctctagtcacagagtcaggtgctttgtgaaactgtgccgacaagcagaaagggcaaacacagcttcttaatgtttgttgctttgtctcacaatagcagaatattttctttaaacacatttcacaatctgtagttgttttgtttgccagtttattgtctgcctctcgggcaaacaggaaactgggagcgtgacaagtccctcctcccttctgtatcaccggtggcaagaaaggaggaacccaataaatatttgtaaataattgctcatgagtggctgatgcaggcattgtggtgtctcactccattccatcattgttcttgtgcctgttgacaccattaccttgagctcccgccacctgagggctgtagaggagggaaagtgttttctctacccatcttaggtccacgctggggctctgtaataaaagacagattacaagagaaaagcaaacaagtttattaacattgtatcacacatttaacacacagagtacccagagttgagtaactcagagaggtagcttaaattcaggctcacactgtctacggccataccaccctgaacgcgcccgatcttgtctgatttggaaactaagcacggtggggcctggttagtactcagatgggagaattcaggctcacaagcatcttcaacaaagaacaatacatttgtaggcaagataaaggacagcaatttttagattccaagggtggctaactgtgtgtgggaaacagctttctgcccgtgggagctgagcccttcccctctcagggctgggtctggtagccagtgggcctcccccggcttctcctgccccccgggctgccatgtgacccacatccggcagtcacagctcttgtgccagctgcagaacaaggctggggatcctaccgcctgtcccagaagagggctgaggtccaggcccccaagctccagctaggttggacttccaagggtggctaactgtgcatgggaaagcagctatatggaaaacgatggtagataaaggctagtgagtcaagtttgttattagattgcactggtgccactccaggtgaaaggggtctaaagttgtctccgacttgttccagacattatggaaggaaaacgtcctcgtaaatgaaattgtcattctgtgtcctcccaccacagcagcagatgtgtccttccgttagtgagggtaaccttacgtccaccaaggatacttggagaaagtctatgaggagcaagctcagtcccacggtttcagactatttatgctctgaacacaagagtactggttaattatgtttcagctctcctcgctgttctaagtgtgcacttgttgaaagtaacttatatttttttattgaatgtattttatttttttgagacagagtcttgctctgccacccaggctggattgcagtgtgccatctcagctcactgcaacctccacctcccaggttcaagcgattctcctgcctcacccctcaagtagctgggattataggcgggcaccaccatgccaggctaatttttgtacttttagtagaggtggggtttcaccatgttgtctaggctggtcctgaactcctgaccccgtgtccacccgcctcagcctcccaaagtgctgggattctctaggtgtgagccgctgcactcacctgaatgtattttaaagcagtagatagaataacaaaggaatatgaaaaccatggattgatggaccattttatgtattcagagagacgagccaccatcattgccagaaataccatgtaaaattggcaatttggccagccacagtggctcacgtctgtcatcccagcactttgggaagcaaggcaggcagatcacctgaggtcaggagttcgagaccagcctgaccaatacggtgaaccctgtctctactaaaaatacaaaaattagctgggcatggtgttatgcatctgtaatccagctactcaggaggctgagacaggagaattgcttgagcccaggaggcagagcttgcagtagctgagatcacgccattgcactccagcctgggagacagggcgagactctgtctcaaaaaaaaaaggcaatttggagattgcagtatttagtaaacaaataaatgatcaacattgtgcaccactaccaaaaagtgtattgtaatgcatcaaaaatcaacattttattcactaatgagatcaataaaataagtccaaattatggaaaccaaaaaaataataaaaaataaagttgtctcagatatttaacttttttttttttttttttgagacagagtctcactctgttgcccaggcggagtgcagtggcacgatcttagctcactacaagctctgcctcccgggttcacgccatttcctgcctcagcgtcccaagtagctgggattacaggcgcccaccaccacgcctggctaatttttgtatttttagtagaggcggggtttcaccgtgttagccaggatggtctcgatctctgacctcatgatccacccaccttggcctcccaaagtgctgggattacaggcatgagccacgcgcccagctttatttatttatttatttatttttgacacagagtttcgctgttgttgccaggctggagtgcaatggggcaatctcggctcactgcaacctccgcctcccaggtgcaacaattcttttgcctcagcctcccaagtagctgggattacaggcatgtgccaccacacctgctaattttgtattttcagtagagacagggtttctccatgttgctcaggctggtcttgactcctgacctcaggtgatccacccacctcggcctcccaaagtgttaggattacaggcatagccaccgtgcccagcccagagatttaacttttatccttcctggtagatggacacagttaaaatgtatgtcctgtttttatgcaaataggagggtagggagcttttcttgtatctgctcttctcaattgccttcagctcaaaatagtccttatgccaaagtggcatatttggaggtacacattctaatttccttcagggccaagtgcagggcagttaaatgcctccagaagcatcttcagacagtgtcagatgacagttagaggataaataccccagctcccccacccaaggggtggataactctgagatatattcttttttttttttttccttgagacggagtttcactcttatgcccaggctggggtgtaatggtgcaatctcagctcaccgcaacctccacctcctggatcaagcgattctcctgtctcagcctcccgagtagctgggattacaggcatgtgtgccacctgcccagttaattttgtatctttagtggagacggggtttctccattggtcaggctggtccgaactcctgacctcaggtgatccacctgcctcgccctcccaatgtgctgggattacagtgtgagccacctcacccaggctactctgagatatattctactgtcccccagagttcccacaggactgagacccggttagccacagcaataatcttctcaatgatattcttttggcagggggccacaaagtgtgttttatttttactattcatataaataattttctataataacctgagcaaaccagagaatttggcagtcccattcgcgggtcccctcagagacccacaggccagggcatctgtgtgaggtgcccaggttcacagagcagcttgtggcttgcatccaccttgcagttgcttttcttccacatcaccactggggacttgaagataacaggggcagggaatcctcagattttaggaaatttcactgcttctcctgctcagtggtctctggtccacaaggtgttccctgcatctccgtttccttcaaagctttatcaaagctggcaatttcccccatgtctggttgtctgtcattttcttttctctttttttgagacagggtcttactctgtcacccaggttgagtacagtggtgcaacctcagctcactgcaacctcaaccttccaagctcaagtgatccttcacctcagcctcccaagtagctgggattacaggggctgccaccatgcccagctaatttttttgtatttttagtagagacggggtttcaccatgttgaccaggctggtctcgaactccgacctcaagtgatccacccacctcagcctcccaaagtgctgggattacaggcatgagccccgcgcctggcctcccccagatattttcttgtgttttcaaatggagtctcgctgttgttcccagactggagtgcagtggcatgatctccgctcactgcaacctctgcctcctgggttcagtgatcctcctgcctcagcctcccaagtagctgggattacaggcacccaccaccacgccagctaatttttgtatttttagtggagacggggtttcaccatgttggccaggctggtctgaactcctgacctcaaatgatccacccacctcggcctcccaaagtgctaggattacaggatgagccactgcacccagcctcccccaaatattttctatctgtggttagttgactccacgatgcagagcctgaggatacggagggcgactatacttgttcctaaaccctgttccaggttgctctggggacttcaccctaagacagtgggtgactctctcccatcctatctttcacagcaggccactgagtcagtctctggggtgaaaggatcagggaagcatgagctcaaatcccactccacactagccatgatctgctggtgagggcatcacttaacctactctggcctgagttctccatccaacagacacttatgacatcacccaccgccctctaggagctgctgctatgataaacggcgtatttaataggagtcctcggcacatacttcaatattagcatccaccctttcctacaacttcgccctgccaagtgcacacacacactccctagagagacagctggaggctggccaggagggtatagatcctttatttcctgcaccacacgcacacaggctgacaagcaatggagattgagaggtgctgtgtgaaggggggcaggtacctgcaggaggcctcagtcccagccccagctattgaggaacaaaggtgtgggaaagggcagaacatggaagaggaagccagggcagggagggggggatcaagacagaggggagaggggctgggccatggatgggagcctggcacccccaggccactggcagaagagggagggagggagaggagacacaccactgggcagagggccctcacccacccacacacagagacacttgtggttacaaacagtaggtagggactggaagaaaggatgaagaacagggaagacagccaggtccctcaagtcaacaagaaccagggggctaccattagcatgggcatcaaggggtgaggggcacattgttgggaaggcgctcacactccctgccggtggaagctgggccctgttccctgctcagggctgagtctggtagccagcggcctctcccgggcttctcctgccccctgggctgccatgtggcccaggcctggcagccaagcttttgcaccagctgcagagcgagggccggggttcctaccgcctgtccctgaagacgtggaaaagcctccaacatgtgggaaagggcagaacatggaagaggaagccaggggcaggaggggtccccaagctccagcccaggttcatgaacacagagggtgggctggtgacagacaagggtcccatttcagaggatgggaaggagggtctgcgggtgtggggcttggccaggcagaggaggggcctcaagctgtctgtggggcctctgcaggctgctggggaacagcaaagcctgaagagaagcaggtggatgtgaactggggcattgatgaccacaggcctggcctgggcgggggcaggggtctgatcaactgtatcagaaggacacggaaagtcgccattgataattatgaggttgccccctgcatgcgccataaaggtcatggttcagtttataacctgcacaagcttcatgacacgcctgctgaagccagtgctattccacccggcagtgaccaaagggccatgagatggggacaggctgggacgggtaccaggacagcactagaggggagggatgggccagtgaggtgctacagcacaggagtagagaggacgggctcagatctaccccggctgtgtggccccaacaagtgtccttagctctctgagcctcaccctcctcacctaaccaatggggacacatccctgccacggaatgaggctgatgggagctgatgcacgtgcaatggctgctgtgcatgaggtcacaaggtcatctttcatgtcctgcggctccttaaagaggcagggctcacatggcctcactcggcaggtgcagctcccagactttggggtttctggctggggagaggagaccctgtccaccccacaaccctgcaggaggccctagcccaccttctgacacccaggggactgttccactgtggcccttgctggtgaaggcctttgtccccatagcctgggcagtcccagaaggccctcttcctcccaggccgtgggagggtggctggtcctgtcctccagcctgggtcagccccaggctgctccaccatcccacccaccgccccccgtgtttgttttgactgctgctgccactctgcagagttggagagcctggggtatagaggaggcaggggttgggggtaggggaagcaacgggcagagatgggaagctgaggcgcagtgtgggggcacagtcccagccctaacccccacccagcccccaggagaaaagtggatggagatctggaatcctaagcaaatgccacataaagagcactgacactacggttcccactgaaggggatcagaggtgtctatgcaaatgatatgaaagtccatgcaaataagcacagcaggtagagccaggctggggcaggtgagcactcgggagcttatccaccctctcttttcatcggcacgacgatctgcagcttgtccggctggcggcgggagggccccgtgggggcactcacctttctggagcatcttccacctcagctgccgccttaatgggcatcttgccagttggccagctgctggaggacataattcatgtccaggtgtgagggcccaagccgctggcctccagggctgatgtcaccacgttcatccgcgttgcctcatcagctccagttccacctcctcccagccctcggtctcctctgacaccagctctgcctcttcatcaccccttcctcagccggcaccttcttggcagcccccagctcctcctggggcaccaatcctccgcaggcgtgaaatcttccccccgcatgatatccgctgccagcatcaacccttctcagcctcaaacccccgcacctgctctcgatcctcactgtagcgaaaatcatacctggggggagatagcgacatcttttgaggggctggaaagtccaaccccccaggcccacccccaccgtctccacacagaccctgatggttcctcctggttctgtcccagccaggggagaggggactaggtaccagctccaaggcttcaaatacccagcccatccccctggtgggagggaggaaaatggtcaccaacactgcataggccccatcttcttttatgtccctgaccctgcacggaaacaccaacagggttaacacccacttctgcctccctcctgcatgatttaaccttcatagccaccccacagctacttgacataggaacaaatccattctagacaggctcagacaggtcaatgacttgcccaaggacacacagtcaggaaagggaccacgctgggccttagtcccaggtgtcccagctcctaagccagtgcctgtcacctctcagcccatagtcagttgaaaagaaagctcagtccccactcagagctgcctggaatcagacggccacccagggggcaagatttgaagaaaagtggggcagctccttcccagaacagttctcagttcagccagccgagatagcagggcttctccggagttgcagggtggcagaaccagaggcaggtgggctgtctggctgctgaaactgagggcaggttgtaggggagcccctggcaggcttaccttaggctggatgtgtccccttgggcatctcataattccttcaaagagaaaaggaccttcattatgagacaatggaagccaaactgcagtccctggggcttggtcaagctgaagaaccttaggtagtggccatgagcagggctcacgcctgtaatcccagcactttgggaggccgaggtgggcaggtcacctgaggtcggagttcaagaccagcctagccaacatggtaaaaccccgtctctactaaaactacaaaattagctgggcttggccaggtgcagtggctcacgcctataatcccaacactttgagaggccaggcgggtggatcacaaggtcaggagttcaagactagcctggccaacatctctactggccatctctactaaaaatacaaaaattagccgggcgtggtgatggccacctgtagtcccactactcaggaggctgaggtaggagaatcgcttgaacccaggaggcggaggttgcagtaaccgagatcacgccaacctggacaacaaaacaagactccatctcaaaaaaaaaaaaaaaaattagccaggctcgtgcctgtagtcccaactacttggaaggctgaggcaggagactcgctgaacccaggagatggaggttgcagtgagccaagatctcgccactgcactccagtccagtgacagagtgagactcgtctcaaaaaaaaaaaaaaacctcaggctgggcatgatggctccgcctgtaatcccagcactttgggaggctgaggcgggcagatcacctgaggtcaggagctgagaccagcctggccaacagggtgaaactgtgtctctactaaaaatacaaaaagtagcgggcgtgatggcacatgcctgtaatcccagctactcggaaggctgaagcaggagaattgttgaacctgggaggcagaggttgcagtgagccaagatcataccattgcactccagcttggtgacagagcaagactccatctcaaaaaaaaaaaaaatacctcagggggaagtgatgggccatattcatagagaagcaatgagtggaggggctgatgcagtgaacgaggcgggtataggaagcgtggaaggtcagagtgtgagggcaaaccccctccccactacaggaaaggccatgcctatggggcaagggagggccccagccacgcacctctccataaaatacacagggtctgaatcatcctccttagagacgttctgagctcctcagccagcgtctcctggaaaccaggaaggtctcctatggtggagagaacagacgttaccagaggacccccacagaacccccacccatggctcaggcacagaagggaactgggatctcaatcagccaccaaggctgagacacaggcaagacgtaggaaagtgggcagccaggggagggtcctcaccagaggcacgctgtatgggtatgggtggcagacccagtggacaccgggggttgctggcggagggtcttcacctcctcctgatctcaatcagcatgcccccacaatccatgtacttctcccgcaggtcctgcagctgggacccacccacacgctctgctgggacccaggcacacccagtccagcactcctgcctatctgtctcaggctgaggccagaggcccaggttctggactccgagtgtcatgtgggggacccaggcaggtccctgcactccacaccactcagaccttgatggaactgtcacctgctgggctgtccaggcatggagggggtggaaacggacaagactcagttcctgctagtcctctccagagtaggtagctgccaagggcctggggtccccactctgggccagtggctctccagggtgggggagaagccggcagcgagactcacctcttcctggagctgcatctggatttccttctccgaaccagctgcttctgcaacttttcagtctcagccccatactcgaaggacccaaaaccagtgacccccatctgaggcctacccactcagggcaccccctgcttccagcaagtcttcccaggacatcagtgagtccttggcagcccatgaaatgacaagtcacacggaaggagggcaaagaggcaggggagtcacacagcctggttcctagaagactccaggaccctctctgggccttggctcctcaagataacaaggggtcaagataaggggctctctgaggtctctgactctgacacgaaagggacctcaggcctggtggagccgagtggaggcaggaagaaggaagctagggtccatggggctacgacaagagggttccacacacacccgactcaccatccggcagcgctgctgagcttcagcacctgggcctgcagccgagcgacctcctgctgctgccgttcatagttttcagcctgagcaccagcacctccgacagctcagccatctgttggctggcctccactggggaggcagaggacaggtcagccctggctcccctggccttcagggaccagctctggccctcccgatgcctctgtctcccccaccctcggctgctgtgctgtgccagtgggtcctgcagggcttgcattcctcactcaggtcttccattcaagaaatgttcattgactgatactgagcagggaccagggtgagtggtcagtaagacccagccgccacactgaggtaaagttggtggggagaagaccacagtcacacatcatacaggccatgatgggcaaatgtcaagggtgtacagggcagggcatcacagctacagcacccaacccgacctgcaaggtaaggaaggattcctggaaaaggaaccactaagctaagaccacagggcaagtgaagctcacccaggcaaagaaggaaaaaatgggtccaagctgactggaaaggcccagaggccatcataagacactgggagggggaggcccagaacagtgcacacaggccagaccacagtagtgggcaagggggtggggtttatccttggccaatggaaagctatttgggagttttaggcacagtaatgacgtggtcagacttgggttgttggtttatttatttatttgagaccgaatctctgtcgtccaggcaggagtgcaatgtgcaatcttggctcactgtaactgccgcccgagtccaagcgattttcctgcctcagcctccgagtacttgggattacaggcatgcgccaccacgcccagttaatttttgtatttttagagagacggggtttcaccatgttggccaggctggtctcaaactcctgacctcaagagatcacctgcctctgcctcccaaagtgctgggattacaggggtgagccactgcacccggctactgttttttaagaaatgaggtcttgggacaggcacagtggctcatgcctgtaatctcagcctttgggaggccgagggggatggatcgcttgaggtcaggagttcaacaccagcctggccacatggtgaaaccccatctctactaaaaataccaaaattagctgtgcatggtggcccatcctgtaatcccagctactcgggaggctgaggcaggagaatcgcttaaactcgggaggtgaggttgcagtgagcaaagaccacaccactgcactccagcctgggttacagagcgagcctcatctcaaaaaaaaaaaaaaaaaaaggaaatgcggtcttggccgggcgtggtggctcaccctgtaatcctagcacttgtgggaggccaaggcgggaggatcacttgaggtcaggaattaagaccaacctggccaacatggtgaaaccccatctctactaaaaatacaaaaattagctggcacggtagcacaggcctgtaatcccagctactcaggaggctgaggcaggagaatcactgaacctgggaggcggaggttgcagtgagctgagatcatgacattgctctagctgggcgcagtgagactccgtcaaaaaaaaaaaaaaaaaaaatttgccaggcgtgatggcacacacagtagtcccagctactcaggaagctgaggcaggagaatcacttgaacccaggaggcagggttgcagtgagccaagactgcaacactgtactccatctcaaaaaaaaaaagaaagaaagaagagagagagagagagagagagagagagagagaaggaaagaaagaaaagaaagaaagaagaaaagaaagaaaagaaagaaaagaaagaaaagaagaaagaaagaaaagaaagaaagaagaaagaaagaaagaaaagaaagaaagaaagaaagaaagaaagaaagaaagaaagaaagaagaaagaaagaaagaaagaaagaaaatgaggtcttgccaggttcccaggctggggctgagtacagtggctattcataggtgcgatcctattactgatcagcatgggagttttgacctctctgtttctgacctgagccagttcacccctcctcaggcaacccagtggtactccactcctggaccatactgaccctgtcggcatagtgtactacagcccagaattcacaggctcaagaatcctcccacctcagcctcctgagtagctgggaccacaggtgggagcccctgcacctgccaggtttggttttagaaaactcattaaggctgtgtgcagaagttcctggtagggcgcggtagaggcagtgcgaccagttaagaggtatcttgggctagaggcagcccgagtggggaggggaaaaagacttaagccattcctaggaggtaaaagcagcagagcttggggactggttctactccagtagcctggggaccagtggggccattcagggagttgcagaacccagcaggaagaaggtcagttctggggtaaagggaacagcaggagttcagctgttgccactttgcgtttcatctcaccagctacacttgaactcctcaggcacaaacactgctcctcactcatcttcaaaacacacagtgcctaggacgatgccaggcacagccactgccccgtgcatgactctgaatgtcccagccctgggtgcctggtctctggcagctcatggctccctcttgcctgccccaataagagaagacaggcttggaggagacccaccttttttttttttgagatggagtcttgcttgtcgcccaggctggggtgcagtggcgtgatctaggctcactgcaaactctgtctcccagttcaagcaattctcccacctcagcctcccaaggagctgggactacaggcttgtgccacgcatctggctaatttttgtatttttagtagagatagggtttctctaagttggttaggctgtctcaaactcctgacctcaggtgatccgccggcctcagcctcccaaactgttgggattcaggcatgagccaccgtgcctggcctgagacccacaatttctgtatagctctttatagttgcacaaagtacttcctcagctgttgacactcttaatcttcataaaccctggagagatcgtggggctgagaaaattaatccccattctaaagacaaaggttcagagaggtcaaggaattatccaagttcacacagctaggagtgccagatctgggacttgaacttggatctccatacccacatcttgagttcttttctctgctccttgggacaaccccccaccccgagtgacaacatacgtacaaaactgctccacacactccagaatgagcatctgttcctcatcctcaagagttcgagttgagaggcctggagggagacaaagaggaagggacagggaagtcaacaccccctctagcagggacgccctcctcccccattctcacctcttctctcagctgatgattctcctctccagcagcctcagcttctcctgcaaggcttccagctgtgggcagtggtgctggtgcagaatgcctcctgcgaaatcctaggggagggaggaatgggagtcagggtgcagggagtgggcttcccagttcccagcccaccagggctaagggcagtgttctcaattagttccagcaacctgccggcaagcacatcacctgtgtccctcttaacaaatgaggaaattgaggctcagagaaggacttgcaggtgcaaaggcaggaactcacagcttaggggcatcacagggatgagcacctgcaggtcttcctctgcttcttcttcttcctgttcctcttctgcctccttttcttcctctcctcttcttcatcctcatcctcctcatcagaatctgagtagagctggaggagctcatccgcaagttcacctggtgtctgaggtataaaatctggcaggaagagagaggagccatggttgggagtgggcagggacaggagagggtcctggcatgaggcaggtgtagattggcccccatcctctcctccccacccggttacctcctccttggctgagcccagcagggcttccagctgctgttctcctccatcaaaacactgttctgtttcaccagggactggccgatgcgagctgagtgttcaggtccctctctctctgcaggaccatcccataggtaacgctctcccagacagtgggagaagctgggggggacacaggggtcagagagaggctaggcccctaagagaaccttcccatcccctagttctctagggtaccagaccagagtctgccattaacccactgtggaactggctcagtttcccctcatggaaaaagaagatcagaccagattggctctgagagctcttcagcctgaacatcccacatcgacctgtcttccataagaaggaccctaacctggggccccgagagactgccaatcaggaaataaacaagacccccacccctacaggacaaaactagaatagggcttgcctggatcaggaaggcagtacacacctcctccagcaaatataacatcacttgacgtcttcctgggtgatctttttgactggcggaggtaggttaggacacagtgctgcagaggcggcaggtggggagaaaaggcccagccaggtcaggaaaaaggagcagatgctaccacaaacagctgtttcccgtcctatcgtcagttctccaacaagggtcatcgggagagaagatgggctcccctcctgccccccacatcctccccttacccctcggcactcaacactcccttcctgctcccagggccaagtggacagggtttttaggtttttggggttttttttggtttttttttttttttggtttttttttttttttttagacaaagccttgctcttgtcctccaggctgagtgcgatggcgagatctcagctcactgcaacgtctgcctcccagattcaagcaattccctgcctcaacctcccgagtagctggggttatacacgcccgccaccacgcccagcttattttgtatttttagtagagacggggtttcaccatgttggccaggctggtctcgaactcctacctagtgatccgcccgcctcggcctgccaaagtgctggctgggattacaggcgtcagcaccgcgcccggcttttttttttttttttttttttttttacccctggaggagcctgaggtagggggtcacagtcctccaggctcagaaactgggctctccggacacctgggtccctggccctagaatggagacagccaggggaagtacagcctcagactggcttatcaccccctacccggaggcagtgcaatggagtctcctgggtcatacaaacagacgcagccactcaccctgcactgttgcgtgtgcagaggacaggaggaagacttcaccagattaggagacactcgagccttaggcccaatccagagatctcccccgacccgcaggaggataggagagacaaggggcaggaaagagcgcgactttgcccccatacccgcaaccaaaaagtgggcaaaacttccccctcccccgcccacccacccctccatcgcacgcaagcccggtcggccagcgcaggctcagagcggcgggacagcgccctcccgcagccccccgcccctctcctggcactgcggtagacccagggaggggcgctgagggggtgcagatctgccgcagcaagaggcgcgtggaggtgggtgggcagcgtgcaggccccagaacctgactcacgggcacaaaccaggggacaagagcagaggagagatggagaaggggcgaccagacagacaccgcagtgacatcgcgggggtggtggacggggacactgagtgctagagggggcggggtgcctggacccgatggggccacttcctccctgggttgccccagtccccacccggtccaggaccccgggggcccgatttaccttcctccagctccgaataaaggcggcgcgctcagggccggacaccccgggtcgccggccaacgtaggcggtggcgtcttccagatgcccgctgcctttccagtcccccggccagtggcccgggaaccaacggcccttggaatacgaagcgggtccacggcgcgtccgaattgtcgggcatagaccggaatccccttggatggccgagaatgcggacgggcgccgggctcctgccttggctccagcctcgaggccgggcgagctccggtgcgggcttccgagaggaactgggttccagaggtggctcggatcctactctctgtccagtgccccgtgcctgcggctgcgcagagggctccggagcggactggctgagggcgaaggtgcacaggtgagtgctgctgggtccccgggtccgagccggcccccgcgcagcaccggcccaacctcctcgggcgcatctcgagtctgccgtccgctgctgggcgggacctttataacctgcgccagccgccgggccggaccacgcgtaggggtgggggcgccgagaagcaactagtggcaagcgggactcagagccgcgcgggaggggagctagtggtacggaacagagcacagtaagaaaagcagggcaagaagggcgagtgcaagttccggatggtccgagttgggatgggagcgaaagattttttctgccctctccatctccggagaatggtttgcccaaagccgcggctgccccagcactcgcgggtccctggctgggggcagcccctcccagctgccgcgccggggtttcgggtgccttccctggtgtagaagctgccaacccaacgtttgcatacggtctggggtggccagtgcattagggcagcgctgcgtctttcccggttgactggagagacattccaaactccagtgcgcttccaacgtgctgcaaccctgcctggcgctgcaccctgcctggcgctgcaaccctgcctggcgctgcaaccctgcctggcgctgcaaccctaccctcgcgctcacaccccagtgctcgcgccactcgacgtcttccatttgattggattactgttcttcacctccaaccttaattcgctttgccctcctcttgccatgctggcgaaccctgttctccttgggagacgcctcttaaaagtctccctgtagccgggcgcagtggctcacgctgtaatcccagcactttgggaggccggggcaggcgaatcacctgaggtcaggagttccgacaagcctggccacctggtgaaaccctgtctctactaaaaatacaaaaattagccaagatggtggcgtgtgcctgtagtcccagctactcaagaggctgaggcaggagaattgcttgacctggaaggtagaggttgcagtgaaccgaaattgtgccaatgcattccagctggggctcagagcgagcctacccctcaaaataaataaataaatagaatactttttttttaagtatctactggaaatgttgggtagacaattagatgtataaatctgaatgtaggggagagaccggctggagatttaaatgtaggagtcattgttctttgatgaccatttaaagctatgagactgtgagatccccaagagactgagagaagacaggtaagagcgcccaggactaaccccctaggttcagagggcagaaagaagaagaggaggcatcaaaggaagactgggatgagtggggcaggaagtagaggaaaaccaggaaagttgggtcctagaaagtaaagaaaatgtttcatgtaggagtggccacctgtgttgggtggtgctgttgggccaggcaaagactgaggacagagactagcttggcaaactggggtcatgggcaaccttggtgagctggggtcatggcctcggcaaggcggtcttgcggggccaggcacagtggctcacacctgtaatcctagcactctgggaagcaaggcaggtggatcacctgaggtcaggagtttgagaccaacccagccaacatagtgaaacccatctctactaaaatacaaaaattagctcggtgtggtggaacaagcctgtaagcccactacttggaaggctgaggcaggggaattgcttgaacccaggaggcagaagtttcagtgaccgagattgcaccactgcactccagcctgggcaacagagcaagacttgtctcaaaaaaaaaaaaaaaaaaaaaaaagagcggtcttggtagagggggtgagagagaccaaagaggagtaggaaataacgagaggtaacaaaatgaaaacagaaagaaggctaggcgctgtggctcaccctataatcccagcactttgggaggcttaggagggtgaattgcttgagcccaggaatttaggccaacctgggcaacatggcaaaaccctttcgctacaaaaaaatacaagaattggccggcgcagtgactcacacctgtaatcccagcactttgggaagcctaggcgggtggatcgctgaggtcaggattttgataccagcctggccaacatagtgaaaccccgtctcaactaaaatacaaaaaattagttgagcatggtgacgggtgcctgtaatcccaggtactcaggagaatgcttgaacccgggaggcggaggttgcagtgagccgagattgcgccattgcactccaaccgggcaacaagagcgaaactccgtctcaaaaaaaaaaacatagctgggcatggtggtgcaacctgtactacttcaggggctgaggtgggaggatcacctgagcacaggtcgaggctgcatccagcctgggtgacagagcaagaccctgtcggaaggaaggaaggaaggcgggagggaggagggagggagggagnnnnnnnnnnnnnnnnnnnnnnnnnnnnnnnnnnnnnnnnnnnnnnnnnnnnnnnnnnnnnnnnnnnnnnnnnnnnnnnnnnnnnnnnnnnnnnnnnnnnnnnnnnnnnnnnnnnnnnnnnnnnnnnnnnnnnnnnnnnnnnnnnnnnnnnnnnnnnnnnnnnnnnnnnnnnnnnnnnnnnnnnnnnnnnnnnnnnnnnnnnnnnnnnnnnnnnnnnnnnnnnnnnnnnnnnnnnnnnnnnnnnnnnnnnnnnnnnnnnnnnnnnnnnnnnnnnnnnnnnnnnnnnnnnnnnnnnnnnnnnnnnnnnnnnnnnnnnnnnnnnnnnnnnnnnnnnnnnnnnnnnnnnnnnnnnnnnnnnnnnnnnnnnnnnnnnnnnnnnnnnnnnnnnnnnnnnnnnnnnnnnnnnnnnnnnnnnnnnnnnnnnnnnnnnnnnnnnnnnnnnnnnnnnnatggcacgtctcggctcaccacatcctccacctcccgtgttcaagcaattctcctgcctctgcctcacctccccaataacatgcgtcaccacatccggctacttttgtctttttagtagagacgggtttctccatgttggttaggctggtctcgaactcccgacctcacgtgatccgcctccccctggtctcccaaagtgctgggattacaggcgtgagccactgtgcccagcccaaagtctgctgtttcctatggtttctttgtcagcagaaagcttgaaggagacacacaaccccagggttgctacgacagtgaggttgaagaacataaggaggtggctgttcgggcatcggcacagcccggcttccgtgaggctacagctccataggctctgccgagtggtcctcccacagcccagctcctggactgtctctctgtgccttggacatctctgcagccccaaccaccaagcacagaacgggcatacagaagaagcctattacactcctgctgaattaaattgtttctggccccatgagaagaagccctgggaaacccctggagagtttgacggggaagaaggcagaggcagtgggaggagaagacagagatgaagttaggagaccctgaaagctcccccagctgaccacaccctcaggtcagcgcactggcagccagcaactctggctacggccaccagagggcagtgtcagccgtatacctccccacgtggcttcctcacctacaggctcagtcgccccacagaaagtggagagggacagagactccattttacaaatggagaaaccagggctcagggcccgtcattctggagtaagcattttggcctggctgacagatatctgcctttcgacagcctagggctgtccagagactgggggtagtctctgatccaggcctctcaagtggttttcctctgtcaaccacccctccctctcctgcttctcatctagggggagaaatcagacacagcaaagacccttggcctctgtcctccctcccagtgtgcatccatggaccctcctggatccgaaagaggatgggaggggcagaagacttgccaggctgcaaagccagaccacccaccacctaattgtgcacacccccgaacctggggcacattcactccagtgcccagccctgggcagcacacaggtggctcaggccctcctcctgccccctcccctggcctgaccctgggaaaaaaaacacctggaacagggtagtcatagaaagagcccctaagggtcggtgccagggacctgggggggacaggcaccggggtactttctgcaggggagcagggtggaggggcaccctgaactaggaacaggggagacctctcacccccgccgcagtcctgctgtctcctgcaggcctttcgggggccctcccccatctcgatccaggccttcccctccagaaccaggcagtggccgccatagccctcacccccaccccgaacccaggtacagtccctccttacatcagcagagaatgggggacttgagggcctaggcctcagaggttcccctttaacttttctttttgtttttttgagagggagtctcactctgtccccaggctggagatcagtggcatgatctcagctcactgcagcctccgcctcctgggttcagcaattctcctgccttagcctcccgagtagctgggactacaggcacatgccaccataccatctaatttttgtatttttagtagagacggggtttcaccattttgcccaggttggtctgaactccggacctcaagtgatccatctagcctcggcctcccaaagtgctgggattatagcatgagccaccacacctggctccctttaacttttctcctcttcttaaagagcccagcccactcctgggccactgagcccctctggcctggaacaaggaggtaacgaggtgctgggggcgctgggggtctgagccctctgcctgctgtcttccatggccccgctgctggccaggaccgaagggagagaggcaaggagagaaaggacagagagcaagtgccggggacgagggcaagggctgaggtggctgggacctcaggtggagagtactgacccccactctgaagttcttccccactgggggctcctatcctggaggaaggccccgcctcccacacaggctcactcctgctcttgttctgatgtctgactcctcctctgagaagccctccctggtggggctcacctgtgttagtatcctgtgccagatcaggcctctctgtgtcctcccctcccctggcattctctcccgacctgcccgctcacagggtaagatgatgtcattgacaagatgatctatttagtaacaatgaagcagtatctgttttgctcacttttgtattctcaggactctaatgaggcatccaataaaatttgttgaatgaacacatcagtggattctctgggtatggatggtgggagtggtaatcgcctggggaagtgacttccggtaagggtgagatcctaggactctggactcccaaaccaggctccacatcccctggcacaggtgagcgccaccaggaaccctccaggggcacctgtgggaagggtggagaccggccaggatgtgagccacagatccccagggagtgagccttggcacagcaggtgcccacttcttccctagagccctcagcccagccccgctcctttccccagggaccgagcaggaggcctgggctggcctgatatggagctgggtccagcaggtcggcagtgccctacctgggaagctccacgggaagcagctgggagtggggggaccacagcaccctctgtgagagggcaggaccgtcagctgcgtccagcctgctggacaggcaataccaggtggtggcgagctagaaggatgttctggccctttggcctccctgagctacctccaggctcagggataacacaaggagcccttcgctccctgacctctgtccccagagtcagcaattccctctcatccctcgtccatgtccaggctctgagcccttccagggacaatttgtggga

SEQ ID NO: 2906 - DNA, 100000 bp, Homo sapiens
cataaagtggggaaaggacatcctattcaacaaatggtgctgggataattggcaagccaatgcaaaagaatgaaactggatcctcatctctcatcttatacaaaaatcaagtcaagatatcaaagacttaaatctaagatctgaaaccataagaattgtagaagataacattggaaaacccttctagactttggcttaggcaaagacttcatgaccaagaatgcaaaagcaaatggacaaaaacaaaggtaaataaatgagacttaactaaactaaaaagcttctgcacagcaacgaaataattggcagagtaaatagataacccacagagtgggagaaaatcttcacaatctaacatccaacaaaggactaatatccagaatctacaaggaactcaagcaaatcagcaagaacaaacaaacaaacaatcccatcaaaaagtgagctaaggacatgaatagacaattctcaaagatgatatgtaaatggccaacaaacatatgaaaaaatgctcaacatctctaattatcaggaaatgcaaatcaaaaccacaatgagataccaccttactcctataagaatggccgtaaaaaaaaatactggatgctggagtggatgtggtgaaaaggcaacatttttatgctgttgggagaatgtaaaccatggaaaacaggtgtggagattctttaaaaactaaaagtaagtctacatttgatgtagcaattccactccttggtatctacccagatgaaaaaaagtcattatacaaaaagacacttgtacacacatgcttgtagcagcacaatttgcaattgcaaaaatatggaccagcccaaatgcccatcaatcaacaagtggataaagaaaatgtggtacatatatacctggaataccagtcagccataaaaaggaacgaaataatggcatttgcaacactctggggtgaattggaaaccattattttaagtgaagtaacccagaaatggaaaaccaaacatcgtattgttctcactcataagtgggagctaagctatgagtacacaaaggcataagaatgatacaaggactttggggacctgggggaagtgtgggaaggatatgaggcataaaagactacacatgggtacagtgtacactgctcaggtgcaccagaatctcagaaatcaccactaaagaacttttcatgtaaccaaacaccacctcttccccaaaaacctattggaaaaaaaaagacaccataagaaaataaatagagggcaggtgtggcggcttatgcctgtaatcccaacactttgggagccaatgtgggaggattgcttgaagccaggagtttgagaccagcctgggcaacatagtggacctccatctccacaaaaagtaaaaatactagccagacgtggtggtgtgcacttataacctagctacttgacggactgaggcaagaggattgcttgaaatttgatgttacaatgagcatgattgtgccactatactccaacctaggcaatagagtgagaccttttcttaaagaaagaaaagaaaaagaaaaggaatacataagccccaaactagaaaaaatatttgtaacacaaaatttgacaaggattttgaatctagattatatataaagaacttctacaaatcaataatgaactttgagcaatacagtaaacataggcaaaaggtttgaacagatgtattacaaaagaggtatatgaatgatcaattaacacaaaaaaagatggtcaataccattagtccttaggaaaagcaaattaaaattgcaatgtgttacgtcacatgtacaaaaacggttaacatttaaaagataacaataccaaatgtgggtgaagacatggaaaaatggatctcacatatattgctggaggagtataaaatggaacagccactttggaaaaatatttggcagttacttatgaagttaaaatatatctaccctatgaactagtaattaggtattaaatgttgagaaatgaaaacattcatgagccaaacctggaaacaatccaaaggttcatgaacaagagaatagataaacaaattgactatattcatacaaaaatacttcccagcaataaaaaagaataaagtactgatatgcacacctacaagagtctcaaaaacattatgttaaacaaaagaagcaagacccaaagttaaactgctgtatgattgcctttatataaagttcaagaacagacaaaacttatctatgatgagaaaagaagaacaatggttacctatgagcgggattcactggaaggagtatatggaaaatttgacggtaaaggaaatgttctatgcttggaaatttctaccaaaaatggtgttttttaaaaacagtttgaggtattgatgaagtgtatatatacatttatcacaactcatcagattgtaccttaagatctgttcactttatataaattttactttaatgaaaatgaaaaagaatgcatctaattagaaatcaggctgggaaaaccaaaggaaagcaacttaatttattttgtttctctgtatttaaaattgaaataatccatatgtcaccaactcaaatattttctctccaccatctttttatacatctttccagttttgagtggcaagcaaagaggatactaattcacagtttttgttttgttttgtatttttagtagagatggagtttcaccatattggccaggctggtcttgacttctgaccttgtgatccacccacctcagcctcccaaagtgttgggattacaggcgtggccaccgtgccctgcctgattcacagttttatacatataataagagctgcaaatagtggttgcattttcattacttccagcaagtagtgtttcattatatgcattttacagtatctttgttctcttgtcaagccttgtagagcacttgaagtgctcttcatttaatggtactctactctcataggttgagcagaactgaagggtagggaaagattgttttgggaaatccagaattcttccctaaacctttacatttttagaaactaaaatacctgggagaatgatgaggagacatctgtaattaaggaagtaatctgttgatggtgtggcggtggcaatgattagtaagaggtgtgagcacagtaaatacataacccaggagaactaggtgccctgtgtttcaatgaggaaattcatcggaaaagttagaattttatgacaagcacacataaacatatgtcccaatagtccctccagctattgctgtccactcacacttataaccattcagagctatctccttgctattaagtctaactttcttactgacctaccagcagggtttcccccacccagctgtgtcccttcagatctaaggaactattaaataagaaaaaaaatttttgtccattcctgttccacatcctgtagcatgacccttctccttctctatgtccttctgaggcatcctaattactccacagagctcacactgcatgctgtagtccaaagtacattgcagctcccctccttctttcctgacacccgtttgtgaccagtcatgtacttggtggctggtcattcattagctcatactcatactctcgttgttgctgttaatcaacctcagcaagctcttgatgttaaggactacgacttctgtttttgtactccaggcagtgctctatcatatatagctgtttaattaacgaatgaattagttactttaactcaattccagaaattaaatcatatttggcagctcaaacctataagttatagtcatttcttatcaattttaaaataaagagtttatttcaacctttcttgagtgcaagaaagttcagttttatccagaagtaggaacataaacttattatttatttatttatttattttttgagatagagtcttgctctgtcacccaggctggagtgcagtggcgtgttatcggctcactcaacctccgcctcctgggttcaagcaattctcctgcctcagcctcatgagtagctgggatataggcatgtgccaccacgcctggctaactttttgtatttttagtagagatggggtttaccgtgttagccaggatggtctagatctcctgaagtgtgatctgcccaccttggcctccaaagtgctgggattacaggcatgagccaccacgcccggctggaatataaacttattaaaatctctgtaaatccttcccagttgggtagctctgtcctatgattttgctatctgggcaatgtagatgatgaattagctgcgattgattttcatcatcagtcatcagccatagcatctgtatacctctgttgactccgtcatctcctagggagcttgtactcaacattaatgacaacatagcccaggtgacatgtaattaagaaagcaaacctttttccaaccaaaaataatatgaggattccaaatccaaacagaacagagctgtggatcatttcatgtttgtcttcatatcatttctccactccactccactgacacagcgtgatgcttgattgtcctctaagccccttccatgctgtcatctgggatgctggcaatgtattgtgctgaaagggaagcttattaataaagttgtaactcgaagagtcagtgcaggttatttgtaggatgctcattatgagtcttgagtctgctcagtccagaaagcaatggaatattccgcataaccacctaaaggacttctctttccccttccccagggtctgtttctcctgtaagggttcagagctgcctggcagaggctggctgaataggagaaatcctgacttaagctgtttcaggaaagtgatccagtctttggagaataatcggacataattaagtatgagtaaaaggcttagagttagtctgttctcctctgtaatgggggttcactagtgtgacagttgtttttgtgactattgcttttacgtacatttttgaccagccttggaacactacctcagggtaacttaaatgaaagtccattttccaggatggagtaaacgacagaaatttccatcgtgcatcaaatctgctataagttgtttgccttctgggtattttgggccctagttgtactcctgaagaaataaccactgttgctccaagtagaaagtggttgagagacagctaacagatacgtccagttcttattttctatcacagagatgtgaaaaaaaaaagcctaaattatcttagaaggaaaagcattcctctgtgctggatttccagtgcttcccactttgcactgttagcttattttttccaatgtccctataataacaatccactcctttctcgcactcctggcccctcgtgatgttttatcatgctcatgctgaaagaaaaggtgtctgtcatactgtatctcttcatttggcctcagggatttccctttgatttggaaagaataatcttcaaattccgctataaactatacaggagaaagagaaaaataagataaagctcctggaatggcactggtattgacatttcgttcaaataatgggctgaaggtgaactatctttactattgtcatgtgaatgatcaattattatcaatccaaactatcaacagtgctgcttattattgattatactgcatggtttaattttgtctccatccttccagacattaaaacatagccaatattagcagttcccgccattcaccatgagcacctccacagcccccaactcctctctcccagtttgcccaggatatttatggtgagtagcgagttatctcctctttggcagtcatccctgcttcctgtgtggaggaattgcccacattcgcatttgcaaacagaggctcactcaagtgtcacaaaggaaaggaggtggagcctgaagagctttaaaaagcaaagctgagtcattccactttcaaaaagagaaactgttgggagaggaatcgtatctccatatttcttctttcagccccaaccaagggttgtagctggaactttccatcagttcttcctttctttttcctctctaagccttgccttgctctgtcacagtgaagtcagccagagcagggctgttaaactctgtgaaattttcataagggtgtcaggtatttcttactggcttccaaagaaacatagataaagaaatcttcctgtggcttcccttggcaggctgcattcagaaggtctctcagttgaagaaagagcttgaggacaacagcacaacaggagagtaaaagatgccccagggctgaggcctccgctcaggcgccgcatctggggtcaatcatactcaccttgcccgggccatgctccagcaaaatcaagcgttttcttttgaaagttcaaactcatcaagattatgctgctcactcttatcattctgttccagtagtttcaaaatttagttttgttagtctctcagcaccgcagcactggagctgtccgaaggtactctcgcaggaaatgggaattctacttgtgtgggtaagtactccaatgaaaagtgctccaggtctccgggaaactgcccccacatccctgttggttcaatctggtatacttggcatttaacaaagtttgtctttgggtatgtatagttgcttaatttttgttttctgatgatgtttattttcttactggccattagagctaatctgctaccaactataaaacttcataatctcaaactgtacttctgtgtataagtgaatgaatatgcctcattttaaactagcagaaatttcatggaagcttcagcttttactctgacaagaggagtaattaacacctggctaattcttggaaattagggaaacagatggttgattttttgtttgtctgtttgaaactcttaagcacaaagaaaaaaatccttccttctgataacttgtaagaattcagaagttctaaaaattatgaaaaatggaaagggaactgtgaacaaaggtagttgtgaaaattaacctaaatttcaattcaacctccttcactttctccccactcttactgtttctgaggctctgacacaactccgagttttagtaacaggtgtattgcaactttaagaactgccaaatatgataatgggtaaatagccacactgtcctctcatattaaatgaattttttgccaaggggaaatgggagcttgacgaatgcgaattacaatcctgccaaaggatattgcctgaaaaacattctctctctaactgtaattcatttatttaatccttgggtgagcctccaacctgctgcttagacacggcagccgctttgttgatgagaggttatagctgccccgacattccatttttatcagcttgcccttttagatggcgtctggcttttaaaaagaggtagattgagggggaaaacacagtacagtttccgaagagacacctatggaagacagtacacaataggcaatagtttgaataaagagagcagatggagccaaactgccaaagctaggctgctgtcctggctctcccattaaggaagttcccgtgaggaaatcaggtgcttttgctcagaatctctggactctgttctcaggtagcactcctgtaacaggtgagcagaactctagggtatttgaaataaagacttaatcctagtgatctcttgttcccagcacctaggacattcctgcttccacagtgtgtactcagcaaattcttgtgttgaatgaggcgtctttctctgatctgctaatgacatagtcctagagaacagcaacaaaagagggtgacaaatgacaaaaatggccccatgaacctcagactcagctgttggagacagagtaaaacttctgtatacagttatgtcaaatggactggactctctttggggtgggagaatttccgtggagtagttggcaaatatctagagttgggcactgtcatttgcatgggatgtgagggtgatggttgggccgatctatcaggcagccagaagctaggaaagaagaacccaggttctgaagcagaacccaagaaattacaaaaatgagcttttatggatggctctaggatctcaaatagtctgattcctgctggcaagcaagtctatgccttgttttccttgccacctctggtgctcagaagtgccttcattgaggtaggttgtacccaataaacatgaaacccaggatagaacaataagttggggagactgtgtcacagagtggaaggaaccacaggttttagaaacaaaaagcctcatttcatatccatgctaccaacttaatagctgagttactttagagtatctctggaaataataccctcgcccactgcttttaggatttttttgtggggaatcacatgagatacctagcatgtaccaaagcatggtgcttagcagagtatgctcaataaatgtcctcctgggtccacgtcttggctaaatctctgatcaagtcatacgatgagatgccgtatttgaacagtcagtgacacggcacagatccatggagtgtggaatgtgtggatggcactttgggattcccgcctctctgctacctcatttcttgcaagtcactggtttaaatcccgtactttacgctccggtctcatgttagctgataactgcctgggtcaccctttgtcagtcactgtgtgcatttcgaggatagtatttctttctcctctctaaatagatatggtgccatcatctatttttccctatttaaattctacttgccttatttcttgcccttggcattgagacagatcacctctgcagcacctgacccagcaggaagaatgctttatggtctaacagtattcaggtaaacttatgcagattgttactcatgtgactgctagccggataaaccaagtgatagcaacacaattaggttctttctattcccctccctctccctccttttaactgagtattctgttagcgtctacttgactacagcaggtgaggacagcaggaaagaaaactgctggcaagtggtttctgaaccttcagtctatttaccctggaggacaaataacagttgaaaaagaaattgttcctgtttggcttcgtacctgcattatttatatgaacttttttggtaataaagggtaaggaagaagtacagcccccagctgcgggagggatcctggggtggcactaagttatcacttttagtagtaaacagtaaatcagtgatttcagtaccggctaaggcgtggtcagcatcccagtcatgtgcaaaccaagtaattctgagaccagaagcttgtctgttttttcagccagggttatgcgatttttttttttttttctaacagcagtgaaactaacctccaaatattcagtggtgtttggtcattgagttagtggtaaagaagcataaattttggagacagatttcttgcctggattcaaatcccattctgctgcttgtgaactgtttgtctcattttccttaccctaaaatgaagataattgtacctcttccgaggactcttgtcagtattgcgttaatgtattcattttcagtgctggctgtgattagaatcactaatgtctgggtggccaccccgggcagtctggatcagagtctcttctggagtggaatctaggccttatttttttttaatgtggtgattctaaccaacagcctgggttgaaccactgagttaatatatgtaaagtgcacaaaacagagcttggcatacaataaacaccgataagcccgagattctattaatgttttgttgttttaaaaattatttttatgaatgtatggtattttctaaatgtggcttggtttcgcctataatcatcgaacattttttatacatgcaaaatgccatagtgaaaaacccaataatagttctacaacattaaaaattatagtcaaataatttaaaaatacataactcatatttttgtaatcagaagaaatgtttattaaaaatacagaacatgtcaacttgatttgagtaagtacctttgtgaaactgtggctctggtgtttgttttttcttataccaactgataaaaaatttcattcattgcaaattaactctgttcgtcggtttcttaccggtaataatcttattttaacagcagcaaaaacaagccacttgaaagtgatgcgattatttcagttttttgcatatttttgcccatgtgtggaacccttcccttgtggattttaaagctattaaaagcatataaaaatggtaaattagttttctcagttaatttacatttggggctaatttgagcttgtcaaaatatttgacattcaatttagaagttgcttgtgttctggtagagcaagtaattgattgtttctatcaaaagtaaacagactaataatttggctcagcaaattaaaaaccttactttataatttacaaatctgcctttatgaaaatccatttcaattattccttgggtagtatggttggttggaggttttttagcttttagtttttgtctttttttttaatttcaatttttactttacattcaggtgtacatgtggaggtttgttacaaggggtattgtgtgatggtgaggtttgggcttctattgatcccatgtgatcagttggttttttattttatttttattttttgagacaggttttgctctgtcgcccaggctggagtacagtggctgatcttggctcactgcaacctccgcctcccaggttcaagcaattctcctgtctcagcccctgagtagttgggattacaggcatatgccaccacacctgctaatttttgtatttttagagagatggggtttcatcatgttggccaggctggtctcgaactcctgacctcaagtgatcgcccacctcagcctcccaaagtgctgggattacaggcatgagccaccacgactggcctcgttggtttattaaatcagtactctccagactccgttccatcagtaaaataattaaaatgaagcatatgcttctaataaacacatttacttatcaattacatacatgtaatatgtacacgtacacatgaacatgtgtatgtaatgaacattacacaacaaataacgtatctaatatttctttctacacaatagcaaaccatcttacatagcctctatgtgatatacaccctccttggagatagttttagaaaataagtgaaatggtagaataaacgtttaccttttcttcactatagctctgttcctttctcttgattgctaggtgtggttttttttttttttttaaatttcaagaaaggtgggttattcatagcgaatgacttttctcagagtgtgtaatggtagaaacagaatgcgtgtggttgtgctgagattcttccggaaggagtggaaggccagatgatgttcctgaggggacctggagtttgagaaatgcccaagtcctgtggcttgctgggctcagcatctattaaattaaagtgacctgcacctctatcatatgttccaggaaacccaatgtctctctcctcgtcttggaagatgctggaggtgggggctgtgatgaggaaggcaaggctatgtgtccctttgggcctcctactgaatgattcatctactgtgtgtctcactgccctcatgtactgtcccttcccatacttcaccacctcacaccagccaccaccctgtctcacttacttcttgaaagacgaggaaacaattgttatgagctgtgaggggacagactttacctgaaggtttgctgttggagggttggggcaagggcaggggctgcttacatcccagcgcttccaacaacaaagtaaacatttttcattcctgttcctaaaagtgacacaaggtcatctgtggaagggacttgccagcatctctttttcttgggccttagtcttccaccacatgagcgaaaccctctttctcccacgtgatactgacctgcaccttggccgctttcctgggcctccttaatctacttcagaccatcatatccttctgcagaacattttagatttcttcttcctccaattttgcttttctgatcaatccgagacttgcctttttaaatgaaaataacttcaaaaactattaaatagtgagctgagtgttttgctaaacaaaaacagttgtgtactcctttgagaatttctggctcctgatttcaagtaatcatttttcttttccttctacaatgggagatgttaattttgagacagaagtgagattcttgtaggcagtcccaggtattaggaatgcatgcttctctgtctctctctctctcctctctctctctctctctctctctctctctctctctctcatctctctctctctctcatcctctctccctctgtctgtatctctctctgtcctgtattctgagtctgggaagggactacgcactttggggctggggagtgcctttactttggcttgatggacataagtcataagtaagcagggcactgacttgaaaagagactttaacaggtctggtcatggccagtgattgtgagtatactataggttgtcctcctcccctctccacaattcttaaagaggacttcagtaaaagtagacattgatctcacttgtgctcaggtgaaatggtacatgagtgacaggtaggggggaatacttccaggagcactgtggcctcacattggtgtggccagagatcaaggagatcagagggagctcttgatggggtaaggatgagagaggtaggccccggaatctctcagaaaggtctagatggaaagattttaaagaaggctaatttccagcaatttgcttgtggtggcatggtccaaaaatttcactataaaaaagaaatgtgcccttatttagtagttactgactggacaggtcagtgtaaacgatacacatctgtaaatagagaagtatgctcagaatattccctagtcagtagtggtctgctattgggagcatcaaatagtttggcttgtgaatcagtacaatgtctttttttttatcgttgatgcataggtttcatttaacaaattcatatagatgaatttataagttttttttaatccatacagagttaaaaagtcaaacattgaacctcagatgaaaggtaacaagatttcttacctggaaaataagtcttctaaaatctgttcgaagtccttaaactttttgtactttgattacaatagaggaaactcggagaacctagcaactttccaatgtaaattgcctatctaagctattttagcaattattgtacagaagtagtttttataaacttattgcaaacaaacaattaaagactcaataactatcctcaatagctggaaatgactgcattggagagcgtttcaaaatagtcagtttttaagaaacaaatcactttatctcactggtgtggccagaggtgaggagaacaggggagagcacttgatggggcgaggagaagagaggcaggccctggaatcctcagaaaggtctaggtcagttttaaagaaagaaatcacgttcttttaaaggattcctaatctttttcaagaaattttaaattccaggaagcagtttagtgcttagtttaattattacccaaatttgggccatcctagagctagtaaacaaaatattagtcttattatgttatagttctcatgtgagaattagaattaactttaagaaagaaccagaaacaacaacagcaactacaagatcctgaccattggaatgtaattgtccccattgtctatttacttcttgcctacaggcagcgctttcctccagaatgctaatattgttcaccatgaaggaagtattgcctagatattggtgaactaagaactagattcactttgtagagattctttattaccactgaggtggttgtcacacggccatcccaggcccttcccagatgtcctgtttgctggggctcatgacaagatgctgagagtcaggtctggaaggatgaatactattattgccaggtgtagacgaagaaaaaattcactgaacagaagggatctttacacttcttgaaagatcttactatctctgaaaatgtttactctcttgttttatatggccaaagttaataacttccaaaggcaattgtggaataatcttgtcaatatgtctttctttaggagatgttctatttcttaagagcatcttccagagcttcttctcaattctgggaattagcaaatgtatagaaacttcagttgttttagccaaatacaggcagaaacttctactctcatcacctgttgacctccttgctaagtctggaatctgaatggtgtgagcatctgtttttttttttattctgacttgattttctgattctcccaagttgacaaacatactaatgcctctcactgtctgggtttcccaagtatttcccaggacattcagtcactggaatttgtgtgtgtgtgtgaaggtatttgagagccagccaactgctgtgacagtattcatggtaggcactaatttatttgcaaagcttcttcccagtgatgtaagagtcctttggagaaaagcactgcctccttcctccattcagactaacttcccagggtgctatggaccactttgtgtgcagtaagggaattacatccatgaggtggttctttctgtgggtaggtggttctaggatacagatagtcacaacagcatcacggcagctgccttgttcttcagcacatggttatcagttgagaaatagtgttttatttcattcactccaacacttttctggttaaaatttaaaagcttgaaggaggatctttctttttcacacacaccattcttgtataaacaggtcaaaacagattagtcaaactgaacattgtcataatacatgccggttgacaccaatcctctgccttccagcccaggccttcccttacgaggtttaaaaacatgctgaagggttgaagctaccagggtcttctggtgtttttctcccttcctctgaagtgcataattattctgtttactggagattttcaacacaaaggaaattaacttctccttggtgtgcaaggaaattgcaaaggttatgtcattaatgttaatttacccactatatcttttagattcaagcaacattgtttagaatgtcaatgctctaagtggatcaaaaggcttattattttttggaagacaaatttgaaaaactgctggaacttttatctctcctggttactctaatgaatcatggcaaagatttcatgtaatgggaaaaaatgaggtatttgaagaaaaatgttcatctaggatttcaatccattaaaaacacacaatcatggacacctacctacaagaggataagtgactgtctttcaatactgacatttgtcttctgagacaggagctaatagaaatatatagcgcatgacatcctctttaacatggctatgttgacacatatgaagttactgggtttattacttccaagagaggcagtgccatttcaaacaaaggatacattttaagcagagtgaattctggttggttctttatacagtgggtgatcttgtcacacaggcaaaaatggagcagttttgggcagatggttctagtgttacgctgcttgttgccttactttgcaagaagaagttctctcatctttggtcaacgccctatgtctgcatgtcatgttaggcctcagcttttgaaattgatagggtctaattctggagctgatatagctgttaatacctacctcttagattgctatgagtactaaatggattaattcttgtaaatgcttagaatcttagctgacgcagtgagttatcagcaaatattggctattactctctacaaaaaccataaatgagacatattagaaacattttctataatttttataatacctgtttctcaaattttcaacaatgcttagagaagtcggtttcctgggatgagctaagtcctaaaaatatcttaaccagcaggttctttgtgatttttaaaaattatcctttttattatcctaacagtgacaaaactccccattaattattttttttaaatagttaatcttgctatttgttacattgtcttcaagagaattatataaaatattttttatgtatatttatatagctgtacctatagtatatatgtatataggtaaggcccagaacttaatgaccagtgtaggattaatgagaacgtgaaactgggctcaggaaatagcaatacgccaacacttcttaattttacctcattttttctatttgtctagaacactcaggatatagtatctataggcaaatatttatgtgtttatcttgcaatttgagaaactaaatttaaagctggttaaaaaagagagaagataattgtattcgtataaatgagacttacaccaaattttgtacctccaataaatttgttatagatttaatcgtagattaatttttagaattcctttagaaagttgagtgtttagtgtcacttagggggaattatttaagttattgttttacttcatttagtaggactcatgatgacatattttaaaatttttttattattttttgagacagggtctcactcttgtcacccaggctggagggcaatggccaatcaaagcacactgcagccttgacttcctgagctcaggtgatgcttccacatcagctcctaagtagctggaactacaggtgtacgccagcacacccaactagtttctgtatttttatagagacaggatttcgccatgttgcccaggctggtcttgaactcctgggcccaagagagcacccaccttggcctcccaaagtgctgggattataggtgtgagccaccacgcctggccttgacactttattgatttcatatttgaagttccaagaaacaaagaaggaaacaattcacaaaagtagaggttaaggtgaataatatttatgtaggaatttactacaagtttaagcctcctgccaaagtgccacaaaaaagaaagttattgaattttttagtgcatatagaatatgaataaattgataaatgtcagattacgaaggaccttcaagatcatttagcccaactgcttcttttatggatgagaggctgagatctagacagatgaagtagcttctcaggtcctatgagaattagctcaggaccctagactcttattctgtgaaatttacaatgcacatgacacctcccaaactgattgttgaaagtccatcaatgtaatgattttattagttctttctaccaaaaaaaataatagttttaagtcggtttaggaaaacttccttaatatatctagttctctatgttgaagcactttgaaagtaggattgaataaatgaaatttccttttatataaattacatccatgattaactcaaatcaagtcagcaagtatttattggatgctaggtgcttgggctgacagtgggacatcactgatccacatacacagggattcctgacagggcaatggggctccagagctcatcagcagtttacctgatgacttacagatcctcttatttggttttatcaaaactaaccctacaaaattcaacaagtggctcagacgccttcctacaaagaaactaaagattgcagacaaactaatattgcaaacctaagagaataatgaggaaagggcagtcttgacacctttcttatcctaggatgagctttttgttggctacgtaagagctgaaagcaacgtaaatctccatagactgaccaaaaaaagttaaaaagagaaattaacaagaagacagcctgaaaaatggatttaaattgttattattagcgacgaacctcacaaaaactgtaaagtgtacctgggaagatgttgctagtggtaacatgaagccatcaggacaagcaagatatttgtaaatgagtatccaggactgaaaatgattttttataatttttacagttgtgttcaaagttatgatagttaagaagatctatttactaagcttaatgaaaaaagtcagaagcctctcttgaggtttcttacattacgcaaaagaggaaaagcctgatattattggtgaaacacttgttcttcctgcttcctgttgggtaaaatattgctaaaataatacatgaaaaaccacatgacaacaaattaaaatgtgttctttgtaaacaaatactgctgaaaactgtacagaaagaatcaatgaaaatgtgatgaagaagtactaagcaattatactgttgaatggaagtaaaggtgtttctaatatatcacagcgatggttgttttctagaaagtaatagccaaaatttactgggaactcactatgtgtcagacagattctaagcactttacatgaattactttacttattctttttaacaatctctgaggtagtattactattattcccattttatttttgcagatgaagaaaccaagacacggagaggttagtcatgtgctgaaggccacactgtcaatagtattggagccaataaagagtcaacatgatactccgtctccaatgccagtaatcttagccactatcataattacctcaacaatgaaatctcagagaactgtaattcttttctatgagagagtaagggaaaaatgcaacagaaaagaattttctcagtgaaagttctcagaagtcagaaatgacttttttatatatcagaaaatgtttatgaaaaaaatggtataagtgtattcagcagtggtacacccactgcatttactaggactcaaccaaaaagcattcttggtgagatcacagagaacaccacagccttcacagcaagactgtggcaaagaagttgaaactggaattgcatcaagcattatggaacatcattgatgtagtattcctataaaacaagactagtctctttataatactttgtactggatggggagtaatctaaaaatctttgtcttacatacttcccacaaagtatcttgaagcaaagcacttaatagacagtcaaatgtcacatgtcacaaaacgtcaaatgtcacaagcaggaggattgcttgaggcagagtttgtgaccagcctaggcaacataggagaccctatctctacaaataacttaaaacttagctgggcatggtggtatgtgactgtagtcttggcttttcggaaggctgaggcgggggatctcttgagcccaggagttcaaggctgcagtgagctaggattgtgctactgcactcagcctgggcaacagagtgagacactgtcttttttttttttttttttttccgagacggagctctctctgtcgcccaagctggagtgcagtggcgcgatctcgtctcactgcaagctccactctcgggttcacgccattctcctgcctcagcctcccgagtagctgggactacaggcgccgccaccacacccggctaatttttttttgtatttttagtagagacggggtttcaccgagtagccaggatggtctcgatctcctgacctcgtggtccgcctgcctcggactcccaaagtctgggattactggcgtgagccactgcactcggccgtgacaccgtctttaaaagaagaaaagaaaaggacaagtgtttaacaatttttggctttttaaaaatttttgtgattacagataatgtcagtagtatgctacccaaaaagtaactaaaacaacaaaactttatccaagttatagtgatgttttaacaagtgagaaagtgaccactaattataagaaatttgtgtaggaagaggcagtttgaagatagatgttggagatgtttccattgttatgtgattttattgttgaatcatgccaatatgtcacctgttaaaaattcttgtgtctgcgcttttaaaacatttacaaacgctttctaagctattttaaaaaaatcttccaaatacagagtttttgtctttttaaatcccttgttaaaaacgtaaaatgcaataccttctggttagttttcatttactgtttaaaatcagaaagatagaaatttgctggtctaattcaacaaaatttgtgaataatcgagggatgtattaaaaagtaaattttgtgattttgtaaatacagccaatgatgcatttatttcatctgagtagacataattgtgaaaaattatttttgtttaaaaaagctgtcaaaaaccaaatatcaaacatgttgatctttaaactagattttttatcaaattcaagcttttcagtaaatgcaaataatcagaaggtgttatgtaatctcaatttttaacatgcggggggacttttgggactgtgggcattcctaactggagatgtccaccaaagacatgtccaggccgggcgcagtggctcagcctgtaatcctagcactttgagaggccgaggcaggcggatcacgaggtcaggagattggaccatcctggctaacacagtgaaaccccgtctctactaaaaacacaaaaaattagttggcgtggtggcgggcgcttgtggtcccagctactcgggaggctgaggcaggagaatagcggaacccgggaggcagagtttgcagtgagaggagattgtgccactgcactccagcctggggacagagagagacaccgtctcaaaaaaaaaaaaaaaaaagacatgtccaaaagtagatgaaaactcagtagacagatcaggatagtgatttctgaattttgccgtgtgtgtgtgtgtggtgtgtgtgtgtgtgtgtgtgtgtgtgaaacatttggaaaaacttttctaatgctttaagttggtaaattcattttagtctagtaatggtagactttaaataaaattgagcataattttgttgaaaagctgaggggtgtttaaacttacttaaggtgaaggattacctatagcatagaacattataacggttcactgttctgcaaaactgaattattatgagttttaaaagttatatgagctgtagtattggataagggatagacacataaattaatagaacagaagagaaagttagaaacggactcacacaagtacactcatttgatatttaacaaagatgttaaagcaatttatggtgaaaggccagtctttttcaacaaagggtgttggaccaattagacatctataagcaaataataaacatcaatcaatacatgcaagatatacattagtttgatcaggaaacgaggacaactcaaagagtagggtaaggtggggttaggttccaggtcacagaaagtttttcaaaattttctgattggcaattaattaaaagacttatcatctaaggacctggaatcagtagaaggaatgtctgggttaagataaggggttgtggagaccaaggttttattatgcagatgaaactccagacagcaggcttcagagctcttataagatctaaaaaggtgccagactcttagttattctctcctgggtcgggggaaaggcctagaaatgaatggggattacctgcagaatgtaattttcccaacgagagacagctttgcaggaccatttcaaaacatgtcaaagaaatatatttgggataaaatattttgatttctttcagggtctgctatttgtcgtgtgatgctatactgagtcagtctggaatttggttgtcctattgctacaaaaagtctgttttgtcaatcttaaatctttcttttaatgttaatgctggtcagctgtgcctgaattccaacgggaggagggtgaataaggcatgtcccaccctcacttcccatcatggcctgaactagtttttcaggttgacttgaaatgcccttggctgagaggaggggtctattcagttggttgggaggcttagaatttattttttgtttacaaatgcaatatattatagaagtagatataaaattattcaggtgatgaattataggaatctatttaaagggacctgctttataattaattatggaagatggatgtaggaatccagccttatggtgaatatgcctagaacagtgtttcctggtgtgggttccttgaacaactgaactaaaacacactgaacaatttctagtacattcagataagcagtatagcttgtctttaaaagctagggtctgtgttgagaaaggcatagctttgtacccctaccccgctattattggccttgtgacttgtggcaagttaactgcttgaaactttcctttcttcttctgtaaatagagatgttgagagcatttacctcctagtgttctccaattgaatgaaataatgcatcaatatgctcccccagagataacacacaatatgttgactgtaattattctgatgaaatcaccacccaccctgttagagtgttagagtgtggaatagcacattaaagactgagaagtctgttgaaaacaaaacgaaacaagtttcatgttgcagaacttgctagtctcaattaatatctgaggacctggaaagtaagcctcttcagtttacatgtaaatgtggctgggggtaggtagggctgttttctgctctggatgacacatttctatcactactctaggcaatcttcattcaaattttggtgaagcaaaatgagttccagagcatttttttaatggaattaagacttaaatcaaatctcctggctcttctttctgggtgcattatttttaaatcatctggcttctctctccacttgacctgaattttgacatagatgaataaactgagaagaaagctgtgaaaagaaattgtgcttgatatggttggctgtgtgtccccactcaaattccatcttgaattgtaatcccaggtgttgagggagagacctggtgggaagtgattggatcatgggggcggtttccccagtgtgttctcctaatagtgagtgagttctcacgagatctgatggttttataaggggcttcacgctttgctgtctcttctcgctcctgccgcatgtggagaaggtgcttgcttccactttgcttccgccatgattgtaattttcctgaggcctcaccagctgtgtggagctgtcagtcaataaacctctttcctttgtaagttacccagtcttgggtatttctttatagcagtgtgaaatggactaatacagtgctcttttaagtaccgtaactgaagaggagatgagatagttttttgagtgaataaaacgttctgtacttcataaaacccaagctgtcatttaagtcagcacctgggagtagtaataaatgactcttcttaggggctttctgtgggagcagtgtgaggaggcctagccttccttatgtaggtccattagtttagagccacattcttttctcatggtgtcactgagtttttgaggtccagaagctccctttgcactctcttcatcttgtgagctttcagtctgctctagatttagggcaagaaacctgtggtggtgagggcaggtggcaatgttcacctgatgacagctaggatttcttgttaatctggttgtggttatcatttatgtgttaactagctctatgagtgtttgcccccaaggcctgcagaagacaggtaatgtctcttctcacttacctgttggggcactccctcagactcacagaggatgaaggggtgtgtgttataaaatgttctgttctgcttcctacttcaagcaaagcttgcttttcatcactgacctctgtgttatgtagtcaagttctttgtagtcactgatgaacatcttcaatgtgctccaaacattctgaactccttttaattcctgaagatcccctactaatccctaggttgagaagtcagaggttctaattgattgctgtttgctgccttaaggtttgtgttccctagaaatgatgtttcattttgtatgtactccccccttactgaactgcacccaaaacaaatgttgtaggttttgacatgggaaagctttgctgttcaaacatgcacaccttgctgacattcaaatccacagactgtaccacacatcaggtttacagagttcttgacaggtctgaaaaaacattaccatatttatcatttccattggtgaacagaataatggcaaatgatatacatgtagtcctccataattaataaaatactttcaatctgtaattattattcacaaagcctaattctcaaagtgtttcattttctttaaaattaattttattacattcttacaaatatagcctgggctctggtttacataaaatgatgttgacgtgtaggaaaaataaacggtgctttgagggaatggaattacaattggctacgcaaagaaatgaagattgtaatatcttgacatgtgacaacccagaccaaggcagggtggagttggaatgtactagattgcgagtgcactagattgcgattgcagtacctggattctaattccaagttaccacctactagtggtgggactttgggaaacatcattgaatttcctcttaattagatcatgttttcctggttcaccaagacctgagaatcacctggagtgcctggtcaaaaaaaagaaaaagaaaaaagcatagccctcagcccagccctgctggattaactggaatctcaagagtgagtagggatctgcaaaaaataggaacattcactcacagagaggcaccctgggtgattatttaaacaaacaattttgggaaacaatttgaaaatgtcaagagtcttcctagttgctagatctgtatgctatgattagcccttagatgggcaaaatctgaagataaaatgtattaatttttatactttgattttgtagttttataactactctatttttttgaaaagttacagaagtagtgctataatttgtgctttatgaatttacaaattcttgagatttctcttttccctttgcttattggtttattggttcatggtgttatgttgaggataaatgaggtcaggatgtaaaatttgttattattattgctgttagtaagataactaccattgactagacccatcttttattatttgatatatctgtttctatggctttgttctattagtaaaagcgcaaataaacagaaccaattatttcttcattagtttattgatttattcaaaatttttgagtgcctattatgtacgaggattgtactgcattatgtggtaaggaatattaaaatgtttaaagagccttttcttttctttttttttttttacatgaaaacctcccatttagtcatatatatatatatataaattttttttttttttttgagacggagtctcgctctgttgcccaggctggagtgtagtggcatatcttggctcactgcaagctccaccacccgggttcacaccattctcctgcctcagcctccgagtatctgggactacaggcgctcgccaccatgcctggctaattttttgtatttttagagagacggggtttcaccgtgttagccaggaaggtctcgatctcctgacctcatgatccgctgcctgcctcggcctcccaaagtgctgggattacaggcatgagccaccgcgcctggccaatattttttaataaataaaatattttattgatctcaccaatatgtcaatgcattaggaattaacaatatatattggatacatttattcagcatagactatagagcatgcatgatacaatagcagagaactcttagaaataaatctagatgtccatggtaatctttgccccacgaatagtagctatgagtttaaggtgtctcttcctagtgtcttctttttctccatgatgaattgtgtattagagacaagttattagagacaagttataccaatgttccagtccctgggttcaatccaagcagttgcacaacctatgtagtgaaaacttgtttctggcaaaaagcaatggcaacgatatacatgtagtcctccacaattaataaaatactttcacatctataatttcattttttcccataataatcctctgatacaggcaggggagatcctgtgagatgtccagagaagcgagctggtggggtcaggactggaaaccaggcctctggctttctgtctagtgccctttcccttttcccaagatgtctacgtgattctacaactgcagtggagcatgggccctcgctatgttctgcatagcggggcttgtattgtagcaaagatctgggaataataatttgagtgaattccttagacatttatgctggcacctatttcaaactctcataatcttacagttctcccagcccttgtagcatttcttttttttcttttttttttttttatactttaagttctacagtacattgcacaacgtgcaggtttgttacataggtatatatgtgccatgtttgtttgctgcaccctcaactcgtcgtttacattaggtatttctcccaacgctatccctccaccagccccccactcccaacaggccccggtgtgtgatgttcccttccatgtgtccatgtgttctcattgttcacacccacttatgagtgagaacatgcggtgtttggttttctgtccttatgatagtttgcgagaatgatggtttccagcttcaaccatgtccctgcaaaggacatgaactcatcctttttatggcggcatagtattccatggtgtatatgtgccacattttctttatgcagtctattacgatagacatttgggttggttccaagtctttgctattgtgaatagtgccacaataaacaatgtgtgcatatgtctgtatagtagcatgatttgtaatcctttgggtatatatccagtatgggattgctgggtcaaatggtatttgtagttctagatccttgaggaattgccccactgcttccacaatggttgaactaatttacactcccaccaacagtgtaaaagtgttcctattttccacatcctctccaacatctgttgtttcctgactttttaatgatcgccattctaactgcgtaagatggtatctcactgtggttttgatttgcatttctctgatgaccagtgatgatggcattttttcatgtgtctgttggcttgtgatttttgcacattgattttgtatcctgagatttgctgaagttgcctatcagcttaaggagattttgggctaagacgatggggttttctaatatgcagttatgtcatctgcaaacagagacaatttgacacatacataaatgtggtctctaggaagtgtctgttcatatccttcgtccactttttgatggggttgtttggttttttctgtaaatttgtttaagttctttgtatattctagatattagtcctttgtcagatgggtagatgcaaatattttctcccattctgtaggttgcccgttcactctgatgatagtttcttttgtgtgcagaagctctttagtttaattagatcccatttgtctattttggcttttgttgccatgcttttggtattttagtcatgaagtctttgcccatgcctatgtcctgaatggtattgctaggttttcttctagggtttttatggttttaggtcttacatttaagtctttaatcaatctgagtaaatttttgtgtaaggtgtaaggaagggatccagtttcagctttctccatatgttagccagttttcccagcaccgtttattaaaaagggaatcctttccctattgctcgttttgtcaagcttgtcaaagatcagatggttgtagatgtgtggtgttatttctgaggcctctgtctgttccatgggtctatatatttgttttggtaccggtaccatgctgttttggttactgagccttgtagtgtattttgaagtaaggtagtgtgatgcctccagctttgttctttttgctaggattttcttgggtataggggctcttttttggttagatatgaactttaaagtagtttttccaattctgtgaagaaagtcaggggtagcttgatggggatagcattgaatttataaatactttggcagtatggccattttcacgatattgattcttcctatccatgagcatggaatttcttccatttgtttgtgtcctcttttacttccttgagcagtggtttgtagttctccttaagaggttcttcacatcccttataagttggattcctaggtattttattatctttgtagtattgtgaatgggagttcactcatgatttggctgtctgttattggtatataggaatgctttgatttttgcacattgattttgtatcctgagagtttgctgaagttgcctatcagcttaagagattttgggctgagacgatggggttttctaggtatacaatcatgtcatctgcaaacaagacaatttgacgtccctttttcctaattgaataccctttatttcttcctcttgcctgatgccctggccagaacttccaatactatgttgaataggagtggtgagagagggcatcctttcttataccagtgttcaaagggaatgcttcctgttttcgcccattcagtatgatattgatgtgggtttgtcataagtagcttttattattttgagatacgttccatcaataccaagagttttagcatgtaagggtgttgaattttatcgaaggcgttttctgcatctattgagataacgtgtggtttttgtcgttggttctgtttatgtgatggattatgtttattgatttgcgtagttgaaccagtcttgcatcccaggggtgaagccaactcggtcgtggtggataagcttttgatgtgttgctggatccggtttgccagtgttttattgaggattttcatgtcaatgttcacagggatattggcctaaaattctcttttttttgttgtgtctctgccaggctttgatatcggatgatgctggcctcataaaatgagttagggaagattctctctttttctattgattggatagtttcagaaggaatgataccagctcctctttgtacctctggtagaattcgactgtgatccgtctggtcctggaatttttatggttggtaagctattaattattgcctcaatttcaagcctgttattggtctattcagagattcaacttcttcctggtttagtcttgggagggggatgtgtccaggaatttatccctttcttccagattttgtagtttatttgcatagaggtgttatagtattctctaacggtagtttgtatttctgtgggatcggtggtgatatcccctttatattttttattgtgtctatttgattcttctctcttttcttccttattagtctggctagcgtctattttgttaatcttttcaaaaaaacgagttcctggattcattaattttttgaagatttttcatatctctatctccttcagttctgctctgatcttagttatttcttgtcttctacttttgaatttgtttgctcttgcttcactagttcttttaattgttatgttaaggtgtcgttttggatatttcttgctttctcctgtgggcatttagtgtatacatttccgtataaacatgctttagctgtgtctcagagattctggtacattgtgtctttgttctcattggtttccataacttatttatttctcccttaatttcgttatttacccagtagtcattcaggagaaggtgctcagtttccatgtagttgtggggttttgagtgagtttcttaatcctgagttccaattgattggactgtggtctgagagactgttacaatttctgttcttttgcatttgctgaggaggttttacttccaattacgtgttcaattttagaataagtgtgatgtgatgctgagaagaagtgtattctgttgatttggggtggagagttctgtagatgtctattaggtctgcttggtcagagctgagttcaagtcttgaatatccttgttaattttctttctcgttggtctaatattacagtggggtgttattgtctcccacttttattgtgtgggagtctaagtctctttgtaggctctaagaacttgctttatgaatctgggtgctcctgtattgggtgtacatataattaggtacttagttcttcttgctgcattgatccctttaccattatgtaatggtcttctttgtctttttgatctttgtttctctaaagtctgtttatcaaagaccaggattgcaatccctgcttttttttttttttgctttccattagcttggtagatcttcctccatccctttattttgagctatgtgagtctttgcacatgagatgggcctcctgaaaccagcacactgatggtcttgacctttatccaatttgccagtctgtgtcttttaattggggcatttagcccatttacatttaggttaatattgttatatgtgaatttgatcctgtcattatggtgctagctggtttcttcaagcgtccatggtctttaccatttgacatgtttttgcagtggctggtaccggttcttccttccatatttagtgcttctttcgggagctcttgtaaggcaggcctggtggtgacaaaatcctcagcatttgcttgtctttaaaggattttatttctccttcacttatgaagcttagttttctggatatgaaattttgggttgaaaattcttttctttaagaatgttgaatattggccccactctcttctggctgtaggatttctgcagagagatctgctgttagtctgatgggcttcctttgtgggtaactcgacctttctctctggctgcccttaacattttttccttcatttcaccttggtgaatctgaaaattatgtgtcttggggttgctcttctcgaggagtatctttggggtgttctctgtatttcctgaatttgaatgttggcctgccttgctaggttggagatatttcctggataatatgccgaagagtgttttctaacttggttccattctccccgtcactttcggtacaccaatcaaatgtagatttggtcttttcacatagttccatatttctttgaggcttgtttgtttcttttcactcttttttctctaatcttgtcttcttgctttatttcattaattgatcttcaattgctgacatcctttcttccgctcgattgaattgactattgaagcttgtcatgtgtcacgaagttcctgtgctgtggttttcagctacatcaggtcatttaagctctttctacactgttgattctagttatccatttgtctcaccttttttcaaggtttttagcttcttgcgatgggttagaacatgctcctttagctcggagaagtttgttattactgatcttctaagcctacttctgtcaccttgtcaaactcattctttgtccagttttgttcccttgctggaaggaattgtgttcctttggaaaagaagaggcaatctggtttttggaattttcagccttttgctctggtttcttcccatcttagcggttttatctacctttggtctttgatgctggtgcctacggatggggttttgatgtggatgtcttttctgttgatgttgatgctattcatttcgtttgttagttttccttctaacagacaggccactcagctgcagatctgttggagtttgcggaggtccactttagaccttgtttgcctgggtatcaccagtggaggctacagaagagcaatattgctgcctgattcttcctctggaagctttgtcccagaggggcacttgcctgtatgggtgtctgttggcccctactaggaggtgtctcccagtgaggctacacaggctcagggaccacttgaggaggcagtgtgtctgttaatggatctcaaacgctgtgctgggagaaccactctctcttcagagttgtcaggcagggatgtttaagtctgtagaagctgtctgctgcctttgttcagatatgccctgcctccagaggtggaatctaaaggggcagtaggccttgttgagcgcgttgggctctgcccagttcgagcttccctgcctctttgtttacactgtgagcatagcctacctactcaagcctcagcaatggtggcatccctccctccaccaagctttagcatcccgatcgatctcagactgctgcgctagcagtgagcaaggctccatgggtatgggaccagctagccaggcaggggagggaacatccgggcctgctggttgcaaagaccgtgggaaaagcgcgtatttggacaaaagtgtacagttcctccagttacaggcactcacaacttcccttggctggaaagggaaatcccctgaccccttgcacttcccacatgaggcaacaccccaccctgctcggctggccctccgtgggctgcacccactgtccaaccagtcccagtgggatgaaccaggacctcagttggaaatgcagaaatcacccatcttctgtgtcaatcttgctgggagctgtaacctgagttgttcctattcggccatcttggaagcgccaaccctcttgtagctttaattcacgtactctccaaagtggagttagtgttttctgactctagaacatagtccctgagtaaaggatgttaacccatcattttgttcaatgcttacaataaacacatttattaagtcatattaagtattacttttgatgataaaacagaatggagtaagcccagcacagaagcaagaatatttagaattcccctccattccccacttaccccagtgattctgtcattttctaaaggcagatggcccaagcctcctcacacttggtcaagagagagagaccaagaaaactaacttgacttatgtaactaatttcatcctctggtgtcatctcagagcatcacaggcaagctgtgtgtgggtctgtcagtaattagtggtgaggtttcccaagaagggatcaggttcccaagtagatatgaatattggggcatcagagttggtaggtggccatcacctagaacaggagaggaccccagtacaggattagggtaccaagcaaggccctacaggcaccaagaaatctagtgaggtttgcacccagatttagcaaataaaaatgcaaagtgcccagtcaaatttgaatttcaggtaaatgagaacaaatttttagtgtatgtcccatgcaatatatgtggaattcaaatttatttgggatcctgtatttatgtggtaaagataacagggtcaaaatatttcagaacctttacaggatctgaaattgaaacagcatttcaatttttcctgcttccgtctaagaccttttagttttcacgtcgtcttctaggtcattatgctgaaggctctggtcataggtaagacccaaggagtcctttccaaaatgataatatctgtaattttagttctaatttacataattaaaatttacactatataaatcctttccacaatagaatatgatgggtggttcctttttgaacataaaaaggtttttatggataaagagtaaaaagtgtctttctcttcagagagttcatttttcataatttccaatgttcatgtcttataatcagtttgtggagaagacaatttacaaagtggagtgtgatatctacaggaactctttattgtctataaatagactttattttaaacagaaaaccagtattaaaaattatttctgcttgtgttggttgtcattgggaagtattttgtttaaatgagataaatattaaaagtatacagtttggtctctttcttcccacccaggtcctgcacccttcttattttctcccatggaaatagtatctttaggattgacacagaaggaaccaattatgagcattggtggtggatgctggtgtctcagtgatcatggattttcattataatgagaaaagaattattgggtggatttagaaagacaacttttgcaaagagtttttctgaatgggtcaaggcagaggtaaaatacccttacctacagtgtttgagctgtttttgtacaggctgacaaatatatatactgaattcttaatgtatagataaatgaaaattatataacagttcaaatgcgtgtcgccaaatataggcatttatttaatctacatctgtggtgtatattcttgaataaattcaccattgatatttagaagccccaaaatgagaaagtgaggatatgaatgtaattttgaaaattctgagtttattaagtcagatcaccattttatgattaagatagattatttgcatgattattcttgctatttgtaaggtaccccagtagctctcaggtggggggcaatttttccctgaggaacaattggcagtgtctggaaacatttttggttgtcacaagtaggtgaggtaggaaggggagacgatacaggcatctagtgggtagaggcctgggatgctgcaaaacatcttacacttgcagaacagccccagaataaagaattgtccagccccaaatgtcaatagtgctgaagttagagaccctgttttatctgtataaaatctccgtcatgggttttggcacctgacacgtagaagaaaaattttcttctttttattctcacagagcttgcactccgcaaaaaaaataatatgcagatgacagataagtactttacttcatgtacatacaaaagatccttaatctttcttttagctggtagaacccttacatgagtcccaggaggaatgtttctctcaatttggtgatggttacaaagagcacatgactagagaaactttaagagttgattctcaatgcaaagtccacatattttttgttttttagccaaatatttctctttccagttattcttaaaagcttcaattagtgctaatctgttttatcacatctccaatacttgctaatctcacttttaacaaggatggtactcattatcctccagacatctggtagtatagtttcaaactcttgagtctaagaatctaagggtttcctatcaagaacatggaaaaacttaaaatagttgtgaatttatatcaagccttaggaaaggatcagcctgttgcctaaaattccatccttatattccttcctttgggttaaaccttgtttataaaggacaactgttaaaattcaaacaatttacctgggtgagctaattatgaatggattgggttggtgcaaaggtaattgcagttttggccattattttcaatggtaaataagttggctagatttctttgtatgaaatgtagaaatagcacaggcttatgagattagcaatttcagcccaactctgatttcagtgatgtcacctgggtagctggacgtctgccatgttgaatatttacaccatgaaaatctttaacagtacaaattggggcttctgcccaccttcaacctccattccccaagaagaccagcttacctgcccgtggctgaaattaagatatgaaagttctggttgggcatttttatcatgaaagagttgggaatacagccaaaggtgcctaaaagacactctgctactctggtcacagtgtgacggcatgaaggactatagaaaggaaggggctattggaggaggagggccagaagaataaaggccacaatgagaaattcatcgagttcattctgtaagctcagactccaaggaaatcttgcatagcttggaattgagttcagttgaagactggaaatttccattagcaaatggaactgaataagctgtctgtatggttgcatcaaaattcaccattactatagttgaaatgatcaatacattatggttggcttcctaatttaaataggtgtaggataatttttagtttcaaagctataaatactatttccagaaatatttacttaaggtcagaggaggtaaatgctgcatcaaaacaaaggcaccgtatctgtgactattttatttttaaacaattttggaactgcataaagatgacaaatacttaaaagaatagactttttattataacaattaaaataattttgttgtgaatgggggaagtattaataacaattttaaaattgattttgcagagagtatgtaatatagagaaaaatgtttctggaatggcaataaattggtaaatgaagaagttatttggtcaaatcaacaggaaggaatcattacagtaacagatatgaaggaaataattcccacattcttttaagtgctttaaaatatcctgcaaatgtagcagttatccagtagaaaggtaaattctgctgtattcagacattgaaatatatttacaaatctaggaagattgatagaattataacattgtaaattcaaagggatcctctcactgagaccaaagcctcttttgcagcacacaggcaccgttttctataggacagttgcctgcatttcaactgaacaggatccccccataaatattcctaactatcatggttttctgctatagaggcataattcctttctaacttgaaatcacttgtaatgtctacaatagggcagtgtttacttgttgaataattttcattcaaaatagtcaaacttgccctgtgaaggagctgctgaaacattgagagattggccatttaaggcactatacattcatttttgggtctatgtaatgtgtttgccctcagtttatattttggtcttcagaggtggctggaagcctttatagagcagatctcgatggtgtggagtgaaggctctgttggagacatcagagaaaataacagctgtgtcattggatgtgctgataagcggctgttttggattcagtacaacagagaaggaagcaattctcttatttgctctgtgattatgatggaggttctgtccacattagtaaacatccaacacagtaagttttactttggtataaaataaaacaattgtcatttgaagtccacaagataaattaattttactttttcaatggaactggtatagtggtttaggccatagattttgaatccaaaagacttgagtttgccgggcgcggcggatcacgaggtcaggagatcgagaccatcctggctaacacggtgaaccccgtctctactaaaaatacaaaaaattagccgggcgtggtggcgagcacctgtagtccagctattcgggaggctgaggcaggagaatggcgagaacccgggaggcggagcttgcaggagccgatatcgtgccactgcactccagcctgggcgacagagcgagactccgtctcaagaaaagacttgagttcaagctccagatttaccgtctgttagatgagtgactttgagtaggtctataacttctcttatcctcagtttcctttaacgtgaggataatcataatatcagtctttgggattattgtgaagggaaagtaaatgaatacaaacaaaaataattaacagagtattggcacataataagttctcacatgttgaccataattattctttttggaattatgatgttaatatttttatctttcattgatttgctatcatgccagcaactgactttccagctttgtggaagaagcagaaattcgtcatgtgaaattgatgtcactagaaacccactcttactctgttctattttcttccccattttcatcacacttattggatgactaaaagaagaatgagacaatgatctggagctagaaattatatcttattagctcagagtatgaggagataaataaaatttaaacttaatatacttttctaaacataaatgagaaacaattgaaaacgtaggtggttaaacttagacaataaattgaaatgaagtgaaattctaataagacaaggaacaaatgttctgtgttcttttttcttttgtggttgctttttaggcataatttgtttgcaatgtccctttttgtgaccgtatcttctattcaacatggaaaatgaagacaatttggatagccaacaaacacatggaaaggacatggttagaattaacctccattcatcatttgtaccacttggtgaactgaagtagtgcatccacttgcacaacccaaggcagaagatgacacttgggagcctggtgagtatcgttgaccttgcgcagggcctgacacatagttcccacccattcacctgcttgagccaacaatgaggcgttgtaggggaaaaaaaatttttttcttcaaccctcatatattcttagtataatagacccctgtaagaaaagacagattaacaagaaaaaaacaaatagaaggccaggatggtggctcacacttgtaatctccacattttggaaggctgaggtgggaggattgcttgggccaggagtttgagaccagcctggacaacataacaaggctcggtctctacaaaaacgaagaaagaaagaaagaaaaacaaatagaaatggattaacatgtacattttatatatacatggagaaatccggggaatgaatagctctcaaagaggtggctttaaatgccagtttatatatatctttaataaagaacagtaaatttttagagaagtgacaagacagaggaaaaggacttgagtttctatgagtagcaacttgggggaaggcaaataaatggcagataaatgctagttataaagtttgttaatgtaggtacctctgcagccattgccaggccgtaaggatctaaagtttcttcagtggttaacttttgttattcttggtagagagggggtacctattgtctttgtaatctatgtcttgcgtttaggcaaatagagcttttctgcatctctttctttttaattgtttaagctcaacaatccttcccattttggagtggcatattctgggatcttacagggccatctcaatttttcccactgtctcacccccagtttctaatccaacaccgaatccattccattctccttctaaatacatttcaaatgtccacttctcttctctattgccactgccatagtctaacagacaggtacgttttgtttggcctactatagtagccactcaactgatccttctgtttttgaatctgatccattcactcccctacataaaatccttcaaaagcttttctttgcacttagttgaagttcagcattttaccagtctcatcaatatttgaccaacctgctctagtgatcttgccctcactaaaatttagtgcaagtcttgctataactcctcaaacatgctaatctcctcattcctttagggttttgcagtctctcttccttggcttagacttctcttcagttctgagttaaatgtcatgtgctcagataggtcttctgtgataagccaatcaaaataggccccttccctcttacttttttcacagtacacctttcattgagctcatcacgaggtgtaactacatatcatttgctttctttttggattctctctcccatttgattgtaagtgccatacaggtagaaccatgtctattttgtttgtttttttagccaccatatatacagtagatatttataaataattaattttagatggtaaatgttagtaaaaagaatgagtgattgactgaatctagtcacgtcccaaatttccacttctaaatgtagtcttctctgaattctttagcatgtaattgttttaaaaagttgtcaggcctgtaatcccagcactttgggaggccgaggtagatagatccctgaggtcaggagttcgagaccagtctggccaacatggcaaaaccctgtctctactaaaaaacaaaaattagccgggcatggtggcgcatgtctgtagtcccagctattcgggaggctgagcaggaggatcacttgaacccaggaggcagaggccacagtgagccaagatcgttccactcactccagactgggtgacagattgagactctgtctcaaattaaaattaaaaaaaaaaagtgttaggtttttatgaaataccacaaggggcctacagaaaaaaagttgtcaggtttttaaaatttgttataatcgttaggctgctcaatgtacctcataaatgatgtgacactaacattcacctttatgtaaaagttttatttcaagaaggttttaaaatatatttaatgttagcctaaatagccctctgaagtgcagaaacagagatagaattgtttatatcttctactttctttttttttttttaagatggagtcttgctctgtcacccaggctggagtgccgtggcacaatccacttgaattcacaaagcaaaagttgtgggaaacagttcaactctgggttctagcaccaattaaatagcaacaacctagtggtaatgctataaagtagatgggtgaacccataatggtgtgtagatagtctacatataaaggtagtgaatctgatacactgccacataccttccatggaaatttcaactcaagctgtcttcacatacaactcattgtctgagtggtgatgactcacacaaaatcataaccaagggccattatgaataagtatttactgagtcccattcataataatagagatatgtctgccatcatcataaccctctcttacatttatatgtaacctcagaatttcaaagtgttttcatgggctttagtttatcggtttgtcacagcaatgttgtgagacaggagggtaggaataattgtacttaattcatcattgagaaacctgaagaaatagagcacctttccatgatcacatagctagttaatgatgaatgtgggggaaaatttcctatcatcaatcttcagtttagtattcttcctaccataaatgtattgtctcttcagagcccctcactactcacttctgtgacaggaagttcaaataggataactgaaagcatgaatttcggaagaaaatctcaatgattcactaaagtgcagccccaaacaatgtggcaagtaatagaattggctggaaacctctgccagctgcagagccacagacaaatctggaacctggaagacagttggcattggaattggctccagttactgaccaaaggatgcacttcacacatactccacaggcaaaggactttgatttcaggggcactgctactttgcccattattgattaggtttaaattgttttagtgcttagaaagcaggagctctttacctgtgatgtagggcctgtggatctcttgattttatggttagatgaaaatatgcactgttccacctagggagatggtatataaattttattgggtttcaatgtgtttgacatccttcggatttttttttgggggggtggatgaagtctggctctgtgcccaggctggagtgcaatgtgcgatctcggctcactgcaacctccatttcctgacataagcaatcctcctgcctcagcctcccaagtagctgggattacaggtgtgcatcatcacactggctaattttgttgtgtttttggtagaggtggggtttcaccatattacccaggctggctcaaactcctgagctcaagcgatctgcctgcctcagcctcccaaagtgctgggattacggcatgagccactgtgcccagcccatccttcagatgtaaagacatacttctctagaggcggttagttcctcatggatattatgcctaaattgcagctcctctggtgatctggaaagtgtactttgctttacaaagcatttagtagtgaaactacttcaatgaagaaataacagaaaatcatataatctggttgatattatttttgttataaaatataaatatttatacaaatatgatatcaataaacttacttcttgcaaaatgcctaagctatcatttatcaaagcatgctctaaaaactctagttctttttttttgagatggagtctcgctctatcgccgaggctggagtgcgtggcgtaatctcagctcactgcaacctccgcctcctgggttttaagcaattctctctgctcagcctcctgagtcactgggattacaggcacccaccaccatgcccagctaatttgtattttagtagagacagggtttcccgatattggccaggctggtcttaaactcttgacctcagtgatccacctgcctcagcctcccaaagtgctgggattacaggcttgagccgccgtgccggcctcaaaactctagttctatgggatttaatgaggttacttaggggaaaaaacctttcgggccaagtgatttagagatgatgtgttcaataaagttgaatgagttttttcttgagtgaatttctcagaactattcatatggttgtgtgcatcattactctctaaaggtgacacaaccatgtcatttttctgttttatttcctatgcagcagcccacaggactcttgaatctattattgtagttcagacctcttttttttttttttgagctctagacaaatttttttaaaaaaagactcaggcataatgagcgtcaagctgcaaagatctgctatagagttaaactacagagatattgacttaaaacatgggaatttattcataatatacaaaaaggagcagctctggtgaagctgtctggccaaggcaagggaggggcttacaaaggcaaagccccagagcttcacatggagattgatttgttggtttgaacaagtccttgccttgtagattcaggttgtctggttctggggagcttcatgctgcagatatgtctgcatgctgcgccccaagtcaaagtaatagagccaagtttcaccatcaggccattttctgatgatctgaccagtttcctgaagagcagttgcccggtccttcttctgggccttgcttgcttgctgtctgtaccttccaagctccgggtcctgtgtgggcacataaaatgcatgtgtttgggctcagtaaaaatatccttttcaaggcccttaagttatctgccttgtaagcatgtctacttggatttcttgcaagtgtttcaggctcaaagaaataactaacctaccaactttcacctccctcttccccagctcctctccctctagtgtctcagcccaatgaatggcatcactctctaccgcatctcccaaagcggaaaccgaggagttcctgttccttcatcttcctcactctcatcccatgaaatcagtctctgcatcccaacaatctactccttatgatctaaccactctgcccttcctgcaggtttctctctccagcatcctctgactagtatccctgtctccattttctctgctgcagggagcataatccctcaaaaaagaggcccagtcatgtcactctttgattaaaatccactgagaattcctaatcatcagtaattaagtgaagtctcttccttgggctcaccaaggcttctgctcatttctcagcttcttctctacccttgtttatattacattctctgttgcaaccattctcaaagatgactttcctttcataggcacacttgctctctcctgcagcccagtctgcatgctcaggaacttgccacctccgtccttcaccagctgtctctcctcatcctctgagaaacagctccaacatgacttccttcagaacaccttccttgatctactgtgagcctaagttagctgttccagagaaggtattctcaggaatgtgttctcagagaatttccctaatcatatgacaccatgcttagctggagttgtcttctttttatattccttagtccttagaggacagagaatacaactttccattgcattcccatgcctaaacgactttaagaaacaagagttgaaaaaacaagcaagccaggcacggtggctacacctgtaatcccagcaccttgggaggccaaggcgggtggatcacttgaggtcaggagtcaaggccagcctggccaacatggtgaaaccctgtctctactaaaaaataaaataaaataaataaaataaaataaaataaaataaaataaaatgcaaaaattaactgggtgtggtggttctgcctgtaatcccagctatttgggaggctgagacaggagaaccacttgaactcaagggcagaggtttcagtgagccaagatcaggccactgcactgtagtctgggcaacagagcaaactccgtctcaaaccccaccccccacaaaaaaaccaagtgaaaaaaaattctttggcacctatctcctaaataatataataaggaataagttttaaagatacataatatctgagtacaaggtttttttgttgttgtttgtttgtttcagttagaatttgaaataacccatctaagtaatgcagcttcttggctcacagagatgccataattattgcatgggtacaaaattatctgtcttgtgataatttaagggctttccttataatatctcacttaatctttacaacagctctataattaagtgtgataattagtgtaatattataaattaaaagttctgaggtttagagatgcacagtaccctgttgaaggtcacagggtggtagaattgggatttgaaaccagacagactgtaacatgctgcctctccaaatacactctattatctatcatttcatattttagatgtacttatttgttttgagaagcctgtaattcagcatatcattatttatccatggccttctggtgttaagtgcttcagtttgcacagatcatggagtcaaaaccctatttctctctctcttttacatttttctttaatgttttttttcaatttcagaaacttaaaatctttctctttctctctacttctccccggctgtccgaaaacaggcacagaatgaatctcacattttttgttggcagattaaacttattagccagatatcctggctgccctgatacctacactattatacaaatccagaaatagtgtgggaacatttttgtacacatcttaatgacaattatttcaagttcaactctggggattttacaactactttattgctcatagatattatgttgtaaaaggtccaaattttttgcttttttctgtattctttaaatgtagatttcagttttaagctataagagagctcaaaagcatattctttgggaaatgaaggttatttattactaacactgtgtaaaatgcttacattcatttcatgcacaaaaagatggctgaatttaatcctgtgagttcatgaaggatattgtctccacctggaaatgtacttgcttctggaagcaattagtatagctaaaattgccaggtgggagtctaattcattttgattattttgttgctggagtgtctactataaaatcttgttattttgaaaccactggaaaagaatcgtcctaaaaagataaatatttagttcatataatttaaattattagtttaaacacataaaattctgttattcttcacggaaatattagtaaatatggattgctatctttcttagcatcatttatagttattgacattttcttagtgactaggtcacatttacaaggatacatgccattgcagcaagcataggattggtttggggcaaagcgggtttgccctgacaccaaatggctgccatttgaaatctcttttaaatacttgaaattgtctttatcatttttatgttttctttcttgctgctggctctcacatcttgcaggttttcaatgcctggctgtggcctctgtttattttctaacctgaggctttttcttgccacttgtttttcaggaaaccagatcattagtcctatagaatttttcactttctggattttgcagattaatccccgtgtgtcatttaacatgtttctctaatttccttgttacctataaactggtagttaggcttagaaatctgatcagaatcagattgttttcaagaatgctttatgggtggcactcaggtggttctgtaagcttcccctttgtaccacattaaaaggcacatggggctagttctattcttttttgtgatgttcaaaattaattagcatttcagaggtcaccagcctggtccagcactgcaagttccccatcagccttttgcttaattgttttagaagctattgattatcattcctggagccattttttattagaggctcaaagcaatgacattctaattctgtcactgttttgcatatattagctgggattcttatacaaagaggagcctttccaaatcagatatatgatgtcctgaggaggaggagcttttataggaaaggtaaattcagtgttcgatcctatttcttatttacgtgttttcaaaataaagagttagtgtcctaaccttccagtatcctccaaaggtacttttctttaatcatctctataaagtcatggatttttaaaaataattgacatttgtatcactgtaattattaccattttgatactcaaattgtactatctttctctggaaggaacccgacctggagtttctagtctgtgtgggaaattaccaactgtcttgcagccgttgacactgcagtctggaatgcaaggttaaggctacatctgggattagtaagaaagaacactggactccgcagccacttctaccattggtgaatgtgggtggggtgcggtggtgacaatggtagtggggcatatacaccttgtctttttaaaatgtatttttaattatggatacataatagttgtaatatgtcataccttgtattttccatcttcctgctatgggcaaccaaactgccagaaatgggatacaataagaaaagactcaatgggcctgaagggctcttctaagagttaaaagcatttatttatttatttatttattttgagacggagtctcgctctgtcacccatgctggagtgcgtggcatgatcttggctcactgcaacctccgcctcccaggttcaagcaattctcatgttcagcctcccaagaagctgggactacaggcacatgccaccacacctggctaatttttgtattttagtagagatggggtttcaccatgttggccaggctagtctccaactcctggcctcagtgatctgcccgccttggcctcccaaagtgctgggattacaggtgtgagccactgcgccggccaaaagcattatttttaaagtgctttaagtttgttgattcatttactttttaattctaaaagggtacagatggatatgataccaagtggctaaattctggctaggtgattttttttttttttactgtaattaggaattccaatagcacagaacggccattcttgtattttcttcttgtatttctattactgacaagagtaaacttctatactgttcagtttgagaagttttttaggaagttgaggcagtcattattgagaactcattaatgatgaagacaataaacaaatgagcaaaaatatagccacgtttttatagacatttcataaaactaacatatattttatgtgctgtttatatttatgcaaatgcataaatataaacacacacacatagaattttacgtatctgtaaaaagagggggattacagtcaaagggcttggaatagcatcccagttctacactctatttctatgtgatccttaacaaggcactatttcctaatctgtaaaatggaagatgatactgctctgcatagctcaagggcttgttatgaaaatgaaatgtgataatacaaatactttacaagtgttattcaaaatttttgttatgtgctaaatattggggatgccaaatatttagttagacttcagaatgaccaaagttaatgggtttgaatggaagagactagaaaggctttgttgtgaggtgagtcttacatggagtttgaggtagacaaagatgtgatcagtggaaaaaaacagaaacggaatcccaagtgcattgtttcagaactgggccagggtaaaatctacagattcatgggctatagtaaagctcatgagtgcctgtgtgctagccaggcagttattgaaggggcattggtggtggacattaaactccatgattaggagctttaattgatctcagaggtaattaacctcattgctcagctctgagaaggagtgttctctgaggtcagcagcagcattctcagtgtggctttggcctattttgaagctaaagaacagcagaagattaaggagattaaagaaaattaaccctcaatcctctgtgttttgccaccacctaaaatgaccttttaaagtgtttagtgctgaattcaggtcacgtcatcagcacaactaggcagaggagaatagtgatttctttcctcctatgtccattattgaagagtgattgtgtattgttaataagcatcactaaaagccatcgcagcatggtatagtggaaaaagtactggctagcatcttgtgacaaactgttttgagtttagctctaaggttgattggaactttgaggaaaaaacaaatagggagttaggttgcaggtacatgatcacagggtttttttgtggatgtattagatgtttactggatgcctatgttgtaaaggcaccgtgctaggtgttactgggactataaatgtgaatagggcacatgccttatcccagaagtttatcaatggaaaaaagatgcatatacataattgtggtggtgacaatggggagatcatgataagaacagatacaaatccaggtgagaggtagtagaaaggtatgggaaaaagaaaaatatatactggatctagaagaacaaagcattttctacacctgagacaatagttgtttcttcattagacagtttgattctctgttaccatactataagcagtaattaaggtttgtaatctttagaggtataaactcagaagaatttttcaccaacatttaattctgtttataatatagaatttttttaaaagagggatctcagtgaatatctatttcaacaagtttattttggaattaggaaacttaggtcaaagagataaagtgatgtgctgtaagaggaagaaccaagaaaaattcagtttccctgattggtaatccagtaatcatccagcatgctgagtttggaaagtttttatagggcaaaggaaagagtttttataagaagcatagtgtttcaattttttgttactcaagaaagtgtagcatttcagtgctattaaaaggccaactcaaaccttcctggattttgttgttgttaacttgtacagtttgtaaaaataaaagttaaacacaatactgctttttaaaagaaatttaaagtggatgaattttgtctccaatatttacaagtttctaattttagtctttacttttaaaatttaggccattttatttttaattttgcttaaaattttgatagtttagtgaagcatatagaacaagaaaaataatgtaactatacatgtataattggcataaaaatataggcaagaaataaaatttttggaatcaattatccataagaccattcaatgtaaatctaactgatttagcaggtaatactgcaatggtgttgaaagttgacaagactgattttgcattaattttgtaaagagatttgaaaaaacaggttcaaaataactaaggaaataacacagacagctaaaagtaattatttgtaactaagatgaaggtgtaacgtttcactagtacattaggcagtgtttctgaaagtgtggtgtgaagcagcctcctgacatcataatcactcctgattcgtaaaaatgcagattcctgagcctctgatttaccaaatcagaatctctagagggtggcaactctccggttatctcaatgtacactagggacattttcaagggggcaagaatatgtttcactgaatcttactgttattggtcatgtctagtgatgttaaataaaatttatgggaggcactgatttagactgagctcctgcaataggccccaacagaccaaaccaaaatgaagtcactatgctaaaattccacatcaacacaccaaaactaacttgtttatctgaccccctgacggacaggagagagatgatagccaaatccccaaacaggtcagctttaactggtatcataaggaatcccatctggtttaacctttacgaggaaagtaacctgaagtaaactgatgttaaccaaccactatatatatcatgctcaagcaatatcacaaaagtgaatgtgctgccacagccagttagcatctgtctatttttagacaagatgttgcccaattcatgaatcccaaataaaagccatttgatcatttaattaaatgtgttgaaattttatcttttgagatttgaagtagaagcaatgggtacagacaaaggagacttctttattagtagataaacagatcagagaaaccaagctatttggagaacagtctcaggccctctgcctgctttgctcaggctcttgctgatttgttcctgtgtccttcccagcaatggtggtgttctcagcagtcctttccttaggtcctcagctttcccatgatacatcagctctagctgattttaacaatgccatggcttcagaatccatgacccaatagttttccttggccttcacctcttgccaggcctctggcctctgtatctacctgattctaggtatctgcccttacgctcaagcttgctactgtatttctcatagtattttacatggtgctattgtttttaaaatgggcaaaaaataaggtgcaaaagagacaaaaatctcataactttttggaaagagatatgcagttgtcccccagtatccgtgggggattggtatccccaagatacccaaatctgcagatgcttaagttctaatataaaacggtgtatttgtatataactagccacatcctcccatatactttaaatcatctccaaattacttataatacctaatacatgcctacatcacttcattcctgtgaattcaacatagtgcttggcatgtggcaaattcagttttgctttttggaactttgctttgtggaattttttttcccaaatattttcagtcctagttggttgaatccacagatatggagggccaactgtaggtgttactagtttagcccttgatctggctctgaaaatcccaatggtacaaaattgaccacttattcaatatagctggctaatcaacccaaacacccaactcgctgagcagattttactgtttattatggaatatttggaaacgtgggacactggcagcaataactacagaaatttgaggagcagagatatggcaatggttatattgagtctgaaagatgttcattaaataatgatgttaaaaacagctaaatagcttaatatctaacctataaatattacacttaaaaagtattcttggccaggcacagtggctcatcctataatcccaacactttgggaggctgaggtgggcagatcacttgaggtaggagttcggaccagcctggccaaccccgtctctactaaaaatacaaaaattagccaggtgtggtggttgcacctgtaatcccagctacttaggaggccaaggcaggagaatcgcttgaacacagaagctgaggttgcagtgagccaagattgtgccactgcactccagcctgggtgacagggggaaccctgtctcaaaaaaaaaaaaaaaaaaaaagtattcttaggtttgaatctgttttcattcctaagcagattatttcatttgcagaatgtgtgcttttttgtgataaaagtacattagatgaaaaagctaataagtagtgtttagtattcgcaacctaagaaatgacatctccagctatcaggatgcccaatcctgagaggttttggagaagtaatacaattggagaaaaaagtggcttcgggatgctggggaatctgggctctggctaagtttgcctccgtgagagatgcagcttagacgttgtagggaggtaagacctcttaagaatcaggaaaagatttagcagtgtcctcgtcaaaacacggccccactccaaataaagcatcttctcttttagagcagaaactttgcaattgaggaaaggaaactgcagcagcactgtgtgtgggcaagacctccagtcacacttgtcatgtgtgcagagggatacgccctaagtcgagaccggaagtactgtgaaggtaatgactgaagtactgtgaaggtaatggaagagtcgctgcttgaggggaggaatgctcaactgagcagcggcttgtcttcagtgggccagccagagactcagtggaaaaccaacttcaagtccatctccccgtcccccacacaacccctgaagactattttttatttattttttcttgtttgtaaacctttataatactttcctatcttcatatcttgtgtttctagatcaaacactgagaggtgcttaggggttgatataaggcagggattctctaagtggattctaccaacctctgcgttgtgtgcaaaatttcagtatgtgtacatttttaggggagtggtttcatagggatcgtaaggtctcaaagagtctgtgactcctatcttatcccaagaagatctagtaggaagcctgggaactgagccaggctggtttgtctaagaatcctcctgttttgagattctggaccaagtgcacgaactcaggagaaatactatgtcctttttcctggaaggtgcagtagtttagtgatgaaagaatccaatggctgcagcacacatacagtggaattagctggggtgagacctcaggtaatctagcatctgcctgttaattataaccccctgcttacatgggaccaatgggtgaaagcctggcatagagatagtgagctggaaggctggggcttcagccagaataaaactgctggagaggtttccacatttagggaaagggctctggtcagtcttgaaggttgaagagcacaataggaatgtcctaagcttgtaaagagctttcaagagtccctaactgaaatggcatgctatatctttcaagggaaataatactacctttttcccaagggttattctaatatgaaaatctgtattgaaagtataagctgggccaggcgtggtgactcacacttgtaatctcggcactttgggagccaaggcgggcagatcacttgagtcccagagttcaagatcagcctgagcaatgtagcaaaccccatgtctacaaaatatacaaaaattagctgagtgttgtggtgtgcacctgtagtccagctactcaggaggctgaggtgggaggatcacttgagcttgggaagcagaggttgcatgagctgagatcgtggcattgcactccagcctgggtgacagagccagactctatctcgggaaaacaaaagcataaaatgtgacagaatagaaatggcttttatcatcatttaattgactattttaccctttgctagagtatggaaaacagactttccatgatcaattacagcatataaagtgtgagataccctgcgttgtgatgacttattagtgatagcacaatttattttcaaaatagccatttgaatgtattgtgctgttgtcattgtgcagatgttaatgaatgtgcttttggaatcatggctgtactcttgggtgtaaaaacacccctggatcctattactgcacgtgcctgtaggatttgttctgcttcctgatgggaaacgatgtcatcgtaagttatagcaacaatatttattgcattagttttcttcattttcaatatgtttctaaggtggctatgatctgggtggtgatcttcaatcagcagtgtgcatcataattacctttgagttttattttgtttggcttttaaaacatggatgactgccagcctgggcaacatggtgagaccctatctctactaaaatacaaaaaaaaaaaaaacttagccaggcatgttggcccatgccagtggtcccagctacgaggaggctgaggcagaaggatcacttgaaccaggaggaggaggctgcagtgagccgaatcaagccactgcccttcctgggtgatggagtgagaccctgtctcaaaaagcaaaacaaacaaaaaccatggatgactggactctaccccagacctatcaaatcagaacctctcaggttggaaacaaatcatctataatctatgtattataggtattttcctgtttctttgtctgtataccttatatttcattgtctatctcttttttattttaattttttaatttttaaaaataacattgggtactacatttcattgtatatctctaaaggataggcatgtaaaaaacataatcagatacattattgtatctaaaaaacttaactataattccttcctatcatttaatatccagtaattttcaggcataaccacaataccattgttatgcattaaaaaattaaggctaggcacgtggctcacacctgtaatcccaacactttgggaggtcaaggcaggaggatcacctggcatattagcaactgattgcaataaatttttgcaaacccgatttaacactaatcttgaccttttctttattaattagaacttgtttcctgtccacgcaatgtgtctgaatgcagccatgacgtgttctgacatcagaaggtcccttatgtttctgtcctgaaggctcagtgcttgagagaatgggaaaacatgtagcggtgagtttatttgctttatttaccttttgtttgtttgaaaaatacatttgctcagtgacatctaaaaattgatcttgttgtcaaggaagaattgattttcaatattgtatactgaaagatattgttacaacagattaacatagatttaaatttagtattttgggtttttggcttttttgtttttgtttagacagcatagcgtctaacttatgagcaaggctttgaggcttgacagccctgaggtagcattaccagttactagcagttttgattttggctagatacttgccctctcttggtctttgtttcttcaactgcagagatactgatacttgcaccttgattaaatgagacttcagatgcagagtgcttagtctgtttcttgcacctaataacacctctctacttttatcttcatagagacttaagtatatagataactggatgtaactcaaattagcagaagaattgtgtgtgtgtttttgattttctaataaaacaaagccaagcagcaaaaatgtgtgagagaaaaaaattactaggaagagttagaccagctgccaaactcatcaatggatttttcattctagacagctgccagtgcacttgctcctgaactcattggtagaatagaggacaagggccactggaatgtgaaggattaacatccaagatgttgggttatagggaggagggtagtgtgacattttgatttttatctctgaaaaataaccttgattgcagccatagaatgattgtggaaatgttttaaaaaatcaacatatgggctgagtgcagtggctcatgctggaatcctagcattttgggaggctgaggcagatagatctcctgaggtcaggagtttgaaccagcctggccaacatggtgaaaccccgtctctactaaaaatacaaaaatcaaccaggatggtggcgggtgcctgtaatcccagctacttgggaagctgaggcaggagaattgcttgacttgggaggcggaggttgcaatgagccgagagtgccattgcactccagcctgggtgaagagtgaaactccatctcaaaaaaaaaaaaaaaaattaacaaatggttgactcgcccccacctttgatgaaaaataattatattttggatgacgtagcatcattactaagcaattgttttgtaggttgttcctcacccgataatggtggatgtagccagctctgcgttcctcttagccagtatcctgggaatgtgattgctttcctgggtatgacctacaactggatgaaaaaagcttgcagcttcaggttagtgctgtggttgtctggaactgtgtccctgaaaaaaaattcatgaaatcttttgtttagaaagatggaaagttaactgcttatggttttgtatttttgaaatgaaaaaaagcaaatcacattgtaaatatgaataatatgagtaataacaatataactagtaccaggcttttaaagactatttctattcttaattagcatccggcaaagatttgccataattcagatagaatatttttagtatatgagaaagtcatgacaagaatagtcttaaaacacttatagttaagaggcatttaataagtatttgttgattgatttgatttttatctctctactgatataattataacactgacaaattctgtccttttaatgtcaaaattcaatataaagttgacgcttcagctattttttttgtcttctgatattacctctcttgcatccttcaacagccaggaaattctagatttataccaaattgatttaatatctcctgaaggttcattatgttttaacatataatgctcataatgctatcatgtaatgatgatcctgtataccttgccctagtgaaccccaatactgttaacttctcagggccttcattaatatagtgtaatctaaatccttaaattatcaagggtcttgctattaactcaaatcattgtgcctccctttaagaagtgcccagccagggaaagttacttattcggacatgaaagtatacaatctactaatattagtgtttcatatgtgtgaatcaagaagatgtataaccctaagacttgcatcatttagctatggtgttgttatttaacgctgtctctttctgtaagtaagcagcttttaaaagcaaatacctggagaggaagaaaccagagatgaaattctggcaatatgtcacctcctggaagaggacatcctcttcctgtcttcacctataccacactagagggaaattaagaaaacaagtactgtagaaattggtaaaaaggtacagtgaaagggaagagtcagagatgcctcttagtttctaaggcacgtttaaattcagccatatttgaaatttggttaacaggaccacaaccatttttgctgtttgccattctcaagatattcgacacatgcattttgatggaacagactatggaactctgctcagcagcagatgggaatggtttatgccctagatcatgaccctgtggaaaataaggtatggtttgttacttgaacagatgtggacatgctttaaggacagagtagaggattttatcctaacaatgacctggcctacttgaaaatcctctgctaagttctgaatgattaggcacagaacaagtaaatatagatattggagtaacacttgagaaattttaaggacttttttgccatcataatgtaccctagtccttgctacgattagccgttttattggaaatgatcacacagtttagttttgattttcagtttagtttcctctttggagatgaggatgggagactagcacagtgtcatgctatagaaggagcttcataaccaggttttttattacttgctggtagtgagaggagtgggagttgagtttggggcataggaagtatggattagtaatttgtgttttacatatgtcttttggggaggagattcaatgacctcttaaccatgaaaatcagggaacgtaagttttatagctctgtgagaatggcaatctaactaataacattatttacataaacattttatataagttttggtgtaacttagaatttctgtatcagctggccatttgatctctaatttcttagttgtatcgtgctaggttagaatgtgcttgaaatgatgttacagtgtgttttggagattaatcacccataatgatacatttatatagttattaattaccctgcataattatttagttattactatgggtacattaattcctagactttcaaactttgggcttttgtttcttcctgatttgaagcatctggtaaatggccaaaagaaacaaagtgaagccaattgattctatatttaataggtatgattggtagccaaatagaagtatttttgcaaattaaagttttgcaattgaacactagcaacaattcttttccctgacctgaatctatatggttccatagaacagttacaataacagaaaaaataattaatagaaaaaaggcagttcaagattcatttattaccaaactagttttattctgcagaatcagtattcttacaacaagtgaatgtggagacctagaatgaattttaagtcggtggctggtttttgtttcttgggttaattttcttattttcttgctactcaaattgtgactttgagccagcagtgtcaacaacacctggagattattagaactgcagtcctccaggttcacccctgaccactaaatcagtatctgcattttaacaatattatcaggtgattcttatgacattagagtttgagaagcacagtgccagtggagtgaagtacccctatttgtatttatgaacataaccttttctatttcatttagaaagaagagtaacccattatttaacgacttaccttttctgaatagtctcattattgattgtaagtttatgtacacatgtgtactcacagttaaattctacaatgctttcattaaattatcaactgacccatatctttaaaaaaatatatattatatacattttaaatttttataggtttaggggtacaagtacagttgtcttacatggatgattgtgtagtggtgaagtctgggcttttaatttacctatcacctgaatagtgaacattttcccataggtagtatttcacctgttacccccctgcaccctcccacccttgcagtctccatgtctgttattccactctgtatgtccatgtgtacccattgttcagctctcacatatagtgagaacatgcaatttttgattttctatttgagtcatttcacttagtataatgccttccattccatccatgttgctgctcacaatgatttcattcttttttatgagcagtattccatttatatatatgacacattttaaaaatccactcatccattgatggacacttagattgattcatgactttgctatatgaatagtgctgtgataaacatacaagtgcaggtgtctttttgattaatactttcttttccattgggtagatagccagtagtgggattgctggattaaaaagtcttctatttttagctcttgagaaatcaccatactttttccctagaggattgcaaatttacttcccaccagcaatgtataagagttgtttttttcttcacatccatgccaacatctgctgtttttaactttttaataatagtcattctgatgggtgtaagaagatatctcattgtgatttgattttcatttctctgatgactagtgatgttaagcattttttcatatgtttgtaggctcttgtgtgtcttcttttgaaaaatgtctgtttatgtcctttgcccactttttaatggggtatttgtttttatcttctcgggttgtttgagttccttatagattctggatattagcccttgtgaactgcattgtttgcaagtattttctcccatactgtaggttatctgtttactctgtgattttatcttttgctgtgcagaagctttttagtttaattaattcccatttgtatatcttgtttttgttgcatttccttttgagggcttagtcatgatttctttgcctaggcaaatgccagaagagtttcttttagttcttcttctaggatttttatagtttcaggcttacacctagtgtttgatccatcttgagttaattttttatatggtgagagataagagtccagtttcatctactgtttatggcactccaatttccccagcacaatttattgaataagatatccttttccaacgtatatttttgtggactttgtcaaagatcagttggttgtaggcatatgactttaatctgggttctctattccattccattggtttatgtgtctgtttttatactagtaccatacgtttgggttactacagccttatagtataaagtcaggtactatggtgccttcagctttattctttttgcttagtatcgtctgtgctcttcaggcttatttttggtttcatgtgaattttggattgttttttctaattctgtgaagaatgatgttggcaatttgataagaattgcattgatctgtatattgctttgggtcatttttaaacagtcttatggaaattcttgtacctgtgtataggctgcatactagactgtaaaagaacttcgcattggcaagaaatcttctgttgaacagatggatgaattaaaatgaaattacagtcatgcatcactaatggtctagcttcttgctctaggctacaaacctgtgcggatgttactatgctgaatactgtaagcagtattgtaacaagtagtaaaaatttgtgtatctaaacatagaaaaggtacagtaaaaaatatggcataaggatattttaaaatgatacacctttatagggcacttaccatgaatgaaacttgcagaactgaagttgcactggatgagtcagtaagtgagtggtgaattaatgtgaaggcttaggacatactgtacattgctgtagacaaacactgaacatttaggctacactaaacttataagaaaataatttcactatgacattttgaatgctacaatgtcactaggtgatagaaatttttcagtccattatcatcttacggaatcaccatcgtatatgcagttcatcatcaaccgaaatgtcatatgtggcatctgattgaatataagattagagactaaaggaactttagcaaatacctagctaacttcctcatttttacagttgagaaaattgaggttaaagaatttatccaaagcaataagcaaataagtgacaaaactgggaaccagttttgacctgcagtgactaagtatctcttacttgcagtgaagtggggtgctacagactgagcccagcttgtagccctcattaattgcaatcattgccccctttcagaagccacagtagttcaagcatgatggctacgtcattgaccatgatcaagggttaataaattaccaatagcagtagcaatatgtgccagatacatggctaagagatctatctatctatctctctatctatctatagcaataacaatagcaatagcaatattgccagatacatggctaaggatatatgtatatttatatctatatacatctatctatctactatctatctatctatctacctacctacctacctacctaataagattgatattattatcttattttaccgatgaggaaactaagattctgagacattaaataacttgcttaaggttaccgtatctgggaagcagcctagttcgaatttagttgcaggtgtgcctatctccaaagtcagctcttaacaccctgtacaacctaaagactagtgccatttgtatatattccacattagtttaaaaaaaaatcagaaatgcctgtgttctcttttgtagatatactttgcccatacagcctgaagtggatagagagagctaatatggatggttcccagcgagaaaggcttattgaggaggagtagatgtgccagaaggtcttgctgtggactggattggccgtagattctattggacgacagagggtatgttttctgcttcagttttaagctgtgtgagatgggagtgatgggatagtaatactattggcttcatcttccactttgaacacagaaaaatgttgctgggcatttggtgggattggagaaaagaggccaccattgcggtccacactccctccacttcctcctttcacaagattgcatctgtgtgcgtgggaggattttgaaggccaagaaagtagcctgtgttagaaaagaaaaccaaacactgcatgttctcactcataagtgggagttgaacaatgagaacaatggacagagggaggggaacatcacacactggggccttttggagggtgggtggcaagggagggatagctttaggagaaatacctaatgtagatgacgggttgatgggtgtagcaaaccccatggcacatgtatatctatgtaataaacctgcacgttctgcacatgtatcccagaactaaaatataataataaaaaaaaaagtagcctgtgttttggtagttcaggcttttgttatagggaaactcaaaacctgtctgaatataagcaataagcattctcggagcatctgctatgaaataagactttctccgaagtcacatgggagatacagaggagcctaagatgtgctccatttttcagtcggttcttagtttagctggggagataaggtatatttccccagcaaaataataatgcaaattcttggtctaaatagcagttcaagaaatgtcatagggccacacataaatattgccaaatgacaggtgtacactcccaaagggagctgccatggaatgagcttcggcatgaagtgacaaatcttggactagaatgttgactccctgttaaaacaagcatgaaggagggagagaacttcagctggagttgtgaggaaagtgcatgagataagagagatgctctttgtttcctacggtgggaaaaaacagaaccagagtgcagttgtgaaaccccactctcagagctgcggaagggctactgtacttggtgtgtatgcagcctgcgtgaacctcagaactgaatggcagaagcaggaaggaaatggctgtatcccttctgcgtgcgaatgagatcccacttccttacgaactataagagaagctgctaacgatagacccctcacaaaataatactagagatgcaattgctctgagatatattctcagagtaacggaaagccagaaagtgaaatggtggccatcctaacatctggtaccaaagcaaccaagtaaaagtaaaagaagggagaatgagggtttaaccctgtgaaatcagcagtttcaacacagagggagaagtcccagggaatgaatgggtttctagcttgggggtaggcattttgtgtcctagaaatatctctttttatcaggataatccatggaaacaggtttttaaaaatctgttgatgtgctttgggaggccaaggtgggcagatcacaagtcaggagatcgagaccatcctggctaacatggtgaaaccccgtctctactaaaaatacaaaaattagccgggcgggtggtgggcgcctgtagtcccagctactcaggaggctgaggcggagaatggcgtgaacctggaaggcggagcttgcagtgagcggagatcgcaccactgcatccagcctgggtggcagagcgagactccgtctcaaaaaaaaaaaaaaaaaaaaaatctgtgatttgtttatctgtatgatatggttatcagttatcaatagtatggccattttacatcaaggtgagcatattttctttcattcattcatttgttcatctaatcataccttcatttcttattatttgagtatttatttactgaatagttgcaatgcaccagatactgtgctttatatcatgacactattaaatccccaaaggtaagttttgttatctccaatttaaagattaagaaattgataattggagaggtaaaataactttcccaaggtcaagcagtcaacaagtaccatgggaactgtaattggaactcaaagatggccatttgcaaagcatattctcttaatagtcataagatgtaccaccgccccaagccagtgtggatttaacatatggttgactcagagtcatggacaaattaaaatcaacttcagttgtaataattataaaaatcataataatgacctcctcgtgttgaacctacttaaaagaatattttaaatgtcggctgtgtataataacagagctgtcatggttgttctcaggagggtaaacgatgatcaaaatggcagatgtcaaccactctcggtccactaaggatgccaagtcttctcatatttccccacattcacaagggacctctaatttaacagtgtttgattaatagcaccatggtaccgactgcagaggcaaggcgttcaggagatgacaggcaccactgtttcctggagaatcagaccctaaattccccagttcattggcttcataataacaagcccttcttaagtcctcctggctctaaaggcagctgctaaaagaaaaccttaatttatctggaaatgagaggtttatggtttggaaaccttgatattacctagaaattgatgtaaataactgagattccaatctcataatattagatcacatggtaactcttagccaacaaaaggggcaaagtgggatgcttgcagttcctttttggcctaggaaaagacagattcaattaacatctaaatgtaggaaggaagcacattgaaaattccaatggtaatgctgttattagtatcaaggaatactgattcctaaagtcaattgcctagtaaagaatcaagaaggtaaaatataagctatctatttattcattcttttgaggtaacaaaaactaatatgaggtaaaaaaaaaatcactcttctagggttgttgatggacacctcttaccctagaaggagggtgagttttctcttggaggatctcagtgacactgggacaattagataatggttagagagagaaggaacacctctagattaaaggtgatgcttgaactcccatgaactcaaatatccctgctggtcttggtttctcactaccaacactggagtttgagatttgctctctagctgaatcaaatagagtatattaggtgaacaccttgggggagctttaaaagtaaattccagcgatcttgccttggacagctgcacagtcaggagcttatgtcgttctcgtctcatcacttaattcctgcccgaacagaatttagagatgatgtctctcatctctaagatgattagagatcatcatgagatcaaagtgacagtttcatctcccctggtcacaagcaagtggcctcagaatttcttccctcccccaagggaagaggcacagtgacagttgtgtctgagaacagaacttgacacattaagttcaaaatatcttccacccagcagtatccttcttatgaccacttcatccgggagtaaaattactttttaaagtggcactggagtagaaatggtttcaaattctccactgcctttagttggtgtttgcaaagtgtttccaacccagcatagtcactgagccagttttaccttcacctctctctgcatactgcctgtgaataaggccctgtgcatagagcactgtgcatgtagtcctgttcctacacagcacctagaaaatagttggtgaaccagccaccagagaaggtctccttagcatctgtaaaaccgggaggagggaatggccctaccttgtgtttctaggcaggcttgtttcatcagacattgccctcaagagcaaggtgagaggcctttaacagatgtttattgaatgaattaaggtggttatatattctggtttgcagcagggaaacagggaaagcaggcagtacattggaaagggaggctcttcttagccctatttatatcctgtctgcctgtggtcccacctgctgcagaagctgctgatcgtcccttgtttgctcctgaagggggcagggatgctatagagtcattttagcatttaaattcatccagttttctccatttcttctgctactgttttatctcctcacgtcatctcctgcctgcctcgccctttcacactaaagccacagcaaactttctaaagtgaagtataactgccccacattctttaggtcctgtactttagaacttgtatatgtacattccttgcttagggtactctttccatccccacccacctttgcctggctgcctgcttctcatctcgtttgttattatcttcaggaatccttctctgatccctgcttggctgggctacccacttgtcaccctccctgagtcttccaattacattctttacatccttcttttcagcatgtgcttcatttgctgtgttataatcccctctccctctttcccctcttacttcccccgacctctctccttccctttccctccaccttttcttcccctccccgtccagtccacctaaccctttctttcccctcccacctctgcctctctctccctctgttcctgttgaactatgagctctataagacagagacagggctttatttactattgtatctccaatgcttagaccaatccctgacaccagttggtgctcagtaaatatttgtttgacaaataaatagaaaaatcaggaaataagaatttctaccctgccagattccattgggttatttaatgtaaagattagcaagtaatatttcgtaccattggccctgtttatctacagcttccacatctgaggattcgaccaaccttggataaaaatattcaaaaattaaattaaattaaaaataagaatacagtcataaaaaataatacaataaaaaccaataacttataactgtatttacatagcatttacattacatgaggtataataatctagagatgatttaaagtgtacaggagaatgtacatagattgtatccaaatactggccattttatatcagggaattgagcatccttggagagttctggtaccaatcccccacagtgccaagggacaattttactcccatttgtcttagaattaaatggaagaaaattaaagccatgtaaatctccacctactgtctctgtgctggcttgtctccctcgtcttcatgatcccagaggataacagtctctttgcttctggcttccattggtttcagcaggagattggaagttaaaagagaatgtcctcacccagccactgacacgatccttttaccttgtcctgtcattgtgattttcattacctggaataaatattgggatgctaattaaaagtgtttacaaatataaaattgtgggcttattgctgctactttgtttgtgggtgggggagagagaaagagtaagagatgggagagagaaacagaaataggagctggtttagaatgcctatctttgcatttcagaaagggagaaaggagtatttttgtttgaaaagtaaaggtgttataacaaactcccttattttgacatattttaggaaatctctgattggaaggagtgatttaaatgggaaacgttccaaaatatcactaaggagaacatctctcaaccacgaggaattgctgttcatccaatggccaagtagtatttgtaaaaataaggcactgctctgcagaggtcatgtgacagttcatggttgatatctagtgtccaaaaccagaaaccaagaaaatccatgcaatttgttcaaatcttcagcatgattcctcatgcttttaatgtcttgattttctattcttgtataataattttattgttaattgctcttttaaataaattcagtttgtttttgaaagaaaaatgcactgtaattcattaacaactagactcaagctcattcatctactttctttaaaaatttgcattgttgtttactgagagaaaaggatatttggattatatgacttatagattctgtttagaaaaatcacaagatatggtcattcctagattttagatgacagaaaacagaaactgtgaaaggttagaagactgtgtgttaattgtgagttagtgacacattttcatttacagattagagatttaaggacaataagaatttcttcctagttgttaaaaaacaaagataaaaaccaaccctattttatttacactgaaatttcacaatgatttatgggagataatatattgatagtagttgataattgatttgggccagccaaatgattaaaactgtgagaacgtaaccatttctaaataggccaataaaaatatgaaccatattgacttcaaaaaaaatgtgcccagcacctgatttatggaagttgaaataactgagttaatagagtacattgcataaaactgggtaacagataaatatgatctttccttatgttgtagttttacaaatgcagtgaattttacatatgcataacagaagaacaggcgacaagatttcattgcctttttgcagtacaaaatgctaattcaagaatattttactcaagctatttactcatgactattttattagtcatatattgcaatttttaaaccaatttctttttaatctaatgatctgagctttaattcaacatttcttttcgaagatgctttacatagacaattaattgctctgcatttcaaaattatttgccgaacatacagcgctatctcttcttctgtttccttagtgtaccactttagtatatcatgaggtaatttacattgatattttcaatgataaagaacagaataatttatttcatgcagatattatttgttgtgtgctttcttgattaaagagattattctggactgatacagggattaatccacgaattgaaagttcttccctccaagccttggccgtctggttatagccagctctgatctaatctggcccagtggaataacgattgcttcttaactgacaagttgtactggtgcgatgccaagcagtctgtgattgaaatggccatctggatggttcaaaacgccgaagacttacccagaatgatgtaggtgaggctttgggatggcgattttttcatcttgactgagtgtttatgagtgttaaatacaaaatatgtttacaccacacacataccacttagccgtatgggtgaatatggaatagagacagacttctccagggatcatgagctgcaaagcttaccttaacattggaatacggggtaaaaaatagtgttgcatatcatttctctttctgagaagtcccaaaatcagaatgaaaatattaaaattttctaaaccctttaggaataagaacttggttcagctgttttcatttcttatgttttagaaaagttgttcacaacagtgatattataggcaattttaggcatgaatgaatgtcagttgataacttgtcaaagattaatatagtttcctcccctattattttcagattttacatggggtgtcatatatttcataaatatctttaaaacattgtagctcatgccagctgttaaaagaagtacaaaatgcaatgaaataagcagtgggaaatttattttgactccaggaatgtacaaagacagtattaaactgggccatgtggtaaatagatgatgacaaaagattataagcctgcaaaaattggctttgtatgttagtactaccaggatatgttgactaaacttaaattctgaatttagtagagggcattgaatgttcttgcacataaaatgtatatgttaagattggcatctctggatagctcttaggtaaagtataggagttcgattggaatttggagagaaggaaatctgttagaagccatagtggttgtccaggcaacaactggtgatggtctgagtttgaacattgtcatttaaaatggaatgaaggattatgatattaaaaattattgtgcataaaaaattaagaggattttgtacagattgcatatagaaaatgagagccagggaagtgttgaagatgctttggagagttagaattggttgggaagatgaaaaaacatggtttctctcatttaggaagaagctaaccaactataatctgtataagatacctattttgcccattctctttggcttaagataagtataatttaaattttatgtatttataagattctctaaaaattaaagatatacttcacaataagtgattgcttatgcacaaccttagactttatcatccttttacttcaggggtatttattgacacatacaggaactgaagatacagtggagggtaaaacaaatatgatatctgcaaagccaaggatctagtgcagaacacatacattactaaaaaaaaaaaaatcatccaggctgggcatggtgctcacacctgtaatcccagcactttgggaggccaaggtgggaggatcactagagcccagagttcgagtccagcctggccaacatggcgaaactctgctccactaaaaatacaaaaattgctgggcatggtggtgagtgcctgtaatccctctgccactcaggaggctgaggtgaaaaatcacttgagcctgggatgttgaggctgtagtgagccgtgattgtgcaactgtactccacctgggtgacggagtgaaaccgtctcaaaaaatacaaaaaccaaaaaatacatcacccaataaatgtaaaattgtatctttgacataaaaaggtagaaaggaatttgaaaatttctaaccgaatgtgaggacactatattttaaactaaaaagcatagcagatactttgtgtatcattatattgctactatattgtatgactaatacaactattgaaggccattatcaaataatttatattaaattatgtaagtaacattcccattattacagtgccatctactggtatatatgtgtggcttcccagctgccagttaagaatttcttctaagagtggatgttccatgctgttacacaaaaatgataactgaggtaatgcatttgttaattggctagattcagccattccacaagtatatatattttaaaacatcatgttgtatgcaataaaaacatataatattgtttgtacttaaaaatgtattttaaaaggttgaagatattcttaatttaaaatgcaattaattgtggtcttctgtaaacaaaaaataagaaagattatgtctagtgtgaggtatttgtttaaacacatagctaattctaacatgtgctttaacatggattaattcctgaggacattatgccaagtaaataagctagtcacaaaaagacacgtactgtacaattccaattatttgaggtatctaggtagccaaattcataggaaaagaaaggagaatggtggtttccaggggatgtgggagaggaatgagaagttgtttaatggacatagagtttcagttttgcaagatgaaaaaattctggaattggttgtacaacaatgtgtgaatgtacttaacactactgaacttagaaatggttgagtgttaagttttctgttatgctttttcaccatgataaaaaagaactatagctatgttaaaattcccttgctgtacttaaggctttaatttgggacaaagggccagagactagaatgaatttaatgaccctgatcaacaatgataagtggagactcattgtaaccagaacaagttatttagtttgccaccagtaggggaagacattcattctaatctgtcaaatccattgttcgtttaaaaaagagtggtctgtgggaatgtgagtagccttgattaaaacatccaacttcagcctcttagctttagtctctaaccacctgagatagaacgttaaaacattcccttgcgtattcaaacttgcatgccttctcagagcagttccagtggcacagagaggtaggtttggtgaaggtggctcagaaagatgcccacttactgttagtaggaggcatgaaaatggaggcagctgataaaaatgactctttcaaaaatgtggctaaaaagggaaggaaagagacaaggaggagctagagggtcacggggatgaggaaatgaagatgggagagaggttatagtagacagagggaacaagctagtggaatgaagagagggaagatgtaagagaaagggggtggtcgttgatggatccagccctagagaaggcaggaagggtgacatcaggggcacaggtcaatattaaataaggagaaggggaaagaaggtgggggactaatgcaggcaaatgtgttggtggagatgggaatgtgggagactcttatacaattacctcaaattttgaaaaatccttacaagaacttgtgaatttgtctaccccttattactgctgctcaaaagagtaggaacctaaggcaaagagtggtaagatagttactcgagtttagtctataagtagcgacagatgtactaaacaaggaaaattccaccttctccttcatggggctaggacgacaatcagcccacattctcccactctgcaactgctggtgatagtgggccttgctgggacctcatgccactatgctcccattctaaggtgacgttcctcctcatgtgggctttccttgaggcaggtgtgtgagtcggtggctcactcataacttgtgagtagctaaagagctgatttagtgtaggaatgttgtgtaaatttcaagccttgtccttcgtaaatagtcattgcaaagacaaagaaggtgtatttaacaaacttgaattgtttccagtcacccatttgctgtagcagtgtttgaggattatgtgtggttctcagattgggctatgcatcagtaatgagagtaaacaagaggactggcaaagatagagtacgtctccaaggcagctgctgaagccctcatcactggttgtggttcatccattggcaaaaccaggtacatactgggatgttacacagtctttccttggctggaatctgcaactgttttaattgtttgatgtcatcagttggcgggggggtggaggggattttgtaactttcactaactgtgtagatgttaagatttctaagatttaagtttgtttaagacaatctggtagtttggtaattggggctttatcctccaatttcacctcttttcttgaacaacttttacttacctgctgcatttcgaagagcctgggttaaggcaggcaatttagacaccggcagtggaagcttctgtcgacacttggaccttccatacccctgaggagtgagcaaatggaaaaggcatttcacattttatagtagctcttcttctgaattgctctttgtcagtttgactagatgatgagtcaggaaataagaatcacattgactaaagagcttcttgaaaaaagtgctggctatacccagtactaataaggtaataacatctgggcttatcttagaatcagtggctccttgggggaactcttctgaaatagctattgaataccctctatttagatacactgcatttctctccctaaaagctatagctccctaaaagcagctgtagacttgcattaatggcatccttttcatcttcaaacccacttgtgaatttgttcttttctctactaggagcagatccctgcttatatcaaaacggaggctgtgaacatatttcaaaaagaggcttggaactgcttggtgttcgtgtcgtgaaggttttatgaaagcctcagtgggaaaacgtgtctggctctggatggtcatcagctgttggcaggtaatataataaatttgtggcaaattacctaacgttggctcagaaatacagctgtacatcaatctttatgctttgctgattttgaatattttggatgttaaaagttctcctgtttttaggaatgctaagaattgtttgtttatttgttctcttctgctgagttttgagttccttattacaggcaaaattcaatgacctctagtggtaacagtcttaagctccaagccctccacctccccatttatagtggatgggtcccaggcttggaaataaatgccaaaatgctatcacctcacaaaaatgttcagcgtattttgtttagaagttttatgtcctcaattttagaggtagtagtatatgatctcttatacatgacaggtcttaataagaaaatcaaagtcctttataaaaaataacttcaggatatcgacaaatgtgggaaatccagcctgagaaggcttgtgatgtacttttttacaaactagattgactttgaggaagaggaagagtaaaccaagtgtgaggtataaccagtagtacttatttcctcccttgaatgtgcacccaaacaatctgggcatctgtggattcatcccttgatatcttctagcagaaatataccaaagataatttacattttattaaattttttaaaaatttatattatctggtaggcatggtgtaaatataagtaaagtaacagattgatgaaaaataaacaaagttatgcaatgaaaaaaagaggctagtttcagctcacaattcaaaatttacttatgttttcctctagctaaccatcataactttagtatgcactgaaagaatttatatgcatttcttatttattacatagagtgttaaaaagctgtgtagtcaatggtcaagagttttaaaaattaaaattcttattgattcacaacaatcttcttgtgaaactgggttttatttttattttttgaacagggtctccctctgttgctcaggctggagtacagtggcatgttcatggctcactgcaccttggccccacccaggctcaaatagctgggaccctaccttagcctcctagtagctgggccacaggcatgcaccaccatgcctggctaatttatttttatttttatttaatttatttaattattaattattaatgtatttaaattattaatttattttattttatttttattttttgagagacaaggtcatgctatgttgcctaggctggtcttgaacttctggcctcaagtggtctcccacctcggcctcccaaagtgctgggattataggtgtaagctaccctgcccagccaattttttttctttttctttttcttttaatttttttgagacagggtcttgctctgtcacccggctggagtgcagtggcaagatctcagctcactgcaacctctgcctctagggttcaagaattctcctgcctcagcctcccgagtagctgggattacaggcgtgcaccatcatgcccagtgatttttgtatttttagtagagacagggtttcaccatgttggccaggctggtctcaaatcttggcctcatgtgatccacccgccttggcctcccaaagtgctgggattacagacatggccaccgtgcccggccttttttcttttcttttcttttcttttttaatatgagtgtgtggagtgaagagctcagctactggtagagtttgctgtcatttcctttttccatactaagacacagctgttgcccacattccttttgccatatcagtacaaatgtgaacatggtggaaaaagcagttaactttatagtattattatgaaaagaattatgactttagggacattctgaaggagagcccagggttctgtggatcacagtttagaaaactgctgtcttacagaatccatttctccctgttctgagagtgggcagtgcgagaatcttatgcctgtattaaatcatgactttttatgtcctttcatattataagatgtaggtaaaatcaggctaaaataagcatgaaagcagctaaaggaggaagcatgtgtatggaagacaagttgggaagatcatctattttgtccttaaaaccgtgggctgtgattatgagctgatcatgtccctgagggttttggtattttactcttttttttgccagtacctgaaagagtcctatctttcttccgtactggttccttatcccccgatcattaagtgctcagtgaaaatgagagggtgtgggatagcagggtgaggtttactaagtaccaagaccctgacagtttctctgaatcctcttactgtaagaatgagtctgaactcacaccaatgaatagtcgtaaacataaatgaaatcaaactttttttttgaaacagaaaagctaatttaattgcatctattgaccttcaataggtggtgaagttgatctaaagaaccaagtacaccattggacatcttgtccaagactagagtgtcagaagataacattacagaatctcaaacatgctagtggctgaaatcatggtgtcaggtatgaataactagttctccaatataccttggttccaacagtttccatcctaccaatgagaaattttgaattacctttctaacttaatttgcctaagttctacacaaggctaatgaaaccaaaccttggactcaagtctgtctcttcgaatgatgtgcctgagaaagatggctgcatattagtctggacataaacaggacaccttggagtctttgggtgtgagtctttgttctgtgaagaaacaaagtaacttggaaacaaaagtaaacacaggacaacatatttgaatgtatttccatccacccctgatatttttggtatttgtccaccttgctgtttttctattagcctgaaaagttgatagtaattgataaacaaatatagttgagcacttcaattgctgcagaaagtccacaaacagcaaatgttggaattcttttctctgtgttgcacatttgtcactaaaatgccaaatcatgtgttcagtatgtaacaactttaggaacttaagtctttcttgttccatattcacctaggaggtcagtggtttttccagctggttcagctcagccctagagcttctgcaaaccccatcctttcactttaggtcactgcccttaagcagtgcaatttgactttgaaacattttatttgtttgtgttactaagtaacactttacaagatgtatgtggcaaaaaaaaaaaaggaaaatatttcaaaactccacattaggactttaaggagatgctttacccaacttttgtggtctgcaaactactttgttgatgtacgtggcctgggtacctcttacctcaccttatcagtgtgatttttttataagatataaataaggagttcataattttagtaataacaataacatttgcagagaatgttagattatatatacagtctccatctgtatccacaggggattgattccaggattcccaagtatatcaaaatctgcacaatgcaagtcccaaagtcaccccatggaacccaggtatacaaaacatcaggcatcggtgtggcaggtttcacatcccaccaataatactgatctgtgttcagttgaaaaaaatccaggttaagtggacctgtgcagttcaaacccgtgttgttcaagggtcaaccataatctctaattgatcctcattacaaatcagttcacagatatgaaagcagagagactgagatctattaagtagtgacttgaccaaaggtttttgaaaattatgaccaaataattaattaatgtgaaaatagacgttctggaaaacttcattaacattaggaatatagtgtgtttagcaatttatttggctacactgtgctaagtgctggggataccaagatgagctaaataccatcccagtcctcaagccacagttagttgtggagacaaacagcatgaaagaataaaatactttaaaccaatgttaggatgtagagaacctttgcaaagtcaccaggaatccctagagattcatagagcatatttgaaagactaatggttgagggactgaaagactaagataaatgacagataggtgggaatggggagtgattaagtgaccaaagtatttgtgaatttggcttaatacctggagcctagtacaaatagagggagctgattgtcctggtgaaaaacccctcatctttccatacctggattgtgtctgtgttgtcctagcttgtgaagtcttacttccacctaagtcaggcttgggggtctaattctgtttcagagtgagatttcacatcaacaaagtgtctatggctaaaagacaatgtgaaactccacattaggattttagagtataatctaaaattcttaacgtggccttttgggcccgtatgaaacaacctttagacacctccccagcctcaacaagggctcaccagccctcttgcttcggctttctgtggcctgcttccctcatcctggccttgtttctaacagacatggacattgtgctagttgttttttcagcccatggtgtgtttcttagcccttcaaagtcctgtgtgtcttcgccctctggctcagaaagcctttcctagttcctgaccgggctagggctgcctattcagctctcttagaacctcacttctgccccttgatcacattcatcacactgtacttcaatactaattatgcaaaacagcagagcctttgtcaatagcagagccctattcttcaccactgatttttgcctctcaggaaggcctaatatgtagtaggtactttcaaatgaattatattagttcactaacaggaccttgggtctcttctagtgtgataaggttaattcttatttaaattacacaatatctttctttgtcatccttatttaaatatgtatcaaagagagtttgatcaaattttgactaaatatcttgatcaaaggggttttttttaaggtcactttttattctagtcctagaaccatcatgaaaaatagacctggcagaaattgtcactgctgttttagagaagaggatgtgaacacaggcatttatttcttccagagcttctttgtggcagaaacaacaacaacaatttggctgtagcctgtccctcctacaactgcataactattgcttttcattacgcacagcgccttgggtttgcatgttaccaagtaaatcctgaatcatattctaatttaagataattcgcaagtgatttaaaacatcttgggtaatcggatactgtccactctacactctgagcagcttgtgatttgggagctagtcttccaaataaatgctgaattaaatggataattgatttggctgatcttatccatctctaagagtcatgagtgacaggagataaccaagcaagcatgaaagcatctgctcccacaagagaaatcttctcgctcaagtagctaagcaaatcaaatgcaatacccaatgtctgcattcacatgccacctgaatcctacttagatcatttaactttctttatttatcggcaagtttggagggctttttaaaaaatctcttctgtactaagatgagcaagctaccagtgaatagacagatgataaattatatcctactgtggtatgtcagattcccccaatccaaaaaggtagggcagagtggcatttggagaatgattacatacataagtaaagagaaaaaaaaaaacctgctcatgtttatggctcaacatataactctgttccccagggcacttgatttcaatggagtatgaaatgaaatgatccatttactgcacttaacttgtatggttcatattttgtaaaagtgccttgaggtgtgcaagtcactacataaatcttgataataaacacaattgtgacatacatattctattatatatgatattagtaaattgtcagtaaatctttttaaattgaatttctttgccatgttggtgcacagatctacttgctaaatattagtctgtgtgctttgggggataagaatagattgactccttttgttgtcaaaatggttgggaagtttcaaacaagcaacagacctttcaaatttgagtctatttgcttctagcaattttataatttacattgcaaatgcttttaaaaattataaataagttcatatagggttccttgaacacaccagaagtgctttaaaactaaagttctttgagggcacataaacagaaacatggctatgggacttgggactatgcatctctttttttttctttttttgacagtgtctcactttgtcacccaggcggagtgcagtggcaccatcttgtctcacggccgcatcaacctcctgattctcctacctcgccccccaagtagctgggactatacaccagttttcagtagagacagagtttcaccatgtgcccaggctggtctcgaactcctgggctcaagtaatccatcctcagcttcccaaagtgcgggattacaagcatgaaccactgcacccagccagctatggatcttttaatgcagtatagttataggtcaactaagcgtttctatttggaggttaacctgtcccagaacttgggaaaggagtggtggactgttctgtagaaccagaagattaaagtccgttttcttctctaaggtctaaaataactgcacgggattcttgctatttgtagatcaagatgactgtgctcctgtgggatcagcatgtatgctcggtgtatttcagagggagaggatgccacatgtcagtgtttgaaagatttgctggggatggaaaactatgttctggtaagagaaaagggcaaattcacatatttgacaatactgaaccagaaacattttttctgctctttctgactcaaaaactccagaaggattatgtaatcagcagatttgaataagttatttgatgttagctaaaaaaaaaaattgaatgcatgcatagaaaatgagacatataaatatatttacacaaatacattgagtttatagtaaatttatggttacacaatatatgcagttgtcattaaggggaagaatttataattagctttgaagcatgaatttgagttcaagtcaagtttatgacttcaccaattccaatgaaaacacacttttttttttttttttttaccccagaagcttaggtcataagttttagtcaaatgaataattaatggatgggttcctattttatattaatagcctcaaaattataatttaacgattgcggaaagatctcagtccttatggtctgaaactctggcagaaagtgatttatttacatattgcctaatcggataggtgggaactctgtaaagactaattcagcagtaacttgtgaacttttgtccaagatgcagggcgtgcctgatgttggcaacagcacctgtaaaggactgaataagattgaatatacgattatgcttattctttccaactagtcccatttatatcaggattgcctaatattgcactagttcataattttgcccacagatatagatgaatgtgagatgggtgtccagtgtgcccccctgcctcctccaagtgcatcaacaccgaaggtggttatgtctgccggtctcagaaggctaccaaggagatgggattcactgtcttggtaagaggacacatgtgctgggaggagggcagaggcaggcctcagaaatcgggaaacaatgtgggtgcatgagcagagggagacaggatataattggggtgacacacatgtcaagatttaaagagttgtgcgacctgctaaactgacgtatttccattcttggtgaacagtcaagtttgtgcccttgtgttattactgcctagtcagcttcaagcccctttggaggctgtttactcctctgcctttctaattctttcggggtttgagtgacaccagtgtctcatcaatacttcccaccttgagccatcatgggggggttggacagcatttacttgtcagtgaatttggtaagagaaatgtggtgaactgcagagcgatgacagtttgttggaagtcactgctgtgtgtataaagaaaaggaggtgtggcttgtcaagggctcctctcacatttcttgataagttcaataggtgggagagtcaagccactgacgtgaaatacaagtaaagaatgattcaaccctctttcgtaatccccgtcctctggcaaggttgggtgtggcacgttggattgggagttcgcgtcgtggatgtctcatacgtttccaggtgcagtagcatcgcatcacgtacaagtgaaaacctgcctgaagccgtctgaggcacggtgagtgattatctgaagttttacagcgctttaaaacttctctttcagtattttctttccctcttctgaaaacctaagaaactgataagaagctcaaatgatactgctttctcccacttgctaggttaaagatgaaatatcaatcataactatcaatcttttgaatctggttgatttaaatagacctttattggattagttttgtggaatccacagacatctgtaaacactcttttaagccatatttggctgtcagtcaggaaaatgtcactgctctaattaagcaggcccatagataattagacaagctgatttcatatttaatttcctttgaagagaaaggaaggtatctcttcttgatgtttaaactcgttaggctctggtttctcacactgttactaactcatctccttccagatcgagcacgcaatggggtgtgctcaccctgcctgcatggttggcacggagtcctcaaatccatgaaagcagtgggcttgctcctctattctctctcccccagctcactcttactctcctccccgccccatatatatatgtagttataatacttcgaaccttgtctggcacataaaagtgctatgtaaaattttatccttattattattaagagtagttgagtttcttggtcaagctacttctttgtctttgctttggaaaagctctctctttctctcaaggtgatagtttattgaattatatcaggaactcataaaagagtcagtttgggccatccgggatagcaattcaatggttaaatatttaattggcccctattaagaataaggccacagtactggaaaccctgagaatatcaggatgaggaaggtagtctttgattgcaaggaaaacgtgacctaaaagaaatatactgtgatcagtgatgaagaagagtgcacatcataagagaagtaaaaaccacaatgaaagtcagaactgggagaaatatttgtttgaggtattgggaaagatttcagggaggaagtgtcttttggaaggagcatgggggataagtaatttcatttgcagaaatgtgaagggatgggagagtccaggcatgaacagatcacatgactgccattaagggtagagagtagcctagttgagactaagtttaggttatatgaggggaagaacagaaactaaggctgataaggtagtgtatgcataacaaaatatcctagactggatggcctaagcaacagaaatatatcctctcatggtttggaggctcgaagtcctagatcaaggtgctggctgatttggttttgggtgaaggatctctcctggcttgcagatggccacctgctcactgtgttctcatatggccttccctctttgattggagagagagagaaagggagacagagagcaagagaacgctctagtttctcttcctctttgttttcttcttcctcttcttttaaggacaccgatgctattggattaggaccccaccctatgaccccatgtaaccttactttcctcttggtagatgctttcttcaaatacagtcacttgggagttagggctcaacatatgaattggaggggcagggacacatttcagcctgtaacagtgggttgggttacctctgcggaagactaaaatctgagggttagtcactgaggtttcactctccagtgaaactggctgagggtcagacagtcagtgttgtcccaaagtttctactaacccattacaactgtaaaatgaaacaggtgaaatgaattttagcaataatattttatgtattaaatatatccaaaatattaacattttaatatcagtgtaaaaattattgagatatttaatttcttttttattttggtactaagtcttcaaactctaatgtgtgttttatactcacagcattcttaatatgaactagatgcatttcaggtactcaatactctcaaatggcgaaggctagaagttggacagcaaagttctaggcaacagggagccactggcagcatttgagtaaagtgggcaatgatgggtttatcatcgttgtgctggagggagaataatgtggcactggtgtttagcatggcgcggaggaaacatgggatccaggaatgagtaaggctgttcttgcagtaatgtaaattgagaggaagagaggccctaaatgttagggtggcagtagctgagaaagaaaaaatgtgggtagttgggaaagaaaggatgacttttctgatatagtttattcttatataaaaagcaaactgttgtatttgatataatatgtatgtcaatgacaggatgtctatacaaaagagttagtatgaatctttaggatctgaacttttaaatgtttgcctagaggttgtttattaatctcaactttgggaagtctcctttccttcaaagcaggaagaaagcttccagcctctctcagggcttagaacacctgcatggggctgggtgtggtggctcatgcctgtaatcccaacactctggaggccaaggcaggaggatcacttgaggccaggagtttgagacagcctgggcaacatacgaaacactgttctccacaaaaaaaaaattaaaaacaaacaagcaaacaagaactaaccatcatagtgatgcaagcctgtggtccaagctacttggtgggttgagctggaagaattgctgaccctaggaggtcaaggctacaatgagccatgatcacaccactgtacctcatccttacaaccaagcaagattctttaaaaaaaaaaaaaaaaaaaaaaaaaaaaaagacagagagaaaagaacggaaacaaaaaaggaaaacaacacgtgcatgggcatgcgttgtaggacctagtcatctctccaacattcatgaaagtccccttaaacctaaaaatgtatagggctgtgctcctttggcagcacatatactaaaattggaatgatacagagaagattagcatggcccctgccaaggaggacatgcaaattcgtgaagcgttccatatttttaaagtcaggaaacaacagggctggagaggatatggacaaataggaacacttttacactgttggtgggactgtaaactattcaacccctgtggaagatagtgtggtgattccttcagggatctagaactagaaatacctttgacccagccatcccattactgggtatatacccaaaggaatataaatcatgcttctaaaagacacatgcacacgtatgtttattgcagcactattcacaatagcaaagacttggaacaacccaaatgtccaacaatgatagactggattaagaaaatgtggcacatatacaccatgaatactatgcaaccataaaaaatgatgagttcatgtcctttgtagggacatggatgaactggaagccatcattctcagcaaactatcacaaggacaaaaaaccaaacactgcatgttttactcataggtgggaattgaacaatgagaacacttggacacagggtggggaacatcaccacaggggcctgttgtggggtggggggagggaggagggatagcattaggagatacacctaaataaatgacgagttaatgggtgcagcacaccaacatggcacatgtatacatatgtaaaaacctgcaccttgtgcatgtgaaccctagaactttaagtataataaaaaatatatattaaaaaatatataggtctctgagaacatatagcatgacagaagctgatgaagctcctcttcaaaggctgtccaactataaaaccctctttttctgtaccccacttttctctcccgtacttgtcttttctgacagatattgatgagtgccaactgggggagcacagctgtggagagaatccagctgcacaaatacagagggaggctatacctgcatgtgtgctggacgcctgtctgaacaggactgatttgccctggtaggttggtgggtggtctacagtgaaggggagggacttggtcggggatattctataccctaatctctatttgcattagagattctaaaaatcattcagtcaggcaggctgcagagctggctttcctgattaggacgatgctgggcttgagaatttgaatggtccaagttttcttaatttaatagcatctggaataaatccttttttattactcacaaccaataaagatgggaacatgggtatctctcttcaactgtgcaactaatctcactatttgaatgtcaatttgtggggctgctggataagttttgcagggctaggcaggtcggtgagaattctggactcagcattttaaatcactttcaaggattttaaaatattactttaaaaaggcatatttcttgttctgaattagaactccagctctcttctctttcttttctcaatattcatatggttgactcctgcttcctgaatcttcttcccataacagcagtaacatctcaccatcagaccccagaaggggagctggcttcacctagaccctggagaccaggatgggggtctttccctcactgcccactttttgcctgtcagccctataagcagaaaacatcctaagaagaaaaatctgtgcttacttggtctctgtttttttttttttagcatattatttttctcaaataatttctcttcttaaaggtactgaaaaactgcttatatttatgtagtcagctgcacatgtttacttttaaggagcagtgaaccattcaataaaagagactttactattatattttggcatgcctctgttacgggaacattttcttcctgccagagttgctacagtcttgtccttgagggctctctgaaggttagtttttagaagaaagcactgtgagaaaaaattttcgagactccaggatttggaggtaacggactgcacattgatgggtaggttttaaaccatagagttaccagttgtcagtgagaccttgaagctaactgtcacttcacatggttagtgtatgtttgtgtgtgacagtttgtttttatgagatcagtgactctgaattcacatggcgacttaggactgggtgttctttacctgcctccaatatgctttatgtatcagataatactgagcccaaaggaagaacggtggtttcatagtgaatgactaaggtctagctaggaaagtgaaactattgtcccttctagagttcttctgtcactaaaagatttatgtcacaaactattcacagaaactagttcctcatttgatacttgaaagacactaatccattcagaaagtaaaagtaatgtcttgggttcttttgactctactccaccccctcacctcagggaagatgaccaccactattccgtaagaaataggactctgaatgtcccctgtcccacgatgggtactgcctccatgatggtgtgtgcatgtaattgaagcattggacaagtatgcatgcaagtaagttaaactgtcttgctgatggcacaggagatgctattcagtccataacttgtagctaatttgtaaaatttacactcaggatgttttctgcaattaggtgttcttttggaaaaatataaacatacacatatgaaccacgtgtgtgacttcattgcatgctccttgtgtatcacgatgcccccttctagttaccggtgataagtaaaatctaaggagttggtgatttccccttttactgaaataatttgatgttactactagtaagtctagggattaaatgtctcatcctggttgaaaaacttaggtttgtgagataattcctaaaactttttttttccatcaaatgtgctttatattatgtgtgagcatccgtgatctgttctggatttacaaaagtttggtacatattcacactggacttcttgccagagtccaaaaattttttcttcaaaactaatcatatgtatattttttcttcacttcctaacagttgacttttcattttgttgttcagtaacaattgctgatactgcagctgctgctttttgctccctttttcccccataagggtttcacagtgggtaacgtgtcaacctggaaaggagatttgaggaagcctaaaactatgagacattcccactgtgctcactccgaaaacctttcctgtggaccctttacaaaacccaaacccacaatagccagttctgcctcaaattttacttttaattcatttcaattttcaaggcaataggaggaaactgatagataccaaaaaactaatacgtctcccagggcaggctcctgatccattgataattttctctgtgcctgagggaggggtgatgaaatagtcgatcctcacaaatagctactataaccttaaagtcttctcttatttcatcagtaataatgacagaataactaaatttgtggaagagtaagctatattctgtgacaaagtgtatggccttcactagaaatcatgtccgcatgacaaaaatagtgaaaaattgctcatgaatactagtaaaatgactcagtccttatagaattctgttttcatattcatatttacatgctataatttccaacctatgataaattgggtatttgcaatagttattgctagttttaatgttaagaatctattggttttgcctgttcattgtttctgatcatcccaaataatgaaattacaaaaataaattccgaatgtattaggtcatggttgttttcctccatgatactttagactataaaaatcatataataatataaagggtactacagggttacatactgcatttagaacaatgttttcatttgatctgataacatccatttattaaatgattgatgaactctttaacacactgcttttcttctgtcattaaatcctgatgaaaatatcatatttctctgataatgttttaaacatgagttctacaaatgacaaactggagataagactcaaattgaaggaccttgaacctaaagcaatattaaaatattaccagagttcacagtaatctggatcataaccttgtttttaaattgtatattaataaaaatgtggtttaattaactattcaacccttgcctcctcctgccctgatgacccaccttatcttttattaattccttaataacaagtctctaggaagtgctttacccatccacttttattagaaacacttcctaggcaggtgtcattctgtacagagtgctcttcatgctgaagcaggttttggaagagccagctctttcttcctttcttagaggaactggaagttcccccagccacaagaaaccacagggtgcccccggggtgatgcagaggaagtgagagttgggagctccatgcccaaggtattcctcgaagatttcctggtttggagatgctcaggaggctccaaccttctgggctcagaggaggtcctcgttcattctgtctttcagccaaacacccttctgacaggtcttctttagaccaagaccccccaacatcagtcctgtgaaatgctttttaaaaaaggctgtatggtcaaatcacgttgagagatgcatcatactctaccctcaattttttttttcaggagaccatcgtcttattattactcaaattggtttccctgagcattcggggagcaggtttttaaggacagcttggtgggttaggggaagccagtgagccaggagtgctgatgggtagggatgaaatcacagagagttgaagctgtcttcttgcgctgagtcagttcctgggtggggccataacttcagatgagccagttaattgatccgggtggtgtcagctgatccatcaaggcagggtctacagaatatctcaagcattgatcttaggagcagtatagggaggttcagaacttgtagcctccagctgcgtaactcccaaaccataatttctaatcttctgtctagccctaattcttgattcatagtatataccacaacacattaaaaagtcttgtttaccagcccgggaacatggtgagactccatctctaccaaattttttttttctttttttttgtgatggagtccgctctgtcgcccaggctggagtgcagtggcgcaatctcagctcactgcaagctccgcccccggattcacgccattctcctgcctcagcctccagactagctgggactacaggcacctccaccattttttatatttttagtagagatggggtttcaccgtgttagccaggatggtctcatctcctgacctcgtgatccgcccgcctgggcctcccaaagttagccaggtatggtggacacatctgtatttccagctacttgggaggctgaggtgggagaatcgcttgagcccaggagctgagattgcaatgagttgtgatggcaccactgcactccagcctgggagacagagtggaccctgtccataaaaaaataaaataaaataaaataagccttgtttatctgtattgagttagaatgtctcaaaattatttggctatggaaaggcaaacttatttggccacagaatctttgtttggtttaacagaagaactaattcataaccaaagaactagtatcctgtgtcctcctccaccctggaaaatgctgaatgactattctgggccttataagactcagtgaggctctacattgcagctgacttggatctccaggactcttggctaagggactgacatattcctcaagacccagactttctgaaaggatcagaggtgtggcccattaacatccaacagtttaaaagtgtgctgctaggcattgatagtaaatggctgtaaccaaagatagctagaattaaaacagcaccaagaaagcctgcaagaatgatggtcctttatgcttttgcactcagatcctgatatctttgcatggttagttccagaagatagcttttcagaggtgaatagagcataaaactcttttggaagcagcatggtatagtggaaagaacataggctttgaaatcagagaaccattggagtaaacctgtcactcatagctgtgtgacgttgtacaaactccttgagcctcagtttccttaccataatacaggaatatgccaccaaaaataaaataagtaaaagtgcctagcaggatgtcaacacacaagatggttaacaagtactaatccatttccctccttcctctgtgagtgagttcccagtccctctgaccagctaaaggtagagacaggcctagagcccagatcttctggagcttgtccagtgttttttccatgctgcctcttctcactatgggcactggtgtcagttctcttatttttattccgttaagtccttttggaataaagtggggacatggatgaataaatagttatccagggaccaaagggaggaatttttaataagtgggcattacagagtgtttaataggagtttttcaaagttgatgcttttgcaaaggataatagaatacagatgtttacctgagatctaattgtttctagaaatgcacattcccagtagatggcagcattgcttcatttacttcaaaaagttcagcagttcactctagtgacagtttcactaatgggacagcagggtgtttgtagtgaacgtccctttttcctccatatagctttttctctcattgaagaaaataggcaaatgctgtatgtatgttgtactgggtcttcccttgcactagtagtgatttttttttttaaaggaaaaagttttctctgcagactaggttatgtgttctgtttagaaactgtacacattcttctttatagcctggtttcaagtgaggaactctgccttcaaattctcctttcctttcacctatctcattgcaatctggccaaacatttgtttccaaaactcccttggctcttagggcagagtgctttgtgttggttttaaaaggtggctcctcaggattttagcctaacagaaactgatcttaatcaatgtcctgtaatgccttatagaggcagtatgcaaataatcccccataaatcccgagcaaacagacgaaagggagaagtccatgctgcattaacttgtaaatcatagcgctttaactgacccctgatggattttctatatgtttctaaagagctgagtctggaaatgcagagttgagagacagctgaatactgagtgtcaaaactatcagcgtttttggccaggcatctctatgacctctgtttgtgtgttgtcacagctgtgttgttggctacatcggggagcgatgtcgtaccgagacctgaagtggtgggaactgcgccacgctggccacgggcagcagcagaaggcatcgtggtggctgtctgcgtggtggtgcttgtcatgctgctcctcctgagcctgtgggggcccactactacaggtgaccctgtctttcctttggtactggaaacctctttctaagactcccaggggaatgcctgtctccttgagatgagatgtatgaaatagtacctctacatactcatttaaaacgtgaaataggctgggtgcagtgacccatgcctgcaatcccagcactttggaggccgaggcaggcagatcacttgaggtcagaagttcgagaccagcctggccaacatgtgaaaccccgtctccactaaaaaggcaaaaagtaacaggcgtagtgatgcacaccagtatctcagctactcgggaggctgaggcatgagaattacttgaacttgggaggcaggggttgagtgagccaagatcatgccactccactccagcatgggcgatagagcgagactccgtgtcaaaaaaaaaaaaaaaaaaaggtgaaataacagtacaatttttactgttagctcaggattcattgctctgaaacatcagtgcttttacgttttccttgttccattccagtcattgtccaacaccttcatagtatatgtgttatttatcaatcacaatatggttttgcgttccactctcttgtttaatattatatgctccccccatagcctgcataactataatttttcattgctgcctccattgagttgattttccacaaaatattaactgtcataaaagaaaatcaatatcttcctaatttggaaggaaatttctggtcctcagattttgtgcttttaataatttcaagttaacattaaaaactgtagacaataacatttatacatttaattctttaaaactaacactacattgggtgcaggcacaggcatcacactgctcattttctgttttcttagaaagtaggacagctcctctattatcatcaatattgaaaagcattttatgtacggttatagtttgtgttgtacaaatcagtgagtcataaaactttagggctgaaggggactttatggaattatctagttcaacttatcatttcatggctggaggacctaagacccacttgactaataggtcccaattctctagatgtacaaaatatctgccaccatctgtagataaaaatttaaccacatttatgggtacacacaaccactcaagtggcaactgtcttgtgttctggaaaattcaacatatcagccaagtgtacttatcagagatcctgctatagcctagtgtagtggttaagagcacaggctctggatcagattatacaggttcaaatccaagttagtgtctaaataacaccagacatgtgtcctacctctgtattcattaatttcctttactataaagtaggaacaagaatagtacttatctcagggttattgtgagattaattgggttaacctaagtaaaggctttagtgtaagtctggcattaggaattaataaatgctatctgttattttgattttttatgaactgtaaccttcccccaaagagtcatatgctctaagcccttttctaccacctcttgagagacaagattcttaggcaaaacttgacattttaattcagtagtccatcaataacattgtaatttttagcctggtgtgaatcaatatcttggatatgtgtagaaagaatattgaatgatcaatggttcatcccattgatcattgccaaagggcaggaaaaaaaaatggaaactagaaacttaagttcatgcgtgcctaattattaagtgttttttcctatttgttgtgttatgatatagtatgtcttatgttctgtggcatttttcagagatctggattgaaagctaacggcaaattgctggctttttaaacttgaattcaaagaccagctcagctgaaagatgactatagactttacatacatataagagtacttcaacctcagactctcatactccaaaaatcagaagtgaaaggactattccttcaaaagaaagctcatcagaaccctttctttttctcttcactgaaatgcatccagagttgtacaatcttcctgagtgaatctatggttatttacctaacaattctgatcagtgtacctgcttactctccgcaaagtttcagctatgtgcataactacgtttgcactatagatcaattctgacagatcaaattaaaactgctagtctaaatgttgccatgtcatactcaactgtaccaacaaaacagctctaacattgagtttttaagttagacatgctaactgtttttctttaaagggttaaatcagttatttcctcccttataccattccttgcctgtcttgtctagcttgtttgatacgtttgtcttctgtgtctctcaaaggattaattgtttgtgtgctgggtgtggtggctcgttctataatcccagcattttgggaggccaagacaggcagattgcttgagcccaggagttcaaccaacctgggcaccatggcaaaaccctgcctctactaaaattacaaaaaattacccagcatggtggcacacagctatagtaccacctacttgggaggctaaggtgggaggatcgctgagccagggaggcagtgattacagtaagccgtgattgcaccactgctctccagcctggggacaaagcgagattctgtctcaaaaacaaaacaaaacaaaaaagactaatgtttgtgaactaaataaatttttcaagtattctaatcttattagtttaaaacatgtgatttcttggaagactcccttgtaagaaaatcaacaggaagtatttcatcacaaagtataactttgttttttgtgggtttttttttaacttttattttaggttcaggggtatatgtaaaggtttgttacaaggtaaacttgtgtcactggggtttgttgtacagattatttcatcacccaggtattaagccagtacccaacggttatgttttctgctcctgttcctcctcccaccctccaccctcaggagcccccagtgtctgttgttcctttctttgtgttcctgagttcccatcatttagctccccttagaagttagaatatgtgatatttggttttctgttcctgtgttagtttgctaagaatatagcctccagctccatccatgttcctacaaaagacatgatctcattcctttttatggtgcatagtattccatggtgtgtatgtgccatattttctttatccagtctgtcattgatggcatttaggttgattccgtgtctttgccattgcgaacagtgctgctgtgatcattgacatcatgtgtctttatggtagaatgatttatattcctctgggtatatacccagtaatggaatgctgggtcaaatggtagttctgcagttaactctttgaagcatcaccgtaccgctttccaaatgattgaaataatttcctctctctccaacagtgtataagtgtttccttttctccaaatttcatgagcatcttttttttcttgactttttattaatagccattctgactggtacaaatataacgttgtacctttgcaactttggaattgtttatattagccacttgtttcaattttttccttgaagcctttgattaaaacacataataacccacaccatctcttggtactgtctggatgccagattcacagcagcccctcctatccttatcactcttcctggaacgtccaggtaggcttttgacagagggttgcattcctagaggcaattaagctgcctatctgccccaggacgtggcgttattgtggagtctcacagatgcactgctctaggggctactgctttgaggatgggatccatctccatgctaaatctccccacccccacccctagtgaatgacgccgtgtataacttagcgttgaatgtcaaacaagacagtactctaaaaaactggatttggaagcaagatcctagtgtatttcctggcttagccactatgagattttcttatcttgggtcatccactcctctgtctttgcctctaatttctttatgagtgagagattgcagtgggccagtaagagcagctaggctttgtgtcatcatgaccgacttcttacactacccttggtagctgtgtgccttagtgagtcactgccatttccaagccccaatggcttcacttgtaaatggagctaacatagttgcctcacacagttgctgagatattttttccacagactgccccactcctccctgcaaaatagttgttttttcattgctatatcatcagtactaggacagtgcctggggtatagttagtctcaatagatacctgtgaatgaatgaatgcaaggctattccccccaacatacatgggcaacatacacacacacacacacacacacacacacacacacacacaaacacacacacacccttacctcacagaaccttggaaagagtgaaacactgtctggaaagcattttgagttctgcaaaaagactgccttaaacatctaaagttatgttcctagttatcttcatatttcttctctccacacaagtacttaaattttagtagcaaaagcagttagttgtccctgatcatcactgaggggctgagtattttgttttgttgtgagattgtctcaaattttggctttatcacaggactagaagctgctatcgaaaaacccaaagaatccttatgaggagtcgagcagagatgtgagggtcgcaggcctgctgacactgaggatgggatgtcctcttgccctcaaccttgggtaatggaccaaagcagatgaagcaaggaattggcttgatattaacccctattcattttttctatttttcactgagttcagaatgactggaatcagttatagcttccagctggtgtcagtgttaccaagaccacatcagctagggaggtcctgggtgggagggtgggggaactgtgttgttaataaaggaatcagatgagttataataatgccataatttaatggcacaataaatttttggatttttttctttcatgtagattctttctataacttagatttgtatgtgttatgtgaaggcttccatatttttagttaatacattccagatacatgtcttaaaaacccaagattgtgctttaatttattttctttctttctttcttttctttttctttttctctgtctttttttttttttttttttttttggacaggatcttgctctgttgcccaggctggagtgcagtaatccaaccctcactgctcactgcagcctcgaactcctgggctcaaacaatcctcccagctcagcctccaaatagctgggactaccggcacacaccgccacgcccagctaatttttgtattttttgtgagacagagtttcaccatgtttcccaggctggtctcaaactcttgggctcaagcaatcccctgcccgggcctctcaaagtgctggaattgcaggcatgagccactgcactcaattttctaattttcttaatatttcttaatatttcttttattttcttaatatttcttttctcacaccatttcaactccccaaatttcagtagcaaaatagttgccagatttaacaaataaaaataaggatgcctagttaaattcatacttatactgaaagttcaaatttaaattcaaaattaaattaactgggttctttattttatctgacaatcctagatattttccgaaaagcacagaggttgggaaattcaagatgtttcataaatcatccacttcagtaattgatcttggaacactaggggcagtcttgaaacaggctacacattcttgaatcagttaagggaatttccatttctagaacctgtcagagttaaggactgattcagtgtgtgctgttggcattatttgtggtatatatgtggaagagactggaatacatggcaggtccatggaggattgaatccttagggaagagcattacagagaggttatggaggagcaaaggcaatgtttggggtccttcccacattattaccctactccccagctcccatctcacagtgaattcccagaaagtagctttcctgtaactgtcttttgactaccaggtgatcatcttttcctacctgtaataggcattcagtgtttccttattatttatttattttttggttggactcaagtatgggggaaaaaaatagaggctgggcaatttgctcatgcctgtaatccccatgctttgggaggccaaggcaggattgcttgaggccagagcttgggaccagcccggacaatatagcaagatcatatttctttaaaaagattaaaaaaaaaactttgctgggtgtggtggtacacacttgcagtttcaggtactcaagagactgaacaggagggtcacttgaacccaagagttcaaggttgcagtgagctatgatagcaccactgactccagcctgagtgacagactgagaccttttctctaaagcatgagaaagaacatgagtctagccttactctcccaccagttggctatctaatcttgagcaattcctttaacctatgcgacttctgctccccactcagtacaaggggtttggattagatgatctctaagatcccttcgtctttatcagtctttatcaattccacaagtgtgtgattctaggactaagctctagaattgttggttctttgaggcctcatgactttgcgaacttctaaattacccagatgtcacttgcagtctacatggtatttcattcaggttttgagtagcaggtttaattcatctcattaattatcatcatgggaatgaaggagaaacacaatctgtgtatgactattaaaaaatcaaaagctttgctgctgtcatgagcaacttgttggctcagagctatgttgggaggcctggggctgcgagctcagtcccccacagccgtcataactgtcgttgacagcaactgctgctgtagatatagtgggagtgggagagagctgaacgctcaaactagaagaaagagcagaaacaaatgtagtctatcagctcctttccccacctcagcccagaatttcgggacctatgttcttctgacaggaggcacgaggttagaaaatttgcagtgcagagggttggattttgacttgagacagaaaaatgggcatgtgtctttaaacagtgggttgcgtgttgattttgcagtgtgttgctgcagagatcatcaatgaggaggagatgaagcatgatttgtattataagaaaatgaaaatacatttctgtggattcacacttcccttaccaacatttccctgccttctgcctaattgaccccatcatcatccctttctacacctttctcaaaggaaaatatgggcaaagagattgttttctatcctctttctgttgtttctgagttgtgtgctcctttctgtggagcgcccatttctgaacaatgaagcgtgatcggccaaaaccttggggcagtccttgcactagttactgattgacaagaaggacttcaccaaatgatgtcctttgtcctgttgtatggggtcacttcttttctttcttgtagcatggatctgttttaatatctaatctatctagagtgaatgtgagccagtgaacctggtcagcctgcattgcaagtgcccaatcaatttttgataatacaaataatgacaaaataatcattttgttgactgaagagaaatgttgttttctgttccttcctattaaaattctagtccctaggctgttcaaccagcttgcaaaattgtcattgcactggtaattattactaccttaatggccccaaattactcagaacttggtagcatgtttaaatgagtgttattaatgtggtgtgcgtgtgtgtgtatgaaaagttgtagcacacacatatattagatattatttgcctgcctatgggcagttcttagaatacttatggattcttggattgcttatggtaaatcagtgctccagggatccgtgacctaaaagctgagattccataattagaatagattcttcagttacatattggtgtgcctagttgctttaagacaaagtaacacaaggctcctcactgaatgttaatctctctttagatagaaagactaacttcacagggcctttcttctgactttcactttcataggatgaacatcgtaaagccatagactttgattcaatgtacgttgagataatttgtgattttaacaatatcctctctccctcctttttgttgtctgcagtttgtggttataaaagacaccaagacctcaagaatgggggtcaaccagtggctggtgaggatggccaggcagcagaggtcagtttttatccctggctcctggtgaatggttatttttacttagatcctgactgttttcaatgaaaagtctcatttaaccacacacacacacacaaacaaaataactaaattgtaaagctatgtgaatagctgggctgtattgaaatgccatggacctgatttgcactggagtttatcttatatgaggttaccacgttcactcaaaactctagtcacagggcagcccgtgttctgcactttgagcaagaacacaatggatgactccttgatttgaattgagttttggggtcatcttaaggtccaggatctatactggtagctgtaggtatagtcccagttaagttg

SEQ ID NO: 2907 - DNA, 77246 bp, Homo sapiens
  misc_feature 10718, 10719, 10720, 10721, 10722, 10723, 10724, 10725, 10726,10727, 10728, 10729, 10730, 10731, 10732, 10733, 10734,10735, 10736, 10737, 10738, 10739, 10740, 10741, 10742,10743, 10744, 10745, 10746, 10747, 10748, 10749, 10750: n = A,T,C or G
  misc_feature 10751, 10752, 10753, 10754, 10755, 10756, 10757, 10758, 10759,10760, 10761, 10762, 10763, 10764, 10765, 10766, 10767,10768, 10769, 10770, 10771, 10772, 10773, 10774, 10775,10776, 10777, 10778, 10779, 10780, 10781, 10782, 10783: n = A,T,C or G
  misc_feature 10784, 10785, 10786, 10787, 10788, 10789, 10790, 10791, 10792,10793, 10794, 10795, 10796, 10797, 10798, 10799, 10800,10801, 10802, 10803, 10804, 10805, 10806, 10807, 10808,10809, 10810, 10811, 10812, 10813, 10814, 10815, 10816: n = A,T,C or G
  misc_feature 10817, 10818, 10819, 10820, 10821, 10822, 10823, 10824, 10825,10826, 10827, 10828, 10829, 10830, 10831, 10832, 10833,10834, 10835, 10836, 10837, 10838, 10839, 10840, 10841,10842, 10843, 10844, 10845, 10846, 10847, 10848, 10849: n = A,T,C or G
  misc_feature 10850, 10851, 10852, 10853, 10854, 10855, 10856, 10857, 10858,10859, 10860, 10861, 10862, 10863, 10864, 10865, 10866,10867, 10868, 10869, 10870, 10871, 10872, 10873, 10874,10875, 10876, 10877, 10878, 10879, 10880, 10881, 10882: n = A,T,C or G
  misc_feature 10883, 10884, 10885, 10886, 10887, 10888, 10889, 10890, 10891,10892, 10893, 10894, 10895, 10896, 10897, 10898, 10899,10900, 10901, 10902, 10903, 10904, 10905, 10906, 10907,10908, 10909, 10910, 10911, 10912, 10913, 10914, 10915: n = A,T,C or G
cccatctctgtggtgggtgagaccctcctctccagccacgtgggaggtaagaagaagctaagggccacccagagcagggcctgtggctgccagtctccacagggccttcttgtcggccaaggtggggactgtggtgcacagaacagggccccaaggacagccgcatcctgatccccactcctgggacatgggacctcgggtggcaaaggggctgagcaaatggggttgaagatcttatggggggtttcctggactgagtggcccaatgtcatcacaggggttcttgcacaagggagcagcaggggccagcagagaggagaggtgactagaggaggggtcacaagaccatatacgaggcagcctctagaagctgggaaggccaggaaaccaggaaagctgggaaggccaggagctgcaggagggaccagccctgctgacaccttgattggaggcctcctggcctccagaacttggataatagatctgtgctgctttagccgcaaagtgcaaggcagctgcttaccgcagcccaggaaactgctccgcgttgatctgggctcagccccagggaggggtgcctgccgggtgactgagcatggtggtgcatgaggcaatcagaaacaggagggtttctcaccctgcaggaggacactcggtgtcttctccgaacctcctacagctctggacactcacagtttgctctcaagtccccaccttagttccactccccttccaccacctcctgtgccctcttaggtgggaaaacgaacaggcaccgcgaacgtaagtagcggcttgccccaaccacaggcagccaggcagaggctgtccttaaaaggctggaggcttcaaggctgtgaccatgtggagacagcacagccaacaaggctccttcaggaactgcaaacttaaaatagactccgcttccaaacccacacactggctctctccaggaagagcgaggtggaggacgcccccgccgcctcagggctgtgacagtgggagtgggttccacctgctgggctgggctaggctgagtgaccgaccgcctcggggctgtgaagtgggttccccctgccgggaccgctgagtgaccaccccaggactgtgagagtgggttcccctgacggtcaggctgtgactgcctcagggctgtgagactgggtgccacctgccaggcagctgagtgaccaccccaggaccgtgagagtgggttccccctgacggtcgggctgtgacgcctcagggttgtgaaagtgggctcaacctgcccggctgggcagagtgccagccagagagctgctctcctgtgtcctcacgcgctccttcaccagctcctctggagaagtcccctcaggaccccagtgaagctccctgacaaccagctttctgagccaaggacattcagaggaaaagatgccttaaggagggcaagataacacatactgctgagcctttcactttccttgaaacagagaggctgcatatttacccattggatgaacacacacaattttattactttgttagatgcaaggaggggctgttttaagttaactcaacagtctgaggtctttcaagtcatttctgaccgctaaaaaatagcatttttttatttttttgtactcactgctaacaaacagctggatagacccgaccaataccatccatgctcccccaagtgggtggcgctgttggcaggtgacgactgttgccaatgttggcgacacagcccggaagtgtgagtcctgcgttctcacggctgctgcatgccgcccgacctgccgctgccctgcgacattccctcccatgggtggttcctttcgcctctgttggcaacggggatttctaggcagctgggattccttctgcatctaaattactttcttcaacaagactgattcttccccttcacagaagggttcatttgaatttgggctttggctgcacataccatgttcttctcaaattttatttcaataggaaggagtttattatatttatccctaataagtcttcgtgtgaagtatacaaatactatggatagaaaatatgtgaaaacttcaggtgagggtgtctaagtcacctcttaacactggggcggggggcgaggtctgctattcttccacaaaacatgaaggggccagagtgggtggagagaccatgaaaatagtcagctatgcaggtcgcatgaccaatgccggcattttccactttcagaatggcacagagaggtttctaggaaggaccattagacagccgtcctatggtcagcgctggattctgtgttgttctgagctagagcttgtcctcatcagggacctggtccacaagggactttcaggagctgatgcagaatgccagttgctcagtggtccagacccactccccatcttcctaaggtggctcttggagagccaggacacgggggttggcacgcgaggcaaaaggctgaattcagacccacaccttgccagaacccatccagaagtggcctctgtgtgtgggttgctgttggctgacttggccatgaggacgagggggccgcaggacagaccagggcaggaaggaaagatagggcaggcccaaggggagcgagtcataggctgggttctcagggaaggatggctggcagctccaaacccacggccagggacagtggactctggctcaggaccctgatactacctcacctgtgggcacggctctcagcaatgcaacctcaactccaacctgagagaccaaagtggggcagggcagcagagcccggagtagagacggcgcaggctctgtgtcgagtcctccagaggaaagctctgcagccagggaggcggggcgacagcagggaccagccacccaggaaagggacaggaaagggggaaaaaaacagcaaaggagccaggttccaggcagggactgggagtttctgaatggaaatgcacgccaggccttcccggtacacccatcactgactcccaagagctagcacatctggacccctcccacggggcaacccatctgtcaggaacaagcagcgctgcgtccccaggggctccagcgcctacactggaggtggggccggtcatccccaccatacatgcaagacgcacaaaatccaaataaaagttgacgcacggtgataacttctgttgaatgagaagacgtgagtggccatcgtcacacacggatgaggccatgaccagcacagcagctgcttgtccctctggctgcagagggggtagatcaaagcgtggggcctgagcacgtggggtcctacccgctcctcttacaacgtctaaaacagaagattccgaaggtctttcaggttcccagatttggacagaagggctgtgcgctgcctgcgcaatactgagaggaggaaaagcctcccgtgcttggaggactggcgttgctcctggagtgggacggcccagtgctaagcaccaagctcaccttgtcccaggagagggcagaccagtggaatgcactttccagcccactgcctgtcacagccacctttctgttcgtgcttcctaaaccaacaaagctcaatgacaagcaggggagagtgtggagacaaacgcgctcgttctggtgggggagtggcgtcacggcggagccgggcagcagaaaactcatgctttgatggtagtccggcctctaccctacctgcttgttttttccttaattcccacactgtgactcctgccccagccactcagctccagctctgcggacacagagcttgccaaagtcatgtcgacagtcactgcaggcctcctctccctgacgcgtgtggagcacctgacccagcctggccgcctcactccttccccgcctcccaggccctctgcactctcctcagccctccaacacctacagtgggctctgggggtgccctgcagctcaggccagaccctccttgcggctcagacacccccctccactgcgggtcgccaagtctcacagctttcagattctgcacatgcacaaccctgcatcaggggcttcccctgggcctcgcccctcagccactgctagcatttctgctctcactgccacgtgtccagcctgagatgctgcccgggatgcaggaggccccatcaacgttcactgtaagaaaacccacagaccacgcgtaacatgccagaggaaacagctttttacaaattaaaagctgggatttttatataatcaccaggtatagtctcattaaaaacatgtttattcaatgaaactacatagcacaaaatgagagcttcccaaaatgtaaccagcaattggatctaactaactagggagcttcaaattttaatttaaagataaaaagtgttcacttgtgaaaaatttactattaaaataattttaaattaagaattttaaaactatacatcaatagtaaaagcgaatgagcaaacttactcaatgcttaaagataaaatttgacagtttcatttgtcttcctattagaacccttaaatcagctccttcaagcaagcgcagccagcgtgagccaggggacagacactttcagtggaacattatggctctgagaacagcaccactcttttggggacaagtccatcactggagctccccggctcctggaattcaggtggcaatgtccaacatccaaactcacagagcctggcattccgatgggaaggacagaaaggctgggaccctctgctgagaagaggctccttttcccaagggaagccgctgcttcgagtcacacacgtgttgctgttataaggtcctttgctttgacaattcgaggagtattagaaaacactagcggcgtgaggtgactactgacaatcacctcctctgttttcggctcatgattttcctaaagcaaagcctcaggctcccggcttctatttatatccacatgaaagccccagatcactcgggcacctgcttccattcatggaattctggccagccagtggcgatgcctacacaagcttttcttcaaaaagccccaatttctgacagccatggcagctttcctccacccctattttgccaaacccccaaatcttgcagatttatatccagtgtgagcacgactatgcttcttcccagaaagtagccgcctgcttgcttctttgcattgacatttgcactctaagaacagccaatccagaaagctataattggtaagcagggcacagagaaattcaaagcaattattagccaaaaaatgggacaaatgccaaacaagacaagagcttcttccacttctctgtagcagagaaaccaccacgaattcaattgaagcggcgtaactgaaggtccctgggtcacctgtggcctggaggcggccgcctgtttccctgctgttcttgccacaacacctaggcgaacatggaggttccacagctgcctggtggacagcagccagcagcctggcagcgtggggtggtgagctgctgctgctatctacccaggcaactccattttgctgaggtggtcctaagtgctgcatgtaatctctcctaagaagctcaatgttcttaacaatttggttttaacagttgtggaacagaaagatacgttagaaaaaaacaaggactttcttttcaatacagaattctcagcctgtaaacacatgcctgtatgaataaaatccagacacaaaaccatactgctgcaacacatgattatttcctgatctccaaagcactgagaagtccaacatggaatcctggaaaatgacgattattttgatcctggtttgttggtgctgttgttttagttgtaagagctttcgtgaacgaacgcatgtactgctctgaaataaggaaatcggggcatctcctcacctcttcttgagcttctatgtggagagaagaattggacagtgtttattcatctttctctgctgaacatgctgtcattgaaaacaccagaaaatcaaacagacgaatgtcctcagcactacaaattacatcttcccattccatcaagggaatgcaaccacacagggtcagacgcaaacacaggggatgacagagcacccgagtccacaccatgccgacacggagccctgcatggttggagagctctgccctcacaagggcaatcctgaccacagggcagacctgccctctcactgctgaggacactaccgtgcaaccaccaaggttgaaggaaacagctagctctttgcagccaaagacattaggacagctaagataattaaagatggctttctttttctttcctcccctccacaatgggtttgtaagtgctcagagcaaaagacactctgtgactggcccaatgcccagctgtgctttcatttatgattaaagctgttggtttcctagtgaaatgcaaaacttcagccacttaaatctcgacccaattcaaaactcctgggaaactttattttcaaattcttaaaacaaggaaggaggcaggaggaagggaagggaggaaaacaaggacagacggaaggaaggaaggaagagaaggagggaggaaagaggcagggaggaaaacaaggacagacggaaggaaggaagagaaggagggaagaaagaggcagggaggaagggaagggaggaaaacaaggacagatggaaggaagaaaggaaggagggaaggaggaggaaagaaggagggaaggaaggggagagggaaaaaggcaggcggagcaaggagggaaggagtgtgcatcttcttcgcatgctccgcagcagcgaggcctggtaggcttccgcggggagcagagcatcgtcctctgcaccagcactggaactactgcccacaggggctgtggagtgcctgaactatggccagtgcaaccaaggaacccaattttaaactctatacattttagctcatttaaatttcaatacccacatgtggctaggagctaccatattggaccagtggagctttacagtggaaaacccacagttcagtaggactcacaactggcagcctgatcctaatggacacagtggagctttacagtggaaaacccacagttcagtaggactcacaatgacagcttgattcctaaaccatgatgctgaaccacaaccagcttgttttggttttctagcttcaacagagatgaataaagaaatctgattttctttctcatttctcagttttgactgcaacttgattttctgggtaataaagagagtatattattttgcttttgcatcttatgtcacaacagcctaagctcaaatctcccttcaaaggagtttgagacgctgaggacggccacgtaatctttctcaacatctctcttaaaacatattgttctgtaaatctgtggtaattttctcttttgctatttcttcttcacgttcttattttttctactctaatgtagcacattactaaataaatacagtaggcctttagaaaaactcttcagcataatgtaagcctcaattaaaccacccacaccaaacagggcccagagcagcgtgtgtgcacgtgtgcagtttcgacgtgcccgccgcacatagacgtacgatggggaaattcccatggaaacacttttatttctggaagtcagagaaaaacaatgtgcacaacctgaatgacacagagcggcagcgctgaaaccacaggggcgccgagagctggcctttcacagcagaccactgttttccagtgagaatggtgggccattcaaaacaaagctaaagggttccaaacatccagaatggaagctgcttcccccaactccattcctatactacaggatggattgctttttgtgagaccccttcttccactgtgcaatttttgattatttaccctcccccgatcttaaagctatatggcgtccaggagagtgcggctgatgcgcttggccatcactgtgatgcagctggagcagaaggcggcccgttcacttcagccagatcacttgtctcccacctcggtgttgtacccagggctgtacttgcggcccggcagctgtggggaaaaaggcattggtgcattctgtttaacgtgaatgaatgtttccccagctcatagttaatgtctacccggcagatgcctgtacttcatgagttccttcagcaatgctggtgagcactgatctgtggcaggtgtctcctgtgagtgcaaggatgccacaggtacacaaaccacaaccagccctgcctgccagaagcttctgtcctagggctgggagccacaaatggaaacgaactctgagtgttctcattaatgtcaggagggtgacaagagccacaggagggggacagagagcatgggtggcacttaggggaggccctgagcagggacagccacgcagacacaggggtggggtgggacccaggaaccacagttcaccaactgaaacaccgagttctctctgaaaaagcccccgtgaaattccctctgaagagggcctgcagaggccgggccgctggctgtaaggggccctggcggagtaggaaagtgagtttcatccaggccttttaagtagacatgggcagggttcagaaaaccagcaaaggagggggaagcactgcaggactgaccctagcgggagccactgaacaccaggagcgacaggacgacagagcccaggaggagcggatgctgccagagaggccagcgggggctgagcttggcagtgacggagctgcagaaaggatgttacagcccccacttctcccacatctgggagagatcaggggctcaggtggcggtccacagaggccaacctcacagggcacgggagatctggggggcaacaagagcccctgccagcacaaagacgcctgttcatgagggtggcggccagcacagggctggctgagacggaaagaggagtgttgctccgcaggaccacctgttgcggagccaggagaaagcgctcagcacggtgtgtgtcgcccagcgatggcaggtggaaaatgatgagttttttcatattttcaaatcagcatgggcacacagtcaatttgtgtaccacacacacacacacacacacacacaccccttccaaattctgcccttaagaacaggtacaaaaccatttttaaaagaatcagcttttcctttatcctaatcagcagcaggcattcacaccatccacacagccatggctgcctggatcacaaatcactgaaatgtgccttgcctggccctgccacagtggccacgcagtgacagacgaacacacaacgcatcctatgaagcagcagaaggtcgccccaagaccagccatctcacacacaggacaggcaaagctctaggatcttcaagcccaggagccacccttcctcctccccagaaagcctctcctctcctaggtgcacagctggaagtgggacctggaagtggaggggccggtgctctgttagttcattcttgcactgctataagacatacccggggctgagaaatgcagagagaaaagaggtctaattggctcatggttcgcaggctgtgtgggaagcatggtgccagcatctgcttctgggaaggcctcaggaagcttcaatcatagtggaaagcaaagcaggggcaggtacgccacatagtgggagtaggagcaaggcaagagcatgaggcgggtagggggtgggagctgccatatactttaaaatgagaggtcgcgtgcactctgtgagaacatactaattacctccaggagggcaccaagccattcatgaagatctactcccatgacctaaacaccacccaccagaccccacctccaacaggggatcagattctacatgagatctggagggacagacatcctaactacatcaatgcccatctaaaggcggggggagggtggcacagccagcctccagctttctggcccaggatacagtgtggatacagaggttttgtttgggtgccaggagaattctgggacacacacaaaaaaagaaaaacccagctcttcaggagtttgaaatctgaagagagactgagatgaaagcccaggtcattcagccagtatgccaagacagcccagggggtttggtattgtgggatcccaggagggggcgcaggcagcagtctggcagagtccagggaggcgtcaggagagtgagggaccctccagggccagggggacccccaacactgctgctcgaactacaggtgtctacaagtggcaggaagaccgcaagagaggacgtgactttctggcttcacagtctgacaagacctttggcctaagttgtgacctgtgcagacgggctgtaggtgctatttctagaccggggagcagtgacgggcacctggggctggctcaaagggcctgacggggtcaggaaggcctgggtgagagagagaaagagctggtcagcccagggaaggtaagtgtccggtctgcttatagaatatgtgcagggtgtgggggctacatgcgggttgccccatagagatgacccgtgggcagttggaaacctgcgtctgtggcttagagacagggctgtgcagccacctcccagtaactgagggaggcagcgccatgtgagccgacctccagggtgctggacaagagaagaggccaaagagcagcactgcatggctgaggcctgagctgcagagggactgaggagtgaggcgcacaggccaccggaggagctgggtgtgaccacggtgacatacggggcctcgcgtcacggtcaccagatggccactagctctgcacgaagacagaggagcggggtgggaaaagaccacactagcggggaagnnnnnnnnnnnnnnnnnnnnnnnnnnnnnnnnnnnnnnnnnnnnnnnnnnnnnnnnnnnnnnnnnnnnnnnnnnnnnnnnnnnnnnnnnnnnnnnnnnnnnnnnnnnnnnnnnnnnnnnnnnnnnnnnnnnnnnnnnnnnnnnnnnnnnnnnnnnnnnnnnnnnnnnnnnnnnnnnnnnnnnnnnnnnnnnnnnnnnnnnnnnnnnnnnnnnnnnnnnnnnnnnnnnnnnnnnnnnnnnnnnnnnnnnnnnnnnnnnnnnnnnnnnnnnnnnnnnnnnnnnnnnnnnnnnnnnnnnnnnnnnnnnnnnnnnnnnnnnnnnnnnnnnnnnnnnnnnnnnnnnnnnnnnnnnnnnnnnnnnnnnnnnnnnnnnnnnnnnnnnnnnnnnnnnnnnnnnnnnnnnnnnnnnnnnnnnnnnnnnnnnnnnnnnnnnnnnnnnnnnnnnnnnnnnnnnnnnnnnnnnnnnnnnnnnnnnnnnnnnnnnnnnnnnnnnnnnnnnnnnnnnnnnnnnnnnnnnnnnnnnnnnnnnnnnnnnnnnnnnnnnnnnnnnnnnnnnnnnnnnnnnnnnnnnnnnnnnnnnnnnnnnnnnnnnnnnnnnnnnnnnnnnnnnnnnnnnnnnnnnnnnnnnnnnnnnnnnnnnnnnnnnnnnnnnnnnnnnnnnnnnnnnnnnnnnnnnnnnnnnnnnnnnnnnnnnnnnnnnnnnnnnnnnnnnnnnnnnnnnnnnnnnnnnnnnnnnnnnnnnnnnnnnnnnnnnnnnnnnnnnnnnnnnnnnnnnnnnnnnnnnnnnnnnnnnnnnnnnnnnnnnnnnnnnnnnnnnnnnnnactcctgccgggtgtctgctttttatgtgggagataccgggtcacatctgtacaccaggaagaaaaaaactgtgcaggggaacaggcgaggatgcaggagagtgtgggtcaaccccaagaacacaaacccggagggaggggcaggcagagagctgtgaaagcagcaaggccctccaggaacactgccggcgaggacacctccagagaaccacactcaaacacgactgccgcagccaggaaacggtaacgctgtagttggttcccatctgagaggtggtcctgccagaaattcatttctttttccctaaaggaccaactgcagattaagcccaaagaacagaaagttgacacctgaacaaaagatcaccgaaaggttttccctttaaccaacctgctgcaaacccacacgacggccagcaggcgcctctcttaagacgcccgggtcagcttccccagggtttttcaattaaagttgtcatttaatgttttacccaaacacggaccagccacgcaggtctgttcacagcagtactgacagaggaagggctgggtttgggaagtctggctccattttcatctttgcaaatagaattttaaatcagagcagataatagaaatagcagaataccaaacctgctaagtccagccagtggccattaattgtctcggaaagttttgtctggacttctcaggcagcagttaactggcctttgatacccaggagggttctcagatctggggtctcttttcagtgttttaggccaacagagaaccatgcggggggggaggggttctttgcagcatctcacaccaggaaaatgcaaaatcatccactttgtttacatgtctacttacgtctgtatctgctaatttaaaataagccttccacccccaaaacccagtgctcattcacacatgagaaaacgcgcatgataacgcctcagggaggaaagcagcaaagcccgttccctgcagggcagcctcactccgggagccgcaacgggcctcgtcagaccttcctcccgagccagctttcccggatctgctcgttcacggtgcccgggtgcgtgacacccatgtgtgtggctggcgtccaaaggttgagatgcaaagggcatgcggtgaactatctcaggtgaactatcaagccgtacacccactttaaaatgaaaagaaaatcattttcctcctgtcagaagtcagggctctgccgagtatacaccgggtgagcaaaccaagaatccttaaggagcaaaagaagaaagacgcctaacagaaaaaggaacaaacccctccaatgctcatcctctgcaatcccctctacttacaatgcgaacggagtttccctcgctggatctctaaattcaaggcattttggactcatacattcacagggctctgataagtttaacactttcaggaggctctttccctgtattccatttccattagaaatcaaaaaggaagtttactgaagggaaaaaaaacctcaataaattacaagccaaacattccaagtcctcttccagagccaagcagctaagctgccctccacccatgacctggcgtgtgtcagtccctggtggcccaccgggagtgttccagggcgaggcctggagcgggaagggattttagacagtgcactgggaggcaccctgcccagtcaccgacaacctgggtgactcagtgtacaaaccaagttcctttccctaagggctgctggtcacagggggctgggtggaaatgacaactccccctggcccccgatggagcccagacatggaggatgagcagggtggcttccattccaggctgcagagggtgtgcacatttgtactagcagatacaaaatgacaatgagggtgtgcacactgcagcccagcctgcttggggatgtggcccagcctgtttgggatgtggatctgtactttcttctcccggaaaaccccacaggaccggacttgttcccacccggcatcctgattcatatacaggaaagactggagaagagacagtattggacacgctcatcaacccactcgtgatttcccccaaatatctgtgtgcaaatctgtgtgtcagaagtccatgctaatgtaaactaacatgatgattttcctgaccctcacagttaagagggtgaatggcacaacacacaggtgctaccctctcccccaccaaccggaaggctacaaagaaacctgaaccagctgcctgagggaggggccctgggcggctggggaacaaagaaggaacatctctcatctttgaattttacagcatgtgcaaggatttcttttttttttttttttttttcctaagagagaggattaagtaacttgctgagggtggcacacggccagtgtgttcacagagctagaattggaccgtgtcccctggctcctgagtctgctcctaaccactggcccatgctgtacatcactcttgcctcttccagcctagggctgtgtctgttcccagttttcccgtcataaataacaccgagtgccccctctagatttatgtgcttgagataaatttctagaaatggaactgcttgcttaggaaaaacaataaacagagcaatagatgctgatgcagccatcggaatgggttgaatttataacgccaagatgctgctccagatcattatgctgctgcttacacttcggggctgattcaagccttggtttctcgttatgaatttataccaggctcttggccttttactgcctcatgcagggtcggcaaactgtagcccacagatcaaatctcgccgctgactgcttctgtaaatgagcctcactggcacaacctggcccatgcatttacacactggctggtggtgctttcacacagacagagctgagcggctgtgagaggctgtgtggcccgcagagctgggaacctttactctcggctctttaaaggaaacctttgctgatcactggcctaagaaagtacaggaaggtaacaaaagacagtaaagctgagtccacgacgtggtttaagttcacttagcccacaattacttccaagtgcccacaggtacgaggtcctgtgccggctaagtgcctacaggtgccaggtcctgccctggcaacagcggggaacagggtgattctccagctccaggtgaggtcgcagaggcagcgaaacgtgctgttctttgatccaaagtgacgccactgagtttgtgtgattcaacgtaagactggatgagttctgatgttagaaaagtgtccacttctaaatgctacagccaacctgggtctgtgccatgagggccaaggccgcacaatgaggtttctcccaggctcttctcttgggtcacaatttagacatgccctatatagtgcttcaaatgccagctgttcgcacagaaatcagcaaggaaaaaaatatacacacacacacacacacacacacacacacagtcactcattctatggaggaaactccttctactggtgaaacgctgtgtcctaactactttgagagagatgaagaagccagtcctctcttctctggctagaaaaacctagaaatgagttggaatgtgggagagcccaaagtagaagatggaaggtgatggagggcgaaaagggtggagaaatcctacctgacaacacggagagaggcttcaggtgcagacagcatgcggatcagcagggaagaggtggccttcaggaggagggaggaggcagcaaatgcacgcaatgcgcagagcacggcctccgctgacagcgagcacagacttcagctttgtggtcttaaagaagccctgacatggaaaaatgcccctcccgaaatacacttcagacttcagttaacgtgaactatgcagctcctgggcaatcagtatactgttagggcctaagtgagaggcaccaggccaagtagtagtcaacagtttcctttatgaggcagtaacagggtctgtacttgcctcccagccagatacatttagaaactggagaactgagtctggtggttgcatctgactctgggcaggacacagtgactagattttacggagagagcactaaaggggtggggcctaggcagaaaaagagctccagaaatctgcacaggggaccactcggtctctggctgagtagccatcagtgtgtgcagggggtaaaactccatgaagcggacaaagtcgacttctgggaaagaacagtttccagggagttgcaagcagatgactcccgagttcacttagggctgagagtcggcgagctcccactggccagagcagaggggcctctcctgcacgcatgcagcattcaacagggaccccatggccatgccttgatactgggctaagccttcctgaagaaagcccattgcaggctcaccagaaagctgaaacatcaagcctcaaaagtttacactgacttgcaagtaccttaactgctgtcagaaaaaaagttctaacacagttcaaggaatagaacaagatctagcactcaaaaacgtaaaatttgcaacgtatggcaaagcaagagacatctctcggcgtatgaaacaggaaaatgtaacccataacaaggggaaaatatcagccaactcagaactgacaaagacgatgaattaggaaacaaagacattacaacagctgtttaaaaatgttcagtatgctctaagaattaaatgaaaaacataaggagagaactggaaaaataaaaagcaccaaacagaatttctagagctaaaaaacaggattcctaaaacacaattcattggataagtgtggtggccatgaaaatgtgctctgccgagctcctactgcagggaggaagtgtgctcctctgcaacgctcctgctgctcctgaccctcaggatctgctgcctgttcagccacggccacgcacgttacagaatgtgcctggtcagtgatggagcacagaagagcttcggtgccagctgttcctgtggacatgggactccctgacaggcatctttggctctaggacatcatcagcctggccaaatctttcctggattctttcttcctgtctcttgtcacagtcccgaaggaagagcaaaggctctcctgccatctcagacttcctctccccgatccttcaaaggtttttcttccaacagacctcttcgacatctaatctcttggcttctgattcttggaagaccaaaccaacacaatgcaattaacagcatatcatacacccacagaagataagtgagcttgaggcagagcagcagaaactatccaaaattaggcacagaaagaaaaaggccaaaaacaaatgacagagtcacagggacctgtggaaaatagcaagtcacctaatgcatggatacataagatccccaaaagggggaggatagaaaaaaatctgaagaaatgataaccaaacactttccattgttctgaaaatgataatcctgccacccaagaaactcaataaaccccaggcaggataaaaccaagaaaaccacgcagatgcatgccataattaaattatgaaaaactagtaagaaaaaatcacgagaaaatcttacaaacaaccaaagggaaaaaaggttcatcagggacaagaaccaagctaggaagaactgcagtcttctcattagaaactatgcaagccaagaggcaatggaaatcttttatgtgttggaggggaaaaaaaaactgtcaacctagaattctatatcaaaagaaatactcaacaaaatgaagttgaactatatattttcagaaaagcaacagctaatagaatcactgctcccagatctgttctataacaactgctaaaggaagttattcacacaggagaaaatgatgccgggtggaaactcaggtccacacaaaggaatgaagcacatcagaaatggtaggggaaggataaaagactaaaagactaaaaaattgtttcaatctctttaaaagataacttctgtttaaagccaaaatcacaacagtccattgtgtggtttctgtgaaagtatatgagaaaacagcacaaagaacacagagggcaggaacagctgtggcctcgggccagatacctgcatctgtgtgaggcggttaaatgctgacaaggtgtggattgactgtgacaagttagagttgccgtggtgaaaccctacggcaatcatcagaaatgaaataaagaggggtagctcgtaaggcacaaaggaaataagatggaattacagtacataaccattctaaaaagaacttaggaaaagtgtaaatgtgaatctcacctgctattatatatggttgaaatgtaaggtaagaatgagcagtagttcagccagagagggcacctcacctccctctaagaaagttcctatccagggtttgctaataacaacagatgtcactgaatcattcatttttatggacaagcttctctgtgtcatatttcagtttttgcaaagacagcctctaacacttaacagccctactactgctctaggcattacttatcagagaactacagtaatgaaagaagtgccacataaaaacattctcaaatgcactttgtaagaagaaagcagaaaagaacttatttggtgagtgaatgtgattaacttgatgtagatatatctcaggaaatgtcattcaggagaaagccaaagaaacctcctgaacaagccctccccgcccaggtacatcgcaagggtctccaagtaggtcttccttgagtgtggcagcgacttgctattcctggccaaggccatggcttttctctactgaacacctatgccactcacctttttgaagtgctgtcctgagccacctctgcctcctcgaatcctgccatgaaataatgcccttccttctcagagctcccttcatcctttgacttttctttggtactcatcacaaagtatgtccaatgcaatcattgatacacttactgatattagtgggcagcctctaagtagaaactttttactagtgttatttcctgtgaccctgacagcatgaggtaaaggaaggcacagtcctgttttaaaagagacagggtgttcagagacttgacttgcctacggtcacgtggctagcggtggcaggctgaaagtggagccccgatcttttaatgatcaagtccaggatctttttccactacagcatgtaaatattcgttgaattaaattgtaacttttagtgtgctaactcttaaaataacacaataagctctttcctcaatcacatactacttatacgaggttttactgaattccctcattccctccaattttccatttatctgtcaatcagcatatatatagtaaaggtatttgctcaaggtctcagctatgagatttcttgggtgtctgttaggttatggtccacaatcactctacccagataaaggtgactccaatctttctgcaggtcctttcgtatgtaactcaagcacttctcttgggggatgtttatatcctagtagtcacctcagggacattcaaggatgccagtttcccagctgaaagagttttcatgaaggatgtgtgtgtgtgtgtgtgtgtgtgtaatgtatacatatatttgtaaatatattgataaatattatacatataaataaatatgtgttattccagcaacaaaccctttattgtattactgtaaatatataaattaaacaaaaaaacattgagtgagggcctgtgtaccgggtgggcttcactctgctggggcaagcaatgggttagccaagcatgactggctcccctctctctagatgcactaaggagcttcaaaatactgcacgttctggggtgatttggaaattccagtttccaactcctattttccattataacatataatgctaatcaattctgcttggagtttttcattaattttaaagaagagcactatagatattaagacacttctctgatacacaatttcccttaatttccattactgtagaacacaaatcgatgtaacaaaattggcataaattttcaaaaaatcttttaacagtcaactttcaaaaaccaatttttattttgaaaatgtgtgttctattttttaacacataaaactatagcttcctacaatatatcattatttagctgtcatatttgttgcaatgagtattaacaatagttcaaatgtttaatcctccttaactcttattagctgtgaataatagaaaagctcctaacctaagtgctgttttaaacctgaaaatggtatgctttctaaaaattctaaagtaaatacaatcatatgtacacactgtaaagtcagggcacttgattttccagattgcatgtaagacagtatcttaccctttccatcagtagacaggcagataccacataccacagcaatcacatacaaaccaatggcctggtaaagatcaccttttatgctcatcatcttcttcgagggacacatgctgataatttccatacacagagatgtaaataactcgggcatacagattaacgccgagtttctatgattatttccacagtgcaggtggcagggcacaaagtggagagaacactgaaggcattacgcattactttcaaacttaattaagtaacttataaactgaaaatttgtattttaacacaactagtaccaaactgagttccaagtaaggtctgaatgtcatgaggaatctaaagcagtcacgtcggccttccgtctcccgcatgtttaggtaaactgatcctagtgcctttctgtaaggtgaattcataaaggcaagaacatacagtattaacatattaaagttaataaaaacatctctgtttaaaaaatggtaagggagaactcaatactgaaaatgaaaacaacttgagatagtaaaagaacaaaaatagcaggcgagaaaacagaagattctgttgtcctagcaactatcttggacagatcagcttcaaggagggaacgatcagcttcaaggagggaacgatcagcttcaaggaggagcacagtatcttaacagcatctggcttccttccattgaagagactgaactggtaaaatgaaaccaaatcacagtttgtctaatccaaagaagggctgtacagaaataaaaagtgaccgatacaatgtttaaaacgtgactttaaaaaatcagcagcctgtcctgcacacattcagtttttcatgaacttacacagggtcaattccgggcacaaaatgaggagggtcgctaaggaaaacatgttcatatatattgctcagaccccaggtacacatgccccactgaaaatgctgcttacttatttatttttatttaattttagtttttttgagatggagtctcactctgttgcccggctagaacacagtggcaattctggcccactgcaacccccgcctcctggattcaagtgatctcatgcctcagcctcccgagtaggtgggattacaggtgctcgccaccacgcctggctattcttgtgttttttaggaagagacagggtttctccatgttggccaggctgatctccaatcctgacctcaagtcatccgcccgcctcaacctcccaaagtgctgggattacaggcgtggccactgcacccaatgaaaacgctgttttagatgaaaacttggattcctgaggcatcaggccctagcgctgggtgtcgcctagagtgtggacaggtgcctgagagccatcaggacactgccagacaagtgacaagacaaacactccaaggtcacaggatcaacaaaaccaaaaatcaaaacccttctattcatatgaaaatctaagatccactctgctgtgaaaaggtctttctttctcgtctgtgtacccatgtcaccagcatgttcatcaaatgagagtgtggatgtcccctcaaatctcatgctgagatgtaactcacagtgtcagaggtggggcctggtgggaagtgtttgatcatgcgggctgatccctcatgaatggcttgggccatctccttggtgatgagtaggccttactctgagttcacacaagacctggtcatttaaaaatatgtgacactctaccaccaagatctggtcatttaaaaatacgtgacactccgccaccaaagagctggtcatttaaaaattgtgacactctgccaccaaagatctggtcatttaaaaatatgtgacactctgccaccaagatctggtcatttaaaaatatgtgacactctgccaccaaagagctggtcatttaaaacttgtgacactctaccaccaaagagctggtcatttaaaaatatgtgacactccgccaccaagagctggtcatttaaaaacatgtgacactcctccgccaccaaagagctggtcatttaaaacatgtgacactcctccgccaccaaagagctggtcatttaaaaatatgtgacagacactcgccaccaaagatctggtcatttaaaaatatgtgacactccgccaccaaagatctggtctttaaaaatatgtgacactctgccaccaaagatctggtcatttaaaaatatgtgacacttgctgccccattctcttgctcctgccttattaggatgtacctgcttcccctttaccgtcaccatgattgtaagtttcctgaggcctccccagaagcagaagttgctatgcttcctgtaagcctgcagaaccgtgagccaataaaaccctcttaaataaattatccagtctcagacattatttatagcaatgcgagaacagcctaatacaacccccacaccttagtctgtgcatggtctcaccccaggggccctgcaagaagcagggaaatgggaagcagcatggccgcccggccaacttgcccaaatgtgagtcctgccctcccagaagctgcaggacctcagaaagccactgttcaaactgctcatttgcaaatgggaataagaataatagtgtcttcttgtggcaacagcaagtgcccagcacacagaaggtgctcggggtgacctggtattgttaccactgcgatcagcgcagaagtggtgccctcttcagcctcagtctctctgctctttccccttcttgtcaggtctattcagcccatgacactccagcccccagcccataatccttccttccaccagcctctcccacctcgcaggccatggctgccagattaatcctaagtgcctcctggatcaagcgtccaccttcctccctattgccagccaccctcctggatcccagaccgtcggttctgtatctctcgtgttcccaaccaaagccacagcaccagccaggaaaatgtcatcttaaccatcactccactcatccatttagtagtcctaccttgagctctgggtctctgttttaaaatttatctgataggtttctaatagtcaagaagttactctaaataaagcccataaatcctcagtatctatgatcttaaattctggttcaaattccaacatctctgaccacctttcttaatcatcccatcaagctgatgagaagttcttcacactgcaattcaagacttggttacataacaatgtgcaatgcctctgactctgctatatttgaactcctcgggttaatctcatgcctgctgtaacccccagtggcttaggatggaaagtaagctccacggtccaccctgagaccctgtgcgatctcgcccactcgccaccctccccacctgttctgtctcctttcccttcacatcatggcccttgccgccatgccctgcagcctccggccttcacagccatcctccttctccctcaactgcccccccaagactctacttggcaaactcatacccatcctgtgaggtgcgagtcttgagaccccagaacagcaacctaccgcacatccctaccctctcacgggtccccacagcctctgggattccacgcatcatctgcgcacgtgtctctgccgagtctccagggtgtggaaactgggttgtgtcccagccctggtgcagtgtctggcactgagtgcggtgaaatgggggccagacgaatgcacgggaaggtggagctcccgccgacaggctgaacagccttgagtgtactgaagagtgacaagaggagccacagcagaaggcgaggcgactccaccatgcggagccagaaactatgagctgggcagaggctgagagcgctcagagtggccctaggaaggagttccagtaaaaagacatgatctctcagtaagagcagctcccagaacactggcaacttctggggcaccactgatttagaaactgcaacccaaacagcagctgtgcacctcttagaattacacaagggcaagcaaagcaaaattacagaaccccaagaagaaaaacgagttggctggacccctcccagactcaggtctggtgcctttgactccatccagccacaggaagagctgggaaaccttcccccgccaagcagtctccctaaactcagactggaagccaggttcagggataaggaaacacagacaagagagaagcaagtctagaatgggcaactggaccttcttcctaacagtaacgaaggccactggacccaactgccgtcttctcgtgttgttcaaagtcacccatccattggcaggtgcaggtgggcagcacaggcacctgggatccggagccccatgagctgccactgctcctgccagcgtcccgcactgtccctgagtatggcgtgctaggccctctaactcgcccctgacactgctcctgttctggagtccccatttaagggtgcagttgatgggaaagagcaggcttcccagacacctagagaggcagccaggcccttcacgcaggtgagaggattcacagggacctgaaccactgtgtgagatctgactccacgagtgctccacagctggacgaccgtgccccttaaaggccagtcagacatctccaaaaccaatctgttccagagagactcattagccatcacatccaggatgttaaccatgtatatttataatgttaagcacacaaactgctgctttcacgctaggagaacgtaatatgacacatcaaatggctgtaatctactgtctggaactggccctgtgatgtgaagacaccagtggattttaatcaaggaatgagatgcttcaatgacaatggccaacgtggtcacgggcctggtcaaccacccagcatgggtcagctggctttctcagctacgctcgcagcacctggatgtaggttctgtgcctccactccacacatggccaatccaacagagtgtctccccagggaggaaagagccctcacccacccctccagcctcccctcagcagactaggttggggtctatgaaacaaacagtgatctggcctggccacgcctgcttggtgaactgggatctctgatagctgagaggcctccctgcctctgggatccctgcttggtgaactgggatctctgaggagcaagaggcccccctgcctctgggatccctgctccatcaacggtcccattcctctcttgctcttttccctctttccacaagcacttacccttttgcctataaacacactgagaatgcctagcccttaaaaacaagacaaaataacaagctatagaagatggaatctctaattcccaccgtctcctgacacttctctcaaggttcacctatgacctggtcatcaacgcagtatcctggcatggtcaaccttcaccacccctgaccttcctgcggcctctgacagacactgaagctccctacaggctcctctgctggcgcccagggcccacacagtctggcctgcctcctaatactcggcgagcttggtcctcttcaccagctcttcttcctttcagcagaaagctcttctgaccaccccgattggatcactcacaagccagcctacacaggacaccaagtggcaggacctgctccactggcccacaggcacttctgtccctcccaccaagtggtatgagtcagtggtctgtttccagcagcgacgccagttgtacttgtcattgcaattgcaaaatttaattaaatgttatgaaactacgcgtctgaaaaggaagagctgctgttctgttaaaactaggctgaaacactttgaaccatttgatgaaggtgagtcgctaaaataaggtctattgaaataggtgtgggcgaacacctgtaggtgatttggggaagaattctgtcttcccaccgtttgtatgctttttagaacctaaaaaaggagtttctgcttataaaagaacttgagctctaataaaaaagtatcttaaagacatggagctcttttcatgtgaaagttagaataacggctttgtttcaatatataagcccaaacagatttcagaaattagctcagacacagggtgggcgagcctccccagcgtcacacactccctgagaagtgtgctcctgtgtaaccctttctgggctcatccatccatcagtaattaaattaaacataagggtcaggaaaagatccatgaggaagtatgcctgggattcctaattaaagcctttacaccaaagttcctttgttacaaacggcaaattcctatcttagaacccaccccacagcccaccccacccagctgccactacctgtctctattgtgctttatagttagccccagtgctggctgaactggctccacccctctcctccagtcacacacacaactctgcagagaggcaacacagcagaggcccagggctccaccgtccggtgaggaaaggccaccaccagccctcagcagcccgctccccaccctgcacctcttccctgactccctctgctggaatcctcagcaatagtctgcttaattttgaaaacctaaaaagcaagaagcaacttggctgggcaggaggggcaacaatgcccctgttaagtgggggctctcgggaaaagagacagtgcctacttcagcgcccccgcccatagcaccagcactctcacctgcaccaccaggaccctccctgacgccttggccctctgcctttgcccccacagttgatactcgacgtggcaagcagagcaacctttaaacctgagacccagatgatgccactctctggcgcaccaacgccaccacctcaccagagtaccgctgaactgaggtccccgtggcagctgcggaccccggctgaccttggcctgcgccttttcagctcactccctgctcaagctcaccccacccgcatcacacctcaccatgacggctcttctctagctccagaccatgtccacctgttcctgccttccggggggtgcctgctccctacacccccacatccctcactcccctgtggcgcctgctcccctacacccccacatcctcagtcccctgcgtcaggtgcctgagacctctctccacatggcagcctcctcgctgtgtttctccaagaccctggcaccctgttacctgtctatcatctgttctccctgcccactagaggtgagctgcatgagggcagggcttggcttcactctcgggtgtggccccaatgcttacacagtgcctggcacgataaagatctaatcagggctaagtgcagaagtggtaggacactggatgacactgtcgggcagggggtctgaaatgtcaggcttggcagcaggtattgggataactgtcattcctactaccttagcactcccaagatgcctgactctatctctgggatagaaccagattaaattaaaaggcaagaattctttgatcagccaggtttcccttctgtgccttcgggttggggatttaatcaattctgcattctgggggactgttcattgggtaaatacctattagtatataaaatgtagactttctaattcagacaggtcctccacagaatggctacagaaaaaccagcaccaaaacagggtttccagttataaagaaaaataggggagccttccatttctgcaaaacagcagccctaatatgcagaaaagcttcttgatataaaaacctctggaaatgctctacatgtacagctgagctccgcaagaaatcacaaagggctaagaaggaagagtgagtgaaaagccagagtggtgagctgaagccgcggtgccctcgggacgcccaagagctgcagaagccacaagacacggcctggtgtccctgtgaggtgactcctgaagggccacacctcagtcggggagaaggcctcctgccagcaaggagaccccagctggcacccagtggtgaaaccatctccactgggaattcgtaaccagagcttctctccacacaggttcgagggttgaaatttgattacctccagggcctggaataccacaagcaacaaaggtgccatcaatccctccctgctctcaggaatctgaggcctggcagcagcaaagggtcctttcaggagtagggctgccaggatgagaaatcatataggatacccggttaaaaaccttgggacatacttatactaaaatactgctgctctcagttcaagcttaccttggcatcctgtacttcatctggcaacctgactcagagggacccactctcaccaaatgcccatggatggagccccacagggcagaagctctgtaccaaagtctccaacacagtcaagaaaagaagccaccatgggtgagaaaaagaagaaacaagaacaagatcagacagcgtccagagcagcgctccagagacagagcataaaataactaggttaaaatgtctacagagagaagcaatgggggaattaccaacaaggaataagatcctaccacaagatgcaaatagcactggcataaagaaaaattcaaatctagacccatctcacaaaatacaaaaacactaaagtcagaaaaatcaggaaaatcctggaagaaaaacgaagactatatccttaatctaaagaataaaggtcaaagcattactcgttttccaagaatcagaagtgctcctaataactcctaacctccaggtatcaacaaggacaatacccatcataaaacatgcatcaacgtcctgggcatgttacaatacacagaccacctatttacagaagcacagtgcaagttattttaagtttctcatgaaattataaggcatagttttagtaattttattatttttagaaattaattgggattatagaaattctcatgttaatggcagaatttggctaaaacacatatttcaacattaaaaaaaaaaaagtctcccagaaagcgagaaattgcctagcagggtaatggcttctaagaaccactgccatgaaaaggcatccatggcctccacttgctccaggaaataccggctgccaactaccttctgctctaatagtcacacgttctgtggaatgtcctcaaatgtgtttgctcccctgcagcaaaccagtgacctgacacgtgtacctgaagaccgatgagaagtcttcccacctccaaagaccagtgagaagcacttcaggaccctctcttgtactctgcaagcccgctgcgggtaggggatccccagctacaaggttagacgaaacaattctgttcacccgcctctgacaaaggccgactttacttttctttagttacttgtcttttgcaattttcataagcaaaacctgaactcttttctaaaaagattcttgtcttgattgtatttactgtttctctaacgtgtaattatagaaaacagcatttaattttgttagcaattcaaacatcacaatattcttgctaaacctcagaacctctaactgtgacccaactaaaaacaacttcaactgtcttgcctggtggcctctgcgagttgaggtgtcagagactgatggctccttgggctctggcagttctccatctgttctgatgagatcagacatacctccacctgcacacattcctgtctccggccctatctcttcctatacactttccatttttctagctatgcctgttgtctccagctgactagacagaaatgagatgaaggcaacctgaaacacaaatgatccaagagaaactacatttcatgaacatttgccttcctattacaccattagtatttgttttcaaaagaaggaaaaggttggagaaaatgggttttatagttagggtttgatttttaacgtgtttttagagcaacattgttttttccgctcagcatctgatggaaattgctgctagcacaagctgtctgtcgggtgccagataaaaggaagccactctcaccagggtggggccttttgttagaaataaaaacccccatctcctcctactcctggggaaggcctgcactctctcaggggtgtgtgcaaggagttcagaaggcttcacacaagacatttcagtattcgcttccttgtctgctaagggctctaccaagtcactcaggtcagaatgaagctccctgaggggccccctgagcacaggctcaggaggaggggactaccggaggggagggagctttccccagtacccagagaagccaatctagaaagagctctgcaacccatgcagagagccttttgtgagaagccacaaaccttcccagatctgaacagctgcacatgaaacccagaggggctttgttcattcacctccaggtatccccacaatctgtttccagaaggaaatgcaatgagaactgctgctgatgtctctgatggacaaaaggattctatgaatttacagaaatggtcattattatttattactatttaatttcaactgatcatttttaatatcaagcaaccgaatttccttaaacaaaatcctctaaacagtcagacaattttactcaacaaaggaacataaaggctgtggtgtgcatggggctttctggaaagaggaaggcagcttccagtggagacccagcaagcacgacctcagccaggagcccacggtcagggcctggtgccaggctgcactgacagcaagtgcccctgatgcttcacctctgtggattcctcccaaaacacacagtccaatctaatcgctagagaaacatcgggcaaccctcaactgagggaagtctacaaaatacctcaccagcactccttattaaaaacaaagtctgagaaaatgttacaccaagaggtacctaaggagacatgaggacccaatgtcatgtgatattctagacggggtttggaacagaaaaaggacattagggaaaaactaaggtaatctgaataattcaaagtgtggctttagttaacaataagggccgaatttggtggctcacacctgtaatcccagcactttggaggctgaggtggccagatcacttgaggtcaggagtttgagaccagcctggccatgatgtgcaaccccatctctactaaaaatacaaaaattagctgggcatggtagcaggcacctatataccagctacttaggaggctgaggcacaagaatcgcttaaacccgggaggtggaggttcagtgagtcaagatcatgccattgcactccagcctgggcgatagagtgacaatcggtttcaaaaaaaaaaaacaaaaaacaaaaacccagtaagtattattaattcattaattataacagtgtaccatactcacagaagaagttaataaaatggaaactggatgtgagatatgagagtcactactaccgtcacggtttttctgtaaatctaaaactgttctaaacattcaagtttatttttgaaatgcttagaaatttaaaaatcggattttcccagtcatttaaatacgattcaaattttaacatttctaaacatttaattcaaaccacaagcccaatatcatatattctcttgattctctttaatgctcacaaactgaaaagcagacaaaaccacataaaacacagtgattaaaaactgctaggtgagctcaccatgtaactgttaaaacggctaacacatctgtcccctctgaacaaccaaacaggggacaatgtagaaaagaattctacaaaggcaacatcaggctgaaaggcaacagggcagggagggccctggatgccaaggtccagagaagaagcaaacacagtgggctgcacgttcccgtccctgaggcgctccctggtcccaccagcagagccggggggcgagaagcccggcagagctttcagcagcaggagtgcactgtggggccaaacatgcagttcggacccaacaaaaagaagggaccctggcaaaaatggcctctcagtaagcgcaagctagaacactccagacctcacaaaacggaagcccagcgtcaccagcttgcttcctgagcgctctaggggacctgccctgacctccatgcctgccagaagacggtaaagcgcatcctctccaggtgagatgactccaggcaaagtctccacaaaaaatgactgccattggaaaacaacaaaacccaatgatgaggccaccaaacgccaagattaaacaaccccaaaccaaacgttagggaccgaccactcacacaggcctacaaaagacacagatactgcaattatcagataattctgtgtactttgtgatgaatatgtttaagaaattagatgacaaaataatatcagcagtaaacttgaattataacaatgaaaactctagaatcaaaaacaaaccaggatgaaaattcaaaactcaatataagaaatacaggtctaacaacagattagaacgagctgaaaggatgattagtaactgaaaggcagtttagaagaacacatctaggctgatgcacactcaaaaaaaaaaaaaagacagatatacagaaaggagcagacacacgaagaatatggtgcatggtgaaaaggtccaacaatgaccaactggaaccgaaagagagcagagagaaaatatggcaagagtaatacagacacctgtgggacgccaaggcagacagaaaatgtggcaagagcgatacagacacactttgggagccaaggcaggcagatcacctgagatcaggagtttgagactagcctggccaacatggtgaaacttgtctctactaaaaatacaaaaaattagctgggcatggtggcgcatgcctgtagcccaactactcgggaggctgaggcagcagaatcgcttgaacctgggaggcagaggttgcatgagctgagatcacaccactgcactccagcctgggtgacaagagtgagattctgtctcaaaaaaaaaaaaaaaaaaaaagtgctacagacaatgaacaccagccaaaggctcaaagatgttatgaacctcaggccaagtgagtacagacgcacatgcacacctacttacacaacaccaccccagagagtataaatgcataaaaccaagtcagaaaaatctcttttaaaaagaagggaaaaaacctgccagagaaataagaaatatcttccgaagaggaactaccattagaaacaaaaagccagaagtataaaaaacagtgaagtttggaagcactgaaagaaaatattggcaattaaaactcaatacccaatgaaaataacctgcaggaatgaagacagccttccttccttcagttcaaatggaaagctgttctgcgggactggagaatgcctgcctgcacctgcctgggtgcagggattagggacgccatggtagcagagacaggagactagctacgccccgtgggattcggcaggtaaatacacttagatgacaggggctggctttctcatcatctgagaaggatatgaccacgagagcactaaaatgaaccttgatgtgttgcactggaactgaagacactggtggtattcacagttttcaacaaatagaaacacagaaacaagtatagatgtatctgaataaaaggaatctgggagtccatagtgatatatggaaatcaatgaataaataaatggggagaaggaaactacttgcttctagtaggacactacctggtcatacagaaagaacgatagaaacagaaattataatttggcaatcatcatagtaataatttagccaagaaaatcaatggatgctaaactactgagtgaaagtttgatgaggaagaggacatgtacatattctcaaagtatgtcccctcaaaatactgactaaatattaagagtaaaagataactttatagtgaagacaccacctaacaagcaataaaggtaacaaaagcagtgatgggacaaatgggaaccatatgccaaattccctcaaaaccacattgagggatattcagcaaggtaactgttctgtagtcttcaaaaagtcaaggtcttgaatgccaagaaaagcctgaggaactgatccagattcaaagagatgtacagaggaaacaattcaatgcaggccatcaccctggattggctattcttgctcagaagaaatggctaggataaatgactgctcatgaagagggcctatggattggacagcagtaacgtggatgctcatgaagagggcctgtggactggacagcagtaacgcgtgatgctcatttcctgctctgacagctgtcctggggttgtggaggagaacacccttgtttgtgagaattacacatcaagccacgattctcaaaccaggcgctgtgcatcgacaggaggactcgctcgaatgcgttctgggccccatcccctgcgtgtctagtccaggaggcctggactgaagcctgagaacttcattcccaacagcagttcaaatgatcctgacaccgagaccacactcggcgaaccatcacttcaagagtttgaagataacagaccatcatgttaataacttaccttaaatggttcaggaaagttatttttctttttttagtttggaacatcccaaactacccaaactaaaaaaaaacaataggtaaaaatgatgatcaaataaagaccattttaaaaaataagtgtgagaatttagtttagcaaaaaattcttcaggcagaaggccaaggatgctacatgcaggcgcagcgcccaggaaggggtgggcagccgtggggcgaatgcgcaggcagagctgccgagcacagctccgaaagtcgcagatgcctgtgggactaacacgtatggagaattaagacgaccgagatcatgcaaacatgcgagtgggtactctgctctggaactggaaagctaattgatcttcaacatcattaaccaaagataaatattttaattatcagtttagtaacaaaaagctattaaaagaatgatactagtagtagggaaataggtggggtaaatggaataaagaaaaaaaagaagaaaaaataatagaacaggtagaaaaaatataaaacagtaagataactatttacaaatatatcagtaatgcattaaatgtgaacagataaatatcctaaatattcagaataaaaaatttaaaaataatgcaaattacaaggtatccatattgaatataaagacacagaaagcttgaaattaaaggaatagaaaaagttacatcatgcatatactaaccaaaagaaagtttcagatgctacataaaattgaataaactttacagtaagaagcaccactaaaggtaaagaggaaaacatcatcatgaaagggtgaccctcctaacaaggcaattctaaattggtacgcatctaatcatacggcccaaaacatacatgagacaaaatctcacaaaacggaaagggggcacaaatccacaaagagtgcagactttaacacacctcctacaggaaaggaaggacttcaggcacaggactgagatgggggttctgcattgagatcacggctgcttctgccttactggagaaggactgagggcagagctaaacccaaggagaccaagaggaagccgccgaacaagctcaggtgggaatgatggcagctggaggtcaacaggaagaagcgaagccacttgtgaaacagacgcaacaggacctggccctcacaaaagcagagacagggaacgaacaccaagtgtgggttttctggcctacacaagacagcaagcaaagcaccagctacagcgttgatgccagggaagcagcaaatccgcagagcccactcaaagagggagaaacagcacatgcactcacacacgtgtacaaggacagaaagggaacacagcacacacactcacacacgtgtacaaggacagaaagggagacacagcacacacatcacacacgtgtacaaggacagaaagggagaaacagcacacacacacaagtgtacaaggcagaaagggagaaacagcacacactcacacacgtgtacaaggacagataagggagaaacgcacgcgcactcacacaagtatacaaggacaaagggagaaacagcacacacactcacaccgtgtacaaagacagaaggaggtgaacacagattattaaccgcaggtgcctctgagagaatctttatggttttatgtgttttccccaaatcctcacactgaataaaaccacttccaaacaatccaaaaaatttacttaaaagaaaatgccaagtagagtaagaaagcaagcaaggggtctactcagactttcagtgggtgcttcaggcaatttgctcatatcaactcagacaattaagtaatgcaaaaagatttagatttcaactcatctacatgttgaaggcatagcttggagtctgatttaatacaactatttcacttttacccataacaaaccacagccaccactgccgcgatatggatcgtgctcttcccagtccactgacattgggatttgcagtgcaggctgcaactacccgctggttcccagcgaaacttacacacgcctcgaacctaatggaatcttgccagaaaaataactcactaagaaggtatggcaattggataagaagatcaatgacacagttgccccaccaacttccaccctcgctgtctgtcccaagctctgcctgccctccctatgtcctcccaatggcctaagggccttctgcagaaatggaaccctcattatttacagacaaagagtaagaaataccagaagtaacatctgacagtaaagaaactgacataacagctgatgaacagagtgtctcctatcaagataatatgcctgatgaagaaccttccagaagaacatctctgctctgggctgtcatctgaggacttcatcagctttccacacagaaatacggggaaaagggagaatttttcaatgaaaaagaggctccttcactaaaacaaacaaaacacagcaacaacaaaaactctttctggagaagtgactgcattgtccccaggtgctgcagactcatccactggccagcttctccatttccacagtcttacctctctgaactgatgtaagacacggtcagtctgatgagtccaatggtgacttccgggagaaagataggaatgcttgtgtaattcagcacctcaaactatcctgaaccctaaaaaataagacacatgtggatcacaccaaaccatcaaaataaatacataaaagaagtgtaagtccgattttttttaaacatccatataaaaaatctatatatcccataaatgctattcgttgccaagcaatcatcccagcagcaaagccttcctcccaaagacccatggtcgatctggagctgctttttaatattactctcagaacctgaggtagcatcttttaaagcctcagtacctacataggacgaccttctgggaatggatgctgttttggagacataaaaaaggaggcaaagtgtgctttaaacacaggaatagcaggaacaaaaagctagaagcaatggttacatgacagtgctacacacaaagcatgcccccattaacaattttccagatgagggatcttggggcaggaacggtgagtagcttcagtccctctggggttgcagccagcgtctactgctctgttctgtatgctgaggccaacataggatggtctgttgtaccacggcttgtaaaggtctaattctccacttttcttggcaccaataaatatacaaatcataggatagtctctagctttatcatttcattttgctgaatgttaaaatatttatactttgttacaatttgctattttaaattaaatatagtctgaatataaccactatacttaaagatttttaaaaagcatttttcagcttttggaaaaaaaaacattaaaataaagtctcttttcttaagggctcaaaaaaagaaaataattattttcaacagtcacattcccattactgagttataaaagcaggagagtttctcatttgtaatggctcaaatggaaattatgtgagtgtatctggctctcggccagctttgtgagacagtccaggcccactgagcaaacccacggcctgttccccacagtacccagtaggctctcccacaaacagaacaacctgaccagaacccaaggctcacgggatccatgatcatgcttccacagacagccacagagctgcgaacctgcggcaagctgaagatgagtggaggtaggtatagcgtcaggagcgtcctagtaaaaaccgcgtcgctcatacacggttagtgtccaataatgcaaatgcccctccaagaaactgctgccaggataacaatgatcgtttgcttcctaagtgtatttatgtgcgtttccacatgggtaggcaaatggctgtaatgtacatactacagataagatcgttttcttagttttactattaagttggttttacttgccaaaagatagcaaatattttttaaaaactcaagcaagcaaaacagaaagtttgtgaagggcataaagtgctgtattttgtaagactgcattaattgtaagactacaagttccctctccagaggaaacgctgctagctttccttatgcattctatctaaacacttccatgcatgtgtcaataatctaaagtacgtatcttcttactgttaacacaaatataaggataatttttgaagtgatctcacataagaaattccaactaaaaatgaagttcatattttaaatgttaacaaatatcaatgtaggaggtgacatggttctctttacagtttgaaaaacctaagaaaatgctagaaaatgcgaagcaatcagtggcctggaccatgtgtagtatagagagcaacagcgccatctatgcttaattggcaacattacatgtagtcccggaaaatcttttaacaagtaggcttcaaactattttgaagattaaaaaaagaatctgttgcaatgattctacaatttatttatacctaaccaaacaccctttcaatttattactatgagcttaatgatgactactaggaagagtccatggtatactccagtaaactcctagatttaagtaagaaataaagatacaaggaatcattttatgactaggaagcaaaaggcagtgaaagaaaatattctcttcacaaagcacttagtttcattaagagaattcaaaactgattgaggataatatatccttttaatatcataagtcactgtctaaaaagaatataaaatatactagagcttggttacaatatgaggtgctgggacacgtattttaaacaagagtaaggcaggaacacagaaaaaagaataaaattgtaaatagtgttttatgaccaagctgtttcccaattaactgaatgtcaacactttgtcctataacatttccaaacccttttttcagtttctcctgaattgcaaagttctatctgaaacactgtacttctgaaaccaactcacatgctacagtttctgtagcactgaaatttcatgttaaaaagacgtgctccaggatcatgtaaaaatcttggcaattaagcaaaaagaaggtgggtgtgaaggtctgggctctgagaagcagggatggtctgagaggagcttgcacagctggaggcctgacgtgtcctcggagtcctgactggactgaaaccagcccaagcaggcgccagtcagttagggatgtggatatgacaagactgaaaaatacaattactgcctctcagcacaagcatagctatacacatacacatattagacactggcaacacgtaactgagatggtgcagaaatgttctaaaccaataatttgtcaggttatggataaaatgaatgtcactggtaagcggcatgtttacaataattatgttaaaaattggtcataattatcacttgagtccctcaattgagaaatggtactcaaatgaaaaaaacacaattgatattgtaaacttatgaaacatctttggggaggaagaaaggcaaaatacaggagaaaaaaggacaaagccattcatagtgagctagattaaaacaacggaatgctatattgatacactatgggggaattacaggatccttctctatgctccgataagcacataactaataactacatgaatggtgcagaatcgaaccaacacacatttcacactgtgtttagaaatgacactgttaccacagggaggtcaagtcagacacaatcccttgtctccgtaagtttgtagatgtcatatgatgcccagcagtagctaatactaacaaacaaggataccatatacattatataagtaacagcctacaagagttaagggaaggtgtcagggagaaaaaagggtgattagtccaagctttaaagactgctaggatttctaggtaactactgggcaggtggtggtggaaaagggcctggcagattgcctggtatcctggtagaagacgcagaaccagggcagactgggttctgaattaattctgggaaaggaaattcagacctatgactaaatgaagataggccactaaagattcaagtaaagagaaaacagggtcactgtgactttttaaaaaaataaacctggtggagtgggatgaagaaataaagaggcagaggagcagagaccaagaaccaggggattacaaccaaggggagcagcagtgttagagacaagggagagaagtcactgaaagtggcacactgcctgcagggtgtgactttggggaggataagggggtcagcagggaaaaaggagggttcaactaggattatggttgacagaggagtcaaaggttccaccaggattcaagcctgaacagacgcaggagggaaggcaagatggcccagggcacaggaccacacagaggatgcagagagcagagctctagctcctgcagcccgagaggtgagatgccccacacagtcacacaaccttggcagctcgagctctcgagtcatggtctcctccttgtaaaatgagggagtcccgccccacagagtgctgtggaacagacaaattatttccgaaacaccttccagacgctgtgttgacatctatgttaactatgagatttcagacataacagcaaaacacggttcagcagggtcctgtccccgcctccgggccacaaacctctgcaacctgttaggaacctggccacacagcaggaggtgacaagcaagccagtgaagcttcatctgtatttatagccgattcccctgctcgcattactgctgagctccacctgctgtcagaccagggcagcatgagattctcacaggagcacaaacccattgtgaactgtgcatacaagggatctagtttgcacactccttatgagaatctaatgccgatgatctgtcactgtctcccatcacccccagatgggaccatctagttgcaggaaaacagctcagggctcccactgattttacatcatggtgagttgtagaattatttcattatatatagaatgtaataataagagaaataaagtacccaataaatgtaacgcacttgaatcatgctaaaccatccacccatccccgccccagtctgtgtaaaaactgccttccatgaaaccggtcctggtgccaaaaaggtttgggaccgctgcaatagagcagtttaaagagaaggtggaggtttttaaagcaaagttttgaataatagagtatatcatttaggtaaatttacaaacacacaacaaatataggcatctagtccaaaatgttaacagagttttaaaaaacaaagagggaactccagcttcagctccaaagggtgaaggctggaagctgtaatttccatccttccaataagaaaaactgaaaatcaatggcctttcctggactaacagcaacaatgaattgagtgattttaagcttataaaaagtggaagaggccgggtgcggcgactcatgtctgtaatctcagcacttgggaggccagggcaggcagatcacttgagattaggagtttgtgactaggtgggcaacatgcaaaaccccattcctactaaaaatacaaaaattagccaggtgtggtggtgcacgcctgagtatcagctacttgggaggctgatacataagaactgctggaacccaggaaggggaggcgcagtgagccaagatcatgccactgcagcctgggcgatgggcaacagagcaagaccctgctcaaagaaaaaaaaaagtggaaggaatggcagccatgtcacagtgacagcaggaggagcaagaagactgtgccgtcggtacctgcagccccatggagcagcagcaccatcacgaagtgacctagatgggttgtaaatgtatactggaaactccacagcaaccactacaaacattttttaaagtacaatcaagatgttaagggaaaagataaaagagaatcttataaaatgctcaagaaatccagagaaggcagaaaaagaggcagggagaaacaacaaatgcagcaaacagaaacagggaaaagcatggtaaaatggaacttgattatcttcacgctcacttctaacatgaatgtccaaatacagcaattaaaagacagagactgtcagagtagattaaaacacaagacccattactacttactatctacaagaaaactaaagactcgagatagaagaggaaaaaagacacccatgcccacactaattgaaagctgcagtggctatattaaattcagatagagctgacttaaacaaggacaaacatcagcgaaaaagaggggcattacataacgataaagcggccaattttcaagaagataataacctaagataataaactatgtacctaacaacagtacctcaaaattatgatgcaaaaactaatagaacccaagggagaaatagacaaatccagcgctgttggaatttaaacccaactctcagtaaccgacagatccagcagagagaaaatccgtaaggagaccatgaccccaactctgagtaaccaacagatccagcagagagaaaatcagtaaagataccgtgaccccaactctgagtaaccgatggacccagcagagagaaaatcagtaaggataccgagacttgaataccaccgtcaatcggctcgatctgacatttatacaacactccagcaacagagaatctacactcttctcaagctgaattggaacactaatcaagataggaaacactggcctagaaaaccttaataaatgtaaatggagagaaatcatacacagtgtattctcagaccacagagaattaaactagaaatcaacaacagaaagatacctagaaaatccctacatgcctgggattaaacaacacacttctaaataacatgtgggtcaaagaaaaagtctcaaaatatttttaaaacattttgaacgaaaataaaaatacaacttatccacatttgtgtgatacagcaaagcagcacctacagggaaactgacagcactgatgcatatgcaaccattcttctgttgtccgggcttccttcccagaccaccactaataccaaaatctgaggatgctcaagtcccttacaaaaatcatacagtatttgcatataaactatgcacacactccccacacactttaaatgaacttgtccaacccatggctgtattcagcccagggcagctttgaatgcagcccaacataaatcataaactttcttaaaacattgtgagtttttttgcctttttttttttttaactcatcactatcgtcagtgttattttatgtgtggtccaagacaattcttcttcttccaatgtggccagggaagccaaaagattggacacccctgctttaaatcatctctagagtatgtataatactaatgcaatgtaatacaataatatagtattataatatctaatacaatgtaaatgctataaaatagttgttatactgtatttttacatttttattatttttttattgctgtgttattttattggcttttttcccaaatatttttgatccaaggttggttgaatccaaggatgcggaaccagggatacaaagggctgactatattagaaaagaaaaaagatctaaagtcaataagcttggaatctatagaaaaagaacaagtgaagcctaaagaaagcagagaaaaaataataaaacagggtatacatcaataaaacagaaaacaactggataaatcatcaaaacaaaaaccaggtcttcgaaaaagttaataaatatgaagggaaaattcacaaagagcaaataaatagccaataaaatataaattgaagtttagtgtttataaaatgcaaagtaaaacaaatacttgtatggtatcagaatcgaaagtttttgtttgcattttgtttaattatattctttatagggaaattagagaaccaggtccaagtatgaatactggtacacatattccggagaatcattttgcaaaactcaatagctgtaaaatgcgttcatatactctgaccacttttataccttaagtaacctaaattgaacaagaaggggtactacatgctctttactgtattatgaacatgaagaaactgaataatccaagagatctattttaaagaaacagtaaattatgcagattatgtagtgtcgggaagtcaaaactttttctgtaaatggccggatagcaaataccaggctttgagagctataacagtttccatcacataatccttccttttccttccaatcctttaaaaacgttaaggatcttcttagcagctgacggctggatctggcccacaggccaaacagtttgccaagccctgattgcatctcaatcaatggtaagtgcagcatatatggggagccatgaaaaaatcaaattttaaatgtttaacaaaacaggaacatgctcaaaatattggaagtagaatacaaaaatacaccaagatatatttagaaatatatgcacacacaaatatttaaagactggaagaacctgcatcaactgttaatcctggcactgtggtggcagaagcgcaggtgatttgattctatattcaactttgttcccgactttctcttccaagagggtgtgcctttggcctctcatccactttgtctttcagtcccctcacccctccctccttcactttcctccttacccagactaagcgtcatgttcaccactactcacatgcgattttgtctgtgctcagttcccttgcccctctcttacaaacctcagtcctgttaaaatcccaggctctgcccaaggtaaaaaaccacatctcctaggtcggatttgcctcccctgcctgaagtttttctgccaaaagcacagctcttgcgctctcagaagcctttccttcgccacacacagagcaggcctatgctgctgtctgtggcagggcctcctgcgaggctggcccttggttggcttctggaaactcagcttctaaaaagtgccccatgctatgaggctgggcagcaaactcagccctaccagggtacgatgggagttatggagaacaccgccttctttctgggagtctggaacctgagtagttgcgaagcagaggattcctacgtgacagcccccagtaaaaattacgggcagtgagtgtctaaagggctttccaggcagaaatactcccatatgttactgtatttttcactgcttgagaaagttgctcaatcaatgtgtcagtgtcctcacaggaggaagagcctgtgcatggatttctccagagtccaacatgtctttttttgattgatctgtctgcgtatctgtcctcattcactgtgataaatcttattctgaacagagaaggcagctaccacagagggagcccccaaggctccaacccacagcacacaggctcaggatctgcaccaggtaaggaccacatggagctgagctgctggcagaggggaggaggctgtgggaccaaggaagctaccaaagtgaacttgggtctccgaactcaccacagaagcggggactcaggaattctgtggcaggttgtttctttctccctctactttatatgaaaaacacctgcaggaccaactcaagactatgaatggtcatcaccgcacaatgacatggtggctgcccctgttcacgtagggatgcacgttttcattctggacagggaacaacggtgaatgccgaccgtccttgcattctctgggtggacagtctggggctgttttccacctggccctttagatctcctcttaccattcctccaaggtgctctgtgcccagaggctggctccttgcatccgaggggctctctgccctctgacttcaagcacagctgggtggatgattgttctgctggttccctgcatgcggttccccatccccctcgggctccatctgatgctggacagcctcttccatagcagcagcgcagcagctctggactccaaaacccagtgcccccgccctcaactgccagtttcccactgggatggcctgggtgtctcaccatcctgttgcttccctcaaccctgccctgctctttatcatggttcctttacgtaactctcttctgttctctggtcaaatgtgccatctgtttcctacaggaacctgacagctgcagctaaagctgaattttgggaaaatggaaatgttacggcaaatcacaaagttatactgatggagagtgcacaacagagccttcccgtggctttcctgtgaacccatgttgtttgtaccatgtgacaggttcctgccggtttccagttatgcacagcatgggtttccatccacaacaggtcacatatacaatgtggtcctacaagattctagtggagctgacacttcctatcacagcagctgtcacagcgccgtggctcagcgcatgactcccgtgtctcggtgatgtggcattgacaaacctactgcactgccagtcgtggaagagtccagcacataaattatgtacagtacagaatacctgatattctcatcaatgaccatgttactgctttaggtatttactatactagacatttcatcgtgatttttagagtactcatcttacttatttaaaaagtaactgtacaacagcctcaggcaggtccttcaggcggcatccagaagaaggcatcatgtcacaggaggtgacagctccacgcgtgttactgcccgtgaaggccttccagtgagaaggtgtggaggtggaagacagtgatacagatgctcccgactccaggtaggcccaggccacgtgtttgtatcttaactaacaacaacaacaacaaaagtttaaaaagtaaaaataaataatttaaaaatcagaaaatacttctagaataaggatataaagaaagaaaaaaatttaagttataaagaaagttatagtaagctaaggttaatctcttactgaagaaaaaaactttttataaaatttagtgtagcctaattgtacattgtttacaaagtctaccacagtgtacggtgatgcctagaccttcacattcacccaccactcactcactgactcacccagaacaactgccagtccgtcagctccactcacggtacatgccccagacgggtggaccattttcaccttttatacatattattttttatgtttagatacacaaatacttaccgtcgtgttacaactgccaacagattcagtactgtaccatgctgtacaggtttatggcctaggagcaacaggctccaccacacacctaggtgtgcaggttatagcatctacgcttgtgtaaacacacactatgatgttttccgatgatgaaatcgcctaacgacacctttcttagaacatatccctgtcgttaagcaacaagaactacatacacaaagcagtgctaagccctgtggtgctcaatcctgcaagggtggtggcacatcactcggaaggtcagctctcccaccaaggggcagggcacactgggaatctggctacaacaatcaactgcactggggcatgcacagaaaaaaatatgaatagcatcttcaacaggttgtctttaggaggtgggttcgttcaacttcactgtagatttccataaagcgtgaatgaggataattaatgtaaattatttctaagatcagaaaaatactacttaaaaagtaaaagaaaaaagcttagtattaaagaacaaaaatattaatggagaaatgtaaacacatcatgcactacaatcagagtataataatataccataaacagtatcataacatagtccctaaaacttagtacttatgatatatacacatggttctgagcctttcaaattattcccacatttaatcccacaacagtcctatgaggtagcttctattttcttcctgctttacaacaaggagacagagctcagagaggttaggccccttgcccaggggcacagtgacaggtgagtggctgagtcccttcaagggatccttctgacctggttatgaaatggtgagtctctggtattacaacaatcatttcttctcagaaatatacttttattttctcctcttggtctccatcacctacgcatcccttcctaaagttaaaattactcggaataaaccaatgtttgatggcccttgccacagttcacgcaaagcacacactgactttgcaacaaaaatggctgcacagggaataatcagctgacttaatgactcagagaaacttctacattcagacacctcagaggacccctctaatttctggtcgtcgccctgtcaatcagcaaactcacggccctcaggttgaaatgtgttgtccacctggataggcactgtaacccttggccattgtctccaggatgcagaatatttattcagaggccaaagcagtgctttgtgctttacttccatctcctagtaatggctcagaaagacaaggaaggcggcgcagtggctcccgcctgtaatcccagcacttctggaggccgaggcaggtggatcactgaggtcaggagttcaagaccagtctgcccaacatggcgaaaccctgtctctactaaaatacaaaaaattagccgggtatagtggtgcatgcctataatcccatctactcaggaggctaggcaggagaatcgcctgaaccaggaggcagaggttgcagtgagctgagattgcgccacgcactccagtctgggcaacaagagcaaaactctgactcaaaaaaaaaaaaaaaaaaaaaaaaagacaaggaaagcgggttttgttgtttgttttactttctaatggaagatttgctagttcctttcaaaagactttctagagagccaatcatttcagtaagctacttttagattaacccattttatacagtagtcagtatatggaatataatatatgaaatttatatttgttttttcttcaatacacatggcctagcactctacctcactgccataatcttacatatggaggcacggcagataaagtgacttgtcccaagtcacacagccagctaagggctgacctgacccttccgtctcctcagtctgacatgaggaccccacagtgtgcctaccttgctcacccttcagtaccattccactaactagaaaactgattttgcaaatactattttaacaggggggcaggaataacaaactaagtagaatgactagttttttttaatgtaaacctattttttgcttattaatctgtactaaaaacatcaaacagaagtgaacttcttttgagagacagagtctctgtcgccaagctggagtaccgtggcgtgaacacagctcattgcagcctcaacctcccaggttcaaggaccctcccaccttaacctcccaagtagctgaaactataggcatgcaccaccatacccaataatttttaaattttttgtagagatggggtctcactatattgcccaggctggtctcgactccggggctccagcaatcctcccacttgagcttcccaacgtgctgggtttacagacgtaacgctgcctggccagaagtaaacttattacacattctgtttacattttgatcagtgaattttagtgacatgtgcagtgagccagctgtccctctggtcatcctaggagactactgtacactcacatcccatcaggcagagaaagaaggtaagcaccaacggcctaagaacaccaactcacagggccaagaacagagctgccatctgtaggcaccaacttcctaatttacatccaacgttgaggagagggaagttgagtgccccggccatccttgtgcctccaggccctcgagagcaaagtgttggtgcagtctgcacagagcatcctgggtagaggcaggaagcagcacagggaggctcaggccaagggctcgagacttaacacaaaaggcagatccccaaatagctactcagtttcctgcattttcacaagtcaaagaccctcaaattactccaatcttgatttataaatatcagaattatgatacaacagcacttctcattacaaaatcatctctgaattttgtagaattatagccctaaaagaaatcaaagtcactcactccagatacatctcctgagtgcacgctgatatgaggcctgtaccaggaactgggcgttgcagtgatgagaagcagcagggggtgggggtggaggacagacccaagcaggatgagattcccgggtggccagcaccagccaggacagagaggcagagctggggatcaccggtgggaaggtcaatgcacagagacactgcaagaggcgccgagggatatttgctgggtgtgcagggtaaaggtctgggccaagacctacggtggtaccacgctatccacagctgtgtgactaggtacgtcctcaagaaactgaattcaacggacggacactgcccggggtcactgtgcctgccagagcccagcagcaggcagaaggaaccagaaaagagagcccggccccagaaggcagcagctggtggaggagtgagagagtgggggaggagagggcatggaaccaggagaagggagtggagaagaggggcagcggtgctgcttccagggcagggagcagcatgaagacagacaagggtctgccgcatctggaatggcgaggccgtctcctggcaggagcagtttcaatagagtggtgcagatgaagacagcttttttcaaccttacctatcggtatggtttttgtttttcatttaatagataccaaagaatccacacaatagctgaaggatataagtcatatcgtattactcctctgcttcaaacccccaaacggcatctcatctctcagaagaaaacccaccaaacgcaccaagacctacccccttctgcagtggcctcccttctagtcctgccctcttccaccgcggcctcccctcctagtcctgccccattccgccatggctcctctcctagtcctgctccattccgctgtggcctcccctccccacactttttctggcccactggcttggctgctgggcgcaccttcccaccacactcctgcctgaagagcctctgcactgccaagcccctgccctctgctcaccccacggcccacaggacccaatcctggcctcactaggcctcatcccgagagaggccctttgtcacccctagctactcaccaccctgttactcgggttacttctctccctggcctttgtgacctgacgcagttttatctatttgtttactcttctcacctactaaaacacattttcaaagacatcaagaattttatctgacactatatctctaaatctggaacggtgttgcacatagtggaagcaaaatgcctgttaaattaataatggcctcaataaattaagtatcagaccaggggattcaggagctgtttggaagaaaaaataccttaagtattgggttggtgctgctaacacctaacttgaaacataattatttcaaacttcccaagtttccccatcatgcaagtagaccccagacatgcagcagcccccacacagatgcactacagtaatcgcaggtggtataaagtgcgattgtcctgcttgagccacggccctttatcgacttcaggtattcaatgtcctctaccacctaagacaggaaaaattccaatttaaacagaaaccccattttagaaatttaaatgaaataacttttttttgagacagggtccggctctatatccaggctggaaagtagtggcacaatcacagcacactgcagccttggcctgctgggctaagcaatcctcccacctcagcacctcagcctcccgagttgctgggactacaggcatatgcaccacacctggctgatgtttgtatttttagtagagatggggtctcaccacgttgcccagctggtctcaaactcctgggctcaagcgatcctcctgcctcagcctcccaaagtgctggattatagacgtgagccaccatggctggccaagaggtaacattttaatacattataagcttgaatatttggcaggaagaatcacaccgtaacagtcagaatggaagtgaagctggctgactttaatgaaatggtggggttgagtgttgcatcacagtatggccttgcctagctaacaccagggatcaagtaggacagacattaccctgcaggctgggagaaaaggacaggtgagaacatgaagactaggggagaaaaatcagccttcaggacaggctactcatttcttcccaagtagttccttctaaaaggcaaaacctagcccctcaaaatgacaaaagaataagatacaaaccattacctagagagacctaatgatctaggtgcccggcctcaaggctggctgtctacacagctgactttccagaggagtaatctttccatacgcattctctcctcacaacaggccaaactatgaaccctctttagtttcgggaatttgagtaaattcaaaaatgaactcaaataacatatattggagacaaaacgtattattcttcttctaagatacatgccacctaaacagtctctcaaggtatataaatactctaaaaacagaaacagaaggcggaggagaaaatgaaatgtaattaatcagtctgagtagaataaaccaaggtctcaaaagaactttacaactggtagtaggaagcctgggcgagaatgcagggcttccctctgcaaggagaatgctactctctgtgcagaaagctcagtcaacctccctcttctcaccctcccaatgctgagaggcaactgaagcacgctgtcaccccagcagccaactatgcaaagcttctctgttacacgggcaccactcacacttcagaccagatcctgaaacttgtattttcttctagaattgttacacctcgttttgtttttataatttatgcttaatatataaaatacaaaataaaaaacttgttttttaacaaatggatgtcagttgcctcagtaccatttaggaaacaattttcctctacttcatttttgtaattatctttaaggaactaactttgccaaactgaagatacttacacacaggtgcatacatgtttctgactcttgttttgttccattaagctctttattaattcttgcattaacaccacaatgctcccttactacaatcgtatagtttgtttttgtatgtgagagggcaaatgttctttcgttatcttcttcagatgttttaatgtttgtctggctgttattcataaagttccctgaaaactacccaagatttactagactttcacaaaacacacgaatttaaggaaaactgttatctttacagtaaatctttcccattaactaatccaactttcaattttccatctctttaataaaaatggagagtggatgacccaagattctgtgacatctgtaattttcagatcgtagaaaccgaattcttgaaagaaactcgaaacctcatggccaggggagtgtgatgatgggtttgactggcacgctttcaggtgataaaacagtgatgtttgttaagaccagtgggaatctaactgacgatcgatttgcaagaaccttacacatgaatcaaatgtaggaataactttcaacttttcaaccatttcttaccttttttgaatcttgagcttcccttgcagaatattgtaaaacctcacattttcactgtaagaaaaaacaagatgaaattcagtgtaaacttttccaagctgaagttaaattacaaatgaatacataccgctaaagtctcctgctcaaatttaaaacctcacattctctgactgggcattgtgctgggcatgtgagggtgcattagagcttgactggttcaggaggacagttaaaagccagaatgttctcatggctggcttgacagtgacaacagcaggaccatttcccgtttcccttctcctgactacactgcccccaagccaagggcgtgacagaccacagccatactgtccacaggagcaaggtacatgagccatgtcagcagctgcacataccatcgccaaagcagtgcccgctgcacggaaggacaacgaagcccagggcctaaccgagcacaggcagaagcatctttacaccagagcaccctccacagcccagggcctaaccgagcacaggcagagggatctttacaccacagcaccctccacagcagggcctaaatgagcacaggcacagagggcactttacaccagagcaccctccacacatttaggatgtaaacatacagggtaagtaaatacccaagaatgtacaagctatttattctcatactgaaatcagcatctgacccctacaatggaccaaacaaacttcaccaactctgctgaccatcttcaacagaccactggttgattaaatacgtagtacaggtaaagtgcttgtattttattaagtctcatcattactgactcacatcattccaaagtgtaggaaaaagaaaaaagtcttcaagctctacaatcactcagtaacacattgttccacacaagtctataactcacaattcagagtcatacaactggataacagattcttctgcaacgagatcactgcactcctcacagcacccttaagatcaacataaatggtcagaactgcaagcagaatgaacaataaatccatagtgaggaaagtaacttactgcatttgccatagggctggcaaggaaaaggccacactaattacaggacttgctgtattgcttcctgaaccctacagctacccattgttaatacgaagagaaaggcacaaagtgacaaaggagaataattcctctgcaagtcacctaagtgaatattcaactgaagtgtataggagacagaggtcttaacatccctgatgaacagggctggcacagaaacattatttgttctcacacagcaatatgaaggtcacaaactatttgacatatttgcacaagagtggtcatgagagatcaggacgatgtgcagtttcgttcaacacacataactgaacagacattagctgaagccccaccaggagccagtgctgtgtggggtatggaaggtggggaagacagggctcctgcccttaatgagctccagacccaaactacctgatgagagcaacctggagagtccattttctatcttctgtgcgcctccttcagcatgctaacaacctcggcaacagacaaataaaaccgcctccgtccagtcacaccgcctctcattcccactgccttgtgaaaggaggcctaaaataagaaggtatcaagtgtgggtcagggatctggaggaaacccccataaagggctgggccagcagttcacgtgcaacctcatggtggttattcctataggtagctcagggccgaggagagccacaagctgtattactgacccccaagttatttcaatacttccagagcctccccagctcctcacccaccttagaacaactgaaacaataaagacagttacaaaactcgctacatgtcaggctggtcactcagtgctctcttcttgtctctgaaatctcagaggtgacgattctttctcagaaaggccttccctacttgtcttgtgtacctctgtgtctcagctaacactgacactgggagctagcagtgttggagtgagtaaataagtatatgttgaacacgggaatggccaaatgttggtgaaactaagttgaactcattaacacattcacaattaaggtaatgaggagaaagacatgtacgcctaagatctggtcataaatattgacaaagccagaaaatacacattcctatgagagttagctcattgtactcttaaaatcccacaatacaaatattttggaaaaggctgcaatgctctttatgcattctaagcaacaaatacaaaaacagtgaagcatcaccatgtatcagcacgtgacagagagaaggctaacacaggaggaactgctcaaagacaggagacacagaacttcaacggagccatcacttgtcaggtcaatctgctttatttcaaatactagtattaaaactaaaaacatttctctatttagttttgattttactgtttattaattatctatgatctaacaatattgtcttctaagtctaacctaagatctaacaataaaaatattcagtatttaactaaacaatggtttaaattacaagcccgggaaacctaatattgtttctgttggaaaataactcctgaattctaaaatctaatggccaataaattttaaaatacaactcgtcataggtttcttgcaattttacaaaaatagtttcagccaaatttcatagtgaatttctatgagaaaacttttaagatccaagtcctcacaaagctgcagtttgatcttggtctacaattcagcacttaaaataatgcatactgctagagtacatctggtactcattcttcaatgtgtgacaaatgacccctacatcaagtggccccatcaatccatacggcttgagctgtcagataagatctactttaacaatgaacagagatgtatctgttcctaaaacaggagttaaaaacacagcaagaccaagtggtaagaaataaagcttgaggcttaacgagtctatgagggcggcaaagtaaaagaaactcttgccctgtgcaaggctgaaaccagccattattttgctgatgttgtagctagaaactccatttgagaaatttgacaaagctctttctcagtgatgtttttgaagccagaagatctccaagagtaatttttagcctgaaactctagggtcaactatctctgtttatgctgtttattcacgttggctctagtacttcccttggtattgtggccttggaaatagggcagtacaacaggttaaaaggaagccgaggccacccagtcttcttaccacctaagaaagaaacgctcaccacaaacaagcagagagacataaacgttaatacttacggtacagaaaaaactccctgaatagaacatttctcttatcacttttgattttattattacctatggtctaacaatattatcttctaaggctgttcatgtaaatattcagtatttaactaaaataaatgtaaaaataaaactttttttctaaaattgtatacttttgtttttattcacaacttcagttactttgaaattttaaacaacaagaacatagatttttaggcaccgaaagaggcttagggttttaaaaagtatgagaaatagtataaaatcttcaattcaagcattattcaaacaatctgagtttaactggacgtgaatgagtgtggcgacattccttacacacgaatatacccaaggagcgcagaatgacaagccataggatgagtaaaccacattttccatgtgctttcaacaaagaaagaaagggggaaaagaaagaaaaacatctggtggtgtttccttcatctaatccaaacatctctcaaggacatcaattaagaatgttagagaaagtgttatctttcatgaattttctccatgaatacacttccaatcaatccttcaggtaaacacgaatgtttagttgccacctgaagtaaaaatacacaagttctctatggtaaacctgtcatggaatagagcttggtttacttctagcatcaaaaaacttcagaaatatagagagcaaaagtactgacaagataagcaaaccaaaacaaataaaccaataaaccccacaaaatcaaactgaaatgtctcctgtttttcttatttataaacatcagattaaacatctcagcaatatccactgcagtaaataagacagaaaactccctgggctgttggggcctaagaaacagtggcgaagaagttttagccctgtaaatcagtcgtgtgtttggctcacctcatctcaggagaaaggttttcttataggcattctcaatgtcctgtagataggcagaggtgatcttcattcatgtggctaaacagaagcagaaaaatcaaactgggaaacatttagagttcattctcttgacctgtgcgtatataaaatgcgaagacaatcactgaccaccattttcttacaactccaccgggcactgtggggactgcggggtgacagcaaagggtcccaacatcagctagagtcttctccttctactacagtgaacacctgagcctgcccaagtgctcccatagcgtgacttttccacacattctaagatgtatacttagggcaagaaagatgcctgttacgaagcagcactcctgtctttcctgtctgcctcgtgcctgagtgcaggaatgaaagagcaccaaaaattggggcagcggcctgtctgtccgccatctgtcctcagcacactctcttcttgtcacctgacttccctgcatctctccaacttgctcgccacctccatcgctcacccatctccccgcaaccattctcccactttctacggctgtcacctctctcatcatctgaaatgcactatgcgaatttagaaacttgaatatctaattatgagtagcaagttttaaaatttaaaactccttacagtccacactatcttctcagcccgttttgttttcttcacatcatttacctctatttgatgtattatttatctccttgcttgctgtaggtctcccccatcagcatatgagctcacgggtgaggcctcatccaccctgctcactggtatgtccctagcaccaagcagggtctaggacagggtgatgctcaatcaacacttacaggagagagaggaaggaagaaagaaatgaataggcctgcgtttcaacctacaaaatgatgaaaacattctaaaactggattatggcaagagtggcaacacttggtaaatttacccaaaatcattcagtcgtacccttaaaatgggtgaattttatggacataaattatacctcattaaagctgttcaaaataagaaaaaccctatcattcaaagaattttactgaacatgtattaattccagtaatgcgacggggcacagggaaaggatgatacagcaatgctgcacttcattgctctgtcaaaagggggaaaggcagtaattgggagttctatttccaataaggacttggtgtctgggcagagaccatctttgttcatctttgcagcctcctagtgcctggcacaggcgccttgcatataggaggtgctctgtattagaggagtgagtgaaacaacaaaagtataaaagaggtgatatgattctaaatctctatcattagctatgtgccaatagaataagattaaatgttaactgattataaaagaaactctagtgtaatataagcccatacatgcaacataacacaaccatctcagaaatctgacctgaagttacttgataaaatatgagttattgatcactttgactgttttcttagaatctagaaatggttttcggatattcctacagttattcccaaaaggtgcaatactgagacacagactgcattgaaataaaaatcaaaaaagaacacagacttactgataatgtgatgtcttttataaaatggggtaattttacctgagacagtattgaagactttacttggaaaaattaagaagttgacagctctactttagacctagaattatttttgaaatactgttttcccagataacaaaagaattatctagagaatgttaatgtatgactttgtttttctcaataaatgtcagcataataagcaaaggtgtccagttagccactgagaaacaaacattttgaacttgcagttccctccttttgccacttgatggaaggtcttagaagtctagctatacaacatacttacaagcatatgcttaaacaataaaagttccgagtggcaatagaaaggcatacatagacatctcgctgtttctactattgcaacagagaagaaagttagtcccatggatctttcaggagcagcaaaaaataaccagagctttactgttgcctgacaagaacccaccatccagagaggtatttcctgagcacctacaagaattccggcatgaggatgggcatcagagtgaggaacaggcaggtagccctgcattttcatcacagtatcaaaaggagaccatattctcctccaggaaaaaataacatagtattaaacaagcagtgaaacccgtctctactaaaaatacaaaaaaattagccgggcatggtggcgtgcgcctgtagtccagctacttgggaggctgaggcaggagaatggcgtgaacccgggaggcggagcttgcaggagccgagatcgtgccactgcactccagcctgggtgacagagcgagactctgtctcaaaaaaaaaaacaaagaactcgccacagggcaaagacggtctttgtttcatctcaggatcctcatcaagccgccaacagagctaccaacggccacagggtcacttcaaaaggcgttgcttcaggccacctaattaagatccaatgaaaactacaaagagtaaatggatgtgtgtggatatactgctctactgttctagaattggtaagtaagaaaaagggggagaggcacgatttgcgtaaatagattgaagtgatgagggatattagaaattgcttccaatgtggaagaaaacgatagacacaaaaacctcatcagagaacagaaaggtacgtgacagagggatggaggacgctctccaggaggccctcaccagcctcccaagtttaaacagctgaggggactcggggaccacaggggaccgcagagcactggtgggcggcaggcccgcaggctgtggcaccaggccgagccatgggtctcccctccacccctgcagatgccctctctcaagtgggaacagggtgtgtgtcacctcctcgtgaggactggtaggaattagtataaatgctattaaaacagggcttttagtgcgatctgcattcaaaatagagatgcttggcctttgattgaaaactgcattacatctccttcttctgaatccgcctctggacctctggaacgggcacatcgatgtaaatcaccaggtggggggcaggtaatcgcagatggtgacgctcttcacctcgttgtagtggtccacacctggcaataggagaaaggggcgctgtcacctaccagtccccacacgggtttccaaaacacactccccttgaataaaagggcaaacatacacgcaattctcaaagccacgtaccaatctacaaacctatctcggtcacagttctaagcactgaccacacacatggcatgtgactgtgctccagggccacggggcatgtgcagacagcagctgtggtgcccacaaccctgaaaacagggcttgtgcctccactgtatttacaaaccaaaggtctgaggcccagagaaattaagctacttacacgagtaaaacagcagcatttaaactgtgaccttaatcatcctaaaagacagatctttagccatcttagccacatttaagggttcacttttgctcctgaggcaagacgtaggtcacgcaaatggaggtcacagttcagtgatctttgaactgaaatatattccatatacttgcagtataatgttgcaggtatatagtatacatgctactatatttcttcacagtaataatagatacaaagtctggtcttctctgaagaataaagaacagctttaaatactttatttttcaaataactagctgaaaatcatcaagctgcatttatcccgtttcagtagtataatcagctgcacagaatatctactgagtcagatttagtgacaacatgaaattgaaagcagctaaggctgaggaatattctcctaaagtgatcactacacagaatgcataatccagggggcacccgcagggcccggccacccaagggaaccctgccgctcttcagagcactctgcacctgcacatgctcatgcaacccgacctcccagaagccaacagagagtgcacgccagtgcatgtggagaggccatgctagaagccatcccctctgcagcttttcacgtgtggaaccttccagaagtgacagatggcctgctagggtccacagaaagacaactattttgctttaaaggaaatgggctgggcacagtgctcacgcctgtcatcctggcactttgggaggccgaggtgggcgcagatcactggagcccggagttcaggaccagcctgagcagcatggtgaaatcccatgtctaccaaaaatacaaacttagccagtctcctaacctagtctcaaaataaataaataaaaattttaaaaattaaattaaaaaaaaagttccagtgagcattcctagtaacctcactctagaggcaactgtgggatggcctttggctcagggtcaggaacggcacgagctaaagaacaaggaagaccacccaggagaggtgtgacaaagcaaaggacggaggctgccagtggagtaccgttcacctgagcatacaacacaaacccgcagccaggcagagcacacgggacctcgggtctgcttcctgactgctggccggtagcaggccggtctctcctgctgctgaggtgaaacctcccttcaccgagtctgcttcaccctgcttcccaccctcacccttactcctgtcagtacacccacttctcaggtggtcccaccttgctctatgccacctgtcctttagccaacatgatctgctttcccccagcccagactcaaacgactctggctaacatcaccagcccccgaaaggtgaaacgtgacagtcactttcagttcccatcagagtcacagcacatgtgacaccaacaaccaaccctccccacatccctctgcttcctcctgtgcacctctgatcattcagcttcaatccctcagtgggggtctcataccccagaaatggtccccaaaggatctggtctcagccctcccccatcaccccttgggcttcccaaggaaagcatgctcacggtcagtgctggacccccaacgcctgcagactccagccaggccagtcctcagacttcagcagacactcagcagatgccgacaggtatctcctgccacttgccatgggaacctcacactcaggaatccaacgcccaaacatgaagccacatcggtccctgcccctgtgcatccttcccccttagcggcccactagccagggcaggtccacgccactcccactgtgcacacaggaaaccacccacccaggcctgcccagtgtccctcctgagcggcactcccactgcccagtgcagcctccctgctgtgcacgcctgtcccaccccaatttcctccagataggctccttccccttccgtctctcctcaccaaatgcatccttcagatgaaggccgcaaccattttaaactcacatctaaccatgtctctgccatgctaaaaatcctccagtggccctcactagtttcaggacagaagccaagcatcctcgccgaggcgcagctccttcctcggcagcctcatccagcatcattctcccccagcacccagccctcactataggacaccaccacagcctgtggcacacgcaggcttctccaccatccccacacgtccctcactcccactgcgtacagatgacaggccattcatcaaaacagctgtccctgacactatcccatctcccagccgttacacatttctcctatgtgcccccaaagcacccaggagtaatgctcaggagtgctaatacactttattacaatgaaccatccccattggttcaacagcccccaaccccgggcccgtggagccttgtcttaagtttcttcatattcatatccctagcacctaagagagcctgccacccacaggcactccagaaacacttgctggtgacctgacccgctgctcagcatgtccagggggatcagcccctatcagaagcacgggcttgcagtgctcttgcgggcggcaagctcacagtggagtaccggcaacaccaggacacacaagcagccagaagcaggcgcctcctccacagatggtcacctggcttgcttcggcctcctctttcattaatcaacagtacttcctctgagctccagattccagctttccactggctccagccaccccagtctacagatgaaaatgccgtcatcagactgtccaccaggcctattcaacccaccgcccaacacagtcctagtcacagacacccaaccccaccctgactcctcaaggtcagcctgcttcaaaccagggggtctttgttccttccatttgccacttgtcagaccttccccaatacagcaacacaaagctactgtcctgaaaacggcagcgtgtcagagggaagcactgtgatgatgctggcaactggcagggctaacatccaattcatcaaaatcacacactagaaactggaaagtctgttacaattagagctacagccaggtattgctagggcaagctaagagcgggggaggttctaacgggaggctgtgggggctgactttaagctgcgtgtgtttgaggtccagggctccaatctgctttcacagggagacatgcagcacaaaagacacctatttcaggagggagaaagggtggaagatacttaggaagttccttttccagcggagaccgattaagtaatggcatttattcatctatctaacagacattcataacacagtaagtgcaaggtgagtctatcacagcccttgcaaagtcgcaccacacacccaaagtgggtctgcaatgctgactcacactgctttcggatgaatccctggttgtacatcgctccaggaacacaaagtcactgaagatggagcgctccaacacaacaccttgtcctgtttaacataggcaaacagaaattgaaaatcagacagatagcaaagcactgtcaactgatcactcattccagagaaaagaaaataacaatcatttacaattccatttccacaccaaaatactgaaagaacatagacatatttgtaagtgggaaaccattttcaaaaactgaagtatcttttcgttttgagcaatataacatcgtttcattaagtcagctataacagaaagcatccggttaaacaaaaagtgcttgtttttaaataacgtattccacccctacagtgcccacccccatcctctcctgcccccaccattccagtcagatctactgatgttgggctacttctcaacctcaccctgtccactcccagcctcactggctgtgttactatcacagcagccccgacggacacttggcagctcagagcactagtccccagggtccccagccagcctccttgcagtcagccctgcttgtctgggcagaggcctcccctaatcttcctacccagcctctccccacagcctccttcccagagcagccaccactcacttggggcaagacattcctgtttccacatcgagtcttcatcctctactaaaacacaggcttccctccctgtggcgcccttagctcccagaatgggtctggacacagcagacatgcactaaatatttaatgaatacgttaacccagttccaatttgccccagaatactgagatgggagcaagctgcactttttttttctaaatgggaaataggttactaagcaccaaaaaaagcaaggctttatttaacaagtaaaatgtttctttttcattttaagaatgagtagtcagaagacagggttgaagaatgctttaaaaagaacgtggaggccgggcgcgtggctcacgcctgtaatcccagcactttgggaggccgaggcgggcggatcacgaggtcggagatcgagaccatcccggctaaaacggtgaaaccccgtctctactaaaaatacaaaaaattagccgggcgtagtggcgggcgcctgtagtcccagctacttgggaggctgaggcagagaatggcatgaacccgggaggcggagcttgcagtgagccgagatcccgccactgcactcagcctgggcgacagagcgagactccgtctcaaaaaaaaaaaaaaaaaaaaaaaaaaaaaagaacgtggagtaagcctggatgtcagtgtgaagtccacgctacgacatcagctcctgattggctcctggtaaagaacctcaaaccagaaacagcagaccacattgttttcttaggataacactaaccaagatcagggtttacgttcatataagaaaaaaagaagcactaataaaagttttcaactttttcaaagcaagacaataactccaccaccgtacaactgtgtagatacggtcatggacacacactgcatccgtggagacctgaaggagcataggcagcggctcctagccagctctgagaagaagcctgtgagccggccactcccagtgaaaaccacattcttgttctacggctcagaccccatgaagccaaccctagtggcggctgagcttgtgcgtgagaagctctcaggggcactgccaatcaacgaaagcagcaagcactgcaatataaaacagacacgaagccctaagagtccacccatctccctctctccgcacacagatgtgccatttgctgctaccttgaactgaggaccgccgtggcatggtagctttgaccaaaaattggcagtgcatctgcggccaactctcaggatgtctagcatgcactgctgtttcccagaatgattacagtaacccgtgctggaccctaacctcattctgcacacaagtagtccatgttcatgccctttcatccacctcccttcctctcctaactatactttctgatccctgtttccgtctcccaggctccccagtcacagctcttcctttctgctttggataccttcaagggaagcatcctcccctactgcactgcctatgggaccctgtgtgttctgcctccccccgtcatcttatcaagattcacgtctgctcgtggctttatggtgattccggcctatctctgggccctccgggacaaccctatgttgtggcatccacatctctgtctgcatggcacatgcacagtcttcataagtgtgatcccgtttctcctggacacttctgtgctctctttacccctttgttttgacacatttcatatataaataatatgtaagtatagaagcttaaagtagtgccttgagaattctatacaatccataaatccactccagtatccatagtgaaacagcattaaattaattctgaagcaaaaataacacaattcaagaaattcatgatcttgttggaaagacagaactcacctcatcaaacacccttaaagaaagctcgactcagtggcaatttaacgtggttgaattctagaatagtgttcaagtacagacagatctaactgcccagaaatactgcacctgtggtcagcaagtgctccaaggcatctggtactgcagcaggcgactgctgtacaaccaggactgcaggcggtaactgttgccatcatgcttctcggatcatcgtaaaatttctccaaactacagttgccattatagtcggtggcgagggcttcccatctcctgtggtactgtctggataatgaatccccgcttcaggaaagtgctgaagcctgaaaagagaaacagtcggatgcagtctgatgcacatcactcactccccgcaggagcagtggggactagccaaaacacacagcccgcccgaatctcaccgccagggatggagcaatgacctagagaaagtcacctacatgcctgggtttcatcacgtatgaagggaacacaaacatatacaagcaagcatgtgagcgaaagagcttgcacagtgcccttatccaggttcccctgaaaggactgctccctgtaaccacaggagccccctctagcgggcagctgctgtcatcaggtgctacagaaaggtacaatggacactcagctgcaccaggagtcaggaaggggctcaaccttggctttgggacccagctatgtggcatctgctcactcaggagtacacccatctggagtgagtaccatcctcggctctatttcagaggctgtcacaaagttcaaacacgacagttatgtggaagtgccctgcttacactgcccacataaaattccaattcaaattgacaaccacatggattttcacaaattttccaaacataaaagattaaaaacagctttttcttgtttcgtttataaaacagctttttcaataaacaaaaatgtgaaatacccaccttaggcccaattataaatatttaatattatttaatattaatattgaagaaaaaccagtgaaataagcaaccaatatctgagaaaaaggtatcattctgtgtaacataaaatcatacctagtttctctgctattcttttgcaagtttgccttttccagtacatatattgccatctacagttatcactctgcgcgttctgtcagtcttttgcttgctttatccccaagtaggaaatgccacattccatagccagcttgcactgcacactgctatgaattcctctctgaaaaacacaaaatcacacagcagacattgtgaccactctggttcctgtaggcattagtaactattaggtaaaaataccaagaacctcttagtgataaaaatgccaacatctacatctttattgcctattaatttgtttaatatctgtctatcccccaccactctgtccatgtaagtttcgttaaaggcagatatactgtcgtttgttcactgctaaatcctcaggccctggaacaatgcctgaaatttttattaaatattttactatgttcaataaaaattggagggagggagggaggggtggatggatggatggatgacggacagacgggaggaagaaagacagggatggagggaagctcaggagtgaagggaaggaataaaaaacatttctctaatccaagcttctgtccccatgtcctgacctcgttaccccatgcctattaaacagctccacctagatgtcctgaaggcacctgaaggtaacagagctaagtgaaatgcaacatccatatcctagcccccaagtctgctttccctcacagcaaggaatatcactacctaacaagcaaaagagagcaaatttgagtgtcgtctttgatacctttctccttcttcaactgcagaattacacacaaaatcctaactgttcagactctctggacactgcatccctccctatgccatgtgctgactctgtcggcaccctcacacctctcatctacaaggcaagacctgcttcaatgcctgtctccagcagcccaatttactctccacactaaagtgggaacttccttccaaaaaaagaaaagaaacataaccaaaagtaaaacaaactgaagaagttcaaagatatgatggggtaataaccttactatatacagaaattgtacagaacaataagaaaacaagaataaaaacacacagcttattttaaaattataaaatatagccaaaaaccacatgaaaagtggtcaaccttgctacaaaaaaacaaaagactattaacaaggaaacattagtttttatgtgtcaaaatgagaaataatttaaaaaatgattacagagttaggacaagacaatgagaccatcctaaactgctaatggtaatgaaacctagaggacgctgggtctacagcattaggatccattcaaagagtatatacataagattgacctataaggatgctcaatgaagtatgattaacaccaaaaatgcaaatagaaacccttaaatgtccaacaacggaggaatagttaaacaaattaaggcatatccatattatggaatactaagtactcagaaaaacacaaaaatattaaatactttatagtgaaatttaaataaaacaggagaatatgaaatatcaagatatttttcatcttgatttgataactgaagagtaaggaagaaacaagttacaaaacaaggcaaagcagcaacccaatttaaaaatgggcaaaagatgtaaacacctctcgcaaatgaaattaacgcaatagcaaataagtatatgaaaagatgaacactgtatatcatgagatattccaaagttgaacaagataccactacgcagctatcagaatggatagcaatccaaagtaaccgacagcccccatgctggcgagcacgcagagcaacaaggagagccttcacttctggtgggagtcaaatgcacagtcactctggaagatggcttggcagcttcttagaaaactagtcttactacatgagaatcactcttccaggtattacccaaatgatataaaaatgtatttccaaaaagaaatctgatgtacacgattacagcagctttattcataattgccaaaaacttgaagcaaccaagatgccttcaattgctgaatgaattgaagtacatccatgcaatgagatattactcagtgattaaaagaaatgagttaccaagccacgaagacataagtgaatcttacatagatatttccaagattcaaggcgtctgaaaaggcaatatattgtatgattctaattatatgacattccagaaaggcaactatggaaatgttaatgagatctgtggttgtcaggggttggagaaaaagaaggtttaataggtaaagcagaggggaattttttaaggcagtgaagctactctgtacgaaccttaatggtggagacatgctattacacacgtgtcaaaacctatagaaccttatagcacaaaaaaaaatccatagaaccttatagcacaaagaatgcgctcaatgtatgcacattttaaaaacgcattaggtagaaggatcccaagatgtaaggcagaatgtgacaaagcaatccaactggttacaaatgtatgaaacgatttcactgaagaaggtgggggcaaaatgctaagaaatgaagtagtcagtcagagtaaaggcaaaaggaagcggacacaagcactgaactccgtgtctgtcaacatggcatcacccaagcacccagcagggcccgacctttaaacggctcttgacaggctgctacgtgaattatctaatgacaagcgcgtgtgcccccggcctgccacctgcacacggcctcccgcatcagggcagcctcggggccctgatcacctccgcgctccagcgttttgctaaagctgagataaaatggcctggagaagctcgtggccccctgaggtctgtccacgaccaagaccaaacaattccggaggcaggaggggtcccccaaacccacccggagagcgacctggagccgccgccagaggccgggggagatgtggaactgctccccaccccgccaccccgccacctgccaccccgccaccctgccaccccgccgcccgctcaccacgcgctgggcgcccgccgcacgacccgggcggacgcggacgtcgctgccagcttcaggagccgcaaggccatggctaccggtcagctcaggatcaaggacccaaggggacgcggtcgcgacggggccctctctcgcgccggcgcgctgccgtgacgtcacggccggggtgcccgcggcgcctgtcgggaaccttcagggggcggggccgcgccgaggccctcgggggcttccgcggagacagccagtgcgctgcagggtcctgcgggttggggcgagggccgagaggtgggagttggaggtgaacgtgggggcgcatgctggctgcccggcccctgcctgggttctgagttgctgcggtgtcgcgggagctgggccgcccagggcgtggagcgacttctgcgtctcgtcccagggtcctgtgctccccgcaaatcccccaggcgcggtgtggacgtcaaagcgacctcctagagaacattcctagctctcgaacgttctcgctggggagggaaagtggaaaaagagggggcgaggagcggagggacgggtgggacccctgtcgcggggcgcctgtcagggagagggacctggcaaggccggcctgggtgcctccggagctgaaggctaagtggtctcatccaggggacctgctgtgaacacattgaaagcatagaaaacaaaagcacacgctccaagtccatctcttttttttttttttttttttttttttttttttttttttttgaggcagagtcccgctctgtcgcccaggctggagtgcggtgcgccatcgcgctcactgcaagctccgcctccctggttcacgccattctcctgcctcagctcccgagtagctgggactacaggcgcccgccgccacacccggctaattttttgtattttagtagagacggggtttcaccatgttagccaggatggtctcgatctcctgacctcgtgaccacccgcctcggcctcccaaagtgctaggattacaggcgtgagccaccgcgccggcaatccatctcttaaaatgtgctcccgtcaggacctgggctctgggctccacgaaggagcctgcatgtgaggtttccttccaagtatgcctgctgttgggaagggtttttataatcttttggttccccaggctttttgttcttaaccccttaaatattctttaactttgttttcaactttcagaaatgatcatgcgattgtaaaacagtgggaatgcagctgtgtaaactacggccggtctatggatgtttctataattgaagaattgctttttgtcaaaaatacggattcccggtcccaacgcaggagggtctggtttttagatcctggagggcacctgaaatccatttaacaagcttagggttcatgtctgctgttttttgccttgtttcctttgcattttttttttttttttttgccttccaatggatacagtacatttttttagaattccatcttgatttactgataatgtttgggaaatatcattatgtatagttttcgtagtggttcctctaggtatcacagcacgcaacgtaacttctcacaacctgtttgcgtggatgttttgttgtacctgagcgagttagaaaacaccacctttgagacgaattaagagtcctttattagctggcgaccgagagacggctaagctcaaaattctctcagccccgaggaaggggcttgattaacttttataccttggtttagaaggggggggggtctagttaaaacaattttacagaagtaaagtagtcaaaaagttaaaaggtaaatggttacaggaaagtaaacagttcaaggtgcaggggctttaagactattacaaatgatagacccggggctttgggcgttatcaatcggacaaattcctgggaactgcggatgagcttgccacagtatcttaccagttaattgcattcttggatgtggtgggagtcagcctgacaagttaagtccttgagaaaggggctgccagtgaaagagccaagatggagtctgtctgctctcttagctaagggagagtcaattcaggtggaaacagggctaggtgattaaaggaaagggagagtctgaaaacagttagtaaaaaccaggttgggcattacagttttactggttcagggaagtattactatatacttccccgtccctccgcttctcgcccccctttttccgttttcctccccagctagaacgttctgagagctaggaatgttctctaggaggtcgctttgacgtcacactatattagacagcatgaaaataacttcagaccccaatagaccaatatctctcgtaacttagacacaaaaatccttaacgaaatgttagcaaattgaatccaacactatatgaatgaatcatacaccacaacccaaggtggtttattcagaagatgcaaggctaatctggtattgaaaatcaaccaatgtaatacaccttaccagcaggtgaaagacgaaatctatgaccagttgcctgatgcagttttctgcatcacttgacaaaattaaatactcatttatgataaaaaaaaaactgctctcagcaaataaggactaaaggggagctgcttcagcttgataaagcacagcgtgaaaactctgcatcattgtacttaatcatgaaagactgaatgcttgccttctaagaggaaacaaggcaaggatatctgctctgcccactcttattcaacagagcactggaagtttagtaataggccatgcagtatggcaaaaaataaaaaatgaaattcatacagatcagaaagaagaaataaaactgtctatttttagttgacatgactgttcacatagaaaacccaaaggatctacaaaaacctcctggaactaatgagtgagcgcagcaagtttgcaggctgcaatgtaacatatgaaaatcagctgcatcctatgtactaacaacaaacagaaggaaactgaaataaagatggaataccatttacagttgcttcaaagaaaatataatatttaggtctaaatccacaaaacacacacagaatctgcatattaaaaagtacaaaacactgatttaaagaatgaagcctcaataattggaggggtttactatgttcatggattgaaagactcaacagagtaatgagtcagttcttcccaaattgatttttaggtttaatggaatttctagcaaaatctcagcgagttctcttgtagacattgacaggcttactataaaatttatataaaaatataaaggctgtcaatagccacaataattttgaagcagaagaataaagtgggaggagtcactcttccagtgtaagatttactacataatcatataaatcaagactgtgttgtatggatggagggtgtgatttgatagatacgtagatcaatttaacagaacagaggatccagaaataagccagcacaaaattctcaactgacgcagtagtgcaccacacaatgacatttggtgaatgatgaactgaacgcacataagatggtggtcccataagattatgacattatattttgacttaccttatctgttttagatgcataaattatggatgagcacagtggctcacacctgctgggacaggtgggacgggtttcacccagcataatgtattatgtatatataatacacaatacagtatatgcattacccagtatatgtattatcccagtatgaatgtattatgcattgtgtattatacagtataatgtattatttattatgaatattggatagcaatgagaatgcatgaattattgttacatgcaaaacatcaaggattcactcaagcaacacggtgaatgaaagaagctgaacataacagggacatactttatgtgtaagcccctcagaaacaccaatgctagcatctggttttggaagtcggacagtgctttttgtggagaagggttaatgactgggagagggcgtgaaggcagcttctgttcttgatctgggagctggttccatgagcacagtccttttgtgaaaacatatgcagacaaggcttgttacttgtgcacagttgtgtaggtttgttaaatttcacttagttctgtaggttgttaaatttaacttaaaaattaatttaaagagcacaaagtgccacatacaatgttgttcatcactacagattttactctaggacatttagttgtcttagtgtgaagtttgacccaacccaaggcctttttcaaggcgtccttaaattccttgttcctcaggcagtaaatcaaaggttaattattggcgtgacaacagtgtacacggcagagatgagcttgttggagctctgggatcaatggcttggggccggacatacatgaaaagcaaggctgtatagaagacggtgaccacgtgaggtgagaggcgcaggtagagaaggctctccagcagccggtggccgaggggatgcgaggacagccagggtgatgtgccaatatgacagtatggtggccaggagcggaaacaccagatgatgaaggccaggatgaaatccaccagctctgcagtggagaagtccgtgcaggccagttgaggatgggggaaatgtcacagaagaagtggttcaagacgttggagccacagaacgtacgctggagataaaacagaccttgatcatggagatggtgaagccactcacaaaggagaacccaccagctggaggcacagccccggggtcacaaggacgtggtagcgcagcgggtggcaatggccacgtagcggtcgtaggccatggaggccagaagcacacactcggtgcacaccaggagctgaagaagtagagctgcgtcatgcacccgacgaaagagatgcgtttctgctggagaggaagccctccagcatcttgggggtgatgtcagacacgtaccagatctccaggaaagaatggagctcagaaagtagtacatgggcctgtggagggaggtgctgctccagacgatgagatgatggccaggttctccaccaggacaaagaggtaggtgagcaggaagaggaggaagagaggtactgcagccctggggccgtggggaggcccaccaggatgaaggtgctgaccttggtacattctccccactcatgcctctgtgcttgggagctgcaggcctacaaaacatcaaagacaagaggaaagggctgcagggcagctgaggcagagagagagtggagctggacttggatgggagttttggtgcaaagagaggccacgtggctccccagagcaccaggagagagcagtgactgctgatcttctgagttttaaagtagaaaacttctgtgtgcttgcatttacatataacatgaagtaggaatgaggaagagagtatatgctgaggaacagagccgggcagctccaggggggcaaaacccaaagctctgagtccaggggcactaccagtccacacgtgcctggggcagtctcaagatccaagtgggcatggacacagagctggccctccttagggtccttcatctgaggttcctgcaagtcggggcagcagcctcggcatgaggtgaggggctatcagcctaccaggcagaaccccaaactgggctaaccagccggaggaatgcagggagggctcccaggaaaggctgcctggctctcggggacctggtccacaggtgggggagagagagggtagccacagcccttgccccacagggcatctggtggttcttttcattggcagtctaggtgggttgaatggcaacttccaccagctcacagctggggagggtgaccccaggtttctggcccaggatgctaaaattgatgagaagactaggagagggccaggtgggtgccgaataatctggagtctgtgctgggaggcgtggtgcgcggcacttactggagagcctcatggtgacgtgtagggggttggctgacaagtcgagttcatggaagagttgcaggctgaaaaacaaacttctagaagggaattgccagggacaggtttacacttggaaacgcacctgtactcctgccgtctagggtgagcatttgtgggaacccaaga

SEQ ID NO: 2908 - DNA, 22855 bp, Homo sapiens
ccatctctaaaaatagtaataataataataaattaattaattaaatttaaaaaaagaattccaggccaggcatggtggctcactcctgtaatcccagcactttgggagtccaaggcaaaagattatttgagcccgggagtttgagattacagtcagctatgatcatgccattgtactcagcctgggggacagagcgagaccctatctcagaaaacaaaaaaagaaagaaaaaacccgcttgaagttagtgtaaacaactaaagcacaaaactatgatcttatcccactggacatttactatctgaattcactcacagtacttggtccctaagtctgtgtaaccattgctggctgctttgacttaagggctcagttggttaaagcccaaagctgaggctcaagtcatgggtccatctcattaatggccagttattttgctctgttcttattctatatcccggaccccactttcgtgttgcatatttatgacgttggtcacgagggtggcttgaccagagagggaacagaggaggcaaatccatcaccacagctactagcaaaacaagcacaaatcctgtgaatggaggatagatatgttttctcctataaaaagcaaagtgtttcaaaataaaaaaaaaaaacaagaatgggcactcaaagctagtgaatggtgctgtttggaaatactgcacttcagactactgagtaactggtgaccatcacaagctggaacatacaacaggacagttagtctggctatgagtcattgaaatcatgggacactagccgggtgcggtggctcacgcctgtaatcccagcactttggaggcggaggcaggcggatcacgaggtcaggagattgagaccatcctggctaacacggtgaaccccatctctactgaaaatacaaaaaaattagccaggcatggtggcgggtgcctgtttcccagctactcaggaggctgaggcaggagaatggcgtgaacccggcaggcggagcttgagtgaggccaagatcgtgccactgtgctccagcctgggctacacagcaagactccgtctcaaaaaaaaaaaaaaaaaatcatgggacactaaacagacgccttatatgctaaaatggaaatatttttctcatggtaagttgtcatggcctaacacttgcttattatgttctgatggtacatattttcaaatttaaatgtaatgtaagaatgttccctctgctcattacctatatgatcattcataaacattataacaacaaaaaagataatcacaaaattttaaatggaaaaatatggagtattttatttattgatagagataacaaaactttttgtaataatcctgaatagaattaatgaaatgtaaatccaaacacaaacagcaagaatctgttctggcaattggagatgatagtgaagcagagaatcctgaatggtggatattcatctaagtactattggaccacggggggagaaggagggagtcgaggatggtgaagaggtattactgactctcaaaccaaccaaccaccaaccatatgtgtctctacctctctctcacacacacaattggatgtttgacagtgagaagcctcttgacctctctagacctcagaggcaaaatgagaagtgtcctccagctagaaacatcacaaattaaatgttttgctttaggttttcttccccaaacactccatattccttattaaaaatagagccattactacattcctatgatcgtattttaaattattgggtaagaagttctctttataaaccaaattttcatcttaatctttgccacttctgcctcctaccccaaataaaataaaaataaattctactaaattgcaggagatagttataatgtaatgcttaagtgctgggctctcagctagatttttgggttccacttaaattaggcaagtcactgactcgttcatgcctcagttcctttgtaagaataatgatacctgtttcacaggatgggtaggaggatgaataatacatttagcacaaggcctggccatagtcaatgctgagtaattattttttattttattttttgagacagagtcttgtactgttgcccaggctggagtgcagtggtgcgatctctctgactgcaacatctgcctcccaggttcaagcgattctcctgccttagtctcctgaatactgggattacaggtgcctgccaccacgcccagcttattttttgtatttttagtagagacgggtttcactatgttggccaggctggtcttgaactcctgacctcatgatccacatgcctagcctcccaaggtgctgggattacaggtgtcagccaccatgccgagcaagtaattgttattttaaactatttccatttctccatttgcattctccatttctccatcttcaatatatgttatgtgtgtatacatatatatgacagaggttatatatgtatatgttataatcatataactcagacacagggtttcacagctagaaggaatttctacatcaagtacaaaactcttgttaatctgtgtcctttctgtcagattcagagggttagagtgatttggttagtgacggaaatgtacttaaacatgagattcctggcttgaggctgcatcgtttttacttttcttccatttactttatcttatttaaataacttcctatagaacaatttcctttaaatatgaaatgttccatggtttttggttctcagtaaattatgatattacaataatgcggtttattctcctgattgcgatctcttcataaattaggacgtgtattcacttaaagcagtctatttgataatgaaaaccagtgatttctaaataggcagtcagaagaatctgctttatgaaacagacaaacccctaaattgggcctttaaaatgttcggatatcaagaccacgaatatattatctaaattagagccctgagcaaggactcaagctctattttatgccccatccctgactcacagtaagatcctggcaagtcacttgaccttcttatatttcagagtgtcaaactgtgaaaagcatgtccataaactgtgcaagcatgacctcattataaacccgatgaacttgaaagcaaagatgtgctttgaacattaaagaattaccaaaatagaactctagtttgtaaaatatgaagaatcaggaaaataattttactatactaagtaaaaggattctgaaatgtacagtttttagcaagtaaagtcaaaaaagtttcaaaatgttatatttaggtgaaataaggttaatgacagaggaaaaatattttttagagaatgcttggctttcaaaaccatagattgtagcaacttaaccaaaataatcaaaggaatggaagactatcagaaacgagtagatccttaataattaaacacatttctaggcattatttccccctacttatacaatgcatatcatgttttaaaatgtatttcactggctggagcggtggctcacacctgtaatcccagcactttgggaggccgaggcaggtggatcacttaagtcaggagttcgagaccagcctggccaacatggtgaaaccccatctctactaaaaatcaaaaattagccaggcgtggaggcaggcacctgtacctgtaatcccagctactcaggggctgaggcaggagaatcgcttgaacccacaaggcgaaggttgcagtgagctgagattgcacactgcactccagcctgggcaacagagtgaggctctgtctcaaaaaaaaaagaaaaaattatttcactaactactatatgaaaagccccagagaaagaataccaatacccttaggaaaaagcagttttagtattattattattattggatggagtctcgctctgtcaccaggctggatgcgatggcgctatcttggctcactgcaacctccgatgccctggttcaagggattctccgcctcagcctactgaaagtagctgagattacaggcacgcgccaccacacccagctaattttgtatttttagtagagacaaggtttcactatgttggccaggatggtctcgatctcctgcctcgtgatccgcctgcttcggcctccccaagtgctgggattacaggtgtgagccaccggcccggccaagatgcagttttaataaggagtttggccatttaggcttgtaactgactggttattgcatattctttaaaattaatttgtattagtcccttttcttctatttccttatctcaactctcgcattagtatgcacgctttattcctactcaggttttcccctatgagcccagagtattattattatttttttgcagggattaggatcaggtttgtgaagtgaatagtgtcttctaatctgcagagggaaggcagcatcccctggcttgctgctgcagcctctctttaaataaacagcaggttcactctttctgcggcattccagaaggaacatcagtaggaacagctcccagatgctgacgtcttgtctaaggttatcccaagaagtcctgtggcatttgcaatgtgctgtacatttttccttttttaaaaaacatattcctgcagactttgttgaaaccagaaacaacacaagcaagcaaagccctttctagcacagcatgttaatcacacactttgccatattcgtgaaacagtaagcaaatgataacctccaactgttgcccgggccctgtaaaacagaagacaaattctgtgttctgccttggcaagaaaagaaactgcagcattttgtctagatttttaaagtcctggggttcacattactggctgaaattgttctttctctactttacagaaaaatgaaaacactagtaaacttaaagatttaaatattattttaaaaggaatataataaaaaatgaaaacactagtatatttaaagatttaaatagtcttttaaaaggaatataatcaaaactgagtttaaaatacaatctagctccataagagaggcaattggctgtgtgttccacttgtaagcagaggatttgaagcatctattttttcccttgtttctatggatttatgaataaagacttgacccttctcaggatcaggaaaattacgaaaaatttaaagcctgggtttaaggtctgtgaagctgcacaggtacactaattttagtaagacgggcgccaggaaaaagaacaaaatagaggggagaaatattcaggcatcctaaaaaatattcagtggaaacgtaaaaacattaaagctgattaaacatcgcagcatgacacagatttagcaactgagcataaataatttgactcgatactgctccaaaatccgaagaggaccaatttcttccaggaggacaactacctcgtccttgcagacccctctcctcggcagctgaaggagtgtggccaatctgcctccacctccccgcgaccccctactctcaggacctcctgcagcaccccaaactggaagtggccgctgcagaccaaggacgaggggcacgcgggagccggcagccctagtggagcggttggagatgttgaggtggagggtcacccaggtggggtgaggctggggtaggtagcggagtgaacggcttccgaagtctgggccgcccccaggttggactaagcaggcgctctgtcttcgcccccgcccagggtggcgtctcctgaggactccccgccacacctgacccgagaccgcgcgcccagcctagaacgttccccgacccagcgtagggccgccgcgactggcgcgcagggggcggcgggaggcctgggaacccgggggcgggaccaggcgggcaaggcccggctgccgcagcgccgctctgcgcgagcggctccgccgcggcggagggatacggcgcaccatatatatatcgcggggcgcagactgcgctccggcagtggtgctgggagtgtcgtggacgccgtgccgttactcgtagtcaggcgcggcgcaggcggcggcggcggcatagcgcacagcgcgccttagcagcagcagcagcagagcagcatcggaggtacccccgccgtcgcagcccccgcgctggtgcagccaccctcgctcctctgctcttcctcccttcgctcgcaccatggtaggtcgggagtggcaaatgccggcgagcagctgcccgagatttcttcccagatttctagttgttttgtttgttttttgtttgttttggttcttggaggtttttcttttctgagtgttacgcagcagctgcgcttaaaggaggtgcattttggatttgcatctcggcgacctctgccagggagcttcatttattggttcccctggagctggacttggtcgtaggccgtccacgggcaggggctccggccgcaactgcagcggggtttctgcatccaatccccctgccccccgcccagccccgcacccactgcatccactaggccgcacccgggctgcctgcagcgcagcgtttcggcctgggagccgggcggggccgggcctagacccccccccccggcccgcccctccccaccccgcttctccgccggcgcgaaggtgcaggtcgggcgggcagtggagaatgaatgggctggagctggccggtggcgcacattgttcggccgggtgttgaggggcgcagtcagcgcccgccacctccccactttggccggccctgtgggcgccctccctcggtcgctctcccctccttcttcccggggggcgcggcgcgggcgtggctgggaaggaaggagccggggaagggtggggttgggggcaggaaggcgaggggttggggcggagagggcggaagcggcggccgggccgccctgcgcccgggcggggccctgcggtgggccgtggcttgttcctgccgctttcgcaccctgcggccccccacccagtgcagcagtggggcgggcgtgagcctcggtgcaccaggaggcacttcccgcgggaggcgctgggctcgcctaattggggcggggggggggggcggcgggggaggagggaactggcgcgcggcttggttccattagagacgcaaagtttctgctccgggaggaggcggcggcgccgcgggctcgtcgctgggggagcagaagcgggtgggaggtgcgggtggccttggcctcagccctggtgcgcggggccgggggtggtgaccctcctggccgaggaggggcggcgtccagacgcccgctcggggccgccttcccccccacgcctgcccccgggcacgcgccctgcccggtccctcgccccgcgcacttccagtccgcagagagatgccctccacgtttctgctttctctgcagcctctagatgccagatgcgactgtgcgcctcgctgggtgtgttttccacagacccttcctcctcggcggcagggctgacatcaccgactgcgtttctggtttggcgggtggggagatggttccccgcgggttctggtacacctttgcccccagggctagcgccatttgggggaggaggttttcgtttcgagaaagttggatgctcctggtaacccctctaacaagagagttctgtagcgaggtggactgttctccccataaggtgacagtttctcttgcgaggtgtggcagcgcttcctgttgtcaagacagatgttgccttggcgttacgtaaatcatcgtgtctccgtcatttaaagaaagcaatttttagtgattgaggtagaaagaaagatccgtttataatttgtaaaaacaaatttcacccagaatcaatatattggaacaccattcctactgttaaagttttcacttaagagcaaaacttcatcagctttctattaggacttattttgtaattggcttcttaggcatccttcttaaaagagaaatccacgttagctctccttgaggtctcgagttccctcggctggaggcacggttcagtggagaccaaataatgcaggtgaattaccttcgtggccattactgcctcgaagaagtgtgtttattaagaacagttcttatgtcattcttaaggtaggtagggttaatacttccagcaaatttagtagatactctttgccagaaaagagaggagtatatatagtttgatattattgtgtagttttctgtgtacttaatttttgcagttttgtaacacttcatttgtaagtggtaccattttttcctggcttctgaatcataggatagtttgacccagggcattagccatgtaatggtagccttttaacaaataactgcctaatttaaaggattggaaagcatttgttcatggaaatgaagttggtggcgtacccagttgctgtatctttattttttctacttaatttttctcataaaatggatataaaagcctgttaatccaacccaatgccattatgtaacgccgtttggagatttcgagggcctggagcagtgcgcaaggtgcgctgaaagcctgcccctggtgagatccttatcctggctgtgatggcagtggcagtgggctgggtcccttgttgagtggaagggggactgcggtgtccatggtgcagtaggtggcgctcttctgtcttagagcctgccccactgcagctggtgccaaggggccttctgccactagaggtgccatttttcacatgatgacttagcctagttagatcgcagagcaagctgtaagccatgggcccagaaaagaaaacttaagtgagcagatgttgtcacttccttgtaatcctttgttaaaatagcataaggagtttttttattctatttactttcattaaatgaccgtgctacaggtttcaaaggattttaagattatttttgaaagatcacaatattaaaagtataactggaaaatctatgttgaaatcaaccaacatgtcgtggactgaatgataaccttttctttcttcatataggctgatcagctgaccgagaacagattgctggtaagttgacaactccaaggagtccccagaaggccagaactaggcctgactcagttttggtgactcctctgttcctccccgctacagtctgggcagttttctaaaatttatttaaataagaacagtaagcagaaacactgaggtcagatgttattcttgccagactttatagatgaggtgaaaggaagtaaaactaaggatgcccacatgttaaactctggaaatttgaccatgtttcacaatgtgcaaagtttgcgtatgattaattgtactgagcctgcactcagcggtttagtttacaattcttatgccatgggtctttcagtaatctgccacgaaacttgtgctcgctatcctaaaataaatggaaatgggtgaatatgagtgttaggaccactgagtaattgggaagaaagttacattagttaaactctgttgcccaggctggtctctaactctgggctcaagcaatcctcctgcctcagcctcctgagtagctgggactacaggcatgtgcaccacgtctggcagattttagctttttaatattcctggaggacttgttttgagactgttctcgttaggaaaccaggaatgcttctgaaatattctaaaagtcatgtggagagagtttactgggaatgtacatttctagtaaccattttatttgttatgaaacaagggattcttatggtttagaaatgtaacaggaagggatttgaagggggcacatggaccaatcttgtcagattgatttagtcccttgaacctgggaggcaggggttgtagtgagctgagattgcaccactgcatccaatctcggtgacagagcgagactccattgtttaaaaaaaaaaaaagattggatttagactaatttaagcatgttccagcttagccgccttgaaacctttgggaatattgtggtgttggcactgtttattgggagcagtgtttgctttatgggctgctgtatgaaggccagtccacaggactattgtggtcattatttcagtagataaagaccagacttctgatacgttgcacacttgaatggctggctttggcaagcccccggcaagtgtgtattgtgactgggttggataagacattgattctaacgggtcaacttttgttttcagaattcaaggaagccttctccctattgataaagatggcgatggcaccatcacaacaaaggaacttggaactgtcatgaggtcacgggtcagaacccaacagaagctgaattgcaggatatgatcaatgaagtggatgctgatgtaagagctttaaaaccatgaatgagggccattgttgtgtaattcaagttcagacatgttcaggattgtctttcaggtccccagagcaaagcaaatgtgcaaagatcctttctgtggttccccagggccattgacaattaaaatagaagatgatgggccttgcgtccatcctgcttaggtctagaatgttttctgcatgggatcactattgttttcttcctgcttggtgcgacctaggctcaaatctatttttttttttttttttggagacggagtctcgccctgtcgcccaggctgagtggcactggcgcgatctcggctcactgcaacctctgcctcttgggttccagcgatttcctgcgtcagccttctgagtagctggaattacaggcgtgtgtcgccacgcccagttaggttttgtatctttagtagagatggggtttcaccatgttggccaggctggtctcaaactctgacctcgtgatccgccctccccggcctcccaaagtgctgggattacaggcgtgaaccatgctcctggccgagctcaaagcttttatcaactggcccatgagtctgcactgagtcttgggggggaggtgaaattaaatagccatagaaagtgctttttaacaaacttactgtgtttaagaggaggaggaacccccagatgaagtaggtgacgagcactcttagaagttaccataaagtgagtacagtgtgagctgtagatgtgtttgctgcagaggagcatgtgaggtttggaggggatgtgtggtgactccaggggatagatttgcagaacctaacggaaagggaagctgtaagtgcagggccagagggaaccagcagtaaccctgatagcggtctgtcatctgttcctctcactctacagcagcggacaacagaactttgattgctgatttccatcagtaagcaggctttaagcacacttccccacccctaaaaaaaaaccacgtattttggtaaatcctatatatatttaatgtactgtatgacagtatagaacatgatttttaaaagatgagttgggaggagaaaagataaaagaaaaaataaaagaagcattaagaataaacaattcggatctagattttacttctagatgattgactcgagggtggtgtagtaaaatcgcttgtctggtcacaaacatttggagcagagcttttgattaggttctttgacaaagccttcagcacgttagagtggttttcacaatagtgttttggaaagaaaaggttgtccatagttctctagtttgctaagatgatcagcacccaggaacgtggagtaacttcctcttgtttgtgggagccccgggaatctgtgcctgggaggggagaagtctgttaggctcttggattgtgtggaagaaggagaagttgtgccaggcacagaatcctgtgtttgcactgagaaaacaggatggtacctgaccttctctgcatggcttgagatagcttaaaataatttcttttgtttttgatgaatatgaacaatatcttaaaattttgaggctaaaaaagtcttgaagggatccctgaggtattttctttgaaaggtactggtgaaatgagtaacttaacctaagggtttttctttctaattttatttccatttagttcaatgcactgttagtctggagtgcttgtctttgggggtattcatctcttagttttaaagaggagtgtttggagtactggccgtagaacagattgttctgacagttccctaagtgttactagtcgagctgtgagaatgctcctgagcttttcccttaatgggaaataaagatactgagttggagaaaacaggtggctaaccatcatagcgtggccaagaaatgatcctggagaagacttggtagacttcatggcccatgcatggcataacagaatcaatgttcctctctcataatcttttccctctgaaacactttatacacttaacctgcagctcagttctaggccttttttgtgttacgctgtcactaaccaaggcagagtgagacctgagtgatttccctaactcagggatggcagcgggggcgctttcttccctcggagtggaaagattcagcctgcggagtggtgtatgctattttcttttgaactgtacagcccttcatgacccttccatgggcttgaatccagatgtgcatttcctttgtataattaaatactatcctgggcactgatgatgagtttgaaattatgtgaattgccctgtgaagtgtttgaacgttttagacctgcagatgattgaacctagtaagatatctgcccctttgtcctagtacatgtttaccgttccgtacagtggttctgaaatgattacgcagagcagcgttaatggagtgcttactttacatgagctttttgttttttaattcgaggaatggcaccattgacttccccgaatttttgactatgatggctagaaaaatgaaagatacgatagtgaagaagaaatccgtgaggcattccgagtctttgacaaggtaatccagcatctcatagcagatggtacttaagtatggcttcttccgctttcacttctaaaagctataataagttatagacagaagacttaaatctaactgcctgagcctctgatctcactttcaaaaatctccttatggtaaccgtatcaggggagggtaggcataataaataggaattttggaccatgttcttgactgttactttgaattgttgtgagcttttgcaaatcctgttttctgcattagcgtttgcatgtatttagtaggttagaggtgggaactagagatcagagaattgtttatggcgcagagttagcagtaacttgagagggcatagctaagtcaaagacctacttccccacactcatcattagcaataacaattgctgaatgttcacaggatggcaatggttatatcagtgcacagaactacgtcacgtcatgacaaacttaggagaaaaactaacagatgaagaagtagataaatgatcagagaagcagatattgatggagacggacaagtcaactatgaaggtaaaactaattctctgagctcagtgtttcatagtcttacctttagatctgtaagcaagccaactgctcactagacagcctttgactttattttatgtacagtaaagatgttgtgttcattaaagcgttttcaaagataaccaaaagttactattatatttgtcttttcagaattcgtacagatgtgactgcaaaatgaagacctactttcaactcctttttcccccctctagaagaatcaaatgaatcttttacttacctcttgcaaaaaaaagaaaaaagaaaaaagttcatttattcatttgtttctatatagcaaaactgaatgtcaaaagtaccttctgtccacacacacaaaatctcatgtattggttggtggtcctgtcccctaaagatcaagctacacatcagttttacaataaaatacttgtactaccttaatgataaggactccttaaagttccatttgctaatgattaaacactgtttgggctggccagtttttcatgcatgcagcttgacgattgagcacagtcaggctttgtattaaaaatgaaaaatgaaaaaacaaattcaaaacctattcaaatgggttctattcaatttgtttagtataaattgtcatagctggtttactgaaaacaaacacatttaaaatggtttacctcaggatgacgtgcagaaaaatgggtgaaggataaaccgttgagacgtggcccactggtaggatggtcctcttgtacttcgtgtgctccgacccatggtgacgatgacaaccctggtggcatgcccgtgtatgttggtttagcgttgtctgcattgttctagagtgaacaggtgtcaggctgtcactgttcacacaaatttttaataagaaacatttaccaagggagatctttggactctctgtttttaaaaccttctgaaccatgacttggagccggcagagtagctgtggctgtggacttcagcacaaccatcaacattgctgttcaaagaaattacagtttagtccattccaagttgtaaatgctagtcttttttttttttttttccaataaaaagaccataacttaaagtggtgttaaatgctttgtaaagctgagatctaaatggggacaaggcaggtgaggggaggccagtgtacatgtaaatgcccacagcccagcattgggtttccctcccaagccccagcaccaacctctgagcccaagaccttgcctgaaaacaagcagataccgattgctcatcctatttatggacatgtaggtctagttgcattttcactggggggaggggggaaggtaattatggtaacttttaatgatctattcaggcagtagagctcttaaggaaaaaaaaaaccactttctctcaagcatgtatttaggggttgttctcaattgtgctgctgattacctgtctatgtaactacttgagaccatctgcaagagacatgatttagtgtgtctgtaattcaatctcgctgtgtgtggtagaagcagtagtcacttttgtaagccagtctcttcatgcctaaaaacactaccagtcacctttgattcgcgacttttaatttatgattatacttagcctcctcccctttttttttttttcccaagttgacttgactttgcttttttccccccaagtagaactatgctagcttccagcttgaaagtaaaactccagtgtggagtgaattttgtgtctaattataacctgtaaccaaaactcagacatctggtactggtctttgcattgagattggtccctgtaaaccccctttaaaagcatattgcatttagtacagagctcttttttgaaatgaaggctgagatgtgcatttttcacggtgttaactggttgtatcttattagcaaggagattggggtttgagtgtttgcgtgggtggtttcaatttgccagggaacagtggcaggctgctagcaaggagtgagaagctcttggcagccaaatgggtgcattcagggctgatttatagagacccttgcttctccttctcctactccctgtctttctggcattttgtagcttgttagattttctgccgaggggtgggtcagagcagtggaggggagacatcgcccatgtgcttctgctactggtcctgggctgggtggttggtagaggagatgttgacactatgagctaagggttggcttttgtattacctgaatctgaaaggaatgcctaaggttaccttggggtttctcttctggtgagataggttcctggtttgagtaagttaatgtcctggatatttcttgtggcagggggtggtcaaaagcctgattgctgacccagtctcaggcctgtggtcgatgacctctcggtagtttcaaaggggctggagggggatatttgacttgttttttcgaaatgtagccttctaaccctcaagtcttagaagctgggtggactcttagtggtcctgcagcgtatcctaaaagactacctttgaacaggattcttgtatggccaggatcgtgtctgggaaccagaaaccctacaccctccccctcagggaatgctgagttccagttttgagcagaggtgaggcagaatccactgtagccttccccctggtatttggggggatgaccagcccaggcgttgggtgttagtctgcatgagtttgtagaggaaatagctgggtgtcctggcagtgcccttgaagttggttaggaccttcctgtaactcttgcccctacttctaactactctataaatatatacatatatttatatataaagtgatagttgaactggcatcctgctttagcctgagacttgccataagaaactgctgagtacttgcaaaccctttcatagttttgttctccatctgtttggggtaggtgttgagcgaggcaaaggatctcgatatttcagatgggcttttgatgcactgttgccaaggaaggctttttctgatttttgacaaatgaatttttgcacactttcattggtgtctttcggcaacttacacacatgaaaatgagctattgtacatatttttatattctctttataaatgcatgtctgattgtactgtaacaatattgtaatgaacggctgtgcagtaggcccagcgctgctgtgtctcgtcagggaatagcttaccacgaacccctcagcatactgggaatctcttcctgaacaacgaatgtaatttggtcaagtctactcttccgttcattcaattattttaagcatttgaattatttatgtatatcctaaatatatttctcctttggcagtgactagatttccactaatgtgtcttaactatccctccagctggcagttactgtttttttaatcccctgaagttgtcctgtaggagaagaaattctttgctgtctgtatcccttggagtaagaaggtagtggcatgggtggagtgttgttctttctccaaatctattatgatgtttattaaacacttctgtagcaaagatggtggagttcttttgttactgaagttgcccttcaccatggctatttgaaaaggagatgtacttgacgtttctgtaaatcttgagataaactgtttggagatttaaccacctctctgatgggggccaactctatggaaattgtaaatacgttttatttataaacctggcactgtattcaataacatttctgcagcctttcatctctaactgcgaactgtgtaggtttctagcttgcatagcttcaattccttttgctctcaacaagatagacctgccctcagatgtaatttcactgggtcttagtactgtgagagtgaggggccagaaataaccgtagacacatcccacaaccgtcttacctagttttaagtagtttgagtgttaatagctgacattttaacctattctcttagcctataacttgtccatgcttgctttttatgcggaaaatttacaccataaggattagtttcctttaaccccaatccaagcctctttaggacttgtataaagaaatacatttttttcaataagatggaattttagatgacaaccaagatgataccttggttcatgtcaagagcgggacagctgagaaagtggggtgggatgcaagtacaatttaggaccttggcattgaagccttccccttagcaacactggcccagaccctggttcttagatgtagcaggagaggctgcctgcttctgcccctttgcttccagaaaggccttttccagctgcctcgtgtgtttcccactctgcccagaagagtgagagggctgaaaagcggggcgggataaggccctgctttcgacagaaggcttgagaacatctccagaaagcatttaaagagcccctcctgcacataggagctgggactataaggaatggtcatcaccgtggagacggccctctgctctgaggctttagacctggcttctggattggttctgtccctccagcctcaggcaggttctttacctttcccaggccttggtatcctcctggtaagatcatattggacttggtaccttctgcctgtggctttctaggattatgaccgactggtttggcatcactttgtgtttagatagatgaaattgcagcctaaaggatgggaggcaaattgtgtaggagtgctgtgtcctttgagatgacaaatgggatttaaaaattctcaccgcttcatgttggaggtggagtggaggttaagcttgctattaagacgtgatgtaatattgaacctgggtcagagaaactgattgttaagtgacttccattctcccaggacggaaataggggctaccactgggcctgtaagggattcagtccaagtgacatcatctggttttcagcagcccggtttagaaaaacacacacacatttccgattcaagctgaactttcccgggcactgggggctggagcacccaatgactcaggatgccttagaaggaaataaaacataaagctttttaagcttggtgcttctctcccactgccctcaactctctgccaaggagtgggaggagttagccatggaccagaactcccattaaagcccctgaactctgattaaatcaagtggcagttttctcatgagaattatgttctttgtgtcaggaaccttaggaatgagtgtgaattgacacattagattgtggggttttttttttctcttttgaggtggggtctcattctcactcaggctggatgcagtggcacaatcacagctcactgcagcctccacctcccaggttcaaatgatcctccacctcagcccccccagtagctgggactacagggatgtgctgctgtgctcagctaattttaaatttttttatgcagacgcggtttcacatgttgcttaggctggtctcaaactcctgggtcaacaaatcctcccaccttggcctcccaaagtgttgggattacaagtgtgagccactggccttggctcagataattttttttttttttttttttgagacagagtcttgctctgtcaccaggctggagtgcagtggtgtgatcttggctcactgcaaccttcgcctcctgggttcaacaattctcctgcctcagcctcctgagtagctgggactacaggcgcacaccaccacgtctgctaatttttgtatttttagtagagacggagtttcactatgttggcgaggctggttttgactcctgacctcaggtcatctgtccgccttggcctcccaaagtgctgggattataggcagagtcactgtacccagccccagatagtcttttcaatatcatatcttagttttattttcattttacaaaggctaaaaggaaaatccagagtttcctctagcaatataattatttgaacatttgttacaacatgatctttagatcctggctgtatgtaagcatgtttgcttttaaactgtttttcattttgagtctttgtatacccttcaagttgtgattttttttaagttactgcatttttagcaaaagatagattttttcctgcatagacatatcagaatcaagatttgagatagttgttttaaaaatggaaaataagtaaaaaagtaattataaaatcatatcttagttaaaagaacaggtcatataggtaaaacttcctctgagtgcaggtatccatatctggtgattctcaacttggaatacttctaacactggacatctaatcctgtttccacaaggcagaacttgggtttctccctttcaatgacaagaagttaattaacagcccattcccatttttatttttattttttgagatggagtcttgctctgtcgctcaggctggagtgcagtggcctgatctccactactgcaagctccgcctcccaggttcacaccattctcctgcctcagcctcccgagtagctggactacaggcgctcaccaccacaccctgctaattttttgtatttttagtagagacgggtttcaccgtgttagccaggatggtctcaatctcctgaccttgtgatccacccgcctcagctccccaagtgctgagattacaggcatcagccaccgtgcctggccaacccattcccattttacaaaagcatttttctgaatttaatagaaatgctgttgattatttaaaatttgtgattcaaatgacccataacctataaactatagctgagactctgtatttccttttggaattttttctcaccatatggatgcagagatagggtttacaacatggggtcccactgtatgtgtaattttttttttaataagcatactattctttagtatgtacaattacatgttgtatatatacaatatattacaatcttcttactccttataactttttctcctcacgatataatttatgtacataaaattcaccttttaaaaatacacaatttggtggtttttagtatattgacagggtttacaaccatcaccactatataattttagaacactttcatcaccctgaaaaaccctgtaccattggcagtgattcccatcttcctttctgcctccttccccccatcccctaatccccggaactactatattttctgtctccatggatatgcctattctagacccatataagtgaaatctgtattcatactttttaaatcctctttttcccttttttttttttttttttttttctgagcggagtctctctctgttacccaggctagagtgcagtagcccaatcttggctcactgcaactccccctccccggttcaagcgattctcctgcctcagcctcccaagtagctgggattacggtgcacaccaccacacccggctaatttttgtatttttagtagagatggggttttgccagttagccaggctggtcttgaactcttacctcaggtgatccacctgtctcggtctcccaagtgctgggattacaggcacgagccactgcacccagcttcttttttactttttctactgacatttctccatcgctttacattcttgaatataatttttaagatctggctgtattaatacgcatcatttagctaaccaataccctaataaaggccatttggcacattcccattattctttcttatttctccaagaaacattccattttaagctgctttaactgtgagcacattcttacaggctggaatctgcttccttttaaccccacccattggtgctattgcagcttgtggagctactctagacatctaatcctgtttccacaaggcagaccttggtcttcctcactgtcatggcccctcccgacttgtcaggcttaacattttgctccttttttattttttattttattttattaattaattaattaattaattagagacagagtctcactctgtcgcccaggttggagtgagtggcgcaatcgccactcactgcaacctctgcctcctgggttcaagtgattctcctgctcagcctcctgagtagctgggattacaagcgcccgccaccacgcctggctaattttttgatttttagtagagatggggtttcactatgttggccaggctggtcttgaactcctgacctaggtgatccgcctgccttggcctcccaaagtgctgggattacaggcgtgagccactgcgctggctggttgtgttttcgttaagtgcactggttttgagttggttgctccttcttttttaaaccactctttgagagaaatcaacaagatgtagtgaaatttacccaggctgtgtattcaacatctgtgttcaaatcctggaattactggcatgtgccaccacacccagctaattttttatttttagtagagatggggttttgccatgttggccgggctggtctcgaactcctggcccaagtgatctgcctgcctctgccttccaaagtgttgggattacaggtatgagccaccatcctggcctacaacatataccaactttaatatgtaagaactgatgcaggcatagcatgaaatgcatcaagtaagaattaacaatggtaagaataagaaatccattattatagagattttatatacttctggtaattgagaaatcaaccagacaatagaagatttgaaccacagaattacaagtttgatctcttgtatatacatagaacattagacccagcaagtagagaatgcacattgaaatattaaatattaatcagcactattattaatcacaaattaataaacaatataacttgtggttataatatataattgtaaatacaaatatataattatataaacaacaaattaatatattagtgtaataaagttactaacaaatatcaattaagaagatattaattaaatagatattaggattgactacctgttagatcatagggtaaatctcaacaactactttaaaaatccatcatattgacctagaaaataattccaaaaatacaactttaaaaataactgtttagaaattaaaatccacttctaataacacatgggtaagaagaaatcataacgaaaatctagaaaaatttaggattgaatgaaagaaaattctacatttcaaaatgaggtacaacttaagcagtattagaaatgtatagccttggccgggtgtggcggctcatgcctgtaatcccagcactttggaggccaaggtgggtggatcacctgaggtcaggagttcgagaccagcctggccaacaagtgaaaccttgtttctactcaaaacacaaaaattagctgggtgtggtggcaggcacctgtgtcccagctactcaggaggctgaggcatgagaatcgcttgaacctgggcagtggaggttcagtgatctgagattgtgccgctgctctccagcctgggcaacagagcaagactccatctaaaaaaaaaatttatagccttaaaatgcttataatggaaaagtagaaaggctaaaaataataagctaagcatccaacttaggctagcaaaagaatagaataagctcaaagaaagtagaggaaagtatcaaggataaccacagaaattaatgagaaacaaaacaaagaagatcgacacgacaaaaagtgggctcttttacaaaaagcatggcagtttgtcaaaaaaattaaacatggattaccatatgatccagcaatt

SEQ ID NO: 2909 - DNA, 56952 bp, Homo sapiens
tcgactcactgcaacctccgcctcctgggtccatgccattctcctgcctcagcctcctggtagctgggactacaggtgcctgccaccacgcccggctaattttttttttttttttaattttagtagagacggggtttcaccatgttagccaggatggtctcgatttcctgacctcgtatctgcctgcctcagcctcccaaagtgctgggattacaggcgtgagccaccgcgcccggcaaaaaaaatttttaatgaaacggggtcagaaaattaaaattttccttctctacacaactccccaaagaaaacacaaggcgacgccagttaagttcaatgccctaaaaaagtctccgtttccacctattcattccgccctccatcgtcgtatttttaaaagaaacatctaatattttaaaataggaaaaatagaaaactgctttccaggctgggcacagtggctcatgcccgtaagccagcactttgggaggctgagatggagatgggcagatcacttgaggtcaggagttcgagccagcctggccaacatggcgaaacctcatctctactaaaaatacaaaagttagctgggctggtggtgtacatctgtaatcccagctactaatgaagctgaggcatgagaattgcttgaccctagaggcagaggttgtagtgagccaagattgtgccactgcactccagcctaggcaatgagtgacactctgtctcaaaaaaaaaagaaaaaaaaaaaaaagaaaaaaaggaaactgttttcacccttggactggtaaactctgtcaggcgtctagactaggctggggcttggatagtaatgggaaccactagtagagccagaggtgaacatataacaatcaccatagcactcatgatgggaactacacacttaaaatgactgcttgcccattttacagatgaggggactgaagtcagagagttgccaaggactgagacccaagtatcctgactccaaagaccaagtgttcattaccttaccccaggatctaccacgagagttaaactggtggctttggggaagaaggatgacccaacctagcttcagctgactgccctctttcaacttgtccctgctcctcccacccttcccctccacacacacatttaatgcagcttctaacatgtactgataacattattaccttctttcagggaaattctgagaatgctcttgttatttaaaaagttgataaattctgtccatttcagtcatagtgttgtatagtaccttatttagagttgtgagtatttatctgttatagaagactgccgtatacatccttaagtcacggtaggaaatattccaaattagaacatccactccgaagcttaaagtttccccaaataaatcttataatagcatcacgttgccaaggtccccagaatcttctctgtggaaggttagcaccctgtatcccagcaaatcaacaatgtggctttccgtctctgactttaggcctcatttgatgacttgcaggttcccaaaaggcctcacccctgaattaagccaaagaccacagacaacaaggtcttcttgattctatagtcttgtatcttcatctactctaaataattagctctgtgtgtgtgtgtgtagtgtgtgtgtagtgtgtgtgtgtcgggtgtgtgtgcctatgccctttgaattgtcatcaggtgacctggggaccagggaaggtgacctgaacatgggagtctgcccacatatccctttcacagacgtccccttctcaatactctatggctgtattggaaagcctggcaaaaatggctctgccattaccttcctgcgtggctttagcaagacactccgcttttctgggcctgtttcctctacagatacagaatagggcaatagactaagtgtggataggaaaggatgagcagctgggaaggaatctctgttaccctcttctccggcttgctttctctaatggtcagatagatttctagcccccaactcctactcaggaactcacagaaggatgttcagggatttctgtgttttccattcttatttctaaggccttgagggcccaaatttggggaccctgtactaggtacattattctccattctccaccctccacttcctgccttttgtcttggaagccaacttctacagactatataatcagggcatgttcacctctggctttgactgggtttggccagtgggagacaatggcaagaaggattggaggattggggagaaaaaagtggaagtcatactctcccagtgcctccctgtgtttctggcagtggtggatcatgtgattgcaacaccagttgggcagcccctctccctcacttcctgctgtcactggtttcatcacaaaattccctccctttctctgctctggtccaggagtgctagaaaggcttttgcttttgccagtccctaattagttccctctgccctgcacacaaccttgtgaatagttctccagtaaaccattttcagtagacccttggaacgtgctttctctttcctttcatatctactgatacacactcttgctatttttcttccaactttcagaattagggttctaactgtcccgctgtggaaaggttcatctggaagacctagagttttgagggacaaagcaagggtctctttctgttgctgggcacctgcctccagttgcatacaccttctctgatccttggtgcgaatggtaaggggaaagtcatctaatgctactgggtgacatattttaccaaacactcttctattctcactataattatgtgaattgtgtataagctgcgttcctctcataatttatttcattttgggtggcagacttccaaattccctctcttttattcatgcataacacatgaatgattcaaagtggtaaagtcaacagggccccttccgcttcagtccccatctgtaaaaatggtttataacctcatgttgaggttcagagttggtataatatcaaccctcatattgagggttggtgtaggactaaatgagtaccatctgtaaatccttagagcagcaggtgcaaagtgctagcccaaccatgagtatttgctcatctgattcatctcggccccctttcctacaatttatatgtagaagggggaaaaggggacttcggtaggaatttctaagtgctccctccagcttccggggtttccgcagcaccccttcctctctcaacacccatttctgagtagatttccttttccgcaacttttcatcccaggaagttccaggaagggcaagaagggcaattgcgattctcacgttttcgctcttaattctaaaccagtgattgtcaaatagaggcctagggagccccactgaccacaaaagtgggttttgctctaggttatatctttgttattgctcttatctgtttaagtttcaaattctgtttgaacaatggtttccaagtctttaaaaagtcgaaaatcccccttctgatgaatacagaaaccccagactttaaaactctcagtcttaaacctctttggcaccattgccaaaaacttttctctattccattcaaatagtttgtattctttgccatttctgatgctctgaacagatattcaaacaagcaagtctttatgtatttatctggagtgtctttctcaagcactcgcatgttcagtagacatttgtctccttaatttctaggcccatgggaaagataactacaaactgtttaacaacagagacatttgaaggtacaaaactttactggaacctgatccagccgtgcagtacttccaacccatagaatccagcgttactagaggaccgtccattctggttccaaggctgctaggagcgagaaaagttggagagcagaagctgtacagggactgagtcccgggaggagtacccagcaactggaattggctgcgtcatggggaggagagttagcaaggtactacactccaattggctaacacataatttctctatgcagcttaagacttcaggcagacagattgaacacatgaagggagtaaaaactccaacctctggaccacttcctggagtgctcctaaccagactcccacagggcttcctcccatacttcatttaggtctttggctcaaatgttaccctttagaactgcctcaagactggggcaagaggagccccagtctagggctctgagcacctattctcttccgtccatgttcctttccatagggcaagaaatcccacgggccaacgggatgactcactcagagctcttgcccctctcctttttagagcatactgtgagttcctgggacccagaaaatagtgccgcaatagcaacaggtcaccagctacaggctgcctcagccttttcccaggtctatcctcctgaggagcaaggggtggtcaaggggaggctatttgcaggtgtggacaaactctgatgtgcagatgtcgttgttataggtgtgggcaaaaggccatttgaagtatggacagagctggggtgccaagagaagaaggaaggctgagggccaaggacatgttccccctcaaagcactacattcgagggcgtatctcagaagggtccaagaatcctaaacttaaatgtgccttccagattatgatgaaggtatacatgtcaagataaaaggataggaattttacatcccgtttaatttgtagttttaaaatatgtagacatgatatgtgggcctccatttgtactatgactcagttcttgcaaatattaagggtagacctgtccctgatcttcgtgtgtaaaatacacctcctctgccactctattcttaccccagtctacatttcttcataacatcggtcacctctgatctacatttacttatgtatcatctctttacccccactggaatgtaagttccacgccctagagtctatattttgtttactgccttatccttatacctaaacaagtgcctggcatacaccactcagtaaaacttgaataaatgaataacaaatctaggctcaaagctcttacagtgaaaggggctaacctggcagtcacaaaggaaaaatatcactgtgacaaccgtctgagggcaccttctccccttaaaataactcactcaaaacagtggagctgcaaaggtgaccagagaaatccattaacaccttagtgcccatgacaccaggtgagttgatcgggctacttgcgaggggacatgtgagtgagcgtggagagctctgagtaggctgaagagctggatgtgggggattgggctgctgggaaccccgaatgttggaatcgccctgacaaccttatgagggtggtcagtatgggtcctgaggaaactgattccacggcaactgcccgccaacccagcacaccccacatgaagaggggcttctgatccatgagtagggcccctcaaatgatgttcccctttagatggcatggtcatcagcaggggtgggtgcatcgatcctgtggggtcttggtggtcgcagaccagcgtccctcttctcacatctaattcacaacgtctcatcgctccgcgggagcccaggaacgccctacaacagccgaaatccgggtcgtctattccaacggactcctcttccgttggatagggggccgtgagaggccaaacaacctccgcgaggctacccccgcagcgaccgctcggcggcgctccattcctttaccggactgtacacctcgcctcctggggcctgaggcgggaacccggtcgcgctgctccgaggcctcggcggaccgcgaaaggatggctcaccacccggccaggccagcccctgcaacaagctcagccccgcccgctcccgcgcccaggagcggccggcggggggggtggctgggccggcctcgggggcgggggctcgggggcgggggctcaggggcggggcacgtggctcctccttgcgggcggaggcaggcggtgccgcggcgccgggacccgactcatcggtgcttgcgtgtggtggtgagcgcagcgccgaggatgaggaggtgcaacagcggctcgggccgccgccgtcgctgctgctgctgctgctgtggctgctcgcggttcccggcgctaagcggccccgcggtcggcgctctattcgccttccgacccgctgacgctgctgcaggcggaacggtgcgcggcgcggtgctgggctcccgcagcgcctgggccgtggagttcttcgcctctggtgcggccactgcatcgccttcgccccgacgtggaaggcgctggccgaagacgtcaaggtgagaagcgggggcggcccgctcccccgtgccccgccgcccggacccctccacctgccggtgggcagcctcctactccgggagcgcgtccctcttccagtcacctccgcccacctctcctctccgcgcatcccacgcccaccaccttcatgtttctcagctccatttttgcctccgctcccttgccttttcctcttggccctcatcccgagcttctttccctctccgcggcctggcccccagacctgccctgctcgcccggttcgtcccccgccaggttactgcctccttcccgcgagaggtctcctttgttccttcctccgcatggtccgctgacaccttaccgtttcctggccagccttgtggcagtcctcttcctctcgtccagggacccatgtcatcttcctgccagttccctagctgctgtgggtcagtgctggggagaaaagggaacggacatccattttgcctcctgccacctttctccactccctcgactggttgaccaggtggtacatagacttcctttccatttttgtctttgatgtgggtatgcccacctggcagttttcctatctctgttccgggctctcctgacctgccgcctccagctccttagcttctgggccacatccttctctctcttccccgctcagacccttatattttaaacccatgcacccagaggcctttggtgcgtgtttggccttgctccatgttcccaatccctggttggggcaccaaaactatatttcctgaattccaaacaccatcaactgtgagacacactgttcattttatgacagcccaaggggtagaaggatagaaaaaaccactacatgtataaagatttgaaggtgaactctattacagaaatgctaaaatttgaaacacttaagacttagagtcgaggaaatatggtaataatagtaattaatatttaggagcacctatcatttcaggcaccttactaagtactcggcatacattgtctcatagtttctttccacaatttaaagattcctgtggtgtcacacatccacctaatccaggtagtgggttttggcgggcaggagtggtatagtgatagtgatttgttcctgacttgctgcctctgaatgagttacttcctgactctggtgctaggtcgctagcacggcctcctaccctgaaatggtcttgaatgagaactgtgggcatctttggaaataggcctttttctagagaaaggggaactgaaccattgttccactgttggtatttcttgataaattcaactctttgtggtagaacagtgctttgtagatgttagttttcagactcaccctcctcttttcctgagcagcttgcagattgtttctgaagaggcgagatggaaccatgtgtacatcttttagccatatggtcctggaaaatatttttaaatgaaacttataagctgttttgacctccagtttacacttgcctacatgcccactggtcccattagctgaacgtgcctttctgagcagtgcttcacaccatttcaacacattggtcaggggaggagtgatgtcaacacatctggtcaggggaggagggaggaagaacatgatcatggaactggaacacctaagataaggtaatctcaggggacattgtgggcatgaactcataaaaattcccagatcgctttccactttgaggttataagaggtgttcagtggctgcgatggacttattctagaatttcttccttcttgagagtgctggggggaaagattagcttcagctgactcacatgtttggcctcttgcaatgcagagtttttagttttcctatgagttgctgtctagatactgacccattctgctcctggatgagggttaccacttccaaacaggattcccagtgcatggagcctttctctaaaataagaaagcgaaatcagaatttaacctctgaaaggaaatggaaggatcaaagtctgtgggggtgagccagggtaaatgggaggtgggagattcagtggaaactggaggtctcctgtgagccattggtgtgagtcagtccttgagccagatctgttgggagggcactggcagaatctgctgtcagcctgcaatgaagaatgtcctccactcaacccaaaggggtgttccctggtgaggccctgctgagaagctagggttggtctcgcttctctctgtgtcctgaggtttcttgagaaaggttggttgtgggcccgcagagggctgtgctatcccaccctgggctgtgtgagtactgcccatgctctctgctgaggacacctgtatcttaggcaggaacagagacagagtgaaggtcacagggagagagaagaattttgcagccatattggctggcttcaggcatttaatctgactgaatagggttcatttcttcagtgactagggcgtagattctctaggcacctgctgccccggggcagagcatgtgtttctgagaacctggttatcccctttctattccagagcagctccggttgtctcactgtatgttttggaaactggtttatccaatttagaccttcattgctattcactggctaatcaatcagcaaatatttgttgatgataagcattgtttgcattgcagttggggaaatgagctactcatagaaggaaaattggaactgttacaaagctgtgtttgaaaaaggccaaaggagtggttcagccatttcttatggaacccaggggaggggaaagtcacagagggctaatctgatcaccagaggccttcatgccatagttatttattacacgcttgccttatgccagcactttgctaagggccttcacaggccatattatgacaatccttacccgggaaaatatctgtactatggatattgtcttcctcttttttaaaacaggtaagtaactttccaggtttacacagatgctggagaaggtcattgactccgctctttttggctttctggagcctgggcaggtagagaggtgggtggaggaggaaggatatccaggtggaaaaacagcatgtgccgagctatggaggtgaggttcgtaaggcgtgtgttgagtgacagtgagcagtgttggttttgccccccttctcttccacggcacaggccacatcgctatgtgtacctgtgattcccagcacagagcctggtgcagagtaggagcccactgcacttcatggtggccagtggcctgagcctcacaggattccaaatgacagcgtgagtgtagaacttctgctggtgccgtggatcctcttgactcagaccgggggtgtcagccaggtgtgagggtagagaaggcattttgtccatccagtgacgtcactgcccagaaactgtcagcaaggagaaggaaggcatgagttggtgaccgcatagtgctgactagctggacagggcataaactaatctctgtgtcaggagagctcctgaattcttcggtgtagagtccagagctgagggtcagtgattctagtcactagaccaccaggtctgactggctcttggtggtttgggtaaatctgtgctctgtcttcatggaagtccagacccacttaacactcggaggctgcatgtttcttgttagagttgtttgccatccagcacctgaacggttgtcagagctagaaggggcattagagatcttcatcctggccctcgctgatccaggaggaagcagaggtccagagagacatgtggagctacggtgctgcagccagttaaactccaagcaaggcttcctgctccacccagtgccctcccgcacttgtgagtggggcaggggacgctgcccttgactccagaccaagcccccagtggggctcagcagaatccccacaacaccccctaccagagggcatcccctcacccatcaatccaaatttacagctgtccaacttctcttgcctcgccacccttcccctctccattagtccatttttctgtggttggtagaaaaattacgctgttcagagcaataattgcaccaggaaagggtttctccccagtagtagagctagactgatactactgatcattttggtgttaggcatttaagcacctgacacttcaaaaagcctctgtcacccagctctgcattgcgttgacagtaaagctaaatgcagctttgctttaacaatggagcactcacataaggaccttctctattccatctctgttacttgtcaaaagacaaaattacaccacattcaaaaatcttaactggcttctattttgattctggaatcggacaacaccacattctgtcttacagaatgagtattctgatgagctagcagaggagtttggctttatagacagaaaaaggctgaagaaagtagaaacagatcaaaatctgattggttatttcggtcccttttaaaggttaaagcagaggagacttctgtatgttgctgaaactggcttgtttgaagatttgactgttaactcactctctcctgatcttggaagtcagatcgacagcttagttttggcttggtggcgtggaacttcagcttgagggactccatttggtttggtctcttgggccttgtgcaggagctcagtcccaaccaatggcctcctagaatattatttaacagttctccccttttggtcaggttctcacctaggtgagagttactaaaaagggcatcagcactactctcagtaatcatcgttttgggttttcggtcttaacacatcattataggttaaggtgtcctcattatcatgcgtttcttggagttttatcattccagctggaagagaccatttagcattcagcagagggctgcatatagatatttaagactctttgagaggtacagtgtaacagggaaactactgtaatgactctccccaggataatactaagagtttacatatgacgcttagccagggacccatgaaccaaaccaactaaaattgaagagatcaaagatgagccagatgaggaatttaccctttttaagcaagtactatttgttcatttttttgcaatgagtctcaatacactatgtgtctatccatgtgcaacagaaagtgtcagcaattgcacaattccctgttcgctagtaggtagcagttctattatctagtatcccatgactgggttaaataaagcaggaagtgagaacacatgggtctaaaagtctgactctataaaagggaccactatacagtttgaacaacagttgtgttagggatgttgctgaagttacccactgggcagactaaggatccctttggtcatgtaaagatctgggtttagcgtgacaaatccaacagtttgtgagttacccacagaagccactgattgtgaaattctaactacagcattatcctgccagacaaaaaaggtagatgtaatcaaggataaagtggaagtcttattccaatgaaactcttgttcaaagttttgggaaagcatgaagttgtcaacttcttgtcctggtttgcagtttgattgtcttggttatggcattgggcattttggtgaactctttgtgtagcgtacacgtcaggcatgagcttgtcccttgaaatgtatatcaagttgttcagcttctgtttatagggctttaggcacaaacagttcctgttcttagttggagaattgtagctagttattggaagaaactggaagaatcagaattcaatccatcttataggtagatgataaaaacttgaaaatgatcaacaaggctaaatctaataacagatgtactatagtttttctttaggaacatattttttctctctatagtacccccatttctaccaaagataatcagggtaagtgggaggcagaggtcacagtgagccggattgcaccactgcactccagcctggatgacagagcaagactccatctaaaataaaataaataaaataaataaaataaaattcagactaatttgcttgcagaaaatatttagtcacatagacttggcctaattatttacataagtgtggcaagaatagtgattgaccacgtaggctctcttaagtttgctttgctagaacttatcgataaggaatctcagattggacttttaacaattctcaaggctaggaagtcaacccaagcccaacttcagatttcacctgcagtacctataattcatcataggtatattctcaagtatggcatcacactcaaaaccttggtaatatgaccgtgtttcctattgtatcctgttgtaaagagagcagatacttattgaacttatgcaaatacagtattgccataaaaataggaatattcacaaatagtttctgaattccagagaggtctttagggagaaaatgtttccatttttgttcacaagagtatacttaccaaattgctgtaaacatagatagcttaaaagaaaataagttttcttaaatctggacaacaaaacattaaaaagaccagcaacgtttcaaatttaaaaaccagaaaaacccataattcttcattagttcatttatctcatgtaattaattcttgttgtgcttgatcttggttatcagttttgcagacccatcatttttttcattagagttctggaaattctttcccagtccaatcgtattatctcgaagttacagaaatggtacttatcagagacgtttccgtggatctccttgaagatgaagcacttcagattatagttgcttagaaaaaagcttttagaaaaacatcagaataaagcaattaactgtaacaataagacttaaaatggttgtggttaaagatctgatgagagttcatagtaataatgaacaattgacaaggaaatctggttattgctgtgcatacaacattttaacctaataaccaaattaaggctgataatgtatcatatttctaggaatatcatataattttggggatacacctaatagcaagtataaacatacatcaataaatataactcaaagaagattaaacatcatttctgtttgacaatgcttcccatataattaatacatcaaatgagcctaactagtttagtatccccctttgcagaatctttgagatgttccagggccccctgaaatgttccaaagttacttcagttcagaaagccttaatttagaatttgattttgggaagtttgtacaaaatgtcaaaggttaaaattaaaacacttaatcagcctgggcatggtggctcatgacggtaatcccaacacttgggaggccgaggcaggaggataccttgagcctaggggttcgagaccagtctgggcaaataggaagaccccatttctatattaaaattttaaaaaattagccaggtgtggtggtgtgacctgtggtaccagctacttaagcagctgaggtgggagaattacttgagcccaggagatgaggacaggtgagccacgatcgcaccactgcactccagcctggatgacatagtgagacctatctcaaaacaaaaacaaaaaagcaaaacaaaaaaaatcacttgatcaaaataggatccaggtcactgtgaagtcacagtcattcatctaaccagaatgataattaaaagacttcaaatgaaaatatagaatgttacattgttgcagaaaaaacagctcttttatagagaggactcattttcttaagtaatcaaggacctagtaaagacaacatgaagcacagggaatcatcttgtgaaacaaaggatctttctttaggagaattacctaaaaggtacagaaaaacctttcacttttccttttaagaacagatcaatacttcaagaaaaccttgttttaacagagaggaccaattctgatttttcatcagtgtacttttgatattaaggctcatcaaaaaaaaaaaaacacaaaactataagttagcccattcgaccacacttgaagttcttttctcttcacaacttcctttatccattggtttgtcctgtactgttcctctttctcattgtgaaataaccagtcactctctttagaacaaaatgactctctttttcccttaattaaaatacatccttacattttatgattcctttataaaccgtgccatacttcccttgcatacagaattatgtcccttattattttagttttagttgcttatattaattagtttttactccttagtaatcttaatttctagtgaaactagcaagcattgtgaactgtcttctattaacattcaccatttcataatttctagaaaatgtttcctcagcttttcatgcttattacagacccaattatattctctatgccatacaaaacaagatgccaaagcatatatactttagacttatgttcagcaattaatgtttcagtatttaatttacttagaaatgatattttatgaatatctatgacttaatttaacgtaaaataacgtaagaggaggctggatatgtggacaggggccaaatgaagaactgccttctggttgtaattttcttctaaagtcagttagagcccccagagaatgttgaatagagattgacataatcgatccacagaaagaaaagatcatttggtggctagagaggccagtgaggggtggagcacatagaacctcaccaggagagaaataatatgttgatgtttctctggaagccctgccatgagacctgtactagctcatgggacacggagggtaggttggaggtgaggtcagtaaaaaaccaatcacgggttcatgccaacctaggacaggcatgaagagatggaggtttgggtgagggaaagacttcagaggagagtggacaggatgtggaggcaggtggggatcagcaatcccctggtggggcagagggattgcatcctgggcctggcatgcaacaggccctgaccatacctgccttgtgcaggctgccttgcaggtgaggtttaaagccaaaggatgcaccccagcttgcagatattggataggctcaagttgctatccttgtgtgctaagggagtcaagaaggctccccaaaagtgtgtggtgggggggtgttgaggaggttggggaaatggcatcataggatgtagctcactcactctgctaaatacttttgacgtctgactctggtaaatacctccatctacttcctctcccaaccccccacccacctccctccttcgaggagtccagaagctacaatgccaaaagcaactaccagcaagaaaggtgggggaaagaagggggtggtgtggccacaggccttcctcccgctcgcagagccccctcccttgtatcagccccaagaagggccagcttagttgccttcttccagggatgcgtcagggtgtgccaggctcttcctgcatctgtctcgtggaggtgagggtacactccttccccaggcgtaacgtgttcttaggagctctgataccttctgaaattgtgtcttctgagacgtcgtaaggagtaagttctagggtggagtattagggtgtttttgcattgtaaaagtaagtacctgaggctaggtaatttataaagaaaagaggtttaattggctcaggttctggaggctgtacacagcatctgcttagcttctggggaggcctcagggagcttttaccatgacagaaggcaaagcaggagaggaagcaggagggggttgggaagtgccaccctatttaagcaatcagatcttatgagaactcagagtgagaactcactcgttatcaagggggcaggccgagctgttcatgagggatctgcccccaagatctaatacctttcactacctaatctatacctttcacctcgtctaacattggagatcacatttcaacatgagatttggaggggacagatccagaccatatcaggtggggtcagaggtcctgctaaaactgtgactatcagggatgtattcagatattagtgttctgtacttaatgggtgctgggtgggctgcctgtgtaaattcactccctgcccctggggcatgagcttcaaatgggaattgtgcctgccaccaggcaggcccctcctcctctcatctgcttcagagacgcatgtgggtccagctgccatggacgtcatccgagctgtccaggcagacactcccagtctggtctcttcttgctcccttctattctggctccatgcctcccaaaaaccctcctctccaggcagcctggtttctgccagtcctctcctcctcaccttgctcaggcagttccctgcccactggaccgacggtctaggttcaactctgtttcacctttcctgctgagcccatgccttggtctgcagggccgacctctccaaacttgagagtctgtgccacatgatttggcccctgccactgccctctcacggcttgtgtgtcttcctctggcgcaccttggcttccagctggagcagcctccatgtgggtggaactttggtggatgctccggggcacctgacctggaacctgagctcaggagagctgcctggtatatgagcttgtttctctcagttcctgggctgtggcccagaatggtgccattattctctctgccaatgtttcagggccagcagccttgtggcccggggcctgatgcaggggccagactctggcctcaaggctttttccccgcagttcctggattccagatgctcctgtttctgtctggggacccagttcctgtaccctttaccccagtcactcaagctctgcccactaccagtatctctggccccaggaaattccctaagggtcccctggggaattccagatcccctaaggcatgttctccaccctctggactgatcccatttagagccccagggacaaaggcaataccagggcttttcctggggggtgggggctggggggatggcgaggagcagggcaaactccttcaacatctctcagcccccatcctggccccgattagtaatggagaaacagataccattatgaggcagtatgacttatgctatcatccaaaacacaggttcccttttgtgagacgctagaaatgcagaccaactggaatattcagaggtccttttccaaggaaggtgtgacctttgtcataagagctttgggatcaggtgtttgaggttggcaggggtgaggcattgcattaggggagatgggcgggcagagggggtacagcccctcttatttacccctgggttttttgtcctttcagcctggaggccggccctgtattcgccgccctggactgtgctgaggagaccaacagtgcagtctgcagagacttcaacatcctggcttcccgactgtgagggtgtgtgactgacaggaggggaaggcaggctgggcctgcttgtttccctttataagggaaagggaccatgtgggatgtgtcgggatgggcagatttcactgctctgatttgagctgggaggtgatcatcacttgggctggtgagagctcccacctccaaggtcctcttcaattgctctccctcttgacctccaagccttaagaggtctgatctaacctataaaaccaggattcaggctctgacccacctgtgggcagggtcagactctagaagccagtggtcccccacaaagggaccccagacactctggcaagcctcagcctcctcaggcaaaatgccttgaaccacaggtagctaagaagggacctgtcagggtagcctcaccccactgtcgaatgtcagtgcctcaggcagcagggatccccggcacgggagttatcacacccaaggcagagggctttgtcacccccgctctggtggaaagtggcacgagatctctgatgatgccttactgccagcctgcccagtgcagggcatcaacagcttaattaacgtctgaacagcttccaagctctcaaataggaggccctggatagcccagggcagcaaggctgctgcagttatggtgaggccctcccctgggctcaggcctggctccaatccaattagttttcttccagattagagagccaaattcaaatctctgtctctgtagcaccagctataaataatatgtaccctcccaccgaatggcatctagaaaaccagtttcttctgtagccattaaggattattaggaaatgccttgaaagctgaaatgccaagcattgtccctggaacaagatacctctgagctgggggtagggcagccaagtttcaagcagaactgtgagccagaactcagcttaattaccccagcagcatcatccgggaagtaaggccgtggctccaccaggaacatccagctctaactccatgtgaccttctgttcctcgagcccagtgcaacccccactggattcagggtttccacacctaatagagtcccttcctaaactgttaccacatagggtcagggccccccaggccccaggtttagctggaccaggttggtctcctgatagcgaaccaacagctactgccgtgtcattgaaaagtggcgcagagagtctgcatgtcaatcatccctttgaaatgaaaggccttcctggcagggacatgtgctatctttggccctaaggtgtgtaattgagaatattcaaacagggcactctgttccttggctgaaccagggtgagtggccctgagtgggaagctgtgggcaagttagtgtggcacaggaaccatcattcacaggctgatatttttctcccagtgagcatgagccgcaggggtgcgccactgcccagcccccaggggaggggttgacactggtacagcagccagggcaagacaacgattggagttctgtagggcctgacacctgagctttctgactctgcctgggagaggctggcacagcagggatgaaggaggcggcctaggcccaggaggtcagaggctcctcagcgccacccatgtcacgcagcgcacgcagcctggatgcctcaggtgagtcaccatctcctgaactcctggctggctgtgggaggggcactgggagggccctcgctgggctcctcagccctccccgcctccagacgggcagcacctggcagggccagtctggtagtcatctgtccacagaccaaacggtggcctcccccggcaaagcctttcctgcctctcctgaggaacctgtggctcagtttggccagggggaggcacccagtgcccagtccataggccaagtggcttgagctggcaggttctgctctgaggtcctatgcagcggctctcaaatagtttcttactgtgaccaactgtaacaatacacatttttacattgtgatcccaaagttggtatgtatctattatcattaaaccaaagtttcataaaacaagattcttactaagtgcagttaaactgtgatattttctgttctattttttttttaaatccggctgtgattaaatacattgatttgacagctcattacaaggtttttctagtgtttggaaaacactactcaaacagattccaatatccagagattcggggccagaagaacctgtgtgcccttggcagaggctgacctggagactgctggtgggccagagacaagccctgttgccctgcctgctgccctctgggggctggagcctgtccttgcactctgtcctgaagagctgaaaagcgagggcccatgcgaagcagggggaggagagagtgcttttggtagatggggacaggcccacacacaagtctggcctccctgagtggcatgtgtgactgtcctttcttctgtctccagccccttgtcactatgagcaaacagtgagcttctaccagcccagccgtttagcaaacacctgggccctgaagggcgggccagctgtgtcaggtccccatcaggttgagccagagcccagctggaaggaaacaaaggcgtgggagagggaggggctggttggctgaggttctggctggagcttggcaacctagaggctggaacttccgggtcaaggggcttctcgtgggcctcaggagtgcccttcagtgggaatagaatgggactttttatggccgaaggccggccggagcaaggggtacacagcacagcagcataggggtggggaagggcaggtcttctccttcgaggctctgaggagatcagtgatgtggtttcaaatccaggcctctctgcttactggtgtggcttggaaagtcacttatcagtgccccagccgtgggccccagtttccttgtctgaaacatgggatgataacatccacctaagaggaccgttgccaagtgtgaagtgaggtctccatatgcaagtgccaccatgctagtgtgatttggacttcagtaaaagttagtttgcttcttcccgttgtcccatctcactcctgggccacccgtggggctgctggtagctggtgtgtgctgctgctggactgtgtggcagtccatccatctgtcagcagccactgcgggcctacttgtgggtgcccagcaccgcactcaccactgcaggcgtggccaggagcgtgagatccccagacccatggccagtgagaggcggccagggataggtacccagggaatgccacaggagtttgcgggctcacggagctctttcactggtcagagaggagtgtgtgtaggagaggacttctactggtgttgaaggacagatggggtttggctgggagagaggaggaatgtgggcgggccttatggcaggcgagaaggtgagagccaaggccctctgtgggcagggcgaggtggcgtgttgagagactcgtccagctgggcagaggctcatgttgagggatgaggcagagctgggggaggaggagcccagaaatggcaggtccttgaatgcaggtttggaagcagggacgccctgtgagggacagagtctgggctgttaccttctgtggcttttgctagaaggtgagatgtcagggaggagacaggactccaggatgtctcctgtctctctctggaaaaaggaggtgggcccctttctcgcagtcagctgctgtttttgaggtcttctccatggataatccacggtgttggaagtggtaaggtaatggatcctcatgggcttaccataaaaatatctggaggctggaccattttcctaaaacgttataaaagctggaattgaatgccatcggtgtcacccctgggaagtgtgcttttcttgagctcttttggccccaagatagcagtcactccatagtttcgtgaagaccagcctgtgttgcctggttttctgccattagggagcagctagaggtcttccagtagctcctgtgtaagtgatgaaagaaaagggctgggtgctgactgctcctggagaaaagcaacacactcccgagtcttaattgcctgcttccagggagctgtggtggtttcccttgggcagggcacacgcccagtggttgacttaataaggatacattttaatcagaggacaaaaatgtgccctgacttatttccgcatgggcttccagcatggtcaaagggcagagattctctgttcagctgaacagtgtctattgagagatgccagacactgtggagcttgcagagataaataaaatgtcgtcctcttcctggtcagaggtgggtgcatgggtgagtggtggattcaggttgaagttcattgcactggagtggcgggagtggagggcaatgtgaggtgagtttgggtttggagcctggaaggcttgaatgcagtgagtttggacattattcattgacagtggggagtcatggaagagatttgggaggagcaaaatgttcagaccagaactgtgccttagaaaactaaccttagtagcagtgggaagatagctggagtatgaaaagattgagcatactaaaacttctgagagcatgaaaggggggactgatgcagtgacccaaaaatacgtcatcatctgtcgggcctggtctagacaagcaggtggagaaggagaggacttttgaagaggtaacacggaggtcaaattcataggactttcagctaactggatgacgggtttttgaagagggggatggtgtgggtggcagggagggggctggttgctgggtgaggtaaacacaagtggcaaagcaggttgagagaggggtgattcagcttggggatggtgggggaggggctgtatccagacacctgagtggaggccaccaggaagaccaggagtctaggacaggtgaggtctgagatgcagagggttcagatggcaaatcatttgacaaagtcattggctttggcaagggagaaatgataggtttgttcattgatccctttatcactcatcatttagaagcaagattgagcaacttctttgtgacagtgccttcaacagcttttaaacagaagagtgtcaggacctgacatgtgtctgtaggagagaccggggtaggagatggggtggacagtgggcacaggagagcagtcgaaagtgaagctaggaccagggcaagggggcaagtaaggctggtcagtgtcaagccaaccaggggagggtggcaacgtgaaagcaacaaggagagcaaccacaaaatgtggcacgaaagttgacaaatgctcgccatgggaagacaaacaggcagtaataacatctgtaccagagagaggccaggagggcggggagagatcactggatggctgaagagaaggtcaccaaggagcttccctagaacggcttcaactgagggttgtgggatggccagagagcagtctgaggagcaagggcagacgctgttccaggaacgttggcagctggggacacgggaaggaaatgcggttactcgagaaggaaggagggcctctcttcatcccatcctccttcccttcccatcctttccttttttaagggttagactagaaggattcgaatcatctgtaggcctagttgggcagctgtagtagaaaagaggaatgatgagagatggctaggagaagttcctgaagagcgtgaggcgtgggagccagaactcggaggagacattggcctggaggtgggtgcgaagcttctgaggacagaagggaacagctgaggtgcagcagggccttccttcagcctgcatcctggggagaggctcttggggtccctgcatccccctgggccactctgctgaccgaggttcctggtcagactccaagctgcttgtggctgctgggatcttgaggggtgcctttttaaaatttttttattttttgagacagagtctctctctgtcgcccaggctggatgcagtggcatgatctcggctcactgtaacctccacctcccaggttcaagcaattctccgcctcagtctcctgagtagttgggatacaggtgcatgtcaccaaatttggctaattttttatttttagtagagaaggggttttaccctgttggccaggctggtctcaaactcctgacccaagtgatccgcccacctcggcctcccaaagtgctgggattaccggcatgagccactgccccgtcctggagaggctgccttttggtagaagtaatgcaagcctcttttaatatgggcactgctcagatgtgggtgacctgatggttgatgacaaaaaaatgaccatattacttttcaaggtgaaaataacagctgtagctgtgggaaagccacccatctcaaggcttcatgatgtcgtgttgttctcatatatgtagaaaccagtcaaagtgtaacctgtctgtaaataaacaaggcaccatcaccatgaataactgcagcgcaacatcaccctcgggtttcttttttgtttttaattttatttatttttaatttttaactttttgtagagatggggcctcactgtgttgcctgggtggtcttgaactccagggttcaagtgatcctccctcctaggtctcccaaagtgctggattacaggtgcgagccactgcacctgacctggtttattatttgtcggcaaaccaaacccaaatagatgtatcttcaattttgttcatgaaaaagtgtcagtccataaatgccgtaactacattatcaatacgatctcctaatcaaggaaatttatgatcattttcttaagtattagataacataattttaataggccaataaaattaaataactgtaaagaacgctatttaaatagtgtggtatgtataagtggatggttttcatccacaataaaagtttatattaatgttttgaaagagagagtaaagcagtgagcaggagtaagggcccgggggaggtcacagggagcagaggttgcagatggggagagacaggtggcttctctgcagcctttgttcctcatgtgggagaggtagcaggtggcttccagattttctgcctacaaatgtctgtaacaaacaagtcctagcgatcatggttcctagtgtttaaaaggtatgaaggagggaaggggatgctggtggtgggtatgatggtacagttaacatgtaccagttccttgatgtatgcactaggtaccatgctaagactttagatgtatggtcatggaatcctcacaagtcttcaaggtagatggtgtcatcctctttcaaagatgagaacacaaaggttcggagcagttgatgcgttgcccaaggtcacacagaagagcaaagcagaaccagtccttgaacgaggtctgccagagcccggggcctgttctcactgccagcttgggataaggccaaacagctctatcccaaggagggagaaggaaaccagtgttggctgttggaggcagaagtccaaggtagtgaaaagtggccccgaggctagagtcccaaggaagaagcctcttcccagcctgcaggctctcccctaggcagttcagtggccggcttcaggacaactcaactgtgttccctcctgaatcggaagagcgcaggcaaaagccttggcagtgtcttgccgcctgggcagaagcccagattgccaggagtcaggctctgttcggtctgtctcttgccccaaggaggtgacagactaggcttggggtgtcatgtacatgggaaaagaggaaaagtggtgagttaaatcagctagtctgtagcaaggcatgtttccccagggactcaggtcccgcttcaagagaacctgttctggagaccccttccttgactgtgtctgctgtgctgggtgggacttagtggacagagacagcagcctgtaagccccttttcccaagtaaggagcaaggcacattgacatagaagcaagctgacatttcccaagggacgtaggaagtgcctgcacttatgttttcagatgagtctgcaaaggaaaacagcagtggtacttcatcactcatccattcataaatattggttagtaattacatgctaggtactgtgctgcatagaaatggccctcgagaggaaagtgtatgaactgctgcccacaggatccatggatgcttctgaggggtgtgggaggtaacaggggagggagccagtgtccagctcctagagcaacctccccccaactccccccattcaccattttacagatgaagaaacaggctcggccaggcgcctataatcctgacactttggaggctgaggcgggcagatcacaggtcaggagttcgagatcagccttgccaacacagtaaaccccatctctactaaaaatacacacaaaaaaaattagtcgagtgtggtggtgggcgctgtagtcccagctacctgggaagctgaggcaggagagtcccttgaacctgggaggcaggcttgcagtgagccgagatcgcgccactgcactccagcctgagcgacagagcgagactcgtctcaaaaaaaaaaaaagaaagaaagaaaaaagaaacaggctcaacaacattaagtgattgcccagccaccgcattgaataagtaggcagattttcagagcaggcctgcgtggctgcctcttggccactatctattactgatgcccacctgtgtgtttgcttccagttcttcaaggctttaccaagaacggctcgggagcagtatttccaggtgggtgcccagctctggttgtccgttagcatcttcctcccccaacctccctcttcacctgggtttctattggggtggagaaaccctggcagtcggcagggtcgagggtgaggcggtccccacgggaagcctaacttgtgtctcccaaaactatcctcccagtcagctttagggaaaggcaggatgaagaagcccttcaggtggacatatccagggccctagggtcggggcaggggcaccatgttcccagaagagctctttgtcacaatggggttggcgcccagagagcagaccagagcccttggggaaagtcctgacgctcccagttctgagggattctttcctgtctgagggatgggtgtccttgcactacttgggccacaggaggactactcaagccccattcttctagcacagggaaggactgacgcctcgtcgtctctgtcagagctggctgtgccctcggccctttgtttctgggagtgaaggtggccaggtgctgtggaagcagctctgctctcctgacactccgctcacgcctgttttcatttacagggctggtgctgacgtgcagacgctgcgggagaggctcattgacgccctggagtcccatctgacacgtggcccccagcctgtcccccactggagcctgccaagtactttgggctggggcggcttagtgcattgtgggccaggatcccaggcctgggagtgagagggtggtgggaacagagggcggggaccccagtttattttccttgctgcctttgcctgtggggctcacacaccagctgctggagctactccagaaccaagtggcagctgatggctggtggtgggcttcctatcgacaggtcctgctgaagagccctgtttttctggggctgactgatggtgcaagggtccatccaccaggtgggaaggaaaagatggatggggcttctccaggttgtacctgctgctgtttctgctaccttccctcaaaatgtttgcgggacgcagcaggatttcacatgctctatccccggaaggccactgagagtcagaatggcatgaggaggaaaaaggagatcaaatattttgaggaaattggggggaggtggagagaaggtggtcatgcctggggcatgggggtggcccctggcctctgtatggcagagcatcaggtgcagtggccggtgctctgtatctgtcagccaggcaacttcccagcttgcctcttttccaggaaaatgaagacagtaaggtgcatggtcttgcccaactttcccaaagaagagacagctagattaaaaacactaggccccccacttctggatcagactcaagataggataatgcccacctcggaggactcttgccaagaaggaacaaatccatgaccagcaggagctgctagagggagcccagccttgtacacagtggaggccccaggtgctagaaggcctcacaaggccgctgttggtgcgcagaggctctcttaaaagtttgtgtgcagggctctcagagacatggccctgctgagagattgtgtttccaagtgtcagttggggttgaaccaactcacaatgactcctttgtcatctttcccaattttccatcctccagagggcctccggggaccctggatacagcatagtctttatgtggtttggggttccacagccagaccctgttctccagaaaacacccatgtcagcctgtgccctggtccttgctgcttctatttctcaatactgtgtttccatctccctccttacacacacacgtacatcctcatggcacattttcagcctggggtatctcaaaagcaacagctcaagcaatcctgccaaggtctctcaaagtgatcctttttttttttttttttggaagacagaatctcgctctgttgcccaggctgggagtgcagggcacgatcttggctcactgcaacctccacctcctgggttcaagcaattctgccgcctcgcctcccgagtagctgggactacaggcgcctgccaccaagcctggctaattttttgtattttagtagagatggggtttcaccatgttgcccagggtggtctcaaactcctcagctcagcaatcggcctgccttggcctcccaaagtactgggattacaggcataagccactgcacccgcccaaagcaatccttttaaagaactttaggaaggaggtagagatgtgtgatgaaaggtagctgcctcttctgaagtctgagggtgggagtggggaaaggggtactggcccccatgtagttgtgctcttctgccagcctagggaagacccagggaagaggtctgagaggctggccactgatgccaccctaaaggctcaacacctcttttcctccaccccagcggggtgcactctggcctcacctgtctagcatatccatttggactgtcactggctgggctccagcatcaatacctgtttttgtttgttttgttttgttttggatatgttttgttttgttttggaaactgggcccagtttcctcatcttaaaataaggagattgggttagagatatagatggcttctaaggtccctgaacccaaggctttctgattctttcattgctttttaatgcctgctctagggaggaagagcacatctcccccttggtcgtgacttgtcacagttccagacttatagctgttgggtttaataccccccagctctcaggggaccaataaaaaccacatccagtcagcctgggcctgcccagcacatggagacaactggtctcaaagcagcccttcccagtccccctccccacacggctcctacccacttccgactctttttgtttgtttgtttgttttttggagacggagttttgtcttgtagcccaggctggagtgcaatggtgcaatcccagctcactgcaacctccactcccgggttcaagtgattctcctgcctcagctgggattacaggttcccgccaccacacccagtaaattttgtatttttagtagagacgggctttcaccatgttggccaggctggtctcgaatccagacctcaggtgatccacccgcctcagcctcccaaagtgttgggattacaggcgtggccaccgcacccggcccactcctgacttttaaaaagagacaggaagcaaaaacaaaaccagcacccaaggtaggtcagatgaagagccagggttagataacaagagcaacatcctttggactaaaggtttggttgactcccttggagggccctgtgtggaagcggaggagggcgggaggccatacctgcagcactgcatcaccagcgtctggcgttgccagcggttttgtcttattctgctggctgtgcagagtgactgccagaattgtctcttgcaggctggaggagattgatgattctttgcgagaaataacgaagagtacctggctctgatctttgaaaagggaggctcctcctgggtagagaggtgagctgccctgaagttccctgcaattcttggatagccatggagaagagccccagtttgggagcagggcttttcctgccaattctagggtcttggctgcctgggcttttagcctggcattggcctgacccctgctgggagccatgggaagtgcaggagctggactttgcgtttcaaaaccttgctgtttattcttatctccttcacggaaatcaaatataaccctgctgttattgagcattggaccagattgctgacacacgtagctgctaatccccaaaataatgaaggtgatcaaatagcatgcccaagatcacacagctagtaagttggtagaaggggctttgaaccaggtccgtctggctccaaagccaatgttgtttccacagtgtcccactcctgggactggagtgaaatatttgggagggagggaacattagcgacgccctagccccaccgaggaaatggggtcctttacccagatgccggtctgtctcatgtggggcatccgtgagccactccccagcgcttccagctgcagtgccctgtctagaaagcagggatgattacgtttctcgtagtattgttgggaaggtcaaatgcagcagtttatgtaaagggcctggattgcagctgcacatagtaggtgctttataaggatccattcccctcgcctaatgcagagagctcaccatctgccattggttcatggacttctccatagaccagttgtgagcttttcccagctgcaaagtgggacgtgccagtgcacgggagatactccaagtcagtgcagggagacaggcatgagagaggcatgaaattaaactgcactgtcagcctgagtgattttcctgctgaaactcaacaagacagctgagagtctgagctgaagccagatgctgtctccaggcctctcagccctgagagagaggcacaggggttggggaggggaaagacagcttggcttaaggagtgcctgaccctctgggtcccagttcatgcctggggtcatgcctgttatgtagaggtgataaatggtgattggatcaggtcttttccctcccctcccaccacagtccttgagtaccaaggggctggggtcccatggttggagccaagtgccccatgcccatgcagtggtgcttagcgtgggaccagtggctagggcccaggttctggagccacactaagctgggatttgtagcacagttcaggcatatgcagctgtgtgatctggaggcatgatttcacttctaagcctcagtttctccagctacaagatggagctttatatttatttatttattttgatttttgtgagacggagtttcactcttgttgccaggctggagtgcaatggcactgtcttggctcgctgcaacctccacctcccaggttcagcatttctccttcctcagcctcccaattagctgggattacaggcatgcaccaccatgccggctaattttgtattttcagtagagacgtggtttcaccattttggtcaggctggtctcaactcctgacctcaggagatccgcccacctcagcctcccataatgctgggattacagacggagccactgcgcccaaccaggaactttatttttattattttgagatggagtctcgctcttcgcccaggcgggagtgcagtggcacaatcttggctcactgcaagctccacctgtcaggtcatgccattctcctgcctcagcctcctgagtagctgggactacaggcgcccgccaccaaccaggctaatttttttatatttttagtagagacggggtttcaccatgttggtaaggatgtcttgatctcctgaccttgtgatctgaccaccttggcctcccaaaatgctggaattacggtgtgagccaccacgcccggcctgggagctttatttttaagtaaacacttatgtacctctatgtgctagtcactgttatggcattttaataacattaaccccttcagttctcagaacgcccccctgaagttggtggtattattattattgttgttattattattttgcaagtaaggaatttggtcagggaaaggtttggtgcagtggggccaggattccaatgcaggcaactgtatgtacggtgccgcatctcttagtctcctgagaatagctgctatttcagtgtttctctgagataaatgaggcaatctgtgtggacactacataatacctatgcaatacaggttagctaggctttctctttatttctttctaaaaaaaataatgatgactgatgtatatttttctgattggagtctagataggaagctttataaatataagaaaaaaggctagggggcgccacctgctcatggtgaagagtgagacgtcagtaacagaagtccgtgcctgccatttgcagatggccttccgattatgctcagaacttctcttcccatttctaatgtggggacattgtcatctcaacaggcctcttgttgccttcagagagccccacgttaagaaacgttttcagatcttcttatactatacacattgaccaaagggcccctctgactactgcacatactgggctcagagttagctgctgtttagaagtttacccaattccaaaggtttattttgtttgtatcctacccatgaatttgttaccatatgtatttgaacgcaataaaatcacagttctttaaacatctgtgactcagcttccataaggaagactgctcttgcccccaacaattgatatttcaaacaaacaataatagtaatttctaaagggatcttttccctttagaaaaatgttatgagaaggccctggggatcctggacatcagagagcagtcttggggtgtgaaggtcttaaagacaagaacgtgctggtcagtgcaaaaaacaaacgagaattaaaatgaaaccacattttattgtgctctttacaattgctttcattagaaagaaaatgctacccagttgggactgtcgtaagaaattaaagcgttgtggcatgcacagctccaaggcctctcctcctgggcagtgattggcacttgctacctatggttagctgctgttgatggcgagtatctcttgcgcatcagtgtggtccactctttgtggtttagagtctggaaggagcacagctgccatctgggtgccttcacaggtcaccgagctggacccagccctggctccctccacccggtggcctggcccccagatgttctgctgtccctgaggtggctctggacctgtcccagcacaaaggcgtggcggtgcgcagggtgctgaacacaaggccaatgtggtgagaaagtttggtgtcaccgacttcccctcttgctacctgctgttcggaatggctctgtctcccgagtccccgtgtgagtatcctgtctcctggcgtcccctctctccctccctgtgctcatccttccttcttgcccagaggggctgcccgcctttcacagtggcaacatgttctttctgaagagccccctcaggagaagctgcagtctgctgtctgcggggcagcgcctccaccgtcaggagcctgggcctgaaacgctaaccctgttccgcagctcagagcctcaaaggcctcagccccccgcacccagtgtcgcctgcaccctcattacgtccccacccagccctggccctcttccccaccctcttctgttcgcaggcagactcattggcaggctacggcctggcaagcactcgtatatgcctgaccctccctccctttggttttctaattgcagaaagttcattagcagccagacaatagccagttccaaaatgccgagagaaaacaatcaggcagcctcagcccctctgccaggctcctgctgctgaatggcccgttaatggcaccagatgggccttggtgccctccctgggcagatgattgatgtcagccaggccccgcaggcaggagcatgggccagggaggcaaggcttgcctgtggtgcctggtgagctgctcctcggggccctcatgccgacccacacggcgccgggcagggtggccacttggcctcaccctggcccagatcactgctagagggcccaggaggtgcgatgccaccaaggacagggaggcactcgctttccgggaggcccagaaagtgccagtgatggtggggagagaaggcattgtctcctctctccgagttgtggaggggaaaattgtttgtgacgatgctgcctcccgagccatctgctcaccgagaaaccaggatggtggagtggaatgaagccgtgcgtcccatgccagctcccccggggcagccccacgctgctgctggacccggcgtctctctctgcaggtgccctggctgtgggtgagagggatatgcactcaggaggtatcccgtgccctggaggactcctccctgtcggaaaaaagaaaaaacccaaaaagaccgtaaaaagatttagagaattctggaggctctttgtcattgttgcacctgttttttgaaaaatcccatatcaaactccctggacttcttagggggtaatgtcactatagtacctcagggcgagcttatggatgggcagctgccatattgaatctcggggtcctggggaagggagtcacactccgccgttcctgtctgtgggcaccgggctgtcccgtgccttccatgccctgcctggagccagagggccactgggggaattcttgggcccaattgccttacaggtgaggtttgacatcaggctggtgtcagagaggctttccagagcatgtgcagtgattgaagggttacagcgaggcctgggtgccgtcttctggcctcacagaggacaagatggaattcgttcacatatttaataaaccttcctgtccgatgagccacccttcttcctcttctgacttggttagctctaatcttgttctctgcacttactgcctctcctccctggttctgtgccccacaggctcatggaatccaggtccttctataccgcttacctgcagagactctctgggctaccagggaggctgcccagaccacagttgcaccaaccactgctaacaagatagctcccacgtttggaaattggcagatcggtaaggctacgcctggttctcctcacttcttctccttccctgatcacagaccaccacaccttcacacccacgccctcttgctcattcttcttccttgtatatgattagtgtgtacattctgagccaggctgtcccccaccctggggtctggccatgccagggaccttcaatgtgtgggagcggcatttagctgcggtgcctctggtgtctgttgcgggccggggctgactggggaatgaacaccttccatgcccacgctccttcagcttaactctctcacaaatggggaatctgcgtgcaaggacactctgaggcctccagaccaacttcccaccaagcaattatttgtgcagtcaatatttttgagtactcactatgtgctaggcactgtggagcagatatgtacaggcagatgcattctctgcttgtgcagaccctacagcatacagcatccttctaggaaggcacccaacctcacttgaatgcctgtggtgtcagtgagttcactgcctttcaggtcacctgtgtgtgtgtccacagtcgtaagcatgagagagctgctcttctctcgaggctcgttgccttttctgttgtggttgggcagtgagacagagctgtagacctcctgcctggtaccagctgcataccaggtggaaatgtctgaccagggagctcagagctggccaggcggtgcccctcacaaggggatgcacgagacagtgggggaaaggtgattgcaagaaggacttgcatcctagcatgagggactttaagggtggaaagtgccaaatggagagacttttagtgatcaagggagaaggaaagagagagtgaggggtggtgtaatcattatgatcattccgtcttatgaatgatcatcataatcattcgatcattacagttatgcaaaccattgacgttctttaatagcttgggctggtgtatgtgccaggctctgtgctgggcaccttccctgtgttacccattcagtcatggggccacttctggaggcagggcacaggaatggagaggtaaactgaggccaaggacagcaaagtggaacacagaggagaccttgccctgaggaggagcataggcagcacaatgcgtaccccattagttgaccttattggctctttccaacctcaggaggttgtcatgaggggtcaggagcaagtcatgtgttttacaggtgagctgactgaggcccaggaaagtcactgagttgcccaagctcacaaactagctcacagtcaaactgaggtcagaacccaggtccaagagacaggggaagaggcacccaactttcctggcccctgccatcagaaccctgagccggaccccagcatgatgggcctggggccagcatggagcctccggcccttccatgagggctcggagaggtgtgagatgggcccacctaagatgtgaggtccggcagctgtgagcacatcaccctgaaagaaatacaggccctgcttcccctcctgcccccagtcgccatttcccagactggtgggcagctaaaccctggtctttcagagagggcccagtttttccagagccatgtcgttgtatgaacctgctggtctgattatgtctagtggtcttggctcggagctggcctgattatgagttgcaggaggggtggctgtgggcctggagagagaaaactcctactccctgccagggctgctgagagttttttacatttgtgcttttatttgatcctctcagcaacttacctgtggcaatgtgttattcatatcttacagatgaggaattgaggctcagagaaattaggtaattacccaaggtcacacagcacatttctggcagaagccagtggtaacttacaagactctgtgccatcagcagtgccccttctcttctctccctttagccctggatgctccttgcagcccctcaccatggttaatacttctttctctctctatctccctctgggtcctcagctccaagatcacatggctgacctggaatctgcactgcactacatcctgcggatagaagtgggcaggttccggtcctggaagggcagcgcctggtggccctgaaaaagtttgtggcagtgctggccaagtgagcagggccatggcttcccttgtctgtgcaattctacggatggtcagtgtgcgttccgtaagctgggcaccccgtcagcccctccctccagaagcccatggtctggctggacacctgacccacagctctccctgtccaccataggtgataccctccagcctcagccataccccacccagccccacactgccagggacaaccctgccccatgcagcagtgtgggtgggacacaggcccgtgccccccacctggggatatttccagctgattcagtgactgtggctctgcctgccgagtcctcagtcagagccccagtgtggcttcccacccctttctgtggtcactgggaaagaggacccctaggacaccctggcgaaggagaggatgctcttctgatactccttgcttccccccagtctgacccgatccctggccctggccatgccttccttattcctttatagtttcccgggaaggtggctactccacgaagggtagctcctatttattgaggacttgatgtttgtctggatttaatccttttaactactctgcgaggtgggtggtttattttgtcctccccgatttagaggcccagggagctcaagtgccatgccttcgttctgccagcctgaaagtgttgtggtaggccttgagcctgtgctccttcctctctgaaggtgagaggtggctgccattccctctcgcgcccttccctttggttccagatcctggccattgcgtccctgctggaaaccctggacttgctgctcagtactgctgagtcagatgtggctctgggcgcttcgggtttggccgctggccagcctcccttggccctggggcccggatctgagcccaccctcctcagtgtgggtctgcagaagctggggctgccctcgggtgatttgtgcctctccttgggaacttcctgccagcctgtccctccttcccacctccctgtcctggccccctggcttggtcacatgaatgcgtggtgaactgagagggcctgacagggacatttcagcctaaggcaggacagtcgttggcccctcacgaagtcccatgcaaaatgagcccttgttcttcagtccattgccataatagagacctttctccaaggctgagagctgtttggtcctcacagtgcagaggcctggggttgacaacctagaacttagaggggaaaaatccagaactgacccacgtacagtccctcctcctgacccatgaggagagcacccagcatgctttcccggcatgcctcagacaccccaccaccctagtccagtatctccaaaggagtcaccccaggaagatcggcttgtgtgtcactcgcatctctcagctgtctcaaacctgctattttctttgtccccagtggggctgtttgcagccggtatgggggaaagaatgagatacagaaaagtccctgagctgggcagaggcatcaccccctctgtgcctgctagtctctgccttcagcaagggctgggaatgagcttgagatgaaggtgcctgccctgccaagccagggccctcggggtagggctggcagtggggtggaggacagagggaagccaggtatccccgcagtagcagcagaggcatcgggggcatgggcctggagaccctctgtttgggtttgcccgcacatcccctggggtctgtagagtattctggcccttgccttgcttgggtagcttttcctgaatagtagtatcctagcagctatcatttcttcagccctgccggtgcctgcagtttctttgtatattagctcctcattctgtttctcagagaagattccacagcatggcttctgtatgatctccgtttcatagaaggtgaaacaaagccccagagaactaaagcaccttgccgggtcttccagctagtgaggggctgggcagggagccacacccactcgcatccagcccatcccattaccaccaagtgcatggtgctcacaggcccgaacccctaagggtgccagtggacctgctggctccccctggctagctgccagccctgcaggtgcccggtcagtcaggaggcccctgcatgtcctgccggtgccttcccacccggcctctcccagcctgtgctccctcctgtggcagctggtaggagtggccactgggtggcgtgtgggcaccagggtttccttgctcccagtgtccagagctccttaattcatccatccttctggcactgtcgccttagaaggcggaagttctaagtcaggatgatggcaaaggtcagtgagaaatgctgacttcaagctgtaaatttggtgtgagttccagaggcccgtgtgggctcaccaggagggcacgtgtcaaagcgtggtctttccggccatttctcactctgggggaaggtgtccagcccaacgtttgataggaatatttatggctttctcagaggaatggatctgttagcaggttttcctgttcagttaccattcgtgctccagtatccttctcctctcaaatgtttgtctttgctttctttgctgtgattttctcaggtcctcatcccctcggccagcctctttgtggttttatctgatcagcctgctgctgtgtcctctttctcctgccctccgccccttgtgctgtgcacgtgcacacacgcacacacacaccatacacacatatgtcctcctccctggagtccttgtggttttaaagtgctgatactaatggatttgagttgacttattgtcagagtagcttttcatgctcctcagataccactgggagtaccatcaagatctggatcttggctgtgagcccctggcctggctggtcctcactggcagccatggaatccaaatgaaaggtctcgtgcccacctaacccagctggccagtcagttggcagtcagctctatccgaggaccacccaaagacaggactgtgtggcccagggctcccagcaccctggcaaggggcacaagtgctccagccttcctcccagtggtggcacatggtcgggggtgctgcacaggagcctgaggtctgagagagggagacttccaggaccccaccccatttaggcgagcaccttccctaccctgtcttctagccttaccaggtgtcccagagcaaaggtagtcagaagtcatatttgtgtcttagttagaatgttttcctggtggttttggaactttgcacacctcctccccactgccccccgccccccgccccccgccttcttctgcatagcttcctacatctgcaggacggggaacttggggaattgcttttcactctccagcttccgcttgttcctcccacagtatttccctggccggcccttagtccagaacttcctgcactccgtgaatgaatgctcaagaggcagaagagaaataaaattccctacagtttctttaaaactgccctggacgcaggaaagaggtgagtctgggaagcaaataaagatctctccatcctccgtatttatgaggtgcaaggggttaaccctgtcatttctgaccttcttcgccagtttgcaccagggagtcatgatcttcgttgggtcctaacaataatcaataaatgactattgattgagctctctatgccacatctcatttaatcctcataatgttagtggaaggtagatattctccccatttagcagtgaagaaacagtactttgaaaaggttaagcaacttgtctgggttcatggagccagtaaggtttgggctgggatgaaaacttggtgagaccccagagtttttaacaactaccctgtgctcctcttagtttgtggtgctgctcagcatggcctccctggccctctccagggcaccttctggctcctgctcatgctgctatttgcaaaagtgggtcactgcagccagcagaggtgtaaaccctgtagacttgtagggtgtcaaatctcgaagggacctcagagataacccccttgtgtacagctggggaagttgaggctggaacgggatgcagcttgatctgggtcacagctttttagtctgctgctgcttcagtgggtggaactggtgaaagggaaatgccaccttcgaggtgatgactgagggacctcatttgtcttagggctgtctcctagaagcttctgtctctgcctctccatccttttccttctccatatgtgcactcacactcatgtgtccctcagggtgccgttctgccaagaaggtgaactggattggctgccaggggagtgagccgcatttccggggctttcctgctccctgtgggtcctcttccacttcttgactgtgcaggcagctcggcaaaatgtagacactcacaggaagcaggtacgtccaggacccgttcaccccactgtgcctccaaccctgcctgttcggccctccaaggggagagggggcagggaagctcccttgaattgccccactggccccagctgccagaagatggggagagtcagccttggggctctggctggattgctctatctcaggtagccccacacggccagaatagaaccaatcccaggagggagcagactttaggaatcaaccagtcctgttttcggccccgggagctctggggctgaggcttctccctgtctttctcgggcttatagtttgctttgctttcagtcttcatgaaaaaattgtgattctattttttttactcttaacaaagaaaaaaacgtgtattttacagtttacatagctgatacatagcagggctttgagcaattttattgcacttcccactgaaaaacaatttcctgggggaagttggggaacacgtttcccctgctgcctcggattgtccacaaactgcaccaccatgttctccggcccgctgccccacacctgcttttgaagactgaaaggatgcgcatccaattcagtccacactattgaggaaccaggtttataccaggctgcggcttggcttggaggatagatacatgggtgaaagggcgacagtgcccgctcttggtggacctctagtgtgaggcagggggacagagaggctgcagtgcatcagggctagggccgtggtggagagaaagatgtggggtgaagagagggcggctcgacgccattgggaaggggcccgaggccttacggggtgagttgaggggtgatggggagtagggattccgccaggagaggagcatcccagcagagggagcagcctgtgtggagcccgtgaatcagaggaactgccaggcagtggtgtgggaagccagtgtgtatggagcatctcaccatgccatgtggcgctgcaggtgccggggacacagcagcatatgagacaggtccctgccccacagggccagtatctgagtggcaggagacagacacagagggatggcttcagccatatgacgaatgctgaggaagacaaagcaaagcagtgccggagcgggtgctgtctggagagggtctgggaaaggcttccctgtggagggcccggtgctgggacccatgtggagaggagaagcagtgtgggacgtctgggaagagagtctcccaggctgtgttggtgtccttgggctgcatcacaaatgtcaggctggggctcagccagtagacgtctgttgtctgagttctggaggctaagtgcaaggtggaggtgtctgtgctggtttcttcgagcctctccttggctgggcggtgtcgtcttctccttgtgtctccgtgcagttgtccctctcccaatccatgtccaaatttcccttcctgcaaggacaccagtcctattggattagggcccaccctaatgaccttattttacttcattacctctttaaagaccctgtctccaaatacggccacattctgagaggctggggatagggcttcaacataggaatttggggggacataattcagcccatagcacaggctggagacagcaggtgcaaaggacaagcctggtgtgtgggcagcactgaaagaaggctgctgtggcggagggagggaggtgaggctgcagagacaggccgggggcggaggtgagcgctcgtgggccagaggccttggcgagggcagggtttggaggttggtgttggcattttgagaagccactgagaggctaacggaagtgacagttggttaacactttagaaaggtggaggatgggctactgaggcagggggaggcagggcagctgaggagcaagctgcatgctcgcccagcagtggtggtgggcctggactagggttgtcagtgtgcccctggaggaagtggtcagatttggggatatgtaaaggcagagctgagggacttactgatagattggaggaagggtatgtgggaagcaggatcgggtggactccagggttgtggggcctgagcctctggtggatgatggtcccataagctaggagtcaggggctcgggttgggatggtggaatcaatggcccgctttgtgtcaatagactcccaatggaggtgtgcacagttgagtctggagttccagggagaggtggggaatagagaattagctttatagtcattagtagcatcagagctcaagctgtgggactggatgagctcccggcagggaggtagagaagagtgctgaggactgaatcctgagcatcaaaccaccagcaaagaggctgaacgggggaggccatggtgatttcaagggggccccagagtccagtgtttcaaatagaggtgtagtcactggggccagtgcagctggaggtggcgcaagatgaggacatctcagcaagggctgtgtcggtggagtagtggaggtaatggccttgttggattcggctgaagaagaccaggaggcaagattctggagataatgagcaggaactggggcatgactgggttagaggaacttctttatgatcatccttttccccagttggaatgatcccttatcaggggataaaggatgacgcagtaaagaaaaaacactaacgggagtgaaatcctggaggtgaggagtgggtaacccgagcagcagcggagacagaggctgagcaacgccagggccgtgtggtgaggcctgtggtggggaggtgggcacctgtgctgggtgcagaagaacaagctgagaaggcagaggaagagagagaggcaggtgtgggctgctgcgggtctcaccttgccaggagtgaggagagtaggtgccaacgtcctgctgcgtggaggggtaaaagcaggagattggcttctaaaggcctggaggtttgcggtaggaaggagcgagcttggaggcaagcaccagcagccctggagcctgaggtgaagggcttaggaggggcgtgttggattaggagtggtgtcctcagcggggagcctgtttcagttagagcaagaaagtggggctggttaacaggtctttgctgatgccagtccagaggtccagtgggtgggagggggtggggggaatggaaggggagagcgaggagagatggagaagattaggaagggcatgtgcaggccaggtccaggcccgagggaggtgacgcatggtggagcaagtcggacaggcagcatgagtgggcaggggaggaagggccaggggctagggcggtgccctctggcccctgctgacctctctcaccatgtcacaaagagcctgagtttcctgccaagagtgtggactttgtcctgggtgtgagtgacaggcacccaggttagtggcagggaagggatccaggtttaggagttttggggggatggggtctcctgtaaagtgaccatggcaggtaggaagtagacaaggggacactgggcctctgctggcataggctggggtgtgtggcacctgtcaggggtggccacggcaggatggggggcggcagggtggcctggggaggcaacggctgtgggctggcagcctgaagggctggtgcgtggcatctcctctgccctgtagccaaggccaagaggtcctcccagccatccgaggctacgtgcactacttcttcggctgccgagactgcgctgccacttcgagcagatggctgctgcctccatgcaccgggtggggagtcccaacgccgcttcctctggctctggtctagccacaacagggtcaatgctcgccttgcaggtaaggaaggacatccccaaggctggagtcacttgtgggggacgagggggtgaggatacttgggagtcttggccaaaatttggggaagggacactcattgtcccctcagtcacagcccaggcctgttaacaatgccagtatcatcagccccatttttgacatgaggaagccaaggctttgacactgtagaccctggtcttcccatgccgttgctcactttttccctgctctagggcccctctctagctactggggtccctctcccgcctcccctgctccgtcttctggctgttggccccttactcaactgctagggcagagggagctggggttctctctccctgggaagggtctgatgagagaagggctggaggagaccaggtcgttcctggaaataccaggcaccggctcccaggagggagcctgccctctgcgttccctcattatggtgcttccttttcctcatcaggagtctgatggctcaacaggcaaacacattaaactccagggagctgggtcgggagggagccatctgtggacagaggcggtttgtgtgtcgggagggagcggtgcacgtggctgtgacagcctcccggggggggagaccagggcggagccgaggttaaaggagctgaatggagcaggtggtggtgcaggcgctgcacttggtcgtggtctcctggggcctcctatcgaactttgaaaggaagacatgtgccgtcttctccttcccccaccccgcccctgccaccaaatgctccatttgacccttcagcccttgacctcggcaggctcccagctgctgctggagggccaggagcctgggcctgtccctgaaggccagaagcagggtggttccctcccctctctggtggggtcctttcagaagaaactcaaattaccaggcacaagctgagagccccctccacaaggcctgatcactatgactcatgacggacccttgactctgcttgttgtcccctccccaaaataaccattctgacttgcatgccattgctgttgctgctcctgcttccttgtagtcaacaacttgtccccctattaaaacctttggagaagtgcttctacagaagggatgggctgatgcattccctgggcaacactgcgtgagggctggtggccgtggctcaccctctgggactcatccagaggctgcctagagggctgggccacctggggtaccaacagcctgcagccccagcagcatcctgactcttccaagtacccctaggtctccccccaactatcccttggagcccacccctaccccagagggctgctgctgggtaaagcaaggattgccatgagcagctgcctcttgcttgaaaacgcattttcccttgaattacaaagtaacctatttgtgcagtttgtataatttggaaaatgtcagaaaaatgcaaaaaagacaaacacgagcagaccgaccaaagactgcaaaacagatcaaaatgagtattcttgcctttcccatgtctggtactggggtaaaggctggttgtaaagtccacatagcaggacagtggtctggccaacaccgggaaatgactgagatggcgctcttcacgcttccctggaaaacccggagggccggggctgaggggtaggtggatctgcctcctcctccatgctgccatctgttagctcccactgtgggctagtgtttgtaatctgtattttctaattacccatcctctggaaggcagtggcgagccctttctgcagacaaggaagctggcgttctgagtggaggagtgtggctgggtttttgggtgggactgatgtcaccaccagcctgtgtatgcttccctctgtaggtcccccagcgaggacccccagttccccaaggtgcagtggccaccccgtgaactttgttctcctgccacaatgaacgcctggatgtgcccgtgtgggacgtggaagccaccctcaacttctcaaggcccacttctccccaagcaacatcatcctggacttccctgcagctgggtcagctcccggagggatgtgcagaatgtggcagccgccccagagctggcgatgggagccctggagtggaaagccggaattcaactctggaccctgggaagcctgagatgatgaagtcccccacaacaccaccccacatgtgccggctgagggacctgaggcaagtcgacccccgaagctgcacctggcctcagagctgcaccaggccaggagcctcctgagcacatggcagagcttcagaggatgagcaggagcagccgcttgggcagtggcacttgagcaagcgagacacaggggctgcatgctggctgagtccagggctgagaagaaccgcctctggggccctttggaggtcaggcgctgggccgcagctccaagcagctggtcgacatccctgagggccagctggaggcccgagctgacggggccgaggccagtggctgcaggtgctgggagggggcttctcttacctggacatcgcctctgtgtggggctctattccctgtccttcatgggcctgctggccatgtacacctactccaggccaagataagggccctgaagggccatgctggccaccctgcagcctgaaccaccggggaggaggcgggagagggagctgccatctctaggcacctcaagccccctgaccccatccctcccctcccaccccttgctccttgtctggcctagaagtgtgggaaattcaggaaaagagttgctccagtgaagcttcttggggttgctaggacagagagctcctttgacacaaaaacaggagcagggtccaggttcccctgctgtgcagggagggcagccccgggcagtgggcaagggcagctcagtccctggcctcttagcaccacattcctgtttttcagcttatttgaagcctgcctcattctcactggagcctcagtctctcctgcttggtcttggccctcaactgggcaagtgaagccagaggagggtcccccagctgggtgggctggaatggaactcctcactagtgctggggctccgcccaccctgctcccttccggacaatgaagaagcctttgcaccctggaggaaggaccaccccgggccctctatgcctggccagcctccagctcctcagacctcctggtggggtttggcttcagggtggggtttggaagcttctggaagtcgtgctggtctcccagtgaggcaagccatggttgctgggctgtagggtgagtggcttgcttggtgggacctgacggttggtggcatgggaaggatgtgggtctctagtgccttgccctggcttagctgcaggagagatggctgctttcacttccccccattgagctctgctccctctgagcctggtcttttgtcttttttattttggtctccaagatgaatgctcatctttggagggtgccaggtagaagctgggaggggagtgtcttctctctccaggtttcaccttccagtgtgcagaagttagaagggctggcgggggcagtgccttacacatgcttgattcccacgctaccccctgccttgggagggtgtggaataaattatttttgttaaggcaagcattggtgtgttctttaacttgctacttgagacctagtgtccagtctggacagaatgcacagagaccagcctcacctggaatgcagcagactcgatgtccctcagcacacacagctcctggccacagactgcccatagaactgtctcacccaaaccccatggccttttcatgcacggagacaggcctctggatgtgcagccttgcaccccctgccccaatcctccctgagagctcctgcctcagtgccctgggctggtgagggaaagcctgtctgcacctgcctaattccagctcctccaggaagcaagggcttgtttgtcaggctgcagggttggccactcggtggggaggagtcagccaggattagagagcctgcccctatccggcctgctgggttttacaaggatcagagctgctgataatgaacctcattaaggggggcaggagcctcaatccgatttggttttctctttgacatcttcactctgctcagatggccgggtgctatgtggagcaggtgggatgccaaggccactcctgctatggggcagctggggcggggagggatggcagtctccctgcatgtttccctcgacctctttagctgcagcgccttgtgggctcctgggttggactccctctctgtgcccctgctccaggcacccattggctccatctcctggttgtgctctgcaccccctgctcccttgggctggccctggctgggggcctgaggacagacaggaacccacaatcaggaggcaaccctggcctgcaagaggaagacagaggctccagggccggtgccctgtgtgcccactgcaccaaggccgctgaataagcctgcccttcacccctaagggctccttgcccaatgccaagtgctggggatttctgtcagcaagccctgtgctccagtgacggtatttctaaagccaaacttagttacctagaattagcgccatgttggaacactgtcgcagcagcccgggctgcacagtgtgtagcccagcctccaggtccacggagtgtgtggacctcccacctcacagctgcctctggcagccaagcctcttttcgcccggccccgcccctctggttgataaacgggtgggcctcctcagcagcgtggctgcctttcaccttgattccccagggctctcggcaacatcgataaaccagcctcgcccaccagctgggccctccccacccagtctgccaggctgggagctggagcttgctgagtcttgaatgcccttctagatgcttctctagaggctctcctggcaagagagggtcccaaggggagccctgcaaagcaaaggtccttgtctggggcgggatagagaatctcgcctctgtctggtgtgttacctactgggggacaggaacaatttcctcaaggagacagtggcatggagctttgaaagacgagtaggtgttgcaaggaaataaggaggaacgggggttacgggcagaggagaaagcacatgccaagtcagaaagaaaagtagaattcgaaaactttttaaaaatattactaaggattttcacaatgctgactgggctagaaactgaagctaaaacagatacgtggtccctgctgctatggggcttccgtctagaggcaaggacaggttgtgatgagggttctgaaggatagagaccaagcagggaggtgttgaggaggcttctgcgagacctgaaggatgggaagccaggaagtgggaggggtggggtccaggctggaggggcccaatgtaggtgtagagggactacagccctgaggggctgctcatgcggcattcttggaggtccaagaggggcagcgccaccttgggccaggctcctctccacagccttggtatggggtgggggtgggaagacccctgatgcagcctgtcctctgggtgtggggtggaggagagggctccaggggacccagccagccttgaccctggaggaaagtcaggtggctcagagagagccctcaaatctgggccctgggtcagggtggggtcaagtccagccttaagagaatggactctggaatctgacgtctgggtttgaatccagcttccaacactcactgctgtgtgactttgggcaagataacttatccccttgtccccatgtgtcattggagataaatacccacctaccagattgttgtaccatgctgggcaaacactaagtgcttaataatggtacccactgctcatgtcgtgtcgtctcctgtcttgatacctgaaaactcaaggggccctgtgtgcttggaggggggtgccgttcccacaggatattctgtgaagggtgtccctggagctggcctccaggtggcaagccccaagccaccccggcaggtgccactggccagagttgaactgggtgttgagtggaaagtgcctccccacccccatctgccacagtagtatggatttccttctgagatggggctcctaaaatgcctgaaatgtgtatgctgttggagaattgatgtgtatgtttattgaactttgcactcatttaaatctcatttaatcctccaacaacgcaagatgaagagctgaggcttaaagagattaagaaacatcctatcccctttactcccaccaaaataaatcatttgccctattctcccaaatggtgagaggtagatccaggacttgaccccagatcccaccactcaaccctggagctgcagtctctaccccttctaacacatgtgattctgtttcatgcctgttccatcggtagagttacacactttcctgagactttatatggtggtgctgctggggccagcccttcttccctccaacagtggcagtaaccactgttgtgtgttggtgtcaaggatggggacaccctgaaggaatccgccttttctagagctctcgctccattccctacatcgagctgaagtgccctgtctcgggtccttgtttttaggcctcgtttgaaggaggggaagaaacaggttcgttgggcgtgaccttggctcagctcgtctgtgaaattggggccgcagacttatttgcgggtccctgctaaattcctctccctcttcctgggattcccatccatgtattgccgctacatgtagagtggagaggagaggtttttcctgcagggccttccagagaaaggattctggccagaggaaatcacagcctataagatcaatatcctgatagaatcccgggccaggtggagaggggagagctcactcacaccagcctgacagtcttggggcagagcgccccataggctctgcagccccatcactgcctcattctccctcaggtgccaaggaagctccagggtgggccagtatccttccacagcatccctcctcttccccttcaacacccctttcacccctccctcaccacctctgaaaggtgctccttgggcagggcgataggattcccacccctagctttaagactaaaccaaacttcaagaggagcaatttaatcttcatacctgactccttgtccctcctaggcatgctgttgtgcaggacagagccctggcttctcctggatgtcacacctggcctgttctgacccttgctttccctttctctgctgccctcaagggtcattcacacccaagagggtagaagctgccctctcatcccttcctctcccaccctgggcctctgccctctgcctggcccagcagcacagtcttctccatagagaggggctgggccatgggaccccagttcctggggtccggtgacacagttcactgtttgctgcagaggaggccccactcgcagccttggcctctgcctgcagaagaattccctgtaactcactcaccaatggccgtgggagccagtggcctcggcagggtcagttggactgcatagctgccggctgagtctctctggccaccctcactggcccctcactccaggttgcactgctgcccagggggtttgtgccaggcctgggtcacagtggaaggagtctggaaatcacaaggcagaggaggagacctttgccaatgtgagagaacaaagttaggggcagtccatgggggcattgaccttacttaggtgaggaggactcagggaacatctacgactctagggctagggtgagatcctcctgatagtgctggtagctccagctgctgctttgcaagacttggtcgtctctatactgagagagcaaaagctcttttcctggggctgcatgttttccataggaaagtgggcttcaggtgctgcctattaaacctcctgcctcccctgctgcatgctttgatgcctttcacctgtgtctacctgcgaacctctgcccaccacggaagagcagtcacatttggaaggggctaaaatttttacctagtttgaatctgctctgcaatgtccccacaagttcttaaccatcccgggttccaatggttacagagttctgccctggggagggaggattgcttagcaaatgatgttgagaatagtgattatttgggggaaaattcaggtaagatctaccttcataccatataccaaaatacatctcagtagattagtaagctaatgcaaaaaaaaaaaaaaaaggggaaatataattgaatacttcactgtttttgaaagcatgaaaacaatggaaatgcaactgatgtgagtaatccatctacttgacgtcacttttaagaaataaggccagcacggtggctcacgcttgtaatcctagcactttgggaggccgaggtgggtggatcacgagtcaggagtttgagaccagcttggccaacatggtgaaacccccatctctactaaaatatacacaggcattgtggcacacatctgtaatcccagctactcaggaggctgaggcaggagatcacttgaacctgggaggtggaggttgcagtgagctgagatcgcgccattgcactccagctgggggacagagcgagactctgtctcaaaaaaataaaaaaataaaaataaaaaaataagtaaagctacatatttaaaagctggggaaatatatgctgtaaatatgacaaagggctgtactcttctgcaacacaccattttaagaatgagctaggtctgcatttattgacctgataaatgtcccaagaaggacacatttttataaacataagttactattgttatatatatgctaagtttgtctagaaaaagtctagaaaaatacacactgaactgtgaatagcagttatatttaaaagcaacattaggatggacttaagtcagggctcggactagagcaaggcaagtgaggtgcaggatgcaaaagttaaggagacacctgacctcaggggcccacaactgcagagcccctgcagtgagtgtctcagtagcctcgccctagtcctggctttcacttaaatatgttttcgaagtttgtaataaaatatttcttttggaaggcaaaaatagcaaggaaaataaataggattaaggatactaaagcccattcaataaaatttgtaggaggccactgatttggcctaggctccatgatgtaaccaacagaccaaaccaatatggagtcattcatgctaaatgaaactagttagagtatattcatataacaagtggctaagtgtcagttacagcctctgagctttagtcaatgtaggtggtcaatagattcagataaggcaatccagttaaactgtatatcccacttgctgtttctgtccctaaattctctctgagtacactgcagccctgaagttctttgaacctgttcgggttctgagggctgtccaattactgaatcatacataaaagccaagtaagattttaaaattgttataattttggtttttaacaacttctgttgtaaataataaaagcactaaatccctctgaaaataaagggcctaaagactgaatgagagatgcaattttttttggctaacctattgcaaagaaatgatgatgatgatgatgatgatacctagtgttgctggagtgaggggaaatagatgtatcagttatccattgctatgtgacagccactcccagacttaatggtttgaaacacagtcactcattttgctcatgaattggtaacatgatcagagctcagcagaaaacagctctggctgctccgtgcagggtatctaggcacagttcatttggcaagttggtgttggctgcgcctggaagcttagctggggctgtgggaggggcctccagtcctctccccatgggcctctcatgggctgctcagacttcctcacggcatggtggctgggcccttcagggtggccttttctgtgctagcctcagaagccacctagcatgacttttgcgattttctgttggttgaggttgtgtaacggctcgcccaggatgcagatagaaaggcctgaacaggttcaaggggaggaacctgggcttcacctttgacgggtgtgacagagttctggaacactgtgagatggaagatactttgcagccatcttaagaaactacaatctgcccccgccccagtcctctcatatactgctatggtagtataaactgatacaagttttgggaaatagataattcataatgtaatgtaattgtaatatacttttaaaagccttaagaaaatatataacctttaatccagcaattctatttcggaatttatcctaaggaagtaattgagaatatttagtaaatatttgctacatgataaattttatagtatcaaagtaagattaaactaaagtccaaaatgggatattgagtaaattctgtacacaattacaatggaatacaatataacatctaaaaatgatttgagggctgggtgtgtggctcatgcctgtaatctcagcactttgggaggccaaggtgagaagactgcttgagcccgaagctcaaggctgcaatgaccgatgatcactccacttcacagagcgagactctgtctcaaacaataacaaataaatacaaattatttgaatgtatatatttttatcctgaaattatttcacaccacactgttaatggaaaatattgttacaaaaacagttctgtatagtatgatctattttatttatttattttttatttatttattttgagacggagtctcgcactgtcacacagctgtagtgcagtggcgtgatctcggctcactgcaagctccgcctcccaggttctcgccttctcctacctcagcctcctgagtagctgggactacaggcgcccgccaccacgcccggcaatttttgtatttttagtagagacagggttttaccgtgttagccaggatggtctcaatccctgatctcgtgatctgcccgcctcagcctcccaaagtgctgagattacaggcctgagcactgcacccggccaatcttattttttaaaaaagaaaatacatatatttatggatattgatgcatggatgaaaactaggataaagacaccaaaacattaatagtggttaatggtccctgtgggattatggctgtttgtttttctttttatttatctgtattttctcacctttattaaaatttattagtatataattaaacacttttaatgagccaagaatatgaaccgtcagcttacaaagaagatatacaaagagcaatacttacgtgaaacagtattctacttgttgaacaatatcaaagaggtgaaagattagtgcgatatcatttttatatagtatgcagcagtacagtttgtactggaaaggtgataatgcaattatactgtatagtatatctgagaaataatatgatgtatgtatcaaccttaaaaagtttatgcccattggttcagttattttagtgttcaaaatcatcctaaggaaataatcagagatattgactagaacttggagcaatctacaaatccaatcgaagacatatctacatgggcccaattcccagggcaagagtcagctgggcccccttcctccccagggccatagtccgcatctctcccttttgcttcccaatacgaaggccaaggggcaataccatttatcatcacatttgtgctgttgatttggaagagggaaatatttccctgcacttgtctctaactgcattttttttttttggcttgtttcctttaggcaggttcttgctctgtgcccaggctggagtgcagtgacacaaacacagttcactgcagcctcaacctcccaggttaagcactcctcccacctcagccttcagagtagctgggaccacaggtgtgtgccaccacataggctaattttttttattttttggagagatgggggtctccctgtgttgcccaggctgtcttgaactcctgggctcaagcagtcctcccacctaagcctcccagagtgctgggatgggcatattttaagaaaaatggaaaaaagcattatctatatagaagtgaagcatgttgctattatttggtatttaggaagagaacatctatgcctaagaatggacctttacttcactcattacctcaggggcctgacctatagccatttgagttgtgactcttattttagactcagctgaacatcactccctctggc

SEQ ID NO: 2910 - DNA, 44229 bp, Homo sapiens
gcttcagtttcgattcgataaaatttgactaactaaacttaagataagcatagttacgcttagagtattaactctcaaacttttaaaaaagaattcttcctttgcttgttaattttcttctttcttttttttttttttgagatagggtcttgctgtcgtccaggccgaagtgcagtgcgtcatcatagttcactgcagcctctacctccccggctcaagtaatcctcctgcctcagcttctgagtatctgggactacaggcatgagccaccatgcccagccttttcttttctttttttcttttctttctctctctgtctctctttctttcttttttcctccctttcttcttttttttgatggagtcttgcactatcgccaggctggaatgcagtggtgcgatcttggctcactcaacctccgcctccgggttcaagcaattctcctgcctcagcctcctgagtagctgagacacaggtgtgtgccaccacgccagctaatttttttatttttctagagacggggttttacctgttggccaggatggtcttgatctcctgacctcattctccacctgcctaggcctcccgagtgctgggattacaggcatgagccaccgtacctggccctttctttctttttatcaagacacaacatgtctttatagtgctcccaaggctaaagtataccttacgtctatgtaaacactaacctgagctttgcaatggcccatgttggcagtagtgcaaacaaaaacaattatgaaaccattttcctttgacaaagagaaataagtggcaagaattggttctttctcttagtatgggctctgaaaagaaccagatcagtcaaaaggggaatatttttctgaagggataggtttggctagtggcttctacctcttttagatgactgctgtttctcgttttaatgttaaatagacacaataggagaaatcacattaattcagtcaacaaacatttactgagcacttcctgtagtcagccctctgttaacttctgggaatacaatgacaactctgacaatcccaacccaaggagccacaagtccgggaatagagacagacaagaaaacagacaattacaactctaccgttagaataaggtacattgagaacttgcaacaaatattcctcatcccttatcttaattattcataactgtttaccaccaataagaatagcaataacaataaatgcccaactcagacagcaatgtcctttaccctgtgtttacacagcataatacaagcaagctgtggacagagattctcttgtttgtcctcacaactctgcaaggtgggttttattactctccatttctagataaaggatctcactaatattacatgggccagtggtcttccagttggggtatgcacaaccctaggggtaggaaggaccctgcctggggtcttcaggtggggaccatcaacctccatttgtactcttttctgacattggtctgagacagaaagtccctgcaattaaggcattaagctggctctttttctattctcatttcataattgcccttctcctgctttaccaaaatctttcaccccccatcatataatatatccccatacatattctatatatacataccctacatatgcatgcacacacatcattatatgtatgcatatatgatatatacatatatgctatgtaaacatatatagtgtgtataacatgtgtgtatgtgtatatgtgtgtatatgtgtatatatacacgtgtgtgtgtacataatacatcatatatgtgtgtctatatatgtatatatgggtgtgtctatatatgtgtatattacgcaaatacgtatatgtgatgtatatatataagatgtgtgtgtgtatatatatgtgttgcatgtgtgtgtgtatatatatatagtatatacatattttttgagacagcatctcacttgtcgcccaggctgaagttcggtggctgatgacagctcactgcagcctcccggctcaaggattcttccacctcagcttcctgaatggctgggactagaggcgtgtgtcaccacacccattagttattttatttttcgtagagatggtggtctcactgtattgcccaggctggtctcgactcctgggctcaagcgcttttccacctcggcttcccaaattgctgggattacaggtgtagccactgcaccggcccatcctttattttaatattatgcagtgccctgagacatataaaaacccaccttcccaagtaaaggaaattcaagctgatgcctgcagagccttctttaacaaggctctgaaataccctctctcattaaaatgatactttccaataaaattttgtttaacaagatttacaaaatgataaaatttatttattttgattgtgtatggatcatggtaacaataaaagacttgtaaaaataactaaattgaaagaatcttgaacatttagagccttaagactgtggaattgaagaccacagaattattaatttatattaatatttttgttgcagagacataataatgatcaacgaaaggcttttaagcgttaaaaatatattacactagataaaattatttggggaatgggatggaaatacattttcaagagagaaaggagcaatgtaaaatgaagatgtaaatccttctgctggttgtccttggggttttcttttaaagaaaagcttggcagtgttttttttttttccattggatgatggtgaatatcaaatcactttggtgctaatatttcatttaaacattaattttaaaattttctgtagaggtgggatctcactatgttgtccaggctggtttaaactcctggcctcaagcaatctccctgcctcagcctcccacagtgctgggattacagggtgagccactgcatccggccccatttaatacatttaaaagagtggtgtaacaatttttattaaaatgtcatatttacaatattctagaatgtatatcttttcaactcattaaacctaacatccttgtaaaaagtgtgaaaagttatatagtttttcaaaattcgattagcagttacaaagcataaatgtttaaagtatgtatggtacagccaggcttcagttccctgtcttaaacaaaagatccatatcaattccagatactgcaatggtttgctgtttttcctgcttcccccattccaaataaactaaagcatcaacatgcctcacctcacataaccctaagttttcagcagtggcagttacacctggaaaccatttttctaaaataaacaacaactgtttgcttacggatcaaatgcaaaggaccataacatttagcctcaccttcctactacagatcgagtttaaaagtccatggtatagctaaattatgaagaaagatatgaatataactgcaaaagtggaaggagattgggataattcttgcccattttgttaggccaaatgcatctttgtgcaaattagaaaaagtggtcttcatcccttcactcctatccttttgggggtggaggggcagtggctaaagtacgactaggtttcagctaccacatcctccttcagttagctgccctcggcgtgacagaaacagtgcaaacagccctgtgcctttgtcttatgttccagccagccaagaaaaatagttgtaaagagcagctgctgtttggggtaatgaccttggaccctccccaatttgttccaagcctgttttgtattcatttttcccacatttatgttcctggatggaagcttccatatctgctcttgccctatttgaaattccccagatttccttcctggctcctggcctttggtttttcatgtggtcctgatcccacacgctccctgaatttggattctcctgtcatttcaggtgcgaggtttccactacagcctcttgggcctcacctccaatacctctttcccatcagaacagcccggacctcccctatggtagagcagagacagaatttaaatgaattctcaagaagtgcttggactcaatctagcaaaattacatggcatttaacctttgacacaaaaaatgcagcttctaggaatcatctaaagatacactgtggcaaatatacaaaaagaagcattatttatcaagcactatttctaataaaataattcttaggtcaggcgcaatggctcaggcctgtaatcccagcaccctggaggctgaggaaggcagatggcttgagctctggagttcaggaccagcgtgggtaacatgcaaaaccccatctctaacaaaaatacaaaaattagccgggcatggtggcatgcacctgtgtcccagctactcgagaggctgaggtgggaggatcgcttgagcctgggaggcacaggttcagtgagccaagatcgcaccactgcactccagcctgggtgacagagtgagaccctgtcaagaaagagagagagagagagaaaggaaagaaaggaagaaaggaagaaagagaaagagaagaaagagaaaaagaaagaaagaaggaaagaaagaaagaaaaaagaaagaaaaagaaagaaaaggagaaaaagaattcttactaataaatgcaggagaaatgatagaattgaaatatcacattttcaattcctaatgaaataacgtatctaggcaatgaccatcaatagctagatgctaaatcatctgatcaaacactgatgggaacttcgtaacagatggatcaggctaacaacattgaaaccactaactggttttgatgtcataaaaagaaaaacaaccagatattttctgtctctgatgagttgcaattggagctacatatcacctgtaaagtcttctggccaaaaaattaacccagccggaccttattaaacctttaaatctaacaattagttttgaagcttttacagataaatgaagtctgagatttgcttcaaaatgaaccagtggtggggaggaagtgggtgaggttaggtgaaacaagattggccacgtcgataattgctggagctgggcgatgaaagcacaggatttatcacaccatctctctacttttgtgtgtttttttgtttgtttttggttttggtttaaggagcagagagtctaataggcaagaaagaaaagagaaggctgaaggaagacgctccccgtacagagacagagggagggggctccaaagccgaaagaggaggtcctcttgtgtatgtttaaaatactcccagataaaatatttttggaagagtacttggttggattcaacagctttttttaatttaaaaaaatcacctcaatttttttgcttgctctaacgtgccatagaaattctgaggttttacttgttgctttacaatgaactgtgtaaacacaagctggaagagatcagcatgcgctggaagggttggttaaatattgagactgccttgctgagggaagccttttaatgatctcagtaattttgcaagagaaaagataacaatgaacactacattaaacatcattctttgcactttgctaaatatgtgtatgtaaattactgtctgactgttactggatatatacagatatacatatgcactttttttactgttttttttttttttttttttttttttttttacaggcttgctctgtcacctaggctggagggcagtggcgcagtctcagctcactgcaatctcccctcccaggttcaagcgattctcctgtctcagcctccaaagtagctgggactacaggcgctgccaccgctcctggctaatttttgtatttttagtagagacagggtttcactatgttgccaggctggtctcgaactcctgacctcgtgatccatctgcctcggcctcccaaagtgctggattacaggcataagccaccgcgcccggcccatgtatactatttatacatttttagtacattttgtctttacattttacataatttcagatacattttcctcatatcaaataattcacattttttagtactaacatcatagtctgtaagccattcaaaaaatgtatttcacaaaatggctatctcatcctttgagctattgagatgaattaatttatactcctcctaagatcccttcgtcactaagattcttttattttatgacaaaaccatagttctagaagcttgtttctccacctgaaaagactggatttgggacatgatcctgtagaacttcggaggtaagcctggtgatcagatcatagggggtctggagggtgaaaaaaaagagtttggtgctcatggatggggctgtattggggtgtaggggagattaggtcaaagcaagaggattcaaaggagaaatgaattctttagattggggaagataatcggaagaggtagaagacaccgtccatgacacttcctgggaagcagatgtatgtataaggatgtgagtattgtggttttgtaaagaatgcattcctgaaatgttgcataatttaaaacctacatattttgattaattttctcatgagaatagcagggttgtgttctcggcgctcacaaatgtataatccattgtggcaaatttttgctttcacatattttttttatcattattgtcacaggttctgtgacggagttctggtttctaaattcacagctaccaaggcagttctttaaagttcttgatactcttttatcatatctaacttgtattccaaattattgagttggagcacattttcccagcacttagcaccgctatttcatggatggttgagagggggtccaaaaattttacaatcatgttaacaaaagtaacacagcaacaaaacaatagcaaaatcactgccagagtattccttagcttgaaacaatacggttcacgtcgatagaaatggcatctatttctgtttaatcagttaaccctgctaagtagcaagagcttacaattcagtctaaaatcatgatttttttactagttttttaaaaaatgtgggctctatatatataattaacattttgcttgtaagacttaattttgcctgggtatggtggctcatgcctgtaatccagcacttcaggaggttgaggcaggaggactgcttgagcccaggagttcaagaccagcctggcaacacagtgggaccccatcactaccaaaaaaaaaaaaaattagtcaggcatggtgggtgcacttgtagtcccagctacttgggaggctgaggtgggaggatcacttgagcccaggggtcactgctgcagtgagccattattgtaccacaacactccagcctgggtaatagagtggactctgtctcaaaaaaaaaaaaagactatttctaaatgtgtggctatattataccataaaatgtggcttcttgggcaaggaaagaggacaatatagatgaaaaagaaattgatcctacagaagtgatccttttatctgcataactctcaggcagttgtggcaaataattggcagtactattgttctgaaactggttttcgcaacttttattgggaacaccatcccctctcctgcagatcagtttctcctctccacggatcattcacatgagtaaagtcagtagcgtgctggtaatgtttaagatcttgttctttgggggaaaaagttcctaagttctagcagttgccctggatacttcaaggtatcaacatggaagttatgtacaaaaatggctgtcacaagccagtatgagtaacaccaacatactacccagtgttcttcaaacttcagctcacagcccattagtggggctgcaaacattttagtggactataagcagcatttttttaaaatgaaaaagtagattgtttacacataacaggagtattgttttgtacaatttttttttttttttttttttttttttagaacagtttcactctgttgcccaggctggagtacagtggtacaatctcagctcactgcaactcggccttctgggttcaagcgattctcatgcctcagcctcccgagtagctgaaattacagcatgcgccacaaggcccagctaattattgtatttttagtagaaacagggtttcaccatttggccaggctggtctcaaactcctgacctcaagtgatccacctgcctcggcttcccaagtgctgggattacaggagtgagccaacgtgcctggtcaaaatttttgttttcgtaatttaagtatgtgtgtagtaagtctcaatggaaatgtaattcttatggcaggtcacttgaaaaaaagaagtctaaaagtcaccaatgtagtatcttctctttaaaaaaaaaaaaaaacaacagagaaaacctgaatctgccctttgctccactccttcctcagctataatgctgcttctccttcctcctcacagcaaacctttctgaaatctttatagtcatggtttccaccagttcttccctcccatttctcaacacacttcagagtcagagtcagcaatgacatccatgttcctaagccattgcttacttccgtcctccttggcctctcagcacacttggcacacaggctgtttcttttctttggcatctgtgacaccactctcagcaaattcccctggttgtcccttctcagtccatttattggcgttgtcttatctccccagggctgtccgaggtgattttctcccactacttcctaggtggtgccatccaatctcatgatgtcatatcattcttccctcatgcttcagcctactggttggtggcctttgtttcctgaacacatttaatgcattctcaagaccctcagggctttgcagcagctgctcgctaaggctggaatgctcttccccaccatcttcatatggctgttcctttctttcactcaccagcagcttaaactttgactcctctgagagactttccttgtacccaactaaggttgccactcaggtgctcccaatttaatcttctctaaaacacatcacttatgtgtcctcaactagagtataagcttcctcgaaacaagaacaatcaaaactccttgcctcatggagtttatagtcttatgatgggtgaagtaacataaaataaaaaggcaccttattagtatattagcatgacaaatgttagccagaaataaagcaaggaagagttgctagggaggtgtatgagtgtgttttgggagagtgtttgcaattttaaatattggtggtcaggaagggcccactgagaactgacatttgagtagacttgaaaagggaaaaggaaatattgagtaaagttttaggatgggagtgtgacaggcctgctaggagaatagcaaagtcgctgtggctgctgagaaaaagtgagaaggaaagtagtaggagatgaaatcacagtgtgtgaggattcgggcaatcaggaagtgctcgtgtaagaactggatctttactcaaagaatgagcaaaaattagtaacggttggccggatgcagtggctcacacctgcaatcccaggttacaggaggccgaggcggcggatcacttgaggtcaggagttcaagactagcctgggcaacatggtgaaacctcatcctactaaaaatacaaaacttagctgggcatggtggcgcgcacctgtagtcccagctactaggaggctgaggcacatgaatcacttgaacacggtaggcagaggctgcagtgagctgagatgtaacactgtactccactccaacctgggcaacagagtgagactgcctcaaaaaaaaaaaaagtaggttttagtaagggattaacatgatctgaattatgttttgtcatgacttctcggctgttgtgttgagactacattgcagaggggcaagggcaaatatagggagaccgattagatactgcagtaataatgtaagagatgtgggactctatctagaagggcccatgaggtccttgcatgctagtattctttactgctgtgcctggccatgataggcattcagtgaatatttcttatttaaaataacacactgggctaattgaacaacagtgccaaatgagggagatattttaggaataagttcttaggatttatgaacattttaatccagattttctttgttaactctgtctctggccctttcactcagccccgtttgcacctaaatatgacttacaaaagaaacacacatttatgtgtacttatttcaacttattttagctttgtaaagaagtacaaggttgactcgggcccagcttggtgtctcatgcctgtaatttcagcattgtgggaggccaaggcaggaaatattgtgagcccaggagtttgagaccagcccgggcaacacagtggaccctgtctctacaaaaaaaatttttaaattagctgggcatagtggtgtgcgtctatagtcccagctactccggggctgaggtgggaggatcacttgagggaaaccctgtctcaaagtggcggggctgggggagactcaggcagaattgtgaagatattcaattgctcctgactttatcaataatctaactttcaacctaacattgatatctattttatgcaaagcattacactatgcactggagactgataagacaagttccttttctcaaactacagtcgagttggatagataaaacacacaacactaccaaaagacagctataaatccaaggcagtgtatgtcaagggtaaattcacctattcaattggatcttgagaagtgcatcaggcttggaaaatgggtaaggaggagagaaaagcaacgtgaatcagaacatgagttcccagttatgggacttgtaatgaattcctcaattaaaacaaaaataatgaaaacaaaagccagggaggagaaagcccacgttaatgacactaaaatatactttccaaacaaatgtggataaaagccaagtagagaagatgagaactttgaggtccctacacaaaataaacagtaagcagccagccattccaagtggctgacatgactttgtttaacttatttgtatttctggctggtgtgtttacagccaataggtcaaactatcagtcagtgtaggccctgagaagtcgggtatttaagagcatctaataggcacagaattgtgctccatactgttaaactgttccctaagtgtccaatttggagaaaacacccacacgcaggataaccggcggtgacgcggagtggctgcgagtccaagttatcactaacggatggggagcttgggctgggacagtccagcgtactgaacccttcccccaccgtttcacctgcatacagaggtgtgtacttcaaaaagcagcgcctccaagtctcttctggcactgtctggacttggatccgaggcagagaggaagctgagaaaaccctggcgttgaccccgtggacctgggcgccccgggaaggccacgcttggtccaggcaggcggggcctgtgcggtgaccaccctggtcctgaaaagtcccagcccgagcgccctccctcctagacctggaggcctggaacagccaggtggacgtcggcccactttcttttctttccttcccattttcctaccacctcccaccccactccgccttccgggcaaggcagccagatccacccaggacacattctttgtccttatccctctgtgctcgtcccaagcaagccagtcgcggtccaaggctccagaggctgtgcaggaggccgagctgggtggcgtcagcggcgggtccctgtccaaaacccagcagagccgccagggacgccccagacacagaggcggggcgcggggagggtggggagaccacagcagtgaggcgcgcgagccgggaagtgacgaggactgactcctgtcgcttcccgtagccgcccacggacgccagagccgggaaccctacggcacttagctgctgacaaacaacctgctccgtggagcgcctgaaacaccagtctttggtgagtcgcgcgacccccggcctcgggtggcggggcagtcgctagaggcgtggctgcttgagggtctcgccagtggaggatggcattcggatgtcacggctcctaaatcaccatttgtgggtgggacagtgtccagtccaccccgacccgccggtcctcaccgcggcagagccgggctgggtggcggggacgctgcctctgcaggcgaggcgctccggggcataagggattatcagagtcgcggcctttcttggacatccctggctggggtcaggctgtttgccctggggtgtccctcgctgcaaacccaccccacctgggctgctttctcacctgttccctcctagcctgagccgagcgccacctccaagtggaggaatctggggaagtttccttcccggaatttgtagtgcagtggagtgacctccattgcgttccctgcctctaacacgctctttaggatgccgagtctttgactgcagtgttaaacattgcaaagcgcaagtcatgtgacttcctttgaccgtacggaaacttaagtgatggctgcttgtgatgcatacgaagtgttcatgctggcgggacctgtcctggggatacttcgggggttgcgtgatttaatgcaagcagatggcttaaattgggtcatggcttgttattatacatgtgtatggcaactcggcatccattctttttgctcttgttctacttcctgaattgagtcacggagccagagttttgaggttttgactaacgaattaagttatgacatggggctatatttaggtggtaaaccaagagggatacagttttttttcttaataagaaaaagtgatagatttgatcggtgtgtattgttggtgtgcagtataatgacagaattgtggaagtaaaatacaggaagctctggtttcatttcccctttagttctgcttaaagtcgatttttcctggagctattaaatgtagtgtagtgtccatgagtgcttttatcttaaaaaattggctgatgctttccaacactcccctgccctgtgattattatttttttaagcaacagagaaaccgtatcttaatagtattaaaagtattggatttttccctactttgatttgtttaaatggaggaggaagagcaattctttctattcacaataataatagctaacatagcgcttacttttcgctgttttattaactcaatcctcagaacaaaccaatgatgtgaatactgtaattccattttatggaaatgaaaatctaaatgaatacctctggtaattgtacgggactgtttgatagtatttaccattaattaattaaattttttttttttttgagatggagtctcgttctgtgcccaggctggagtgcagtggcacaatctcggctcacttcaacctccgtctcccaggttaagcaattctcctgtctcagcctcctgagtagctgggactacaggtgcatgccactacgctggctaatttttgtatttttagtagggatgggatttcaccatattggtcaggctggtcctaactcctgaacctcaggtgatccacccgccttggcctcccaaagtgctgggattacagtgtgagccaccatgcctggcctattttagtatttttaataataaattccatgttagaattttctactgatgtattttttaagtcaatatttcctacactcacaatccaaaattatttgtatatgagcacactggtaagaatgggaggcagatcgttgattgtaataatattctatttttggtaaatatcagtaacataatatataatttaaattttaaaataggatatgaagaaaatgctacatgcttacttttcttttcctctatttttactttacacagggccagtgcctcatttcaatccaggtaacctttaaatgaaacttgcctaaaatcttaggtcatacacagaaggactccaatcgacaagaagctggaaaagaatgatgttgtccttaaacaacctacagaattcatctataacccggtaactgatttctataagataactttttacctatgccaggacagaccaatagaatattaattatccattgggagacagggcaagaataaaagccagtgaacatattaaagcacctactatgtaatagagatggtggtgggtgctgattacaaaacagctcttgcctctagtggaggaagaagtcacaatgataatatgacgtgatgaaacagtgttatgaacgggaacgtctgggtagagtggagggaatgccaacttttggtgatgggaggaggctcagcaatcataaattgtagtttttaaaggaaaatggatttcttactctacaagtttttcatttcttttttaattagagctgtccatgagaagttaatgtctcgatctttccctcagcctttcaatactgcttggcccttgagcagggaaaatgtcaaaagccaatggggagatggagagtggaagtagtaagggtctcgtgcagttcaggcaggtcctagaatccctgaatgactgtaatgctggaaattgccctgtaatcctgagcagtaaagagcttgttttagttttatgtggtgggagaatctttaggaatgtctagtttccacgtatctgaagctgaatcctgaatcgaggtcgaaaaaggacagccacttttttagtaaaccgcctagaagattcttgggcaaaaggaaggtgagaatccttaaaatgaggccctaaaccagttttgttagtgtgtgtgggttcaagttttgtcatttactttatagctgtatttcctttttccctaagttttaatgtcattgtgtaagatgaggtatcgctgctgtatcaagcaaagtcagttttaggagaaatagcctttcagtggagtaagtttaaaaaagatgacttcctgaagcggaagcttgtgagacatttaagatgacttgcgcatgttagagttaaaaacatcccaaggttgtaaactgatttcctgcaaagatcttacaacaacaacaacaacaaactaggctgcctgccacgggtgtctgaagtatcatcttggtcaagctgggagaatggataaaggttacactgttcatttctgcccttcacacagaaaagagataattttataggtaaaattcgtgcatatcttgattctagcatactgctgattcctgagtttctggggtcagtactctcaactattgaggtggaacaaaaataagtagacttcattcttgaggaaggggatctggagaagtagttctgcgctagagcagaaaatgccttcagtctgtggcatgggctggatgctgttctgaggataatgcatttccaagggagatatttttggcaatagcttttttttctttcttttcaaaattctctgttttattatcagttctcacaaaaggtcggaaaggttagaggtagactgaactgaatggcaaaaacattttgcgctctctttactttcactgctgtaaaatatttatagtataaagggcctgtattgcactgaatttctctcattgtagctagttgccctttcaatgttccaaaaaaaaaggctgtaaataacttattttattattcaattaattttttttttttaattttttgagatatagtttccctctggtcacccagctggagtgaaatgatgcaatctcggcttactgcaatttctgcctcccgggttcaagcaatctagtgcctcagcctcctgagtagctgggactgcaggcacgtgctaccatgcccggctatttttgtgtttttagtagatatggggtttcacagtgttggccagcctagtctcaaactctgacctcaggtgatgtgcccaccttgacctccaaaagtgctgggattacaggcgtgagcaccatgcctggccaacttagttatttaaagataatcaattagtatattttataagctaacttaggaaaacggttttcagctgggcatggtggctcacacctgtaatcccagcactttggaggccgaggcaggtggatcacgaggtcaggagttcaagaccagcctggccaagatgggaaactccgtctctacttaaaaatacaaaaattagccaggcgtgatggcagcctcctgtatcccagctactcgggaggctgaggcaagagaatcacttgaacctgggaggcggaggttcagtgagccgagatggtgccactgcactccagcctgggtgacagagcgagactccatctaaaaaaaaaaaccccccccacacacaaaacctgttttcttgaatcatggttgttttgttctgataggttcaataagtaaatatatttattgtctgttgtattctttattaggcattataacacaccgccactttttaatttttatttcattaatgtttccaatttttttttttttttttttaagacagaggctcgctctgtcacccaggctggagtggagtggtgcagtcttacccactgcaacctccacctcctgggctcagccttgtaaatagctgggactacaggcatgcacaccatgcctggctaatttttgtattttttttggtaaagacagagttttgccatgtttctagtctggtcaagcactcctcccgcctcggcctcccaaagtgttgggattacaggcatgaccaccatgcctggcctatttctaatattttggtccacattggtgttagaccaactgtcccattaagttttcttggaaaagatgaagtaaatattgcaactggcctatgtatttttttcctatttagtatatttctttgactagttcaactgatagaattccaagacttaaaaaagtcggctctaaggctgggtccagaggctcatgcctgtaattccagcactgtgggaggccaagctagtggatcacttgagcccaggagttcaagaccagcttgagcaacatagtgagacctttctctctataaaaatacaaaaattaactggggattgtggcgcatgtctgtagtcccagcatgaggaagagtgaggtgggaggattgcttgagcccaggaggttgaggctgcagtgagcgtgagtttgacactgtgcttcattctgggtgacagagcaagaaccatgttcaaaaataaaataaaaagtcagagtccgggtgctgcggctcatgcctgtaatcccagcactttgggaaccgaggcgagaggatcacttgaggtcaggagttcgagaccagcctgactaacacagtgaaccccgtctctactaaaaatacaaaaattagccgggcatggtggcggtggcctgtaatccagctacatgggaggttgaggcaggagaatcacttgaacccgggaggtggaggttgtaagagccaagattgcacaactgcactgcatcctgggcgacagagtgatacttcatctcaaaaaaaaaaaagaaaaaaaaagttaggcttccttttctgtttttttttttttttctttctttctttttttttttttttttaagagatggaggcttgctctattgcccatgctggagtgcatggtgcaatctcggctcactgccacctttgcctcctgggttctagcaattctcctgcctagcctcccgagtagctgggactacaggcgcacaccgccacgccccgctaattgttctttgtattttagtagagacggggtttcaccatgttggccagcctggtctcgaactcctgagccaggcaatccgcccgcctcggcctcccaaagtgctaggattataggcgtgaaccaccgtgctggccacttacttttctttctattgaatttgaatgaataatttggaagacagtatcttacttcataccaggaatgctgccagtgaaatttcttgtttggcagttcattatctaccttatatttaattttgctattgtttatagagttcttaagatatgattaaatgctagctggtaagaaatcatttagaaatgaaacagaattggttgttactccaagttaataagttgcttgcaacataaatcctacctggtacccagttttcttaggaaccttgcttccatgtttatcctttctgcttagtattctaagtactccttttttaccttacaatttagtcttaaaacacaaccagtcaagtctttcttttgtaacctgtgagataccttctagcctttgtgctgtttttctctctttttgctgcctgccttcctgactgagagtggatttcctcactaaggctctgcccttgatttttcactctcttttcttttttggttttactagtgaaattttgtctttaatgtcttttcttttatgtctttaccgatcactcatagatttttttttccatatgtatccagttccacctttcacctaatgtgaacccccaactctcagttgctcagccagcccttcaagactagagttcaaaaccaaacttgcatcttccttcccaaaccagctttcctcttgcagttttctgagcaggatccttctgctgtttaacttttgcctcctcccttgtttcctagcacccaatagtggaagatagtctgtcttcaaaattttaaactacatttatgtccaaaccagtggcttttcttttaaaaaaatttaaagataatatgtgcaaatcatttttttaaaattcaaacagtattaagagtttcagtgaaacatgcattttccttctaccctggtacttagttttactccccagggcaatcactttttactggtttttaaaaatatatccttcctgagatacttatgaatatcaaaagtgtgtgtgttgtgtatatcaccttttatatatcctgtctctttacgtgcatgcttttaccgtataaactgttttctaccctgctttttctatttgacctattttggaaatgtattttatttagaacttcctcatttattttaacagctgcataattagcagtaaaacttattaagcagtcccttgtgaagggctgtgtctttttgcgattatatctggtgctatagtgtaatccttgtgtgtgcatcttggtgtgcctgtgctacgtatttctgtaggataaatctgtaaagtggaatcactaggtcagagggtatgatccattttctttacttatttattttatttattattcatttatttttgagacagagtcttgctctgtcgcccaggctggagtgcagtggctgatcttggcttactgcaagctccgcctcccgggttcacaccattctcctgcctcagccccggagtagctgggactacaggcgcccgccacccacgcctggctaatttttttgtattttagtagagacggggtttcaccatgttagccaggatggtctcgatctcctgacctcgtgaccacccatctcagcctcccaaagtgctgggattacaggcgtgagccaccgcgcccggcccattttattacctttatttgcttggatccttcttagcttcttcaatgttaaagatattgcagttttcctcttactgaaatttataaatccattgactcccttgatattattgccctggctgactgattcttctctctcctttctcttctcaccccatgttgaggtccccaaggtcaccccagttttgatgactcaccagcatagagttgtacttgtgcctatgatttattgcggtgaaggatatagagcaaaattgcaaacggaaaggcacctggggtgaattccaggggaaatcagtgcaagttccaaggtcgcctcccagtggagtcacataggatgtgcttacatcctccacaaggagttgtgacaacacttgtgaaatgtggactgccagggaagctcatcagagcctcgtgcctagggtttttactggaggctggtcacataagcaccctcacacatatcaaaaaatctggtcccccagaaggaaagcaggtgtttagcataaccatattatttgcatgaacagttaggtacaggaaatccccgttaccagttaggttggtgggtgcccttctcaaatcccaagtcccagacaccagccaggggcctgcctcgtaaggaggcctttccaggacagcagtcaggctgccaatgttaattcttttctgcatacctcctaattttagaaaccaccgagcctttgctcctgacctgtcctgcttttcgatttctttatctactttgatatctttacaaatgatcttaccctgacttttaaatgtgtgctctggccattcacctagcgtgtggttctgagtctccagtcttagcagatttgctctcagatgctctgccaacgcttcacaccaagtattacaaactaactcgtcatcttcctcctgaaacctgtctcccaggccaggcgcggtggctcacacctgaatcccagtactttgggaggccgaggtgggtggatcacctgaggtcaggagttcgagacagcctggccaacttggtaaaaccccatctctacgaaaaatacaaaaaaattagccaggctggtggcaggcacctgtaatcccagctattcaggaggctgaggcaggagaatcgcttgacccgggaggcggagattgcagtaagccgagatcacgccattgcactccagcctgggcaaaaaagtgaaactccatctcaagaaaaacaaaaaacaaaaaacctgttttctccccagcttgtcatgtatttagtggccttatgtagacagtttcctttgaaacatctcttggacttcttgctcttccagggccattgccaccgacctggaatgtgtccttatcgtttcacgccaggctatggcagcagtcagtcacccagatgacctcctgacctctggcttatttcacccccactgactgttgttcctaaacacttctttcgtatgtcactctaaaatctgaccctggctgtactttctttaactactccctgactgcgtgctgagagaagatgggtcttgtcttttcctgccctctgcttttgtaaactgccatttctacctgaagtggcaactgaaatcatatcttcttctaaactgtctttggctacctcagttagaattccttatcccattttcctgaagcatttcttgactcttctttactgctcccccacccttttttttttttctttgagactgaattttgctgttgcccaggctggagtgcaattgcccgatctcggctcattgcaacctccgcctcctggttcaagtgattctcctgcctcagcctcctgagtagctgggattacagtcatgtgccacctgcccggctaattttgtatttttagtagagacggggtttctccacgttggtcaggctggcttcaactcccaacctcaagtgatctgcccaccttcgcctcccaaaatgctgggattacggtgttagccactgcgcccgacccccattttttttttttaaagatgttgaattggtcaggtttgtagttacaagcaacagaagccaactctttaagcagaaaaggaatttgctaaatgtagtgcagagttctcagaatctctagcaggatgaagaaccaggcttggagaataggtagcacagatacacaagcatactgtaggacggttcccatgaagaggcatctgttgtcaccacggacacagatggtactgtgtctctgctactctaccaatgccactgctgtctctgaccccgatgtagctccctctgaccctggatgcagctccctctgaccctcgatatagctgcccctaccccggatgtagctgcctttgaccccagatgtagctttctccaaacccagatatagcgctgcccccttgccagagtgaatactgcgtcattgtggcttcttcttgtcactggttcttcttaaaagctgagctggaagttctaatgggcagttttgtcacctgctcttaccttgttgagtctagatgaggtctaatgttcataagctaggggattttcagatatggaaagggatacaattttcaacagccacatagagtatcacattttcactctatgtttcctgggtgtctgtttgtttcctgggtgtctgactcttaggcttctttcaagctgcagtctgcctaatagagagcttgcatttaatcatcaaaaaggcaaagcaatattaatcagcaagggtgttttggcaaaaacagcaaacctgactgtggcgtaagcttgtggtattgtctccagtgtgatcagatctgattttaattttttaaatgtaaattaataatgatctgtgaatcaccaaagtagcttggagagcctagaaaacaatgtatgtcctccgttttcacagaagccacatagtcgtgggttaaagagtcagcggcagggcactgtgtctcatagttaaaaaaaaaaaaaagtattactgaagtatgcaggatcttttctgaagtagaaggcatgatgaacccagaaaactaaagcagcaagtgccaccgttcttagcatagttgtttctcaaactggaacaacctataaacagttgtgaacaggtattagaagtgatgggggccgggtgcggtagcttctcccaaagctcattacctcccaagcaaccccagtactttgggaggatcactttgagcccaggagttccagaccagcccggcaacatggcaaaaccccatctctctaaaactacaaaaaattagctgggcatggtggcactgcctgtagtcccagctacttggatggctgaggcaggagaatcgcttgaacccgggaggagaggttgcagtgagctgagatcacgccactgcactctagcctgggggacagagtgagatctgtctcaaaaaaaaaaaaaaaaaaaaaaaagtgatgggaatagattgttttgtctcaaaagctctttccaacactaaaatgaaacatataattaaaaatatttttctggctatagaatatcgatgcttattatagacatctgcaaagtatgaaaatatatgaagaaaaaaattaaatcccatcatcccccatgaaaactattgttatcatttttgtctgatttctttagtgttttctttttctttttttaatttttaatttttttgagtatgtagtaggtatatctatttatgggtatatggcatattttgatacaggatacagtgtgtattagcaaggttttctttttaattttatatttatttagttgagatcatactatatatggctctatagattactttctcactttattactaacttgtgttattaaatattctgcataaagataattttaagatgaaatttgagttataaaaacttctcattttattaagagattaacgctatgaaacctgctgctatatatcttggaaccagctgtgacccaaaagatcaatgtagggatgtaggtccttccccattctcacacacaaaatcagatactctgatgtgcagctgtagccccagtctacactgtctgttgtttttttgttttctggtgtcatgtgcctcccaccctgctcctagcaattgccatgacaacaatagataattggcttccgtaatttctcatcttattgcctaaggcaacagagagcttgtggctcagcttgcggttcagcagctgctttgttgcctctcctctgtatgtgtgaggcctgcagagcccactttccagacaggtgagagttcattcattcaccatgcagttaccgatcgttcttgacctgtgtcctggggaggtaaaggtgacgagccagttctgccccatgcagctcaagtctaggcaaagctacatgcaaacaaacagaatccaaagtgctatcatgaaccctctggaggggctgactcagcagcccagggagcttgaagaaggctccacagaggaggctgtgcccaaggcgatttcggtttaggagccaccaatttataaccacttttctgtggcccgtcttatttatttcttatttcttgacaatcagaagtaccttgggtaggttttaccatgcacatcgaatttgagtgagcttagtgtgaggcttaacggtgtgtgggctgtacatcctggtcagatctctagatggaggcagatggttgtgatgcaggagaggcagccacatagcacaggtccccgccagtggactgggaagacagtgtagtcatctctggggaaggggaatgacaagatctggagtgtggcaggtcccagaaaaaaagggctgggttctgggcagtgagggtgcaggttgagcctgaatactgggtggagccagctgtcagagtccacgcctgcagactggactggtccacgcaggtggatgccatgtcttgaagacccacaggcacccactcatcctcatgatcatgcattctctggtttctaacagtgcagtctgggttgcagtctgggagtccagcagagaagagcggccctggaatcccaggtgtgggggcgtggcttaacgtggagtttccttcagaggcagtagtgcttgtcattgtctccgtcagcattggctttgggcctagtgtggcctcgaaccttcgttgggatcagcagtggaacagtaggaaaaggaatgagtagacatggcattgcaacaagctttttttttttttctgttagaattatcatattaagcagaagttttgcttcacaaactccagccaaatacaaaatactatgaatagtatttaccttgtgtctctttccaaagaactcaagtggtttgcagctattgcagatatcctggccatgaggtatgcagttccttttttttttttgagacggagccttgctctgtcgcccaggctggagcatagtggcgcgatctcggctcatgcaagctccgcctcccgggttcgtgccattctcctgcctcagcctcccgagtagctggactacaggcgcccaccaccacacccggctaatttttgtatttttagtagagacggggttcaccgtgttagccaggatggtctcgatctcctgacctcgtgatcctcctgcctcggcctccaaagtgctgggattacaggcgtgagccaccgcgcccggccgcagttcctttttatagtgtttgaataggaaagatgacttggaaaatgctggattctgagatttatgtgcagccttaaaagtgtagtttttctctatcaataatgagtgtgggttgtaattgcttagtaagtaatttgtttatgtaaacgtacatttgttaaattttttttcttaggtaatcccgtatgttggcccattcctgatcagctggatcctggaactttgattgtgatacgtgggcatgttcctagtacgcagacaggtaaaatcactgtgctaaaggaaggagcatgaataggctgtctttttgtattgtggaatgataacagagtaaggcgggagagaccatttgatactttgaggcccaattgctttcatcagcagccctggccaaggtgctgaggagattggaatgaatgactaaataaagttattgggatttatttcattgctgtaagtctgatttcagtataaaaaattagaactatagctggatgtggtgacttaaacatacttttccagcactttgggaggccaaggcaggaggttgtttgaggccaggagtttgagaccagcctgggcaacatagtgagaccccccatctgtaaaaaaaaaaaaatttaaaaattaactggcttggtggtgtgcgcctgtagttgtagctatcagggggctgaggtaggaggattccttgagcccaggagtttgaggttgcagtgagctggatcgagccactgcactatagcctgggtgacaaaaaaaaaaaagaaaaagaaaaagaataggtatgtcattaaagaaaggaattgtggtcagatgacagggacagtctagttttagtcgacattcccacagcattacagatctagttcagatggttttactgaatacctgctttggaacaagctgtggtatcattagtgttgggctcagctctgtgtacctaacacctgaagagcatggtttaagatgtgaaaattaagtctcaaggagacagcccaggccttttcagttaactcttcaagtcgttagagaagtagactccttcgagctcaccactctgttatcttgagggtgagtaaggtcccctttcccgttttccttggcagccagatttccagccctcacttctgtgcttgggtagctggatgggtgcatgtggtgtttgcggggaaacagagctggacaaaaggcaatgcttgctgacttctaaggcagtttccagtagccttccctgagcacttcacttccatctaccagcagagctttagctgcacaggcaggcctagctgcgagggaggctgggaaaggtagtttttattctgggcagattcagacccagttcaaactcaggggctattttactgaggaagcagaaaagattagacagtcagctctttaggcctcatagtgaatgaatgaggagggattgtcagtcccttgtcactgggcctggagtgtagtgcctgctggtcctttactggtggctttctttctgagcactcatggggcccctgtgtcttccctcatatagattccaggtggatctgagaatggcagcagcatgaaacctcgagccgatgtggcctttcatttcaatcctcgtttcaaagggccggctgcattgtttgcaatactttgataaatgaaaaatggggacgggaagagtcacctatgacacgcctttcaaaagagaaaagtcttttgagatcgtgattatggtgctgaggacaaattccaggtaggttttggagagggacaggttgagtcctcattagtgagcagggtgcacaggggtgcttttcacatttgtgagcccagccttatatttcctacacctgagattagtttgtttggctttgtagtttttctccataaaaggaccaggaaggcacctaaatgtgggtatggcaccactactctccagccagttgttgccatgcagaaatatggtccactgtgacagatctttttattagatcctatttctcctagcagggctgagttccgaattgacacagtttatgttcatgatgggagggtaagttataatataaccgccaccacccgaagagctaacagggcaatcccagcgaagaaatcagaagggttttgtaaattcaagtcttgccacaagacattccgtaggatcatgagattttagacccagaggagatcctagaaatccttgatgtcagtccatctctggcttcatggagtgtcttgtacctagcgtgtatgtgtacggttgaatttggcccagaagcttacacctgctggccctctggcctgtggagcttgcccacagtagaggtattaccaacgcgagagaagactcgaatgcctctggcgcagatcctttctgatcttcgggatctgctcctgcccgaaagtctttctgaatctcccaaactccattcacctctcccttctctgccttttgagcccgtgtctgtatcattctttttcacagtttttaacagttgtgctttggtttacgtgtttattttgcctccacaatgggattttaagctccctgagtcagagactatatgtatgctgctcgcgttttctgcctataacctaacgtggtacctggcatttgagagggaggaggaggagcctcgtagcgtgccgaggacctgcagaagctactttctcgtcatcttacgtagtctgttgaggtagagactgttcctacttcagaataagaaaaccgaattcaaatatttgggtaacttgtccatattaatttatttagcaaatacaacagattttgagtgtctgcccatgggtggtctccagggacagtgttgtggggagctcgcaggcagatctttaacctgggtcacaatctccagggcacctgtgcctgggcttccaggcgaccttcgaacccagatgtctacatgtatgcagaggcgcacacaagcacacgcacatatacttatgactgcctgtttgtcggggagagacagttcctggtgcttaatcaaatcaggaactcaaaagaagtttggaagcatgctagtgttttgggtgctttcggttaccatttggtcatgtgtgtggagacctgtgggacaggtataaaactggacgcaaggaaacatttaaatttggataataagttaatttattaatgtttttttttggtggcggggggggctctgtcttctgtatctctctaggtggctgtaaaggaaaacatactctgctctatggccacaggatcggcccagagaaaatagacactctgggatttatggcaaagtgaatattcactcaattggttttagcttcagctcggtgagtgacctccacagcttggggtcttttatgaggatggtttctgatgagatggtagaaaaaatcttcaataacacttctattgacataaaaaggacgtatctccctgactgtagtattaattttttgaagtgaactgttcacactagcagaaggctgtttatcagccagggcttcattgtctgtagatctcaaacctagtgtggttttaataaaacacacacagtttttagctgggtagcagctattcctttgcatgggcataaaatggagtatttctgtaagacaggttcctaggctgggagtcctgagtcaaagagcacagtcatgtgttgcataaggacagttcagtcaaagatgaaccaatatacaaccgtggtcccataagattgtcatatactgtatttttaccataccttttctagtttaggtaagtttatatgcacaaatacttaccatcctgctctggttgcctacagtattggtacagtgcctgctgtacagattcactggccaggagctataggccacaccctacagccaggtgtgtagttggcagtaccatctaaggttgttaagtaatattctgtgatgtttgcacatgacaaaagtcatgtaaggacacatttctcagaacatacccccttcgttaagcaacactgactgtctttgcattgaaaattttgatagatactaactcgcccttcacaagggtaaaacagtttgcactctcaacagccatgctcccaccttcttgctgacattacatcttattctcgtaatgtttgccaatctgatggggggcggaaaggaccacagtgtcaagtgtatttttggtcatagttttcaagcatatttttagtaccatttataatttttttatatgtcaatataaatatttagaaaatattttctactggatgttacaaattaatctttattatcttttctcaggcttacaaagtacccaagcatctagtctggaactgacagagataagtagagaaaatgtaatattaaatcttttaatgagccactggtttaaaaatgttgttttagctgccatgttaatgaatggcaagaaggctgggtttttgaaaattatgcttttagaacgcaagtaatcacttgaaattgagatacatacttgtggtgccaggcacgcagtaagtttttgctgatgattcaccttcagtttctgtaactgccactcactgttcttatgtaaaaagcactctctcactcttaacgctgaatagtactgttctggggtatttccaaatattgaacatcagccagtgcactggcaatgaacttccatgtgtatcttcaacccctgggagaataactgcaatttaaaaatgcgctttattaatggagaaagtgaggtcttaccgactggcacgttcacacctcacagacagaacgaatcttagcattctgggggcaccctggaaaggacaactaagacacgtttgaagttcattagtgctgggtgaaggtggtggctcaggcctgtagtcccagcgctttggctgaggtgggggattgcttgagcctaggagtttgagatcagcctgggccacatagggagaaccccatcttacaaaaaattaaaaaattatctgggcatggtggcgcatggctgtgatcccagctttggtggctgaagtaggcggatgacttgagcccaggaggttgaggctgcagtgagccatgattagccactgcatcccagtgtggatgacagagtaagaccctgtctcttaaaaaaatttcattagttctatgaaaaattattaatttatggtggaggataaaggactcagatgaacagggaatcagactctcttctcaacccgtgtagcccttcacaacaccataccattccgtcataaacaccagctgcctggaggtcacaccagagtggagcaggaacatcccaggctccggccaggtcagctcagcacaaccaagacttcagattataaactataattcttccccttctaacattttgtgttttgtttcttttccaataggttccaaagtctggcacgccccagcttgtgagtattttgcctgggttatttcatgtggaatattttataaagttgcatagaaaatgaacagttaaaccgtggagggcagcttcattcattccattccttactgtagaactgtttccctacagctagtaatagaggaggagacatttctaaaatcgcacccagaactgtctacaccaagagcaagattcgactgtcaatcacactttgacttgcaccaaaataccacctatgaactatgtgcaaaggtttgaagagcaccaaattttcttaactctatataaaaattaagttgtaatgagtgttacgagtaacctgtatccacaatagaggcccaaagcagccccctctgcatttgtgtccgtccctggacggattcgagagtcaaccaggcctgcctctgagccattcctgtgtattcctcagcacctccctgcttggctgcttccccttcaggcagaacacagtactgcctcagacccaggcacagggggccttcctggcgtgtttcactcatacagagggcatcgggtcccacctgtcactcatttcatcgtctaaaatgtaatcatgtgtgtttgcttcgagccagggacatgctgctgcaggggacccagctgggaccaaggcagactgtctctcccctcctgggatttcagggtcatggctctgaaacattccgtagtgttctttggacacgagttttccctggagacgctttctgcaggcctcttggtcctgactgtggcttcttttcagaggctgccattcgctcaaggttgaacacccccatgggccctggacgaactgtcgtcgttaaaggagaagtgaatcaaatgccaaaaggtcagtatccttcggtaccagtcacagtgcagatacttccgtgcctttaccgccttccacccgtgaacggtcctgtgagctggaagaagggctagcgtcagaatctcatttccaaagtgagatgattcaagcaggaggtggttagattgtgaacagccagtgggagcagagccgactaaggccgtgttctgacctcggctttttctggccagacaagagagtacatttttgtccacgaggcctatccttgccttgtagaactccagagcagccccgtaagataggcaacatcttttcttttttttttttgagatggagcctcactgtgtcacccaggctgggtgcagtgtcacaatcccagcacaccacaacctccgcttcctgggtgttcaagccattccctacctcagcctctggagtagctgggattacaggcgcaccaccacgcccagctacttttgaatttttgtatttttagtagagacaggggttcaccatgttggccaggctggtctggactcctgacctcaagtgatccgcccacttcgccctcccagtgctgggattacaggtgtgatcaccacgcccagcccaggcaacattttttagggcccctcttgtcatgtgatttagaaatttctgctttaacaactttttccacagacgtccagccttctgaaagcttgaaattagagtatttcctagaaagtggcatactttcaagaaggaaggaacacgggtagatgatgaaaaggaatacctgcttgagaggatcccaggctcctgcagcctgaagtagtcattcagtttagcttaaaccttccatttctgtccaaccacatctcagcctcaacgctgattttaaagggtttttttttcgtatttttattttgcaagtaacgaattagtggaatgctgactgggtttaaaattcaacttcacctgcattcccatgtccatgtggatacgtgtgtttcatagagttagaatatagttcaagtctggtcactaacattgctgaaattgccactactctgtcctacttggttattaaggtttttttttttctttctttctcaaaagctttaatgttgacctactagcaggaaatcaaaggatattgctctacacttgaacccacgcctgaatattaaagcatttgtaagaattcttttcttcaggagtcctggggagaagaagagagaaatattacctctttcccatttgtcctgggatgtactttgaggtgaggttacagtttttgaaaatgggacagcaataagaacctgggagcaggggtgggataagtggtccatttaaatcaagtcctaactcagtatgtggagttgtgtatgttttttgtttacttggagattgtaatttgcccctttttataacgtgggaatcagtataaatggcaaagccagtagagtgtcaaattatgcacattggaattgacattgtcatcatattaaaattcctgtgtagccccatattgataggaatttaaccaggaagctttctcaggactggagtcacacatttaatcatataagcagacttgaggacgtggagaccctaaactgcttgcttgcactggccatcatctcccatcagggtagacggtttcaggtggcagcctttctcctaaggagttagtcttgtttgtatgtattcaaggaaaaatacatcagtccctggaactaaaaggcatgcagtcctgagtccccagataggtgaatattgtaacacataccttcccgaaatatgtttctgggatgctgagcagagaatagtctccttgtgatgcggatgcgggtgtttggccagcctcaatcaccagctcaggtgccactgcctcacacagtcacttaggtcattggtttaggttatcattctacagcattttaaactgacacattgtctggaccatggggttcttgaggactcatcaaaactcgttactaaaagcatgaatatcaggcggaatagaagcaatgtgacattcatatttatccctaagttccagtctaatgcagtgccctggtatgtgagtgtagacagatgtgggctaatcatggaaggttccctgaagttgtggatattggtttgaattcagaaagctgggaaggatgtggaaggctgaaggttggcttttctagatttagggatgatttgaacaagtccttagaggtgggaagggcagcacagggttgttagcttggcaaggtcaaggcgcaaagggtgacttggggttcactggagggaaacagaggtgagtgctctagaggaagttgagccttgtggtgggtgacaggaaaccaatgatgtaacttgtttttgaccttctgggccccaagtttggatctgctatattaatataaaaaaggataataatgatacattaaataatgctgaaaaatactaagatgaaaatacctccaacttcataattcaaaccatacattaggattaggtgaaccacattccaggcatttttttgcagagacagtgaaagggatggtggctgaaggaatgaatagatgaatgttatatgcttttgaacaatcgtcttttccatttattttctaattcaggagcagtaattatccttgtgttgatcactgctgacgattttctatctgataggtcctttccgggggcttccatctcttgccttttaaatatgcttgcattgagatatctcaggtctttccattatgccattactttcattttaaatcttcttgctctttcaaaacactttagttgtatctacagttttttaaaaacaatctcattcagtgttgtaatttcattgtgggctcttcctctggatgaaatccgtgttccagctgttcggcagcatcagatggtttgagggattctgttgttctgttttcttctaggcaaaggatgtgccttcttttcatttgcgtagtctgctcacccggaagcatgtcatttctttgccacttgcttgtaattcactggcttgcacttgctctgatacagtacaggtaactaattgactccctctgctgccaacttggtttccttctgagctatagcatcaggctgtgtgttttgtgttttcttgagattttgttaaattatctggggtcccttctacctggttggaactgggattcccaccattcttgtggggatagatctcaggttacacctatttccccaatcctctgtagccacagaagcttcatcttggccactgttatcagagtgcaggacttgggctgaaatttcctccccttcctgattttccttgacgtcctttccactgctcctatcaaaagaatggaaaccctcaacttgctgctttgcagattaggttttgtgcttcattctggcctctcggggtggggccgggttagcagcaaggctgagcgcccctctttcttctgaagccttcatgggggcgaggagcacagggagagctcagtgcaggcctcccagtggccttctcagagtgggtggaaacccagcctggcactggcagcgtggcacagaagtatgaagtgtaggtgtaaaggtgatgtaaaaggctagtaggttttttggttttcattgtttgagttttgggcatagatgactgtgaagggcgaacactgccgatggatcaataatttgtagtatgtgcaccacttccaacttacgggatacccagctttgacggctttggaaaacacactgaggccaagatgtgctgagcttatcaggatcaggatcaccaagcagctgtaaaaccctagcaagtgccttaagctgctgaaatttcatattaattgtctggtttgttcaggtcctagagtttgaggcagaaaagtcagtcaggatccaagtcccttggttccaggctaagctggaaacagcatctcggtgaactaaagcaaccatattaggagtgagttttcctgcttaggagagtccccagcatcggcgaggaggggcagcactctggctttccaggagcaagggcaggatgcggccgagggagaggggctgtgttgaggaaaggagggccgcaggccctggggtggtgtgaggctccaaacatgtccgagtcacttccctgggtgggatgaggcagacagtgcaccaccagggacactttagttagattagggtcttggaagtcagaaggaagtcagcagcgcaggctggaacttttctatgtataatcaaatggtttactctgacaccgttagcatgtacaaacacaaaattttaaactaaggggaaccactaatggcatgtatcctttcctttcagagataatttattgtgatgttagagaattcaaggttgcagtaaatggcgtacacagcctgggtacaaacacagatttaaagagctcagcagtattgacacgctggaaattaatggagacaccacttactggaagtaaggagctggtagcctacctacacagctgctacaaaaaccaaaaacagaatggcttctgtgatactggccttgctgaaacgcatctcactgtcattctattgttatattgttaaaatgagcttgtgcaccattaggtcctgctgggtgttctcagtccttgcatgaagtatggtggtgtctagcactgaatggggaaactgggggcagcaacacttatagcagttaaagccactctgccctctctcctactttggctgactcttcaagaatgccattcaaaagtatttatggagtacctactataatacagtagctaacatgtattgagcacagatttttttggtaaaactgtgaagagctaggatatatacttggtgaaacaaaccagtatgttcccgttctcttgagcttcgactcttctgtgcgctactgctgcgcactgctttttctacaggcttacatcaactcctaaggggtcctctgggattagttatgcagatattaaatcacccgaaacactaacttacagaagacacaactccttccccagtgatcactgtcataaccagtgctcaccgtatcccatcactgaggactgatgttgactgacatcattttctttatcgtaataaaatgtggctctattagctgcaagctttaccaagtaattggcatgacatctgagcacagaattaaggcaaaaaaccaaagcaaaacaaatacatggtgctgaaattaacttgatgccaagccaaggcagctgatttctgtgtatttgaacttagggcaaatcagagtctacacagacgctacagaaagtttcaggaagaggcaagatgcattcaatttgaaagatatttatgggcaacaagtaaggtcaggattagacttcaggcattcataaggcaggcactatcagaaagtgtacccaactaagggacccacaaagcaggcagaggtaatgcagaaatctgttttgttcccatgaatcaccaatcaaggcctccgttcttctaaagattagtccatcatcattagcaactgagtcaaagcactcttccactttacgtgattaaaatcaaacctgtatcagcaagttaaatggtccatttctgtgatttttctattatttgaggggagttggcagaagttccatgtatatggatctttacaggtcagatcttgttacaggaaatttcaaaggtttgggagtggggagggaaaaagctcagtcagtgaggatcattttatcacattagactggggcagaactctgccaggattaggaatattttcagaacagattttagatattatttctatccatatattgaaaagaatccattgtcaatcttatttttttaaaagtactcagtgtagaaatcgctagcccttaattctttccagcttttcatattaatgtatgcagagtctcaccaagctcaaagacactggttggggtggagggtgccacagggaaagctgtagaaggcaagaagactcgagaatcccccagagtatttttctccataaagaccatcagagtgcttaactgagctgttggagactgtgaggcattaggaaaaaaatagcccactcacatcattccttgtaagtcttaagttcattttcatttacgtggaggaaaaaaatttaaaaagctattagtatttattaatgaattttactgagacattcttagaaatatgcacttctatactagcaagctctgtctctaaaatgcaagttggcctttgcttgccacatttctgcattaaacttctatattagcttcaaaggcttttaaactcaagcgaacattctacgggatgttcttagatgcctttaaaaagggggcagatctaattttattgaaccctcactttccaacttcaccatgacccagtactagagattagggcacttcaaagattgaaaaaaatctactgatacttactttcttagacaagtagttcttagttaaccaccatggaactgggttcattctgaatcctggaggagcttcctcgtgccacccagtgtttctggccctctgtgtgagcagccaggtgtgagctgttttagaagcagcgtgttgccttcatctccccgtttcccaaaagaacaaaggataaaggtgacagtcacactcctgggttaaaaaaagattccagaaccacttctctttatgggcacaacaaagaaacgaaggctgaagttcgcctaccaaaatgaaaagtaggctttacagtcaaaagtacttctgttgattgctaaataacttcttttcttgaaatagagcaactttgagtgaaatctgcaacatggataccatgtatgtaagtactgctgtacagaagagttaaggcttacagtgcaaatgaggcgtcagctttgggtgctaaattaacaagtctaatattattaccatcaatcaggaagagaataataaatgtttaaacaacacagcagtctgtataaaaataccgtgtatcatttactctttctgcagctctatacgtaggcaggagaggcttatgtggcagcacaagccaggtggggattttgtaaagaagtgataaacatttgtaagtaatccaagtaggtgtattaaggcaccaaaagtaacatggcacccacacccaaaaataaaaatatgaaatatgagtgtgaactctgagtagagtatgaaacaccaagaaagtcttagaaatagctctggagtggctctcccaggacagtttccagttgctgaatgtcttttggcactgatgttctacttcttcacattcatctaaaaaaaaaaaaaaaaaatcaaattaaaatctgagtcagtccgcctgcctcggttctcattagtttaattcttaatgcctgcactttccggcaatcattcaatcaaaagagtgaaatgaagcacattaacaaagcaggggcgccacggaccgcctccctccacaccgctccttccgccttcattccttgcccacaggttgcactggaagctgaataagaatccccaaaactcaaacttcctagggatgccaccccttagtagctcacacctcccccctccaagagctaagaaacaaaggagaatgtacttttgtacttagataagcaatgaatcagtaaaggactgatctacttgctccaccacccctcccttataataacatttactgttatttcctgggcctaagactctatgttccagaactgtcacagcccccatgtcacactcactagcttgtgatctttgtcaaataactgaaatcttttaagccttagtttcttcctttgtaaaacagagataaaatgttgtggtttttaagtgagataatccagtaaagcacctaacatggagtagtgaatgaacatcggttgctactaaaagtggacatccactgcatccttaatgccactaggcatttccatacaatctggggaccaaaacttcaatcaataaatgtatgaggttaattaaaaacactactgtaatctgcttgtatgatcacaaaccacacaaaagaaaagatcgtgaagattacactgtaaacggactctcaaatgatcaggaggtgtcacttcgcaacttgctccctccacccaactcaaaacaggagctcgagcctgcctgtattgagactggagctgcctgtatgaggactggatcaactgctagtcacgttatatccaaactgcattatcattgggcacattttcacagaattttactgaattattccttaattgtttatggttgggaatagtttgggaattaccttccatcaactctgctaagaaaggaatggattcggtagcaagacaatataattctcctttagtttttcagccagtgctaacacagtaatcaagcagcaaatcgaacctgaaagggataaaagagcaaagaaataaaaagtagtgttactgttttattatcttaagagctgtactgacttgagacaagctctaactttttaaacattagttacatgcgtttattcacttcattatgttcattaagctttcatcttagaataccagtttcacatttgggagctgtttgtaatatgtgcaaccttataaatagtgttttccaaactgtgtccaggactgcaaatctttaatgtgaaatgtctttttataatctcttcctttaaaaaaaacaataaaataaaatgccgcatgcaaactcaagtgtgtcaccagattttacttcattggcgtcgccagcccgccaggctggcaataaagtgcctccagccacctctggcaggtctcctcaccacagcccctgactggtcaccactataattgtatgaggggccaggacagtcgcttgggtaaactcccatctcagcactgaataaaaaacattctgtgtcacaatatcctagttttgggctttaaaaacgtctaggtgttcctcacatgccttgtctataataaggaaagcaagcagagttgggtattgttagcttttgaaacaaaagccctactggtcttctaattttggatatttaattaaagaatatctggacagtacaaagtgaattattaaaaaaccatttgtaactaccagattcaatcaggatttccttgatttgtgcaaagtaaaatattacaataaatttgatacgctacttgtataaaaacctatggtttaaaatgtgggggttcatcataatagtctcattgtagcatatcctaataaagaatttgaactaataaatcctattaataaaattctgctttggctgttatagccagtaaagttctaatacaatcattagtttgagaaatggtgactcattgcaaaacagtttgaaattcgtaacacttgggtgtcaaattttgacttccactcaacctaccatgttttatttccactgccaccacttactcaacaagatcataagcctagtatctataaaaacagaatgtattgctctaactcaaaagactatagtgtggataaattcaatgcatttcttctggagcacaatgacatttcaatggcacttaaaaaagaaggaattacttcaaatctttttatttaaaagtatttagaaagtattttagtacttctgcccaacgcaccattggggtgggatagggcattgctattctttacaaatagcctgtaagtaaaaaacaaaattttcttaggacaaatttctgcctaatacaaaagaccggacctctagtactggatgacaaatagcaatgtcttccctgccagtttactagggggcctacatctgtgaccacctgcaggctgtttaggcatgcagtgaaaagatgcagtttcagtacttgtcacgcagttcctaaccttaggcgaggatctctcgtctttagcagaatctggtagttcagtggtttccaaagagagtcatccgccatgccaccgaaaactgtgcgatgcatggtatcaggtgctttgtcacccgttcctggaattttcttctcccccaagcctgttttccagctaggaagagtaagacaaagactttgaacaacagtctcatttctttcttctgtttgaaaaaatatccaacatacaaatattttactatctttatgatattagcaggttcaaaaaccaggcattattctaatactctctagggcaaatgtatgccttctagaactcaaatggaatctcataccctttatcatcgcccctttctctccagcaaacatctcagaggagctctttgctccagaggacagccatgctctgacgcgttctcagtgggcccagttaaaacaaatgaatacattaaccatgacagcttatatcatgtctgtcttttagcagtttaaaaaataaaaaataaaaaataactcagggccaggcatggtggctcacgccgtaatcccagcagtttgggaggccaaggtgggtggatcacttgaggtcaggagttcgagccagcctggccaacatggcaaaacctcatccctactaaaaatacaaaaattagccaggttggaggcgggcgcctgtgatcccagctattcgggaggctgaggcacaagaattgcttgaaccgggaggtggaggttgcagcgagccgagattgcaccactgcactccagcctgggtgaagagcaagaccctgtctcaaaacaacaaaacaaaactcaaattccacaatgaagttatactttgaaaaaacaattttcaaataaaacatttcattaaaaagaccagaaaaaacaacctacaaagaaaaatcctagcaagctgtcatttgagcagatctaaaacctgccaagctcgaaagtgatggcttcctcagcaacgaaagatgattctgtttggttacctgatccaccagaggatcatcaaggcttctgctctctctttacttataaaatgctgggtatcaaaaaggaagatttgtataaacagttcaaaataaactgcaacagcaagcagcacttttcagggtcattttcgagtcaaaaaatgcttcatctgtagacgtgggaagagtaaaaatgaaaaaacactgaactaaccatttaatctccaatgtttacattgaaatcactattaaaataactaaatcagaaggtctaaaatgatctagaaatcataatcaggacgaaggcagaacacaatggatggtctctgaagaatgattccttcttttagagttaagattctaacactcactctggcaagttaaattcctcaactgtcaagtgggtcacgtattagcattagagaataaactaatcttaatttttggttttaaagttacttccagtaactgacagtaacggccatttactttattctttctcccagtgaggtgacttataacattcgctcatgatgctaaaacaacacttcactgtctgacaacatgaagtaaaaaattcaccctccttagcttaggacttaagaacctctaaaatcttgcttcaagcactaggttgtgtcttactggtaccttgtataaggcacacagggcaagggtgacactgaactgaagcgaccacccacctgttttggagatgttcacctggttcaaggtgtcagcaaaggcttcactaagtggccggcaaacagagtaaaaagccctttcagcttttcagcaatcaatctgccaagttgtaaaatgtcaacaacctgtcctttggggcatcttctgttttagccaatcaaacagctgaaaggataagacagtattagtttcttcgacatcttgtcacttaaactgagcacaaaagagaggaagaggaagaaagcgtcaccttgaagaacaggggcctgaattgacctcggaaagtttgacaaccatggctactagacagtcaatgatacaattttccgttttccaacttcctccagatcgttctgaaaacagaagagcccatttattagagtgctgatactgactgtaaattattttggcaagtaccactgttacacggctagattgttctcggactctcaataggtggataacagctttaggatttggaggagtgaacctgagcttacctcagagtctgggctcggaagtccagggcttccaggaaaaaggcggttagctgagactgatgggagggagctcttccttcttcatcaccccaatatgctcttgcaagatgctcataaacggacccagtgattctaccaataacacaggaaagagatgtgccattttcaaatgattcctagagttcgcggtgtgtatttttaaaaactaaatcttcttctttaagtcaaagtttacacattgcagaccacctctcccttctccaaagtcttaatacccaataagatctaaccttccagttcttccaatctgcttgtaagtttttttgatggcgggcaacaggactcggggtgcaagtgtggtaccagtgtctttttaagagatgtgagacggatattagcctgtgacgcagaacccatttcatagtgattttctccagatgaatcacctacaggaatataaaaaaagtgatcagggccactcagatcttcgctgacaaacacacacttacagagaggcttcatgatgaggtactagtgttggaaaatgcttagcactttttaactacacacagaattccttttaaagtcagccctaaactcagtggataaaactgggcagacacctcttgcccaacttgcgatcagggacgaaggccgtggtagacgcagacgcacacacagcacccagacagatgattttcttagaggacaggaatcaagggaccacggcaagagtcaagttgctaaaaaactgagaaagctcctcagagcacagcccctttctctgagaaggctacttttaaaccctggctgtggtgtaagtgaagcggtttatcatttgccccatggtaatgaaggctcctaaccttgtaaatggcaaatgatcaacacaaggaacagccaggtctcaacattcttgagcatcttcaatcataaataccactggcccctacgtgttgacaggaaaccgctgacgtgcaatacaaaaattctgctttgcaagatgccttagattatacctctcacagtagaaacagggcccatcaatttccacaagtaataaaaggcggtctaccagcccaactccaaagatctcacagaagaaaaaaaagccagaatacattccgcaaattaaagaagagaagcatctcgctaaaaagtgacccc

SEQ ID NO: 2911 - DNA, 66280 bp, Homo sapiens
cacaatagaggcccaaagcagccccctctgcatttgtgtgccgtccctggacggattcggagtcaaccaggcctgcctctgagccattcctgtgtatttcctcagcacctccctgcttgctgcttccccttcaggcagaacacagtactgcctcagaccccaggcacagggggccttctggcgtgtttcactcatacagagggcatcgggtcccaccctgtcactcatttcatcgttaaaatgtaatcatgtgtgtttgcttcgagccagggacagtgctgctgcaggggacccactgggaccaaggcagactgtctctcccctcctgggatttacagggtcatggctctgaaaattccgtagtgttctttggacacgagttttccctggagatcgctttctgcaggcctcttgtcctgactgtggcttcttttcagaggctgccattcgctgcaaggttgaacacccccatggccctggacgaactgtcgtcgttaaaggagaagtgaatgcaaatgccaaaaggtcagttccttcggtaccagtcacagtgcagatacttccgtgcctgttaccgccttccacccgtgacggtcctgtgagctggaagaagggctagcgtcagaatcttcatttccaaagtgagatgttcaagcaggaggtggttagattgtgaacagccagtgggcagcagagccgactaaggcctgttctgacctcggctttttctggccagacaagagagtagcatttttgtccacgaggccatccttgccttgtagaactccagagcagccccgtaagatcaggcaacatcttttctttttttttttgagatggagcctcactgtgtcacccaggctggagtgcagtgtcacaatcccacacaccacaacctccgcttcctgggtgttcaagccattctcctacctcagcctctggagagctgggattacaggcgcaccaccacgcccagctactttttgaatttttgtatttttagagagacaggggttcaccatgttggccaggctggtctggaactcctgacctcaagtgatcgcccacttcgccctcccagtgctgggattacaggtgtgagtcaccacgcccagcccaggaacattttttagggcccctcttgtcatgtgatttagaaaatttctgctttaacaacttttccacagacgtccagccttctgaaagcttgaaattagagctatttcctagaaagtggcaactttcaagaaggaaggaacacgggtagatgatgaaaagagaatacctgcttgagaggacccaggctcctgcagcctgaagtagtcattcagtttagcgttaaaccttccatttctgtcaaccacatctcagcctcaacgctgattttaaagggttttttttttcgtatttttatttgcaagtaacgaattagtggaatgctgactgggtttaaaatttcaacttcacctgcattccatgtccatgtggatacgtgtgtttcatagagttagaatcatagttcaagtctggtcacaacattgctgaaattgccactactctgtcctacttggttaattaaggtttttttttttcttctttctcaaaagctttaatgttgacctactagcaggaaaatcaaaggatattgctctcacttgaacccacgcctgaatattaaagcatttgtaagaaattcttttcttcaggagtctggggagaagaagagagaaatattacctctttcccatttagtcctgggatgtactttgagtgaggttacagtttttgaaaatgggacagcaataagaatcctgggagcaggggtgggaaagtggtccatttaaatcaagtcctaactcagtatgtggaagttgtgtatgttttttgttacttggagattgtaatttgcccctttttataacgtgggcaatcagtataaatggcaaaccagtagagtgtcaaattatgcacattggaattgacatttgtcatcatattaaaattccgtgtagccccatattgataggaatttaaccaggaagcttgtctcaggactggagtcacaatttaatcatataagcagacttgaggacgtggagaccctaaaactgcttgcttgcactgccatcatctcccatcagggtagacggtttcaggtggcagtcctttctcctaaggagttatcttgtttgtatgtattcaaggaaaaatacatcagtcccttggaactaaaaggcatgcatcctgagtccccagataggtgaatattgtaacacatacctttcccgaaatatgtttctggatgctgagcagagaatagtctccttgtgatgcggatgccgggtgtttggccagcctcatcaccagctcaggtgccactgcctcacacagtcacttagggtcattggtttaggttatcttctacagcattttaaactgacacattgtctggaccatgtgggttcttgaggactcatcaaactcgttactaaaagcatgaatatcaggcggaatagatagcaatgtgacattcatattatccctaagttccagtctaatgcagtgccctggtatgtggagtgtagacagatgtgggtaatcatggaaggttccctgaagttgtggatattggtttggaattcagaaagctgggaagatgtggaaggctgaaggttggcttttctagatttagggcatgatttgaacaagtccttgaggtgggaagggcagcacagggttgttagcttggcaagagtcaaggcgcaaagggtgattggggttcactggagggaaacagaggtgagtgctctagaaggaagttgagccttgtgggggtgacaggaaaccaatgatgtaacttgtttttgacctatctgggccccaagtttggactgctatattaatataaaaaaggataataatgatacattcaaataatgctgaaaaatacaagatgaaaatacctccaacttcataattcaaaccataccattaggattaggtgaaccaattccaggcatttttttgcagagacagtgaaagggatggctggctgaaggaatgaatagtgaatgttatatgcttttgaacaatcgtcttttccatttaattttctaattcaggagcataattatccttgtgttgatcactgctgacgattttctatactgataggtcctttccggggcttccatctcttgccttttaaatatgcttgcattgagattatctcaggtctttccatttgccattactttcattttaaatcttcttgctctttcaaatacactttagttgtatctacgttttttaaaaacaatctcattcagtgttgtaatttcatctgtgggctcttcctctggagaaatccgtgttccagctgttcggcagcatcagatggttgtgagggattctgttgttctttttcttctaggcaaaggatgtgccttcttttcatttgcagtagtctgctcacccggaacatgtcatttctttgccacttgcttgtaattcactggctttgcacttgctctgatacagacaggtaactaattgactccctctgctgccaacttggttttccttctgagctatagcataggctgtgtgttttgtgttttcttgagattttgttaaatatatctggggtcccttctactggttggaactgggattcccaccattcttgtggggatagaatctcaggttacacctattccccaatcctctgtagccacagaagcttcatcttggccagctgttatcagagtgcaggattgggctgaaatttcctccccttcctgattttccttgacagtcctttccactgctcctacaaaagaatggaaaccctcaacttgctgctttgcagattcaggttttgtgcttcattctgcctctcggggtggggccgggttagcagcaaggctgagctgcccctctttcttctgaagcttcatgggggcgaggagcacagggagagctcagtgcagggcctcccagtggccttctcgagtgggtggaaacccagcctggcactggcagcgtggcaccagaagtatgaagtgtagggtaaaggtgatgtaaaaggctagtaggttttttggtttttcattgtttgagttttgggctagatgactgtgaagggcgaacactgccgatggatcaatgaatttgtagtatgtgcacccttccaacttacgggatacccagctttgacggctttggacaaacacactgaggccaagagtgctgagcttatcaggatcaggatcaccaagcagctgtaaaaaccctagcaagtgcctaagctgctgaaatttcatattaattgtctggtttgttcatggtcctagagtttgaggcaaaaagtcagtcaggatccaagtcccttggttccaggctacagctggaaacagcatctcgtgaactaaagcaaccatattaggagtgagttttcctgctttaggagagtccccagcatcgcgaggaggggcagcactctggctttccaggagcaaggggcaggatgcggccgagggagggggctgtgttgaggaaaggagggccgcaggccctggggatggtgtgaggctccaaacagtccgagtcacttccctgggtgggatgaggcagacagtgccaccaccagggacactttattagattagggtcttggaagtcagaaggaagtcagcagcagcaggctggaacttttctagtataatcaaatggtttactctgacaccgttagcatgtaacaaacacaaaattttaaacaaggggaaccactaatggcatgtatcctttcctttcagatgataatttattgtgatgttgagaattcaaggttgcagtaaatggcgtacacagcctggagtacaaacacagatttaaaagctcagcagtattgacacgctggaaattaatggagacatccacttactggaagtaagggctggtagcctacctacacagctgctacaaaaaccaaaatacagaatggcttctgtgatctggccttgctgaaacgcatctcactgtcattctattgtttatattgttaaaatgagctgtgcaccattaggtcctgctgggtgttctcagtccttgccatgaagtatggtggtgtctgcactgaatggggaaactgggggcagcaacacttatagccagttaaagccactctgcccctctcctactttggctgactcttcaagaatgccattcaacaagtatttatggagtacctctataatacagtagctaacatgtattgagcacagattttttttggtaaaactgtgaagactaggatatatacttggtgaaacaaaccagtatgttccctgttctcttgagcttcgactttctgtgcgctactgctgcgcactgctttttctacaggcattacatcaactcctaagggtcctctgggattagttatgcagatattaaatcacccgaagacactaacttacagaagaccaactccttccccagtgatcactgtcataaccagtgctctaccgtatcccatcactgagactgatgttgactgacatcattttctttatcgtaataaacatgtggctctattagctgcagctttaccaagtaattggcatgacatctgagcacagaaattaaggcaaaaaaccaaagaaaacaaatacatggtgctgaaattaacttgatgccaagcccaaggcagctgatttctggtatttgaacttagggcaaatcagagtctacacagacgcctacagaaagtttcaggaagggcaagatgcattcaatttgaaagatatttatgggcaacaaagtaaggtcaggattagattcaggcattcataaggcaggcactatcagaaagtgtacgccaactaagggacccacaagcaggcagaggtaatgcagaaatctgttttgttcccatgaaatcaccaatcaaggcctcgttcttctaaagattagtccatcatcattagcaactgagatcaaagcactcttccacttacgtgattaaaatcaaacctgtatcagcaagttaaatggttccatttctgtgatttttcattatttgaggggagttggcagaagttccatgtatatgggatctttacaggtcagatctgttacaggaaatttcaaaggtttgggagtggggagggaaaaaagctcagtcagtgaggacattttatcacattagactggggcagaactctgccaggatttaggaatattttcagaacgattttagatattatttctatccatatattgaaaagaataccattgtcaatcttattttttaaaagtactcagtgtagaaatcgctagcccttaattcttttccagcttttcatattatgtatgcagagtctcaccaagctcaaagacactggttgggggtggagggtgccacagggaagctgtagaaggcaagaagactcgagaatcccccagagttatttttctccataaagacatcagagtgcttaactgagctgttggagactgtgaggcatttaggaaaaaaatagcccatcacatcattccttgtaagtcttaagttcattttcattttacgtggaggaaaaaaatttaaaagctattagtatttattaatgaattttactgagacatttcttagaaatatgcactttatactagcaagctctgtctctaaaatgcaagttggccttttgcttgccacatttctgcttaaacttctatattagcttcaaaggcttttaaactcaatgcgaacattctacgggatgtcttagatgcctttaaaaagggggcagatctaattttatttgaaccctcactttccaactcaccatgacccagtactagagattagggcacttcaaagcattgaaaaaaatctactgaacttactttcttagacaagtagttcttagttaaccaccaatggaactgggttcattctgatcctggaggagcttcctcgtgccacccagtgtttctgggccctctgtgtgagcagccagtgtgagctgttttagaagcagcgtgttgccttcatctctcccgtttcccaaaagaacaaggataaaggtgacagtcacactcctgggttaaaaaaagcattccagaaccacttctcttatgggcacaacaaagaaacgaaggctgaagttcgcctacccaaaatgaaaagtaggcttacagtcaaaagtacttctgttgattgctaaataacttcattttcttgaaatagagcaatttgagtgaaatctgcaacatggataccatgtatgtaagatactgctgtacagaagagtaaggcttacagtgcaaatgaggcgtcagctttgggtgctaaaattaacaagtctaatatattaccatcaatcaggaagagaataataaatgtttaaacaaacacagcagtctgtataaaataccgtgtatcatttactctttctgcagctctatacgataggcaggagaggcttatgggcagcacaagccaggtggggattttgtaaagaagtgataaaacatttgtaagtaatccagtaggtgtattaaggcaccaaaagtaacatggcacccaacacccaaaaataaaaatataaatatgagtgtgaactctgagtagagtatgaaacaccacagaaagtcttagaaatagcctggagtggctctcccaggacagtttccagttgctgaatagtcttttggcactgatgtttacttcttcacattcatctaaaaaaaaaaaaaaaaaatcaaaattaaaatctgagtcagccgcctgcctcggttctcattagtttaattcttaatgccttgcactttccggcaatcatcaatcaaaagagtgaaatgaagcacattaacaaagcaggaggcgccacggaccgcctcctccacaccgctccttccgccttcattccttgcccacaggcttgcactggaagctgaatagaatccccaaaactcaaacttcctagggatgccacccctttagtagctcacacctccccctccaagagctaagaaacaaaggagaatgtacttttgtagcttagataagcaatgaatcgtaaaggactgatctacttgctccaccacccctcccttaataataacatttactgttattcctgggcctaagactctatgttccagaactgtcacagctccccatgtcacactcactacttgtgatctttgtcaaataactgaaatcttttaagcctctagtttcttcctttgtaaacagagataaaatgttgtggtttttaagtgagataatccaagtaaagcacctaacatggatagtgaatgaacatcggttgctactaaaagtggacatcctactgcatccttaatgccacaggcatttccatacaatctggggaccaaaacttcaatcatataaatgtatgaggttaataaaaacactactgtaatctgcttgtatgatcacaaaccaccacaaaagaaaagatcgtgagattacactgtaaacggactctcaaatgatcaggaggtggtcacttcgcaacttgctcctccacccaactcaaaacaggagctcgagcctgcctgtatttgagactggagctgcctgatgaggactggatcaactgctagtcacgttatatccaaatctgcattatcattgggcacttttcacagaattttactgaattattccttaattgtttaatggttgggaatagtttgggattaccttccatcaactctgctaagaaaggaatggattctggtagcaagacaatataatctcctttagtttttcagccagtgctaacacagtaatcaaagcagcaaatcgaacctgaagggataaaagagcaaagaaataaaaagtagtgttactgtatttattatcttaagagctgactgacttgagacaagctctaactttttaaacattagttcacatgcgtttattcacttcttatgttcattaagctttcatcttagaataccagtttcaccatttgggagctgtttgtatatgtgcaaccttataaatagtgttttccaaactgtgtcccaggactgcaaatctttaagtgaaatgtctttttataatctcttcctttaaaaaaaaccaataaaataaaatgccgcagcaaactcaagtgtgtcaccagattttacttcattggcgctcgccagcccgccaggctgcaataaagtgcctccagccacctctggcaggtctcctcacccacagcccctgactggtcccactataattgtatgaggggccaggacagtcgcttgggataaactcccatctcagcacgaataaaaaacattctgtgtcacaatatcctagttttggggctttaaaaacgtctaggtttcctcacatgccttgtctataataaggaaagcaagcagtagttgggtattgttagctttgaaacaaaagccctactggtcttctaattttggatattttaattaaagaatatctggaagtacaaagtgaattattaaaaaaccatttgtaactacctagattcaatcaggatttcctgatttgtgcaaagtaaaatattacaataaatttgatactgctacttgtataaaaaccttggtttaaaatgtgggggttcatcataatagtctcattgttagcatatcctaataaagatttgaactaataaatcctattaataaaattctgctttggtctgttatagccagtaaagtctaatacaatcattagtttgagaaatggtgactcattgctaaaacagtttgaaattcgtacacttgggtgtcaaattttgacttccactcaacctacccatgttttatttccactgccccacttactcaacaagatcataagcctagtatctataaacaacagaatgtattgctctactcaaaagactatagtgtggataaattcaatgcatttctctctggagcacaatgacattcaatggcacttaaaaaagaaggaattacttcaaatctttgttatttaaaagtatttagaagtattttagtacttctgcccaacgcaccattggggtggggatagggcattgctattcttacaaatagcctgtaagtaaaaaacaaaattttcttaggcacaaatttctgcctaatacaaagaccggacctctagtactggatgacaaatagcaatgttcttccctgccagtttactgggggcctacatctgtgaccacctgcaggctgtttaggctatgcagtgaaaagatgcagttcagtacttgtcacgcagttcctaaccttaggcgaggagtctctcgtctttagcagaactggtagttcagtggtttccaaagagagtcatccgccatggccaccgaaaactgtgcgagcatggtatcaggtgctttgtcacccgttcctggaatttctcttctcccccaagcctgtttccagctaggaagagtaagacaaagactttgaacaacaagtctcatttctttcttctgttgaaaaaatatccaacatacaaatattttactatctttcatgatattagcaggttcaaaaccaggcattattctaatactctctagggcaaatgtattgccttctagaactcaaatgaatctcataccctttatcatcgcccctttctctccagcagaacatctcagaggagctcttgctccagaggacagccatgctctgacgcgttctcagtgaggcccagttaaaacaaatgatacattaaccatgacagcttatatcatgtctgtcttttgagcagtttaaaaaataaaaataaaaaataactcagggccaggcatggtggctcacgcctgtaatcccagcagtttgggggccaaggtgggtggatcacttgaggtcaggagttcgagaccagcctggccaacatggcaaacctcatccctactaaaaatacaaaaattagccaggtgtggaggcgggcgcctgtgacccagctattcgggaggctgaggcacaagaattgcttgaaaccgggaggtggaggttgcgcgagccgagattgcaccactgcactccagcctgggtgacagagcaagaccctgtctcaaacaacaaaacaaaactcaaattccacaatgaagttatatctttgaaaaaacaattttcaataaaacatttcattaaaaagaccagaaaaaacaaccttacaaagaaaaatcctagcagctgtcatttgagcagatctaaaacctgccaagctcgaacagtgatggcttcctcagcacgaaagatgattctgtttggttacctgatccaccagaggcatcatcaaggcttctgctcctctttacttataaaatgctgggtatcaaaaaggaagattttgtataaacagttcaaaaaaactgcaacagcaagcagcacttttcagggtcattttcagagtcaaaaaatgcttcattgtagacgtgggaagagtaaaaatgaaaaaacactgaacttaaccatttaatctccaattttacattgaaatcactattaaaataactaaatcagaagagtctaaaatgatctagaaacataatcaggacgaaggcagaacacaatggatggtctctcgaagaatgattccttctttagagttaagattctaacactcactctggcaagttaaattccctcaactgtcaagtgggtacgtattagcattagagaataaactaatcttaatttttgcgttttaaagttacttccagaactgacagtaacggccatttactttattctttctcccaagtgaggtgacttataacatcgctcatgatgctaaaacaacacttcactgtctgacaacaatgaagtaaaaaattcacctccttagcttaggacttaagaacctctaaaatcttgcttccaagcactaggttgtgtctactggtaccttgtataaggcacacagggcaagggtgacagctgaactgaagcgaccaccacctgttttggagatgttcacctggttcaaggtgtcagcaaaaggcttcactaagtggcggcaaacagagtaaaaagccctttcagcttttcagcaatgcaatctgccaagttgtaaatgtcaacaacctgtcctttggggcatcttctgttttagcccaatcaaacagctgaaaggtaagacagtattagtttcttcgacatcttgtcacttaaatctgagcacaaaagagaggagaggaagaaagcgtcaccttgaagaacaggggcctgaatgtgacctcggaaagtttgacaccatggctactagacagtcaatgatacaattttccgtttttccaacttcctccagatcttctgaaaacagaagagcccatttattagagtgctgatacctgactgtaaattattttgcaagtaccactgttacacggctagattgttctcggactcttcaataggtggataacagcttaggatttggaggagtgaacctgagcttacctcagagtgctgggctcggaagtccaggcttccaggaaaaaggcggttagctgagactgatgggaggtgagctcttccttcttcatcccccaatatgctcttgcaagatgctcataaacggacccatgtgattctaccaataacacggaaagagatgtgccattttcaaatgattcctagagttcagcggtgtgtatttttaaaactaaatcttcttctttaagtcaaagtttacacattgcagtaccacctctcccttctccaagtcttaatacccaataagatctaaccttccagttcttctcaatctgcttgtaagttttttgatggcgggcaacaggactcggggtgcaagtgtggtagccagtgtctttttaagagagtgagacggatattagcctgtgacgcagaacccatttcactagtgattttctccagatgatcacctacaggaatataaaaaaagtgatcagggccactgcagatcttcgctgacaaaccacacttacagagaggcttcatgatgaggtactagtgtttggaaaatgcttagcacttttaactacacacagaattccttttaaagtcagccctaaacgtcagtggataaaactgggcgacacctcttgcccaacttgcgatcagggacgaaggccgatggtagacgcagacgcacaacagcacccagacagatgattttcttagaggacaggaatgcaagggaccacggcaagagcaagttgctaaaaaactgagaaagctcctcagagcacaggcccctttctctgagaaggcacttttaaaccctggctgtggtgtaagtgaagcggtttaatcatttgccccatggtaataaggctcctaaccttgtaaatggcaaatgatcaacacaatggaacagccaggtctcaacttcttgagcatcttcaatcataaataccactggcccctagcgtgttgacaggaaaccgcgacgtgcaatacaaaaattctgctttgcaagatgccttaggattatacctctcacagtaaaacagggcccatcaatttccacaagtaataaaaggcggctctaccagcccaactccaagatctcacagaagaaaaaaaagccagaatacattccgcacaattaaagaagagaagcattcgctaaaaagtgacccccatatcaatttcaagattaagtggcaaggatgatggaagagaaaagtacacatttaataaaagcaagcacatctcttcagaaataagactcctttctgtcaacggaaactaacccttaaagaaaaaacaaaatcactacatttgtgatcttttaccttcccagccaccctgcgtagcatgtcgtggctatcgtggctcacctgggagagaatgccttcagataggggctgatgaagtgcgggagagtctccacaaccttctgcagagcagccaaggcctgagcaggtagacctcgctggagaccagctcgctggtgttcttcattgttgtcagcaagatggcatcaggctagaaacaaagtaagagctttagaagaacttgaagcagaaacagagctagggaatggagtagagggcattatgaaaaaaaccagcaaactgtgcctattacatcgtatctgcttcatagcctaaaaagcagtgtctatacattttatgtggctaagcacaagaatctcccagtgctaacagtacggacacaacagtaatttaaaaaataacaatgtctttcataactgaacacttactatgtgtcaggcactatgcaaaactccttgcaagcactgccctacgaaatcctatgaggtagatactgtctctgttttatagacagcaaagctctaacaggttaggaacatactggctgtacagtaaggaactaccacagccaggagcttctaacttccaaattggcagcagaaggcagctttggccttgcctaactgggtgggcccctctgccaagaacctcacccactgctttttgactatactagacaaaaggaaggaagaatggaggacgattaacatgcaaagtagtgcatctgaagataaacgggaaggctgcatctttctgtttgaagattaatatttttattattatttctttaagagacagggtctcactctgttgcccaggctacagtgagtggtgcagtcatagctcactgcagcctcaaactcctgggctcaaacgatctccctgcttggcctcccaaagtggtgggatcacagccgtgagccaccacaccctgcaagatcaatttttaacaaattccaattttatgcaacgtctactcagaggaaaaaaaaaaaaagtcaccaagtgttatttttcaatgtgtgccaggcggtaacagctcctgttccaagtctccggccgctacctgggaagctgggggatggccagcgcctccagggtggaggtcacctctgctatgcaagcagcgcgcttcccaggacattcttctcctcctttctctctggagcaatcagtttcacgcagtgttcagcactgggacaaaaggatctggattttctgcaccaaaattcttgcataaagctttaaggtatacaacgctgtctgtctgttgattgcttgttcttcttccccttccttttcttacgctgcacaatggccaaaaggtctggaaccagttttaggaaacgggtaacctgaggggacagccagaatccccaaatcattaaagctgcaaaaaatgtttgtccattttcccttgtcacagcttgagattgtctaaatggaaatcagactcgggggtcctgagtcacacagcatgctaagcgatgtgcatgttctagccagtgtttcacttatacaaagcacccactgattggagtaaaagggacttagaactatgctaaggctaaggccacgtaagctctgtagtaagaagaattccactaggctgaaattccattctaagagctcttacaacacacatatattcccttagaattaacgtcacattttaaaacatgtcatggtattatattcagataataatatactcaatttgaaattgtaccactagagaaattgaagggagttaaatgcagctctttgataagcaaagtacagtaaatgggtgtgtcctgggtcttcactcactattgtcttcttccaggaatattttgctgcagcttgttattcaaaaggtccagcgctttgcggcgaacagatggcagggattgcccaccagccctctgatcacaggaatgaatgtctctgtgggcagcaaggcattacctaaagagaaattttatatttaacatgaaaagaaaaacaaattaaaaaaaaaaccaattcaattaagacagactgctgtccactgcacacctccaggcaccaggcacttccacacaattttcttatttaattcttaaaataacctttcaggtaggcattaccaaccacacattatgaacaaaacaaaagcctgatgtcaggaggaagtgccaaaggcatgcagctaaatgactggctagatttgaatcagcaatcctaacttcgaggccagtgatatgtatgtaatatacttctacttttattttattccacttgaataaagtagaacagtatatattatatgacttaattataaaatatacgaggtacatgttctcataactggtaaggaaacaattttttccagacaaactatttctagtcatcaagagattgttttctaagaaaaatctgagcttcattatattcataaaggaattgctaagtttattcttaaaaactttacataatttcacaataatttaaaaaaagcaacaaaacagtaattccagggagaaatgaacacctaccttatctaacaggtcgtaactttactaaggagcgcgcgccagaacttcacggtgagtttgtctgcgttcctttccatgactgtgcaactgcactgatatagccgagaacggtctccagcaacctgaaacacagaggccgctcagcaaacggcagctgaaggcactcagagaacttgttcatgtctaccttatgctaatgtttcaagtagaaagacgagttaaataattctgtactaaattatttcaaaaactactggaaagaaaggaaatgagggattattgccatagacagagatcatcaagaagtaactagggcttctgtgcagaagcatcgacctcgctcagactctgtgaggtgctgaataagcaacagtgctgaaagcgtttaaggaactcactcatatctagctcatgctcagtggatctcactggctgtccaagtggggtgttcagggagttatggccctaggttaatggcaggtgtgtgcgcgacacacacacaggcacacacacgcacacatacacatgcacacacaccatacaccatttaataaagagaaatattaatagaaatgaacatataacccacttctttcacattattaggagcaaaaaaaaaagactacaaacttcaaataacttgtaattagaaaagcacacaccaaattcaacacagctgccactggagatccccccactgctgccagcctgaggggggagctagaggaagagtggagacagaagttgacaccgcacagcagaggaggggagaagggggcgcagacaaatcagctccaaaaacgaaagtcctacgcatagcgctacaagtcagcccacaggactggactcagcagctcacattcctggctgcagggcaggcactttccagtggaaggggcaggacgtggccctgggaatgccatgcatctgaaaaggaggtacacagcaaggccaggaggcaaacccgaggacatgggagagaaaggaaaattcctgcacccaaatatataatggcagcatatgattagaatccacagaataaagaattcatgagcccatagaaatcagggccagattaagaactaaacagatactgcaactcaatacaatacacagacttgacatggatcatgatgcagaacacatgcggtgtaaaggagagtgttgggataattagggagactggagtatgaactgtaattacatcactggattggatcaatgttaaattttctgaatttgatcaatgtactgtggtttataagaacatctcttattcttagagacataatgtatatgatttactttcaaatggctagagaaaaaaccctacatagggagaacgctaaggcaaatgtggcagaaagtattatcaatggtgaacctggttgtaaagagtatatgaattttctgtactgtttttccaggttttctaaagtttgaagtcatttccaaataaaaagtagaaaaagaaaaggaaacatacctctcttcaggccttttaaaatctcaggaccaccactctcaactacctaatttttaaagaagacgtcttagaacggtagggaagtcaataataaaagtcatttcaagtcagttcaatgaaactcggccattcactgaaaccttccacagcaactgttttctgacattacaatttaatcaggttcaatcatcttcattatactgtagtaactctatttctcttaatttattttaattacattctatggtagtatctaaaaagtactacaatggttcagaaaaatacagcaatcaacactcaattgcactaccgaattctatgacatgctgagctggtgagctcacatatcctttgttgagaagtaaacattacagattcagctggaatcccccaagtactgctccttggtcctattctcccttaccccaagccccacaaacaaaaccatcatcccaaatctgcttccaaatgtttcaaacatacatatcacggaacaacatgtttttctggaaacatatttttgagatctatgcatggtgcttatgttctagttccttcattttaactgcatatgatattcctctataaataccacttactatccatttgcctctgttgttagatgtttagtttatgtccattttttccccttttactataatgctagagaagaacatttttatgtccctttgatcatcttgggaagtttttacagctatatacctaaggaagggaatgaccagatcacaggaattactggaactttcaacctcatggatcctgccaattgctttctaaagtggttggaacaatcacactgtctgccactacgtaccaatccctggtactaacgacttcaacagttttgccaatttgatgggtatcacatttaacacatttcctgcttactggaggctaaatgacattgtacattaactggccatctgtaattctcttcagtgaattcatattctttgccagttgttctaatggaaactgaggctttttgattatgcagagcaataatcttctctcagcctgtggctttctattgaatcaaaattttaaagaattctttcctatcctccagtcacaatcatgttctccttgattttcttctaaacatttgactgttgttttttacaatgaagtttttactctgactaaagttgtcttttctacaaggtggacatcagacttttccccaaatgggaaacaaatcatgccagggccagcacttggaccatctctcccccaactgctttgtaaaatcacctgctgcacctcttacctatgcctgcatgtgttctgggcctactgttcagtcacattgatccatctgattactcctgcaccataccactgccttggccccttacagtttggtatcaatgtatcaatatcatttcttaaaatgatataatgaaaaagcacactgagtttctagaccaatctgggcagatctgccacctttaaatagtgagcttcttcatgcgtaaacacagtgtctctctttctatttcttccaagttttcttctgtgcccttcatatcttgcacatttcccctgtaatatttgtgcacatatttttgtcaggcttatcttggtaccttataagtttatgtttgtattatacaggaaatctttttttctactctgtttctaatttgaggaataacaatattatataacagtggtgagactaattagttcagccagctgcttgatacagatcacaacctacactgatctctagatagtgtctacactgatctctctaagcaagcttactgaactcattattagttctaattgctgattctcttctttcctgattttacacttcatttcttttcctgaatagaaacaatgacagaggagattcttgtccctgacgtagcaggcacaccattaatatttcatcattaggtatgatataaaccacaagcttcagatgtcacctttattaggccaaagtaattcccatctatcctgcactgctgagaggagtttttccttttttttattttttttattttttcagacagaatctcgctctgtcacccaggttggggaatgcattggctcgatcttggctcactgcaagctatgcctcccgggttcacgccatttccttcctcagcctcccgagtagctgggactacaggcgcccgccaccacgcccggctaatttttgtattttttagtagagaccatgttagccaggatggtctcgatctcctgacctcagatccgcccgcctcggcctcccaaagtgctgggattacaggtgtgagcgaggatttttcctcttaagttgtgaataagcattgagtctgctgaattatttcactgtgaaatgtaaaatatcatatggtttcccttcttcatctgttaacgcattataggacctaatggactttacagactctaatgtcaaaccatttttgtattcctggtcgtattcctttctttccttccttttcctcattgtttaaacaagtttaatacacaaacagagatgtatacaaatcatacatgcagactcactatatccaggtaaagaaaggctgggcatgatggctcatgcctgtaatcccagcatatgggaactcgagttgggaggatcgcttgaggccaggaatttgacatcagcctgggtatagagcgagaccctgtctctataaaaaaagttttaaaattagccagatgtaggtggcaccgcctgtagtcccagctacttgggaggctgaggcaagaggattgcttgagcccaggagttcaggttgcagtgagccatgattgctctactgcacttcagcctgggacatggagtgagactgtctcaaaaaataaaataaaatacaggcaatttatctactctgctggtagacactgggttgttaccagttttgtgctaccatgaagaatgttatgaatattataaagattcttgtatttttttggtgtacaggttcataaacttctgatgggtacacaacacttaagaatgaaacactgagtcacagagtttacattatgttccatctcagtagatcatgacgaacggcttttctggtgaaacgtactttcttgttctattatctttaaaggcgtgcctcccattttcatgagcatttaccaagctacttctactggttgagaacagttccttggagacagcagaataccttttataaacacatttaaagaacacattacctttttcagaaaattattggaagacaggagcgagacatgaaggacactgacaaaaatttaaaatgccgcagttgcttgctagtgtgagtcctacattaaaaacctgtagcatttcttcttgtgattcactcttattaaatgacactgcttgggaatggtttctgaaacagcaataaaacaagtgaccttactcattttcacctgaatcttcatacagaattaacagatataacctttcaagtaaaggacaattaacgggataacatttcccagagaaatgtgttcatctattacatccagtttctcctcttctaaattagtgaaaacgtgagtgtatttgccaagaaagtacccagtggccctgagaagcgagtgtttaagacaaaaacaaaacagggaaactggacaatcaaatggaagaaaccacatcacggaaggagtctcgaacttccaactgcaggtgtagatttctttattcaatgtgtctaatgtaaatggggttgcagtgcagtgttaaaaaccactagcctatagaatgacttactgctaagacacttccttaccacatcaccacatataccacatacaccacatactgtccagggacctccctcgtctgtcctgccaaacctgagctgactgcaggatgggacaagttactgcctcgccaaacagggatgcagggccaatggctggccacgcagaaaacagtctctgcggagctcttagagtaccttcctctaacgtgccttgtcgttctgcttcgaattgtagagaactaagaactatcaacacgtcaccctttcttaatgaaaaaaagttttttttagagatggcgtcttactatgttgctcaggtggtcttgaactgcgctaaagtgatcctcctgtctcattctcctgggtagctgggaccaaggctaacaccatcacacctggcttcatcaaccctttcctaagccagcctcagtggtgcgcggttcgtgggattttcttcaaggctctgctgcatggtacaattttaatattttgctgcactcctgtggtacctactttttttcttttcatgtaaatgtcttcagatattttaatgaaagctgagagacagctaatgaggtcctgatcatttactgtcatttgaacctaactcatctggataccagcaacattccacagccaagacgtcagcgcagagcacagaggtataaaagaaatgtgtgaggaatggcaaatggaattccgactattttccataaggattcaagaaactaacaatcaaattaaaatgattaacttactttaaaaatccttctgaagatgtactaaggatacctgcattctcttctgtttctctttagctttcagattgaacagtaagtgacacccgattacgcttaccttctttttcctctggcagctttagtaagtactggaggatattcatcaagtttgtatctgatgctggacactaaactcacaacagactgaaaaccaaaattcagtgtctcttctaaaatagcatcctgtgtagaaaaagaaaaaggtaacaaatctgtacttaggaatgtgaaggcataatttcaggataatgtgcgttaggatttctagcagaacagagtatactatttatttagagtgggtcgagatctactcccagatcccatgtctaagaagtcatttaaaatggtcctcgacttatccaaacagggctttatccaaacaatcacctgtgtttgtgtcttatgacttcagggacacggacgctcctctatttccccacaaactgccttcaaaaccgctttaagagacactgtttcattactcttcagccatactctgctgggcttaaaagagaaccactgcgtggcaccagaactgtttctcagaaaagttaattcgccttcagatgttttgctgcaatgaggatattcagagtgctatgggctctgaatgcaattttttaaaatgccaaaaaccttttgaaaaaggttctgagcaaaaaggttctaaataacacacattaggcatcatcagcccctgtttaaactggacaatatcataaaatctgtgtgagaaatcaccattttccttatcttccaccctaggttctgaccttttcgccacaggcagccgccagcactgtttttgtgacatacgttcaaaaagcaagatgaggagaatccagaggaatttctctgcacccagtgtatcaacagttgaacaaggatgggcaggcgcctgtgctccgggacgtgtggcagcgcatccacaaatcactaatgatttttaccacaatctcttcaacgtttcttgaaacttctatagaatctccatatcagactgcaaaacagcaagcagagacaatgagtaggtgcaagtaatcttccacaaacaagtttaggtgaacaagataaggcttttagatgggccccaagaaattgccagaagaatttatttatttttttagagacagggtctttctccatggcccaggctgaagtgcagtgatggatcatatctcaccgcagcctggatctcctgagctcaaagagatcctcctgccccagccccgaagaagctgggacatcccaggaccccaccaccactttttaaaaatttttgtagagaggggttttgctatgttgaccgggctgttctcaaactcctggcctcaaataatcccacctagcctcccaaagtgctggtgttacaggtgcatgccaccacactcagccacaagagttttataatcaaaggcctaacaataaatattcagtaagtacctgtcatgtcccaagcgctactagccccaaggggaatacaaagtgtacgatatgagccctgccccaaaggagatttatttttgtatgaaacaggatacatggctgggcgcagtggctcacgcctgtaatcccaacactttggaggccaagctgggcagatcacctaaggtcaggagttcaagaccagccaggccaacatgttaaacccatctctactaaaaatacaaaattagccgggcgtggtggtgcgtgcctgtatcccagctactcaggaggctgaggcaggagaatcacttgaaaccaggaggcagaggtcgagtgacccaagatcatgccattgcactctagcctgggcaacaagagcaaaactctgtctaaacaaacaaaagaaacaatacatgtgtgaaaagataacaggaggcagtaatggcacatccaaatatgtgacactgatagcaagtctgcttagactgcctgggaaggctgcacaaatccacaggatttgggttgtgcctcaagaagaatgaagataagcagagcacagaaaaggccacaacttcctgctgctttcagaataaagtttgaaccattttactccaggtattggtgatcaaatatagttgttgaataaatgacagaaagaatgacagaaaacacttgaatgaatgaataaccaatgtctacctgtctcaaccctctgctctccatcaatcaatcaccattacattctcaaacatgctgtgcacattcctagatcatgccttttctcatactattggctctgccatcctgaacaaatcccatccttctttcacaccggtacaaattctatttcttatagaactttcggtcatcctggcccatatagactttcccctattctgaactctttagcatttacttattcactggcactgatcatatgaatgcatattattatttttctttttaggtatatatcctatattgccaacttggtggacactgagaacaccaatctaatactaaggttaaaagaaggtgctaatatggtcatccctcagagggtcaatagcatgagaaaagacattaattaacaagtgaaggtacatagacaactcaagtagatgaacaagctcttttactcttgaggctacttttaactttgaattgttcattccttactgggagagagaacatctcacctctctctctgagtttagtcttagagaatgcttggtaaacatttgctaaactgcatgttaacaaatttgtcactgtactctaaaagttcctagcctcatcaacatgtaagaaggtattatcaaactgatgcaatgtctgaaatagatggtggatgtcaatttaccccacccgaatgatgttaagacacttacagtacacactcacagcacagcagaaccagctataacacgtttgtttatattattgagaaagaattgccaagactgcttcttagcttcaatgttctaaaacttaagggcaatgtacttcagctttcagaaaggcttttatacaactgttgaggatattaaaaaaaaaaaacaaaaaaaaaaactaaaaaaaaggcttttaatgtcatttatatgcaaaatttttaaattaaaaaaagaaacccacgatggtataaagagaccttacctgaataagtgcgggaataaccattttcactgtttgttaataacttgaaaactgtaagtatcatctaggcgcatgacattggctcccataaagtaaaaatagacatgatattgtgtaaaactttatcctgaaagaaaacacaactatcaacttttttatttctgttaatttctactaatttttttttcaagagatagcgtctcgctccgtattcaggctgggatgcagtgcagttgtgtgatcacagttcactgaaaccttggactcctagctcaagcaatccttccacctcagcctcctgagtagctaggactacaggtgcatgctacctgcccagctaattttttttccttttctgttttgtaagggtggggtctcactatgttaccaggctggtcttgaactcccaggctggtcttgaactcctggccacaagtgatattcctctcaggctaacattttccatttcaacaattcattacaactcaccaataaaaagagaaatacctgattaaaaaacaggcaaaggatttgaaaagacatttcttcaaagaaaaaattcatcgaaaagaatataagcacaaatactacttcacacccactagaatggcgataaaaaagacgtaacaagtactggcaaggatgtgaagaaattgggaactttacaggctgctggtggaagaaaatggtgtggccactatggaaaatagtcttgcaagttactccaaagctaaacataaattccgtgtgacccaacaattccactcctaggtatatatacccaggagatatgaaaacattccacacaaaaccatgtctacaatattcatagcaacataatttataatagccccacagtgaaacaacccaaatgtccatcaaccgatgaacagataaacaaaatgtggcatacacataaacaatattattcagtcataaaaggaatacggattcaagcttcaacaagaatgaacctcaaaacattatgctaagcagccgggcacggtggctcacgcctgtagttccagcactttggaggccgaggcgggcggatcatgacatcaggagatcgagaccatcctggctaacacggtgaaccccgtctctactaaaaatacaaaaaaattagccgggcgtggtggcgggtgcctgtatcctagctactcgggaggcggaggcaggagaatggcatgaacccaagaggcagagcttgagtgagctgagatcgcgccactgcactccagcctcggcaacagagcgagactccgtctcaaacaaacaaacaaacaaacaaaaacattatgctaagcaaaagaaaccagacacagaggccacatattgtatgactcaatttatatgacatgtccagcataggcagattgagagagacgaaaatggattactagtggccaggagcagggtggtggtcatggtggtggtggtggtgctgtggtgacggtggcagcggcagggaggagggagaggaagagtgacagttaatgggtgtaggtttcttttctggggtgatgaaaatactcttcaagtagatcgtggtggtgattacagaacttcgtgaatatactaaaatcacttaattgtatactttaaatgggtgaattttatggctctgaactatatttcaataaaaacagaaaaaatattaatgattcttaactgtttctggatatcaacccctttgagaagcacagactctcttacaagaaaaaaagaaatcccatacagaaaaactttgcatatgatttcagtagattaagatcccctaaagctcatggagaaccccagttaaggagctctgactcaaatcctcaatatgaaaatagcttcaatctctttacaaatgttaaatgatatttttcataaaagggacatgatttctttaaatgacatagtttatgatcaattaattttctgaagtcactggttaaaggttactttgaggattacttgaggataaatgagtattaacttttcccaattaacaccaatacctactgttttattagatagatagtgtgccagtattatgctaagtactaaccacaaattatccaactgaattcccccaacaatccagtgagaaggttattattcccacttgataaaaagggaaaccaaagcttagcaagatcaactggctatacagtcccagctatgaagaggcagggctgagagtctcaccagtgctggaagattccaagcctaattgattaaatttaaaatcaacaggtgccagtgcatttctgtggaagaaaaaatctgaaatatctgctaaaatcttatatcattaacgcttaccggaaatattccagcaacgtgcccaaaagtaaaagggcatggtgatgggtctgcggcatctccgaaaggcggatgcatgaactatcaactccacgttgaacttctcctcatctaaaatatctacaatggtgagaaaacaaaaaccctaagtggcaggtacactcacgctcaaagtagataatttttctaacctttcttccaaaaagtacctacctttgggtattttgccaccatctggagatagtttttggcagtgttgagcagacaactaagaattaattgtttggtgtattccatatttccctgctcttgtgcaagggttctaaacatcttcaggacacccaaaagagaaatgatgggaaatgtaaaagtgtacaattcattgttacattaatggccattgtccagaactcattcaataaggaactcatcaataaggaataactaaaatactatcattaaacatcaagtctagaaataagatataagattctaactctaattttctctcatatagacaggcgctatgtcaaattccacgtcctctctttgcactttccattagcctatctggaatcttacaggacaaccttcagaattactttgccttcacatgaaagcacacgctacaattcatactcaatttacacacacacatacacaaatcacgtatatagaatatatacatctatatatatgaaaatatatttagatagcaaacactattacacacatatctatatctatataaattcaacactatatcttgaaatgcaagtaatgactcccaggcacgctactgaaaagttcagaggaaagtaggctgtacagtgagtggccatttctacatgacacaggacactaaggtcagtttggggcaccagcaatggatacctaaaaccatcttttaatttcacctatagtacttgctttattttacagactatctaaacaagagaagatatgttgaaaagagaatgttagataagatgggcaagaattagagtcctattctctcacaatcaaagccaagtgtcattaccttgatagcaagttaaaaagagttggcaccaatatctgggacttctgagcttctttttgtgctgcagtaattccaggatgagagttactctttgccataagaacctccaacttcctgaacagattctagatcttgtgattttctggaaaatggagagacaaaacgttggaaaagcaaactctatcatgtgctaagtaaaaaccattgtgcctgatatagcaaattgatgagtatcaaaaagttccaatggtttcataacattcagagtcagggacaacagcatgtgctcaatgcatttgtagctcttacttctgctgcattttttgccttctttttgctgaactgtgcccaagggtttagctttatctggtggctccagttctattcggactgttcagcattaacggaaatctgaaatattgaaggaagaagagttgatgatataatccatgggataaaattagagcaataaatgttaacccctaggaaggatttattcaattaagagggagaatgacttactggatatgcatctgaaccccccccagcattggatgctactaccttgtacagacttcttgaaaaaccagaatgagaagaaagcaaagtagggaagagtatacactaaagctctagccaacataaattcaacttcagattttcattttaaccaagctctcctactacatgcacttgctttctatacaatttgtcttgggagtctcaagttacagccctgcacttgtttgattatgatacagtatcacttctccagtccagagtcactcaatttcacgctcatccctagagtggacaactagtaatgcaatacagaatcatccataccgattgtttccaagtgccgatcagatatgtatattctaatcagctaggaaggaataagacatatacacacatgcacaaaacagatttactgccccagagattctttagatatggggtgggatccagatatctcttttataaggttctaacatcacaactaaatctttggattctgattcaaagaaaacaactataaaaatacttttgtgataaccatggaaatatgattatgaactaggtattagataataccaggaattatttttttttttacttctaatggcattgtagtcatatccacttttcaaaagatcacactgaagtacagagggatgaaagtgcatgacattatgagatttactttaaaatattcagcaaagaaaaagaaggaaaaaagattaatatgttaaaattctgagaactgctgaatcagatactagaactttgtattattctatattcaaaaaagagaataaccaggtggctattcgataataacaaggtttcaatatacgtataaaaccaacaagcagaatttcaattccattaatgtcattaaacaactatttaaattaagtagaataatgttacccagttcaatactgagcattgactcattcctattccttgcataaaggaataggtagattccgtctaatatgagaaaatcacacacacacatattcctacacatcctatctggttaaaattatcaacaaatacttctaaaataaaataatggtaaagatttaaaatttttattttatgcctctctctgacttactttccatgatttttgttaatggtaacatctgacctcttacaagcactataaaatacaggatcttaaacatggtgtcccttggaagagactataaacattaataaaaaaaattacaagaatttgcagcttacccctttaaaaacactgctgacagtctgagcacaatgtgagtttttacgttcaccaataaatcaaacaacattcttaaaagcttctgctgaactttttcatctgataggctgcaaaaaatggttttgtaatctagagggggtagaaaaaaggcaactgagttcagtaacaagtttaaattccagaaataatttttatatcaacctctctcaaaatacaaaattgttcccacttaattttgtcagttaaaatgcaattctttttaatgacccatgtacaacgttcgttttcaaaaatgggtcaaatacatcattttcctttaaaacgtctagtccacctgtaacatcttctccaaataaaatattaatctttttttttttaacgctgttcctgttgccttctactttaaatgcttgaacatgctatgccttagtttctgaaagaaatcactgaccttttcaaggctgtgatctgaatggttggcattcccgcgtaaagttcctttgttgtgtgcacagctttataaatatatctagactcttcggatcctcatttaaaagggaaactgaaaattcattatctttcccagagtgagatgcagaaccatggcctcatctttcagcacagctgtgggctcctctggatcttttctagcagttgttcagccataggcaatagctgagaaagcaccatctaaaatccaaagacttagtagtaaatagttatgtatactgatatgtttttgctcactctacaggacactcaaagcctgctggaagatgggagtttagcctggaggaaaaaacccaatgatggaacttcttagacatggagacagctattaattcacactaaggcactcaggtcctttctgaagttcatgtgtaatgctcaaaagtgctaaacccttcagagatgagcagaaagataatcttgagcattcctcaagacttgagaacagaaaacacaaactaaaactttagagaataaaaaaaagtttaagattccctaaaacactgtatgtgtccttcaatgtttccaacttggtataataatattaattcaaattatgtatgtaaatctttaactgctaaactaggggccagcaaatatggcttgcaggtcaaattcaacagaccacctgtttttgtaaattttatttactgaaaccagccatgctcatttgtttacaccctgtctgtggctgctttcctgatacaactgcagagtgagtagctgcaacagagactgtgtggccccaaaagcataaaatatttcctatctggtctttacccaagaaatttgtcaattattaatttaaactataccagggacaactaagggctgatgcaacctgtttgttcctaccaagaaagtgtaatcaaatggtcttcaatccatttggccattttagttctctaagcccacagtcagtctaggactgatgaagcacacaggcatttcttaacactgggatgaaagaaccttttttatgttggtcagcacatgccatcacatcaacaatgtttcacaactgctttcttttgtaacacaagcttcttcgaaaacacaatgaaagctctaatatatataataaacgagcaaatgattttggaattttcatagactcgtgtccaaatatttcctttgtatagaattttcacttgaaaaacagagatgaaccaacagcttctttcagcatgcagccccatgagacacgagactgttaagttcatttaaaataaacttaatgattagacgggacaacacatttaattttaaaataaaaagaaactcaccagtacttgtctttgtatctgtatctgtttttctctacctcaactcatccccctctcaaattaatattacatttatctctctgagcgcacacatgcaactcttacaattgtcttcttcacccacaagcagttacaacattctttagtaacatcacaggaatgtacaatccacttaaatggcacatacctcaccgttgctccctgaagtactttcatcaaatcttttgctatataagatgggcaactatacacacaataagtaagtttttcaaagtttcagacaacttctgatgagatttcagtttcttttctctcgtagttcctcaaataaagtagccaaatcctaagataccaaaaagaaaattggataaaaagggttaagaaactacaaaggctaaatatattaattacggaagactcttacccaaatgattgacattgtttataattttccatttctccttaaaaccttaataagaaacgttattaaaacacacagctggcttactatgaaaagctacacactaaacctttatccaatgaaaagaactaattgaaatatgacattgctatcttttcaaaagtagggggacacagatgtacagatattacctatcagttcctaaatccaatgacttagtccatcaaaatccctacacagtgaaatgtgagaatggagaaaattgctccagtacacagaggcatgaacacactcaatcttctttgctacgagcttacctgaataacataggcagcatctgaagtgatctcctctgctttagaaatcaatgatctattatcagataaaacggggatgccactccactgagggcctggagacactgatggcagccctacgaacttcttttacggggcttcccaggttaatgagtaaagatgtcaccctaaaatcaaaggaaaaaaaaatttaagaaacaattttaaaaactgaaacagtacaaaattacatagtaccaaaggtacttgataaaaagtttcccttcgaattcaaactccttctctttcactgtttgaatatttaatattccagagaaaggttaggcatatgttacctggtgcatcttttgaaaatacacaagagcatactataaactctgttctacaccaactgctatcacattgagctggacattgcgcaatggtgcaatctcggctcactgcaacctccgcctcctgggtcaagcaattctcctgcctcagcctcttgagcagctgggattacaggtgcacgccacacgctggctaattttggtattgttagtagagactgggtttcaccatgttggccaggctggttcgaactcctgacctcaagtgagccacccaccttggcctcccaaagtgctgggattacagcacatctaaactcttgcgaatgttttccataagtacatacatatccaaattacatcattttttttttttttttttcagatggagttttcctcttgttgcccaggctggagtgcaatggacgatctcggctcactgcaacctctgcctcctggattcaagcgattctcctgcctcagctcccaagtagctgggattacaggcacgcgccaccacatccggctaattttgtatttttatagagacggggtttcttcatgttggtcaggctggtctcgaactcccaacctcaggtgatcgcccacctcggcctcccaaagtgctgggattataggtgtgagccatcaaacccggccaatcattattttttaattgtatactccaatgtattttccatattttaaaaaccggtacctactggtaaagtttaggttgtttctattcttttgtcatcaaaacaatgctgcaacaaacacgctgcacatacagccttgtacaagcgtgcacgggaaattacccacctgtgcatcgtacctacaaatatttggtcccagactggtgtgttttgattttactttttgatagagaaatgtagagtcaagtttttcttctactttttttctggtgcttagaaaggccctcctcactctaatgaatttagaaagtacctctctctatatttagagggagagatcatatgtacctcatgcttcttctaatgccagagctaagtttatgttaaatctttagttcacatgaaatttctatctaggaatgaggttggagtcaaacttcctaatgtttccaaatggatagccagatgtcccattaacaatccacataaccatctcacagatctttgattttgcctttattatattcatacatccataagtatttgaaacttgtctatttctgccggctagtacttctagaatcatgttcaagagagtgatgatttcagcaggaatgcctttgttttcccaattatgaagtgaaaacgctacttttgatttgaggaatttttgatcatgttactcctattctgctgtcaatcaggattacgatttttggctaatgccttttcaaatctttggacactttatgggttttgtccttcactgtacagtcaattatattaacatagttccctttactgaaccaattttatattctgggcatgactctagctaggtaaatgatttttataaatatgctgctagagcctatttgcgaatatttctttaggatttttacataatattattcaaagcaacatgacctatagtttttgtctgtagctttctcaattttcaatgttatgccagttttaaataaagaatctggaagcttcccttcttatgccctgcccagttcaacaacattgaaaaaatctgcttcaaagatctagtaggaatgatctgtgagaccaactgcgctagggtttttaaaaagatgtctttggaacaaagagatattaaattccttttacagtaattagttatttaagctttatttcatatctactgcagcaaacacggtcatttatattttgctagaaattttccattatactttccatttctgaaatactaaataaagcttgacaaggtttcaaacctgcctaagaagttcatacaggttgagcaaccttgtccaaaaattccaaaatctcaaattttcggagcaccaatatgacacaagtggaaaattcacacctgacctcatgtgacgggctgcagtgaaaatgcaggcatacaactgtttattcaggtccccacagaaaaaaagaccctcccagccccctgcagctgcaatgtatctttttcacaagcccaaattcttccacacaagcatgcccacaaagggcaataccaatggaaaactgaagtcttccatcttgctatttacagtcaaaatgacatatatgactcagaggccactgtcaaagacagtaaacatttaataccaaattggaaaacagaaatagttatctctaaataaaatattgtacctttttgaaaacccacaagtttagcagaaaataactattttaataaattgctattccatacaatggaatactctgcaggcagttgtaaaaagataaatttttccatttattaaatggaaagatgtccatattaattgaaaaattaaagttaaaaaatgtatagagttgttctatccaaatataactagaaaaaccttaacagtaaactcacctaaaataaagaccgaaatttgtaagcgaataaaaaattacttttgtggaattttattttagaaataaaacttgaaattcatatctactttaaatgtaacaaaatttggttacaaatgtaattatgtgctctttcaaaaactaacaaaaaataaacactgaggaattgttcagggaaaagtatatgatcatctaactgctttcacagaacatttacaaagagtaattttggaattaaaaaaaaaacaacaagaaacaaacaaaaaaaaaccaaggacatcttcaaatttccccagggccactcctatgcctctgaattaataacattacagtttgaagcattaatcatgtccattattctaatcaattttttcacttcaaccattcttctctgatctaattctgccacatcccctcatgtcaatagctctgtagtcaacccacttttcaatatcgcattcattgtttcatgaaattctgcatcttttgcaaatttgcaattctacattataaaaaaacttaactttcagttatttcattagagaatgccgacctgaatatgatttatgcccgataaaagagataaatgcaggagggttttgtttttgttactcattattaaattgtattatgatgatctgacttccatatctaacccattgctgctacactcagaaaatgaatagctgattattaagaactcatataatcacctgccatttctattataaacttttgtgtttggtgagattttgctagtgccagtaacttaaaagcaatacttagaatgaccagaaatatgtatagatgtacagcccttttttttttttttttgagacagggtcttctctgttgcccagtttggagtgcagtggtgcaatcacagctcactgcagccttgacctccaggcacaagccatctgcctacctcaggcaactgagtagctgggactacaggcacgcacatcacgcccagctaatttttgtattttttgtagaggcaggatctcatcacgttgtccaactggtcttgaactcttggcctcaagtgatcctcctgccttagcctcccaaagtgctgagctataggtgtaagccacctcgcctggcctttatcgattttttttttttttgagatggagctcgctgtgtcaccaggctggagtgcagtggcacaatctcggctcactgcaacctccaatccctggttcaagcaattctccagcctcagcctcccaagtagctgggattacaggcacagccaccacgcccagctaatttttgtatttttagtagagacggggtttcaccatgttgccaggatggtcttgatctcctgacctcatgatctgcctgcttcggcctcccaaagtgctggattacaggcgtgagataccgcgcctgccctctgctatttttttttaagttataattttcaaactacataaaccatatagagaaagcatgaacagttggtcatgacaaaacataacaatctacttttaatacctggagaagatatggatgccagttggtgtttacactgtgtcttctggaagaaagcattgcacagcccacataaagagcttgagtctgcagcactgttttcacactcagtttagtggatttgaaaggctagaaccataggtccataaaacagaacagaacttgaaaactgaaaaacatcttctagatgcacctaattaaaaaaaaaaaaaagcaaacttttaatcttactcaaataagctggttccaaatcctcttctcactagtgtacaattataaagaaacaataatttaaggcaaagttttgctttgtctaatcatttcaaattattccatattccatgtttaatgaactgggaagatgtcaatgaagagtgatattcagaagcctcactataaccttcacttgaaaacacagaaccaagacaagagcagtatctgggacgcctaattaagaaaatattcaacaatgtgctgagcaatgccaactccatgtcaaatgctgtagagagaacaagtcagcaagaacaggaactgaccactgggcctggcaacatggaggtcactggtgctggggatgaatttcctgagtaacttcacgtgtgctaaataacctctctgaacaccagtattcacattttaaatggtattaaccaatcaaaaagactgggctgttgttatttttaaatatagtaatggcctaacatattagtaggagtgtagcaatgttagtttctattcaacctaccgattagtatgtgattgtactcttttacagggcccgtgctattatatactcttcactgtttacaagtcacttttgtttacattataaactgtcataacccaaataacccacagtatctttttatttattattattttttttgagatggagtctcgctctgtcgcccaggctggagtgcagtggagcatctccgctcactgcaagctccacctcccaggttcatgccattctcctgcctcagcctccgagtagctgggacttcaggagcccgccaccacacccggctaattttttttgtatttttgtagagacggcgtttcaccatgttagccaggatggtctcgatctcctgacctcgtgatcacccaccttggcctcccaaagtgctcggattataggcgtgagctactgcgcccagcccacttttttttttgagacagagtctcactcttgtcacccaggctggagtacggtggtgtgactcggctcactgcaacctctgcctcccgggttcaagcgaattctcctgcctctgcctccaagtggctgggattacaggccccatcaccatgcctggctaatttttgtatttttagtagaatggagtttcactatgttggccaggctggtattgaactcctgacctcaagtgatccgctgcctcggcctcccaaagtgctgggattgcaggccagccatatcttctttaagggtagatacgcctgaaaaggaggaggcttgtacctttatgaaaagtttcatcagaactctgaaataacagcatcggcaccattgagcatcatctcaaacagcccaatgagcaagtgcagatagtcctgctgtcttctttcagttgttcaggattccaccatatatcacctacaaggacatggaagagaaatgatgctagatcctacatgaacatgctgggagctttttattcaagacagtcatgtggagtcaatcattcagttttgcagagtatcacatttaaaagattcacagcttgtatttacctttaggaaaagatttaggagctttcagtgcataaataaattttttcaaggaaaaacaagaaaaaccgagtcctccacggccaccctctgagtgctgttgagctcttctacatatgtgcccacagctccactgggatccctctgtctaacatcagttcaatgtgccattctgagggatttcctgaaatgttaaaggaaacaaaaactagtacaaactaagggttctgaacatggttatatgaattcctctgcataatatgcaaaagttttgtttatgtgtgcattttggtgggaaaggattaacagaactgctttggtcggatttttaaagaggtttatcactattcacaggaaagacaaagttaaattttatctatgtcttaccttgaaacattatctctaaaaacaactttattcatatgaactgtttatccaataaagggtaggaataaataggcatatttcttttttttttttttttttgagacggagtcttgctctgtcacccaggctggagtgcagcggcaaatctcagctcactgcaacctccgcttcccaggttcaagcaattctactgcttcagcctccgagtaggaaggattacaggtgcccgccatcatgcctggctaatttttgtatctttagagagattaggtttcaccattttggccaggttggtctcgaactcctgtcctcagatgatcacccgcctcggcctcccaaaatgctgggattataggcgtgagctaccgtgcctggccaaataggtatatttcaaaacaggaagataaacagttggattgccaagacatagttaaagggattctttgatttcactgttttaccactaatctgaataaggtacatggcaaaaatctccaacctgcagatgattttaaacaagcagcaaaatgttaggtgtttagaaattatactgtaatgccaaaagaatgcagaacaggtgtaagaaaatgacaaatatgactctgtacaagcagtcagagtaataacttagaaggaaaataatccaaagccagatttacaatgtaacgtctccatgagggatttgattaactcaacgtgctgctacaggcgaaaacatgctcatgacctcgagaaggtattaaaagtaaagcaatataaaataacctgttatctacatatgtataataaaacctctatttgtccatacttttaacactgagaaccagtatagttcaggtcatcatacttcaaaaagacaccaagaaactaaaagttaagaagggcctatctggactatttttcaaaatataagattttactctttttaaagtttacacattttagctaacaatggccatgatcagaactataaaatcctgcgggtatacgtaaatgtgaaaaagatataattcatttagtaaatcctaaatgagaagccctctaaaatttggaggacaaataaaaacaaaatccttacatatagcagtattaaaaaaaaagtcttgctacctcaaaacatgtcaaatgtaaacagctgaaacatgtctttagtaatactatgaaagacagtagtaggctggagggatacacatctatgtaatattaaattatttaaagcctaaaagatctatttttagtaaacaattgaatgaaatagtattttttcaagcactaacacaccaagtgaattcttcatcgctagaggtagttaggtgtagcttggtaattatccaataaagacaataaaagagaggagagtcaggcatcagatacaaaatattcaaccctaaaattttataattcaactaaactttccgcaaaagcaagggagtgcctagttactatctcactgctacccaagactgcttcacatttcatccagctactatccacagactcacatctcgcctctgattttcagttttgctgtgactaataggccaggctgttgttttattaacatcccactttctggagattctgctttccttaccactgcagtaatgacactttcaagttctttatttttttctgcaacaaactgaagactcttatcgcaaatggaaagtgggtttctttaaagatgaacaacaagagacgagcacagacaggatcacatgaaacgttactttctgttcaggttaaaggactcctcctcacccacgcttattaaatcctccaccttgaaaaataacacactctattaccagttgctcttgattttcataaaacaattttttcaactcaggtctactaggtattatgtgttttacatttaaagtgagatgacaaacagaaagcctttataaagtctaagcactgatttctaagtaattataagaataatttcagaaactgtaatgaacataatgcacttgccaactggttaatgtatttaaatcacacatctaatcctttacaaaggtttattaataaggcaaagataattttctcctctttgggattatattttgctattttaacaacaaaacaacaaaaagactaatattttaaatgggaatgagaaaaaatggtggtaaaaaggataattattcttatgggtgtgatatggatccacattgaaaaaatatataaaatgttaaaagattcaaacattgcacagaatatattaaacaacactgcaacgtttaaagtaaaaccaagtatcaagaataaaagaaattttttttaagaaaaatctagtaaagcaaaagctgagaatttataagagtatgagaaagaaatccagggggtggactttcaaagcatacttaccatctttaaattgaagaaggatctcctaaatttatattatcagccaacaactcaatcatcttctgattgctacaccgattagttttcctggctttgtgcttttaattacattttcaagagctgtaaataaaatcgaatgcagagagctcttatgtcaccaacactcaaagaatcacatgaagaattaggcaaacattttactattgtttatgaaggtttgctttctatttttccttgtatccgatctgaatttgtctatgaattggcttccttttcactgtatactttttatcttggcaaaaatttaaaagaccttactggcatataagcatgaccaacaataaattttaaattttccttgtttcttttgtgttatctgttcactttttctaaaaaaacaactgaattttttaccttcttccagcctcttaatagagggtgcagggagcagattcctgattttgataaatatatagcaatttcatctcagcagattccgtatcatcattattgataaccataaatggcagcaaacatacaccacctgatttgacaactgatcattttcactcagtatctcttctttaattaatatgtcacggctatcttaagtacctcgtacctaaaagacatgcaagcacacttggttgaaagacacttggaaggcttcaattgggcaaaaattcatcattacattactccagcttaactgacaattcctggtctcctgaccaaaactattattcagatacactaagacaccacttaaaatccatccaataacagagttatctgtgacaatatttttatttatttattttttgtacaagtgctggattacaggcatgagccactgtgcctggccaacaatacttttaatctgctcatcctgtcaatcttaaaaaaaaaataataatttttcttagagaaatcactagaggttaactataacaaagacatatcacactagatgtctcaactctaccggaaatcaggttcactcaggcactcaaaaaaatgaaccaagcacatcctacatgatagatatctacccatacgatagatacaaaacacgtaagacacactctcatcctctatggagcttgcttactttttcttgcaaaaagcttggtgccaaaaatgaaataaacagagctcattaaaaacttaccacagatggtatcatgtgctctgaacttattttttaatttgtttaacacattggtatttgtttttaattataaagtaaaattacataaagcagcaaattagaaagtcctacccatcttacttcccagaatgcaatacatacattatatacttccttttgcattttattaagagaaattccaaacatagagaacagataatgaacacacacaaacacaaattaattaactgtataatgaaagagagtattacagtagatctgttctactaccacgacaaaagggtcatgtaatcaaagccttaaaaaaaaaaagagaagaaatagaaagaacttgatataagaacttcatcaattcaaaatagtatgaggagaatgaatacataccattctccattctttgaaagttctgctctttgaaagagattcagaagtttgaaatcgtcacttctgaactgaagtgttctttgaaaatctaaagggaaaaaaatatcagagtagatttgtacttgcttcaaacatgtatggcgctttttaaatgcgaattttaaaagaatgaattataaggaatttctcccaggaatcctagtacaaattaaaagttttaagattatttctcaaaagtggcattcataagacaatttccacaggtcccaaggtatttgctattataaaaatatgttaaaagcaatataaaaattcacaaaacatttttcctgtttgaacaactccatatatatttaatatatcaaattgtgaatttctgtgagtttctcctaaccagacttagtctgtgctctccagagaacaaatttcccatggaaaaataatttccaaaaatattctatctcaagcagagaatcaagtgagaagggcaaggaaatttacaaaattgtatacctcaacaatgacaaattcactcacctcaaaagcacttatagccgacaaaacaacatctatattatatcacctaatcgggctaaaacagcttcttttatgaaagattcatcaacaccctcctgagaataaaagaaaaacattaatttagctgttgccaaaaatctcttaaggctttgcactagaaggaagtatggttttgtgaaaaacactccagaatgacagtctaacacaggctctgctctgatgaggactgaaacacactagaactagataatcgctaaagggccttttgagattaatattgtttggtacaaatccttttcaagttttcagtgaaaatatagtaaatatggtatactcaaatatagtttttgtagttaaggagttcatcttattaaagtgagagcccagatattgacggatatagactaaagaataagaatgtctaatttaaatcctagctctaccacttactagtgtgtaactttagtcaagtcacttaacctttctggatctcactattctcacctataaaacggtttgctaataaataatacctacctgcaagggttgttagaagattaaaaaatacatgtagtctgtagcacagtgctttacacatagtactgttaaaagctagctagtattatctaaattttacaaggataaggacatgtactacaaagccagtctgccaaaaatagagatcatttttaaatataacaaataaaagaaaacaatgtatattcattcacagagaaagaaaactaggatgctaatcaacctgaatatatccctatctatatgtggcaggcaactaaataatataaaaacataggtcactctgttgggagaaaaatgaaaattcacagaattcacaaaaattaagttgtcaggcacagtggtgcatgtctataatcccagctactctggaggctgaggtgggaggatgcttaagcccaggagtttgaggccagcctggataacatagcaagaccccatcatttaacaaatcctcaagagctaataagcagccatatatctgaacctggagtttagaataaaaccatgtcctgtcatcaatggagaaaagaaaatgaaacatggtatgcaaaggaggacatcaatgcaattacaatcctcaagcctgtaagttgaatgtatgcagggccggcccttcaccgaaaacgaaccaaacccagagaacaggagagaaaggcagtaaaagaaggaaggatgagaatacttcagaaacagaagattccaggactcccctttattctagaagaatttcttatcactgaatcctcctatcacaacaaagactattattcaatgaatttatttaacatatcgacaaaataacctattggcagtttacaaaagcagaattcatgtcagatcaaataaagcaacatttctaaacctgaatattacatcagtcactttcaaagaaacattctcaaagatctaaatgttgttgttgtttatatatcaacttaaaattaagtataactccttcttaaaatatagatgacataaacaaaaatttttttttaaatctacaagggaaatactaaaaactctataaaaccaataaattcaaatgaagatgaacttagtgtgattagttgtaattagctgaaattaaattttacgatcatatgattttacttgtagtaagaatctgcttctaattgctatgacacaagttctaagttcggcacgtttacactgccatgtgctacaaggaaactaaactctgttaaccgctttctctgttccagaaatttctcaaatatgcaaatcacggtgcataattttagatatgacacgatggagcattcctattttaattatagtaactatagtaaaatgcatatacaattagcactcacacccacaatttgaaggctatgtaaaaaaataatgagtccatctgaaataaagaaaattgtgagaaaataatactactatcagtggtaatttgtaatttagcaaaaattgtacaggactgcttgaatgactaaagtttggaaactactattctatgtgcatcattaccaagtctcataccaatgccttttggtataaatgcaaattagaccaaattatttacaaataaagtcacctcaatacatatttgaaaccactaacattttaaagacaaacgaaactgcaggcaccaaatcatggaacagtgttcaaaagttatcattcaaatgtcccaaaatatgtcttcatctaaattaagactatcaaaatcaaatttctcggtttttttttgaaagagtcttgccctgtcaccaggctggagagcagtggcgtgatcatggctcgctgcagcctcaacctctcacacccaaagatcctcctacctcagcctctcaagtagctgggaccaaagcgtgtgccaccaaacttgctaattttttattttttgaacttttttatagagaagggggtctccctatgttgcccaggtggtctcaaacgtttgggctcaagtgatccttctcacagagtgctgggattataggcatagctgctgtgaccggcccaaaatcaaatttcaaaactaaaaaaattctcagataattaagaacctacgtgaattaatctacaaattccagtttgaaaaacactaaagataaacaactgcaatgtggaaacataaaagtagttgttattaggttattgttaaaatggggacaactggctacacagtcctaaatattagtctaaggtactctcatgaggtttattcaactcatctgtacattacccacttaggtggtaacttcaatttcttattcagaattacactgctcatcataaaaaaaaaaaccatataaaaaagcgatctgaaacaaacctttgatgttttcatgatcttttcaaatgattcatggccagaattctcacaggagcaagtggatgattcaggctgagcatcaagaagtatcagaatctgctaaaaactacagggttcaacatagttatcaaatgatttcattaatctgaacagtctatgatcaagaataaaacccagagaaaaccaccccaaattgcccacattttcagtaacaaccatctaactacagaaaacaaacaaaaaaatgcaaaatctttgttctagaacatcacatgagttgatgaaaaaatttgtattgttaatggtatgatttcatgatacttgtgtctatgtgtaggtttaatttagtcaagtaattctacaaagtaattttgtatttgtatgcgtatctgataaatcacctaagataaatccctgttttagcaccttccagaaacagaatgcaactcatctacatgatataacaaatagtgacactcaaattcgtgacaactagttcacttacgcaattagactaaaaagaaagtcttatccatcaacctaagatttggaatgcaacaccattaaaaatgaaagtctaattatggaagagaaatactaaaacaatcatattctcttcataattatctgtttttaaggctaaatataagaactcctgcttaaatgtctaactctagtataaagctttaggcttgaatcaccagaaaatttctcaagttttaatgtgatctgaaatagaacccatctcccccttgctaatcaataatataaatagccatctgtggctggacactggaaagcatagacctagatgaaagacagagaatgctagaaacctacatgaggcctcctctgatgattcttaatgaatatcccatacaaaattctcaaacaatacttttcctgaataagtatcacgttcatagttatgtacaaattattgtacctttctccaattattctattctgcctcagagccgtacttcaggcaactaggcaaactgtagaaggttatctctgtaaaatttccacacaagggaaaaaagtggcaaatttccttctggagctcttcacatacccatacaatgtaccccaaattgtcataattcctttggagaacaacatacctgatactttcctccattgtagaaagagaaacaaactgatggaaaagctcttgttttttcagatctgcaatttccttaagtgttcctctaatacaacatctaatgttctggggtatctgggaagcaattaaaaatgaattcattattcttaataaatttattaatctcatacaccatacacatataaaggaaaacataaaatcttaaaaattactgagactgtgacttaaattttaacaaatgttgtaggtaaaccaaatgacattggtcaagtgtgttactatgactactccaataacaaaatagtctcttataaaaaattatactctccatagcccccacacaaccactatttcctcttatatttcaatatttttgattccgatactcgccccttcttgaagaacaaatttaaaaaggacagtctcttacaattcagtatattaagatgtgacttgtgaatcatatctttatagaacaggaagtacttagaagagcataaacatacacacgtaacttacttgctttctaaaagcctaatgagtggagaaattgttcattaagcaaagacactttattagaatccatttcttcctgtgaactatagaaatatactcttcaaatagaaggctgtaaaaaaaaaaacagaaatatcagcatacatagagttactatttattgagtacctactatattctaagtgctttagaaatattatctctaatgtcatacttatacaaggtatagtttaatacttattttacagataaagaaactagaggctggtgtagtggttcacaccactggcattataatcccagcactttcggaggccggggcagagaactgcttaaggtcaggagttcgagacctgtctgaacaacatagtaagactacattgtattttaaatggtgctggctcacgcctgtaatcccagtactttgggaggccaaggtgggggatcacctgaggacaggagttcgagatcagcctgaccaacatggtgaaaccttgtctcactaaatatacaaaattagctgggcatggtggcacatgcctgtaatcccagctaccaggaggctgaggcaggagaatcgcttgaacctgggaggcggaggttgcagtgagccgagatttgccattgcactccagcctgggcaataagagcgaaactccatcttaaagaaaaaaaaaaaggaaaagaaactagagtgtaagtcttccaatttgctcatgagaacagcaataaaaggcacattcagtaagcccttctgtgccacagagtggggtttcacattttaagccccagtctgttctagagcctatgttctcaacattactacacgtgtatactctcctttaattcacaaacaaccctctgagcaaaggggcatgaatgatgcacaccaacacacaggcactctcttgatctacaaaatggcaaagctacatccagactaacctccaaaacttactatagccctggaagtgtaggcgcagaatttacacctatgtctgaccacaacgcctacatcttttcactgtatcggttgcccattaagagaaaaaaaaaaaaaaaaaaaaaaagactgaattatctttaaagaataatccttactctatgcttaccttcaatattgtttctaaatgacatttactgcgttttattgtgatgtgttatttcagatattatggtccatttactaagagaaaacttcaaacggcccaaactgcatttagttattacccaaatttgtcttaaccactaactttccattttcatcttaagcactaaagacatgcaagaaaaattacttttgcttttaatgctgccagttactggataagtacttatagttaatgaaatgatacagacaaaacaagatatacattaaaaaggaatctgggaaatttctaaccaatcttgaaaattatactgagtcacaaaaatgtaaatcaaaacatgtcaaaaataatagcttacctagccaacaaatggtctaagttgttcttcagtgatattttgtaagtatagcttctaagtgtctcttgtagatttgaccatccattccttcagtttttctccttaatatgtaaaaattaaaattgtgttgggaaaaatttattttgcaagctaacttattaaattcacttatagcagaaaatcgttctcagaataaaacacacacactgatatcagctttttatctatttgcacaagtgcattccacttatttagtcatttatattttttaaactcttttgtatagatcaccttcatttttcttttatctaaaattctctatttttaacaagactatcatgcttataacaataacaaaacaaaagtccaaaattagtctttccccaggtcaattacaaattagttgtgatggtgccaatcaactatctctgaaaagaggttaaacttttactcagtacccacccccttactgaaccaaaagctgtcatctatttcagatttataataaaatatgaatctgatcttagcccttgctttcaaagactgggacattactcattaccttcagataggaagaatacattttcattttgctagtcacttttctaaaatgcatgttcaaaccaaatttggttacaaaaacctcatttttcagtagactgacataagtttagagaagtctttctagtattctccaagtagcaacagaaccaaatgtttcttcctagcctttctgtatttattaaagacataatgcaaataatcactttctaattattattattatttttgagatagggtctcctctgtcgcccaggctgaactgcagtggcacaaacacagttccctgtagcctcgaactcctggactcaggtgatcctcccacctcagtctcccgagcagctgggaccacagttgcatgcaccatgcccggttaatttttgtatatttttgtagagacggggttttgccatgatctgccatctcagtttctcaaagtgctagaattataggtttgagccacctggccctctaattatactttttgctttttgctttgtttcataatttggatttttatgtataaaaattttcttggcttatatttttaattactctagggaaaaaacttttttggcaactggatgagatattcatataaatgaatcactaaagttcattaaatacctaaatgagaaggcaaaggtttactcagtataaattttaaaagtattccagtctttttcatgtagagactatttaagtatttaagaaccagatcttaaaaaaagtaaaattctaagaaattactcaattaacaatgatctttcttcaccaacctgctccccaccccagatgtttctcacttaagaaatagacaagttacacaagaaaactggaaaacagaaattttaaatattttgaagctgttaaccaggatatggttactatttaagatcaaatcttagaaaatttctggacaaaaaatataaaaccacacacctgtaacatatgaatgatggagacgaccagatggggaagcatgtaatgcagaagaggactgacatcgtagtttcagaaatcccatgaagtattgtaataagatcaggaacattacataagtgagggatggcctttgaagaagcaaaagtacatatcgtgttgactttacaagttagacaatgagtacaatataagaaaatatataatcacttatcttacaaaaaaaaattattcaaaataattttttcacctctgactagcaccatttctcaattcaattgtacatactttttcccaaggctcttggcttctgtctctgcaggagcactatcaagcaacttaacccatccttgatcaaagaggaatcttggtcaatgttttgatgatctgtgatgccaatgaattcacaaaggtattttccaggtcactttcacagaaatctgacatattatcatgtatgttgcagctctgtaatctggtaagatgatttcaatccctaaatattttttaaatataaggaaaaatgataaaccatattatttctgctactttaaatgttaatctgacaaattagaaatgtcatagagattaatacaaccaatgcatagtcaatcactcttcagacataaacaataaaggagctgacccctttttcagatggatacagagatgagacaagtctgttgaacgagacaaaggatctcagaaaatttcccactcaaacatctaccacatgtcctgacaggagccagtaagctcttcttttatacataaaacctacttatagtagggagacctcaatcagatcactaatggaagaaacaagtctgatgaaggtcacaagttgggacactggtgggaagtgaaagcagtacctccacagggcacctgggaggcagcaggcaagaaggcacttgggaaggagaaacgctgagaggcaggagccagtgcacaagaatactgagaggctgcttacgcctcaaagagactgtctgctccgtcctccttccaggaggtacaaagactgctatggaaatcaatctaggagatggccgcaggaccagacagccatatttattcttaagagtcctaattaaggtcccaggccagtgagtttctaataaaaaagttcatattttcaacctaaaggctaaatctcagctatcatctgaaataaactgtcaatttaaaacacttaaatctaaaaaaactttcgaaagcaagaaaattcctttaagtacaaaataactacttaacacatcagcagtgccaaccttttggatatagggaaatagtttggcgatgatttgtctgatacgtcctctgcagctaccagcgccgacactatggtagaagcatagaaagcaagagcaccctcaactgagctgagctgcccgggtactcagcaaaaacctgaaacaaggacacaaacaaaacacatttaacagtgaaagggaggtagaaggattgcttgaggccaggagtcaaggctgagatttcaatgaactatgatggcaccactgtactctagcctgggcgacaagcaagtccatgtctccaaaaaaaaaaaaagtgaaaggccaaataaatatttacagctctctgaattaccatatgcaacaatgaatacacaatgtgacaacaattaactgcctaatgatttcctaacatttttatttaaaaaaaaattttttttttttttttttgagatggagtctcttcgcccaggttgcagtacagtggcatgatcttgggtcactgcaacctccgcctcccaggtcaagcgattttcctgcctcagcctcccgagcagctggaattacaggcatgccccaccagcccagtttattttcgtatttttagtagagacggtgtttcaccatgttggccaggctggctcaaactcctgacttcaagtgatccgcctgccttggcctcccaaagtgttgggattacggcgtgagccaccgcacctggccttaaaattttttaaacagctttcccaggttgaatatcccgacatttctagacactctctttgaatagtcactgtaactagaatctggcaaggaatgacatttatttttgtagaaaaacacctttggtgataaaagactgattcttaaaaaaaaaaaaagatacggactctcaaactgctcctgcttcaaaacaccagaccatttaacaaaataatttatccaaagtatcattgttattagggaatgttttagtatgttttcttcattcaaagaagcaatcttttcataaaattatatactcatgaaacagactgctcaccttcacagatttgtcaccaaactgcaaatgaaatccatgaatccaagatctttgtagcagtgggtaatcaagttcctttagctaacggcactccagattgctgttattgatggaaagaacaaactactagaacattcatcaactgatccttattttaaagcatttaccctagtaatgtcttcatactgcacaattcataaataaaaaatataatctctccttataactggtggtggtgatgaaattaaacataaaatcatgtaaacttagaaattcaaaagagaaggtcagcaatgagggcagaggttttagtgaaagatgtttgcttatcgtatgtcacattttgaaaggtatttatcaaaatctgattctctagattcttagtaactttactggttcgatttggtttctgagccactatgatagcttctgtcattgctttacaataacactaagaacagaaatagactaggaaactgcacaattataccactattcccaccatctagcgttgtacatggtatgtaatagatgctccataaaactgattaaataaatgaaaggagaattttaagtgaactttagtaggtgagtggagtttgctacctgcaataagagtgcctagggagcagcaagatccaaggtagattagaggaagaatattttgatgctatgggcagagtgaatgttgggaagagcagttaatgagctttatcaaagctggccttctccaacattctttagttcaagtgctttacgttcagattcttaaattctcctctaattaaaaagtcctcattactcctatcttactaattctgaacactgaccccactacatcatcagcctaatgtgcacagcctcgtgatctgttagcttaccttcatccccatttgctccccccctaccctggatcaccatgcccaacatgcagtcaagttcctgctaacaacataatctactttcctccaccatatgttgcaaacaaagtgctaacggttagtcagttggttttctacaatagcatgctgtcttttcttacccagacccttcctgttatacaagcatccttttttagtctgtaaattaactcctagcatcttcctcacaactttagtaaattcttgaaaccctgaagttatccttatccttttaatttttgtaagtattttctgcctttcttcaccttcaattttttttaagttctcagttccaaatttaaaatgccaaacggcatggtacgatacaaagcacagactctggaatcagatttgggttcaaatctcaactctgccactttatagttatgtaactttggcaagtagcctgtcctcatctgtaaaaatgaagttttgtgataatccaagatatataatgtacattgcctagcctgatgtcagatactaaataaaagctaaatattattaaattaataatagtttcaattggaagtcaggaaataaaaatgatggaggtagttatctggatatccccaggagcaatgacttattttttcctaattaaatcccttaatcaagatctgtaagattacagacatatgtcattcagcaattataccttaactggcaacaaccagaaccatcttgctttgaattattaatttttagaagctgtatgactcgcacaaatattcttgtctcgtgtatggcagaacacaagcaatgaggctatcttgattatagagatgtatatggaacctgggaaaaaaagcaaacagtccaactgaacacaaaacttaataataagcacctatttcctcactgcccaaactgtattattaataagctaaaacaacctagaacgagtagcagtaaaaatcaaaaattataagatacagagcatttaaaaagtccccaattttgcattcacatatccctcacatggtccagccaattcctatgcaatatctttgaatattctacatcaaaatatacatccattaactttctctcagctttacaatttttatttaattttttgaatagagtcttgctctgcactcaggctggagtgcagtggcacgatcacgggtcactgcagcctcaacctcccaggccaaatgatcctcccacctaggtctcctgagtagctgggaccacaggggagcaccatcacgctggctaattttttatttctgtgtagagactaggtctccctgtgttgcccaggctggttgtcaacattttttttttttttttttttttttttttgagagggagtcttgctgttgcccggctggagtgcagtggcacaatctcggctcactgcaacctccacctccaagtttaaaagttctcctgcctccgcctcccaagtagctgggactacaaactcataccaccatgcccagcaattttttttttttactttagtagagatggggtttcaccatgttgcccaggctggtctcaactcctgagctcaggcaatctacctgcctcagcctcccaaagtgctaggactacaggttgagccaccatgcctggctaagatgttttttctaattctgccaactgatccctcttctggaaaactctcctatccttttacatcgtgtactttttttaaacagtaccatacattgcctttattagatttttttttttttccagagtctacttggtcacccaggctggagtgcagtgggtgatctcagctcactgcaaccttcgcctcccaagttcaagcgattctcatgccctagctcccaagtagctggaattacaggtgcacagcaccacacccagctaatttttttttgtattctagtagagacagggattcaccatgttggtcaggctcgtctcaaactcctgatctcaatgactggcctgcctcagcctctcaaagtgctgggattacaggcgtgagccactgaacccgcctcttagtttgacatacggttttagcggttactttttccatgaagctttcttcaactttccaggcagaactatatccacaaaactctgcttaatcctttattatggcatttatttcaaacagtaatcaacggcaacctacttatctatgtactgaacttagtatttgctgaataataagttatctgaagacataaaatgaaaaatcaaatgcaaaaagtattccttacattaatatctatttgggggtaaagttaggtgctagaaaacagatggaaatattacagacttttaatattctttgtctgattgccctaatgttctgacaatcagaagacccaagttaaaatcatgtttcttgatgactcacttgcttcttgaaaaaaaattagtttatccccacgtctccatttttgttttttttttttgatacggcgtctccctgttacccaggctggagtgcagtggcgtgtctcagctcactgcaaaatctgtctcctggattcaagcaattctcctgcctcagcctccaagtagctagaattacaagtgctcgccactgcgcccagctaatttttgtatttttcacaagacaggttttaccatgctggccaggctggccttgaagccatgtctccaattaatggaaagaaatctacttttaaaacatgtaagttggactggatgtggtggctcatgcctgtaacccagcactttgggaggccgactcggcaggaggatcgcttgaggccaggagttccagaccacctgggcaacaaagtgagacactgtctctacaaaaaatggaaaaacaaaaacaaaaacaacaaacaaaaaaaaaactaggtgggcatggtggtgcatgcctgtaatcccagctacttggtggctgagatcggaggatcatttgagccctggagatcgagtgggccacgatcacaccatgcactccagcctgggtgagtgaaatcctgacactcaataaaataaaaataaaaagacaccgtgtgcagtggctgtggtggctcacaccagcactttgggaggctaagacgagtggatacgaggtcaggagtttgagaccagcctggccaacgtgatgaaaccccatctttactaaaaaaaaaaaatacaaaaaattaactgggcgtagtggtatgtgcctgtaatcccagctactgggaggctgaggcaggagaattgcttgaacctgggaggtggaggttgcagtgagatgagtcgtgccactgcactccagcctgggcgacagtgcgagactgtctcaaaaaaaaaagacaacatattgggagaataaataaaacaaaaatgtgtatgctgtgatgtgacaccaatatgtagaaaataaactaagcttactgagacaattcccaaagcagataaaagatcagaccttggaataaacttcagctgtatcctagctctgccacttactagctgtgtgactcaagaaacttatccctctaagcctcagttttctcaactgtaaaacaaggataatacaaataatctcaccgaggaatgctgtgagaattaaatgagataatgcagataaagtgcttaccagggcctagttataaatgctcaaaaacacattagctatcattgtttttctcaagtaatggtatttcagagataacattgcctgcttccccaaccatcttgttattttgccaagaaagcagcttagtaccactgcctcaagtgtgcaggaacaagctgtaatggcaaagtagcatgggctcttcagaataacgaggttaggctgggcgaggtggctcacacctgtaatcccagtattttgggaggccaggcgggtggatcacctgaggtcaggggttaaagaccagcctggctaacacggtgaaacccatctctacaaaaacacaaaactcatccaggcattatggcaggtgcctgtaatcccagtacttgggaggctgaggtgggagaatcacttgaacctgggaggcagaggttgcagtgagcaagatttcaatattgcactccagcctgagtgcccagcaagactctatctcaaaaaaaactaatgaggttagaccatttactcaaaatcaccagtagttctacttttcactatcaacaaaaagaatttaaaggcagaagagcatgcttatctcacacaatggacattgtatcaatctttaatatacctaatttttcagctttaatttgataagttctcaactacttaattttttacagaccaaagtgattaacccatagttatttctgtaattctattagctacctgtgaatcaacactccagacacttctgtgctggcttaagcaggaagtaaggcgacaagtgaataaggaaaatgaaatgttttcatccaactgtttgtttactgctttggtctgaacacttcgctccaagtttttgctagctgactgaacaacggtgcttcaaactgctcaaaggaaggatcaattccagcaactcttccaggccagtacatcctaaatttcaaaaaaggccagtttatttaacaatcttcgtaagcaaattcatcccacccctcttttacagttttacttacccctaagaagttttgaattctttaagtacatataatttataatacagtcccaaacactgatttctagttttcacttttagagtaaatcctatctcatctactagaacagaaagtacttcgtggcagggaaccttttttttttttttttttggatatcccctacaataactaggccagtcctctgagaggattctccgtcaccccagtcactgcctccatcccccttttagctgttcttctctttgacatttagttgacctctctaattttgtttcttcatctgtgaaatccagatacctctactcataacatttcaagcaccaagcacctgactgttatgttctctttcccttaaaaatatacatcacatgctagaaactgctaaggaagaggacgggacagaagagaaaacaaggggaaaaaaaaaaacagtaacatccagaaaacaaacgcttccaagagcttttctaagttaaaagatggctaccaatggcgaaggcggtgtccctgtcgattgtggccgcttccttagggtcaaataacaagaagcaacttcatctctagataagaggctggcatcactttgagggagggcgagtcgttcagctgctgggctaaggacgtcatctttcacgccagcggagttttaatgacacgggctaaaaaacgtaagcactttgataagtttctacgaaattataaggcgcctcgtaaacaaacattctcttctgcactcagcaccgtcatggacacacaacgcgggtgtcctgagatttgtggccccggagatgcaaagacgatggcagcagcgttaacaactaattacagtagcggcgacccgccaaggctttccttcaaccctgattccgcagatatccggaaaactcttaccctccctgatatgccgcccccatccgcagccacatcaagcggctctgtgccgcttacctggaactggaatttgggtatatcttggaaggcaacaactcttcacagcgcttcccacatggtaccaagagcccaaccctcacccggaaacctaaggcatgctgtagagcaacttcctgctgcaggcctacggcaagtgaagaggttcaagcttgccgggaatgcgacgagacagctccgcctcccagacgaaagcccgcccctcagcccgccggactcaggctcaagtctgagcttcgcctctgagctccggtttagcggtctgctctgcggcttgtgtctgaagctttcggtctctggatggccttctgtgggctttaaggatccgtagccagaatcattcattcagtagtgatccagccttactaggtgccagcagcaccgcgtagtgttgaaagctatgggttgtgaagtcacgtggttgggttcaaatcctggcgctggcgcctgtcggccgggttaacgccaccaaattatttcactctccgagcttgttactcactctacaaagtgggaagaggccgagattgtcgtgaaagggcttctgctcctagtgcaaaccgatctataaatgctggactccaccgccccagagcttggggagatcttgtcactcctctatgtttccattcccgaggggtaaatggcatatattttttctttcaaaacgaatcatagtcaggcgcggcctgtaatccgagcactttgggaagctcagcgagctgatcacctgaggtcaggagttcgggaccagcctggccaacatagcgaaacccgtctctactaaaaataaaagaattagccggacgtggtggcgggcgcctgtaatcccagcactaggaaagctgagacagaagaatcgctggaacccgggagtcggaggttgcagtgggcaagattgcaccactgcactccacagagcgagactgtctcaataaataaattaatcgaatctgttgaggtataatttacaaacaatggttacacccacgtcagtggaagagtttgatgattttagcaaatgcatgtataggtgtaatgacctccccagtcaaaatgacagtttccatccccctaaaaattgtctcttgcctgtttgcgaagattcccgcaaccactggtcttggcctactacagatagtgttgcggaagagtatccttatgtatgaatatagctaatctgtttccaaacaccggtatgcgctagaactaggatgaactgacgtcttccagacgaaggagtgagattgatgctctgtcttttctggatgcattaatttctctgaagagctctgcggggccaggggtcaagtctttctgtaaccgtcttccctggagaatgtcagaaacacagctacaaatttggggccctggttgtctatacctcatgcagattctctcccatttacaaacagaatcttttgtgttggtttgctttaaaagcatttaaaacaaccaaatattttcttcagttattagtattttactgactgttaataatcttcttttcatgtggtgttgagtgccttgcagagaataacataaaattctagtagtacctatttcattcttacaaacatatctctcaaaggaatttttttttctttctaacatgtcacaggagttttacctttacagaagcaatcagctttcggtactttaaagaaatgaacaccaggtctgtttcattgataagataatttgctttttttgcttaaaaataccctatatattttttaaaagctttatttaagtgaaacttgaaaaagtgctacaaagtttgactcagtccttcctatgtcagctgtgatggtgtatagtgccatgccgaattttacttggaaagtaaaaaggaaaacaagtcagatgttcataaatgtaatttttttttaaaaaaagctttggttttaaaaaaaatgtaataatcttgaattatatatttttatctgacggacaatgtaccaagctggtattttcttcatagccattatcactacttgaaatgacctgatttgctgtttgtttacctgtttatttcttgtattccctcactataatattggcttcagcacgtggcataaagcccatccctaagacttatggagcctgagaaagagtacagatggactcactctgtaggtgtaaatatttaaaagttataaattaacttaacacattattaactaggatatctataactctcaatattggtgagtaaacatttataatggcaaaataaaaatgtttttactagatgaaaatcagcaaaatctgattgcatttaattatatcattcctgtccgggtgtccattgattggctgattattttggatgagtgataaagacatctatagttaatacatttccttatatttagcccatgaaaatttaccttcatttcagcaaaattaccatgtatgctgtttgtcaagattttcatgtaattgtgttctatcagaaataatgatcaaaaaggattaaaaataaatttaattatattccaaacatatagtttgaatgtttcaataaaaatataaattaaattaaaagcaatacattaaatctttttcacttttttcaaaagatttacctttcttataagattaaagtataattagtgacaatattttttttttgttttgagatggagtcttgctctgtcgccaggctcgagtgtggtggcgtgatctcagctcactgcaacctccgcctcccaggttcagcaatcctctgcctcagcttctcaagtagctgggattacaggtgcctgccaccacacccgctaatttttgtatttttagtagagacggggtttaattagtgacaaaattttaagtaaataatttaaataaatctaaagttgtatttgtttttttggtaaatattacttaatgaaattttcattaaagtaaattactcacaagcgtatcattcaatgtccacctagttgccagtgtaagaattggtatcaccctttgttcatgttatgtctgtatctacctattttcaaatttcaggtcatgtgaattgtttaatattgttaaatgttcctcagcaaccatatctgattgttgagattctacactaattcctgagtatatccagaaccataaattggggggaaaaaaaggaaatagaaattccatgtttggaactacttagatataatactttataatgcaaaaatatgttcagtagtttgaaaggaaaagtgtgacaaattaacttttcttttctcttacctaagcatttcgtattcagcatcctggtcgggtcccggccaggtgcggtggctcatgcctgtaacccagcctttggaggctgaggcgggcggctcacctgaggtcaggagtttgagaccagcctggccacatggtgaaaccccatctctactaataatactaatcctgactctactaaaaaaaaattgccgggcgtggtggcgcacgcctgtaatcccagctactagggaggctgaggcaggagaattcttgaaccgggaggtggaggttgcagtgagccgacatcgcgccgtttgcactccagccgggcaacaagagcgaaactccgtctcaaaaataaaacgaaacaaaaaacaaacaaaaaacaaattctccctatgctcttaggcagggtccggaaacagtacaatccacggatattcaggtattcagacagggttgtcttttactttcaggacaagggacaagagacctatttcccacaacttaaatgcataaatcatgagggtctatgtttaggtttataggttatgccacagtaggctaaatggcaggttttgaaaggcaggttcccacatttttaagcaaatttattttgtatatttgtgatatgcagagatcacgatctaaggatgatgttgaagactttctcgtgtttacactaaatcctaactaccaaataaagtacctggaacgtggttaacaatacatatttattttcgaatgaatgaatgaatataaatgtgcataagctgtatctgtatctccttcctgttcagaaatgtgtatcagaattcaagtgaataagtgtagcattattataggaataacttagaatattctaactataataaaagtaaaattttcacaaacttcaaagtttaattattagtagatgtttacatcatatatcacaactgatgggataccatccacttgaaaatatatctgttgcgggctcagtggctcacgcttgtaaacccagcaggttgagaggccaaggctggcatatcgttgagcccaggaattcaagaccagtctgagcaacatggggaaactccacctctgcaatggcacaaaaattagccgggcatggtagcacgccctgggaggctgaaaatgggaggatcagtgagcctgggaggatcaattgagcctgggaggcagaggttgaagtgagctgaaattgcacactgaactccagcctgggtaccagagggagtcgcaaaaagtaaaaataaagaaagaaaaaaaataacgagaaaagaaataggatgtgtgtaattagcaatgtaaagtcaacatatgaatctacattttggcaatatgctaaaaaaaattgactagttaaatgattgagaagtatgttttcatcatattgcatcccaaacaaatttatttgcatttttataagcttgagcacttgtctcttgctaccaaaaaatttataattttttttttttttttttttttggttattttgaaagtactgggagggagctaggaattaaaaaaaaaaaaaaagatttggaaatcaacaggagcagttcctgaaacatctttggaaaccggcaggtggcaccaaagcattttcctgaccccaggggcattcagggtatccccagttgcctcatggaagtatcagttttcacactttttaaaaggaaaattatatacaattatctaaaaattggttcatgaaagcttccatgtgtcataaaatgccataaaaataatgccttcgaaggttgtttagagaactacaggacttaacaatatttgatattcttggctaatgagaatcattcaaagtcattgtttaataaatacattaaatttaatgtgggtagcctgaatccctttcttctctcatcctcaccacattctaagttagcttctttgactatttgccactggggacacttcttattgatgagggcaatggtgaagtagagaacgggaaagccagcaggtgaaaccagcatatttatcatataaatatggtagcaaagaattaccaggacagttttggggaggagatgagggacaaaggacttggttctatgtgagatggtttgaagggaaatttgggacagaaagagttttgggaggaagttggagagaagggcaactcctgtgtgagataatattacatactagatggataggaaatagagagaaaaaaagatttttgtttatgtttggattcttccttaggtattcttaaaagacttatgtgaaaatttcaatttattttagttctatttgagagtgactagtatttctttttttcttttgagatggagtttcaccttgtccaccagtggtatgatctcagctcactgcaacctccacctcccaggttcaagagttgtcctgcctcagcctcccaagaagctgggattacaggtgcccaccaccaccccaggaaatttttgtatttttagtaaagaaggagtttcaccatgttggccaggctggtctcaaaccctgacctcaagtgatctgcctgcctcaaactcccaaagtgctaggattacaggtgtgaccaccgtgcccagccactagtattttttatagtgaaattctatgttgtggctggtttcggacccagtaagccagtctagttttatgtgggttattggaagaaagagacaaagatatcatatttcctagttacatgattatatacctagaaaagccaaggattccattctataaacagtggaatcagtatggaatatagga

SEQ ID NO: 2912 - DNA, 38527 bp, Homo sapiens
gccaacatggtgaaaccccgtctctactaaaaatacagaaattagccaggcatggtggtggtgcctgtaatcccagctactctgcaggctgaggcaggagaatcacttgaacctaggagcggaggttgcagtgggccgagatcgcgccattgcactccagcctgggcgacaagagcgaactctgtctcagaaaaataaaataaaatttaaaaagtcatggcttttttccaggtcacaattgtctagtgagtctatgcattatcataatgtctgtgggtggtcaggctaaggagtgtttgccaacagtgaaaaatttttccagggagatacccgggagagatagtgaggcatctcggaacttgagagttaaactaatttataaagttcatgcttgtgggggcaagatcagccattggaaaagcacctcacctaagcagtaccttagacccgggtgagtgaagagtcatgagaccggtggagcccagccaatgtctggagcagaggcgtggggtggttttaactcatctgggaggaagaggtggcagagggcagaaggatggagaaaaggtgatgagtgcagcaggtttagatccggcatggtcagtgtttagcaggccccagtcaagggcagagggcaactctccctaggggccaccatgtcatcatcactcagagccttgcctgaggcttgtctagcatttaggacagtccggcagcataggcatcacttagagattgttagaaatgcaaaatctggccgggcatggggctaacacctgtaatcctggctctttgggaagctgaggcaggcagatcccttggggtcggagttcgagactagcctgggcaacatggtgaaaccccatctgtactaaaaatacaaaatcagctgggtgtggtaatggacacctgtaatcccagctactcgggaggctgaagcaggaaatcgcttgaacctgggaggtggagattgcagtgagccaaaattgtgccattgcactccgcctgggcaacagagcgagactacgtctcaaaaaaaaaaaaaaaaaaaaaaaagaaagaagaaagaaagaaagaaagaaagaaagaaagaaaaacagaaatgcaaaatctcagacccatccagacctacggaggcagaatttgcatttttacgagatccctgggagattcagagacaattcattacaagtgaagagtactgatttaggagacatacctccagtatatactccttgagccttctgattatattcagcttcagattcataaaggctcccaaggacctgacaccttagcagggcaacgtgaatcccagcctggggatgggcacccccggcctctgctgtgtgcagcactgaatttgctttccaagtcacaatcccttattcaaaacatttggttccaagtgtgtttagaattcagaatttttcataattttaggaaggtaagatgatgcatttgccaactctcccattctcccagtgggatctggggcagtaccctatattcaaacattgatatcttgcagcttttatgaatattgacaccgaaaagaataaacatcacaagatcaggtaagttttggcaccaatttaatggaaaaccttagttttcaggctgggtgcggtggctcacacctgtaatcccagactttgggaggctgaggcgggtggataacagggtcgggagtgcgaaaccagcctggccatatgatgaaaccctgtctctactaaaaatacaaaaattagccaggcgtggtggcacgtgctgtaatcccagctactcaggggtctaaggcaggagaattgcttgaatctgggaggtggggttgccgtgagccgagatcgtgctactgcactccagcctgggcaacagggcgaggctcgttgcaaaaaaaaaaaaaaaaagacagcaaataaactcacctaaaactttagacacagaataattgcccacacatttggattatagcttttgtctctctttacattttaaatatatatttatatattttaaaataatatatatactttatataatttcatataaaatgtcacactgttgtagttttctagcctctgtttttcacttttcatctttttatataatcaaagagtcttcacagccttttcttcaaaatcaaggtagttttattgtattttggttgtaaaagtgataatggaaaaaacaaacatatatttgcttatatgtgcataaagtctctaaaaggatacactagtgctggtcacactgtttacctctggagggagccagatggaaggcagacagggacgagagagaatttttattgtataatcttttagactcttgattattactttgtgaatgtattctcttttcaaaaataaaattaaaaaaactggtacatcctcactgcaaaagaaatcaagcaataagaaaggaacaaagaagaaaataaattcatctttaaactcaatacccagatacaacactttagtatttttgccacatttcttccaagtctttatctatgaatgtacagacatgtgtatgagatatttttaccaaaataggatgatgctgtacgatggtttttgttacctgtgtttttatgtagggtgaatcacagacagcttccatgcagcctcattttaaacatctgcattgttatgcatgaagttagccagttaccaaaaaattaatccaggtgaactgagtccagcatctgatacgcagtgccaggtaacaccaaccccctgatccaaagctgggattttcttttcttttctttctttttgttttttttttgtttgtttgttttttgagacagagtcttgctctgtggccgggctggagtgcagtggtgcgatctcagctcactgcaacctctgcctcccaggttcaagaattctcctgcctcagcctcctgagtagctgggattacaagcatgcaccaccatgcctgctaatttttgtatttttagtagagacggggcctcaccatgttggccaggctggtctcgattcctgacctcaagtgatcctcccaccttggcctcccaaagtgctgggattacaggcgtagccaccgtgcccggcccaaagctgggattttcaatttgctgtctgtaggatcttgaatggcaggatgttatgttccagaacctggagagataacatatgggaacgggctggatgttcttctgtccatggtgtttaaacccatgtcgcttattccataggtacaaacacctctacctcccccttcccctcagcctttatgcccactaccaccaggatgatgccagagagggccttgtggccagagccagtctgcatgtcaaagacccgagctcccatttgggctccaccacacacgagtgatcctgggaaagtcactttttcttctctgtagaacagagataataatctccatgtgcctttctcagagtgttgttttgttagaagaatcagataaggttatgactgtgaaagtgtatgtaaaatacagggcactctacacatagaagtttttattgttaaagtctggcctctccctggagctgtcagggagaaggtagatgccaaaaccagctggcccagcttccttccgtattggctcatggagcaaacattccccttgtgcacttttcaacatctacacactcatcttaaaatggagtgttgtaaaggtcaagggcacaaagcgttgacaagggcgtggaacaactgaactctactaatgcttctgcacagctgctgggaagtaaattggtacaacctctttggaaattgacagtatatactaaaactgatcatgtgaattcccctatgtacggcccagcaagtctctgctatttatgtaataaacacaggtattgtggatgttcaccagaagacatgttattagatgttcatagcagaactatttgtaagggtcccaaactagaaactacccccaaatgtcctcagtaattaaatggataaattacaatattttcatacaatggaataggatacagcaatggagcgaatggtattcaactacatgcagcaatatggaacaatcttacaaacgtgttgagcacagaagcctgaccaaaataagagtacatacttgtttcactaatctatacttgtttcgcgcataacaagtatagatcccaaaacttaatgtcttaaaacaacagatagattacttctctgagaagatgggatagctgtgcaatttctcttctgatttcaccttagttgagtcataagctgcactcagatgcagatttggctgggtgggaaggtctgaggtaccctcacgtgacctcttctggtgatgctcagttctttcccaggtggcctagaccaccttccttacacggcagtcgggggcagcatttcaagagagtgaaagtagaagctgcaaagttttaaaactaagggttgaactatcaagagttgcaagggcccagcctcaggagcttcatcgtgtccatttctctgcatctattggtcaccccataagtcaaaaggccagcctagattcaagggtgtgaaaatagacctacctctccctgagtagaagtcacattgcaaagggtcatgcatacaggaatggaagaatctgtggtccatctaccacaataccctgtgattccatttatagaaagtagaaaagcaggaaaatccactgaagctgttataaattctttgacgaatgggcctggagaggagtatgagaaccatctgggttcctgatgtgttctgcttcttcatctaggtactgatgactagaatgtcagtttatgaaattcagcaagctattaacttaagacatctgaaactttttacgtgattacatacttgaattgaaagtctaagttacatagtggttttaaaagaatgcagttcatttcccttccagttacagttccatccatcaggctggtggagctgctcatctcctcaatgttcctcggacccccgcttccttctttcttgccatgccatcatcttgtcctcatcgagagttgaagtgttgctggcagtctgcattccagctagtggagaggatgcagaggggtagccctggacagcacattccttgcaagctaataaggtggaagttacacacattacttccactcacaatccctggcaagcactgattctcatggcctgcctagctgggaatgtagtcttagctgggcagctgtgccaaggatatgtgccaatttcagggaaacaactagcagtctactgcattttttttttaatggagtcttgctctgtcgcccaggctggagtgcagtggtgcgatcatggctcactcagcctctgtctcctaggttcaagggattctcctgcctcagcttccccagtagctgggacacaggcatgtaccaccacatctggctaatttttgtacttttagcagagataggaattcccatgttggtctggctggtctcaaactcctggcctcaagtgatctgcccgcttcggcctccaaaatgctggaattacaggcatgagccaccgcacctgccacagtctactacattactataataaagctgctctttaataattatgttttcagaaggccatttggaaatagtttttactcactgttggattataaaaacaccaagtgacccgagttctacacttttctgtgccaaatgaagaacattaataataagtatccatttcccctcaagtatatatatttaaatcataaaatgtaagtaaatgtatacatttatttaaattttaaatatgcaattggccaggttccaaggcttatccaccttcctggaaaaaaattgtctttggaaaattccttgatatgattttagaggcagcctctaaaatgaagtgttcaatgaatgttcaaggaatgaatgaattttagcaactgtatcttaggtgctgagagtatctgattagggcatatcagactaaaaaaagtcctctaaaacactagaatttactaatctattttctacttaaaatgcatagataatttgacatcaacacatgtacagtttatggaaacaattttattggtaacagaaccctactaactcatcagaccccactattttctcccgtgtactttccttctcctggcagcctgtcccccttccctgggccccctcccaactcattcccgtgaactttctgacttgctgcctctctcccttctgggaaaagtgtcagctgctgcactaataatccagcacatgctacgactgtccctgagacagctgctactgcccctaggcacttgggcaggggatctccttggagccagaaagttaataactggcttgaagatacaaacaatgtcatggtctatgactttgtgacacgatgcaaaggaaagcgttgggctttgagtcaggcagacccagattcatacctcagctcttcttaatatgtgtgtgctttgggcaaagtactgcatgtttctagccctcagcttcctcatctgtgaaatggaaatacaatacagagaatattgggaataacaaatgagaataaatatatttagccctctgtagagctcagtgaccgggcttcctctcccactatctctttgtctttccagagttgaaagaccctaacaaggaatcaaaggagagtgaaacgatgactaaaggtttagaggataagatctaagatggatgaaggaggccgggcgcagtggctcacgcctgtaatcccagcacttaggcgggcgatcacgaggtcaggagattgagaccatcctggctaacacggtgaaatcccgtctctacaaaaacacaaaaaaattagccgggcgtgatggcgggcgcctgtagtcccagctattcggaggctgaggcaggagaatggcgtcaacccgggaggcggagcttgcagcgagccgagattcaccactgcactccagcctgggcgacagagcaagattccatctcaaaaaaaaaaaaaaaaaaaggatcaaggaatggtaaacgtttattttattttattttattttattttattttgaatagagtctctctctgttgcctaggctggagtgcaatggcacaatctcagctcactgcacctctgcctccccggttgaagcgattctcctgcctcagcctcctgagtagctgggactaaggcgggcaccaccacacccagctaatttttgtatttttagtagagacggggtttcacctattggccaggatggtctcgatctcttgaccttgtgatctgcccgcctaggcctcacaagtgctgggattacaggcatgagccaacgcgtccggcagaatggtaaatgtttaatatggaaagggaacatttagtctggacagagaggacaataaataattatggctaccatttgtcacacctttcctggcatttacttatttatttatttattgagatggagtttcgctcttgttgccaggctggagtgcaatggcacaatctcggctcaccgcaacctccgcctcctgggttcagcgattctcccgcctcaggctccccaggtagctgggattacaggcatgcaccaccacgctggctaatttttgtatttttagtagagacggggtttctccatgttggtcaggctggtctaaactcctgacctcaggtgatcctcctgcctcggcctcccaaagtgctgggattacaggttgagccactgcgcctggcctttcctggcatttaaaatagctatgtccagtcttcagaaagccctgtggcgaggtatgatcatgaaacccacgttataaagtgaagaggaaacagatttataacttgcccaagatcatccagctaaatggagaagtggagattcaaagtcgggtctgctctttgtactagcttaagaacagactctcagctggatgtggtggctcatacctgtaattcaacacttaaggaggccgaggcagatggatcacttgagcccaggagttttagaccacaaaacacacaaaaaattagccaggtgtggtggtgcatgcctgcagtcccagctactcaggggctaaggagggaggattgattgagccctggtgattgaggctgcagttagccatgatcaaccaagagagggaagaaggaaggtggctgtcagtcactggtatcagagacaagcagaggcagagaagacaaatgcaaaatctttctttggctgggacttgtcagaaagggaatctccatgttggtgatggtgtcaccaacagcctcatgtgccttatgtgtgggcatctctgaaggcgaaagaactccattttccctggaggaaaatggaccagtgagcatgaggctgaggtctgatcctgggggccacacaggcaggcctgagcaccttgcccctcctcactgaagggggcttatgtctggggcacagttgactccatccctctcttttttcctgtatgtggttttttgttttttttttttcaagacaaggtctcattctgtcacacagactggagtgcagtggcacaatctagctcactgcaaactctgcctcccaggttcaagtgattctcccatctcagcctcccgagagctgggactacaggcacgcacgtacaggctggtcttgaactcctgacctaaagtgatcgcctgcctcgtttttcctgtatgttctaatgttatttcagggatcccctttgcctcacttggccattccaaaacatatatatgtttcatttatataaatccaaatgaaaatattaaaatgcaagtgagatatttttggccttaatctttgaatttcaatgttttcttatctgtagagtggtgtgctaactcctgtaattctgggcaatgcccatgtggttcttggctgcttcaagcatctcaggtctgattttcacacaagctcagcagcactgggctagaagggtaccgccctccactctgctgccactttgaatagaagtccaagctttcgctttcttgccctgactttgatcttcacattgctgaggagcagtgattgaagcttaatctcattgtctacagtccgtctccctatggagctgcactattctttcccatctcaattatttctgatgtaaccaaaacactcttctccccactgccttttttcttttgtaaagacttgcaaagggtcagttccagaggctcggccctgtgttctgactttcacagacagaggcctgccactcttacatttacaggtcatcatctgagcaatacactttttttgaagagtagtcctaaaagctcactaaaaagttgcattttatttaacttaaatagagaaccttatgtgtagtccatgtttctggactctatacctgatttgaatcactggacttaaattattggacttacaacactgatacatcttgtaaatgaaccaagcaaagaataccagccctacatcccactcccctcaagataactgggaaagacacaaaccatgctgaggaggagccatggtttgatattgtccagtgagtgtctcttggcctcagaagctgccacttcctgcagttccagcccttggctgtggtccattctgagtaagtgaattccctgttaaaacttgcacacaataaggagatggcgtcaccaacagccagagaagtcaagggcctgatccatccagagacaaggtgaaaaggcaggctgggggggaaagggggaccagcagttaggccaagagtgtagcatcatgaaatgtgatgtcttcatgagaaatgcaaggaaataagcatttgctgtacatatctaacccgtatgagagagaccccacttcttcagaggaaagctaccagggaggtcagaacttgggccaactccatgacttcaatggtagagaatggcacacggccaaacaggatgcataccatcaccaagaagtgtcggggtctcaccggctaaagacatttacaaaggtgccctcagtcacctgcccagagaataaagcagggcccaggcagggaaaacacacaaggatactgatctttagctgctggcttcctggggtcttgatgccttggagatgaggataatgggagagcccgaaaggcagtctttgggggtttcagctgacccatctccctcatctgcatcttagaggccactcttctaaaaactacaggcgcatacctggtgggcagggatctgtgccacttggtcaggtcaacatttccagatctcgttctccctggtcagatttatgtcattaagtctaaaacatctgctctttttcctcaagcaacagttacacctgagtggctgagaagccactccaggtaacagtacagcaggctgtccttactatggaagtttggcttgtgccacagctgtttgcagaatgcccacaagacatggtcctgcctctattctctgagggaacaccctgtctcccttgagaggagctgagttctagaagactgttgtaggacagatttggttaaagttctttaaggcaatgctgtttctgtctgtggcagaaccctgtgtccaggacagaaagatggaggcagtggggtgctggtaaaccagctttctggaagagaaaacaccaccaccacgattcatagcacttgttaattttcatcatgtaaatacctccatcatgatcagatttcagctaccaaaggtttaaaaaccagttcacaaaaaatcctgaatatttaacaatcggccagaggggctggctccatccagcagatccaggactctggggagctgggttgcataagacatctttttctctgatgctttgaaatgttatgagcttactgtgttcttaaacttcagctacagatcaaaacagggcagagactttctgaaagtatccttactcccccttaccctcaccaagactggggctttcattttagtccttgaaagaagacttgaaaagtcacaattcttgttctctttccaaatattttgagtgtcacaagttagaatctgatgaagaacttcaggtagaaagaagtaagagccaaatctacgtgagttctcaggaatgagtctatacaacatggtaccaggggtacaggggatagcatcttgacatcacctcttaagcatgagactggacagtggcagaagagggtggctttgtaatgctgagcaatgggaagaaggagttttaaagaaggttttaggactcatgtatcttttgaggagaactaacagcaggctgcttacctccagtatcttggttccaatcttcaccttgcaatcatgtgatgaggtagcaattaaaggcatcaaggccaatgctcttgtagaaagacgcaggatgcgacagtctggaaatgccccttatactcacatattctgtttgagtctgtcttaggtcccacaactgcaaagtaatgacatggaccagctcatagtcactttctagcttcatccatgaatatctatctccccctacccccatgatgcacctattccctcccttacctgctcacgtagctaccccttatcttcatccatccacagacccaacaacccatcatccacagacccaatgacccatccatccagtgattattttaagcctcaactatgtctcaacaaccctggttaagaatgtgtcatatgagtttttgcctttttagtggttagggaagtaaagctcccagtcctacagcatgatggtgttccatcatggggaacccatggggagccccaacaacagtatggggttgtttgctttcatggcaactcaagagctgccttatttcaacctctggcatctgtgggccctgtggggaccccgtagttagaagtaccccatagatataagtactctaggtgcagacattctgatttaatgcctagatgctgaaccttgatgtgtgaagactacgtctacaagagggaagtgccagtcagtgctgccagtcccactctcattgatacagatcgatcacagctggagaataatgttcagggaggagagcaaattgaattatgtccaaaaagaaatgaagttattggacagcatgttatccagggaatagctgtaggagctggaaatgtttccttagaaaagagatgctacattcaaaggctgcaacaccccaatctaccatttactagggtgtggtcttgtgcaagagatgtcaacttgccatgcctctatttccttgtctgtgaaatggaattataatagtacctaactcatggggttgtttttaaggattaaatgagatattacattaatgtgctcatcccagtgcccagcacacaagaaatgttcaataaaataggaggcataatgttctgtttgaatactagataacccttttaatggatattctacaattatgaatctaagtgctttggaggagcctaggcaatctattccaaaattaaatgtaaggaaggtacatgagtagggatggagtaggccctggaccaacactagagctccaaatttcctaaaaagcttgagctcttttactgtggccacgcctataatgggaataaatctggttcttcaaacagtccctccctctctaagctctgctgggagtagagacatcagcaggctggttctgtgtttagctcctcccatcttgactctcatcccattcctctttcctactaccaattcagagagccctaagttgtgaatgtttcttttattttctttctttatttttttgagatggggtctcccttgttgcccggctggcctcaaactcctaggctcagttgatcctcccacctcagcctctgaatagcttgactacaggcacatgccaccatgcccagctaactttttatttttttatagagacagggtctgctctgttgcccaagctagtctcaaactcctgggctcaattaatcctcccgccttggctcccctatgaatgtttcttaaatgaagcaactggaatgcaaaggatcactcacagtatgttttgaaagaggcctgagccattagcaaagcccgcctgtgtagcacagctacaggcatgggccagagtaagtgatctgttcatcagcaaccagatacctggacctcacacagtctcctccgtggcttcacagccttctcctccaaagccattgctgcaggagatacacttgtgtccaccacactgacttcacagtaggtctgaatgtgctgctttgcaggaaacatatgagctaccgcagcccccgactgtcccataatctgaaagagattagggcaggaaattagcttgtagtaatgtggctgaaatacacccgtattgtcccactaccaaaaaagtcttggctctttgctgctaggccagtcagattggaatggcatgatttacctaaaaacggcagcatgaaccagatcatctctgagactctaaagttggcaggaagtaaccaaattgaatgacatctgagttctttcattttgagatcagttaatagaaattgagaccaagcatcttaattgtacaagttaatttgtaatttggtcctttgagacactgctttccgtggacaaaaggatatttctgtgcctgtgattaaatttttaaaaagatacttattatgatatgggaaatcagtcatcattcagaattagtacaaaagatttacatacaggtcatggccagccttggctatggggtccactggggagtgtttgttttgctttttatttcatttttacctctttaccccattcctaccattttctaagggaatctcttctgagatccaaagtttctagttatcctctccggtctaagaactattggcttactgactcccctgatgctgatttcaaccctgcttccccagggagggcttcagctgaagctgggtgactgagaacaccaggagccatgcaggggtagcaaggagagccaggcagcccacagggtgggacaagcaagtgactgattctggggttaatctgaacaccttcacacagcagagctggctgaatcagatgctttggaaccatccaaaacaggggcttttacttggcctgattcatgacacacaacctctaccttaatgatccatggggccaaagcagagaggccccagcacagtgaagggcagaggaacagaaggctctgggaagggcagagcaatgtggagaatcagatgggaatggagccatgtatgcatgggagccacaaacctcacaagaaacactttcacagcgctcagtaagcccacctgagggttttatcttcagaggtctgtagtatgtatggttctctgggacccagcacaggtgagtgacctagaaaaagcaaaatgttcagaacttctccacaccagtcattcctctgctgtaattcctgtcaaatgtgctaactagcatcactgtgcctcttccaaggattctgaactagcaaattcatttacaggcatcttaggttttgcagatacctatcgtcatgctctacctgcatctcctaggttatcagcagcaagataacagctgggccagttggagcaccaaaatacatgcaggcaccctaagagtgcctgaaaccccagctgtgtggcagaagaacagctcctgttgtaaggtgggttcactgaaactctagccccaacacctcatggggtcaggaagagcattcatgtttctctttatccctgcaggtccctgctggataggcataaatagtttccaaaataacccgaaataacaggattttcttttcttccagtaacctccaccaaatagagggcatggggcaagcatatctgaccattggcagtcatcttcaaaattagaaaagtgactgggactgaaatttgacaaccactaaaagaacatctagtatgggtcagacacaattcaggtatttcacatctagtatctgaattcatcctctgaagaaccttagcaggtgatagattctccccattttataaatgaagacacagacactctaagagcttaagtaacttccttggataacataactggtaagtaatagatccatgattttaacctgagtataactgactccaaggctctccaatttataccagtctgctactagaaaacaactggtccttcaaaagcaatgcaattctacataaagcaaaaggtaatgcttatttctccacatgatgttacacatatgaactacaataagcataagctgtgaggtcctggaagacaggaactatgttcttggtcactaacctgttcctagcacagtgtctggcccacagaagaaacagaataatgaaagaaataatgaaacaccattttaaattccaatataagtgagtaaaatcattgtctggagcagaagactcaaggaacatctaatctaataaccctgagaggccagggtctcacagcaggttaggggacagcattgggacccaggctctaatttctgctcatgggcctcctgatttatctcccgagcctttcttcaccccatgctcctttctgctgccctgttctgtaccaagtttgagttcataccacgtcctggagacagatgctctttccacactctgtcctgtcaccacatcccacagaagcaggtgttgtcccgagagccagtgcacagctgtgatgagtctttggaaacaatggtgagaagaagcctgtgagtggggacctgaacggggcttttcagaaagcacaaaggcattgggaagagtccgctttgttttacctggactcacagccaatccggtgaccaccatggcatggccacacattgctgccttggttgtgaggaaccgtgcaagtcccacatcatgaccatcctgtcacgaaggcactgaagaactggctggatttgggaatacaggctacctgctcagggaaaaaacaaaacactgaaatagctctggtatgctagttggactggactttaaattgggggaaagatgatctgcataactccctccccacacacacttcttttctttttttttgagacggagtctcacttgtcacccaggctggagggcagtggtgtgatctcagctcactgcaacctccacctcctggttcaagcgattctcctgcctcagcctcccgggtggctgggattacaggcaccagccacacgcccagctaatttttgcatttttagtagagacagggtttcaccatgttggccaggcggtctccaactcgtgacctcaggtgagccacccacctcggcctcccaaagtactgggatacaggcatgagccactgtgcccggcccccacacacacttctcaaaagagtaatacctaacttgaaatctatgaatgcacagcatgggccagtctgaatttccacctttatcaatgttggctacctttcctttatgtagcagatttcctcctgtccttcagggtaaggttaaaaatctacctcctcagatcatgtcaccttggtgaggatgtatcccctcttgggcttcctatagaattcctcctgtgggattccttttgcacttgatcatcaccacaccccaaaaatggatgctgactgttatgacaggtgattctgttatacttacgaagaatttgaagtgaatctctgttccttttatgctttttaccttgaatacaactttgcttgatattattatcatcccaactcctgtctgtttgtttacatttgcctgatatatctttgctgacctactcttcctgttctgatctttccatcgtgtttctttttttttggaattgtggtaaatatacataaaacttaccattttaccatttttaagtgtacaactcagtggcaacaagtacattcattgttgtgtaaccatcacactatcatctctagaactttttcatcatcccaaactgaaactctacaacctttaaacattactctccattttcctctccccgcagccgctggcacccaccattattctactttctgttctatggacttgactattctaggtacctcaaataagcagaatcataccatatttgtcctttgtgtccggctcttacttagcataatgttttcagggttcagccatgttgtaacatgtacagaatttcattccttttttttttttttttttgagacagggtcttgctctgtcacccagctgcagtgcagggacctggtctcggttcactgcaaccttcccttcccgggctcaagcaaccacttgcctcagcctcctgaatagctgggactataagtgtgcgccaccatacctgactatttttgtattttctgtagagacagggttttgccatgttgctcaggctggcctcgaactccgggctcaagtgatctacctgcctgggcctcccacaatgctgggtttacaagcacgagcactgtgcttggcctatttcattcctttttaaggctgaaaaatagcccactgtatgtatttaccgcattttgtttatccatgaatctgtcaaaggacatttgggttgtttccagctttggctattataaacaatgctgctatatatatatatgtgtgtgtgtgtgtgtgtgtgtgtggtgtgtgtacaaatatctgttctatatttactaactgttttactttcaatcttaaagctttttgcattagatatgtcttattttttatttatttattgagacacagtctcactctgtccccaggctggagtgcaatggtgtgatctctgctcactgcaacctctgcctcccaggttcagcgattctcctgtctcagcctcctgcatagctgggattacaggtgtgtgccaccatgctggctaattcttttttttttttaatttttagtagacatggagttttgccatgttggccagctggtcttgaactcctgacctcaagtgatccacccgccttggcctcctaaactgctggattacaggcatgagccatcgtgcccagcctagatatgtctcttttaaacaatgtacaggggctttagtttttaactcagtaagagtactgcctttcaataagtgaatttatcccaattcatttactgctatcatatatatgtttgatcttgttccttccatcttttctgttggttttgaaaaacactttgtcatattttcattgtcttctttttctataaaattgtatatttgttttagagttatttttccctttatatttttaatttaaataatatggaacttaagttcttctctgatacctctgtatatgtattaatatccttaaactcatattctcaatgtattaatttcaaaagaaaacagaatctcctgtaaggaaaattttttttttctttaattagcacaattatatacttctggctcgttcccacttttgtaagtactctcttggatttttatctagtctattacatattattaatattttgtattttatacatataaatttttaaaagaattaaaacaattaatttcttctcatagccctcgttttgacaattctttagacataattctgtgtttaattggttgaaggctcatacagtgaattcagtttggaacttctttaatattcattggctttattatcatcattcattcacattctttattttttattttttattttttgagatggagtttccctttgttgcccaggctggagtgcaatggtgtgatctcagctcaccacaacctctgcctcctggttcaagtgattctcctgcctcagcctctcgagtagctgggtttacaggcatgcgccacacacctggctaattttttatttttagtagagacggggtttctccatgttggtcaggctgtcttgaattcctgacctcaggtgatctgcccgccttggcctcccaaaatgctgggattcaggcgtgagccaccgcacccggcccattcacattctttaataatataccttcaactatttattgaggaatgctttgcatatggcaagattttacaaatttaagaatgtcttcccattcctttacacatgaacaacactctccgcacatacagattctttttctttcttcctttccttcctttctttctttctctttcttttctttctttccttctttccgtccttctttctttcttttctttttctctcttctttctctctctctctctttcctccctccttctttctttcttttgactgggtctcgctatgtcacccaggctggggtgcaatggcacaactatagctcactgagcctccatctccctggcttaaacgatcctcttgccttagcctcccaagtagctttgacataggtatgcaccactatgaccaccgaatatatttgtatttttatttatagtagagacagtcttgctatgttgcccaggctggtcttgaactcctgagctcaagcaatcctcctacctagcttcccaaagtgttgggattttaggaatgagctaccctgcctggccaatttttacttttaataatattttttcctcaaatattttctctcccagataattcttctattgtcttactttttttttgagactaagatcttgctctgtcgccaaggctggatgcagtgaaatcatcacgctcactatggcttcaacctcatggactcaagtgatccttccacatcagcttcctgagtgctgggactataggtgcgcacaactacatccaactaattttttaattttttgtggagatgggtctcattatgttgcccaggctggtctcaaattcttgggctcaagcaatcctcctgcttgccttgccaaagtgccagcattacaggcatgagccactgcacctggcttgtcttatttttcaatttcttgtttcatagagtacatgttctcttaatttatagagagtaaaaagcataatcaaattttatctttgcttcttgagtagttcttccttcaaagtgtattttcatctgaattagcttgttatatgtatatttaaaaaaatctaggcatataggcctcactttggatccttctgcttattaatcttttcatctttgaatgaggataagtccaatttttggcagtaaatcaataaggcttgatacatgctcaagtgttacatgcacacacacacacacacacacacgtcacacacacacaagtgcatgcacacacactcacacacagtcaattctctctcactttcttccttttagtccaaggtctactataacttgacttgtcatgctgaatattgatggttgatatgtcttgatttgtcatcctgaatattgatggctgattatgtcttgtctaaatagctgaactacaggtgttcaccaccatgcctggctaattttttttatttttggtcaagatggggtttgctatgtcccaggctggttttaaactcccggcctcgggcgaatcacttgaggtcagggttggagaccagcctggccaacatagcaaaaccccatctctactataaatataaaaattgccgggtgtggtggcacatgtctgtaatcccacttacttgggtggccaaggcagaagaaagcttgaacctgcgagatggaggttgcagtgagctttgatcacacaacggggagagtgaactctatctcaaaaaacaaaacaaaaaattcctggcctcaaatgatcctcctgcctcagctcccaaagcactgggattacaggtatgagccaccatgcctggccagtccttcggcatttagggtgaccagaagaaggagaagcaagctggcagcagtctcaattttgttacattgtctgttttactggtaaacaatctatatctttagtcctcatctttctaaataaagggctgttggaggaccattcaggaccagctcttttagtgacatctgcactctgccaaatatctggggtaagtgcattacagcatggtgttctctatcagtctagttcagaacacaatgtatctggcagcaaatatcatattctgtgctatgggattgtggctgatgcctagtttcattataaatgagtgtgtatcttaatttttggttcatttaggcggacttcagagcggggaattatataaatggcattctctatcatttttgctggaagctcactctggtctgtaatgctatctaacaaaaaatttttatttcattgttattgaatgttcattaaatgtccccaactagactagaaggtgctgagcacagggattttgtcactttcctagctatggtaagcacagggtaagcccaagcttcagtacagtacttgttgagtcaggataggtcaagagttgttatcagctgtgttctgttactacctgtgctattaagggcttaatgacaaaagaaaaattgtgttcgatatgcctgtacaacaactaagtgaatggtttgctctgtttctcctgaagtaggatttcacagcatcaacaaacctttgcatttttccttaagaccaaagattcaatcactcttaatatctagaactatagctatcctttattcagttccagattgccttcataataatcatttgaaaattaccttgtgatctcatgttcatgtcctttgaaccttttcaccacatttccagttttccaattatagccacaactgtctgaagagagtgaagattgtagtttcattactcaattcttgttaaagtgcactagcctctactgcattctcaccttactttctccctcctcactcactccctctctgccaggaacttgctcaaagcattcggggttccctgttgtggccgtccctcctcacgtgccctcctttgagtttcttttctttcctcctggttgttctctgtctccctccgacactggaccctgctctaaacttactgatgggtttgggctaacattccccaaggagaactgattcccctgaggttctgactgtagatggtgaaggagaattccacataaggttagatttgttttcccttagtactgtatttttttgttgtggtgtttttttttttttaatctaccatttcaagctggcgcagtggctcatgcctgtaatcccagcactttgggaggccaaggcgggcagatcacctaggtcgggagtttgagaccagactgaccaacatggagaaaccccatctctactaaaaatcaaaataagccaggtgtggtggcacatgcctgtaatcccagctactaaggaggctgagaaggagaattgcttgaacctgggaggtggagattgcagtgagccaccctgcctggcctagttttaagacaaaatactgccaattaaactatgatacttcgatgcatcctgatttcagaatgttaaaatgtgaaaagtgaaaacagggccaggcacagtggcgcacgcctgtaatcccacactttgggaggctgaggcgggcggatcacctgaggtcgggagttcgagagcagcctgacaacatggagaaaccccatctctactaaaaaaaataaaatacaaaattagccgagtgtgtggcacatgcctgtaatcccagctacttgggaagctgaggctggagaatcgcttgaaccaggaggcggaggttgtggtgagccgagatggcgccactgcactccagcctgggcaacaaagcaaaactctgtctcaaataataataatataataaaaataaaataaaatgtgaaaacagcatcttagaaccagtggaatgcagtatgcaaatggaatttgaagattctaaaaggctatgaaaatgagagacattattattattattttttgagacagagtcttgctctgtcacccagctggaggacagtggcccgatctcggcttactgcaacctccacttcccaggttctagcattcttgagcctcagcctcccaagtagctgggattacaggcaagcgccatcatgcccagcaatttttgtatttttagtagagatggggcttcgccatgttgtccaggctggtctttagccctgtcctcaagtgatccgcctgccttggcctcccaaagtgctgggattataggtgtgaccaccacacccggcccattattagtattattcactacaaaaagaattagcagttgtactccagtatcccagctgtgagggctatgatagatcctaatatgaaggagagaaatgtgagatgggaggaaggaagacaaaaacacagggaggaatcatgatgcataccagtgtagagagctaaaagaagagattagacagttccttttgctgacaattaactcctgtgtctccatgtagtgtaacatgggattggtggtaagtataatctttgccatttatagaaagcatgtgggtggcaggcatagtgttaagatctcacctacgttctttgatttaatctttaataaccacctgtaggtggcattattattcccacttaacagataagactgaaactcaaaaaaatttaaagactgtccaaacgaatgggaagtggccaagcagggatttaaatccagtctttctaactctaagccaatatttttacacttgtcaaccctgctccagaaatgcaaatcctagacttcctttcaaatatcttcctttccctgcaataaagttcatttcccgggaaacactgcaaaccccacctatctttccctccagagacacaaaggtctgagttcaaagcagccacgacagagacggtaccatgtgagctgggctatactcttgaaaagctttagtttgaattctctcttctataattcatcaggcctgctaaaaagagtatagaaaatgagagacccaatggcatgggagtggatggggtggggtggggtggggtagggagaagaatgtgggttaagaaggcaattcaggccagataaggagaaatatttaaaaaggagaagagaagggagacccatttacattgtcagcaatgtattatttactctgaaaatgtgcagaatgactgaaggactggaatctgataaagggggacctgaagccaagaagccaggagtctttctttgctcacactagcaattaatcctgaagattagggcccctctgtgtatgggtgcagacactagctaataaacttgactgtttctttctttgagacagagtctcactctgttgcccagactggagtgcagtggcacacatggctcactgagccttgacttcctgggctcaagcaatcctcccacctcagcctcccaagtagctgggacacaggctcatgccattatgcccagctaatttttgtattttttgtagagatggggtttcgcatgttgccaaggctggtctcaaactactgagctcaagcaatctgtccccctcgggcttcaaagcgctgggattacaggtgtgagacagcacacccagccctgactgtttcttatccaaagaaaacacactaaactattcagggaaggccaactattcagggaaggccatcaacattgccctgggccttctctttcttcagtggagagttttaatggggcatgataaaacctgggccccaggggaggattgcagtacccgtatttataagtgctgtgtttgagtttgctttgctgttccccatcacgacacaaaacctaaacgaaaccttctgtggaggagcttgtttcagttgcacctgagtagcagcatcccttgtggctgctggaagttgtgttccctgtttaataaaaaaagaatacatgttgttaattttgttaggcacaatagtatgatgttgaaaataaatcctttttagactaattaattgtatgcttttgcttttcctcctcaccctgcttcacacttacagcctgaggttgcagacacacaaaaacaaaactgattttaaaaaagactaagaagtcctgtataagtaaaacacagaattgccatacggtccagccattctaatcctgggtttaaggccaaaacacagaaacagatgttcaaacaaaaatttgtgcacaaatgttcacagcagcactgtcacagcagccaaaaagtgaaaacaactcaaatattcatcaacagatgagtggagaaacacatgtggtcaatccacacaatgaaatattactcggccattaaaaggaatgaagtactcgacatactacaacatgggtgaatcttgagaacatcatgctaagcaaaagaagccagacataaaggctacacagttcatattctatgtatgcgaaatatccatagttggcaaatctataggacaaaaagcagattagtggttggcaagagctggaataaggaagagactggggagtgacacttaatagatacagatagaatgtaatacagagtatcttaataggctagatatagtttgatatgtgtcccctccaaatctcatgttgaaatttgatccccaatgttggaggtagggctagttggaggtgtttcggtcatgtgaccagatccctcatgaatacttggtgacatctcccggtaattagtgagttctcactctattagttcccacaagaacgaattgttttaaaaaagctggcacctccctcctcacctggttccttcctctcttgccaagggatgcctgctctccttgcctactgccacggtggaagcttcctgagccctcaccagaaacagaagcctgcgtcacattttcatacagcctgcagaaccatgagccaaataaactgcttttctttataaactacttgcctcagttatttttttatagcaacacaaacaaacaaagaggcagagtttccttttggatgatgaaaatgttctagaactagatagtgatgatggttgcacaacaatgtctctatatataaatgtcactaatcataaattttatgttatgtgcactctgccacaataaaataaatacaagaagatgtaatcaaaaataaaaaataatttacactactgaagcttcttgaaaaagaaagcctcagttattctaaaaggttataaccttccttggttgttggatttttttttttttttttttttgagacggagtctcgctctgtcgcccaggccggactgcggactgcagtggcgcatctcggctcactgcaagctccgcctcccaggttcacgccattctcctgcctcagcctcccagtagctgggactacaggcgcccgccaccgcgcccggctaattttttgtatttttagagagacggggtttcaccttgttagccaggatggtctcgatctcctgacctcatgatccaccgcctcggcctcccaaagtgctgggattacaggcgtgagccaccgcgcccggccggattttttttttttaataatttcactatggcacctctcagtgtgccagaatcatgaaatagagttctgagatgctagaaataatgccactaaatgagacaatgtaggtaatgacctagactgcagttcttaaagtgtgatccatggaacatgggggattcctgagagcctttcagggagttgggaggacttctgttttccaaccacatctctcagtgaggcccttcgctccctccctccttccttcctctccttttctctcctccttcttccttcttccttctcctccttctccttctctttctttctttttccttctccttctcctttctttttttttgagacagggtctcactcttcacccaggctggagtgcagtggtgtgatctcactgtaccctcaacctcctaggcttagtgatcctcccacttcagcctcccagggagctgggactacaggcttgcaccatcatgcccgctaatttttctgtgttttttgtagagacggggtttcgccaactcctgggctcaagcaaccacgtgccttggcctcccaaagtggggccttcttttcttttaatacctcaacataaacatagattataatagactgaatgcagaagcagatatcagagtccaattgtctcctttttaggcaaacattagaaatttgcaaaaacataaagcaataccacttcttccaattaaatatttggttttggaaagtatatttatttttcataaaatgatgttttatgttaatatgcaatagtttattgctatttcaaaattaataagtaaatgtctttaaaatttgttttttaaaattaataattaatttacttatttattttatttttttgagacggagtttcactcttgtcacccagctggagtgcaatggcgtgatctcagcccactgcaacctccgtctcctgggttcaagcgatctcctgtctcagcctccagagtagctgggactacaggcatgcgccactacatcaggctttttttttttttttttttttttgtatttttagtagagacagggtttcaccattttttggaaggctagtctcaaacccctgacctcaggtgatccacccaccttgacttcccaaagtgcaggattacaggcatgagccaccgcacctggcctcatttatttatttttaaatttaacaaccctgcatgtggcattcaatctcagttttaatgtcaaatgatggtagcagagcaggattgaactcaatctataacctacataaacaaaacctctttgggggttcttaattttgaggaggaaaagaagttctgagaccaaaaagtttgagagccagtgacttagaatttaaataatgtaatattggattatatattagaattaaaagaataatgaaacattttccagatttacttgttcatccccctcaactaacgaggctagaactgaaaagaaagagaatgaattatgcattcaaggtgctcctccactcattcagggaacacctcctaagcaccttatttgtgtaggtcctaaccagttgctggtgaaactgaaaaaaagagaaacctgaagatgtgaccagcatgaacattgctgggaccgaaggaacctaacgaaggaccagtctcaactactccatgtcatgtgtccctgcgactggctgtgatatcagatagctgagggaagtatggggggcagtgggagcacccgtccccatttcttctgaggttctgcctaaaagttctaggaaataagtttcttatgggcagaccaacctaattctaggaagaactgtctacaggaagaactgtttacagaagagaacagagctaaaacgcaccaacttaatattctcattcataccattagcattaaaaaaatggagtttccagaagaatttcagcctacattttgagaagttgctagaattgacttcctgacgagataggtaaccaatacagaaaagcacaatgcaatggaaacaatgtgagtggcatcaagaggctaggatctaccccagccctgcctcatcccattatgtgtccttgagtagctccattcccactctggcctcagcctccccagctagaaaattaggacactatacgaaatgatttttagtgactatgtgtataatgagagaaggtctctcgttattcatctttgtaccccaagtggcttcacagtactgtacaacaaaaatacttgtgaagtggcaaatctaaggtcccttccacttcgatattccaggattttctataagaggccacaagatgtgctgagaggcaaaattcaggatgttttcaaaaagtttgggatgtggtattgtttacagatagagggtgcagggcttcttattgccagcctaacctatttttcaacattgtcatcaaaccaatgacagatgccattcatagtctaggtcactggaaattgcagatgctataaatggattagctctgctcaaaactgattgtatagtcagagagccatacttcccaagtaaaccatattcatgggacattctaaggaaaaataacttttagaattacttacccccaaaccaataggatcttcttggttagctgccctatcaataatttgtaatgtgtatcctttggaaaatagttcaggcagccacttcttaatctcttaattagtgggaagccactgaagttaatctcttctctgtctaagcatgtttgcactgaaagagatttacaaggtaaataaagaccttgtttattaaagagatggttaggtgtagttttcctcacaaagaaagaaatattttacaaaattccaagattatctctctcacatttccacattcaggaaagtatactatagtgttaattatatatctatttttaaatatgcaaaatatattaaatacattgttaaacattttgattttgctcataacatagtacttctattcatcaaaatcttgagttgactgcttatttcagagtttactgcttttgtgaaaaaggcaatttctcctttttaaataattctcctagaatttgagatgggagagcttttcaaaatcaccatatataaccatttatttatttcaagatctgcagagtaagggtagaaatattatttgctcaaaattaaactaagaccatttattgaaagatctgcagaataaggatagaaatattatttgctcaaattataactaagtaaatctcttgacttctagtccagaatttccattataaatgtctacaagaataaacagctttattgcattttaataactcaattttaagaattcaattaaattctaatattgattgacagtgcagcttattctgagaattaagggcagcacagaatagtcagaacacatttcattaaatgcattagtgtctgcattagataggactagttgtgaattatagctcactgtggccttgggcaagttgctgaacctctctaagtctcactttcctatgtgtaaaatagataataactctatcattgacttctgtgaagattaaaaatagcacttaaaaggtaccagaactgctctatgttttatatttattaactcattttatctattccacaagcctctgagatctgttactacaggttgagcatctaatccaaaaatccaaaatccaaaatgatccaaaatcaaaactttttgagcactgacatgacattcgaaggaaatattcattggagcattttggatttttttttttttttttttagacagaatcttactatattgcccagactggagtgcagtgggcaacctgggctcactgcaacctccacctcccaggttcaagcaattctcctgcctcagctcctgagtagctgcgattacaggtgtgtgcctccatgcccagctaagttttgtatttttgtagagatggggtttcaccatgttggccaggctggtctcaaactcctgacttcaagtgactgtccacctaggcttcccaaagtgctgggattacaggcatgagccaccgtgcccagcccatcggagcattttggatttcaggttttccattagggatgctcaacccttaagtatatatgcaaatattctaaaatctgaaatttgaaacacttctggtcccaaacatttcagataaggatactcaacctgtatggccattttgcagatgtgaaaagtgaggcacagagatatcaaaagtttgctcaagtttatactgcaaataagtggcagagctgaaacttgaatccaggcagtcaactccagaggccctgttcttgaccagcatattatactgcatctctacaaaagctggtcatataaagcttttggttcaatctggcaagttgttaacaataaattatggttactagcagattgcaagattaacagtgatcatactggaagcagcattttcacccttgttaatactgtcataatgcacaaatattaatgcacaaatatacacagagaacacatacaaacggatatataatctagaggatattaaagctgaagcaaattatggcctctgatcagagtgattggacccataaagctaagaattcattatgttacatagcaaggcaattaaaaagtctcaagaacaaatatatgaatttgggttatatctacgttgttgtaatttatcatgagtagaataagaaataaagtactactaagttatcttccactatttttattaggaacatgtaatatacttgagaggggtataatttctggttcatttttgtatctatgatttgaccttagcctaggagaatgaaccaaggcaaataaatacctgttgaatgagtgaatggaatactaagatgaagagtcggcttgtggtacgctattttttttttttttttctgagatggagtttctctcttgttgcccaggcggagtgcaatggcaccatctcagctcatcacaacctccacctcccaggttcaagcgatttccagcctcagcttcctgagtagctgggattacaggcgcctgccaccacgcccagctaatttgtgtttttagtagagacaggatttctccatattagtcaggctggtctcgaactcccatctcagttgatccgcccaccttggcctcccaaaatgctgggattacaggtgtgagccacgtgcccggcccagtggtacactttttagggacccaacaacataagcgcccttttaaccgcccaacaacatatcccttagagagcagtcaccctgtttcatcccaggctccagacccaaaaggctggagaggacatgggaaaatctacagattcagttatggctctggatgtccctgtggttccagttggaaccaggcctcggtctgaatcccatcacttctttctattccaatctctttccaaaggccttgggatatccagtagtcactctaaaccaccctaaacagaaagcaggaattctcttttaactctccagtgcaatattccttgatatacaccagtacctatccgacgttctattccatgaagaaactgggactcagagggctgtgacttgctgaaggtcacagggcagagccgggtggactggaccttatttccctggtcccgttaatgcaaatgctgatatctatctccctccgtctccccaaatctccctctgcacacttctgtcttacactctgggagacaaggcatctttagtcgccaaaacaatgctcaaagaaagaaaagtatgagtagaaacaccggaagctggtctggttcgaccctctaatggtacagataggggaaaccgaggcccagggataagagggtcttgcctagagtcacacagggagccagttctaggccaccactctcacggtgcctcaaattttggggacgacttgtgtgcagtttttcctttctgtcgcttcagatggcaatgctcctctccctgcccattatatgaacaactaaagcttaatttgtttttgtttttgtttcaagagacggagtctcgagtctcgctctgtcacccaggctggagtgcagtggcgcgactcggctcactgcaacctccgcctcccgggttctagcagttctcctgcttcagcttcccagtagctacaggcgcacggcaccactcccggctaattttttgtattttagtagagacaggtttcactgtgttgcccaggatggtctcgaactcctgagctcaggcaatccacccgcctggcctcccacagtgctaggattccaggcgtgagccaccgcgcccggcctaaagcttatttttatgtgtatgtggaaagcggggagaagagtccccgaagatgggaacctagcgccaccagcccaaggttggccctcataaccgctctccgcttcgaccaaagggcgagggttgcccgtcctagtctgccgctatgcccctttctcccacctcaggctcagtacccaccggtgggctcggggctggagctggggccggcgggaacgcggagcctgggggtgggaacagcctccgagcctcccgcgcctccgcccctagcagcaggcgcacgttgctagggcgggagtgctggagaaagcctccgggcaccctcgcaggccgccgaaccgcagttccgttcgcctaaagctgggagggaactgagcgcccggcgctactctcttcgtgatcaggtccagaggagaggacgcttggcccaggactccgctgccagaagaatctagacaatccaagcaaaacgggtacctttgtatagctatggagaaagcacttaataaaggtcatcttttaaattattggtcgctcagacatcgtgttgccgtatttctttggagtttccctgatttcgactagaaattcctcctttggacctcccccagctccccactcctctattcctttcgttttttttttttcattgaaccattacgcctagtaccatagcaagaagagacccctcagtaccttcttgagatccaaatgggaagaagttgtagaaacacagtttttacagctgcggtcgcattgctaccagactagagtctattatctccgtattcctggtgcacagtatggggcttggtatatagtaggggcttgttgaatgttgttgaatgaatcaatggcagggatcctagccaacatttatttatttttaagacggagcttgctctgtcgtccaggctgaagtgcagtcgcgcgatctcggctcactgcaacctctgctcccaggttcaagcgattctcctgcctcagcctcccaagtagctgggactacaagtgccgcctccatgcccggctaattcttgtatttttagtagagatggggtttcatcatgttggcaggctggtctcgaactcctgatctcaggtgatccacctgccacagcctccaaaagtgcgggattacaggcatgagcctccgcgcccggccccaacatttattttgaaccctagtagggcctctgcagtgttgatctggcaaaacagccttcaatgaagatttgtggagtttctgaaattgggtgcctttgagggggtgggaatggtgagagaagtttgcctccacatactggctatgggtctgttttccagtccagggaagggatcccctccatggcatccctgatgaagtatcgtagccctagttgatgctcactctgtaatgatgggctgattactttctaagctagtgactattgttgggagatttccttctggcaggagaaagtatctacccgtatgccacttgaaacctgatcttcgctcagaaccaatggctctccttacagacttaatccctttcccccacaacgcctggcaagctacaaccaggatagactcactgctttgtcctgggacactgggctaggccagtgcagctacagaggtgagttactagatctctgcacccaagatgttcctgctctgggatgtttttccctctgagagagaggctttaggcttcaggcacgaaagactcccaaactggacctgtagccaggcctctccctgagtcggacctgtatatccacctgccacccgcccatcgcaactggcagtttaaaagacacctcattcttgacatgactcatactggaaacatcatctcccctcaaacctgttccccctcttttccctgtaagtgctgggcactaccattcaccaacacccaagccaaggatctaggagtcatttgtaactttacccttgcttcctcgttcaagacaatccccgagacttctcaattctgcctcccaaacattataaaaataaaaaccttctcttacctaccagctggattcaggccaacatcagggtgtgatagattaaaaacgaccacaactctttgtagctcttcccatcaaggctggctttgtaacttgttttgaccaatagaatgcacaggagtgacatcgtgggacttctgagtttaagcttcaaaaggccttgcagtttctgctccatcctcttggcacactgccagcatgggaagaggaccaggctagtctgtttcagagactggcccatccaatagctagcaccaaatgccagccatgtgagtgactgttgcccatgctgagtgcagtggtgcgatctcggctcactgcaacctccgcctccttggttcaagcgattctctgcctcagcctcctaagtagctgggattacaggtgcgtgcccccacatcccggctgatctcgtatttttagtagagacggggtttcaccatgttggtcaggctggtctcgaactcctacctcatgatccgcccgcctcagcctcccaaagtgctgggattacaggtgtgagccactcgcccgcctcagtgttataatcttatgggaccaccaggtacatgcagtccatcattgataaaatgttattatgcagcatacgactttatcctcagcttagaggccatctccctctctgccccaagtcttccctacccattcctccccttctccagactgggttaactattcttcttcgtgcttccaaagcccccacactttacaccacatagtataacttttcatttacttctctcctcactcaactgcaagcaacagaggcagtgactgagtctcatttacacttgtattgttgtgtctaacccagggtctggcacagcactgcaacagaactttcaacaattatggaaatgtctatacctgcattgtctaatacatcagccactagccctactagctattgagcacttgaatgtagctagtgcaactgaagaactgaattttacatgttatttattttaattaatttaaattaaatagccacatgggcctagtggctatggtattgaacagtgtagggctagcacagagagatggccattgaatatttttgaacaaagattacaagggaaagacagtcatgacagaccttaggacatgatagaatgctatgggtataagcaacataatttcatatcgacctctcctgctcctcacttcacatcccctcaactttacactaccagtgcctttgtcttagtccatttttgctgctgtaacagaatactacagactgggtaatttattatgaacagaaatgtatttggtcatggttctggagactgggaagtctaagatcgagaggctgcatctggtgagagccttctgctgcattatgacatggtggaagacatcacatggtgagaatgcaggagtagtgagggaggggacaaacctatccttctatcaggaacccactcccacaataacatcattaatccatgacgagatcagagccctcatgatctaatcacctcttaaaggtcccatctctcaacactgtacaaggggaattcagtttccagcacatgaactttgggggacatgttcaaaccacggcagctgtggctctgccttatttaaatataatcctagtttttggctctttatggcctgagttgttgttctctcctggacttgcccagattgataacaccccttctgtgacgtgggctggtctaagagccctctggagaagagagctgttctcatctagtttagtctggcctgagcagagagactctgtcattgggaggcttggacttcatcatagaggacccatgtgatctgaatttgtcgcatggcaggctgccaaatccctcttaaaagtgacagttaaagctggctgtactgtgaaacaccccaggaggaaaagaagccacagtgttggtagtcttattgctattcctggaaacctgcaaaccccagtcagatgacttccagccctggcaccagagatattggatcagtgtctggaaggaaggaggaatggacacaggcccaggcagaagggggctgggctgggccaggccaggccccaccaggcaggcagaaaaggctgggcctgacaccgaggagcaggcctgagggaaataaaggctagggaagaatagtcctttccaaaagactttccaaaatgttcattaaaataaaagtttaggccaggcctggtggctcacacctgtaatctcaacaatttgggaggttaagggggaggatcacttgaggccaggaatttgagaccggtctgggcaacataaaaagactcagtctctacagaagttttttttgttttatttttatttttatttttttttgagacggagtctgctctatcgcccaggctggagtgcagtggtgcaatctcgtctcactgcaagctctgcctccggattgatgccattctcctgcctcagcctcccgagtagctgggactacaggcatctgcaccacacccagctaatttctttcttttttttgtatttttagtagagacagagtttcacgtgttagccagggtggtctcgatctcctgaccttgcgatccacccacctcgacctcccaagtgctgggattacaggtgtgagccaccacacctggcccagaagttattttttttttaagttttttaaaaaagatccaaaccaaatgttataaatgagcaagtgaaagggcaggttaggagcaggttgtacacataatcccaattttgtaaaataaatatgttccagcttgtatcattagtgggagctaatgaatgctttaacctatgtgtgaggacctgtaagtatatttgtagcgtttttcacacattgtaaatcgtgtgaggttctttgaagattggggagcagagttcatgtacagaaagacatcttgcacttgctagtcctctgtctggaaatctcctccccagatgtttcatgccttgcttcttccagtgccacttacctgagaggacttctacaccatcctttctaaccagcacctccatcatgctctttttcttgtaatacttgaatctttttcatagcccttacattactgacattatattacatatccatttgttgcattttatttgtgcatgaaagtagatttgttcttcttgactgttgtatccccagtgtctaaggcctggcacattggcaggggctaataaatctgttgaatgactaaaatgtaacaatggtgtccattcttctctccctagctcgagtgcctgaagttcaagtacagccctgcctatgcccatgaagcctccagaggtcccctagagctctaagcagctttcaaatttttttgacctcataaagaagtacattcattctccaggtgcatatgtacgtatatataggccaaagacaaaattacaacaaatgtagttgagtgacttattggcttttattagcacttctagaatcaggcaacacctaattctataaaacagaagttccaatgagctgaacagaggacatgggctttataggtagaaaagagctggaaaaaaaagaggattactcatttcaaagttactttccttttagggttaaaacagagaggacttcctatcatgccagctaattctgtactgtttggggattttaatatgctctctctttctcttttctctcccaatttcttggaagttcagataaactacttagttttggtttggtgaagtggcatttagcatgagtaactccattttgttttggtttggtatggtggggcctagtgtggaagccagtccaaaacaacgaccttccatccattttgtttacctatatatatgtaattgaaacacaaaaaccttactaagagcatgttttctgttctttattcttttctttttttctcttttgagacagagcctcactctgtcacccaccacccaggctggagtgcagtggtatagtctctgtcactgcaacttctgcctcccgggttcaagtgattcttctgcctcagcctcccaagtagtgggactacaggcatgtgccatcacgcctggttagtttttgtatctttagtagagacgggtttcaccatgttggccaagctggtctcgaactcctgacctcaggtgatccaccttcct

SEQ ID NO: 2913 - DNA, 100000 bp, Homo sapiens
gatgatcaacaacaatgttttgagcacctactctgtgtagggctctgtactaggtagacctagggaataacaatggtgacaaaacagataagagctcctgccctcccaaacctcacttttgcagtaaaagccctggcacagcggctagaatgtcgcactcaataaatattacctatgtattagctaataataccaatggtattattgttgtcattattccttcctttctttgagcccagtttcctcatttatttagaatgtggactgagcaaaagtttcttatgatgccacctcatcaagccttaaaatggtggtaaagtagatgggcgcggtggctcacgcctgtaatcccagacttcaggaggccgaggtgggaggatcatgaggtcaggaaatcgagaccatcccggccacatggtgaaaccccatctctactaaaaatacaaaaattagccaggtgtagtggcacacgctgtgatcccagctactcaggaggctgaggcaggagaatcgcttgaacctgggcggcagtgttcccgtgagccgagatcgcgccactgcactccagcctggagacagagctagactcctctcaaaaaaaaaaagaaaaaaaaaatggtggtaaagtgggcattaccaacctcatttttggaagggaaaactgaggcactcagaactgaatccaggctggggatctaaactcaggtctcttactcctggtctccagatcattcccaccttccaggactgaggaaacataaaaaggacaggaattcgactggggatgtgaatgctttaaaaatacttttccttctccacgcccccaggggggaaactgaagtgtccatgttgtgcaccaatttccaaaacaccctctcagtatgaggccctgtagctgggaccattcccagtctctctggaaacccctatcctagcgcctctggagagtctgcaggacggtgggagctgatgaaatccccttgcaacaaacagccccaatcactgttttaaatgcaaaccggctggactttaggaggcaaaggccccacgtggacatcgcctcctcctgcagaagaactgtgagacgactgccccaggaataaacccagagtcccaaaacacataggttccgctcccctgtttgttagtaagtaaaccagacttaggccctctctaacagtgggcagccattgttttattaacaaaacagcccccaaataaaacccaccaattccagagaggcgcctggaaaagtcgtttgggaagtccctgtatgtatctaactttagtctttcatgttcagttccagcccatttcttctccttctgttctagaggacaggaacaatgtctcttttactgcagcctgtctcagcttctctctgctccaacatagcccaggtttgttatcagcaatttcccttccgactatctcagaagcaggtctttaaacataggtaatgatggactccaatcgtcatttctttcaacaaaagcccgggaaaggagctttggaagtgtcgtctaaggtcacgagcaagcagactctggttctgcctgtgccagccccatcacactggggagagcccagctcgcgcctccctgctgtgcacccttgggccagtcgcgccccctctctggacctcattctccccgcaggtgtaccaagagggaactggacttatttttgcagcccgttcagttcctaccatgtcagggctgcctacccgacactggcccttgttctaccttcccccccgcgacaaaaagagaaaagaaacttgcgttaggcgtccgggaagcgcgcgcggctccgagggccgccaggctcgcggattgttgctgggtgaacgaatctcacacaaatcccagacagaaagcctcacctcccagtaaccacagcaacccgggccacgcctccagcccaaacacagcccgaggccccgccaggcccacccccgagctcccccgggacccctcccctccctgccaccagccccagctggaagagaaaaagccaacgcccccattgtgcagaggtggagactgaggccggagggtggagatgaggaaccccgcggccggcacggtttggactggggcccataccgcccgtccagggctcctcccattcccggagcggtgatgcgtctccttccccgtgcgcgtggggtttccacgtggaaagaccgaaagcagcgccgtcccagtggaacggagcccactggcgctgtccactctcctccccattctcccgacggagaaactgagtcccaacgagggacagggaccaccccggacgcccgcgagcccctccccgagtctcacctgctggcggccgccgagcgcgggtggtttcctgagttgagcggcaaacaaaggcctccaatccgggcgcggggcggggcggtggctcctttcataatccctgaggcccgcccgcgacagcagggggcggcccggggggggcggggcctctggagcgcaccaatcaccgaaaggccgccgccacggcccgcccccaggaactcggacataggagcgcaaaccctgctgcaggatgaaaatctcagacctgggaggctgtgtgtgcctacgcaatcagccccaccgcagacccggagatcgaggcccggtctgcggagggtaaggcattacgcaagatcgcacagagtggctcacgcctgtaatcccagcactttgggaggccgggcaatcacctgaggtcaggagttcgagactagcctggccaacatggtgaccgtccccccaccccaccagtctctactaaaactacaaaaattagctgggcgtggtggcgcatatctgtaatccagctacttgggaggctgaggcacgagaatcgcttgaacttgggaggcggaggttgcgtgagccaagattgcgtcactgcactccagcctgggcgacagagcaaggctccatcaaaaaaaaaagaaagaaaaaagaaaaaagaaaaaaaaaagatcgcacagagccacagtgaggagaaatcacaaacttccatggctgaaacggcctgcttagtaacagtaataataaacttttttgatcacaaattatgggtcagacctgttggaagctcttctgctgttcagtcgtctccttgaggtaggtaggtattatcaccaccgcccccaagtatattcttgtccaactccccatcggcaagcatggaaacccagcccgaagacggacaagaacttttccaaggtcccgctgtgatgcagcacagacatcataccttgtccaccacacacacaccttgaaggatgcacggtgtcaactcacctgggctctttgccccagctctgccacttgctgccagtgagcctcaggcaaagggattcatacccacatcttatgcggttgttgagagtaaataaataaacataatggcagcccgtcagaaataaatcagtggtactaatttaaagagcaccttgaccgaccctattaaccaagagggttaataagtcctgatgcaagaagagacttgcccaaggtccctcatccagctcatccaaagttgaatgctttggaatttttcctccaggtagaaagcacttgccagttcccaggttgcctgctactccctagacacatatttagtagtaagtttagcagcagcttctaccactaagggcctgctctgtgaaaggggcaaacattttagctaatccttctgggctctggcctggaatgtcagtgtaggaagggcccaaggtgtttttccacacaggtcatggaagtgaatgtttttctgggtttgagcagcatggcggtcctgactcttgaacagaatggggaaaccgggcttggtgcattgtgtaacctgcccagcattctccagcaagggagaagcagaccctgaactccattccccccaacccccactttggcatcatgagtaaaaatgtcagggtcacaggtcatgtggccaggatggacctctgacaaccctccccccactctcccagtacttgaagctgcttagcctaccacactgggcccttcaaaagacaccaggacaggtgcaggaaagagcagaccaggcttaaggcagctgtgggtccaaacttgtcctccttagctgtgtgactttggacactaactggacctttctaagaccacttgcaaaggaatgtttttaggttaaaagttctactggaggggaacccatacactcaatgggctacagcctcagagtcaggcccaggaattccagagcaacaagtccagaaactcattcctgtcctactccttccaagtacagacatggggctggactaacagctgctgggggtggcagctccattgttagtttcctatggctactgtaacaattaaaacggcacaaataccttctcttacagagggcagaagtctgaaatgagtctctgggttcaggtccaggtgacagtagggcagctttcttctggaggctcttgaggggagaacccatgccttgcctttctctgcttctagtggctgtctacattcctcagctcgtggtcccttcctcatcgtcacagcacatcactgcagcaacctgtttccatcatcacacaccttgtcttctctgttaacatctttctctgcttcccatttataagagcctggtgattatactgggtccacccatgtcaagactttaatcatgtccgcaaaatcccatttgccatataaagtaacattccaagttccagggatttgaatctgggtatctttgggagccattatttagcctaccaaacccttttatagatggggaactagaggctcagagaggtaaaattacttgcccatgaccacacagctttggagttgaatgccaggagatctgaggcctaacgaagccctcctgctgctaggtggagggtcattccctgcagagggtcaacagcaccctgtcaggggatggcaggggtgcctttgaaacaccagctgcctcaggggaatccatggctcaggtctcaggtggtctgcccaggcggaaagagaacaaggacagccaagaacaggatctgggacaagagcatggaaccaactgtcctaacccacctctggcagaactctggacacagaactggacaaagcaggatttctcaaatcttccatcttccagacaaatattgaggacagaaggaataagcactggggccgggactgggccgtacagtagaccatgtttgcaaccttttcctccgagcccatcccatatgttttgcctgacacccgctgtcctaggctactggaacagcttgacccacataggtagagagcaggagtgattgggaatttatggcctctctctgtaggctttgtctaaagactgacaggcatcaagtccagccctctggccttgagtggagacaactctaggcctagtgtacgccctgggatcccctgggatcaggctgaagctgccttctgcagactttgcctgaaatctcaccttcgcttgcttcctccccttccctgtcctgcttccccacttccttgctggtctgccctgagggcactcttgacgattgattgggtacaaatccttatctccaaggcagcttctggaaaggaatgggtgcatctgagatttaaaacattcatgcacattgtgcattctgcctcataatatacttgtggttttaatctaaaaatattatctgtaaatagtcaagttttgccttcaagccttcaattagaggctccaagatgtgagtgtggctcaagcacccctgcacgccccaccgtgtatcccattggagccatgcgggcagtcggggtggtggtctgtggtgctctgactgcccccacctgtctgcccacccctccccacatggaaaccccagccacccaggtaaaccacacagcacgctgcgtctaaccttgttcagatttctttattgaaaaattaaagtcataagctctgtatataatacaatgacactgctggtcacctgcaaggcctctgggataggctgggggtgcagagggagctggggccttggggtccccaggggcatggggagggaaataaataataaacaccatggggataaggagccaggaggaatgggggtgtgaatggggaggtgctcgatgcttatttgtggactaaaggtcttgcaagatgccccctgactgggggccgtgtccatgaattctcgagtgactcactttggacaaaggctcaggcatctggggatgggctgggtcctagctggaggggggcagcagtgcccccaacccaacctggagaaaccagcactctgcccttccttttcctttctcctgtcttgcaacccacttgtcctgggcgcctactgtgtacccagtacagcaccagttctgacctgaccttctgtctgccttgtcctgctctcttcctctcccagttctggtccagtggctgggatggaggggggatgtcttcctgccaccctggccatgcagccccaaccccgcaagagcttgatgaagccaacggtggaaagggactgggaccaggggctgggcagtggtgggagccctcaggccttggcctctagagcatcacattgaactcagtgaccagaaagtcaatgtgtcacggtccttagtcttgaaggcctcggcgataatgcgggcggcctcccggtgctcctgccccgaagcgtcagcccattcacttccagaatcacgtggcccaccttgagctgcccacgttgtgagctgagccgcctctctgcagggaggagacacagggcatggggtgcccaagggtagacaggcctggctttgaccaccaactgggtcagtcccaacactgccaagcaggcagcacaatctgagtgtccacttctcggattaggaaagctgaggcccggaagagcaaaggtgaataagcctaggtctgcccttgagtgccgtgttacccatgggagtcgcaaaaccctggagtgctgagaaagggcctttcaggggtagggagagatggcaagtggggcccctggggacatcctgaatagtgacaatcctaggcaggggctggcgggtgttggcgccaccctcgatggcgtgcccagggtggccgcacttttcttcacacggaccagagtggacgtgggctccagaagtcaggctgtgggtattaggaaggacaccactgaggccttcgcagttggcaggcctggccaggggctgggccgggccgtgacaccaccctgggtcagcagagctcaggctccagccctgttcgggagcctcaggtgtgcaacgcactaagccaagcacttgtgttcttggctctttaatctcaccaaaatccccgaggctcaggaggttaaggagcttgcctaaggctgtctggtggtgcatcaggacttgaatcgaagcctgactccgaagactgtctcagccacctggccatgtcaaactgagaggagcttaaagattcccaagaccaatctcagcctcagcccctagtgtcaggcaaaggcagagctgaaactgggcctccagattcctaatccagtgctcctccaggacgtcaaatccctccagttatagggagctcactacctccctttgtggtcacttgccaagctgaccctggtcccgggacctcccattctgtgcctggggcccgtgttcctctcagccctctgctcctcctcctcctggctcaccggtttgttggccccatctgtgggcctctcgttccgaggagctccttgctactcctgctcttggtggacaccgactgccttcctcggcctggggcgctgcctctgcctcgccagcatccacaccactgtcctcgcttagagtctgcccgctgtccgaagctgggagagcgtagaggctgctggagaggggaaaaggaagagagaagcagcttatatgctggggtcagggagggctgcctggaggcagtgacggagatggaggctggaaggctggggaattccccaggcaaagatgggggaaggaatgaagagatcgtggggccagagggcaggtcactccctgccaccctctccacctactcaagacctgtcctttcaaccagacctggtcttaaggctgtgacttccaggacatctgcctggatctcccagttcccagccactggcataatataaaacagaggtcaggaggcaaacctagcccacagatgtgggtgttttctttgttttaaactcacataatgctaccaatttttaatgatgaaccaacacattcaaattagaagatttatataagtaatttctagtttcccaagaataaaagagaaattccaccacacctagcctgacccctgcatggcccctgcctgagccgagtggtgggcacatgccctccagccaccagtcacttcactatgtgtgtaacagcctggcccctgagtttgagaccctaacttaagaacacacctctggagtctggcaggtcaggtttgaattcccactgaccagctgtgcaagcctgggcagtaacagagcctctctaagcctcctatgttctccttctaatacagaaatgatggtgcctaccactggggtgattgtaaaaactcacagatctgatgtatagaatggagcagtccagggatagacttgtgctagactgcctggctccagggtgtgggttcttaacctagggtttcaaatcaggggcccggctgttatacacatagtgaagcagcgtgggttgactggtgggctggaggcatgtgcccaccactcagctcaggcaggggccatgcagaggttcagaccaggtgtggtgaatttctctttttctcttggtaagctagaaattactactttctctctctctctctcttttttttttttttttttgagacagattctcactctgtcatctaggctggagtgcagtggtcaatcttggctcactgcaacctctgccttctgggttcaagtggtcctcccacctcagcctctgagtagctgggactacaggtgcccaccacacctggctaattatcgtatctttagtaaaatggggctttcagcaagttgcccaggctcctgaggtcgaaatcctgacctcaaatgactgcccgtctccgcctcccaaagtgcttggattacaggcatgagccactgcacctagccgaaattactactttgtatgtctcagtttgttcatttgtaaaatggagataataatagtacaacctcatagggctactgggaggattaaatgagttaatactataggcaaggccctttgacactggcacaaagtgcttattgttagtacggctgttagctcttattatccctgcatgtcagctcagtgccagctctagagacagcagtgatccatctgtgacagccctgggtcttctaccacgtctgcctgctctccctcagctgcctcccctcactaggctgcgagcgccagagcctgcattttgcatcttggtctgtgcaggcgctcagggaatgtcctacggggcctatgtacactgtagccgcaagatggcagcagaatccaacaaaatgctcccaactcactcacaggcggagctccacagctttcagggtggggaggcaggctctgcccttccctctaccccacagccatgtcctctagcaaaccggggcacagcgtcagctggcctccccaagattcttcctgcacctgaccctagacctgccaggggtccagagactgccacttcagtttccagcatctactcaggccaggccatggcggacaggaagggaagccacccctgccctccacgagttcagtcctctggtgaacacagggtggccagggtagggggagctggagaaggcaccccgacgctcgcacaacctggcaggactgtcactgttatctccattttatgatggggaaagcaaggtgtagaggcagcttgtccacagtcacacagccagtcagtggcagagccgggattcaaactggggttccaactcccttcgccactctggccctgagccccctcaacaagtagctggtccccccctcactgtgtcatcaggtagactgacctgaagaggacagggacccccaaggaccacagagctggccttgctgtactcactgcgcgtctggggcagcgccctcacttcattgacgtctggccgctgtcggggcggtggacctccaccatgacaaagtgctggtttgtgcctgtctggtctggtggccagagggtgatgggggcagaaggcagcccccagccactgtggcctctgcagagggcttttcaggtgcgggggtgactggacccgtgggaaggggccgatggggtgttggttgccagggccagatgggcgtccagcggcctcttggagctggggttggcaggggagacggagcatagatgggggaagagggcaagtcctgtgcagaggaggtccctggggtgggtgcggtgccgctggcgggctgcggttctgtggagccgagaagacagtgcccgagcaggaaggcatgaggaaggtggctggaggtcctctctccccagcttccttggctggcctagtgggaggtcgtgccttgggccagaggtggtgggcgaggcagtggcttgaagcttgacagcccctgggagtggatctgacatcatcctgccaaaagacccaacaggcggagaaggagtcagaccccatccgcctggaagaggggaggccgagcagctgagtggtgccaggcccagctggaattctgtcccactctaactgctcttggccacgctgctctgaataatgcaacacctgagtggaaaactctcccctgcatctcggcagctgataagcgttgggatcttggcgggtgtctctggggacacatcattacctttgggaactgaagttcttggcatcagccagagcttgtcacagggaacagacttcattagagacacgatgaagaggatggaaatacaaaaaatgcatttatttggctttctttttagggggtgatcttgagtactagaggcaagaggtatgaaaggactggagagagatggacaggaggagatggatacatgggctggggtgctatgtggccccaggcaaggcacacacctctctgagtgcacctctgggcaatggggaaaagcacatctacccagcagaggtgggtggtgatgtcaaaagccacgtgaatactgttagcacagtgcctgcgccacagcaggtgacagtgaggggcagctatggacactgtgactaccactcccctctgcctaggtcaacaccgacacctgcacagctccaacaaccttccagtcaccatcctaaaggctttacttaattaattactccatgccacgaacttatggggtaggtatgctatgatcatcatccccactttaccacggggaaactgaggcacagagaggctaagaaacttggtcatactgtggccagccagccgaaggccccgcctgaagtcaccagaggcaagtgatcctggtgcctgctagagatactagatggtgagcttgtgcacagacctgtagctgggtgtgagagctcatggcagaggcctctgctcctttgccaccctgtgccctttctccgtggctgtcatggagaggagagagccaccagacctgagcacaccagggagagcagaaccaaagggccagccagggccttaccacggacactctgggagggcgttgatattgccctggacagcctcgccagtttcctccaggtccagagtttctagaaatggacgagaaagcaaagtgagcaaacagaagctgagaagggaacactggttgttctccagcacaccaaaattgaggaagtcttaggacacctccatgtggttcatgtgaccctgacatacctcacttcatcgaaattcactttacccattaaaatgaaggtcaatttgctgctggtcactttgaagttaagttttctttgggactttctgatcattttcaggcatccctgaactgccagagatgctggggcatctctagcctgggctgggaattcctgggtttggcacgagcgctgtgctccacagtcatgcctccaaaagccaaggcctctctccaccacttgcgatgaatcccaggaaggtgtgaaaatggcaagagagaagtggatggggaaagtctctcctttttaaaattctaatggttttaatcccaaggtggtggtttaaggtttaaatggaccttttttgcaaaaaacgtctatttctttcttcccttcccaattcacaagaagaaacccaatgctccttaagtgacactgggctgccaaaaggccatttgtgggccgtctatggggggcccacggagctcctctctgagctgggctctcttgagggctaagggagccagttctctcggcccagagcccagaatggaaaagagcttccaccactgtgatgattagcttcgcgtgtcaacttactgggctaagggatgctgagatagctggtaaaacattatttctgggtgtgtctgtgaggtgtttccaggagagatcagcatatgaatgggtggactgggcaaaactcaccctccccatgtgggtgggcctcatccaatccactaagggcctgaacagaacagaaaggcagaggaaggcaaatttgcgcgctcttctagagctgagacatccatctcctcctccctcagacaccgggctcatggttattgggcctttggacttggactaaaacaaaaccaccagcttccctgggctccgacttgcagatggcagatcaggggacttctcaacctccatcattgcgtgggccaatccacacaatatagtataactgattgcttctctttctctggagaaccctgctggctacataacacttggctgaggtctcaactgcagtgctcatcagtactgagcagtctctgaagctcaggctgataaggggctggggacacagaggtgggacaccaaccctgccattggtagctcaagacaatggggtcagtcgacaagcaaacaagcaacagggagactgcagagagagcatccatgggcaaacacaggcatataatgcaatcgggggaggggttaccacggaaggcttcctgaggacggggcacaactcaaagctaggtcttatgagtgagcagagcaaagaagggaacgaaggtgtttcagacagaggaaagggtgtaaagcaggaatggagataggatgtttgagaaccccgagcagctccacagaagtcaagcatggagctcttgcacttaagcctgagggcagtggttgccatggagatgtggtcaagtttgccttctacgaagatcccctttgctcacatccttccagccaggctggaacaccacggatgtgtcagccttcacactggctgttgtctctgtcgcgactcttctgcttggctatccatccacaaggcatgctgtcgctcacctccaaaacctacccacctgtcacctgctcgacaaggtgtaccctcaccacctcagctaaaatcgtaacctcccctcaccccactccaccttgctttatttttctccttctcattgatcaccatctccaccagcagctagggagtcatgccagaaacacatgtcaggtctctctgcagctcaggaccccaagggcctcttcatctcagttggaggaagttccaaaccctactcattgtgcctacatgccgggccctttcctgctactccaacatcacgagctcattactgccccagggcctttgcactgccgctctcactctgcaccacactgtggttcattccttcactttgtttagttcagactcagcgaggccctcccagagaagccctgtctaaaacagtactgccccacccccatcccttctatcccgttcctgctttggttttctgtgtaacacctatcaccatctgactttatacttttgcatactgtctgtctctctcaataggatataaactctgagaaggcaggacatgcaatactcggtcctcactctctcctcacttttcagaacagtggctgctggataaatgtttataagcaaactgatgaatccatgaatgaatggcaggatggatgaatgaatgaatcaatcacctagccatcattggaggaggccagagcaggcagggagttgaggggggtggtgctgcaggcactgcagtgagcagtaatgaatgtctgagtgtgaaggcagcaggtggggacagaaggcctcctgacgccatacccctaagacagagagaggccagtcatgccacacatatccccatccgacccacaagatgctggctcgggccttccgggtcagagccctgcaaacccagagctcccatctggtcccatgatgcttcaggggcatagtcaggcaggggcaactgcccccatttcccacaaagttgaggtttacatgcaaaccttggtcctgacctgttaactgcacactgcctccaggaatctgctgctgacagcccctgtgatgcaagcgcggtatgtggtggttggggggatctttcaaaagggcgagggtgattgggctgctctctcactcactgattagtgacactggtctggctctgccaactctgaggcttctttgagctcacacccagttctgccgcttgcagcgagtgatggtaggtaaatccttcctctgtaaaataggttaacagcaatacctgccttagcagtggacatgttaacacttacaaagcactcagaatagggcctggcacaatgtacgaggaggtgactgttacgtgcattgggagactgggaggccttgcaatctgccccagcaagagatgaaccgcgagacgtgtcctggcccatatgacaactaggatggaaaggaatggcagcccctcacaccacctccctcctccaagaccataatgagtccaatgctccctggaagtagtccgccaggcgcgttaaggtgaacagtgaggcagtgattgacatgcattcacttcctcaggccaacattcatagtcctggtgtcagcaggaggcacagagaggggtcagagcctcagaggttctacagcaaagacaaggggagcctctgccacattcaggtggagccactgccccctgcccaggaattcaacctgcagctgatcctgggggaagctggggttggactcagatgacagtaatggtaggaccaatgccgtgggatcctgccctgctctggcgcatcaggggctttgcacatcagctgtgcaggaagctcttatcaggcagccatgactttccagggaagctcagggaggtgtgactttttcccagaaagggtattagagaactacaaaggacctactgtgcgccaggcccgtgctgggtgttttacttatattatctcatttgatcctcccaatgaccctgtgaggcggcactaggactgtcccttgtcacatcgattacacctgaagttcagagagggaagagactgtccaaggtcatctgaccgttctacagaaggtaaggtttctaacccaggtctgggtcacccaacgcccatactacactgtcccaaccccagaaatgaacagggccttgatgtcatagaacctgaggcccccatgagcaaccctcttggaaatgagagagaaggcagccatagctggcctgtcctcagcctcattccctgctactaactgcatcctggggacatggcaggtggaggggagggttgggagggtgaggggtagacgagggatgaatatccagccctgtcggggaggctgaagtggagcaaatggcagacgggtcggagcccagccctctgagcccagccctgccagctccatctgctgaatccagacgctcaggagtcccaagtccccgagccatgttccttatgatctgaaatagctgcagacagccggctaagaacccgggggatgcatcagcagaaatgccgcggaacaggcttccagaggaggctcaaggtcagagctcatgcaggagctgggcctgttactttcaccaccacccacacacaatcacagccacctgggccccctccccctgtacccacgaggccagagcctcagtgagggcatagacctggcggctccattaatcctgccagatgggcccttcacccactctacagctgaggtgactgaagatcagagcgggaaggtcatctgtccaggtcacacagcaaggacagggcagaaagctgaactctattcaaggcccgactccatatcccgacaaaaacctgcttcccataagagccaagatgacctgctgtcattgttcttccactccttcctcaaacctgtggcagttcagcaaattccctttttttcagagaaaagaacccctatttcctgagttggcccaatcagggcccaggtatcacagaagtgtggtcttggggaacgtaaggggatgaaatgaagaggggcaacctttgcggggtggactcaggggcaggtaaggtcccctgcatgatgtcaaagcctgaggctgcctgggcactgcggggccacctcagcaaatgcagcttctccctcctagcccttctcctcccctcagcccaattccgggtttctaggccccttcccctcattacaatgggagggctgttacataaaggtgctatttccagctctttgtcgttgggcttctgtacttctgtcaagccaacagggtcccccaactcccatcccaaaatgaccagaggcctaaggctgagtggttctttcttcattctgtatgtggggaaactgaggcatgagtcacaaaggcctctggatattcgccagtgggggcctagattttgcctgaaggggcgctgacaggaagggagataaaggcagagggagaaagagattagagggagaataacagaaagagagaaaacagaagattcagcagaaaaggcacaggcggagagcaatgtagagaaactaagaagcaaagaaaagagcagggcaagtccggtggcacggccagagctgggctgggaagggagcttgtgatcccaggaaaggctacgggggtagggagatggagggacagggatgtgaccagggagagccaggaagtcctggcattcctggggggcagtggggctccccagagtgaaggtcaggggccagggagccagagatttgtgggacaagaccctggaagtgtcagtcatgcggtggcgacggggaatcattggacctgcaatctctccaagcacagggtaggggtgtaagctgtgggccaaagggaaaggtcagaggtgcagaatgggagagaaataatcctgaaagcactaactgggccccgcactggctggtgtggctgagatcacaagaacaacctcaacactggccagcactgtgcttttctaccagcctgtctattctggctatcatatttgaccaccaaatacaacattagggagctctctgggaagcttctgcatgaagccttcctgagatggggcagagtcactgcctccttgtaaccaggcctgtgccctgctgaacagaccaggcttcctcctgcaagctgaaacctgctccacgcctccctccctgtggtcttaagaaaaggacgtcagtggaagagagagtgacccagaatctctagaaggttaaggcaagcagagccctcaggataaggcggaaaccagtgctcctgggagggaatgcaggcacccgagaacttggctgggggaactgtacatcttcatttccattaacctctaactgaaaggccacgtttcctttcattgctaacagagcaacaaagcctcagaggaactggtcatggtcacccacagagagcactgatctttcactcacattccagctgctacagatgtcacaaaatcccatttatgcacttcttggcttcacattacagcagttactgactcactgctcaaccctgttattgctgtcctaaagtagcatgtttacgttgtgttttcatattctgaaaattatatcaggtatttcctgatgtaatttgtcatctatgtattgtgttttattttaaacatttaaagctttattctaagaaggggtcccagcattcaccagcctgccagaggggtctatggcacagaaatgaggaagacccccagtcctaagcagtgctttgtccaagttcccctttgatagcttgggaagtcctcactcagagggcagctgggccagcccatgttcaaacaggctctgacctccatgggcttggctctgtttggtggaagagcttccagcaatcccaagttgtcacaggggaaggcaggtgttccataaaccgctacaagacagcaaagcactggctgagaggaatggtcctattcaggctccaggtaaagctgtggcggcctgagaggctttaatgcctctgggcaaactgatgattctggaaggtgcagggggccatgctgaggcctccctgggatggagtgggctcttctactcaaggagaagacacctatctcctcgatatgccctctctgggcactcagcagcttcctggggtgggggacaggaggtcactggacaggaacaacagcctctcctggtcacccgcatccaccttgcacctctgggctcttccacacagaagaggcagcttaaaaaatgtaaacagagggctgggtgctgtggctcacactgtaatcctagcactttgagaggccaaggcgggaggatcccttgaggccagaagtttggaccagcttgggcaacatagtgagacccccatcactacaaaaaaatgtaaaaattagcttgcatgggagcatgtgcgcctgtggccccagttactcaggaggctgaggtgggaggacccttaagcccaggagttcaaggctgtagtgagctaccccaacagagaccctatctcttaaaaaaaaaaaaacacaaacaggatcacatcacatccttactcaagattctccagagtatccatggttttagggttaaacacaaacgcctcccgctcctgaccctcgcccctctacccctactcctgacactccagccctactggtctccttccattcttctgagtggccatgtgccaactgctcagggccctcagacatgccccaccagctcctcagctgtctcacctcatctattgctggctgtagccaacaacttcagatcttagcttcaacctctctccccaagtaccccagatggtcggggcccatgtatgttctcacaccacccttcagcccgctttatcagagtgtgagtatggagatgatttgagttgaggtagcctcctccactggacttgatcagcttcaagagccaggctcagcccctggcaggcaggagatgctccacaaaggctgctgcatagaagaaggatggctgaacgcatgactgaaggaatacatggagttcctctcttaccccgctcatggatgagaacgattctctaaaccatccaggttggaccaaagtcaggatgcaggaggaaaaataagccctttgacagttttctacttgtttctgaaaaaaaaaagctggtttgacagtgaggggccctgcagctggaggggcctgagacaagcctgagcttctcccagttcactgtgctgcagcaaggagggaggcacagaggccacagaaggaggccaatgcagagaagcactgacagccaatctactgccccctattcaccttctttttgggggacaagaggagggaagaaggacagtaggccttcaggggcagggatcctgtccccagcatccttgggcaggggctgggagcctcctccaggcatatgacagggctggagcacaaactctctcaaatccaggtggaaaaagcctgagtcaagtccagggcaaatcccagctgctgccacctgacctcaagggcatttgctccttggtacaaggctggccttgacctctccaatccccttttctctacaatgctctgcagtgcctaaatgctttggctatgtatcctcacccaaatctcatgttgaattgtaatccccagtgttggggaggaatctggtgggaggtgatcggatcatgcgagcagatttcccttttgctgttccgtgatagtgagtaagttctcatgtgatctggttgcttaaaagtgtacaggacttccccttctcttcctcctcctccagccatgtaagatgtgcctgcttccccttcaaacttccacctaattttaagtttcccgaggcctccccagccatgcttcctgtacggcctacagaactgtggtcaattaaacctcttttcttcataaatttcccagtctcaggcagtttcttacagtaggtgagaacggattaatacagggcccttttccaacctttggagtagaaacagaatgggctctccacactccacacctgcatatccactcctgatctcactgaatcttcagaacaacccaacagctggtcttatcagcccaccgtacagatgcagaaatggaggcccagaagacacaagcatctgcccaaggtgacaaagctactactctggaaagcagaacccagctggtaggatccagaatctgtgcaattaagcccctctgccacaggcatgctggcactagatgaagaattcagaaataacaggcaggcctttcttctttcactctgctctctcggccaacatctttatggggaaatgatattgtgtgaaggcagcataaaatgctcagggctggctctctgttagacaaaggaaaatcaacacagtttgtgaatgggggaaagctggatctgatttcctttgattgacttgtctgctttgaggggaaatggctgcagaatgagccacatttaacctgggatcaataacacacagcatgatccgaggaattcaggctaaatggaaactggctccatttggggccagtgctggggcatctcggtcatcgatagccagccacctgatgtcatcttgcccaactgaacacagaacaaagaacattttcctaccatgtgggaggcgaatgtttagaaggccgcatagtagagataatcctgcaagtggccggggagtgtgtgctttccttccagtttctgttccacacttctgggcctccattttgcaccagctctcgctgtttattggggaagggaaacccacgaagggttaaagcaatgtgacaagtgatttagcagaggtatgaggagtgtgtgagctccatgcggaagggattttggccatgttatgttttgggttgttgtccacattttagggttattactagcattactgcagcaaaagcttactaatatgtggtgttgtagaccacacagcggcacttgtggtgaataaaggtgattatttcaagctctttctctctctggaggaatgctgcagtcctgttcaaatatacacagaagaggtgggaatatagagttgtcattccttgctgtgcctccccaaatattttccagcacctcctgatgcagagaagactctcagaactggaggagccatggggtcttccgtggttgtacagatggggagactgaggccaagagtgagtgaggggctttctgagagcacactgcctgggagagacagagtggagtaccggtgtgggggtccagactcctggatgggtcccagtgccctgcgtactctgcaggagggcttccacgtggaggaggtttgtctgtggccacacatgcagccaacatgggtgtgcatggctaagggactcccacagtccccccggcaggaagggtggtacctccatcaggtctataaaccacagcagtcgctcctgaggagggtgagcaaaaggcagtcgctcctgaggaagggtgagcaaaagggcctccaatctgagcctgctgtgtgtgggggtggggagaagaggggttcccaggagacaacagggcaggggctacccagccacaggaggagctggtgcctgcagaacccatcatcacatctttagcaactcagctgcatgaccttcccaggcccttcgtggcccacagacctctgggtgtggctggttcctggaattaaccagttcaccttggtacaaacccactcttacctattctcaataatcaggggaccctgttaaatcgaagtcagaccacatcagttccctgctcttacctgccaaggactccatctcactcagagtcaaagtcctcagcatgtctgcccccgtactccctctgctctggcctattggccgcctggaattctctgacattctcttacctcagggcctttgcacatgcagctcttctgttggaaatgctcttctcccagatgttggcatggctctctccctcaccacctgcggtcttgactcaagggtcactccctaaccaccccacccctctccagtctcccttgcctgtttatttttctccctagcacttgtcatcatttagcttactgtgtatttcagttatctattcctgtgttattgcctggcattcctgctgtctgttcaactccatcgtggaaaggatttcttggtgttcaccactgtatccccagaacctcaaaatgtacatagcacacagtaaatgctaatatttgttaacagaaaggaaggacaagaagaaggaagggaggagagaggcagatagagacgaaatgatgcttaacagggagctggtgagatccttcagggaagaatcacagccagaggcaggggtaacaacagagctcagagtcaagcaagcctgggtttgaatcctggctccatactcactagccatgcaaccttgggcaagttgcttctcctctctgagctttggttttctttttgtaaaatggggatcacagcagtactcacaactcctagctcctgggatggtcaaagagatacgaatggaaagcactaccacagtgtcatagagaacattcaacaaatctcagccacattgttattaataaaggcccaaattatgggctagggtctgtgctgagcactagggataggactcaatggtaaccgcacgtgcgatcgctgccctcaagcagtcagcagtcacattgggaactgggaaacctgtacaggcttttataataggacataatgaggcaagagctgtgaccaaggaagcccgggggcaagaggagccgtggcctgaaagtcactccccttgggaggatcaggaagtcttcttggaagaggcagcttctgagctgagggctgaagcacacataggagaaagcaggtcatatgaagtggggagaagaacattccagacagaaagcacatggcatatgcaaagccaaggggtctctcaacatcacgggacagaaattaccatcctcattttacagatcctaaactgagctcagagaggtgaaaccacttcctgaggtctcacagcaagaaagtggcagagtgggatttgaatggacgggattctcactgcagagctcaggaaacctgatgacctggaaaacagtcagcaccaataagaacccctggtccccaccaggactgggtgcagacatacggggtggcagaaaaggccacagccccctaccccggcccctggttaagggactcccacagtcccaccggcaggaaggacggtacctccatcaggtctataagccacagcagccgctcctggggggaaggatgagcaaaaggcaaaaagaaaagatacatcaaataaatatttagggaatggggggtgcagcaacaaccccttccccaaatgcacacgcgcacacacacatgcaaaatccaccattctccaaaccccttttctatttaccttgaatgctttgggcaggaataatggagagagggagggaaagaccccactgccatgaccagcatcccttcattctgcctgcctccttgaagaaacaggcgagtccccactgctctaaagaaaagacatttgtccctgctaaagggccttaggagacagtcatttactttggggcgaggctgggatccgtattcccagagagagaaacagctcagagaagggaagtgaattgtctgaggtcacacctgctaatgaaatgcagagcttcaggagggccctgtttggaagcctcggttggagaaggcctggacttcagggaggcccaagcctgtgatgtcagagaagctgaatctgtggaagggagctctggactgtgcatgtggaggtacctgggtgggatgaaggtcaggggggcggtggcagtccttcagcctagcactttccaaccctccacgagtccccaaggccctgggtacaatctccaggtagttttccccagccagggggctgggtccaaaagaaccgaggcttcacctgccctcagggtgtggccagcatttctggatgctggtactagcaggttactcaccctgggcccacaggcatcctctcatttaatcctccaacaagctggaggaagtagtatcactgtccctctgcaaaagaggaaatcaaggcacccgagctcaagtgccccttccacgctgcctttcctgcttgcacaattttctcttagaatccttccaggggctcaccctggtctaggagagtcctaatcctgacatgcatgtgccacctgtgggccatggactttcacagtcacaaattctgagtccttcccacctcagaaacttggggaaacctttaggaccactcttttcatctgtcccaaaaaactccctgtataaaaccacccttggcctttctgaggcttgccttccccagggtgccccaatttgcagtgagagcccctctgcagagcagggccaacttccacagctgggatctggactggccccagatggtgcttctcagtaggggagagccccctgagctgggacaaggttgctgtgggccagtgccgagctgggggccctgacccctgccccagagcccttgccaggcaagatagtcacctgactcctggcactccgcctgatttgccctcagggcttcgggctgctgaagtcagagccagcaaggaccccaggcattttatccagaaactgaagaccagaaaggctggggctcaaacctagacctcctgcctccagaccaaaacacatcccaccccattcactggatatttcatctctgattctaaagggacactgtagaagcacagtctgcagtttcccaggttttagagcagtggctcatggctgctgagcctgaacattatcaaggccaatctcagtggagcctatcttagagagaaacagtcatcagccaaggacctgcacccttaaaccagatcctcacctaaatgccatatcaaagtatgtgccagagcctggggtgaaggacagcctcttccctgccccagaagtgatctgcttgtcccagacatggaactgcctctgctgcagccatgtccagccctagaggaatgcagggcgacttgtgggacatcccaggaaggggatgagcacccttggaaatgatggcaactcaggatgggaggataggggtaaaagagtataaaggaatcacccccagaaacccagaatcccagggctaaagaaagccacactaggagttggagcttgcaaaagagaagggtgcatgctcctgggccatttctggtggctgcaagctcatcctcactcattaaccatctgtgtttataaccatggccatcctgcacacctctgagctcctgctctcccacttaacaagacagctaataccgtatctaccccagtctgagattcctccagaaagagctctcagttcagcatctgggagcaaccgcctgctaagaaacattactctccccactgcctttccatagaagagtggtgatgaatgacctaacgtgagaaacaagggcatagaggagagcatggggccaagccagctctcctgacctccagcctgacttttccactgcatggaccttaataaccagttgtttcccaagacaggtaacaatgatatgctcctgctccttccttgcaaacgtctcctgggattcatttgcctccaagcatccgggggcagaaccatatcttgagatggccagatgctttgctggggggctggtgagtctgcagagagtcacgctggggccacgcatggtgattcacacctgtaatcccagcactttgggagctgaggtgggtggatctcctgatgtcaggagttcgagaccagcctggctaacatggcaaaccccgtctctaccaaaaaatacaaaaattagctggttatggtggtaggcacctgtaacccagctactcaagaggctgaagcaggagaactgcttgaactggggaggtggaggttgcgtgagccaagattgcacccctgcactccagcttgggtgacagagcaagaagccatctcgaaaacaaaaagaaagtcaaactgggcttgggctccagagacaaaagggtggcctcttgggaaaataaaaatcacagtccaagttaccatgcccactaccatctactgagtgcccagcggagtgggcaccatgccagaggcattcccaaggattctaatgatctttttctatttgcctatttacctactttttttttttaacctttctcccccagcttcccagactgcaagccccagaggcagggccacatctctcctgttcacctgttgtccccgagagcccatgcctagcatgcgtagacattcaacaactattaggtttttacagaggaagaaactgaggctcagagaggcaggcacacagctggtaagtggtggtgctgggattcgaactcaggctggtctcactccaaaccagcatcttaactctgccctggctactaagccagggacaaggcagaagaagctcacccggccgagctgacggtggtggaggtgccgtggctgcctgtggatgaacccgtgtcactgtggagaccatggagtaggtgtccccagccccggggcctgggggctgccgcgccttcatggctcaatctcacgcctcagcaccaggtggtcgaagcgttctaggtcttgcggggaaatgggcctctcacctcagagaggagtgagaactggaggcggggacaaaaggggcactcagcaggagcgctactagaaggtggaacaggggccctgctacccccaaaggactggcatgcaaactgaccctgcctcccctccttaactgtctggctccccagtgctctcaagagaaaggccaacaccgtcacctggacaccaggcccagcatcatctcactcctgcttccctgtcatctcctagcaagcacatgtagctgtgactccctggacacactgcaacatttcatgccacaaagccctggctgtctgaaccttccacccagaataccctttccaatactcatctccaaatcctattcctctgttaagtcttccgaaacataacccctcccagtggatttcaccacctcttccttgtacagtttctggacctcaaacagtttggagcagagttctcaaagctggtggcacagcaagtcacctggagggcttgtgaagatgactgacagctggctcccatccccagatatgagggttaaccagcctggaatggggcccgagcactgcttttaagagcaatccaggtgattctggcactcagcgttggaagccactgcgacagggacccaatcacagggcgctttaaatgtcttttcccccaggagtctgtgagcatcctgggggcaggaggctgcctcagtcccaggtctcgcccagtgttcagttcaggcctgaccccttgtaggttctcagcaaaggagcgggggcaggcaggatgcagagccctggaaatgctgaagccagttgggaggcagggcacgggtcacctggcgtgggtgttgagcagcttgaacagggccatgacgagggcctccacagagacgctgcgccacggtactcatccaggtagtaggccatggtggcgtgttcctgctcgttcagcaggtccgagcctgctcctccagcagcactcgtgtctggttccccaggctgctcagggtcacctggagccggctgggcccttgtaaaatcctggctgcaagacagaaagatagaagcccaggattcttagctgctctagagctgagtggccatgccactccccctctgcccttccatcctgttaagtgtggtgtttcatctgttattctccctcataacccccagcaccttgccttgatagactatctttcttaattagaatttgttttgtctttacatctccttcactgagtaaaaccccatgagggcagggacctggtctgctctgttcattgccatcaaccctggtgccagaggtatgcccagaacctagcagtcagtcacagataagtgggctggggggtgggcagataaggggtgcccagttggaatgaggtagtgtaagtcactcggcaccctctggctggccagacctcccactcagggagctgtgaggaagcagagaataccccttagaggatgtcctaccttgtttatccttctgttgtgagatcgccaagaaacctgtggggaaagacacacatctccagttgtgatttgagcagatcaaatgggcgtgggcaagggacagggtgacttggggcaggaagagcaagcttcaagagaaccatgcatcgtggcctccactcgctgccagttcagtctgggggctatcaggggtaaaggaaactccggacagactggcagcgtccagcctcccaatcagcagtgtcacggcacctccaaaaccacccgaggtgggctcctgagttgttgccaaccccgcaggacaggcaggtaacacaaggagtggagggaagaaatggtgattgacaggcaacctcagggtcggccaaccctcaggagcttaggggccggtgaactggagatcccagatgcaactcgcagggcggctcagctccagccgatgtgggctcaggctgccagacttcctgatttttaagaagctccagaaatccagtttttttttttatagaaaacctggtatctttctagatgttggcaagaactttgaaaatgtttaatactatgcaggtgaaaggaagggaagggggacacacacacaacacacacacacacacacacacacacacacacacacacacacagagagacacagacagaagacagacagacatgctctgcagtgtatttggccaggtggccaccagcctgagatttctatgaagatcaaaaggtgacacattacactgttggcaactatgcagccacctggcaactgatctcagtttatgactttaagaccctctcacccagatttcttcatgggatccagcctggggcctctggccaaatacaccccaaagcatctctctctttccctctccctccctctctttatctgcacagatctgggatgagggcagggttatggtccccactttttggatgaagcaacaaggtctatagaatgagttaagtaatttggggacaaataaagaatgagacagttggatgtgtatttcagctttccatggggaaactgaggccaagagaggagagggatgtgcccaggtatgtcctgccaatggagggccctggtgtggggactgcaggctgagaggagagccagggcgtggagggatgggaggcagctatcactggctttcagaaatggccctggggtctggagatggagcgagcagagtggccagaccctgccgagttcgccatggtctccctgatccgggaacggcgatccacttggtctcgtccacagtggtgcgggcatggggcagcctcccgacgtcctcactgtcaggatgaggtgccgagatgacttaagcagcctgacagcctcgtcgtgtaggagttgagaaagctccgcccattcacttctagaatctggtccccaacctgccaagatcacccacaatacagtcacctgggctgtttgcaggattcacactagggacttcacagcccagatccaattctcctctgggccagcctgtcaaggaggtcatccaggatcagagaggatgtgagatgcctgagggtcacacagcaagtcaatagcagtgctggccttctgatcctgacccagatccatgctcttgtcatcaaaagggggcatgtccccatgactcagcaatggctttgagggtgggtctacgatgacattccaagggtccccttatctagaaacaacagtcatctcagggcaaggtgggcgtgaagctggggtaggatgaggcaagccatgaaggtggacatccgtaatttcctcctacacttgtactttgttgaggtttttacctcaaccatgcattcttatattacctaaaatgtaaacaaaactttaatctactaaaagaaacagcaataaatgagaaaattagtttccgttaaagcagtacatatggcttagattcttacaaggaggcagctttattttgtaataaaaaaatatttctggcaggtacagtggctcatgcctgtaatcccagagctttggaggataaggtgggaggactacttaagcccagtagttgcagaccagcctgggcaatagtgagatccatttctaaaaataataatagccgggcacagtcgtgtgtgcctatagtccttagctattgggagtccgaggcaggaggattgcttgagcccaagagttcgaggctgctgtgaactggattgcaccaccatactccagcctggacaactgagcaagatcctctctttttacaaaaaacttttaatgaaggaatgtaaaaacagaggcaaaaaataaaactagccttccaataaaacaaatatgtgacagaaatagaaggggttgaaagggaagatgctgcagggtatgatgggacgcacctttaaactcggggttcctttcacaaatgggtcaactgaggtccaaggacgggaagggctgcccagggtcatgtgccactgaggccttgaagggcagcctcacaatgctggttttcttggctgtttttccttttccccagtttcccagcctgctgagagcacatgatcaactctgtaggtttatccagcatttttcaaagatttggaaaaggtaagacaaatgggagcttggagaaaagaagatgggattaccaggctgagaaccaaaaccctgctccccagttccccggttttcttgaatgcctcaccccagttgggagtttccagtatagaaagtggttacaaagacgactttacctctctcctctgcaccggctttgacactcaggggaggcttgctgcctctgctccatgactctaacagagtggggtctgtgctgcatttcaagcattcaccaccatttactcaatgcctactgtgtgctgggatgttgtgctgagcaggataatctgctcctgttccattagctcacgatcaagggtgagctcagctttgcgtgatgactgagtttccccatcagcctcccacactgtatccccagggcccagcacacagtaggaattaaaaaaatcatcagatgaggcaggcatcgtggctcatgcctgtaatcccagcactttgggaggctgaggtgggcagatccttggggtcaggagttcaagaccagcctggccaacatggcaaaatgctgtctctactaaagtacaaaaattagcccggcgaggtggtgcgcctgtagtcccagctactcgggaggctgggcaggaggattgcttgaaccctggaggcagagattgcagtgagccgacatcgtgccacgcactccagcctggctgggtgacagagcaagactctgtattaaaaaataaaatcagattataaaaagacacgcatttccatctattccaactccaggaccatctctgctgcagctcaggatgcacattacaccagccttctttgtccctttatatgttttctccttaatatcaccaaatcctataaagtaagtatcatagctctccatttcactagagaggaaactgaggctcagaaggttaagcacatagtttgtggtcacagtgctagtgaaaaggagtgctgatttgcacatcaggtcaggccagcaccaaggcccctctgctttctactgctgggctgctgcccggagcgtgtttggggaccacgtgatatcgcttcaaatccagcgtgtccaaagctactgtgctgcctcctttccctgaccctgcctgcagcagccagatctgaaaacttcatctcatcatcaacttgcctttacccccctgagcagatccttcagcaaatcccgtcctccacccccatcagcccctgacctcggttcctacctgctccctcccacgtgagcgagctagcatcctcatcactgtcatttacatctaaactggccagacatagtaccagattaatttcttttttttttttcttgagactgagtctccctctgttgcccaggctagagtgtagtggcgcaatctcggctcactgaacctccacctcctgggttcaagcaattctcatgcctcagcttcctgagtagctgggacacaggtgcacaccaccacgcccagctaactttttgtattttagtagaggtggggttttgcatgttgcctagactggtctcaaactcctgagctcaggcgatccacgcggcttggcctccaaagtgctgggattacaggcgtgagccaccgcgccccgccagtgtcagattaatttcacaactttttgctttgatgacatctctccctgcttaaacacctcccatgacccctcataactaggaggaagcaaagcactatggctaatggtttcaaagacaatcagatctgggttcaatgctaactctatcacttccgtgccacatggccccacaaaacccacaatagcttttgtgctcactttcgttgggagtaaaaagggagtcctagcccaggattgtccttctccaaatatcaaagtcagcagcatctcaatgccacatgctttcaccatgcccccagcaatatctgcaatctctttctccctttttatgtctctgagctccccggttgagaagccagggcccctgagaattcggcagccctggctggtctccctgtaaagagcgtgagacaagacccaacacctggctggggcttggtactcagcaagcactcaatcagtgcttatgcatgcaggtgtggatactgccttccctatctcgcctctgcagctccctcctcccctctctctcccagctggctttcgctatgctaagaggcagagctgtgcagctctcccaggtactcaggccttactgagagtggagagaaactcattcctgctgggctcactggcacccaacttgctaaaccacctccccacgtgcagctccatctctcatctctgctgggcaggaatcttctccgtttccacctgctgctctggctggagctggctgcactcttcatcgcgcaagggctttgtttccttaagtatgcccctcatagctttcgctttcgttgcgctaagggcatcaattttaatcttccctttaacacacttatatcatccctgcagtttagttaaaggaacgggcatccaagagaccagctacggaagggatccttctgtatgcaagcctctttctatgggtccaggccaggagggcagtgaggggaggaacaactcaattctatgagcatcgacgtggccttctatgaggctgggggaaggttgccgataaaatataggatgcccagttaaacttgaatttcagaaaaacaaatgctttaaaaataacatatgtcccaaatattgcatagggcatatacatactaaaaaacatattcattgtttactgcactcaaatttaaatgagcatcctgtgtttttattactgaaaatctagccaccctgggtggaggtatcagtcacctctgggaccagtggctcttatgggggctgatttagtgttgggcttccaaacctaggtcacttccctcaccctgagcctggcacctggcacttatgcaactgagtcgcaggaattacccagcatcccacttacttcagcctcatcctaggcattaatatcgtgaaatcccaggttggctgtgcgagtcacattgtcctcatgcctgttaagtaaatattccctaccagatttgaagaggcagcatagattcctgtgcaatctgcctggggaacggcttgaaatgggagtcacacttgggaaaccctgacttactggggacgtgtaagcccatcttccaatctcttttcaatcctctcctgtctcttcttcctccagagcctgtgttcaaaccaaatgctaggtaggactggcttcagggtctccacagggccctccgcagcatgtgagttggtttgagtggctcccatttttctgtgtccagctctctcccttttcctctacttgttggaaagttccccaggtctaggagccctgtcagaagagctgtctacacgatcactgtgatgtagagccacaaaccactttcaaccaagtctggtgtcttctctgctgctagtgtcctagtgtcacccgtgtggccagtggagtgtggagtcccatccctacattgcagcctctagttttaaagcaggcaaccgtgacatagtagctgagtggccccgcacagctctcaagtacaacctgagtccagttttgtcatctataagatgggcatgatactaccactagttcccaggtagctgtgagatcaaatggaaccaccctgcacagagcctgagacacatcaggctttccatggcttctcagtgcttctcttccagatacaggagacaggttcagagatgttgagggacttgctcaaggtactggtcgtactggaagtaaacaaatgaaccagcctttgagcctaatcttctcatcttctcctaccagcctatgccaccttcaccccagcacagcactggcatgcgggagatgcttagaaatagtgaatggatggggggacccggccttcctcctctcttgttctcacttctgtttgttcccctttcccgtcagttggtgtgagtgaatttggaggcagcatgtttaaagatcttatctcactctttcccaaagaaaactaagagctctgtttgtttgttcattgcaatgtggcttttcctacccactgaaaccaactcagagttagacggcacaggaaaataaagcagaaaatgaggcaaagatgctgtatccatcggggccttccaaggcgtctcttatagatgcagaatcaaggctcagaaaggacaggaacatgtctagggccacagagcaaggcaacagcaaagcccgacccacagctaaccgtggaaacactcatatccctccaccagagctcactgggacaggagtgctggagataggagagacaggtgccaagtgtgatcgagtgtctaatattgctcagctgcttgcagggcactgatggggaggacaaggaaagataaacgaataaaggcagctttatttatttgtcaccatgggaatcctatttgtcaccactgatggaggagtggagggtggaccaggaatgcccttcattttaaggcagaggaaagactcctccatcatccacagcccactgaggactggctcatgttcagacactttgagaagagcacggcggggcttcaataagggcaggaaccgatttccctgaaattggccaaccaccagtaagcagagaattcaattcccttaggtcggggcaggcgcaggagccccaggaggagaggggaccctcgtaacagcggaaacactcagggaccttgctgggttaacggagccctcttactctccaagagacctgaggaaaataatttattgttctaagccttccttcccaaaatgggaacaagaccactaacagctagtgtgttgtcaaagtacaccagtggccatctggtgtgtgtttctgagcacagacccaggagtctctgataattctacactctgtcacttacttgctgtatgaccttgggtaattgacttcacttctcgtgcctgttacctcctctggaaaatagagatcatatcagtacctggttgacaaatgagtaatacattccccagtgtatcaccaacacttaaaacagggtctggcacatagtaggtgctaataaatatttactgaatgaacaagtataaagcacataaacaagtagctaacatacagtactgcatgggtctccatggggccataaatgcaataaatgcatttttgaaagccatgctttccctgaattcacctgttgatcactcaccaaccaaatctagcaattctacctccagggttctctcagcaccaccctctacctttccacctaccttccccagggccctgcctctggcttcactgacctacacacattgaccacacccatgaaactcatattttaaccccattttacagtgaggaagccgaggacgggaagtagagtcattaagagctgggatctggccttcattctacagccagcaaggcccctgcacgaaccaataccacactctcctttaagaaaagccagcctcccttcctctacttcttacccctcccagccctgggctttaggccatgcactcagtaggtctgtattcgtgcccgatgaagggaactggcaggaagaacctgtggcggaatggcagtagttcgagctccctcgccagaagttgttaggagagaaggctgccaacaacctgatcctgagctgagctgggagacgggaatccatcctctcaggccgcgcgtgcacctgtaccagccacgtgggaagggcccgaaagaagccgatttcagagttgccttcagcaccctcccaagcctgtttaaaatggatcttgcggcttcaagggaggaccctgttggctacagcattatcacaaggaaattcaaattctattaaagagttttattgcaattatgaatctttaatagttttccatgcaggtgtaaaactttaatgggctgtttttttttctttcattacaagtaagcaatacagtttaatgagacattagtttttcccaacagttcaaaagtcagtaaagcttgtccatattttaaaaagaaaataaaaagatgcaggtaattgctaagacagttcctggagcaagctcagggatgggctgggtctgggtgagctcttcacccaaccctctctggtttagagctctcacaagcagaacctaaccagaaatgctgtggatggacccggcaaggctaatgcacactgactcccatatggtccatgcttccttccggttctctcttctgacattggcagatccgttgttagtactgcttactctattcaccacacaggaagcctcaatgaaggcctgctctaacccagccataatcaaaactgaggccagaaaggggaaagaacttgcccaaggtcatactctgagtcaagtcaaacctgagttcttcccaaaggaaaatctggcttccaaagtaaacagagaaattacaaggtcaaacacagaaagaataacaattaccaacccccaagtgccttgcttaggccagctccttgtacagtttagctctaaacttaataggcaccgcctgagacatggaagggtccgtgttcatagatgacagcagtgaggctcagagaggtgaagctacttgcccaaggacacccagaagcaagtagcagagtgggatttgaagccaaaccaattgctattctgagacccagacctcaataatggaaatgttctataactaggctgtccaacaactattatttacatttaaattaaataaaattaaaaattcactcccccagtcacacaagttccatttcactagccacatgtgctaatggccaccatcctgaacaagcctaaacacagccccagatcaaacccctgaccttcccgattctttcctccaagcctggtccttctccggggctcctcatctcattgctcaatccaaaattccaaacccactggatctatcatcaagcccaatgcattttactttcccttccaaaggaccctccatcttcactaactccactcggatcccagctgtccttgtccctcacctggccattaccacagcctcctaaggggcctccctgcttctactttcaccaccttgcccgatatttccttatgtagaagacagattcatttaaactgcaaacctgatctcgtcacaccctccttaaaatgccccagtagcttccaagctcctctgcctagcctgagaggggccttagcatcgaaccaatctcgcaccttcctcccctactgctttttttccgatccaaccatacttgccactctcagttcactcaacagatggagccctttccccactccagaccttggagaccagaccttgttcctctgcccaaaacgtatttcccttcattcctcacctggataacacctactgaagtccaggtcttggctccaatgacacctcctccaagaagccttctccagctccaaggcagtatcactaatccccctcgcccagggcaccgtgcagcactcactccccacagtttgagatgtactagactacagacagagagttcaaagtcagtgcgctgcacccccttgaatggcacagggaaacacctgacaaatgcctgacggaatccatgaatgaatgaataaacaattaaataatggatgagcaggcatacaaacaagctagtcccctccccattctggttcctgcagacagccggagacatttcccatttatgtaaaggttgcatttgacaaggccagggcatgtagggagctgggtacatgcagcccagctctacaggctgcagcagggaaggagcatttgatttttaaatcaaagggaagacaaagaggtaaaaacacaaatcagttttgtttttacaggaatcacctctgggaaatggtgtacatttaatccagcccctcattctgaaagaaagaaaactaggggagaggtagaggaggggtgtcactggtccaaggcttcctgggcagttggggcaaagctgaccagaatccagtctaccacctgcttcaagctgctctgtagacctgcaagaatcaagtttcaagctcaagtccacagccttcacagacacaaacagtgaccagctggaagataagatgaaggaaggggaaacctcatttatagtagcaacagaagagaaaaaactaccaaggaataacttaacaagaaatgttaacaacacctatatgaagaaaacttcacacacttctaaaacaccaaaattactcaacaaataaaatatccccttttcttggaaagggttcagcattatccagcatcggctctctctcagctcacttacgtatttaacattatcccaacaaaaacatcaacagcttttgttagaaaagtcagcaaaaattcatggggaaaaataaaaatgcacagggaaaaccttaaatgcatactgctaaggggaggaagccagtctgaaaaggctacacactgcatggtccaactatgtgatattctgaaacaggcaaactgatagagacactgtaaagatcagtggtgcctgaggctcagggaaggatgagaagtagagcacagaggatttttagaggggtgatatcttctgtattacactataatgtttgatacatgacattatgtattgatcaaaatccaataactgtgaacccttatataaagtatggactaataaaaatattatccatatttgctcatcactgtaacaaatgtaccccttgtacactaatacgaaatgttaataataggggaaaatgtttggggacgggttggggcagaggaggtataatgggaactctgtagttcccactcaattttctgtaaacctaaagctgctctaaaaaaataaatctattggtccggcgcagtggctcatcctgtaatcccagcaccttgtggggccgaggtgggtggatcacctgagatcaggtgttcagaccagcctggccaacatggtgaaaccccgtctctaccaaaaatacaaaaattagccggcatggtggtaggcacctgtaatcccagctacttgggaggctgaggcaggagaatggctgaacctgggaggcagaggctgtagtgagccgagattgcgccactgcactccagcctggggacagagcaagactccatctcaaaaaaccaaataaataaaataaataaatcaattttaaacataaaataattttattatttaaatataatgaaaaataaaaaactttttgctatttaaaataaaaacaatttttaaaatctaaaagtataaaatgcacgaatggctatgagaaacccgatacagaaaagctactagagaagctaccagacactaaagcctgctctaaatcctccgtattacaccagtgtagcactgactcatgagtagacagacaggcggtgaaacagactagaataggcccaaggacacacaacattttagtgtatgataaaggtggcactacaaatcactgtacaaagacagactttttaatatgcagtagtaggataaatgagtagctatttagaaaaagtaaatcatgccctctataagactaaatgccaaacagatcagaggtctaaaggaaaaatgatttataggcattaagagaaaaaatagataagttcatctataccctgggcataaggaaaatgtaacctgactcaaattcaataaaagaaaggattaataattaaattagatttaaaattataaaacttttgtattaaaaaaactctataagcaaagtcaaaagaaaatgacaaccagatgttatgggctgaatgtttgtgtccccccccaaattcctaccctaaccctgaatctgatgtatttgaagatagggcctgtgaggaggtaaatacagttaccttctaatccaatggtgggtcctaatccaaaagggttggtgccctttataagaagaacaagagacacctgagtccttcttggccatgtgacaacacgataagaaggcaagccatgaagatagcccctatcaggaatgaactggccaacacgttgaccctggccttcccagcctacagaaatgtgagaaaacagatcctattgtttaagccaccttgtctttggtattttagtcagcctaagctgactaagacaatggagagaacacttgcaatatataccacagataaagggccagttagctctaatatttaggaattcttaagttttagaggaaaaaagatccaaaatcctgagagcaaaaggataataaagacatgaacaagttacaaagaagacattataaatggccattaaatatatgagaagatgtcaacttcacccataataagaaaattgcccagcctggggaatatggtgaaaccccatcttacaaaaaatacaaaaaattagccaggtgtgatgctgcatgcctgtagtcccagttaccgggaggctgaaatgggaggatcactttagcctgggaggcgaaggttgcagtgagtcgagctgtgccacagcactccagcctgggtgagtgagtgagacagattgggtgctgggtgagtagacagattgagatcctgtctcaaaaaagaggggaaaaattgcaaaataaagctacatcaggtaccatttctcatctatcagattgagaaaaaaatttaaaactttacagtgaccgtcgctatggagaaacaggcacacttttacacagctggtgggaattcaggatggtccaacactaacggaatcccactttcttttttttcttttttttttttttttgagacagagtctcacttgtcacccaggctggagtgcagtggcgcaatcttggctcactgcaagctctgcctcccggttcacaccattctcctgcctcagcctcccgagtagctgggactacaggtgcccgccacacgcccagctaattttttgtatttttagtagagatggggtttcacctgttagccaggatgtcgctatctcctgacctcatgatccgcccgccttggcctcccaaagtgctgggattacggcatgagccaccgcgcctggctaacggaatcccactttcaaaaatttaccctgaagattatttcccaaagtgataaaatacatatgcacacagttactcactgaagcactgtttgtgctgtaaaacactgaaaataacctaaatgtccatacagaggagaacggttggataacgtaggtacagccacacagcagagtacacacggctgtcgaaaagaatgacaaagacctctgtgactgacataacaggatttccaggatacggtgaagaaaattaagtgcaaaagagtatctaagcatgctatcttttatagaagaaagaaagcatatagatataaatctgcttatttttacaaaagaaacaaagaggaataaaccaaaaacttatttggttgcctttaaggagcaggtgaaatgggtagaagggacatggggagtcgtactcggagtgtacctttttgtatagttttgagttttagtacttagaaagtaaaattaaatcaataaagatgggggaaaccctattcaatgcagcaaaaacaaatgaaccttgttcatatgaataacataattcagctgaagtgggaaacaaataactaacccaagtaacagactgctttgaccataaaccctcagtttaaggacaaaaaaactgcaaacaaatcagaagctctacttcacatggcaattctgaaactacttttgtgtttgtaaaattgggcaaatgggtaaacacttaaggtaggttcttgatttctcactgttgagaaatgggagaagctaggaagaaccatgtaatgttggcctagaagaggaggtatcagtagagtgaacttacgttttagacaaatattgaaatatttatatttcatgtatatctgtatgacacacacatagatatatgtgtgtacacacatgtatgaatatgagtgtgtattatatgttacagttgacccttgaacaatatgggtttaaactgtgtaggtacacttatatgcagattttaaatatactggaatttttttggagatttgtgacaatttggaaaaacagatgagccattagcctagaaatattgagaaaattaagaaaaaggtatgtcatgaatgcataaaatatgttagatagtctactttataatttactatcataaaacatacacaaatctattatatttattatttattgagacggagtctctctgtcgcccaggctccagtgcagtggtgtgatctcagccattgcaacctccgtctcccgggttcaagcgattctcctgcctcagcctcccagccagcgggattacaggcatgcgccaacatgcctagctaatttttgtatttttagtagagacaggttttaccatattggccaggctggtcttgaattcctgacctcaagtgatccgcccaccttgtctcccaaagtgctgggattacagccgtgagccactgcacccagccacaaatctattattttaaaagttaagaagaaattttttttttgagatggagtctcacagtgttgcccaggccagtgcagcgatgcaatcttggcttgctgcaacctctgcctcctggtttcaagtgattctctgccttagcgtctcgagtagctgggactacaggtgtgcaccaccacacccagctaattttttgtatttttagtggagatggggtttcaccatgttagctaggctggtctcaaactctgacctcaggtgatccgcccacttcggcctcccaaaaagtgctgagattacaggtgtaaccatcctgcccgacctaaaaaattaagatttatcaaaacttacatacacaaacccttgcgataatacatggcaccattcacagtcaagagaaatataaacaaacattaaaatgcagtataaatcataactgcataaaatttacagaagtacacatggtagtactgtaataatttcaagccactttctgttgctagttcagtgtgctcaagttttgaaagtatcagcttaaaacgcctgtgccgctcatcatctctgcatgagcagtctgtctctacagtaaattgcatatcatagaaaaagtggtctctcgtggctctcatatatttttcaacatattttgtgcactaccataagcttgaataacaccataggatccctatgaagtgccactagtgatgctggaagttctcccagaagcagagaaagtcatgacattataagaaaaagttgcatggcttaatatgtgccacaattgaggtctgcagctacactcgggcaccatttcagacagacgattcatctggtaaacaatgatgtaaacttacggaatcaataaattcagtaaggcactataaatgtattttctcttcttatgattgtcttcataacattttctttttctagctttattgtaagaatatggtatatgatatataacatacaatatatgtgttaattggctattggtaaggcttcaggtcaatagtggctatcaatagttaagtttttggagaatcaaaagttatatgtgaatttcaactgtgtggaaggttggcacctctaagccctgcattgtttaaggggtgactgtatgtacaaatgcagcatgtatatttcctagctttgtccactaaaagccctgttagtaatgacacctcagtagcataagcccatctagcccccagatcttgatatctaaatgccattccccattgagaaatatatggcctagtggagaatggctggttccaaggctgggcaggaaaagtacaagatgagcctaaccatcttcttgagtcagaaagtaaggaaattctctaaaaatgacagatgcatgtcaatggacacagaagccaggctgaaggctctgccatatccaaatctgggacactctgagtataaagtaaataatgccgatcataaataacaaagtaagaaggcatgaatccatatttgtacaaataaataaatcacaggataaagctcctctctacagtaaaatagcaagtgagttttttaaattttgcaaaacaactgaatcagggaaaactagtaggtaaattttgacacagaacagatatttacagtctcaaaatatcacctgcaaatacgttattataaaaggaaaaacagtacgaaacctggcagacattacttacccaagtgatcagtgttaccctcactaataacgggacaactaacatcacgggacccaccaaggacctgacatcaaagctagcatgatcctgccaaatgcataaactaatccaatcatagcaaccatcagatatcccaaatagagaaacattctacaaataatgagccagaatgtttcaaaaatatcaatgtcataggaagataaaggctgaggactgttccaaattaaatgaaactaaacaatcataaaaacaaaatgcaacacgtgatcctggttggctcctggactgggagcagaaagaattgctacaagaggacattattgggacaaatgcaaatgctggggctatgcagattggataatagcattgtactgatgctaaatgtcctgatgtgaccattgttctgtgattatgttaagtgaatgtccttgttcttagagaaaaaaaatctgaagtatttaggaataaagaggcatgagatagacaactccaatgctttagacgggagagagaaaaatagataaagcaaatgtggcgaaacatgaaaaactagtgaatctgggtgaaggctgatatggtttggatattcgtcccctacaaatctcatgtgatccccagtgttgcagtgggcctagtgggaggtgtctgggtcatgggggtggatccctcataaacggcttggtgcctcctcacggtaatgagttaccaggagatctagttgtcaaaaagagtctgggacctcccgctctctctcttgctccctctcttaccatgtgacaagcctgctctcctttgccttctgcataagtggaagcttcctgaggtcctcacctaaagcagttgctggcacggcctgcagaacgtgagccagacaaaactctcttctttataaattacccaggctcggatattcctttagagaacgcaaaacgcacaaatacaagggtatatgggagttctttgcagtattcttgaaattattcaaaataaaaagatttaaacaaaacaaaacaaaaaaaaacttctaggtccagtccttgtgaggagtatcagacatcagaatctagagtgtgtttccacttctgtgcttcatagccaaaagaaagaaattgacctgctcttccaaatacatgggaatcctccaactcctaccaagagaaagcagtactgttgcggccagcaccaaacaatggaagaatattagacaagagccaaggcctcccaaggggaagagctataataggtgttggcaatattgtacacatcatatgagtatctacactgctggaccaatcaccacaaactcagtggtttaaaacaacacgaatttattacttacagttctggggtcagaaatctaacatagatctcactgggctaaaatcaagatgtcgcaggacagagttcctttctggagagtccgggggacaatccaattccttgccctttccagctaccagaggcctcctactttcctactttggtagccccttcctccatcttcaaagccacaacctcgcaccaacaaggccttcttatacagccacctctctggttccctccttctgatcccacctctacttcaacaacccttgtgatgacacgcgacccaccaggataatccaggatatctccctacctcaaggccagctgaataggagcttttattccctctgccatataacctacatagtcacaggttctgaggattcggatgtagacattttggagggtccattagtgtgcccccatatttgtggtaacaaaaacatggtgggcattcatgaatagccaaacagaacagaaaccagaaggtccctgtactagtccattttcacactgctgataaggacatacccaagactcataatttataaggaaagacaggtttaatggactcacagttccacgtggctgggtaggctcaaatcatggaggaaggtgaaaggcacgtcttacatggcagcaggcaagagagaaatggagccaagcaaaaggggaaaccccttataaaatcatgagcactcatgagacttactacccgagagcagtatggggtttccccccaccacccggttcaattatctcccactgggtccctccacaggacacaggaattatgggagtacaattcaagacgatatgtgagtggggacacagcaatccatattaactcccgtaccccatctagatgaggaagggttagtggggcatctggccttcaccagctggagcataacttggttgaaacttgctaagaagcatttgacaaaatggtcaaaaacttttgcaattttactgctaggaattaaccccaaccaaataaccatggttataagaatttaaatttacaaaaagaatttgaaccccctccaaaaagtctatgaattaatgttgtcaaatactgcatggtatatccatacagtaattattatactgccattaaaaatgatattaatatttaatcacatataattattttttccaattaaacttaaaaaaaattacaaaaccatataatgacatagtacaaatagtcaaacagtaaaaaggggggtatatacaaactgtaaaatctcccctccgaaacccccttctcttaaaaacgcatctccattcctgaaatctaaagcccaggatcagtttcttggtcattttctcagggattctcttcacatatacaagtatgtaaaataaatatattcctctttttaaaaaagcaaaaatggaattacataaccatactctgtacttgctttttttcacttaatattttgcaaaggtctttctcacatgaaggatctgaatgtatatatataatatatatatatatgcacacctctactggcaggataaatgctaaaatgtatggaaggtgggggaaagaaaacagtctgatcccagttttgctgaaatattttatccatttatattccatgtagacattacacactgaaaggttatacaacaaaattgtggcactagtttccctaagtgtagggttttctctgttttctacagtgaacatactttacttttgaactcggttttttaatgttattattattattattattattagacagagtctcactctgtcacccggctggagtgcagtggtgtgatctcggctcactgcaacctccacttcttgggttcaagcattcttgtgcctcagccttccaagtagctgggattacaggcgtgcaccaccatgctcagtaatttttgtatttttagtagagatggagtttcaccatgttgcccaggctagtctcaaatcctgacctcaggggatctgcccgccttggccacccaaagttctgggattacaggcgtagccaccacacctgggctctaatattatcttaatattgcctatctaatgtggtcttcaacgtgttgaagggactgggaagaaataggccaaactgttcataggagttgcctccaagtgacaattccaggcaattttaatttcaagttctttattcatgttctgcacctcttcaaattgatacaaagaccagactgtcaagtgtataaagaaaaaaattccacaactaaatgaaaaaatgtggggagacaagccatagcacaggccaccatcatctctcccaccttctctaacacctcctctatgtttgggggtctggggtagagtgggtctaggccctcggtagatatgccgtgcacgctggagaagaatcttctttatctcacccagtccgttccatgcctcttagtaatttggataaatcatttctgccccacactgggctctgaagcctgctggcatagataggcttggagcgtttaatctcctctggaaaggtcctctgaggtttctctcatttgttgctccttttaatcctgatttcaattagaaacagctaaatgcctgacttcaagggaatggttaggtaaatttaatttagccccaagatggaatatgattatgcaactattacaagttgtacccataagttttatttacatgggaaaatgcagataagaatgtgaaatgcaaagcaagctatatgatagaatcatgtcaaagaatacagagaagagaatgacagaaactacatcaagatgccaacagatgaaacaacccaaacgtccatcaactaatgaatggataaacaaaatgcgatatcaccataaacagaatactattgtcataagaaggaatttcctggtagatgctacaatattatgctaataaaagaaggcagacacaaaggccacatattctatgattcattgatatgaaatgcccaaataggcgtatctagagagacagaaagcagattagtagcagttttcagggagtgaagggaggaggaatggggagtgatgacttcgtgggtacagagagtttttcaggggtgataaaaatttctgaaattatatagcagtgatagttgcacaaccctgtgaatatcctaaaaaccactgtttgcacactttaaaagggtgaattttatagcatatgaattgtatctcaaaaaacaaacatggtaataaaggctggttttagaaggtaggatgtctgggtccttctactttctgcatggtttgtgtgtgtattatgtattgaacttattactttagtagctggaaaaataaaactcaaacaaacaaagggtctggctcaaaccctttgaggtttttgggccaaaagctctagtgcaagcaccactcagttccctggacatcccaaactctgaaagctcttgcctccttccatctgcttaactcatagctccttgactttggaagtaataccctcactcactcctagtgccacgtcatccctaggtgcgtctagccagccaggagctcttggaaaagctgttggagcatgtctcttccctaccccttccccctccctccccaactctcctctctgtcagcccctcagtccctccagcccgcctgcccgtccctgacccccatgcttctatgtctgtgctcctcccaattcttctggaagagctcttccttcacttctctgcctggcataatcttccacattcaatgccccaccagaccgcactcttcacaggggcaaaaatcatgtgttttctggctcatgtttacatgtaggcacatagagaggctcagcaagaacctgctaaccaagagaagtccagctcaagatcccttcctctctgcagccacaaccagcccccctcacctggactgactgctcccacctgaggcccagcacaggaagggccgtgcagtggccacagggacttggaagcagcctgcctggctcacacgccctggctgtgtcaccttgggtaaatcatttaaactctctgagcctcacatcggaaacaagggatgagcacccttaccacagggttgctgtgagggtaaaaggactgatatatcaaagtgcccagaatactgcctgtacatcagagatgttaattgttatccagttatcaggagtactcctattaagagcatggtacttcttaacaggtctgactttattacagtttgctattcctcctccctcttcctcactagactgtcagcaatttgaaagcaagaccccatgtgtttccatggaccaactgtgctgtggtttgaatgtgtgtcctccactaaaactcatgcagtataagagatgggacccttaaaaggtgattaggccacaaggactccacctttccaactttgctctctctgtcactcactttctctctcacacactttctctctctctctttctctctgtcctctctctcccccagccttcagaactgtgagctaataaatttatatgcattttaaactgccaatctcaggcactctcttatagctgctaaaatgacaaagatgagtactatcagcaaacctaggagcctgtgagaaacgcaaactctcaggctccatcccaaatctactgaggcagatgtacttttccaaaaatggccacagcaatatttcgagtttcatgtgccccctagggcccgtcatgccatcatagagtaggtcaaattgtgttcccccaaaaatatgtccaagttctagccccagtacctgtgaatgtgacctaatttggaaatggggtctttgcaggtgtcattaagtaaggatctcaaaaagagatcatcttggatttagggaggattctaaattcagtgacttcgcccgtataagagaacggacagggagatttgagccacaaagaaacatgcagggaagaaccacgaagacaggggcagagactagagtgacactgccacgagccgaagaccaccaggaacagcaaaaactggaagagcggttggagggatgagtgtgatcctgctgtcaccttgattttgacttctggcccccataactgaatacatttctgttgttttaagccacccagtgtgtggtatttggtatagcagccctaggacactcacatagaaagaagggcctagtcccctctccccttgaaactgcctggacttgtgacagctttaaacaagaaagcccagctgagggatactcttgccttctgaaactgggccatcaaaagaatacagcctccactcacctctctcccagcactatcccctggaaagcccccctaagccaccattcttagaggcagcccaaactagcactgtgaaagatgacagggagaggtccatgcaggaagcactagggcctccagcccatagccaactcaacttccaggcacaggaggaaacaggcttccagatgattccagcacccagatgttgatgttccagctgcggctgcagacatcatggagcagagacacatcacccctgctgtgcctttcacttcctcacccacagtacctgggagcataacttgtggttactatacatccctaagtctgtggtggttatgcggccacaagaaccacatttgctgaatcataactggcactggaaaggtcccttgggaatctgtatgcatggtcaagtgcccaaagcactgccccatatagttactacctctcccaaagcccttcatgtttctatcccacagcagaggctgaagaaatgctcacggtaatcatttcccttatgaaagaggggaccgtgctgacctcagattcagtaaaccatagtacccacaagcaggcatttaatttggcatgaccacatgtaaagccagaagggcaaccatgacatttccggggccagtcagctcttcatgcccctaccctattccaggacctttgttcgccacttgggaatgagatgagaaggaaagcccacagacatccccagctagtagcctctcctggtggacagaatggttcacagggaccctgagcacacgaacaaatgatctcaccttttctgtggccaagctgcaagtgagctctgctctaatgggcgtgcccagagaaattaagtcttttggcagcagcctgccttggcacaattaccaccctaccaagggccgctgtaaagaccagccagaggactaagcatctcgaatttctgcaattgattaaacactcattcagagaggcctttcaaaaatccaactaagagagtatcataaggaaggactgagaaggtggcacagctggggcgggtggggagcagaggctacagcaatcactcagcctgtggcagcttcttgggaaataatcaccttccggctccttgggaaagaggttcatcatcaatgtcaattcatcagctatcgagcatcgcagatgtaactgcagatcagtcttgccacaagcaaatcgcttagacaattaagctaccatttctttttggttgcttatcatgtgccaggcactgggctagggattttatagcattagctcatgttgtcttgacaatatagtacctaggatacaggtggtactattattacattattatcaaaaactggaatctacaggagcttgggaagcactgctcctctatagtcttacgaaggaagcaagagccaactctgaggcttaggacttgtggacccgcccaggagtgaaggtggctactgcacctcagggataggcactcccgagggcatggctcattagaaaaaaccactccagcaaaaggggctggtggggaggcaaagcccagttatctgagctggacctcagaaggacaaggaaattgtcatcctaccttctgctgaaaaagcctggggatttttgaagcccaaagcaaccaggtgctggagaggttgctgctctgccacaagtcctcgaaagcaggggcgtgtggggccagggctggagtgccaaagagggacaggcaggattagcctcgagtttattcatcccagagggacaatacaagactgtcccctagcctgggaggaaggccccactgtgaactgccctggccgggtgttagaggacagagccaagcctgcaaccttggccagccccttccggtaagtggccatgggcaaatcacttccaccttctgagcctcaagcaagactcatgcggtaccttacaaggttatactgaaaatcaggaataatttttaaagctaattaaaaaaatactttatctgcatcaagtgcttgctagagattctctggctacatcttcaccatgtcccaagggtattattaccccagctttacaaatgaggaaaccgagtctcagggtgataaagtgacagacaggttttacacaccatgcaacaccaccagggaatgtcatcaccgccccggcacacataggtgtcagaagtagctgctattgttattattattagtttcccccccccgcaaaaaaaactttctgctgagatacagctttagtcatacattctcaattaaataattttaaaagttggctaggcccatgctctcatgtgggaatgacagacattgaatcatctgggccacgggtccccttttctgccccatggcagacacagcgctaagtgactcttagcattagctaactatccttcttgcagagcccggctgcaaccacacaggtacaaacatgtgtacaggcgcactaatgaatggcattggcatgcaagagatcggtgacttgctgcccttgggaatggaaaaagcactgatttggggtcagaaaaacgtgggcaaagcccatccaaggtaaaatagaaagtcctttgcagtctgaggcactgtgactttgtgctcagctgtccctgttggcatcagcacagaggtaggcatgtggccttggggagccctgcctttgaatcacagcttctctgccaactaaaaatagttttggggcaagctgcttaatctcattgagtctcgggttctttatcagtgaaataggctgatgaaactcaggagatcctcctggggctgccaagaggacggagcaagatgatttcaagaatcacctggacagggctgggcctgcagcaaatcatcaataaatagttgcttttatggattgttattatggagacatcagaaatatcactgtgggggtgtgtgcgcatgaacgcacaaccacacacacaggaaaaccccaagtgaagaccattcgctcctccctaattttcacaaacagtaaattcaagctgcctacaggggaaggccctgccctgtgtccctcccccagtctgctgagaaccacttcacaaagagaggacccatctaagttctgtaagaacctctggggttcacagagaaggtatgaggagagggaagagatgagaatgggacttctgtgactaagtgctagcccacctgggtttgaatcccagctcttcttcctattaactgtgtgaccttgggcaagttcttaacctctctgggcttcagctgcccatctgtaaaatagggataataccagagcctcctgcagggatgctgggagcattaaatgattcactgtaggcacagtactcactaagcaccaggtgggacagagggcggactcccaaaatgctggcaattgctgttgttattcctgcatgtagaaataactagaagactgctcaccctaatgacttatttctgttactactatttcctcacaacataggaaaggtaaagaataaaaattaaaattaaaaaatgtatcattactgtttccgttatcaccactaccctcatgctgctgtatcttctgccattttcaccatgcttttacttaacacatcctgaatggccagaagaatcctccgggttccaaatctaaaaagcagagtgtgagaaacatcgggcaggtgtcaccaacatgctgacggcagagaaccgggcagaagtgggggagctggctggccggctgccaaggggcgtcagcctgagtttccatcacgcaaattcaggttatagggctaacaaggacagcacctggcacacagtaagtatccgggaaattgttcttgcttgaagaagtgactgtggagaaggcaggccctgagccaggtgtctttgactccaaagccctatcttgagcactatctcctttgcatcctggcctgaacacagcacagagcaggcattttgtttgagaagtgtgagtggttttcccactcacctaggttgtgaattgagcaatcagacctgtctctcagagatgcttgcctttgggctaaaagaggctgggtagcagcctggcccaagtgaggtttgctcatcacaggtgctctctggacattaggtgccatcttcagctcctcctgatggagggcagatggcgggaatcagtctacactcacagatctcagctgccaaccctcatttcacacatggggatgctgagggccagaaggaaggaaaggactggctgagagaagggccagagctctgggcccccagcatagagccccgttgccatcaggcagtttggctttgtctctgattccatcctgatgcttctgctgggaggcgagagcaagcctgacagactctccacactgcttcctgtttcttcatggaggaaggggtgtggttactgtgtttgttttgcattgcttaaaggaatacctgaggctgggtaatttataaagaaaagaggtttatcttggctcatggcctgcaggctgtacaaacagcgtggtgctggcatctgcttctggtgaggcctcaggaagttttactcatggcagatggtgaaaagggagcaggtgtgtcacaaggtgagagaaggagtagagaggtcccaggctcttttaaacaaccagctctcacatgaactaatagagcaagaaccactcattacctctgggagggcaccaagcccttcatgaagggtccacccctgtgacccaacacctcccagtaggccccctccaacactggggatcacatttcaacatgagattcggagggacaaatatccaaactacatcagttactatataatatttgtttaataaggatcctttagtgtatttcattctgtgattatggctgattttatggtagtcctaatgaaggtgacaaaataatgtcttaatatttatataattcctgacagttaaaaaaaactcacataataagggcacttacaagcaattctctgcctttaaattccacaacttggatgaatggaccaatttcttggagacgcaaactactaacactcaagaaagaaaaatagataacctatagatatcctatatctacatgtccaaaaaatggagtttatagttaaatcatctcccccaaaaaaactcaagccagacactttcatgaatgacttcccaactcattttgtgaagccagcattatataatactagactagatacattataagaaaagaaaacccagaccactatccttcatgaacacaaatggaatatcctccacaaaacattggcaaatcaaatccagcaatctctataagggataatttacacaaccaagagtgtttatacaaggaatgcaaggctgtttcaacatttgaaaatcaatgaattaacagattaaaagagaaaagccatatgatcagaaaaatactttaaaaattcaacaacattcatgatactctctaaacaaactaggaatcaaatctgatgaagagtatccacagaaatcccacagctaacatacttcatggtgaaaaattaatgctttcctttaagatagaaataggcaaaatttttctctcaactgttctactcagtatcatactagacattgtagtcagtgaataagttaagaaaaagaaataaaaggcatacagatccaaagagaaaaaataaaactctaccatctgcctagaaaatttcaaagactctgcaataaacctcccagaactaataaatgatttagcaaagtcaaaagatacaaaagccaacatataaaaatcaattctatttctaacaagaacaactggaatccaaagttaataaaaacagtaccatttataatagtgctgaaaatactaggtatacatagctaacaaaatatgtgtagtttctgcaggctgacaattacagaacaaaaaaaacctaaataaatggagagatctgtgttcattgattgcaagactcaatagtatgagatgttaaatcttctaatttgatctagattcaacacaattccaattccaatcccaggaactatattttttttttaggtatttacaagctgattctaattttttttatggaaatacagaaaaccagaggagccaaaacaattctgaaataagaacaaattggaggactctgtacccaattccagacttactgtaaagctacagtaaacaagatagggcagtgttaatgaaaggctggtgcatagatcagtggaacagaatagagtccagaaataaacccacacaaatatacccaaggatttttggcaaaagagcaaaggcaattcactggagaaagggtagtcctttcagcagatgtgctagaacaattagctgtctatatgcaaacaaatgaacctcaatctcacactttatagaaaactcaaaataaatcatagactaaaatgtaaaatgcaaaactataatactgttagagaatatataatacaaaatctatgtgaccttgggttagacaaaatatggctaataaaagatgacaaaatactttattaaaatgaaaaattcttgctctgcaaaagatacttttgtttgttgtttgtttgttttgagacagggtctcactcccgttgcccaggctggagtgcagcagctgatctcggctcactgcagcctctacttccaaagctcaggtgatccacttcagcctcccagtagccgggactataggcatgcaccaccatgcctgaaaagatgaaaagatacttttaaggaagacaaagacaagccacagaatgaagatatttgccagccaggcatagtggctcatgctgtaatcccagcactttgggaggcagattgcttgagcccaggagttcaagaccagcctggcaacatgacaaaactctttctgtacaaaaaatacaaaaaaaattagccacatatggtgtgcatgcctgtagtcccggctactaggaaggcggaggtgagaggatcacttgagcccagaagtcaaggctccagtgagctatgatcatgccactgcattccagctggggcaacagagcagaccctgtctcaaaaaaaaaaaaaaaaagaaaatattttccaatcacatttctaacaggaacttgaaaagatgctcctcaacttatgatggtgttatatctcaataaacctatagtagttgaaaatattgtaaatcaaaaatgcatttaatacacctaatctaccagacatcacagtgagcctagcctgccttaaatcagaacacttacattagtctacagttgggcaaaatcattaacacaaagcctgtttcatagtgaagtattgaatatctcatataatttattgaatacttattaaaagtgaaagaatggttgtatgggtacttgaagtatggtttttattgaatgcataagttgaaaaatcgtaagttgacccatgataagtcagagactgtctgtattgagaatgttaaaaaaaaactctaaaaaaaaaaaaaaaccatctccaaatgggcaaaagatccaggaacttttgtgttggaattgcagtggtggatgcataactctgcatttgtcaaattcgtagaatgtacatcacagagtgactttatataaatttgtaaaactcaaccaggatgtgtatgggaggggcacgtgtcgggcacggggaggaagatagaatgcagactgagatgaatgaagacagagaactcttacaaatgatttccataaccacactgcaaggggatagagaagaaaggaaccacttaagtagctgggaaacattggttcaaccgatcttataagacagaaaccaagaagagcgtatataaacactgtacttcagttgggaatttttctccctcctccaaagtatatgggtaggggccaggtgtggtggctcacgtctgtaatcccagcactttgggaggctgaggtggggaatcacttgaggtggggcgtttaagaccagcctggtccacatgaggagacccagtcttactaaaaatagaaaaaaattagctaggtgtggtgatgcatgtctgtagtgtcagctcctggaggctgaggcaggagaattgctcgaacccgggaggtggaggttgcagcgagccgagacgtgtcactgcactccagcctgggtgacagagcaagactatctcaaaaaaaaaaaaaagatatggattaggaattctgaaatgactttgtttctcctagggtggagaaagtatgtaacatgttttaggtgattcttactctgggaaaaagctataagtaaggaaaggggaaagatagataaaccctttgattctgggattagaatcagccttattagtgtggactcatttaccaaagaaaaaaatactgtgtatgtatatacacagagatgaatacatacagatacgggtatgtggcatgcatgagtcattatacatatttactgttcctctatccattgagaaggaactgtagctgggacaccccaataaaaatgggtacacctagcacctggatcttggtttctaaatactttcttcaaataaaaggaaccagtgctctttgtaggggtggtggattccaggtctagggcgggaaaacaaacaaggtgaacctgggatttcttgtgccagaaagtaaagacatgctgtaagtaaacaaacaaataaataagcatatcaaatgtgcacagaagccaacctaaaagcactcctataggcaaaggagaataaaataagcatccatgaggccataatagtgtcattatgtattaactgaataaatagataaatgagtgagaagggacaattcttccttaaggaagaatggaattttcctttcccattaataaacatagaaggaacatgggaatagaaaatcacccttagacattacattttggtaatcatttctgtgggcaagaatcacaagcagatgctaaaaagtagcatcagttggccaggcgcgggggctcacgcctgtaatcccaacagtttgggaggccgagcgggtggatcacttgaggttaggagtttgaaaccagcctggccaatgtggtgaaacccatctctactaaaaatacagaaattagccaggcatggtggcaggcaccagtaatcccagcactcgggaggctgaggcaggaggatcgcttgaacccaggaggcagaggttgcagtgagcgagatggtgccgctgcactccagcctgggcaacagagccagactctgttcaaaaaaaaaaaaaaagtgggcacgagtttaagcagaaaaaggattttctgtgtgtggtttcaaaatattctatcagtgtacttcataattataaagggaaaatagtaagtttacagtggcggattctgccgtcacccttagcagagcgtaatacatattttttaaaatctttactgtgttttccaatgcaaaaataatacttgctagttgtagaaaagagaaataatttaccgggatgtgacagcgccagcaggtgtcatgtccttccagatctcttttggtctgacctactgtacacagtggctgggatccttcttgtttgttctgttccttttatgattcaaccatcgagttcttagatagtgcttcccttcttcaaaacctgacatctctaatttataagattttgactaagttgttgcattttagagtattgagatgggccttctcaaaagtagaagcacaaaaatgtagcaaatgttatttttgcgggcttcatattatcattttttcctattgtgattcaaaatctataatgtttcccttctgctgtcagagaaaaaaatgtgggaaggagaaactacaaaatgtctcctgagatgcttgtgttttcattttccttgagcagcggggcttggagagagctgtttgatggcggagagggggtggccctgtccctccctgggtgccccagggcccagtgagtctttcctgttgtggagcactgcaggcactttggtgggcaccaggtgctggcaacccatggacagagcgagatcagcacctagatctgtgtctgcatcatgctctgcatggaaattatgttgaatggggaggtgggagtgggagacagaaggcagcaaagaatcctggtgccccaggtgttgtgctggtagagaaatggtggcagccaatatccactgagtgattattctaggctgggcaccctgctagcactttttatgttccaccataacaaatccctgaacagtctccgtggtaggtgccatacatccttcactgaaagatgagtaaactgaagctcagagagggcatcacttgcccaaggtccacaacaaggaggtggtggagctgggatggggatctggctccagaacctcccttgggcagggatatgatgtgtaaagaacattcattctttacctcatgtagccatgatctgggagaaagacattcattaaacaagtgctcccaatttatagatgggttaagagtttcagccaggcaggtggctcacatctgtaatcccagcactttgggaggccaaggcgggcggatcacttgagtcaggagtttgagaccagcctggccaacatggttaaatcctgtttctactaaaaatacaaaaaaaaaaaattagccaggtgtggtagcaggcacctgtaatcccagctactcaggaggtgaagcaggagaattgcttgaacctgggggtggagattgcagtgagctgagatcatgccctacactccagcctgggcaatagagcgagagttcatctaaaaaaaaacagagttcctactcctagagctgggtagacagagatggcacatatagatcacctgctgcttggtacatactagcacaggggtgctgtccagagactcagtccagagaaggcaggtggggagaacagacccggcagaagccagtacgtggagggagcagccccagcttggctggcttcaccaatgaagtcatatggtcaggctcctggcaaagtccagcacccgtgatagacctgtagagcagcaggtctccacacagtcactgaaacattgtttctgcaccagacactcgatgggccttcattaggatgccataaaatcagccataatcacaaaacgaaatacatttaaaggatccttattaaacaatattatatagtaactgatgtagtttggatgtttgtcccctccgaatctcatgttgaaagtgatccccagtgttggaggtggggctgggaggctaccatagccacaggcatagtagtgccccaagattgggacattcatgagaacagagatcctgttccaagaagcctcagccaggaggcagttggtccccaggagcagaaatgaaatgtgctcccacccctggggaaactcaggttggaggccgtgggccaggcaagatccaggaaccacactgggcttgggaaacttggtgattctaagaagactcaatgtcctttatttcctctctctgcagccttttgatatttaatcaattaggggtgctaggaaggtggcagagcaaagcgtatgacctttggagggccttaaaaggcaggtactagatccctgtgtaatccctgggaagctactgcacctctctgagcctcagttttcatgtattaaatgatgttattaatgtccgccacagggctaccggtaggatgaaataaagtgtatctaatatgttgagtacagtgcctgattcataataactggttaataaatggcactgctatcattatgattaatttcaaatgctagtcaatctcagttgtccttaaaggaacaaggaggttttgtggtccattctttggtggggtttgaagctggggggcaggtgcaaagaataagagatccgaagataaactctcaaagggctgttagcccccactgggggagtgggaagtgccaagttccatggggccttcccagggcaaatgctgagaacctgcctgaccccccaaggcttctccacttagggcagtgccgtcctgacatcccccgccccagactcaaaccaggccttcaggagctaagtgggctgagcagctggaagcaaagcaaaaggcacattttctctccaggaagctctgcacagcagcaaggagccctatttacaaataaaaccttttcttggctccatgcccacatagccaagcccctttattccatttcaatatgcctaattccactgaaagtgcttggcaataaacagaattaatcagtcctggatgcccaagtgagtgtaggcaggtgttagatatccaaggggccctggaagggaaagtacaataaacagcaggaatataaaatgctttatgcggaggggattgaagatagaaaggactttactgaaggtgggcattttatgagcaaataagcctttgattgcctgcaactgagaggcaaactaaagtgagtggaaacttctatggaaattttttctctgccttgtttccgaatggaaatcactttattgttgctgtttttaagatttaaaaggaatatttgctccattcagacgccgcctaaggacataaacaaagtgaaaatcaccctcatcttaccacctgagataaccagtgttgacactgtggtgtgtgtccggcatagagtttctctatgcatatttttgcattcatatagaatacagatgaaatcctgttagctatgggttttgcagcccacgtttcccacttaataacagcccacggacatctttccacattaatactgcagatcttgatcatcgtcttttcacagctgcacagtcttgggtgcattacatctccgtgcgatcaggctgtttcctcagcagcattgctaaggcatcttctccccacctggcttccacgttcagccacatgggccttcctctgcacactggaacacttctttccacttcagggcttggcatttgctgttctttctgcctggaattctcacttcctctttcacataattagtttgttctcttttaaatttcaaccgaaatgcttcctcctccaggaagtcttcccagatatcaagaccagggttggtctcccctggcatacactcaattggttccatgtgctttgccatctggtattattacaattgtaactaaatacacagttgtgtaatttgtttttgtttttcttacagaatataagctgaggaggtcagagactgtgtctgtcttgctcagaagctgcaaagtacgtgttagcttataggagtcatgagtatatatactcacagactaaatggaaagaggaaaacaagggagagccacaaacacgtgcttacatggaatgtccacatccttccacacaaaagaggatctatcagctggttactggttttggcatctctttgtaaatatgaaaactataggtgaacagagtgaagaacattcctggtgtctgggcaccctctttgtgctggctgccaggaagtcagagccaagtctgtgtcctgcctgtagctgggtctacagtcccacagagcagggtgtctggaatatcactcatccaggcttcatctcttttcctgtcccccattttccttcgccccatttcctccactcattcaaaatttttgctctatgtaaagagaactctctgcaacttttcggccaggaaactgtacagatctaggagaagtcctcggagatcatctagcccaagtgtccagcagggagactgaggcccagggagaggaaggacatgcccaccttcacacagccagtcatggaggccccagggctcctgtccttccctgctcaaggaaaccccaggctctgtcaggcccggtttaaataacagctctgataacagaaagaatttgatcttgggcaactcagtttaagctgtaagtcttggtttcttcagctgtaaaccgaggactgacaggcgccataccatagtattaagaacgtggactcagagtttgctggagtgagttaaaatctcagttctagcacttagtgggtggccttggacaagttgcttaacattgctcctaaatctatcgtctataaattggcagaagaacattcttttttaaaatgtatcattgcaaaaattgtgtaataatgaataagaatatttagctcagtatgtgacatagtaactgctcaataaaagggtaagaggataataaaaacactactcatcagtaatcagagagagagggcgagatgctcagtgctctcaggccaagactaatgtgttgtctctctggaatgctccctctctccctttctcttaatgtggatttaatagagggtactcaccaccaacaacgttacgtaagctgttcatgcatttatgtcaccaaggcactatggcaccacacaacacctctcaaggagggaccagaggaaaactgttctgaggccccgaaggaggaataactaggcttttcaaacacagctggtctgttttcctcttacagacacactgacttgcttcactctctgtgttggctgccaggaagctcagagccaagtctgtgtctgcctgtagctgggtctgaacccccatgcagcaggtgttctgggaaatcactcatcctgttcatctcttttcctctgcccccattttccttctccccagtctcctccacctattcaaatctttactctgtgtttagaaactgtctctaatctttacgtttctggggaaaataaatggatttaaacttcatacagactaaatgcaatgtggtatgctggattcactggatcctggaaagaaaaaagacatgagtggagaaactgtgaataaggcctgtagtttgtttaacaatatttactgatgttagtttctcggtcttgacaaatataccacggttatacatgatgtcaacacagaggaagctgggtgaaggataaacaggaactctcggcaacttttcactaagtctaaaatattccaacatacatttattaaataaaaattccatacagaatattatcagattatttcccctggagtccaaacaaagcatcactcctacctgctaaaagcaaagcaagcacctagatcaacacatttcagaatcaactagacctggccgacaccgtggaacatctcctacccatctgctggcctggttatgggcacagttctagaaccagactcctcattcctggatgggaatcctgctttccctctcattggctgtgcaactctccgagcctcacctactgagcctgtaaaatgtgctcaccaaagggtaattgcttgaggggatggataccccattctccacaatgtgattatacacactgcatgcctgtatctaaacaccacatgtatcccacaaatgtacacacctacttgcacccacaaaaattaaaaataaagacataaaatggtgctaacaacagaacctactttacgggagtatcatgaggtcaaacaagttaatgacataaagcacttggaagagcatctggaaagaagacacacgatccatgtaaattaccatgtctataacaatgatgataatgatgttgtctgagtcaatctgggctgctataacaaagtaccatagactgggtggcttataagcaaagaaatttacatctcacagttttggaggttggaagtccaagatcaagacgccagcaggtcagtgtctggtgagggcccacttcctggttcatagactgtgccttcttactgtgtcctccatggtggaaggggcgaggcagttcttggagcctcttttataagggcactaatcccattgtggggctccaccctcatgacctaatcatctcccaaaggccccacctcctaatactatcgcttgtgggtaaggatttcaatgcatgaattttggaggaacacaatctgtggcaatgttactataataataagaattccccatttgatctttgcaataaccctgagaaaggaatgttactattattattatatagtaaagggaagcaaggttaaacaagttaatgatgtaaaacactggaagagtaactgggaaaggggagatatggtagatgttaatgattatgtccataatgatatgatgatgatgatgatgatgatgatgatgatgatgatgatgatgtcgtctgtctgtcctttgggctgctataacaaagtaccatagactaggtagcttataaacaacagaaatttattctcacagttttagaggctgggaaatcaaagatcaagatgccagcaggttcagtgtttgtgagggcttacgtagtgttattatacaggaaagggaagcccagacaggtggagggactcccaagatcacacagctatgaaagcaaaagcagcaaaactgggacttgaacctagtcttcctactgcaaacccagagctcttcccacaatgcctgtttcctaagagaacctgacagacgatcgtctctgtactccagcctgtctgccatgatgtggcttggtggccacatgtgacctttcttcttgtctgcatggaaaatgaaatctcctgatattagggcatgcaaggaaggcccttgttacaaagatacaacctcatcatgtgcttcattcccctggctttgcacacagactagcatccatctagtcagtcaccaacagtcagacacgcatggtcctttggccagccactccctccttcccctttacccatccctctctctcacactccccatggcctggctcaaaggccactgtgccatggtcaccactccacatcactgctgctgtggcatccctggcatcaggatttacccaaacacatggtgctctttaatttggtgatgggtgtcctgggtccagcgtccccgtggcagtcttgtctctctgagcaagttcccgggctaccctgcagcgtgctaagtgagggcttgaaattcagactgcctaagttcaaagtctgctctgcaacccaccagttgtgtggcctggacaagtcagtttaacctatgtctcagtttccccaactggaaaatgtgggtagtaatacctacccctcagggtcacgtgaggagtcaactagatgacatgtgaaaagtagatcacagagctgggcacacagttagccctctttaaaatgggagccagtaatatttcaataactgctgttgtctggattgaatgccaggcctgaagctgcccagggcacccccaacccagcttatcatttctctcctctatcctctccacgcatcgtaacaaaccctgaggtcagggccaccacagccatcagcagtgtttgcaaaacagcagcacgacaagttcgggctggcctgctgcccacatgcgtaggcggccaccccgctgctgctgtgagctgtgaatttagaggtacagcagccaggagggctccccagctgggaccagtcctcaaggtggagtgctgattgctctgctggaggttatttaaaatcagcagcaaagagctccatgcacagagttttccctccctcaggccctcctcaccttgagcccgctgccttctgcttcagagcctgggtccacgccagtgatgtaaatgcaaggccgtactcagctcccccacggatcgtgaggcccagggaccggccgtcccccagcccaggttcacctgtcagagggagaggataacattagagggactggaggagccatcccttcggggacagcaggctgcaaagccccctctcgtactttgaagagcgcatcttatccgactgcaaggaggcccaggccaaggcctggaagataccctagaacattccagttcctgccccactctgcctctgacttgatgggtgaccttgaggaagcccctcaccccctcttggtcacagtgcaagtgtagtggggggaaggtgctgagggagatggcctccgggatcccctcagggccacacccgggactactcagacactttgctcatgctcttcacgccacagtggccacgttcactgaggcttcagtcggggggtgactgttcgcgccccggggtctcagttaggctccatctccctccttaggatcaaggctcaggccaggtcacggcagccaccaccctgcttccccagggtctcctgtcacctcaggggtctcccgtcacctcaggggtctgcctccccaggggtctctatcatctcaggggtctcctgtcacctcagggtctcctgtctccccaagggtctcctgctccccagagttctcctgtcaccccaggggtctcctgtcacctcaggggtatcctgtcacccagggatctcttatcacctcaggggtctcctgtcacctaagggtctcctgtcacttcagagtctcctatttctccgggggtctcctgcctccccaggggtctcctatcacctggggggtctatttctcctgacgtctgctgtctccccaggggtcttctgctctgccatccatcctagggaccatgatggtccctggctctacatacatagggtgcacccactaaatgcagtcccgtgctggggcttggagatgagacagacacagtcctgctcctgaggggcccgcagtctagggtacagacagtcaacaggccttcacggtacagtgtgagcagcgcgtgacaaagtggctgagggccacatgggtacagagaaggggcaatggtcctgactggcgtgggggggtgcttctggagaaagtggcatctctgatgagacgggagggtgagcgagagtcagccggcggggggaagggaaaatggaacattccagaatatgggacggctcaagtcagtgctcaggagagcaatcccgcccgggaggaggtgagtcgcagtggccacagcaggtgctgggggacagggtgggctcacaaggacacgcaaggggtggctgcgggcagattctagaacggttcctaatccatggggaagctgcaggaacatgcaggttaagtgtgtctccggtatgaaagagggattcatggaaagaaagcaggggaccagaatagctgaaacctagcccaaagagacgagaaacacctggcacaagacccagtgacaggtaagggatccaaagagagcacagtgtgactgcccacgggaagggagcggtgggagaaccttcaggcaccaggaaagacacatttcattagggaaagccaccaaccagatttctatttcggaagttattcgtccaagagttatcaagtgttctgtgcccttaaatgtgttatctcattgaattcttcaaccaccttgggcagaggtggtgaacaagaggactcaagtcccagcttcccaggggagggcacagctgtgtgaccttgagcaagttacttacctctctgtgcctcagcctcctcacctgaaaatgaggacaataatatctgcctgtctttaaggttaccatgaagaagatcaaattaagagacaagtgagagcatgtggccactctctgcccctagcagatgctcagtaagtatgagctactgttggttctgttgcacacatgacaatcttgttgggaaacctgacaatgtcacacagtcgcagccaactcatggccaagtcagactgggttctgcccacctctggaactctgaactctttaatttgctgcttctctctgggacctatctgggaccactgcttgggaacaaaaagcggtggctttgctcctactggttgccaaagatgtcaggaaagagtccaatagacagtgactctccagggtttcgttccaagatggcagctctgcggtttgtcagggtggtctatcccatgtgggatggtgccaggagggcactgctcgtgggatgggcccagctgccttagtccaggaccagccccagttttctcctcagacagaagaccacattagtaaggagggccctggtgaggcccacagggctctgcaggaagcaagcagagacccacatgcagccactggttagacagatgttctggaaacagcaggctctgcggacattgggaacagtaacccagcccccatgatctgacccatcctgccccagtgctgtgccagcccaaggcttgagcagatctgagggcacctgggttcaaggcccaccctggtcccttgtcaaggcagctctgcatatttgggaggaaaccacatggtggttaatgcatgttcaggctccgagccagactgccaacttgctaggtatgtggccccggccaagttgcttcacctctctgtgctcagtttcctcatctagaaaatggggaaaccagtcacgctcacttccttgggctgctggagggatgaatgggtccatttgtgtagagtgcgtagggtcgtggctggcacagggaagcctaggaaacagtggctgtcgttatcctcacagtggcatctcagccaagccagcaggtgcacctggaaagcaggtgtggccttcctcaggggagatgatgactgtgggctgctgtgcagctgggaccaccatgtggacgtgagccaggctggagttccatctacacgctttcgagcctgagtctgtgctaggccttgtgctgggtcactccagaagctcaggagtcaccgggtggtagagaatgctgagaggaaagaacaaggccacccaggacgggacactgctccccctccagggcaaggcgctcctcctcagggcagcgagtctctcctcaagaactgccctaggccaaggggcacctcaccagggtcacaaccctccctggaggcagctctgtggctagtggctgatggcgtgggtaaaagccagccccagcctcaattctggacacctctgcgggccatcccagctccgagctccctgtgggacctgccgagatccgtgctgagaaggcacggcagccctgccctgttctctcactcctttgccagtgttgaccccagggcactgccgccgctgtaacaaatcacccagtcagagcctaagagcaacacagatttgttatctgacagtttgggaggttggaagtaaaagtgtgccaaaaggaccacacttctcctagaggctccagaggagaacccgcttccttcctcttccagcttctaggggccacctgcattccttggttcatggccccatcctccatctcaaggctggcagcacggcatcttccaatcagttgctctctgctttttgcatcacgtctcctttctctgacctcctgattacatcttgcaaggacccccgtgatgacacggggcccaccagacaatcccccacgtcaagaccatcacatactcacatctgcaacatcccttttgctattaagggttccactcacaggttccagggaggaggaggtggataccttcagacttgaggatcacttataatcctttttcaggcaaatctttgtctcagagtctattcccaggagcccagcaaaggcagagctccccagaaatacgaccaatgagacttgaaggctggggcggggtggggggcagccagggacagaagagggaagatgccattccaggagcaacagcatgtgctaagccacacacaggacagcgtgcagccccgaagagtcaccacacgggtcctgtatggccagagctggcaggagagtgggggaaatggctgagattcacctccctggtgagggtgccatgagccggctaagaggctgggctatgagcaggacagtgacaggctccaaagtggactgcaggaagctcctggaaacgggaagcaggagaggggtgactttgtagagatcccccatgagaagtggggtcttacgatggtggtgatgtaggaggaaggtggggttcagatcagggacagaacagaaggctggctgaggacacagtaggcagctcctgccttgatccccattcctgccacgcctgcagagcccccactccatgctgcaccttaaggccttggaacaagccaggcccggcctgggtctacacacccaggatctagcccagctccttgggtgacctgcagtcagtcccccgccccccccaccccggggcccttccagctccaggacatgaagatcccagcagggagagagccaaagaagcttgggcatctttgcagtcaagcccaggaacacgcagatggcagcccatgtctgagcagcccactctgaatactaaggatgaaaacaaacctccccacctccccgccacctcccataaattctttacatcagaataaaatgagtctttatcacagaactgtaataacagttcatcaagcacagggtaatctgcctctatcacttgctgaaaattcaaccaccatttggcataatcggaattcatctatgggaaagcaaatgacactgtgagaagcagccgggcccagtgaaataacaccactactgctaataatattaatagaataataactcaggcaattggtcaccaatgtactgtttcctatgtcccaggcaccgtactcagccctttatatgcattacctcattaatcctcactcctcctctatggttttgttgttatccccactttccagatgaggaaactgggctcaactctcactgagggatgaaatgatggggctaagattcacatacccagccacttgcttgcctgcagtgcctgggcatttaaccaatgcaccacactgcctctcaccggcctgattcaagtcttggttctgcccctcactcttgggcacccttgggaaaagccctgttgcttccggatcttcagttgcccagtctataaaaagaattgtgcaacctgccgggggccagcactcctgtggccaagccagcagccatctcccttcctgccttgccacggagcctcgactaggtcaagaggcagccggagcagctccaggagatgacaccagcctaggttatccattcccttaaccaggaactggaatgcatgtaggtaattctgggccagttttggccaagaggcatggtggggatgtctgctaggggattctgggtaagattccccactctgaaaagacaggaacacagaagagaagggcctcctgctcccttcacccactctgctttgggcacggttgtgagaggcttgatggcaggtgcagtggctgccatcttgcagctgtgaagcaatgagcccaaggcaagaccaacaacaggaaggagagactcactccctagcaaaccagagctcgggctgcccagcccacacctctgaagagaacagcgaacacctgaatgtgtgtgctcctaaaatacaggctttcgtgatccacagccaaaagcacccctaactgatagcgccatccagggctgttgtgaggataggatgcgtgggctcccaacttccacccttgctcctgccatctaccctccatccagtagctggacagtccggctggaacctcatatgcacctggtccctcctctgctcaaagctctgcatggcagccatctcactcagaggaaagtccccagactcggcctggttgcccatgcctgcgcctcactcctctgtaatctcacaggtcttgctgctgctcctcaagaggccctgctcactgcctgaggcctccagccacctggagcactctgcccagataggacggatccgtgtatgacatttccttgtcagcttcagatcctttcttttgtcaccttcttagtgaggccgtccctgcccttctctaacactgccccacgcacacaccaccctcccatgccctttccttgcttggtctccctcattttacaatagactgtatattatttcttttcatgcccgttacggtcccccccaacacactagagcgtcagcccttgacagtggctaaggtgttgtctgttctttgtctgtcactgctgtatccccagtacacacagcaggcccattataggtacttggtacatattttggggaaaataccagtacctagtcagcatttagtaactgacggttgttgctggaattcattctatgtccaggcactgtgctctgtgcttataagccttgattattaatcctcgaaacagctcacatggctggcatgaccatcctccaatcatggatggggaagcttaagtgactcatccaggttaagtggcttgcccaaggtcacacagtcacgaagtttcaaaaacaagcttcaaaccagtgctgctgagcccaaagcccctgctccttgtgttccaggcttgtagcagcctgagcgaagggcaggtcccatcttgtttctgtggctgctggagacacatgagcttggcggagtgctgcttctgctgcagcagggtctaactgctcactgcagagtaaggggccgtgggacaggacactgtagtggaataagacttaggaagttctcaataaagctcatgggcaaatgaccgggaggggtgaaaggggcatctgagttctacaaatagctgttcctgcccgcatcattcctcgagcagattccagatgctgaccaagatgactggtgctgtgtgcaggcaggctctgctgttctcctggatggagccaccactgtggctgtgcgagggccggacccaaagagccagagccggggacactgaagggaccaggcataagcctgagatatgagcctgacctgtcccagccacctctagctgtatgacctgggataattcatgcaggctctccaggcctccattttcatctcggaaaatcggaataatgacactatctgtaagtattttataggacttgcctgccagtcaatgactctacaaaaccacagtgaaatctgaaaactgcagtgaagagataagcccctgggagctgtgcttctatcactctggatactggttcattgccacattaacaaccccatctccaaaaatatgggtgatagaagtgtaagtgtggtatgtggaagcaatagaagcaggagacgcagccgccttctgaaagcccatctgtgagtttctgttggatgctctgcaagggccccaggcgagccatgacaccttcacagtcagaactcaagaacaggtgatcagtcctgcagctcagatggatcctctagcctgcaggaggcatggagaagggaaggcgcctgcctcagaggagggttggaaacatcatgcttattccctccaccccaaagaccccatggcaacacactcgccctccatcctgatgcagcctcctcccctgggtcttccttccttctctcctgccacccctggcctgtaagctgactcaacccatcctccatttcaagccatttcaaagaaatgagttcaccccctcaactcaggaacaatctcatcctgaatatgcacacaggagggagtactggaaccttccccaaggttcattttccacctttgaagttcaccttaactaaaacaagaaacatcattacggctccagaagttctttgtgtttttacttagccaccctcacccctcttgaaaacgagcttgcacaccttctttttcatggtcttgctaaaggtctttgcatacctagaattgattttgcttcttccctcgccagctaagagaatgcccagcaagtctctgttgtctacagaaaaaaatgtcccccacccacacacattcccagcccagcatctcagcctgcaggagctaactccatctacttctccaaccttgtttcacagccaaaggaatcgcttaggagctgtcttgctctcttaacctctggatactgtcatgctgtaccctctgtctgggtcacccttcccttccactgcacatgtccaaacctaaaatgctgcctcctccaggaagccttccccaatttctctagtggcaggacctcccttctctgcacactacagcactctccctgtccctttcagaggacatgtacacatttatacctcatagaatgtgccagaacaagtcctgtgccacaaacttgcctcctccactggggaggtgaaataggggaatggttaggatcaagagcttaataagacgcagaattaccttgaccctggacaccgccacgtccctgctgtgaccttcagcactgtcatcatgttgtaaggcatcacataaaggcccaaagtgaagacagatcaggaaaaaactcatactacctccacccacgaggacagctactctcaaaacaacagaataacaggtgctggccaggatgtggggaagaggaaccctggtgcactgttggtgggaatgtaacatggtgcagacactagggaaactgtatggtggttcctccaaaaattaaaaatacaaccaccatatgctccagcaagcccctttggggtatgtatccaaaaaaattaaaagtaagcagaaccaaggtttgaacccaggcgcctgggacccaaggtcttaccatccctgccacactgatgctatcccacttagccgcccccatgacaaattgattctagtttatgagagctatagaggctgcgggttagaacaacatggaagccatacagtgagcactctgcaccctgccccgttcacttctgaggatttgacagtgtttaagagcagccacgtctgactccctaagcactacatctgttcttccctctgtacttttcttcagcctcacgggacaggtctcataccatggcacagagaaggacactcctgaaaaggctataaaactataaccagctccaggggatggcataaggattttcaggggtaacttggcacatgtgtgatttttatgctactattgccctgagaacccacttcctgagaggtatacttctctgtggaggttatggttacgagtccaagagtctggccgtggctttttggactatcagagatgggaccaggctgctggagagaagagaatcagaccccaccaggccccttacccaggtccagcagccagggatccagagacatcagctcatgccccttcccaatagggaaatggggttccacactgtgtcaggaagaggaggaacagggaggagggtagatgcgccagtctggggtgtggaatctgggacggcctgtctctgggatggttcagggtgtctcctgcctccttcggatctgggtcctccctggagtatgattcatgcagccttcacctctgcattattttattctgagacaggagctcactctgttgctcaggctagagtacaatggggcaatcacagctcactaagcctgaatctcctgggctcaggtgatcctcccatctcagcctcccaagcagctgggacacagacacatgacatcatacccggctaatttttttaaaaatacttgtagagacagggttcactacgttgcctaggctgatctcaaactcctgggctcaagcaaccctcctgcctcagctcccaaagagctgggattacaggtgtgagccactgtgcccagccccacattcttatatagttattgagactcccagaggcaccttacctaacccccaccctcccatctgctcaatcctgcagacactggcctcagtcttacttcagggcctttgcacatgctgtccttgctgcttggattttcagtccccgaatggcacatggcagctccttctccctctctaggtctcagctcgaagccgtctcctcagagaagtcctccctgatcacctcaatcaaaacagcccgtacctcctggcactttctacccggctcctgatttcacttcctcccatcagtttgcactgtcttaatatcttgctcactggtgctcattttgggattattgtctcactcttcccaccacctccaaatctggatgcttcccaagagcagggccccagtgctcttgtccactcccataacatcgtcagcacccaggtgctcagcaaacactaggagacttgctggctgggctgtggttgccacagcctgagcctcaggttcctcatctgcaaaatggggatgatgacacctacctcccagtgtggtgcgaggaggactcaggaagacactgtgagcacagggctgggcacacaagggctctccacaatgataagctcaactcaccccatgccctgcatagaaaagggactgagaaaaagataaacaagttctgtgcccaacactagacagctgcccttgatcatgactcaataaccactggcgcattctctcaagattgtcagagaacaagttccctggtggggagagggtacgagcccaccagccctggcaaccttgacgcggcccgggctgctgtggtgcataccaacaagctacctgtgccgctcacctccaatagaagctgctgtgatctctgccgcgtcctgcatattgacgttcagcaaagaacacaaaacacattaaataaatgttacagtcttatcgacaggaaaaggaggctgagaaagagtttccagaggcatggcacttggcccagagccccaagccatgtggcctctggcagtcagtgtcaaggtcctacacaccagggagctgcctgcaggagctatgttcttgttccaggagtaaccaaggggtgcaatgcaaacagcacccagagagaagggtaagatatagggaccatttcagccttcctgtgtttcaagaaacagtacaggtctggggtcaggagggtccataggggacatctattggtgtccctgcccccttctgcaagttagaacaccccacaggctttgggcaaccacccctctcccactggctacagtcttggtggtcttgtcaatcaaagccctagacatccctgccagcccgtgaggtgctccctctttgggaatcttcaggggaaggcactgagaacggaatggtggacatccccctactgcaggctgcaccctgagattctcggctcaattctgggactgcccctgtccttccagtacatccctgctctgtaaaatggccagggtggtttctgttacttatgcccaagattcacactgcacaagattccctgtggagcagcaacctggccacattcctggcagctatgtgtggccatgcacctgggtctaggccagtgggaatttggtgatcttgaaattaaagagatgcctctctttccctttcctgggaggtagaaagggacctgatgtggcccagcttcaaccacgagaaggggcaagaccctgggggatggaagatgagggaatctgggtcccaggataagtcctggagcagaactgtcccccagatgagactgtcctctattctgttacatgacggagaaaaaaaaaaactctcatttaaatcacagtattcaccaggcatggtggtgcacgcctgtaatcccagctactcaggaggctgaggcacaagaatgcttgaaccctggaggcagaggttgcagcgagccaggatctcgtgaccgcattccagccgggcgacagagtgagactctgtctccaaatagataaataagccaatcaataaataaatccagtatttaagctcttttattgtggcagcttagcctgtattataacatacactacacagtcaaaaagaaaagcaaagaaaaaacaccacccttcagtacagacttgagggaagacagacctggacagaaccagcctcttcttgcggcctccaagcagctctgctgttctgggttcgggggagaatacggtgtctgagaggctggcctcctttccccaccccactcacctttttctctcccctccttgcaggaggtgcagggtgctcctccggtcaccctcctgctgcctcagggcccaccgtggggctggggcaggcccgagggtggggagatgctgcggccctgcgggtccaccaggtgtagatgtggttggtgacgtagcccccagggatgcgccctgctgagtacacagaagcaccagcttcttggagcccttcagagcctagggagagagggatacaaaggttagaggagggaggtgccgggggtgtggaggaacaccctcccctggcccagaccttggtttttctcggagccccacatggaagaagaggccagccctgaagtccctttccttctctagccctcgatttgtcctgtgaaaacaagaacatctgtcccacccccatcctgaagtggtccaaatacagaaatatgatcttttaggatacctctgcggaggagtttgcattgcaggcctgacactgtatcctcaggaaggctcgtttacaaggccggcctttggctggcatctcggaacttggattggggagtgtcccaccattccctgactgagaaatgcggctcatgtgcttagactgtctgtaacagtaatggtttatgctcagcctgctttcctcctgggagtctggaaggtgggtacaatagacagggtctatgtctaccagcccccaataaaaactgtgggtgctctctaatgagctccctgatagacaacatcccacacctttgtcaccatttgatgctggaggaattagtgtgtctgtggaactcacagggaggggacccgtggaagcctgtgcctggtctcctctggactctcccaatgcaccctttccccgtgatcattctgctctgtatcctttggatgtaataaacccagccacaggtacaaccatatgctgaatcctgttagcctttctagagaatcactgaacccggtgtcatcttggggaccctgataaaataccaagcacagagtcgacagataaaaacaatatagcaatcgcttaacatttataaagggcttgtatgtgtcggccactctgcgctgcaccgatatgcattatctcatgaaatcctaatgaaatccaatgggggagggggactgcagagggaaggaggatctcatttgtcagatgaagaaatggagggaaactgcctgcccacacagtggtaagaagttcctttctcagccgggcgtggtggctcacgcctgtaatcccagcactttggaggctgaggcaggcagagcacctgagaccaggagttcaaaaccaccctggccaacatgcaaaatcctgtctctactaaaaatacaaaaattaactgggcgtggtggtgggcacctgtatcccagctacttgggaggctgaggcaagagaatcacttgaaccctggaggtggaggttcagtgagctgagatcgtgccactgcactccagcctgggcaacagaatgagactccttctaaaaaaatagtaataattaattaaaaaaaaagaagttccttttttatagcaactaattcgagtgtggaacaccatctttattgtacatttcccagtcttcagatggaaccaccgtgagagaggcaagcccaaaactctacagcctggggtggaagctgaggtctgccatattgcttcccacaagacgcttgcagctgagatgaagacattgacccaaggagacactcaccaagcacaggattaacaataaacatagcctgtgttagggactgaatgtatttccctccagatccatcgccgaagccctatcctcaatgtgatggtactttggagatgaggcctttagggggtaacggagttagatgaggccatgagggtaggaacctcatgatgggatcagtagctttgtaggagagagagttctggtctctcttcatgtggggacacaatgagaagatggaagttttcaagttgaaagtgggccctcaccagaatccgagaacaatggcaccctgatctcagacttctggatccagaactgtgagaaattaaatgtctattgctaatgccacccagtctatggtattttgtatggcagcaccatctggctgtttgaataaatgatagaattcacacacactgaaatttttgctgccattgaaatcctatttacaaaggttgtaatgccatggaaatgtgatatattttatgttaagtggggttaaaaggctataaatcatgtcttatagtatgaagtcagttatgttagagaaaaatcatactggaaaaacaaaatgaaacaaaactgagaagtaatgtgccaagagctagcagtgcttctctctgggtgctaggattatgggtgattattattttgctcttccttttctcaatattttctaaatgttccacaatgaggtcacattgctttcaatatcagagaaaaaaaacaatatgcctaagaaggggggtgaacacttagctctctgcgtcccccaagcttccccaatttgcacatacagctctaccaactccccaacactctcaacagacaaactagacctgggctgagctttcaaagacaggagggagccctggctaggcaaggcctgcgggaagagcaagtccctgacatttgagcctctctcagcagaggaagggtgagccaggaggcacccagccctcaattctacagctaaatcccagtctccagtggagggataacgaggatggcgtctcccaaaattctgcttttataaaagatttttgtgaagatgcacagggtaagatttacagtatcttttagcattccccagggctcccctggcagaacagtcaggaaaatcaaatccctgttaggtgaagaggcaggatggagaaagcctgagaccaagtgggcttcccccagagcaaagtgaaagtggttcagggcacaggagacgtcagcagaagcctctgaggccaccacatcctcctggcccctgtcttcctgacctctctttcctctccctctcgtctctgcctcctgctccctttccatgagggcacagctccctgctccagtgctgttccgcccggcctgcctccttctctctccttcctagacagactgcaacactacaccacagcattcattcaacaagggctgaccaacgcctactgtgtgccaagcctagaggagacaaagtgggtctatcctcatgacaggctgagcctggtgagaaacaaggaggcatcacccagcacacatcaggtcctcatgacacttatcctggtgaggaacaaggcattgcctggcacacagtaggtcctcatgacacttgagcctctgagagacaaggcattgcctggtacacaataggttttcatgacacacgcctggtgagagcaaggcatcgtgtggcacacagtaggtccttatgacacttgagcctggtgagggatatacattgtcctgcgcacagtaggtatttgtgaaacttgtgcatagtgaagagcaaagcataccaggtccatagaaggtcttcacgacacatgcctggtgagagacaaggcatcatctggtcacagtaggtcctcaatgatgcttgcagcctggtgagagataaagaatcatccggcacaagtaggtcctgaaaaaagactgcctgattgattaagaaagtaaatattgcccccaaaagaaccgttaacatccacaggcattctcctgcacccacatctagtctggaaggttatgctcggtcaggaacagaggagtgcaagtggaaaaatcacacgtggattgtggagacagagaaatgggattccagtcgcactggtgggattccagtcggcttaccagtggacagtccttgggcggttgcttccccttgcaaagcagcatgtgtgaactggggagaaggacaatgctcacctccagggcaccgtgggttaaatgagacaatgtgcataaagttcagagccttcttggccacaagtaggagctcagcaaatggcagagcccactcccctccccctcagcatgtctgcatggaatcgaaaaccatgcggtagcaaaacgttgaccaaggagtttaaaaaaaaaaagggaaggaagaataaagaacaatgcgcagagcatcatttgtattctttatcaccagcaacagtagatcctcttggtcagttctataaataggccagcagcaaccttgcgaacggagaggttaatgccttgatgagaacaccacagagagccagcgccggagagggcctgggccaagtcgctgagctcccacaggctgcccacccccagtattttacagaaggggaccctgaagccccaagatggaagggaaacatagggttcaggagtacaacaggcacagcccaggacgcaggaggccagcctgggtctccttcccctctgcacctcagtttccccatcacaggactctgagattagaaatcagacagccactcaagcgtagaccattcatctacctctgataatgactattctttaggataaatatgggctttttctgggtgttggagagcaagaaaatcatcatcctctactgctttttatatttctggcgaaactgatgataaacaagattcctgagacagactttcaatatctcgcaggctcttgggatatggtcttggtgcagtggccatcagaatcctgcaggaacagctcatccattgctgtttaatgccactaaaatgtgtgtgggtcatgcagggaaggggaagagacggtctctgctcctactgccttcttgtctccatttctacaaaccattgcttgcttatttaacggacatcattcaacaggagagttatttcctaaacaaagctggtcatgttttttccctgtagccaccctgccagcctttcaaactcacccaccattgctaccttgatccctgaggtcaggccacctgggggatcgcgagatcctcacccatggttacgtgcaccagaccactcatttacttctctcaccagagcagcctacagagtgagtagcctcaggcagcagagcttgagctgtgagacagagacccagcaggtccctgttgtgccattagcttggtgggtgtcctaggttacttctccccttgctaggtcttggttttgccctctggcaatgagcaggttggacctgttgctaagatcctgtcccaagttaaacttctatgtctttctgattcagggctgtatttaaaggaaagactgtatttgctctcatggtggtcacaggtcattaaagcagagagatcagggctctgggacacccagggataactccaggcaggctgagggttgcacctatgggcacctgcttctgggcctggaaaactgtcctcagtttctcccatcccagcagtgagcacttgagcttgctggctggtgttgctaccaggtcactgaaccagatccagagcctgggggctctgaggtccacagggtttaagaaaacaccagaaggacaattggagcatctcagttatggcaggatcgcaccccaactcggcactatcagcagcagcaggagattttgacaggacttgaaggccaagggctgcccctccgaggccacggctgtgtccttgctctttgtaggaagctgcctgcagtggtaagtcacatccaacacatccatctgcacgctagtgactctccatcaaccacaccctctctagccatgacagctccacaggatccaccagtcttcctgaatcaatggcatattagtgtgccacctcacacaagttaccaaacctctctgttcttctgttttctctcctgcaaaagaagatcaccattctcctttctctttacttagaggagccctattagcacaatgcctatcctgaggaattcaacgagctacggctgaaaaggaaaattgcaagatctggggagagcccacgcatgcagggatggtcattagagtgctgtgttcccatacctgttatcacgtgtttactgtgaaacttgaccctggggcattccaccaactcaaatcatagagaaatctcgatctgaccagcagatggcacgactaagatactatccatcaccagatgactattctggcagcacgtttgattatggaaatgtaaattatatgtgtatgtcttcaaacttaataacttgctacttggttaatgctctcaggaggcaaatttgcctcactcagctctttggagccaactctgaaacccaaaatcatagaccaggctgacatgattctctgcttagcagaggagtgagaaatagactgagagggtcacagtgtagggggctaatgggatgtgttaacatggcagacgcacacatgctctgtgttcaaaaccatacaccaaaggcaagcatggggtggacctcaaggtcacaagacatcagatcactgtgctgaggagcacgtgcaacagaggtattccaaaaaagtctcaagcaggacacgtaatgatgagtcacccagcttatttcagggtgcagacctcaaagggcaaggtttctcttttcggaaacagagactcaacaacaggaaggagaactggtctaagacccatctagtgacccagaagggaggaaaaaattatgcatgcctgctcttcgcagccgcaccttgccagctggggctttgtgtgttcagactcaccggacaatggtgttggctctgtagatgacttctgtgtgacactgagccaattgcctaaactctctgtgcctgtttctatatttaaaaagcattgctggtcaggcgcagtggctcaggcctgcaatcccagcactttgggaggccgaggcggtggatcacctgaagtcaggagttcaaggccagcctggccaacatggtgaaaccacgttctactaaaaatacaaaaaattagccaggcatggtggcgggtggctgtaatcccagctatcaggaggctgaggcagaagaattgcttgaccccaggaggcggaggttaccatgagccagattgcaccactgcactacagcctgagctacagagcgagactccgtctctaaataaatagtatataaatatcaattgttgcctgggcacagcagctcaggcctgcaaccccagcacttgggggacagaggcaggaggattacttgaggccaggagttcaagagtagcctggacaacaggtgagacgccacaaaaaaaatttttttttttaaatttaaaattatccaggcataatgggtgcacctgcagtcctagctactcaggaggctgagttgggaggtttgcttgagcccaaagatcgagactacggtgagctatgatcgagccactgcactccagctggggcaacatcgcagattctgtctcaaaataataataaaattaaaagcaactgttgaaaagatttaagaaacttaaactgcgtatacagtacctagcacatggtaggtactaaatgcatgctaattcccttctgaggctgccagttccttctcccaaacagaggtcccagaaattctctaaacctcgaatcatatggacacaaacacgtgtcccccaactttcttctttttaagaaacatccttctttaaccacatttcctcgtatctgcgctgccttcaacactcagctcctttcccacgacctccagaaagcttcccagattgtggctgactctgtcctccaagagcatccagcacacttctgtgatgtgctgccgtctataccacaggctctgagtcacattcgtgatcttgtctttaagactaaagacaagttccttgaggcacattacatgttctgtttcctttagaacctctccctgctcttttcactcgtttagccaaccatccattcattcatcgttgaacaagatattcaatgagtttctatatgccagacagcctcaggaatctgttcaaattaggacacagagcagtgctcttcagatcagtagtcaggcagtccacacttctccactttaatgtgagcatagacacattagtacacatggaatttggagagacaagtgaagaaagtgtggttaagagccacagccctggagtaggctgtgggaattccatcctagctctgccacctgccaacagtaaccttgggcaagtacttacccaatctgtgccccagcttcccaggcaaaaaaaaaaaaaaaaaaagagagaaaaacataggtattatctcacagggtagttctgatgattaaattagtgtgtgtgtgtgtgttagagtgtgtgtgtgtgtgtgtgtgtgtagagtgtgtgtgtgtgtgtgtgtgtgtgtgttatatatatatatatatatatatatatatatatatatatatatatataatatatatagttttagcacctggaacctaggtaagagataccaaaaaaaaaaaagagagcgagagtgaaaagataacagaggtattatctcacagggtagttctgattattaaattagtcaatatatattaaaaggtttagcacctggaacctaggtaagagataccaaaaaaaaatttttttttttttttgtctaacaagaaattctgggtactgtagagaactcagtacccagaacccagagtggagtctcaacccaccacccatggtaacgactgatatgtgttgatgtctgcccttcctgactgctcttgtactttataaacacgtatatatacatatacaagcttatcatctgattacataatcaactcacaactgaacattttctgctccatctttttttccactaaaaatgtattttaagatcttttcttaccagttcaatgacataaagctcatctcttccaatactccatcccatccctggaagggactcaccactaccgaattctcattctcctatcaatggacatttaggggtttctcattttttgctagcaccatcacctgcgatgaacatccttgtatgtgccatcttgggcattcatgcatctaattccctaaactagagaaaaatggaattcctgaagccataggagtgagtctttattcacaatcacatttccttgccagtgtcccctggggcatgccttatccttttgtagttcctgtatctacctgcagggggaagcactatgccatctgggcctacagagacctgaattcccctgacaatgtggacagggctgggtggaggcctcgcaatgtccttctccaagggagtgctcactctggtggagagatccacactccttcgtgctttcttccacagttccaaaaagctcccagtttaggcagatcttggctctatcttccaatcatctgggggctaatcttgggccctaaagcactgcaaagcaccaaaatgaaaacggtaacctggtggtgtctagggtgcgaactccctcaaaagtgttttccagtggaaggtacagttgctagaaagccatctcaaacggtgttcaaccccttcctagctatgagacttcagacaagttacttaacttcttggcctcagtgttcccacctattaaaaggggccataacgcctatgctcatggagctgtctgtaaactgaatgagggccaatgagaaaatgtgcataaagcatcttgcactgggcaggggcacaggaggtgcttggcaaatagtgggtagcattagtaacagcaaaattacagcgatgtgccacattttattcttcccactgcacagatgaggaaagcgattctaggtggtgaagtgctatgcacggtcacagaagataaaaggcagggcttttatacctctctcctcgcttctctcattgccctctcaccagcagtttaaggggattcacacccccttaaacaccaggccaatctacaccttggcccaagacagacaggggagggtttttaaaaaggacatgggcctcacaggtgtaaacaaaagaaagtcccttagggtcttgaaccccaagcaggtgctgtgtccagccaatggactggaaagtcccttcccatttagccctgctttgagggaggacagaaattggtgagcggactctgccccagtagcatattttaatgtcatgagaaagtaaaaccctaattagcatctgtcttccaagctccttccatctgtaccattttcatctgtgttaattacctcttacaggaccactaactgcaacagcttcccagcctcctctctcagcccagtcactgcagagcaacagagaatccttataaaacatacgtggactctgacccttccctgccccaaactctccccttgcttctgctataaaactccccacagtgcatcttgggcctgtgcgcctggtcctgatgctggccagcctcatctcctgccctgccacctgagctgtcttataggatcaagtactccagctcttttccacttcaggcctttgcacgtgatgctctgtccctgaaagtacatatctcacatacttacttatgcaaatgattattttattatctacactcttctcagttgaccaggaagcaagaaattgttgtggcttgatcagagatgtatcaataaatagaaaacataggagatgtaagagattccacataaagagacagtgaagaaatgaaaggatgctttcttcttggaattaacaccaataaggaaatttacctctcctgaagttaccaatgatttctctagtagaatggaataatccattaatttctccttttgccttggttgctagggggctcagaattcaatttcatataaatactgttcctatcaaaggcaccacacacacatacacacacacacacacgcacaacacgtacacacacacacacgcacacacacgcgtgcacacacacacacacactttccaaatcacttctgattcctctacctttttaatgaagtgcttttcaggttaactcactccattcttttgacttaagtaagaatcttaattataaatgtattagtaaataagcaaatgagatagtaaagtttaaagcgggggttaaactacaccattcacatggtagatgctcaataaaaccctgctgagtgaataaacactaaaatctaagcacatttctagaattagataccttttctagcagctggagatggagatcctttttacagatgcttgggcaatcattctgctttctcctctacctctctccctccactctatagaaaggctctgcagctactgagtttggtctaagaaccgtcatttgtaaacattctcttaaacaaaagtccaaaaattgttattcttatattatttggaatgatgacataactgggcaatggtgtggtaagaattctgtttctcaaagaactgtgcttcacagtagcatcctcaacatctgtgtgctcatcagggagccaggacccgcgacacaccatgccacgacacggtccatctgctccggctctgtgcggccacctcgcttccttgcgcgctgcatcccagggtaaatcgagtggaccacagagcattggtgtgaactcatccaagacccatccctgaaatgcagcccaacataaggatcattaaacgcaatgacaacatacgtcaaaagaaatgcaaggaagcaggtgattcgacaattgaggaaatgtgaatacataaggataaggccaggggagatggcagagaaatgtatgatgtccagttagaaggatgggaacgtgggttcttctccccttttctggttttctttaatgctatttagatatgcctttaatttgggcctacgaagtaggtttttaaaaaccaacggctggataggagagtatttaaggaaagaagaactttaaagaaaaagttttttttaaaaaagatataaaaaccaactgttcattccttccacctcttttctttaagagtttgaccttctctgagggttcaatgtaaggatgcagaaggaaactttgcttccatgctgcgaatgccgggatctcagaggctggaagaaagacctgacattttaagtccctgctctccactgtcattgcttctaaatgtttgggtgagttaaggctgtgtgaaagaaaaaaacataaaccttcaaagagagggataaaatcctgaccttgggaataatgctcaagaaatttgcaacaaagtgacagataggctgtccacccctttgcaaaacaactcataggacagaacagattccagaaagatattgattcctctttaatgcaattcttcaattatcccaaagcctggcttttagtctgttataatttaagtaaattgctttataaatgttcttttagttttgtctgtttattctttttttttctttaaggaagaacaagattctcagagtcataatatattcactcaagatgagccccaatgggtttgcaatggcacattttgttgtctgggatgatgtccgaagcacagagatccatcaggaatatctgtttatatccatatcgttttctcatccatgaatagatacgttgatgggatttagtctcctcccagactcttgacatccctgtgctcatcactttttgacaattctcagttgaaaaggtgatgggcttccaatttaattcaagtcagatgaaaaatctgaattcaaggtggattaatcagccatttcctaaaaacctactcgccgatgtctgaaaaataatgatagatttgatgacactgaaatgcaaaactcttgtgataatgggcacaggatatcagtcagttatgcacgaaatatatacgtgtaaatacatgaacaccacacaaacaataaacatgcaaaagagtttaacttcactgcaacatgggacagaatgagggatgcaacggaggcaggtcggagccgctgccatcaccatgacctgtggtaaccagcaaagctccccaccagaagagtatgaaaaagcagagcgcgcctcggttaagggaaagcaccagatgacaggctttttgccgccacccgcaagcagagggacttggagatcatgcagcagaagagaaaaaggcaaacgagaagcagcaggaacccaagtagctttgtgcttcgtgtccaacctcccgccctttgcctgagtgcctggagccagtcccaccatgcccacgtctcctcctgcgggcccacaagtcccagccctgatggcttccctttgccctgagtctgcagcgggtccctttgtgcttccttcccccatcaggtggcctctctcctcctgggtcactcccagggtgacaggttaccccttcccagtgttttttattcctgtggcgctcaccccaaagtattaaaagtactttgtaatttgaaaaaaaaaaaagagcttaacttcactatttaagttatgtaaattaaacaggatacctttttgtctaacagattgataaaaatggaaaagaaatataatacccagttcggcatggctggagaaaaatgaagagcatcaactgctgttaaacgctggtgggagggatatacaaaacaaattccgtcccaggggcagtctggcaacagttaatcagaagctttaaattgcgcctctcccccgagccaatgccacctctagaaagacagcccaaggaattattagaatgtgcttaaagatgaatgtgcagggatgtctaaagcagcaatatggataatattaaaaacaaactgtctaacaagaagaaattagttaaataaatcatgtacctcttcactacgataattatgcaatcattaaaaaatcacagtgtagaaacatttatcaaggtgggaacacagtctcatacatcgcttggtgtaacgaataggctagataacgatgctcagaatggcagctttggaagaattcccaatacaaatgcatacacagatgcacacagggtactctaattgtcaatatgattatttctggcaggtgagtgggtacaattattactgacttggggagggtcttttgggtttttctgaagttttcaagttttaaaaattaagtccaggctcagcgtggtgactcacactgtagtcccagcagtttgggaggtggaggtgggtggattgcttgagcccaagagctcagaccagcctgcgcaacatggtgaaaccccacgtctacaaaagaaaaaaaaatacacacaacacacaaatatatatacacaccatgctgggcatggtggcgcaagcctgtagtcccagcactcgggaggctgaggcaggagaattgcttgagcttggaaagttgaggctgcagtgagcaggatcgcatcacagcactccagcccgggtgactgagcaaggccctatctcaaaaaaagaaaacaattaagtccatatatgttaggtaattaaaataaagaggctaggcacagtggctacgcctgtaatcccagtgttttgagaggccgaggtaggagaatcgcttgagcccagaagttgagaccagcctgggcgacatagtgagacctcatctctaccaaaaataaacacaattaccaggtgtggtggtgcacacctgtagtcccagctacttgggaggctgaggcaagcagatacttgagcccaggagttcaaagctgcagagagctgttatcgcgccactgcactccagccggccaacagaataagaccctatcttttttttaaaaaaaaaaaaaaagtgggggtggggggtggggagaaaaaacgttttatttaacagcctagacaaattcctctattccatttgtttctatgaccaaacaaaatgcccctttaacttgtccagtctgtgacagcagagttaatgacaccagcctttcacatgaggcccaggagagagaccctcctctcatccttgaagtgtgctgtcaggcagtgtagacaaattcagagactccaccattcaatgagataatttcacaagtcacagttatctatcagggaatttccacagacaacgtacaaaataaaaacctgacaaaggtcaggcatggtgagagagataagagagaggaaaaaggaaaaaaacaaaaaggaaaaagtgccaatgccacctctgtccctgaaatctagtcaataaaatgcatacagtgtgcccaggggaaacagggaagctgcagcctaggttttctcatcaaatagctacaaagccatttccacaagaaaaaactcagggaggaaacgcacatttactgaactcctgctcttgccagcaccacgctggctgtatgccgtgcttctccgttagcagccagccgagagccctggcaatgagcatgcatttggaggccagaatacctgggttcaaatcctagtcccaccacccctgactgtgtgccctgactgtgtgcccgtgatgggtcacctcctcttccaattctcagagtcccctcccggggggtatggtgaagtgtcagtgggggatttacatgaaacccacacagagcttgtgatgtcaagaagattcccagtggtggtgatattttttagtgcgctaagtactgtaaacatcttgtggtgttatctgttttgtaccttctacactgccaggaagagcagcatctggtaggaaaacaatcccaacacaggagtttgaacatggtaaatgatcatcaaatgttcagaccaatagatgacccagtgctttaacacattgtctgcataatcatcagtatccccattttagagatgaggaacctgaacagagaaggtaagtaacttgtctgctactttactattattcccatcacaattcactgaagaggaatctgagaatcagagacgttaggaagctggttcaaggccccacagcagaaagtggcagagccagtcttggaaacccagggcttcggagctcaggctcgagcactgggggcatcccttctctctgctgttggggcaaagacgcaacccctcaagtcaacaaaaccaggtgtaaatcctggctctgtcactttccacctttgggatgactggcaagtgacaaactttggcaattttggaaaacaaagtgatgaaaatgatacctacttgaacttcacagggtgatatgaggcttaactgagtttatacacatacactgaaaacagtgtctggttcattctaagcctctatcaaaggttattatcatacaatgagcaacaaagaaaaaaaacaccaagaaatgattatctgtgtcatgacagaagtgagaaaggccatgacactgcgggggggagcgggtttaggagggaagagcaggctcctcagggtggggacagcggcagaggtgagcaggcaggtccctggagaggacgtactgaggttgcacctaacaggataagtggtgtcaacaggtggagaggtgaaagccttgcttcagaggagggtatgttgcttgcttggccaagagtggacacaactggggaacaggactgctggtaaagatcagagcatgggcagcccaaacaccaggttgaggacttggcgtctgccctgcaggctcccagctcaagagcagggttgtagacagggcacagctgatgagatatgtatttagagagtgtacccggtcaacaggatggacatcagaccggtgggagacgagcaagacaggagacagacaggctggccaggaggatgctacagttcggcagtgcggtggcaatggtggtgacggggaagagggaggtgtggtctgagaagtgctggaaagaagaaagcctggagagtccagcctccctggggctggtgcaatactcaagtgggagaaagtgggaacaagagcaggggaaatatccacaatttaagagcgagagaaagcacaacgagaaggcattaaaaaatagataaatacactaaaaggaggcacagatcctgtgcagagacaacaaggtagaagatgggtggagatgcagacatttggggaaagaggaatttgagggagagctgtactgtatatggacctgagaagcagacttaaaaatctcaggattggaaggacttgcaggagggaggggctcaagagagtcagggaaaatttgggagaaatgtatgattctctaaagagaaaaagagggaggcagaaggaaagagatgaagaaaaggaaaagggtacactgggtccaaacatacaaaggatgccacccctccgtccagggacaggaggatggacatggcagaaggaaaatcctcccctgactttcaaagttttcctatccacatgggaggttaatttctgaaagctggacacgtttcttttcttaatcagaaacctcttaatgagactttgtacaccttttcagatgtgctcaaataaattacagggttttttttttaagtgcagaagcccatgttaacaaatcaccatttcacctgcattaattgctttaatgggctctaaaaacagccacctcctctccctcctatcagggtccctggggaggccatcagggaaggttgctgggaaacgaagttatggatgcactgatccaggggacaatgctgtcacactctgggtcatgcaactgtctggtatgccaccccattgctataaggcctcacagatcatcagaagggacggtggggggacacagaattctatcaaccaccaggctttattactgctataaagcaaaaatgccgatgccaaaagccagatagagcaattacgtttttaaagaaactctgtctatgtggggatattgactacattcagtaaagactctgcaattcaaacagctacagtggatcacatgggccctgagtccagtattttcttcaatgccacctaaaaaaatccaaccaaccaaccaaacaaacaaacaaaaaaactaagcagcataacagaagactttcaaagacaagcgaaggcagtccataccatttttcattacaatcttgcagcaggacctccactgccatattttccagatttctgatgttcaacagcaacaatacatgtttgtgaggactatgggccaggtttggtggtaggatatctgagtaacagaaaggaaagggacctgcccaaggtcacagccaagttacaccgtcagatgaacccaggtccatctcaaaacccatctctaacctcttgggtacataccacccttcctcagattttccagtacgtagttgaccttacacaagtggaatcttgctgcaagatagttaaggatggggacaggaaagttcacctctctggtcaagcctttatggggataaacagtgttggggatggaggaatcctaaggaagacagtgtttcccaaactttagcatggttaaggcctggctggggagtttgttaatcctaagcaagctaacattgtaaattaccacttctaaggctctaacacacaggtatttggaatatccttttttacatcattttactctgttcttccctgcagcctacagctttagaatcaggaaagaggacatttggggacctgtttatggaaggctgatatatttgctttgcatacgagttgagaggatgctgatattaggaaactcaggtggagaggaaaaaaatcatgacgaactggctgctaactgaagcaaagccacagccaatttagcaaaaggaacacaaattctcaacggggaaggagccaaaggtgctgggactgtaaaggaagaaaaaataaatccatttatgctgctcagagaataaagcagcttttaagcatatgtgtggttactggaaacttggccttcaccaaaatgctgggtttctagaaacctgaacagtttttgttttttgtttttaaaaaaaaaaagaaaaggaaaaaaaaaagaaagaagcccaaaagccagaagatatatctcacccaaaatggttcattgattgcttcagaatgcataaataattctattttggaatcaaagacacaataggctgctgaaataacccacttctggggatgtggtttgaaaattaagagcaaagtgacaatgaactagctgaaagggtcttgtagagtggctctgggcttcaggggaggagaa

SEQ ID NO: 2914 - DNA, 73404 bp, Homo sapiens
gtttattataaaggtgactgcaccctgcagccaccagcactgcctggctccacgtgcctctggtctcagtatggcgctgtcctgggttcttacagtcctgagcctcctacctctgctgaagcccagatcccattgtgtgccaacctagtaccggtgcccatcaccaacgccaccctgaccgggtgagtgcctgggctagccctgtcctgagcacatgggcagctgcctcccttctcgggcttccctttacctgctggctgtggtcgcacccccactcccagctctgcctttttctttctgggtccccagggtgaaattctcaccagcccaggggactctggaggcaccccctgctccaaacacagaagcctcactgcagagtccttcacggaggacggttctgtgctgggcctgaggggctgcctggggggcaatgactgatcctcagggtgagctcctgcatgcgcactgccaccaggggcctcatctccccatctgcaaaatcagggagagatctgcctgagtctcctccagctgacagtcaaagattcagcatcaagcccccatcaccagctccccccttctccccaatcactggcaagtggttttatatcgcatcggcctttcgaaacgaggagtacaataagtcgttcaggagatccaagcaaccttcttttactttacccccaacaagacagaggacacgattttctcagagagtaccagacccggtgagagcccccattccaatgcacccccatctcagctctggccagaagacctgagcaagtccctccttcttcctggccttggccttcccatgggtgaaccgggagggttggctttaatctccaccagactcttgccccgggactgtgatgggcgttggccacttctcctcgataacattactgtttttcttccgccttctggttgactttagcagaaccagtgcttctataactccagttacctgaatgtccagcgggagaatgggaccgtcccagatacggtgagggccagccctcaggcaggagggttcaccgtgggaacagggcaggcagcataaggtgggggctggatgtagagccctggaggctttgggcacagagaaataaccataacatttttgagctcttaccacgtgctcagaaaaaatccctaagaagacactgagagattagatgaggaaacataagaacagagacctcaaatagtttccccaaggtcacacagctttaattagaactagaattggaactccaggctggcttcagatctgcctctctctcacgcccctttaagatcctttgcaaaccaatggtagaagcctgtatgttggagaggtggtaccttcactatgtcccccatcaccgcagaggtggcacatggcagggagctgatggagctgaactgcatcatttagcatcccgagcctcctctctgggcctcattttcctcctctgtaaaacgggagaaaggccctgacagccacagtctgtgtgaggctcctgagatctcatgtacagaaagtcttggcgtggagctgggcacgcagcaggggctgggcacacggtggcccaaaggagacccggccttcactgatgggctttgtggccccggacacacctaggactcctcacctgtaagacggcaccattgtgccatcccatgttctcacccagaggctctttttctcttccagagggagccgagaacatgttgctcacctgctgttccttagggacaccaagaccttgatgtttggttctacctggacgatgagaagaactgggggctgtctttctatggtaggcatgcttagcagcccaaactcatgcccctctcaggcctcaccccccattcacccacccctgggctggcccctgaaccccagccctccctggcctcccgccgggccccaccatgtccccagtcagtctccttctccccctgcagctgacaagccagagacgaccaaggagcaactgggagagttctacgaactctcgactgcttgtgcattcccaggtcagatgtcatgtacaccgactggaaaaaggtaacgcaagggattggacagtgcccaccttgtccatggcccaacttgggcagccccagaggccagagcaggaaagctgccaggcaaggctgcacagctaggcagatcttctgcttttaggacctgcctcactgtagggacagctgagctctacagaggcccaggggtggtggatgagagccaggagggagaagtccctgtgaaaccagggaggacctgaaagctaacaggagggaacacgtgagccacggggttgggggattggcaattggaggggacgtaatgcggggagttaccactacagacgcgtcccaaaccccaggctttcaccccacctccactccccgctcatttttatacccgtgcagtggggaattgatactgtggttttcaatgtcacccacactgcagcacggcacagtcaccatcccgatttttgctacaaatgaaaattactgtataatgagctccttaaacttttctttaaacctgtgtttggaagacttgtgttggtgtggccctgtgccctaatactgtgaaatcacagcaccgatgagctggttccaatttttaaaatatatacatgcagtactccatgactattcaaagaaaaacaattccttccatttgccacctgagatgaccaccagggtgtgaactacctcctgccccatccccagccccaggatcctgggacagggcttatgaacgaaccactgtagtcagctcacttgatccacagcctggcacctccactgtctggctagggacctcgaatgggtcccaaggccaccctgctcctcagttacatcatctgcatagtagtggtgttgtgaggaattcaggagctgcagcataagggccctgcaggtactatgtgctcagtaatgccagtggttcttaagggtctgagctcccatggtagaggcaagtaagctgaggttcaggacagaaaatgacttgcccaagatcacccagctgggaagtgacagtgccagggttggagcctggttgagctggttccacaggccagagctcattctgccctctccccggaagacctccaccctgtccccatgcctctgcttctccctcaccccaattccccgctgccttctaggatagtgtgagccactggagaagcagcacgagaaggagaggaaacaggaggagggggaatcctgcaggacacagccttggatcaggacagagacttgggggccatcctgcccctccaacccgcatgtgtacctcagctttttccctcacttgcatcaataaagcttctgtgtttggaacagtaagctgttagtcatttgttcattcattcattctgaagcctgccctgagttcaaccctgctgggcactggataagacgctgtccctggtgggaagagccccacacgtgccaggatggagatgacaggcaccgagtgctgtgggagcccagcactgtgggaagacattttcttctgcaggcgaaaatctgggaaggcttcctagaaggggcatctgaaccaatctagaaagatgagggcataatacaacctgctgttctgtgtacaatgtgtgatgatcaaatcggggtcatttccccacctcaaacatttaccatttctttgtgttgggaacattatcacacagttccccataatatgtacattatgtgtccatttaaaacaatacaagcaaacaaatgtgaatttctaaactagactactgtaaggcctttctcctaatagcaagattgtaataaaacttcaactagtcataaaaaaaatccttttctgtttctgctgcaagcaaggaaatgagaggatgcatttgagtaccttgaggcagaagaccctaaacaggagtggaggtgtgatattgtttggctctgtcccccccgaatctcacatggaattttcagccccatgtgttggaggcgggtcctgctgggaggtattgtatcacggggctggtttctaatggtttagccccacctcccaggtgctgtttctcaaaggtctcattgtttaaaagtgtgtagcacctcccccttcgctctgtctctcctgctgtttgtgaagaagggacttgcttcctctttgccttccaccatgattgtaagtttcctgaggctcccagccatgcttcctctgaagcctgcggaactgtgagtcaattaaacctcttttttcataaactacccagtctcaggtagttctttatagcaatgtgagaacagacaaatacaagtggatggggtggggagagttcaggcatgtggtgcctatcacaaggaccttattccagtataccatggccatcgggggaggcacgttgtggggaccaggctggaggcaggaaggcctgatgaaggctgctgtgggcaactaggcaagaggcggttgcctgggccaggacagggcagggagggaagggctggggtgatgcagagggcttggggcccaggccagaggggctgggtgtctcatggacgtgttcttagggtgctcacctgggagacccagaagaaggagataacacgtaaggtgaggctggtccctggaaatcagctgacatcctgcaaatgtggagccctgaggtggaccaagcccgaggcacagcccactcagtggcacaagccacaaagggccggcctcaccccacctgggtgctcgtgattgacagcctcttgttacgtgagggaagcagcaccccttccgtgcagaaaagttgggcctgaattgtttgagcaattccacgtgtgcagctgcgtataccatcagggtgataggaccatgagcccgaggccctgatgtcctggggtctagtcctgtgtccacggcaccactcccctttgtacctcctgtcccaacagccaagctccacagggccaagactaagcatcctttgctcagcacccaaaccacagctgtgcccacagcacggaggctggggacacgagctgatgtcctcagaaggcaagtggacaggacagcctctggggtcccacaatgtccggaactgaaggctcagaacctacaggaagtttgtccatttcagtgttactttcagtgagcaccattttcaaccatactcaggaggatccgctgaaaaatgaaacagaaatgagtcatgtgggcagagcagggagaagcaagggagacgagaagtggggaacatggaagaaaaagccagtgaggaagaaaccagaggtcaagagaaaaagaatcatggaggtagaggaagcaaaaaaacacataacaaagaatgtggactttgggtcagaccaatgtgagtttaaatccaggttcttcccaaaccagtttgggcagatggcccattggaaccccactctcctcatcagtaaaagggggcagagtgagggtcctgagggttagcacatggactgtgtgaagcagacaatgcccaggcttagcaccggaatcagggtctagcaggtgctccctaaatggcaggtgctgtttgctatgaaagtactggaaggctgggcgccatggctcacgcctgtaatcccagcaatttgggagctgaggtgggtggatcacctgaggctgggagtgcaagatcagcccgaccaacatggagaaccctgtctctactaaaaatacaaaattagccagacgtggtggtgcatgcctgtaatccagctactcgggaggctgaggcaagagaatcacttgaacccgggaggcggaggttgcagtagccgagattccaccactgtaccccagcctgggcaaccagagcaaaactcagtctcaaaaaaaaaaaaaagaaaaagaaaaaagaaaaaaaaaagaaagaaaggagcactggagagtcaggtgcatactcttgtagacagcaacttgctgtgtgcctcatttacatctctggcctcatcaaaagggacttggctaggcagccccacctcaaggccctccgcagttgaaagatttatgttctgagataggcaaagggggaaaactggagaaacagaagccaccagagggaggcaggagagcacccaacaggtcccctgggaaagggcttggctgggcatcaaacctaccaccccaaaacttgacattgaaggcaaaagttaatgacatacagcagagacacggatggctttgggattttttttgtcttcttttctttttttaagatcaatattcattcttcatttgccctcgtacgaaaatagatttttaaatgcctcaaatatacaaacatcattgatgcacacacattccgaaatgcagaggtatgctgctgccacggggtaggggtgcgggaggcggcctggcctcatgccgcagaccgtgccccagcccgggcctggcaggtagctggccactgataaatgccactggatcctaggagaagctggggaccatgcgtgaggtactgaaggggaccatggtggatggatcctgggcactttgtagcttgtctgagggaaaggcctctgctgccatagaaaagctggcacatgtcaccctggggccctgacatcctaaaatgccccactgactaccagtcactagggaaaggtctccggctatgcccttcccagtgatgcttgccccagagtgactggtcacagggggggacaggtttgctccagaaaccgtaggcctttcttgtctggccccctaaagaggaccaagatcaggaaaactccccagtttaaaaaaatatctgtccatctgtatataaaataccattattagctggagttgcacacatgcaggaccaggagagactgcctgaggttctgcctgaccgaaggaggcctcgctcacagcacctctgtgaggggactggtgctcctgggaagtcattctcttggtgaccgagctgacaccccctccacttggaaagcacagggactgagcaggcggacctgtgctggagggagaccctcctggtgaggaactatgcgggccttctgggcctcacagctccagcccactcctggcctggcaggccacctgcccacccacccacccatctgccttgggcccccagtgaagtcagaagaggcaggagccccgcaggctgtgagcctggcgcaggcggctgacagcgagcttctcatctgcctggtggtagagcggacgctctcggcagcctgccggcccggctcagggccttgttgagctcctctaggtcgcccaggtcgagctggatggaggccggtgtctccgggctggtgggggagaggctgtgggcggccacttggcagctggttggctgaggtaggtcctgcaggcgcatagtacctgaggagagaagtgagtgggctcgttacaatggggagggctggggacaagccgaggagcaccgtgtgtggggtcaacccccttctaaacccagctgggccagtggctcctactctctgggtctcagtttctttacctctaaaatgggataatgggcacacatccagggatttcttagaaagatgaaggaagataacaacatgagtgctgacccagaacaggtgttcaaggacaggaagttcaatctacctgttcatctgatttacgcccatctagtacatgccagccagcgtgccaggctctggggttacagtgggacaagaaacatggactcctgcaatcttcttggagccggatcttgggaaggccaggatcaccctaggctgatagcaaaaccccctcatggaagaatatctgggggttccatttgccaagcaaggggtctggagaaaggcaataattaataattaataatagtaataataataataatagggattctcaggagtgggagggtctggccccatgtcctgggaagtgggtagaagagcatccttcctacccagtcctataggaatgtgaggtgttgttttaaagtgctgtgggaatgggctgacaagccattgagatgaagcacggatttccctaagaggtgacaatggcatccatcagggccactagtttagggttcaaggaaaccagcagtgggcaagagggggtgtggcctcagcactgttaataaagggtgtgtgtggtggaggagggagataaagaagcatggacctaaatcaggaatagtttaggaggacgcagcagagtcattcattggcatcttgcttggcacactgtaaactctgctttattcctgagcccctgctgtctaacttgcattgttatacagtgtgtagaaacagagatccaaacagacatttctccaaaggagctattcaaatggacaatacgtacatgaaaagtgcatatccttagccatcaggaaatgcaaagtgaaaccactgcacaccctctaacatcaaaaggacagatagcaacaagtgttgacaagaatgtggagaaactggaatcctcagcactctggtgggaatgtaaatggtggagccactgtggaaaacagtctgacagttcctccaacattaaacccagtgcctagcccagggctggcatcctcatctttggtacccatgtaccagttgtgcctttatctttattttacagatgagcaaagcggagctcagagaagctaagtgattcggaggcagtagaatgcaccagccttagcagctcaggccctggagccctgccccaaatccagtcattctgctgggctactcatgggactctggacaagctaagtcactttgcaaggccttgttttcccacctaaaacgaccacagttagcaacctctcagcttagagctgatggaaaatcaggtaaaaagctggcactgcctggctccggtaagtgctccataaacgtgagctcctagacccagagtcagacagctggaaggggcagccatgggttcacacctgggcccgactctcccacatatctaatgtgtgctaattggcaagcagcagatgctgataaaataatctgaacttatgaacaggcttcttgcatccccaaaacagcagcctgcactccctcctctagggaccgctggtgtaagtaactacagaggctcctcaaattacgatggggttatgcccctataaaccgctgtaaagtcgaaaaatcataaatcgaaccattgtaaaagtagggactgtctgggctggttttcatacacccccaccttctgttaatttgatgaccaacttggcctgaaagttacccaaactctccctagggccaacactgaaaaagtccctctgggctggaaagtctcggctgcagggctatgggacggctgcccagcagggggcagcacaggcccactccgctttccaaactaactggtctcaaccactgggcccgttcagtcctgctgaccagcagctggagaaatttcaggtgtcaccagcgcaaattctagcagcattagaagcaccatcattattggcaacttctattactatgggctttccatgcattaattcattcaatcctcagcacaacccatttcgcagagaggaaactgaggcataggtataacccgcccatcctgagttggaaacagcaacctggtgattctgcccacaggcctgagcctggaagaatgtgaaatggggcctcaggagaagtaaagatccatggctaccgtggggtcaccaaattctgggcaaaacctttcccgatcaatgagttgaacactggcaggcgctttcccccgtgtctgctggaggtctgagcatgcagcattggttccatctctgctggagtggaagattccttaacgacttgcttagactcagctgagagggcagaagaaagcaaatttacataccgggcgcggtggctacaccttgtaatgccagtgctttggaggccaatgcgggcagatcacctgaggccaggaggtcaagaccagcctggccaacatgggaaacccatctctaccaaaaataccaaaaaaattagccgggtgtggtggcacactattgattcccagctacttgagaggaggaggcatgagaatagcttgaatcttggagatgggggtgcagtgagccaagatggcgccactgcactccagcctgggcgacaaagccagaccctgtccagaaaacacatatacataaaaaatttttaaaagcacatttataggcctggtccccgaaagaggaccagggctggatggcgccttgggtccctgctccaccaagcaccagccctcacatgacgcaggccctcactgcctacacacccaggcttctggcaacacagccactgaagacaccagtcccaatcgactcatttcacagcaggggaagcaggcagagaagtagctgctgacactgagacaagaagacaggtttcctacttctggggactgggcttttgtccctgcacaatctatcatgttgaacccacttttactccttcttcttcctactagtgacaacactgagcaatgcaacattctctgtgatggcgaagctactgtttgctcagcaatgagcacgtgaccaaatgcaccacaaactccacacacttctcatttggttcctgccacgtgccacacttaatcctccgcacaggattaagtacgtggttgagactcttcctccatttaacagatggggaagtggagctctgagaggaagttagtttgccaaggccacagtgctactagggggcagatgggactcacggtagctctggccaactccaaacccaagccacttctgtctcggctgccctgcctctctggcttgactgatgttacgtccagaatctgtgcaaaaagtcctacaatattcccgaccagactccccagagatgtccaggtcatcaaaaacaaggaaggtctgaggatctgtcacagcgagggggcgtaaggaggcatggcaatcgcataccacatgggatcgtggatgggatcctgaacagagacaggactttggaggaaaacggcctgaaggaactacgaacttcagttaccaaaatgtatggatattgcttcactaacgtggccaatgtgccacattattgtaagatattaaaataggggaaactgtttgtgcaggagtgaggaggattgtgggaatctctctggactatcgctcaatttccctataaatctaaaactgtcctaaaaaataaagtctattaaaaaaaaccagtgctcatcacttacttgcggagaaaacccataaggaaaatggaagatggttaggatttcagtctccacaaagttataagctcccagagggcagggccctcttgctagtccccttcatgctgggtcccagggccgagcactctccttggtacatgggtttgttgagtgcctatatggtgttggctttgttgagtgactatatgagtgttgggctcctactgcatgttatccacgcgggataaaacacaggaggagtatactgcatctcagctgccccacccaggtctgaatgctacatattcagtgatctatagaaagaggctgggaaggtcagaatgaaggctcttacacagggcaggtggataaggcatgatgggaaccgaggagatgtaggcaaaggctggaggggctgtgctgggggcgctgttgccagataccacagtccggggggtgggcgtggcgacgaccccgctgcttgctcctctgcttggggctgggagttgaaggtgcttttctcctcgtggtggcctctctgcccctatcagggagggaacagcacagagagacagagtctgaccacttggcagatcagccaaagatggagggtccacccagcccttcccctatgagagctggacaggccctacctgtgagactccatgtcggggaggtctctctttggggaacaaatcctctgccccagttgcctgtcccagactggaacaacagctgctccagttaaactcacccaggtctaataaccctgtcaaggagagctgagggtctggctaagagaagaaacagtatttgtccctaccagaggtgctgagcctggaccatctgcctctgggggagacccaacttgaccacacaggggacactgagggtatcagcgggaggcggtcccagtgggtcccctgtgacagcaccacctagaagaggagaagagatgtcaggggaggattacatctaaatcatcagatcaggagcccccatgcaggcttctgcagcactgagctctcctcgggacccactgcggaggggacaagctgcctccatctggtgatgacattgacaacaaccatgacagtgagagcaagcatttagtgagccaggcccttgctaagggccttcctgcattattttatcaaatccaacaagccactgggctagccactgcctcactcccccactttacagatggggaaattaagggtccaagacgtcaagtaatttgcaagggtctcagagctgggaagcagtggtccttggatcctaagcccgggctctcccaaatcagcccaaccccccgccccaaccacagtgagacagagccattctccatgtgggagtggccagaacagtcccctggggaaccaggggggtcagtagaggcaaaagggaacaggaggagatgggtgccattgttctcttcccacatacatccccaatgccacacctgggtgagttccaggctggtctgtttctctttcaggccttggctcaaccaccactccctctgggaagccctccacccaccccggcagagtcaggcaccccccagccccactcgtgctcccctaccccagcttggccactctgctttgttgtgtgttccttggggacggggcccagggccccataggggtaatgatgaatgaatgaatgaatgaatgaatgcatgcaggcatgaacggagaggcctgtcagactctaacactagcacaggaagagcatagtggtgaaaaggtgggactctggagtcacaagacctgggttcaaatcctgcttctaccacttgtaagctgtgtgcccttgggcaagttactaatctctctgagccttggtgtccttgtctataaaatggacgtaatagtactgcagtactagttcatagaactgtgaggattaatttatgcaaaacccttaacatgacaccctctacaagagggacttaataaatggcagctcattatcatcagtcattatcatcactattgcttgaaagtcctagagaccatctcttccaatcctttcattatagatgtggtgactgaggtacaggaagtcaaggaactggcctaaggtcacacagcaagtcagtggcagaactgggactagaaccattgcctggattatcgggccactgctctctctgccactcctgtggacttgggggaaatatgaggggtgaagggaggatggaggggagaataagacataatcactgatgccaggtccctgctgcctggaggccacctatcaggacccttcaggaacttcttaaatcaaggagggtgcttcaggcagcagcacctgaagcaacagatgtgacggcaggacacccagaaaaatcctctccctggtctgtccctataacccactgctaagttcagggcaggccagatcttgtcaagtcacactcccctgagggcaagaagctgcagccacagctgcctgggccagttttccaggtgcattccttacccgcatcctgggtcctaatgggccggcagtggggacaggagactgtgccttgccttttgggaccgccttaggggacagaacatggtattcgtggcctggggaaagaaacagaactgtcagtatcagccctgtggatggatgcaaaatagaggaagattctggaataagatctcctcttcctccaaatggttttaatagtttctgtctctctctcacgtgtgcacacgtgagtgtgcatacacacatcatgtgtaaaatatgtacatatttaagtatgacacacatcacacatatacgtcaccgaacatctttgtgtctgtttattgtaagctttctccagactctattctgtttcatctcagatcctagaaccagctgacatccagtagcaaccaacacacccggctaagtcaggatttgaaagcaggccaggaagaaatgataagcaaagcaacaataagaatgaacaagtgatgctattccccacaccccgacttgctggtttggttctgaatggctcggcacagggtcagtggtgttttctccccatgctctgagcggctgtaacatggggataaactagcgcccatttcacaggcttgttgggagaactgaacggggccgtatccgtgtcgtgctcgcccagtgcctggcagatggaaagcagttgatgttatgagaaagctgggcggactgtgcctcctcacccagccccaccacctcctgccttacccacccctgagtttcaaataaggcctctgggtgacacctgaagccactgtggagcggtctcatcatctcatttccctcctgtgcgttctggctttgtgtatgtggagctgaacgtaattgctcttattttcccgacgcgacagtgaggaatctgagggtcagagaggctcagagccattttctgtgagactgacttcagagttttggttttgacttctatactctcttcctctcattgtgttggaagcatttctccaggttagctcacttttaagggttaagatcacctttaaaggctacagaaaacctcatccaatgattcatctctttccttttgctagtaagtccacagagagattgtccggtgagcttggaggtgtcctgctactgtcgtttctaactccttggcctctgtccactccctcgttatggtccatgagcagaatgtgcctctggcctcttgccttgtccccagaatctgaggtcagcagccctcctcttctgcaaggtgtctgtgagagatgatgcctttactataattacctattggttatcacttctctgctacagtcagattcatgaaggtgagaaccatatccatatatatatatatattatatatttatgtatttttgagacggagtctcactgtcacccaggctggagtgcaatggatgatcttggctcactgcaacctctgcctcctgggttcaagagattcttgtgcctcagctcccaaatagctgggattacaggcacccgccaccacacccagctaattttttttgcatgttagtagaaacggggttttgtcacattggccaggctggtcttgaactactgatctcagggattctcccacctcggcctcccaaagtgctgggattagaggtgtgagccaccacacccacccatatttttgtgttaatgttataagcacttgaaatgctaccatgtgtcatctcaagttttactctgtgccaggtcctgtttcctgagacacaggggccctctggaaatgagaacctaaggaagccaggtgcaaatgggacatccaattcagtgtccaccctgtatgctccgagccgaaaagcacaggtgatcagaacttctttaggattgaccagctgaacagacttcccagaacaagcatgggccctggcaaaggggaagcatcagaaagtgtttgctgaatgaatgaatgatgaatgaatgaacaagtgcaccgagattcatggaggcaatgctccctgctggttttcattcacagaactgatagaaaatgatatttgaatggcccactgggtatatggaaagggcttccataacagaggagcccccgctgacaccaggagctgcacccatcccggccctccctcctgcctacctgtgtattggccccggaaggtgaccctgtctggccatccagcactgcccaccctctctttccatcccgagctgcctgtggactgtccttggtggtcttgctcttctcagagacagtggtagggagggcagctcagattctgaacctggggtagaaaaagtggggcatcagaggggcaaggggtgggggtcacatttctcaaggagtgggtatgccatgagtttaggctctgggtggatgcctgggttttaatccccagtctcccccttaggagtaacagctggcatttcagaaccctgcccccgtgccaagcgctagtctagacgctctgtgtgtgccgtgttgggcacttcacagcaatcccacgatgtggacactgttataactacatggtgagctgtccctttactgctcagagcaggtaaacaactcggccaaggacaagtggaggggagctcgctgatcccgctactgactccagagccctgatcctttagcacatcccctgcgctcattgggcttcagccccttatctgtgaaatgtggataatatgaccatcttgcagtggaggttaagcaagacagagctacaaagcccttacagacaccctacacgcagtaggtgtgcaggactttagaagtgcctgtgcttcacagcactataatatcctaaaacagatgcacaaaaacccttctccaagttccttgaatactgttgctgtggtccctgaccactgagccaacatgctcagactgtggccttggaaatcagcctttgcaggtggtcacttactcagggacagtcggagcacctcccgaggactgaggaagacctggctcgctgccttcctggagggacaatctgctcttcacctctaggtcaccaggcaatctctctgtggatttactagcaaaaggaaagagagatgatgtcattggtgaggttttgtgtggcctttaaaggttatttgtgagaagttcaacctggagaaatgctttaacacgatggaaggaagagagtatagaagtcaaagccagactctgaagtcagtttcacgaaaatggctctgcgcctctctgatcctcagtttcctcatctgtcaagtggggataatacagcaattacctcagagggttataaaaagattaatgagaaaatgttcataaaacccttctcaagtgccctcccatagactcaaaagaagccagctgattttatgtcattgtcataaataacaaacaccgaattaatgggtgagagtgaaggcatgctggcaatgttctaactctttgttgggtggtgggtctagggatattcattgtattattctttattattattattattatttgagacagagcctctctctgttgcccaggctggagtgcagtggcacaatctcagctcactcaacctccgcctcctgggttcaagcaattctcctgcctcagcctcctgagtagctgggatacaggcgcacaccaccacgcccagctaatttttgtgtttttagtagagacagggtttcccatgttggtcaggctggtttcgaactcctgaactcgtcatcttcccgcctcggcctccaaagtgctggattacaggcatgagccactgcgcccggcctattctttattattaacataaggtttatatattcttttgtgcatcaaatactgcacagtgaacaagctcaacagtgaataatgaatgagtgagagagggatgtggcagtgcctgagtccatatgtctggggagagccaaggccagccaagactatcttctgtagctgccaccaggacagaggtgggagttttgaggtacccacctgccataatgggagccccaggtggctggggagtctgctggccggccgcgggtcgggcggggcggtcaaaggcagatgctgggcgtgtcgggctgccctggagtggctggtgaggctgtcttccagccgcagacgaagccgggacacctcttcttgcagctcacagatggctggctggggttggagtggagacagaaacaaagaacagaggcatgaggaacagagctgcaccacccgagtatgccaggatgcggcagcctttgtcccttcacagcaggcacagggtctactctgctgtcaaacgattctagaactttcctgtgcgacacttttcttgctacacaacttacacctttctgagttcatgtccctgtgcagtgaacaaaacagaacttttctttgaagtttctcttcctaacacatggggtctgagtggctgttcaggaacaccagtgacaaattctcggatggagacaaggatgcagcatagagagggccctagctacagttctgccataaaataccaccttcactctctgtccaggcccagctcctctccctaccactgtgcaagcccatctctcagacctggcagaagatgcttgtccaccatctccccacacagacagtgagccgccagcagcaagaaagaagcgggcttcctgtcttataacccctgaggccctgcaccttgtggatgctaggaaacagtactgcagtggatctgggctctgagacggagcagaataaagcgctgtgagggagagcggacagggagacacctcgatgcttcctagcaccacctgaaccgggagggctgctaagagcaggctggaagctgtctgcaagactatagtaaatcctggtgaaacccccaactggtccaacctccagccaccagcactgagggagtaaatcctgtctgtgtttctctccaacagtccctgcatcttcagggtcttgttttgtgggcattgctgacaccgcagcagacaatctacccagatacccctccccacaagaccccctcaaccacggagcagcgttagagccaggtcagcaaagccaccctccaggcggatgcaggctccacatctacttggtctggcttctgggtgggaattcccactggggccgttcttgcctggtggcccctggactcctgggtgagtatccctggtgccgcctccagcagacatgagcgctcagatgactgtgtcagaaggagtggagcctcttcctggctgtgccccagcgctgagtgtgtgtgtctgagggcagtgggttcccttgtaatccccagggagacgcttgctggtgtttctgaggcaaagccacgagggcaagtgtggcggtggctactggagagtgacatctccccacccccagttaactcctgaaatggagagcccgcctcctagtcagaaggcactaaaaaaaaagacttaccaggccgggggcgtgagtcaccacttgggtatctcagtctctctgatgtaactctttagtttcttactgagtgccagcagcacttaacattcatctttctctgcaaacttactcccctgtctctgcacatggcagcagatctacctgactagccagacagaactctgagtcactctagatcccctccttccctgaactccctgaagttaattagttaccaagtctcatgggcccaacttccaaaatacctcttcccaatgaatcccttcttcccctctgtaggggccctccccgagaacccagtccccatcatcttctcctggatgtggcagccttctcagcagtctcttggtctccgttctcaccctgccggtgccagagaactctaaaacataaacctgcctacgctacgtccctgcttaaaatccccttcctgtcctctcagcctttgtgcactcatggaatacgcagtgaatgtctccccttacccatgccttcaggccctgtaggatctcccataggtctctcctctctacccctctcttcctttatgctcaacactccaccccctcacactagaggatctggctgaccgtttagctcctccaagtgatgggcactctctcacctttaggactttgcacatgccattccctccactgaagataccttctatctctcttccttctgatgtctgctgagataccacttcctccaggaagccctcctgaagcctctaaccggaccagatgctccttcgctgtgctcccacagtcctttagtcctcgccatcatggtatttatcacaatggagggcactactgcctgtttctttgtctgttcatctacaagatggtaagctttaagaggcctaggatagagtcttgtccactattgtattcccaggcctggcataccctagacaaacaagcctctaattcctccactgatgtcaggggaggctcaggggtagacttactaaactcagacaaggaagccaaacaccagcagctggacacaacttgcacgtaggcaacatgacagcctcatgcctgttcgagccaaagaaaccttggctgggcaccaccgagcagtctccccagcgcatcccgggacagacacccactccagcaagggtgtgaagtgatcactggccaaaagcaactaagaggaggtgtgagagaactgaccaagcgatttaccatttctgttcaaccaaggaagtggaactttcttagtagaaaaaatgcacacgaaccaaaaaagaaaagaaaaactcagaaggcagtagcttcttggtccatacaatcaatgggcaattgcagaaaagatagccctagaaaggacaggcttttctcggaaaagagatgatggagaagagggcataagtgtcagcaccagaaaggtgaatctttaggtcatattccactggctgggaagtgtgtcctcgatgtctagatcaatgaggtcccacagaaacgctgggaactgggagcaggacacctgggtccgtctgctcctaccaccaccatctgtgtgagctgggcaggtctcacctccacctgctaacacgtcgcatcacgctcccgtctgtatgatgagcttgaatccccggatccaagtgtctaacttactctcgccctgccctggtgagcaggaagctggggatggttctgttggtccacagggtagaggcgcagcggcaggggcgggggctgggggtgggctgatgtcttgttgggaaggggctgttcagaaatccgtttgtgcccctcaaactctgagccaggaccgctagggaggcagagagagaacccaaagtgagtttaagcagagagaacttccaagccacacttgtgcaggtggaatgatgggggaagtgaagagacggtgcctagttcaaggtcaaaaggaagttcctgatgaggccaatgacccacactgacctccaaaccagaagatctagatttgctgggagtgtggggtgctgagctgggcctgccccgctgtttctaaccagaacccccctcccacccaccatgacaccatccgagtcttcaggaacttcccctgcaaagaattaatacttcttcacttgggttcctcaagacttgatcaccttctcaccatgtttttgtggggctgcttcagagcctcctctgaaattatagtcacctctttccacgtatgcatgtttctgggggagcattaataacttttaacgaatctcccaaagggatgggtgaccaaaggttaaaaaccctaatccgtcccctgcattaaaagcaatgaactggccagacatggtggctcacgcctgtatcccagcactctgggaggctgagacgggaggattgcttgcgcccagaagtttgagtctgcctaggtaatatagaaagaccccatctttgcaaaaaaaaaaaaaaattatatatataaaaaattagctggatgtggaagtatgcccctttggtcccagctacttgggaggctgaagcggaggatcgcttgggccagggaggacaaggctgcagtgagccataatggcgacactgcatgcagcctgggtgacagagcaagaccctgtctcaaaaacaataaagaaataaataaaaataaaagcaatgaaacccttggaatactactcagcaatatataaaggagctaactattaaacacagaataatctagataaatctccagagaattatgctgagtgaaaagccaatcccaaaggttacatagtatatgattctatttatagaacattcttgaaatgataaaattatagaatggagaacagattagtgcttaccaggggttaaggacaggctgggggcaggagggaagtggtgtgcctatgaaagggtagcatgaggctccttgtggtgatggaacgttctgtatcttgctgcatcaatgtcaacatctggctgtgacattgtactacagttttgcaagatagtctcatggggaaaactgagtaaaggcacatgggatctctgtgtattatttcttataactgcatggaatctacaattatctccaaataaaaagtttaattaaaggccgggcgtggcggctcacactataatcccagcactttgggaggctgaggcgggcggatcacttgaggtcaggagtttggactagcctggccaacatggtgaaacccatttctactaaaaatacaaaaattagctggagcagtggtgcatacctgtagtcccagctactcgcgaggctgaggctggagaatcacttgacctgagtggtggaggttgcagtgagctgagatcgtaccactacataccagcctgggggcagagtgagactccatctcaaaaaaaaaaagtttaattaaaaacgtttttaaaataatgaccagctgggcgtggtggctcatgccggtaatcccagcactttgggaggccgaggcggggggtcacaaggtcaggagttcgagaccagcctgaccaacatggtgaaaccccatatccataaaaatacaaaaattagccaggcgtggtggcgcgtgcctataatcccagcttctcaggggctgaggcaggagaatctcttgaacccgggaggtggatgttgcagtgagcagagagtgaccattgcactccagcctggacaacagagcgagactccatctcaaaaaaaaaaaaagataaccttttaggcaaagctaatctgaggtgtcagaagtcagaacagtggttatgtttgggagcaggtagtgactaaatgggacttcagtgaggttctggggttcagatcatactgagttcttggtgtctgttcaccttgtaaaaactcatcaatttaagttctttttggtggtttttatttcaataaataattcatgtgtatttctaaaggtcaaaaactgaatcacatatagatttatagacatggaaagtgtttatagtacaatttagtgaaaaaaggaggtcgccaaatattccatataaaatgatcttattttttgttttttttttttatgttttttgagatggagttttgtctttcgcccaggctgaagtgaagtggcgcaatctcagctcactgcaacctccgcccccggtttaagccattctcctgcctcagcctcctgagtagctgggattttaggtgccagccacacgtctggctaatttttgtatttttagtggagatggggttttgccatgttggccaggcggtcttgagcttctgacctcaggtgatccacccgcctcagcctcccaaagtgttaggatacaggcgtgagccaccgtgcccagcctcatttctgttttaagtatagtcacgcatcactaatattgggtataagctcccagaaacacattgttattctgtttcaccatgtcacaaacacatagattacccacacctattacatatgtgaggtagatggaatagcccattattgtaggtacaaacctctacaacattgcctgctgaatactgtaggtatctgtaacacaatggtaagatttgtgtatctaaacatagaaaacagaccataaaaatatggtataaaagattttaaaatggtacacctgtaaagggtccttaccatgaatggagctcgcaggactggaagttgctctggtgagtcagtgagtgagtggtgagtgaatgtgaaggcctaggacattactgtacactgtgtagactttataaacaccatacacttaggctaaatttacaacatttatacaaaagtttttcttcaataattaatcaagtttaacttacagtaacatttttactttataagctttttaatggtttttaaccttttgactcttttgtaataacatttaacttaaaaatacattgtaaataaaaaatattttctttcttgatatccttataagcttttttctatttttaactttttttaaaaaactttaaaaacttttctgttagaaactaagacaaacacacacacatcacagacaacacacacattagcctaggcctgtatagggtcagggtcatcaatatccctgtcttctacgccacatcttgttcttctggggcaataatagcactgtcatctgtgataacaacaccttctctggaatacctctcgaaggactacctgaggctatttaatagttaacatttttaggctggcgcggtggctcacgcctgtaatcccagcactttgggaggctgaggagggcggatcacgggtcaggagatcgagaccatcttggctaacacggtgaaaccccgtctctactaaaaataaaaaaattagccaggcatggtggtgggcgcctgtagtcccagctacttgggaggctgagcaggagaatggcgtgaacctgggaggcagagcttgcagtgagccgagattgtgccactgagtctggcctgggtgaaagagcgagactctgtctcaaaaaaaaaaaaaaaaaatagttacatttttaaaataagtagaagaaatacactctaaaataatgataaaaagtatagtaaatcataaaccagtaacagagtcattagttatcaagtattaggtactgtacataatcgtagggctatacggtactttttttttttttttttgagacagagtcttgctctgtcacccaggctgtgtgcagtggtgcgatcttggctcactgaaacctctgcctccgcctcctgggttcaagaattctcatgcctcagcctcctgagtagctgggattacagtcgtaagccaccacacctgctaatttttgtatttttaatagagatggggttttgtcatgttggccacaggtgatcctgccttaagtgatcctcccaccttggcctcccaaagtgctgagattacaggcatgagccacatgcccggcctgtactgtacttttttttttttttttgatacagagtcttgctctgtcaccaggctggagtgcaatggcacgattgcagctcactgcaacttccacctcccgggttcaacaattctcctgcctcagcctcccaagtagctaggattacaggcacctgccaccatgcctgctaattttttgtatttttagtagagacggggtttcaccacgttggccaggctcgtctcaactcctgacctcaggtgatccacccgcctcggcctcccaaagtgctgggattacaggccgagccgctgcacccggctgggactgtactttcatgtgaccggcagcgcagtaggtttgttccaccagcatcaccacaaacatgtgagtgaagtgttgctctgcaatgactgcaacatgcaaccaaaggaattttcagctccatgaaaatcttatgggaccaccgccgtgcacgctgctgtcgttgaacaaaacgttgctatgcagtgcatgacagtatgtgtaaacaaacacacattatatcggcacagagaacagctcacaggttctacaccaaaacgtcagcactgatggttccagagtatttttttttcttttgttcccttttgtccacgttatctgtaatttcaaatttagtacaatgaacctggctaatatgtcatatcctaaagggttctgcaagtttttctatttatttttcaacccatgcagttctgtccaagtcagactcctgcactcacccatctcggctgcagtgtccgctccaggctgaagttgggtgccctctgccggagaggcccacttgggctgggaggtacctctgtgcttggctccggggtgtgctgggctctgtggctcttctgggaatcaagaacccctggccttggggtaggaagctccatccctgggcacagatgcagcaaagggctggctaatgttcctgctgtgctgggggaccgtggaggaagggacacacaggggtcacacaagtgagacactcaggcggcagcatctgagcccctccacatgctaacccaataagctcccccctttgtaactttgcatctcgggtggtacaatatttccaaggacacacacacattagagcccaattctttgtaaactgttcactggccaacccaatatgcaaaataataaagctcagttatgtgtagaatacataaaagagaaataggatttctaatccttcctttgcatgcaccctgggttgccatgtgggcctcctgaagggcctgcacccagctttggaggctccatccctcactcttcacccctgtcccctccgccttctcccttccctttgggttccatgtagccacccgagtgccctttgcccttgtcttctgttcacctcacagtgccctccctgtagtttttattattcatccattcatttgctcaacaaaaatgaatttcccagtctgtcgctaattagctattgaggctggactagttactcccctctctgaagctctgtttcctctgtccataacacaggacaagaaatcacggttaggggatgaaatgagggcctacgaatggacagaccatcctctctattctgggccatcacaggcactgtgattcccaggctgtcccaggaatgtggcactgacggacaatggcgggatcccgggatacctgatgtgggagagccggtgctctggagtctggggaggggtgaaactctgcttgtttctgagcccacaaagccactgtctgtctctggggacgcatccaggtctcctgaaagaggcagtatccctttatgtctgaggaatgtgtccaaggcaactgggaagcccttcccaaatcgtggcctggcctcacctcccagaggctcacaccccaggttgctggcccagctcccaacagccaggcccaggagtgagggctctcaggctctcaggctcagcacaagaatctggctaccagcagggactctgcaccccaggaggaccctcagcaaggctgcctccctgaggggtggcagccagagcccttgggagagacaaggccatggacaaggctagcaaggggagagggagaaagccttatttccagtgtctcctggcttaggcctggaatctatggtcttatctgacagtggaaatgctcaggcccaaggcattggaaaaacgagaccacaaatatgtacaggtcctacccgctgggtttaacacacggcacagagaacacaaacagacaacacaggtgcctgccctcgctgagttcatgtctagtgcagagaatcctgaccatgggtcgttaggactacagaagtgtgtgtgtgtgtgtgtgtttgtgcataagtgcacatgcatcatatatatgcattattctatgacagtcacatttccatagtggcctgtgactttgcagcgtgatgtctactctaaagagcatagaactagtctctccagctgtgatgggcaggctcaggaagtataagcaatgggttgcaagctctcagaggaggaacaagagctccggaagagggaaggtttggggggtgacactgagcataagtcctgcatgtcaggtgggattgtggctggcaggacaggagcagcaagtattccaagaaggaatagcacaaggaaagacccagaagcagaagttgagaagacccaggaatgaccctgaggttctgggcccattcccccatgtggagacttcctccaggtggggcccaccgcctcggtgcaaaggcttctgtggaaggcgctcagagatgcgcttccctccaggctggtcatactactttggtgggatgctgcggacttggtgcctggaggtggggtggcacgccagggcctggaggggctgcctcagccttgcccaggcctgacatggcccgtctctagccagggatgcctggaaacctggtggcttcatagataccatcttctcctggcctccctggcatgggaagagaagaccatccttgagttctgccaggcagccctgacgaggggttggcctgtcctgggagccaagcagcccagggcacaagctctggagtcagacatcctggctgcccagcctggttctgccaccttctagctgtgtgacctagggcaaggcacttccctctctcaacctcacttttctcaactataaaatatggatgccaacaaaacccacccacaccaaagaggaaatgttaaagcagcatttcccagacttaaggagtttgcataccacctccctatttcagtcatttccataaacttccatctactccaaagattttagatcactattcaaacagaagatcagtgtgtcatgtgacaaacagaaactaactttgaggataaatataagaacctgaatattatcatatactagatagatccacttgcctgctaaatgctctaggcctttgtgctctcatactgtctctctctctctttttccacagaagttcaagagaggcattaaaacaccacagctctcagtaaactatcacaaggacaaaaaaccaaacaccgcatgttcttatcataggtggcaattgaacaatgaaaacaaatggacacaggaaggggaacatcacacacgggggctgttgtggggtggggggagggatagcattaggagatatacctaatgttaaatgcgagttaatgggtgcagcacaccaacatggcacatgtatacatatgtaacaaacctgcagttgtgcacgtgtaccctaaaacttaaagtacaaaaaaagaaaaataaaaaagacaccaagcactaactgagactttctccttggcatcattagaaggtcagagacagaaaaagagaagatattcttttttctttttttttttttgagacagggtctcacactatcacccaggctgggtgcagtggcccgatctcagctcactgcaacctccgcctcctgggctcaagagattcactgcttcagcctcccaaatagctagggctataggcgtgtaccaccatgcctggctaattttgtatttcttgttgagatggggctttgccgttttgctcaggctagtcttgaactcctggctcaagtgatccacctgccttggcctccctcaatgctgggattacaggcatgagccacttgcccagctgagaataatgttctttaatactgcatgtgtcctactgaaaatcatgtccccactacccaaaatcatttcaagggctatcagtggtatacattccacacttgaagaggcagacaggtaagccatgtctaaactgtgaagcgctgtcttattcactctgacagtgatcatcctgtggttttagggtggaaccaaacattctgcaggaaaggctcagtgacttactccagggagccccatgacttttctcagcctgcaccgggcactgccttgggaggaccctggtggctctgctttccctggagttgcagccaccccatcaacttccagggagtcacctcccccctctcctcctcctcctcctctccttcttcctcctcctccattctcatggcttctgggagagattcacactgaggtacctgcagaagaacacacagaggggcatgacctctgcccagtggggacagccaagatccagctgctggccagacaccctggtcaggtccaggtggcactcaccgcccatgaggccatggtaaacttgctccatctgcagctccttgtgcctgagtcgggccaggggtcctgtggcctgtcctccacctcactgttgccagagctcacctccacatttacgtgcatgggcaggggccagtgctggcggcggcagtggtggtagcaggctggggtcagaaagatgacagacagagattcagcagatagttaaacaccacttttaagcacttacctcctgccagctcgagctgtgggctgcggggtaagaagcacattagactcactaagcccaccaccctttatgtatgtgtaaactatggagactgggctgtgtggtcttcgatactggctgccatgaatgagcacctgctgtgtgccaggcaccatacagataccatgtcacaacaatcccaccagtactacgattattacaaaccattttatagacaggtaactcacgctcaaatgatttgcccaagtcaacagaaacaaggagcagagttgagatttaaacctagatttcctgccagagttaacctcctgacccccatccattccagcatggccaccccagccccctgcaataccttcaactgaggagcatgagggtcccttaagatattgtactcaggttttctccccattcaagcgtgtatggcacctggtagagttttcctaccctctaggccagagcacagcacaagattttccccaaccatagggccagcatgacctcagctgtcagggatgtcctaccagtgtcccaccctaccagcatgccaggctctctttcctgctcccatcctcaacagacaagtctttgcagcacaggaacaggagttgggaggcatagagaccccactactgtcatctgtgtgaacgcactacactaatttgctcgcctgcaaaacggagatagtgattgtctctcaaggggttgtggtgtgggcagacagccttctacaaagccccttttgtgtagggctcttgtctaggtttcaccccattaccatgcagtactacaagctagaaacctggagccatccgtgtctcccttcctccctctcaggccactccaagtccactcaaacataccttcccaacctctcttaagtccacacatgctttccatttgccctgccacctccccagcctcagactggcctacccacaagtcatcttatgtatcccctgccagaaaatccagcagagtttaaggccatgctctctacgtgacccacaagccctacatcatggggcccctgcctgcctctccagccacatctcagactatttttcctttccttcccatactctagccacagggcctttgcacaagctgttttccctgctggatgggtttctctttctgtctctagtaattcctacttagtctcaggtctcatttaaacatgacttcttagggaaagcttctctgacctcctcctcaaactcagtcatgttactcctgctactctcacgaaccccataattctccttcagtgcactgaccaaaattataactaaatcactgtaaccattcaactctacagaaaactctgtgaaggtagacgccaccttccctgccacctcccatccactgaatccctaccatgtgtcatggtacatggcacacacttcataaatatgtaatatttcatatttggcacacactggcatatggcacacacttcataaatatgtaatacgtattgaaaaatgaattaacgaagaaatgaatgcacgagggaacagcccaatatggttgagccaagagtacctcagggcaggaggtcttgatggctggcatgggggcttgtccagaaggagcaggcggtgcgttggctgatggaggcagggcagggctggggtgctgtccagagctgagtctgaccgggcggctcaggctcttgctgggtctggtctatgtgttccttcagctcttccaggcagttcccagacggtatatctctgcctccagctccctggaatgcagaaacattaccaccagggcccaagatggcagctacatcaggcaggtccaggaacagagtatcagagcagagactccggggatgcccccttagggtccatttaatatcagcctttagatgatggtgagaactcaaataagcaagatgaaagaaggttccattgggaatcaggaggtctcagcccaagtcccctctccatccacaggctgtgggacattagagaaatcccacccccatctagcctcagtttcccctcatccaataagggtttcaaggcatcttctcagcacgtgggtccaaagggactcaaatccagcttttgatcgtgccaccatttggatatgtatactaattaggataagatttctctctttccccgtgtacaaattataaggacaaagtgcctccctcctggagactgagggaccccagggcccatcccatctgtccttccaggccttccaccccagcaggtacctgcgaggatcaatcttccaggcgtccccttggagccggcaagcggctgggcagggtgttgctcccgacaagcttcaggtactcctcctctagggccgcgtgggcagccttcagccgctggaagccctgaaccagaccaggccaggaagacttgagtgctcagtccccgcggggcctgtccctgaagacaagtggatgagacagcttgcgggaggccatgggatgcacctgggcccctgggttcatgcagatacaggctgaggttgagatctctggaggctgcctgccctggagagctgccgtggtcagctctctgccatcaggctggcacaacagagacacaactcagagacttggcaccagctccgagggcaccagcccttcctgcatagacttacaaggaccccaatgtaccacaaactgtcaagctgtcacagtgtcaaatacactctcactattatctccataaggaccctttacatgaggactctggatcctcattcttgatttgcaaaactgtgggcttcagaaaattagccactcttccccaaatccttatagactatcgacaccgataatgttatcatcaccatcacattattggaatgtttactgagcattgaggctctgggctaaagcactttgcatttatttaatcttcatataatcataatgagaggggtgatttatcatcttcatttaaaaaggatgaaactgaggccagggaggtcacttaagttgatgaaggtcatggagtgagtgagttgtagagacaggatggggcccaggccctctggccccagagctcatggtcctagcaattctgctaggctcccatagaggatcacaggtaatacatggctaaagctgcaggaattggggttggtatcactgtcttctaccatccacatcccactcaactctgaggagagacagaagccaagcacaacctaaaaccattccctggtcacatctaatcttctgacagctctcaacttccctgtatatggggggatagaacagagagcaaaaaaatgaatggttttagtttataaggtccttggtcatccactggtgatattacatgatacatatgacacattttgtgattggaaaatgtacatgacatctatgaaccacacaggaaatatcctgccataacatttttttagaaactaggtgttttgaatttgctctccagaccttctctcagctcctctcccaccctgctctgtgctttgagcatcagggcgtctacctgctggcttctggttgggtctgtctagtgggagggacctatgagagatcacaggtgggaagagagagacttgagagtgggcacagctcccggctaatgctactacccggggttcctcagtctttgttgggtcccctgatgctgcccacacctttgctgacagttctctccttgacgcctacactcccagacttgagagccccacctgtcccttaatgggaccctggctgtgcagcaggaatctaaattgtatttatgaccaccgttatctaaaactccaaattccaaagatatacaccaataggactctataaagggtctcccctccagcccccactttttttaacaggtttccaaacttttggcaactattttgtaattttgtttaaaggcgataaaaaagaaaagcctttttctgcttgctgagaggcaggataatttgtggaaagtagtgcagggcagtgatatgaccctggatttgaaagagagacagacctggctccaggttctcctgcctactagctgggggcctttgagtcacccctctgagcttcagttccatcctggttaaatgagggtgataatgtaactgcttcactgggttttgatgatgaccaaataaaataacatactctagggtttacacagtccctgtacacaaccatccttgcttaataatgggtaactattgtgaaataatgacgttatcatgggaagctactcaggaactgtttgctctaaaagagaccctgtgtctgggatctcttttctgtcttgcagcaaagaaggcttcagagacagagtcatgggagacagtggtgtctggcagttccatgggtggctcctgaattgggcagtaccttgacttggtcctggggctgagacgtcctgcctgtatcagtctttcaaaggactccacctggacattgggaggggaagaaatatgctccattaatccagtcctgtagactcccacacccagccacatctatgccttgtaagaggagctgggtccgtcctcaggatgtggggtttctgccaagcatggagaggtggtgctgggaacagcttctaccaccagccccaggcatggtagccttgagaaaaattgaagtaaacctgcaggaatttactgacaacaaagcaagtcactcatgtgcatcaagactaatgatcaggatatttactgcagcatgaacagtagggaggggacaagaaattgcctaaatgccttcggtggaatagtattcagccatcaacaagaggaaggcacacgtgtatgttctgagctataatgcctccaagacctatttttcagtgtcaaatcaaggtacagggcaatgtttacggttgctaccatctgtatagaatatgtggagagtaaaaaggaaaacgataaatacattgctttatacgatatactatctctagaggaattcaagaaactaaaatatgaattgcttctgggaggagaactgggtggctggaagacaggaatgagaagtagatttttctactacatgtccttgcatcctttgaaatctgaacaatgtgaattcgttgcctacccaaaaataaatattcaaattaagacttcaaaaagtcaaggtacagtagcttatgcagccatttctataaatgcaagttgtgcattgaacatttttgcatgggttggaggaaagatttagtttttgctcaatatgcctctgtactgtgcaaaggtccttatcatgggcatctattacctgctcaaaaaagtttaatacaaaaaaaggcaagggatgatgtaaggttcggttttaagaaagctctagatcagtgtgaatatagaaatgtatattatataatcatattacataattttataatatataaaatagaatataatgtgagctacaccatctataattttctcatagccacattgagaatgtaaaaagaacaggtaaaattaatttttatattttatttagccccaaatatcatttcaacatgtaatcatactaaaaaaatagggagacactttatatttctaagtctctgaaatctggcatgtgttcatacccacagcacgtctcaattcagagcagcccatgtcaagtactcaacagtcacatgggccagcagcttctgaattggaccgtgcagcactagacatgaggggtcagctaaggcccagctcctgctcagtgtgatgatttgacattgctttattttgtggacaacatataggacgagaagaaatgtgtctccggctacggaaccaagaatggtggtggcaaaaggaaacgaagctgtaatcccagcactttgggaggccgaggcaggcatatcacctgaggtcaggagctcaaaccagcctggccaacatggtgaaaccccatctctactaaaaatacaaaaattagccaggatggtggcgcgtgcctgtaatctcagcttctagggaggcttgaggcaggagaattgcttaacccgggaagcggaggttgcagtgagccaagactgcaccactgcactccagcctgggcacagagtgagactctgtctcaaaaaaaaaaaaaaaagaagaaaagaaatgaagtacttgatgtgctactccaacaaggattaactttgaaaacatcatggtaagtgacagatgtcagaacaggacaaatattgcgtgaatctattgctatgagacatccacaataggcaagcctataagacaggaagcagaagagcagccgacggaggctggggaaagaggggatggggagtgactcctaatacagatgaggtttcttagtgcgtgatgaaaatgttctaaaactgactgtggtgtagtggcagaactgcaaatatactaaaaaccgctgaagcaagcaaacactttaaatgagcaaccgcatggtatgtgaattatatttcagtaaagcaagggaaagaaggagagatgggagggagggaagaggagaggaggggaggggaggagagaagagaagaggagaggggaagggaaggagaggagaggagggaagggaagggaagaataaaatggtggtgcttctgaaagaattgttttatgggcatggtagtgcatgtaactattgcatttctcttttggcattggcaactagaagctcaaagctaaatgtgtgactctaatgtgcttagggtccaacagaacattttattactcactccacgtattttatttttttctacccttacttcctctctgccccagttttctccttctgttttcagaatgtggctaaaacgtatgtattttcataaggtgctttaaaccactctggaataaagccaatgtacagttataaacagacctgcaaacaattcacggttacttggctgtttgatgaagatacgaagacccttgagaagtaactaggaattgatttatttaataaatgaactaagaaagtgaggcaacttatcctgaagaggaaaaggtagagtggagattctgtacccttccagaatcctgaaagagctcagagtttcccgggagccagcctagagacacttcaagcacaagtggagggatttggatgagatgcattgccaaaaaggggggtgagacctagactggtgacaaggaggaggctggagctgtgtggcctctaaaaccagggaggggctcatgtttggggatggctgagttaactcggtgcagaggcaggggaatgacaagtgagactcccaagtgcctctcacccaagcaggcagaggttctgtgttctccaggtgagttaagtctctcggggcaaagctgggagtccactcaccttggccaggaactggctggcctgagaagccagtgctgggtctgctctgctgaggactggtcctcagagatgtcccggttctccggaagccacccagggtgggcatgctggtaagcgaggaggggctcaagtctcctcgagctgatggccacctggaatacacaactgctgaaagctggggccaagaacagtccttccaggagctgaaggacgaggctgaacgtcaaagccaccacctccatcatcaagttatagctcagtcaccatgtgcatcttcacatcagccccaggaagtgggctgggtagaacattgtcccccatttacaaggggaacaaggtccagatctgccccaggccacatggttggctggagcagagctacgctaggctctgggttcccagtcaacagcgtgggctctcacacagggagacgtgagttccaatccagcacttcccctccatagctgtatgaacttcagcgtgtcctcacctctccaattggtcccctggctgtcatgggtgtgacaacagtgcacacctcagcgggttattgtggggattaagtgggtcacatgtgtcaaggcttagcacagggcctggctgagatatgggctccccagggacatgctctatgttttcaactcacccagggtcaccaagatgccaagtggcagggccagggctcccccaggctgctgtggatcaaagcaggacactttccacatctctgacccttttgagtcaagtgcccagggtggggccttgcctccctccttcccctggcctgaggccagcgccatcccagggtgaaccaagtcagtcccacagagcagaatcccaggcagaaggagcctccagctgagctcttctcccggactcacctgaggccgcagaggcctgggggtcctcggccgggcccgccaccactctgcagagcggggctgtgggatggtgaaggacaagaccttggtcccctgggcaccattcccgtgtggatgctgtggttgggctggggtgggtcagagaacaggttcaccttggaagcagggaggcacagcacagccaagtcagggtaggggcaaacccacctgaaacgctcatcttcattcaggagctcaacacacatgccctgtagtaataaataccatctttcagtcagcccttggctaggccaaacacaggtgaagaactgcatgccttttcatttactcttaaggcagtcctgaaaggaagacagggtggggaccccaacagcccattatatagaagaaaaactgagacacagagaggttattaagtcagttactcaaaatccccagctgataagtccttgatgaggatcacaacactgctctatctgaccccaacacctatggttctcctattaacagtattttttattaataatgtgtgttataattatatcataattaatataccatataacatatattatttcttaacaaatataagcatttctaataattattatactgataataatagcaacaatagctattcgaatgaatgagtgaaccagcaagtaaacaaactaatctgccattggtacggatctctatcatttgaggatggatttaacatggcagccagcccagttggtgagggagagtctggagtcaggcaggtgaccaaggaaggcctcttgaagctggaaagcagagggaaacacaggctgttcaacagcttaaagcagagttgagagaactatgttctgtttttgtaaagaggttttattgaacacagccatgcctgtttgtttatgtgttgtctatggctgctttcacctctggtggcagagttgagtagttgtgacagagactatatgctccacaaagccaaacatgtcacaatctggccctttacagagaaagtttgccaactctggcttagcatgtgggctctcagctagagcccaggttcctgtctaggctctaccacagcacacctctgagtcctagttgtttaataacctctctgcgcacaaaataagtgctcaataaatagtggccaccaccctgacttcatcaccattatcttcaccaccaccgtcatcaccactaccatcattagcatcaccatagcatcatcaccatcagcatcatcaccaccactgtcattaccaccaccatcatcaccgtagcaccataacaatcactattaccatcaccatcattcaccatcattaccatcaccatcatatcaccattatcaccaacaccatcactattaccaccaccatcatcaccatttttaccataccgtcatcatcataaccatcaccgtcatcatcgtaaccatcaccattatcaccatcacgttatcgtcatcaccatcattatctgcacagccaccatggagacaggcccgtggaaaacaacaccccttagtgggatttgctcatcatgatgttggggggttatcttaactgcccccctgcaccaaggtcaggaatgagcagtttagggtgggcctggtggaaggggctccctggccccaggcaagcaggctctcttgcttaagctgtataggtcccggctgtagccgaaaaatcactccaagtgtggcatggtccccgccgcctccccctctttcaggcccagcctccccagagagaacaaagctggattttaataatcccctcagccatctgctcagactcccctgtggggcctttcctatcagcacccctctcctgaggtgacccaaatcccaggggaggcccagcccttgacatgtttccctccccagacccctctctcagcctcaggccccacctagggagtgacaggaatggggatgggccagggaagccaggaagcccttttgtttcagggaccgataaggagttgaagcagagaagcccaaaacctgagcagatgcccaggcagagcgatgaggtggggagggcggtgggggtgggggtggcagctgcagctgctccggccaggccctcccagggctggttctctggacacagccagggtgtcccgggtgctccccaaggctggattcactccctcggggattctgtgaaaggtgaatcaggattctgtgaagggaggactagtgaatttgggaaacatgggttaaacaaatgaatattctctgcacagatggatttctctcagcctttaaaatgctatgggctttatgaatggggagggaggggaggaggaagagagagaggaaaatgtttccccactcatctgcatacagaagcctccccctccccccatccccacccaggggcttctagaccacttgcagccatcagaacacactgaaaagaggtggttttacatcatctccgtaattcctcttgggtaatttctggtcacctcagctcttccagatccctcttcagctgagatggaggacaggggctgggggggaggtggcaacatggcagcaaatgcagtgagatcactataaacccggccagaggccagtgtagagaacagagcccaccagtgactcctgaccagtcctggctcctgccccacagctgggctccctggtcctgccccaaccccaaggctccagacccatcggtgtcctgggccaggcctccccagctgcagatcccgcaactaccaagtctagttctgctagatgtggtgtcactcgtgggcttcagagctaggctgccgagttccaactcctgctctggcactacttgttgaatgatcttggtcaagttatttaacctctctgtgcctcagcttccccaatgcaaattatttaagagagtggtccataaacatcacctatgaccattcttattactatacagtcatcaatccacctcatccctatgcctgtctccacacccagtgccagggcctgagtccagggcttacccaggcatgaggaaagaaacacctgttctggaatcagggagatgtaggttcagtcccagctttgcctgttgcaccagctgtgggatgttgagcaaaccattccacctgctgtgccttggtgtgtgtgtggaggggctcaaatatgaccctgaagctggggtgggatcctgttgctgctcagtgaatgtcaatctccttcctatgggtccccatccattgctgtcccctacccaccatgcctagcctgggtgtccagcgcaacatccccagcgcggctccctcccggtgggtccagccctcccccgtgggctctgagcagagtgaaatggctcggtgggttctgggactgcctctgaactcgtgggttctgagcagaagaccatcctggggtctctccagcctcggggtagagtgcacagaggtccagatggagtgaggcactggccagctggaatctcagccccctcaagccccatggacccagagtgaatcccctccctgttccggggctctgtgttctttctgcacataggagctgcaagcctgccatgtactgttccttcagggcagctgtgagatgggttgggcaggagatgatagtatcatcctgcttccttccggtagagccctgaatggtgtcacacttcttgaggctgagagaggggttgggggagggagcagagccctcgggccaagcatcatttttccagaaagcgggagtgagtgagctggcacagaaccatttctggcctctccgtgacaccctcacacacatgagccaggggtctgggtgctggccagggcagggtgactaccatgggggggaccctgagtcctactgggtcaagggagcacccacgagaggagataccccgctgtgctcccccgtgtccacccccgcctgtcactgtggctggcacacaagaggcctggagtaaacacctttataatattccctaactcttacaaagtgcctgcctagtgccaggtaatgctttctgtatactgactcatgcccttaaacgagtgcaggaggaaggaagggaggaggagggtgcagacgctccacgcctccagcccccgccactccatgaccttcagaggcccctacccaacgggagccccagtttcccaatctgccaaacggggaagcccaagtgtttgggtctatgaccagttcctttctccttggacctacttggagtctgcagccatgggaatgtggtttcccagagaggatgacctaacaaagccccttccctccctttcccaactcccccgtctcttcaaccctggatctggctcagtggttcagaaagctggaaggagcctgcttggctcccaggggaagtctgattagcccctcttttacagatgtgcccgatgaggccaagagggaagggtctgcctgtgccaggcagcaggtgtggggacgcagcggggggggggggggtcctggtcctaaacaggcccccttccatttcctcaccacagtggcctccgcccacctgccccggaagtgctctcgacattgagagcagcagctgtggcaggggcagggtcctggagcatgacagggggagcactggggcatctgcatctctgcacctcagctcccacatcctcctctactgctgcctgtgaggcaagaggagggcacagcaaaagcaggaagccacgaggggccgcacaggtcccactcctgcctcactcagaaaagaggaaggtgcagaattcacagcctcctccgaagacgggggggggctggggtggtgggttccccctctgctctcctcctgccccatactgctgttcagggaggggagaggctgtggtgaggtggtggggagggagaaaggcaaaggtgtgatccaggagattcaggcccaaaaaacaagcaccaggggctgagcagaaattctgtgttactcttttgggctcacagagcccaagtaacgtccttaaggtcacacagctggttagcaatggagccagagtcgaacccaggtggtcttactccagaacccatctagaaggagagagattctcatgaattcctgggctcatggtagctcaggcctgtaatcccagcagcactttgggaggctgaggcggaggatcacttgagcccaggagttcaagaccagcttgggcaacaaagtaagaccccgttctacaaaacattgaaaaaaaaaaaattagcagggaatagtgatgactgcctgcattccagctaccagggaggctgaagcaagaggatcccttgagcccaggaggttgagattgcagtagttacgaccatgccactgcactccagcctaggtgacagagcaagaccctgactcaaaaaaaaaaaaaaaaaaaaagcccagggaaggcaaggtcactgcccaaggtcacagagggacttggggtagaagaaaactggcgttccactatctccagggcctcagtagatggaggaggcgtggcctttctctaggactatggaaaagtgtcacctcctcggggacttgggcccatgccccaccccatcccggcctggtaccttggccccgaggcgtagctggtcaatggtgttctcgcctcagcgtacttggtgaggagcctgtggtagtcttcctgcagaaagcgggagcaacacgtcacatgcgcaggcacacaatgaacccctccttgctgggagaccctgatagcaaaccccttccataagggcttctgggttcctgagaggaaagcattcaatggtgggatccgagctggcaatcttcaggcttgtgtgcaacacagacccaccacgttcaagttctggagcatgagaggcagtgggacaactcttctacccccatgacaacgggtctagactgagggcctctggctgtttaccttgatacataacccatgtcgcagatggctgccactgttttatttctccaaatccctgcccaccggttggctctgtggggtgaggcccatatctttctttccccctgctgcatgtcggtgtttaagaagcatgtgcttaagaagtacctgattttcaatggctaattgaataatcacccaagagtcccatggcagagaaatagaagacttaaaatcactgttccacctaccagagtcacttatcttaaacaagtccaaagaactttataaaaacaagtcattgcaggaaaaaggaaaagcatgtcacctttgaaggatgtgaggaactgactccttctgaaaacgggtggtaactaagtaagtaccattatgggtcagtaacggtaacagtaaaaggacagaacggacatctcgctggcccttcccataggaacaagaacttggtaaccaagtagttgatgagggaacttttactttttagcatatttccagcaattaatgcaggaatgagagcattagcatactccactttgtcacctcaaatgaaagactagcccaagacaatgaccatcagaggctgtcaaatcaccaacaagagagcagcaggcatcctgtgcttactgaaggaggcactcacgtgctctgccaaaactccccacgcccgtggagctcatggtctggaggggaaatggtcatgtttctctccagaccaccaaagcctctagctcaaaacctaacaatattcaagaaaaagaggacaagggacgcatgaaaagagaccacagcacatcagcaaagcccagactgcggacgactctgcggacagactgatttccgcaacaaatgaattgcacggcagaagtaagaaggaggacggacaagagagtaaaagagatctgaaaaagtaaatgcaagaaagaaagaaagaaaaagacaaaggagaggacagacttgaaaggcaccaaatgcaatatacaagccatgtttggatcctgagcccatggacgggaacgaataagccatttatgagacacagagagatctgaatgcgggtgtatatttgttcatatttaaggacctggtgttaacatttaggtgaccatggtatgtggttagtttaatataaggtctttatctttagacatacacacactaacacatttttagataaaagattggatgcctgaaattttgcttcaaaataatctagtgggggtgaataggggagaggtaggccacaggcgagaaaggttttcggggctgctaattgtggatgcggggggtaggtacatggagtgtattctacgatcttctctcttgtatatgttttaatttttttatagcagaagttaaaagaagcaaacagatcatccttgaaacacgagtacaatcactggtctttttgagcaagggcttgggtgtatctcagggctccaggtacaccctccctccaccagcagggagttcctgcccaaaccccaggcctccctaccgcagccagcctctaccccagggcttcctgcccaagcagcctccaccccaggcctccccaccccaccagcctctatcccagggctctccacctcaccagcctccaccccaggcctccccaccccaccagcctctatcccagggcttcctaccccgccagcctccaccccaggcctccccaccccaccagcctctatcccagggcttcctacccagccagcctccaccccaggcctccccaccccaccaggctctaccccagggctccccacccaggcctccccaccccactggcctccatcccagggcttcccaccctagccagcctccacccaggcctccccaccccaccagcctccgtcctagggcttcccaccccagccaggctctacccaggcctctccaccccagccagcctctactccaggcctccccaccccaattagcctcaccccaagccaacaggggccttggtgacacatccacagccatgagtcccactaacctgggctgatggaccagctcagtggcttgctcaggcgtctgaaattcttggggtaccctggtgtagggtgggcaggaggcgtgtcctttgccagggctgcttctccactgctcaacagcacccctgcacaatctcagctggagacttgaagatgaggggcctggcaggggcctgaggcttctgttgtggcttctggacttggggggacggtagctctcatctttggggaatctcacccgggccctaccttggagaaatcagggagtgggtagttcaactgcccccggccatacttggggcattagaagaggagcggccagccagagtggctccctgtctgggcagcggcctgccctgcgcgttggcctgggctggggattcagggggctgatggagccaatgaatcgggaagggagtgcttaggtgacgtctttgtctgcttccagatgtgttccttgggctgagggcagaagaattggtcgtttctctcctccatctatctgtggcatgctgcggactctgggctgggggagctaggagtcctggaattccatgggggttgcccgagcaacactgcctccagttctgccatctggcttaggaggtggtggctggggccctctggcaaggtttctgccagggcagtgggctggggccatcggtctctccttcccaggtagaatcaaggctgtcactagggtggtcgaggctcctgtcccactgctccaggaccttgccgggctgagttcaacggatgggttgacctcggaagttcagaaagtttgtccccactggcttgttcgccagaagccacccagcccctggcctgacatgcccaagagccatggggctggtgtttccatggccttccaagctgagaccagcctcaaccccaaccttgaggagctctctccagcctcctcaacctccagacttccgagggtcccactggctcctcttcagtcatgtccagctgacggccctgctgggggagccaggcaagaggccatgggaacttgctgggctgtccacatcctctgcttcagcctctggaaagacaggccatcacttcttagcatataccagctctgcacccaccttgtaacttaccctaagtcacttcaatctctggcttccatttcctcatcacgtggggatggaaagaatcccaaggtggtggtagattagccaagtgcttgtctgatacctgatctgattatctcagaggtccttcaaactcaaatcaaacccaaacccggtggatggtccctccagtgtctcccatctcagcagacggcaacacatcccctctatgcatacaggccagaaggctgggaggcatctttgccatctctctcccttaaccccctgaatccattctgtcacttggtcctgtccaatgggacctcctataaagatccaaactcatctactgctctgaagtctaccaccactaccttagctcgcgtcccatcctctatctggctaactgcagtcagtagccacctaaccatctcctctatcctcacccacatccccatctgaaaactcatccatgtcttcctgtggaagaaaagcagaaccttcactatggtccaaggtcgctgccaccccggccccattagctctcctgatccatctctctccatggcccctaagctccccctgctcctgctatgtgcacacaacgctcctcccaccatgggggctacgcagtgcgcatccctctgccgagggattctctcccctccttggcctagttaactcctatctgccttcaggcgttcgctcaacctctgcctcctcaaggaagacttagctctccctgactagtcaagttctcccttttacaggccctcataggactggctccctctactttgtaacacttacatagcagcagttttccatttatttgtgcagttgtttcattgacatttgtctcgcccacacactgcaagttctatgaagccaaggatgctctctgttttgttcatgattatatttgcatgccggtacctgacactatttgttgactaaacagaaggaaggagaaaagggaggtgagtaggaagagagggaaggaaggagggagagaggaagataaggtatataaagcccccaggaatagatagttattgtaattattacatagtgggtactcaagaaatatttatccatctaccccccatctatcccgccatccttcctcccaacatccatccatctacccacccatgcacccatcatcacccacctgtccattcatccatgcatctaaccaccatccatgcagtcattgttttggagcacccactctgctctagaccccgtgttgacctcagggataagtccaaagtttcagagacatagtttgggtaccaccaggcatagactctctgttcaggcagatgcacctttgtgcactctctgttcctccatgctctttcccctacccttgatgcctctacgtctcttaacccttaacatgtccttcagcaagttactcttgcttacagcagcatacttgaagcccagggagttacgtaagttgccaaagatcacccagtggttccctggacctaggacccaggccccagcatgcaggtgagtttgcttccaccactaggggtcacgtactaggggtgaaggggcctggctttggagctagggagccctgggttcaattctggctcctatcacccctcactggggccagggcaagctgctgacctctctggcaatccatagtcaaacttgaggatagttcctcctactgacagagggtggtgaggagggaacaagagagggccagaccctgcccagccctgtgcctgcacatagtaaaggcacaggacaaggtagcagctgttacatcatagcagggggttaccagtgaccccaggaagagatgcctctgccctgtcgacccagtgcatctcagtcaccatccctgctggagagagagctcagaaatggctcctcagtgggcagtgcccactttgagcagatcggtgtgtgaaactttgagtaatggcacaatccactaccagaggaggcttctctaccaacacaccagcctgcgggagtcacaggaccctaaaacaggggcatcttgctcataatctaaggcaatagttaccatatattcagctcttactattctccacgatatgattcctctcatttttagatggaaaaagcaagattcaggcagaaggaacttgctaagcaaagctaggaattcagctaagttggtctggatgcaaccagaacacagctattgtagaaaacaagaaatgccaacgtcccattgctaattgggattttaaaaaaccttaaaaatgtccaggcatgacggctcgcactgtaatcccagcattttgggaggccaaggtgagaggctcacttcaggccaggagtttggaccagcctgggcaacactgtgagaccctgtctctacaaaaaatacaaaaattagctggtgtggtggcatgcacctgtagtcccagctcctcgggaggctgagttctgaggattgattagccagaaaggtcgaggctgcagtgagccatgatcatgccactgcactccagcctgggcacagagcaagactctgcctcactaaaaaaaaaaaataaagtcaaaaatggacataacccgggactaagtaattcaaattaccaaagatatgatcaaatcaagtgtgcaaagatatattatgacattcatcactgcattatttataacagcaaaatctagaaactactaaaacgcccacagtaggagactggccaattaaccatggaatatccatggaagtctaggaatcacttgtggagaggatttgatgaactacgaaaatgttcacatctattaagttaaccaaaaagcaggtacaaggaagcatgtagaatactgttccttattcacattacatttgcatatctacacataggaaaacagtggttatcaggggatggagtgggacaatgagtaattttaaattttacctattttgtgcttatactttccggttgttctgcaatgaatggtattatgtatacaatttaaactttaaaaatttttaattacagactttgtagaatttaattgaaaatgctgaagcagcgtcactcccttcctccctggaagaatgtgtgatggccgggcttatgcctgtaatcccagcatttgggaggccgaggcgggcggatcacgaggtcaagagattgagaccatcctggccaactggtgaaaccccgtctctactaaaaaaaaaaaaaaaaaaaatacaaccgggcatggtgggcatgcctgtaatcccagctactcgggacgctgaggcaagagaatcgcttgaacccaggggcagaggctgtagtgagccgagatcgtgccactgcactccagcctggcaatgaagcaaactctgtctcaaaaaaaaaaaaaaaaaaaagaacgtgtgatgttttggggacaggacacactgtagggggaggggtgtcagtctcaccttctcccgaagtctctcctgactcggaatctgatgcccatcgggctgcgggtgtgggtcccactccaggggcggcaggtgctgctgggcaggcggaagtcctctaggagctcggggctggtggcattgggaaagagtctctcttcttccagctttgtgaactacttctatccacatccctcttgtcctcggcccaggcccagcgccgcgctgggggcccttccccaggccaggctcagcccagcggatctcagtctccgagctggcattggggctggcctgggcttcacctgggccacttcatcttcaggagacagagctgctgcaggggccccagagtcaccgctggttcctgtcagcatcggccatcctgcctgtgccctgtagggacacattcaagagagaacattaatcaatcctgatcccctcttttattcggaacaaaagttaccagcaggaactctggaattagccccagttcaactcctggttgtgtcctcccgagctgtgtcaccttgggcaagtcactctgccttcattttcttcatcaataaagctgggaaataattcctctctctctccagggtttttttttttttttttttttttgagacacagtctactctgttgcccaggctggagtgcagtggcacaatctcggctcactgcaacctccgtctccaggttcaagcaattctcctgcctcagcctcctgagtagctgggactacaggtgcacgcaccacacccggctaatttttgtattttttagtttcactgtattggcgaggctggtctcaactcctgaccttgtgatccacccgccttggcctcccaaagtgctgggattacaggtgtagccaccatgcccggccccctccagggttttataaactagatgagacacaggatgaggacccagtggccagtgcaccaacgaacaggtgttgaatgcatgctagctagtgttactgcgactggctcttcgtgtgggcatggggcacaggccctgctcatgggagaactgatggcccagaggaagcagacgatcaccaggcaactacaaatccaggtgagatgtgctggaggaggcagggggctgccctgacacaggccagggaagtctggtgatcccagtttagaagccggttccccaagaatcctctctgacctcactggggtaagaattcagattgagaggtgggggaggatatgaaaaaagcattccaggccaggtaggagagctcacgcctataatcccagcactttggaggctgaggcgagtggatcacttgagtctaggagttcgagaccagcctgggcaacatggaaaaccttgtctctacgaaaaattagccaggtgtaattgtgcacacctgcagtcccagcactccagaggtcgaggtgggaggatcacttaagcccgggaggtcgaagctgcagtgagcatgacagcgccactgcactccagcctgggcaacaaagtgagaccctgtctcaaaaggaaaaaaaaaaaaaaaaggtagcattcctgtacccaacataattgaaaaacaggtgctcaaagaaaaggcatgaagtcccaacacatgctacagtatagatgaacctcaaaaacattatgcaagtgaaagatgcgacaaaggtcacatatagtgtgattctatggataggaaatatccagcaaggtaactccttggagagtgaaagcaggctggtatttgccaggggctgggggagagggagcgggcactaaatgcttgctgggtatgggatttccttctgaagtgatgaaaatgtttgcaactagatggaggtggcagttacacaacactgtgaatatactaaatgtcactgaacttttacctaaaaatggttagttttatgttatgtgaatttcacctcaatttaaagaaaacgcttccgagtgaggagtgaggcgagctgggggcggggagcaagcctaccaggggctttccggacctgggagtggtttcgccgccgatggctggggtattgaacacagggaaagcccatcgaggtgtggtttaaaagttccccttgggctgctctgggagaatgaaccagggaggctggcacacgggggacccgtcaggcggctgctgcaggaacagggtagccagagaagggctcctcgctgccttccctcaaccctctccttctttccctctttccttctccctctcatctcctttgcctcttccttctgacgctcctgctatttccctaagcgcttcctctatgccagcactggccaggcccaggaagtgcaaagctgacccagagtgggcacggtcccccagggagctcccgccatggagggttcagagaactgcagcccatcagtgcagcggcccccagagcagctcaccaaaggccttcttccacagatggggaaactgggatccagagaggggagaggccttgcctaagccacacaggggtcaggacaaggcaggggtgaaagtcagcctcctggcccacagtctggctttctcccctgcatgctgtgttgaaggcagtatgactccaggcctcccaggacagaggtctgtgtttgtccctttatcctcatgaacacttggatcctgcttgatttgtgtggctagaaaagtcagcaggcaactatttttggacacaaagttccccagggaacagtgcagcccggaaaggctgacttctcaagggctggaggagggaggtgcagggaataccattcttccctcttggctgcgactcctgctctgtggatgggtgttcggggcttctatcctctgtccccgccagtcttcctctctacccccaaatgcagagccctacaatttcctccagatcaccctgtgattgtcctccagccccacagtccctaccacatgtgaagagcccactcggcgccagcctggttgaagctttacttttaaattctcaatctgccctcctacaaacatgagggtagaatttgctaagatcacccagctacttcctgccacagcaagatttgcaactgtcaattctggcctgtggtaccccaatatttttttaatcacacaatccatcagtaaaaatatatttgctcgaaacatcacgctaatatattacatgtattggaaagagtattttcaaaagtgatcttctaaaagatgcaatcgaaaatgggccaggtacagcggctcacacctgcaatcccagcactttggaggccgaggtgggcagatcacttgagctcaggagtttgagaccagcttgggcaacgtggaaaagcctgtctctactaaaaataaaaaggaaaaagaaaatatatacaggtgacccttatgacagtttgaaccacacaggtctacctatatgtgaattttcttctgcctctgccaccctaagacagtagatcaatctcccccttaactcctcctcctcaatgtgaagatgacaaggagtaggcctttatgatgatccacttccacttaatgaaagtaagtagattttctcttcctttgatttccttaataacattttcttttctctggcttactttattgtaagaaaacagtacaaatacatataagacagaaaatatgcattaaccaactgtttatgttatcagcaaagcttcagtcaatagcaggctattgataaagttttgggggagttaaaagttataagcagatttttactgcatgaggcactcctaacccctgtattattcaaggatcaactgtattttattttatgagacagggtctcactgttacccaggctggagtacaatggcaatcagagctcactgtagcttgaccacctgggctcaagcgatcctcccacctcggcctcctgagtagctaagaccacggtatgcgccaccatgcctggctaattttaaaaatttttttttgtcgagatggggttttccacgttgcccaggctggttttgaactccttgtttcaaatgatcctcctgcctcggcctcctatgtgctgggattacaagcatgagccacccacccagctggtcaactatattttaaaagaagctctaatccttgcttctcataccttctgcagggcctgtacccttcttggaaatcctgccagggatcttaagcttcagtgtgcttaagaatcctctaagcgtgcagtttcctgaacaacctgcagagagcctgactcagtggccctgggatagggcccaggaatctgcattttaaccagggcctcaggcagggcctgccctttgaagttcactaggcctcctggctcctgctttatggcaggtggagaagaggctacaatttagctgttgcttttctgattctgaagcctcgctgaggaaggggccgggggaggtgtgcggttttttgactttttaaagggctttttttcagctctgccacagagcagcctgcccaatcacagagccctctgggtgcacaaagaggaactcctgtcttctgggatgactcagtcgtggcagaaatctcactgtaaccaggggaaggtgacgtcagaggcagctgcagtgactgactagagtttcgcacttgcccccaggcgcctaaacagtgagcctttcctgagccaggcctctgccttccatgcgagccatggccctcctcacccaaagccccagaactggccagtcagctagtcagtcaacaaacacacgttagtgccaactcctgccaacctcaggctgggacgatgctgtgatagagaagcaggctgggcatcaggagaaggtgctagtcctggctgctgttactcactgtgtatagctgggcttgcattttcctcacgtaaaatagagaaagtaccacctgctcttgatatcgcaaggggatatcaccctgctaggtgggttgggaggcagggtatgggactcaaagagctttgaagtccctgattgactcagctctaagggcaacagcctcagaactgttaacctctctcctcctccctgaggtcacatttcaagtacaaagatacatactgagcacccagtgggcgcaaattaactttttaaaaaagcccttgacttcctactatataccaggcgctacgtaagatgcaaagaatatagaaaagagtaaagtgttccaagattttaaacggtggggggtagtacaatacagaagtgttaccaaaggaagtttaaggtgggcttgagaaacaatgaggatttgggggagaagactggggagggcattccggcagcgggaacagcacggaggcaaaggcacgtaggtctgaaagtatggcctgaccttgaggagagctatgggcaggtgtccctgcatgccagataaaggcagagttgttccagccagcctcgttagggcagcagggctgctcctaaaaggcagtgagtggggtttggtgaagactcagcagtgtgagctggggagggctatggagttcagggtccccgccatccctggagaaactgccccacaaggaagtagcagccactgcaccctccttctgcacatctccttcttacacccagccgccactgcccctgctctctcaagggtctaacagacccctgaggtgtctatcttcattcctgggtgggatggactcttcttccccaccacccacacagggcttctccgcccgctcgtcattccacagccagggacccttccctttatggctcaatccctcagaactgcccagaccccaggctctcctttgccagcacagctacgcagcccgcacagcctccccgtgccctctgagccccttcccatccagccagagctggccagggtgccaccctgcttctacccccacccaaccctgacacctcccagatgaagacactgaggcacagagacatggcctgctctcacaagcctcacagccaggaagcgcagacagaggattcaaagctggggtaccgcaactctgaaacaaggctgtcagatgtgtcagggagatggggaaggaagaccaccccccaaatcagtaaccgaccttccaaaaaggctcaaccatacccccacccacctgctggcagggcacagacttgcgttctcaaggggttcccaccagctgtgtggactctagtcccacaaggaagcaccagccatccctctctgtgtcctccctgcccccagcccgctccagcagcagaggccgaggagaaaggaaacggtgccctggctgttgccagctctggtcttgccatcctcaagagctgagctgggctgctggtcctcggactgtccttggctcctctccttgctcttacgcagctggcataagggccactccttcaatagggaccaccccccggcgccgtcgctgcctcctggcctgctgccctgcctgcatcgtctctgagaccccttagcaaccaaggacactaactctccaggtgcagagacgacaccccaggcacagagatggacccgcctacccaagttcacaagagatcagaatcgagctaggactggaatctagcatcctgaggcttgacgaaatcctccttaaatccaccctgccctggaggccgggatcccctaagccaagagaaaagcggtgcagctccagcagctgcacttcctggctgggctggtccggctgcctggactgtcccggagagtctgtgactggcccgccagaaggaaagcggcctcccgggccctcctccgttccaatcccttacctctctcgggcccaccaccgtcctgccgacccagtttcaggggacctgcctgtgaattctttgttccaaaccagggagccccctgtctccattgcgccctggcccacctccaggccgttctgccagcccagctgctgctcacagaccagcatcgctccccacctctccccgcccctgccgtggttgagccgcctcgcctcggcaggaagcgcccagcctgatttcctacaagtgtttgtcagaaggaggggtttgtctgcgtgcagagcaagagctggaggagcttaaccccttgcaagccctccgagtcagcgctgcccaggaaaggactcagggaacaaactcctgacgtcctgggcttgggacatctcagcccaggccctgcaggtacagatggggagactaaagcacagagaaggtcagagcttggccaaggtcacacagcatgctgtagctcctaccctctaggccctcttcaaccacgcctgaccttagccgaggctccttccctcactaggcctcagggcccatgtgcacggtgaagctcagactcaacaccactcctgcccttccagctctgactctgccaatgtgcaacctgatctcagggagaccgtggtgattcctgccatctcaacccaccgtcctcaccccgaggtgtcctgcagccagagtgggatgttcggggcagcatggaggtgtgaacctggcggatcaggaaactttcccttgttgtaagaaccctccaagggttcaccagatgttgggaacagatcgacctgatggtcagtcgagctgtctttcctcaagccccaccatcccattccttcattcgtagtactcactgagctcctactgtgtggcgggtgcttttaaatcacctgggaatatggcaggcccaagacaggccagtcccctgctctccactctagcagagacatggacaataagcaagacatgtataatttcaaggagagagctgtgaacaatgagactgggtgacgatccgtgtccaggccaggtggcactgaagcctggggctcaccccaggccaacagagtcagtctctgggctcagacattttaagtgtcccaggtgactggccctggtagagaacacatggggccaagagaatgggttggaggagaagggttataggacggtcaggaaggtctctatgaggaggtgacatcaaataaggcactggaaggaagaggggtcaaaagcaagccacaagaaggtttggggcaagtgttctgggagggcaagtggaaaggccaaggtgggggagccagcgggctttccctgaaacagcaaggcctgtgtacccggggcagagcgagtcaagcgggagaagcaggagcttcaagaaaagggggcacaggagcacaagaggctcccaacactggccccacccaggacccagaactctgagtcaggaaacaaaaagaaagaggaaaaaaaacaggcctctgtattgtccaaaagccctccaggtaattctgataagcagccagatttgggaaccacccatgtaggagagaaaaaatctcagagtcactgtggacctgggttcaaatcccagccccatctcctgctggcccgacctttgaagcttcacgtctctaagcctcagtttcttcatctgtaaaacagggataagagagtagccaccccacaggggctgctataaagattcaatgacatgatgcctaccaagggagagcgggggagccagaacacagtcatgtattgagctattttattattgctactacaacattgctgctacttaggtataagtctctggtctcctctaaaggctagatcttaatatcttcctgaagcctggcacactgtttatggctgatgaatgtgttctgtgaatgaatgaatgaagaatgagtggacgttcccaaggtcagcttgtgaatatctggcgtagccagggctagaacaggagccctcatcctggtaatcgcccacccctctatcccctttcctgccttttacccactctgggtggcagggctctccctgtagcccccagccccacatggagcagagccaaaccctatgaggcccctccctatcagctctggaggccatgtgtgccattgtgcaaggggcgggctccctgacaccctgtcactcactcaccctccctccctggtcattaacccaggcagcattacccaggtggctgccattgctgggcatagcctgtggcccctggataaccccaaacccatccaggggcagccacctaacaccaaggagaaccgcctgcagtgcagtctgttccatttcctgcacccccaagcatgaccaaccctcctccctgcctttgctcatgcactgccccctcttgatcactgtccccacccacaggccaaattctaccaaaccgaagcagcatgtctaagactggctcctagtattgccaccctccaaacccacccctccttagtttggcccatctttcacccggtacacactgagaatcaactgtgaccctggacacttccttttcccttacatcccataacaatccatcgtcaactcccagtgatttcatttcctaaatttcaccagaatctgtccccgttctgcatccccacgtgggtccctggatcggccttgcctggaaagctctagggtccactatctgttccccacactgcaccgatgtggtcttccaagataaaagttccaaacaagaccctccatgcttcagacgcacagctagctactatggctctgagaaagaagatgaaactccacagctggccgctgctgcagcctcttctcccaccaccctctctgcccttgctcagcatgctctgccatacaggcctccttgcttttcctgggacagatgtgtcctgctcctcccctcaccagtcccacttcttttccctgttaacttctaggcaacctccagatgtcagctccagcgtgcctccttggggactccccatttggaactatatttcatatgtgattatttgattaacatcgtctcttcactcagttgggagctctgtgaggctctcatcatcatatccccaggacccagacacaggccctgatatacaatagaaatacaataaatatatcctggatgatccactcaactagctacttgcccaagcctgactcatagccctcataacaacccaatgaggctgatgtgaaaccccatttcacagttgggtaaacagaggcccctagagcccaagcagcttgcccaaggcacaaaggtgatgagctgcagtagagtttcaaacacacaaagacctggcttctaataacaagcttggtgctcacaacattgcagcccgcagagataattaatacctgtgcacaataaatcgagagtggagcttcttaccaactaattgcaattcacaaagccaatgttccaattttaagtgaggccctggttccacacagagccttttggtttcccaaaatgctttcttctccttttagcactagatgctcaagaacagaacgtttaagtggggagaacacgagtattattccatgtataggtgaggacactgaggcccagagaagagaagagaagagattcgttcctggtcaccagaaaagaaacaacaacaaaaacctctgactcctggccaggtgcagtggctcacgccttaatcccagcactttgggaggctgaggtgggcggatcacctgaggtcaggagttcgacacagcctgggcaacatgatgaaaccccacctctactaaaaatacaaaaattagccaggtgggtggcaggtgcctgtaatcctccctgtaatacttgggaggctgaggcaggacaatcactgaacctgggaggcggaggttgcagtgagtcgagattgcaccattgcactccagcctggcaacagagcaagactctgtctcaaaaaaaaaaaaaaaaaaaacaccaaaaacaaaaacacaaaaaaaacctcttactcctactgccagggcttgatgactttcacccttttaccagcacagtcatgtgcatggctgtgtctgcagaaccctgccagcccttcccacgagcctgaggccaagaatcacttgaacctgggaggcggaggttgcagtgaaccgagatcatgtcactgcgtccagcctgggcaacagagtaagacgcttgtcaaaaaaaaaaaaaaaaaaatccacaggagtctgagggaaagaggaggcaggtgaggatttccagagtgaaccaagaagaaatgatgagcctggctagggaagtagagaaccaagttccagcctgagtgaccaggaataagcacctcctttctctgagctttggaacctgcggcttaatgagattgtctctgaggttatcagagatatcttctaatgctaaacctcctggattctttattccatttgcccacccaggcagaaatccatgcagacaggaggctgcagagcacaggtgttaaggcacatgggctttgtgggcaaaagagaactccatgttctcccttggaagctgtgtggccttgggcaagctgcttaacctcttgaatcccagattccacatctgtaacatggaccaataattattttactgggttcttgggtgacggatgagactatgtgccaaaagttcttggccccagtgcccagctggcacagaatgctgttcacaaataaatggccttgccttttccgtgaaacgccctacaacctgctccctgcggactgagtttaattttcctcatccacagcttccacaatatcaaccccaggtctagcgagagtcctggacacaaaaagggagaagcagttttcccaagtggagggaggtgctgacattccctgtgaccctcttccctgcgacccttaaaccagttccagggctcactgacccagctaaaactctgtcctcactctgagtagttaaggagcagaacaaacagccccttctcagccaatgagataagggttatgaggagggtgtggccatattgaggaaaacacatacataaattcaattcatgctcttttcaaagagtcaaacaaaccgtgcacgtgccaggaagggactgctaaagcaaaactatactgaacacctattatgtgtcaaataccttataaaagcctttccatggctcagatctcattatttaatcctcatactaatccaaggagggaaaaattatgatgcccatttattttataggtgaggaagctggtttgaaccaagctgtttgaatctggacagtataactttttttttttttttttttggagatggagtctcgctctgttgcccaggctggagggcatggcgcgatctcagctcactgcaagctccgcctcccgggttcatgccattctcctgcctagcctcctgagtagctgcaattacaggcacctgccaccacgcccagctaatttttttttttttttgtatttttagtagagacagggtttcactgtgttagccaggatggtctcgatctctgacctcgtgatccacccgcctcggcctcccaaagtgctgggattacaggcgtgagccccgtgcccggccctggacagtgtgatcttaatcactttgcaactgaaacttgcaataggaaaatggttggaaacaatagcagtgtcccgtaacaggtgatcattgaaagaaattgtgaagttccactcaaaggaataatattagctgccgttaacagtcatgctattgaagaatatcaataatgtaaaaattttgttatgttaagtggacaagccagttataaaataatatatatcagtttgagtccacttaaaaaaaaaacagtaaaatatggaggaagaggaggaggaagaaagaaggagacaggataggaaaaagaaagagagagaaagcaaaagaaagagaaagacatgcttaaaatgtttacaacaggccatgcgccgtggctcacacctgtaatcccagcattttggaggctgaggcgggaggatcacctgaggtcaggagttcgagaccagcctggtcaacatgggaaaccccgtctctactaaaaatacaaaaattagctgggtgtggtgacgtgcacctgtatcccagctactcgggagactgaggcaggagaactgcctcaacctgggaggcagaggttgagtgagccaagatcgtgccaccccactccagcctaggcgatgacagtgaaactgtctcattaaaaaaaaaaaaagtttacaatcattatcactaggtagtagaattataggcaagttttttgatagggaagtttaccatttttccttttgggtatttttcaaatataacagttgcttaaaaataagaatgaaatgaacatgtactattcttaaaaacaaaacaaacgaataccacccacctctgtgtggtgcttccttctgaccttgggcacctccgtcttcagttgcccctccttgaaaggcgaaatgtatcgttgggttctttgaggccctttacagctctgacatcctatacattctgtaacccccacaccttctcctcctctgtttaaactctaatacaatatgttgtttctgcaatacagccattatgcaacatgtgggaacacatgaaaatcactaaaaggaaaggagcaatcagcgcccagcctcagccactttttgcatttggaggcatggcatgtgttgctgattggatcctcataaataattaggcatttaacagatgaagaaaggttcagagaggttaccaacttgcccaaagtcacacagcatgttaaggcacagttgggtctgtacccacaaataagcattatcctccagatgaatccttagtgggggactgagtgtgcctcttagaccctgagactcccctcctcagtcctggtccttggctgtggtcccaagaccccgaggagactgacagcggacatcccactctggccctgatcccaggctccttccccagaaaaagctgagctggcaggggggggctggggggagaatgctggcaaggacctaggggctggtgtgggagcggcactggcgcagaaggtctcactcggcaatggagctggagttcgcctgacatttggcaaggaagccagagccaagatggaacagcaagctggggtgcaggagggagggaggagtgagaatgtgaactttgggggcaggaagcctgggtagatcagccctttgctgttttgtttcagaacttcttgatatcctcatctacagacagaggcttctccttccctcaggcatgcatgtgtaaagtacaagataatgtgtttgtacgcaggacacactcagaaaatgaggagcttctgttagcctctggctcccctggccaactgccgcacctcttccctatcacccaccctgacttaccccccatcccttggcacaatgacaaatcttagggcaccatcctgtcaggtttttcccctgcttaagaccatccgtggctcctgtcactttcaggttaaaggccagacattttggcctggaattcggctcataccaacctgttcccaagtcaggggctgctgcactgcataactcacaccgtacctacaaaagccatctcataaagggtttcttcccaaatcgcatactttaggggagctgcatggggcgcaggccttctggcctggctccacttggctctgccaaaaagcccccaactccagctgccaagcagaagcaaggctggtcttccatcccccaacacccttcacctgcagctgttttaaaaaaaaaaaaaaaaaaaaaaagtaagaaaaagccctgatttgtggtggttactattttgatggtgttaaatacccttactgaaattggccatgccaatttcaagctattgatacactgaatgctgcactgggaagagatgggcacaatccactctcccgagctgacaccagccaccctgcacaccccaaagtaaggatgcgctaacaccagtgagaagctgtgtgactctctcaagtggctttacctctctgaacctcaggctttctatctgtacaagagggacaacaatacacccacttcgacaacatcacgtaactgatataatctagatgatcaacaacaatgtttgagcacctactctgtgtagggctctgtactaggtagacactagggaataacaatggtgaaaaacagataagagctcctgccctcccaaacctcacttcttgcagtaaaagccctggcaagcggctagaatgtcgcactcaataaatattacctatgatattagctaataataccaatgtattattgttgtcattattccttcctttctttgagcctcagtttcctcatttatttagatgtggactgagcaaaagtttcttatgatgccacctcactcaagccttaaaatggtggtaagtagatgggcgcggtggctcacgcctgtaatcccagcacttcaggaggccgaggtggaggatcatgaggtcaggaaatcgagaccatcccggccaacatggtgaaaccccatctctctaaaaatacaaaaattagccaggtgtagtggcacacgcctgtgatcccagctactcagaggctgaggcaggagaatcgcttgaacctgggcggcagatgttcccgtgagccgagatccgccactgcactccagcctggagacagagctagactccatctcaaaaaaaaaaagaaaaaaaaatggtggtaaagtgggcattaccaacctcattttgtggaagggaaaactgaggcatcagaactgaatccaggctggggatctaaactcaggtcttcttactcctggtctccagacattcccaccttccaggactgaggaaacataaaaaggaccaggaattcgactggggatggaatgctttaaaaatacttttccttctccacgcccccacggggggaaactgaagtgtcctgttgtgcaccaatttccaaaacaccctctcagtatgacggccctgtagctgggaccatcccagtctctctggaaacccctatcctagcgcctctggcagagtctgcaggacggtggggctgatgaaatccccttgcaacaaacagccccaatcacatgttttaaatgcaaaccggcggactttaggaggcaaaggccccacgtggacatcgcctccctcctgcagaagaactgtggacgactgccccaggaataaacccagagtcccaaaacaccataggttccgctcccctgttgttagtaagtaaaccagacttaggccctctctaacagatgggcagccattgttttattacaaaacagcccccaaataaaacccaccaattccagagaaggcgcctggaaaagtcgttgggaagtccctgtatgtatctaactttagtctttcatgcttcagttccagcccatttctctccttctgttctagaggacaggaacaatgtctcttttcactgcagcctgtctcagctttctctgctccaacatagcccaggtttgttatcagcaattttcccttccgactatctcagagcaggtctttaaacataggtaatgatggactccaatccgtcatttctttcaacaaaagccgggaaaggagctttggaagtgtcgtctaaggtcacgcagcaagcagactctggttctcctgtgccagccccatcacactggggagagcccagctctgcgcctccctgctgtgcaccttgggccagtcgcgccccctctctggacctcattctcctccgcaggtgtaccaagagggactggacttatttttgcagcccgttcagttcctaccattgtcagggctgcctacccgacctggcccttgttctaccttcccccccgcgacaaaaagaggaaaagaaacttgcgttagggtccgggaagcgcgcgcggctccgagggccgccaggctgcgcggattgttgctgggtgacgaatctcacacaaatcccagacagaaagcctcacctccccagtaaccacagcaacccggccacgcctccagcccaaacacagcccgaggccccgccaaggcccacccccgagctccccgggacccctcccctccctgccaccagccccagctggaaagagaaaaagccaacgccccattgtgcagaggtggagactgaggccggagggtggagactgaggaaccccgcggccggccggtttggactggggcccataccgcccgtccagggctccctcccattcccggagcggtgtgcgtctccttccccgtgcgcgtggggtttccacgtggaaaagaccgaaagcagcgccgcccagtggaacggagcccactggcgctgtccactctccctccccattctcccgacggagaactgagtcccaacgagggacagggaccaccccggacgccccgcgagcccctccccgagctcacctgctggcggccgccgagcgcgggtggtttcctggagttgagcggcaaacaaagcctccaatccgggcgcggggcggggcggtggctcctttgcataatccctgaggcccgccgcgacagcagggggcggcccggggggggcggggcctctgggagcgcaccaatcaccgaaggccgccgccacggcccgcccccaggaactcggacatagggagcgcaaaccctgctgcagatgaaaatctcagacctgggaggctgtgtgtgcctactgcaatcagccccaccgcagaccggagatcgaggcccggtctgcggagggtaaggcatttacgcaagatcgcacagagtgctcacgcctgtaatcccagcactttgggaggccgggcagatcacctgaggtcaggagttgagactagcctggccaacatggtgaccgtccccccacccccaccagtctctactaaaacacaaaaattagctgggcgtggtggcgcatatctgtaatcccagctacttgggaggctgagcacgagaatcgcttgaacttgggaggcggaggttgcggtgagccaagattgcgtcactcactccagcctgggcgacagagcaaggctccatcaaaaaaaaaaagaaagaaaaaagaaaaagaaaaaaaaaagatcgcacagagccacagtgaggaggaaatcacaaacttccatggtgaaacggcctgcttagtaacagtaataataaacttttcttgatcacaaattatgggtcgacctgttggaagctcttctgctgttcagtcgtctcctatgaggtaggtaggtattatcccaccgcccccaagtatattcttgtccaactccccatcaggcaagcatggaaacccagccgaagacggacaagaacttttccaaggtcccgctgtgagtgcagcacagacatcatacctgtccaccacacacacaccttgaaggatgcacggtgtccaactcacctgggctctttgcccagctctgccacttgctgccagtgagcctcaggcaaatgggattcatacccacatctttgcggttgttgagagtaaataaataaacataatggcaggcccgtcagaaataaatcagtgtactaatttaaagagcaccttgaccgaccctattaacacaagagggttaataagtcctatgcaagaagagacttgcccaaggtccctcatccagctgcatccaaagttgaatgctttgaatttttcctccaggtagaaagcacttgccagttccccaggttgcctgctactccctaacacatatttagtagtaagtttagcagcagcttctacccactaagggcctgctctgtgaaggggcaaacattttagctaatccttctgggctctggccctggaatgtcagtgtaggaaggcccaaggtgtttttccacacaggtcatggaagtgaagtgtttttctgggtttgagcacatggcggtcctgactcttgaacagaatggggaaaccgaggcttggtgcattgtgtaactgcccagcattctccagcaagggagaagcagaccctgagactccattccccccaaccccactttggcatcatgagtaaaaatgtcagggtcacaggtacatgtggccaggatggaccttgacaaccctccccccactctcccagtacttgaagctgccttagcctaccacactgggccttcaaaagacaccaggacaggtgcaggaaagagcagacccaggcttaaggcagctgtggtccaaacttgtcctccttagctgtgtgactttggacaactaactggacctttctaagacacttgcaaaggaatgtttttaggttaaaagttctactgggaggggaacccatacactcatgggctacagcctcagagtcaggcccaggaattccagaagcaacaagtccagaaactcttcctgtcctactccttccaagtacagacatggggctgtgactaacagctgctgggggtgcagctccattgttagtttcctatggctactgtaacaaattaaaacggcacaaatacctctcttacagagggcagaagtctgaaatgagtctctgggcttcaggtccaggtgacagtaggcagctttcttctggaggctcttgaggggagaacccactgccttgcctttctctgctttagtggctgtctacattcctcagctcgtggtcccttccttcatcgtcacagcacatcacgcagcaacctgtttccatcatcacacaccttgtcttcttctgttaacatctttctctgctcccatttataagagcctggtgattatactgggtccaccccatgtcaagactttaatcagtccgcaaaatcccatttgccatataaagtaacattccaaagttccagggatttgaatcgggtatctttgggagccattatttagcctaccaaacccattttatagatggggaactagggctcagagaggtaaaattacttgcccatgaccacacaagctttggagttgaatgccagagatctgaggcctaacgaagccctcctgctgctaggtgggagggtcattccctgcagaggtcaacagcaccctgtcaggggatggcaggggtgccttctgaaacaccagctgcctcagggaatccatggctcaggtctcaggtggtctgcccaggctggaaagagaacaaggacagcaagaacaggatctgggacaagagcatggaaccaactgtccctaacccacctctggcagactctggacacagaactggacaaagcaggatttctcaaactcttccatcttccagacaaaattgaggacagaaggaataagcactggggccgggactgaggccgtacagtagaccatgttgcaaccttttcctccgagcccatcccatatgttttgctctgacacccgctgtcctaggtactggaacagcttgacccacataggtagagagcaggaagtgattgggaatttatggccctctctgtaggctttgtctaaagactgacaggcatcaaagtccagccctctggccttgatggagacaactctaggcctagtgtacgccctgggatcctcctgggatcaggctgaagctccttctgcagactttgcctgaaatctcaccttcgcttggcttcctccccttccctgtccgcttccccacttccttgctggtctgccctgagggcacttcttgacgattgattgggtacaatccttatctccaaggcagcttctggaaaggaatgggctgcatctgagatttaaaacatcatgcacattgtgcattctgcctcataatatacttgtgggttttaatctaaaaatatttctgtaaatagtcaagttttgccttcaagccttcaattaagaggctccaagatgtgagttggctcaagcacccctgcacgccccaccgtgtatcccaattggagccatgcgggcagtcgggtggtggtctgtggtgctctgactgcccccacctgtcctgcccacccctccccacatgaaaccccagccacccaggtaaaccacacagcacgctgacgtctaaccttgttcagattctttattgaaaaattaaagtcataagctctgtatataaatacaatgacactgctggtcactgcaaggcctctgggataggctgggggtgcagagggaagctggggccttggggtccccggggcatggggagggaaataaataataaacaccatgggggataaggagccaggaggaatggggtgtgaatggggaggtgctcgatgcttatttgtggcactaaaggtcttgcaagatgcccctgactgggggccgtgtccatgaattctcgagtgacctcactttggacaaaggctcggcatctggggatgggctgggtcctagctggaggggggacagcagtgcccccaacccaactggagaaaccagcactctgcccttccttttcctttcttcctgtcttgcaacccacttgcctgggcgcctactgtgtacccagtacagcaccagttcctgacctgaccttctgtctgcttgtcctgctctcttcctctcccagttctggtccagtgggctgggatggaggggggatgcttcctgccaccctggccatgcagccccaaccccgcaaggagcttgatgaagccaacggggaaagggactgggaccaggggctgggcagtggtgggaggccctcaggccttggcctctgagcatcacattgaactcagtgaccagaaagtcaatgtagtcacggtccttagtcttgaggcctcggcgataatgcgggcggcctcccggtgctccttgccccgaagcgtcagcccatcacttccagaatcacgtggcccaccttgagctgcccacagttgtgagctgagccgcctcctgcagggaggagacacagggcatggggtgcccaagggttagacaggcctggctttgacaccaactgggtcagtcccaacactgccaagcaggcagctacaatctgagtgtccacttccggattaggaaagctgaggcccggaagagcaaaggtgacataagcctaggtctgcccttagtgccgtgttacccatgggagtcgcaaaaccctggagatgctgagaaagggcctttcagggtagggagagatggcaagtggggcccctggggacatacctgaatagtgacaatcctagcaggggctggcgggtgttggcgccaccctcgatggcgatgcccagggtggccgcactttcttcacacggaccagagtggacgtgggctccagaagtccaggctgtgggtattaggaagacaccactgaggccttcgcagttggcaggcctggccagggggctgggccgggccgtgaaccaccctgggtcagcagagctcaggctccagccctgtgtcgggagcctcaggtgtgcacgcactaagccaagcacttgtgttcttggctctttaatcctcaccaaaatccccgaggccaggaggttaaggagcttgcctaaggctgtctggtggtggcatcaggacttgaatcgaacctgactccgaagactgtctcagccacctggccatgtcaaaactgagaggagcttaaagttcccaagaccaatctcagcctcagcccctagtgtcagtgcaaaggcagagctgaaactggcctccagattcctaatccagtgctcctccaggacgtccaaatccctccagttataggagctcactacctccctttgtggtcacttgccaagctgagccctggtcccgggacctcccttctgtgcctggggcccgtgttcctctcagccctctgcatcctcctcctcctggctcacggtttgttggccccatctgtgggcctctcgttccgaggcagctccttgctactcctgctttggtggacaccgactgccttcctcggcctggggcgctggcctctgcctcgccagcatcacaccactgtcctcgcttagagtctgcccgctgtccgagagctgggagagcgtagaggcgctggagaggggaaaaggaagagagaagcagcttatatagctggggtcagggagggctgctggaggcagtgacggagatggaggctggaaggctgggggaattccccaggcaaagatggggaaggaatgaagagatcgtggggccagagggcaggtccactccctgccaccctctcccctactcaagacctgtcctttcaaccagacctggtcttgaaggctgtgacttccaggactctgcctggatctcccagttcccagccactggcataatgataaaacagaggtcaggaggaaacctagcccacagatgtgggtgttttctttgttttaaaactcacataatgctaccaattttaatgatgaaccaacacattcaaattagaagatttcatataagtaatttctagtttccaagaat

SEQ ID NO: 2915 - DNA, 75330 bp, Homo sapiens
gcatgaactctagagcaaggatttctaaagtgaaaatgcctttatttatgacccaagctgggaattcatagctagagggtcagcatgtatacaggtaacatatggcaagttttattatggactgaccaagtttttcaaagccagggctcttaattatataattcaagctttctaccattttttttgctctactccacacacacacacacacacacacacacacacacacacacatcctaccattatacaaaactagatattgctcctaaactgcaattaagctactgtttaccttcccttacccacatccaccccatagttccatttatgagctcccagtctcatttacaaaacgcactctcgcataaactggttgggtggtgggaaggagagggaaaataagtaggagtggtggaaagagaagatttcagagaactgacaatggcctgagtgaacatgataacagctgaactttagcctcaggagtgccaccatttttgaggaacttgatggagaaggaattcatagaaaataaataatgagaattagaataagcaagagtggtgaccaccttttccaagaaatctccaggaaattaagcattccttttcttcttctgttcaatttcttaaaaaggtaatactgtaatcttcgattctccatacaccatcaatgtattaacagcttctctgaggagtgaggaaagccactatgagaacattaaatatgtaaacattgatttttaagatatatctcatttcagaaatttaagttgggaggaggggtgtggtgaagcaggtgagagttaggtaggggagtggaagtggagtacaactcaaaattcagcaaatctagtgcctggactacctcttctgaccctgttggagttggttgcctccacagatgggtggctttgggtaggctggtgagttgatgaccacaaagagccatggagcttccactcacctaatgactgtcccagaagaaactgggatggatagaactctgtagtaaatgaaaattaagctatcacttttacttatagaaagagcctcaaaaatgacttagaagagagcctttatggagatcttagatattacaagaaaacatgacagtatatctaaggtgcatcaacattaaatcagaatacagctcaatgtcatagtgctattccacctccagtcaaggttctctctcgagaaatagaaaaaaacccattttggccaggtgcggtggctccgcctgtaatcccagcactttgggaggccgaggtgggcggatcatgaggtcaggagatcagaccatcctggctaacatggtgaaacccggtctctactaaaaatacaaaaaattagccggtgtggtggcgggcacctgcagtcccagctactcgggaggctgaggcaggagaatggctgaacccgggaggcggagcttgtagtgagctgagactgcgccactgcagtccagcctggcgacagagcgagactccgtctcaaaaaaaaataaaataaataaacaaacccattttactaggagttaaaatccttctgtatagagtacagaagaaataaaaacttagtaaatgaaaacacttctggtcagagaactgtgtcccctttcagcatataaaaccatactatccaccctgtcaagacagatccctagtgatggactttggtcagtagcagaaacatacacaaacaaatccgaaatgttgaaagtttatttagaggagcactcaaactattttctttatgggattctacatgggaatattgttgtttgtgaaccatacatactgaaatacacgaacaactttttactccatttatactggtgaccacctgtgtcattctctggggttttgtactctatacaaaaggatttaactcctaagtaaaatgggtttgttgctatttctcaagagagaaacttgattgggagtggaatagcattatgacattaagttgcattctgatttaatgttgatgcaccttatggtaactgtcatgtttcattgtactatctaagatctccataaagtctctcttttcttttaagtcatttttgagactctttctataagcaaaaatgatagcttaagaagtttggctcttaaaacatgacaccactgtctgcatttacctctcttaaaggcattaggccacatcagaaccttaaacaccccatcttcttaaacagagtcacggagtcgactgactgcttctatagagatgtctttgagctttgctaagcagtagttccattaaccatgaaaagctcaggaaaactggaatatgaggaaagaaatcagagcaagaccataaaagcccagttcatttcaaggagaaagcagtaccatccctccccactacattttaaatatcacaacgaatttacgtaacaaactaaacaatcactgaaagcacactttatgtacaactttaatttcttcctactgtgttcattaccaagtgttttctttctttagggaggatgagggggaaacttttaaaagactcatttaacacagagtcaatttccactaatgtattcttcatgtggcatatgtagtcttccaaagcagatctattatacaaatacacatgtatcagtatcttcttttataagaacaacagcaattagcccacccaaacacattattgctattcatatcctctagggaaaaacatgaatatgagaaccacctctttataataaatgcaaactgattagtatttctgatagaactgttttgtaaaaaacaccttaattgtgaaaagaataatgcgactattgtataacccagcttttaccttctagaaagttggcagggagtctttttcatgcattcatccctaaggaagtagaaataaagtgctttgcacaactgttgctatcaagttatataagacagaaagagttggtacgacattgcggtctttgtatttggggtgtgtaaaggtaccatcagctttcacagaatcaccaagggctcccccggtcagatcccaaagtcacctttgtacgtgttcagtggaggggaggaaaataagaatttgcacagtgtgtaggaggccaaagtagaaaagagggagagatgaaaacaggcaacctgaccgccacaaaatattcatcacagatttcaaagaaggcttttctccttgagctcttcagatcatgctcaggtagggggatagggggttttaattgggaggaacacatgcctagttagaaatgggaatataaaaaacactacttacaattcctcaaatctcattctgtacataaaatgtagccatggaagcagaagaggagacatctgcacatagcacacatgcatgcacaggcactcttagatcaaagcaagttgctacaaccagccagagaaaataacagacatgtgtgcttaggcaaaaataggtaagaaacaaagacattaaggggaatacactaaatagaatacgtacatacatattatatatatatgtacgtatatatgtatgtatagtgagttctagctttaatcaacgcaatcgcaaaataattttctttactattgaagagttttctaatagctagcccttgattaaatccctcaaatggaacgcaagtgtttggttattacagaattagactgagccagaatctgctacagacgggacttatcacagatgtagagatctgaaaaataacagatatatattataagcctttcagaattctggccccaaaggtatccataaaatatatatttctggcttagctccatgtttttacatatgacccaggtactttatctgactgttcaaatgtcggttggcaccttagtatttacagggcacttttttgcctgcatgatcccatcagactcttgtgatggtccagtgagtaggtgggagaattattggccctgcttaatagatgaggaaactgaaattcatacaactaataagtcagaggtaatgaagatagaaccagtaaccaaactgtctcttagtctaatgcatttgaggaattatagatacattgtgtcttacaatatacagaatattgcttttatggtttctaatcacagcattctggcagtggcttttttgttttttgtttgtttgtttgtttgttttgcaatgccctttagtctgccttctaggcccctaaaacagcacagctatttctcactaattttgtcatcaattcgtttcctgggttaaattccttcttcccaaacacctccctgtagacgggatcagagaaacatgaactgggcttctctgttccctaaaggaagatgtccaccagtcaaagagagagagaacagctaatatttggtaacccacctgctagcagcaccattgttcttattagcaaacccattgccctcaatgaggtgcacctggcttgctttttcttaacactcaactgccttcagagctggagctcgtaagaggcacagcctcccattctgctacaaaaattcttagtctcctcagctactttctctatcatttctcattaaaatgatttattatacagaaataaatggcatattgtattaaataattataaaatagtttaaaatttcttttgtacatttcatcatgagtatttgagaggaagctgaaaccagttctgatgacaggtggaaggtagtaactagttagcatcaatgcattcacttcaaaccacttgaagaaatgaagtgttatttagtttccagagctgcaatctccaaatacacacatttgttctcagatgacagcagttcttcgaattacagtgaaaatattaagccgaaggaagactttttggttgtcttgacaggttgacttgaggttatgccatctcattaaaccaagccaagtaagggaagaaaagattgatgaggccatagccaggagtgaggtcaccagctaaatgtgaccgcatagcaacaaaagaagtttgactgataagatgtgtccccacggtagaagtccttttccctaaatgagtccttcaggtcaagaaagaaatttgttgactagattctcttagcttgctcccataggcatgtgactaatagcactttaagtctgttgtgaaggatataatgattaactgaccatttaaatcctggaaaggtcacatagcagcccctatcagtgcttcggagccaaaacagtagagtgtgaaacttgaaatccacttgagctcagaaaatgattaaagtcagaagtgatccctggctgcttataaatgaagtccagatttctagcattatcaataacagcagtaggcacaagatcattgtgggtgaccaaaaaaaacaaggtagttggattttcctatttttttaataagcaaagaaaagcagttgggctaatgaaatattagttattagctgtaaatttcgtaaatgaatgctgcttttaagagtttaagacctgtctgatcataaatatttcaaagagcacactattaattcaaaccaatcaataatacgtataaccctccagctaagttaccaatgagaagaaatttattcatcagttttattcccacgaatctatatccaaaggtttgggattgattatagcaagatgtgttgtcttattatcaaatagtatttattactcaaacatttctaaagcaataacctgttatgactttttaactcatgagtagaaagttgaatatttactgacatttcttgaaaacttgcaacccgcctgcaggaagaatctgacatcatcacactgtgttttccttaacttgacaggaagtcaacttcaagcagttgacttgaaacgggatctcatttaggaagcataagtgtccaatcaaaaactgtgtattttttaaatttggaaaatactcaagttccagttgcttatcattctccttcactttctgaaacctggcaatcccatgtggacttctggtagaatgagcaatgcaaagaactggcttggactggcatgtccttgtacttctgggggctgatggaccttacgaccaccgttctctcggacacccaacaccacaaggtgaattagaagcactcctgtcagacaagccacagtcacatcagcgaccaagaggagctgggtttggaaccagtttttcgttctggaagagtacactgggaccgccctttgtatgtcggcaaggtaagaaatgccaagtagaaatgacccgggtagtggatatgaaattgaatatgaattgagtatcaaagttgacctagcctttatctgagacctgagaaaactagaacaagtggtacgttacttgacacctagctaaaatgtaacttctgctttgtcaggaccagtctgaaaggaaagatttatttccttgtccatgtctctggtatgaatgggaaaagtgggaattgggatttggaggaaaaggctcagaccctgcaagagctattcaagtcctaaagaggcagcagcagctgtctgggaatgacagaatgggggagagggaaacttggaaatacagaagagtacagagttttttgctttgtgtttttgtggggtttttttcagagcatttccaaggtattgcctgaggtgcaaatttaatgaaaaaaataaaaataaaacatttttcatttcgaagatcttagcatgtgctttaggatagttggagacaataaatatatttataaatgttaatttgaattctcttgatttaatctatcattatttcatctttaatcctggatttttcctggtttactttattggggtgttaattacagaccattttgtgaaagcaaccaagtgagagagatgggagacaagaaactaattagaaaataactaattcattcaaatggtaacttaaacgctgtttagcacagaggctgggagcatgggtttcagattcaaacacaggtgggttcaaagccagccctgccaattatttctagaggaactttggacaggtcaccaagccctgctcatctcgcttcctcaaattcgaatgagattgagagaactgctccttctcaagtgttgtctacccagttctttccccagtgtccactcacttcttaacccaggtatctggctttggtccctaccttgacccaaagctgtgttttcattgcttctcaagacctctctactgcccaatcacacctccagtcacaaactcagacactgctgacctgtctctccttgactcattgtcctatctgtgcatgaccttcacaatcccgtttttccttcttttttctcagccgcgtttgtgggtcctctcttccacctgaccccatttgttggtgggcttgtcagctttgccctagcctcttctccacaactcattccctgggtggactcgccacctctgcagttttgaatgccatgtctatgccaataatgcaaaacctctatctctggcttagaccactttgggttataaattctactgcatatggacatctccacatctactcataggcctttccaatgtagtgtgtccagtaagaaactcttttttttttctcctaaacgtagtctgccccaacacccacccatcatttcctaaaaccagaaactggggatcattcctccctttcccctgcccacacattctctccctctgcaaattctgtagtcctatgccagaatcaaccccaaatcctgcatttctcttatccctgcttccaccatatctgtcacctgggcaagtacctagcctcccaaccagtctcctcatgtccacctgcaccccctcccatctgttctccaccatggtctttttaaaatttaagtcacatcatgtcactccctacttacgtctcttcaatgttttcccactgtgcattgaatcctccagacacctccccaagctaacaagaccatccctttctggatcagcctgcctcctggcatccacccatggcccagctactctctccctcattctcgcgttgcagcggtatgacctttgacagttcctacaaccgtcaagcactgcctttactgctcccccataatgaaatgcccttcccctggcttctctcagacttccttggccactctctaaggcaagcccctctgttagactctctttcacagccctatcacaaccaccatatttgtttcttatttacatgtttattgtctgaagcctctgactaaactagaagctcaatgaaagcaagaacattgctcccattttatccccaaggcctaacacagatttatcttatagaaggtgctcaagatgacatttaataaatgaatgtctcactgtggagaaggattaaataagctaatgcatgtaaagcactttgcacagtacttaatccagagtaaactttaattatccttaacctgtagtagtaaatagtactatagtagcaatagtattaatagggtaatagtaacagcatttaaggagttcattatgggaactcaacgctcagtaatacctatgcagctgcaaatcccttggcctcaaaacctgtgacttttcattgacttctcctttcctatctccttttaccttcacgtgcaatcggtccccatatctgccaatatttctgtgccagttctctcggatgcatctcctcctctctaggctcggtcatgaccatgatcctttgctcttctgattagattaactatgccggtgctgcctgtctccctgtgaaaagactcttcccatccccctccaggatgctcagcgcattcctctccctgaagcaccctttccatcatgttgctccttgattaagaaagcactacagtgcttttgaatgctatcagagctcctagcatgcagttcaggacttcctcctccctcactcagccctcgtgcacaatttctcaaatcaggtcctcatccaatcaagctggacctccttaactggttctgccacacataccacgtttgtccctgacccccatgtgtgcccacgctgctgccctgcccaggacaggccctgacttccgctcatcaggcccattcaaattcctcaaagttttagcttaaaatcagacaattctatcatgaacatatctttatctactcagaattccaaagacttctagcttctccatatctatataacatttcttccaatagacatacatggccactgccaagttcaagaaaagagtatgtttgtattcagcaatttcagtaattacttatgtgcacataaaatttagggctctcttccctcctcccaagggtagaattgagacgccactccccaactttgtctacacctccctgacgctgagtacttggcacagactggccacacacaaagagtgcagaagggtagctcacgttttattggactaccacagtatatgtgtcggtcacaatcacatcaaagcagatcatttaatcatcataacaatgctgtgagtgagtataacacagggaactagactcagagaggttatttatgttcattgcccaaagttgaccgaaggtagcagggaagcccagactgaaatacacatcactcctaccccaaagccccgctttcatttacattgccttgtctgtggtcagtggctttagactaagcccagaggacaccacaggagtcagtggtgtttaggtgggatcaggaatctgagccaggctgcttcctgaaccttgatctctcacgctgggtagttcttagctgtgtagcacccttgcatactcacaattatgctcgccctttccaaataaccccaaccaagatacaagacacccatgcatctcaacagtatctgatccaatcctcataccagcaaccaagcgaagatttttaccctgcattaggtgtgtacctctacatgaagaagataattatatattcacttttcccttttactttcttttgaaaggaattcatccactttcattctctttacccaggggcattctgcttgtgaccttgagctcggaagatgtctgtttagagagcttgccagagtatttgcttatttcagaaaggagtatggagcaattatcagctgtaattggtatggccttacaaaatccacactgggctttccagggaaaggcagtgtcaagttaaagctagattatattgacatatgcaaagagagggatgctgaggcttgtgcacgaatctgtgggtccaaatcatgccgaggttaacaactacatggaagctgctaaccacaaactgtaagcactcactgcatactcgaaattactcaaggtactctgaaagtgacaaaaggagtgaacatcattcttgtttttgaaatcctcaatcagctaagattcttcggacctgcttgtacttcccatcactcactactcccttggctgaagatcttaaaaactaagaatgattaggataagtgagacattcacttgtcttattctgcctaaaatatttttttagaaggaaaaaaaacattttcccaagatgtacgtaactgtgctgctgactctgctcggaagttcttaccttcctccaaatagctggtgcgcagtcagtgttagttgaattaaatatgggcaatataaaacacatttttattacaccgccaatttgctgagtgacttggagaaaagctgtaatgtctgttctttgccatttttgaaaccaaatgtgtattctacggctggtaaagcggatattaaatgtgcattgctgcacgggttattaagctggtgtctctcagccccatgctcactttccatactctgctttgggtgctggggctgaaactctccaagccgtaatttctcctctccaaccatctcctctcccaggtaggttctgcctgccggtagaaggtactagagggagccaggaggcaggaggagggaggagtgacttgctcctcatcacacctacttctaagaggtctagtcccagggaacaggggcacctcctcgaagctcctgcggccccagcccaaggagcagcctgcttcctcaggggtctcaggcccagcctcaaggggctcccctccaaacctgcagatgcagaatccccacctccctcctgtgttgccccagccagaggggcactggctgtttttcctgagctgcgctctctctctgatgcctcggggcttccttctggcctttcagccctccactcaaattctccctgctgaaaccaggtgtgagttttgttccctgactacacctagaactgatggcttatgggcctcagaaaccacctctgtgtaagtagatcctgacatgcttcaaagctggatgcttcctgcttccctggggctgttctctacccgctccccactccttttccctttcccgccttcttccctctcccctccacccttcctctcccacctctctcctcccttcctctccccctctctcctcccttcctctcccccctctctcctcccttcctctctccttctctcctccttcctctccccctctctcctcccttcctctcctcctctctcctcccctcctctcccccccctctccccccctcctcccttcctctcccccctctatccctctccctccctttcccttcccccctttctccccgccttctcccttcctctcccttcctttcccttccctcctttctccccctcctccctttctctccccctcttcccctgctcatgtgcacacttgcacatgcagacggtgctccgaacctcctggaaagctgctcctagctctgttaaccagggctagcaccatcatacggaactttcgccctcccccagacccttcttccaacacagtttcattgcacacttcaagacgtcaggcccacatcaagatgaaggtcacacggaaagcgaaggcctcacactcagcgtcagcccagactccagggcaccagccagctcccaggagtcaggggcgccctgtggtagctctgccgctgtcgctgtcgtttcttaaagcgcttaaagcgcgctcacctgcggcctccgggatcacaggtgtgctgaatatttcaaggatcacggaacaaacagttttatttgataatagagcacctcggaacagtcctggggtggcctttctgtcagcttctgtttttccttcctacatcatcagcagtgccctaaattaaaccaatttcattaaaagtcctatgccacatgcataaaattacatacatacactgttatatatataaacatacacctatatgcatacgtatcatgtttttaatttaaaacaccttctgaaatccttgttctccccacacttctgttcctcgcctgagaacacaggtccaaatggaatagattttcatttgtttgtgcccaggtccaaataaatgcctttctattctacacaacaagagatgggcacctctacttttttaactgcataatagaagatttggattgtaaaaaaaaaaaaaaaagaaagaaagaaagaaaaaagaaaatatgtatacgaaatgaggaaatgtgagaacttcacattctaaataaaataagtagaaaaaacccacaactattttttcggtcaattttattcccttatttctctttctagataagacgcactgagttcccctaggcagcaaaaccattgcctgcatgatttggccttgagtcaatctgaatcagctcaaagccagccacaacctccaaacccatccctgtcggaggctgttgtggatgatttgcaggtgttttattggtgttcatgctgtttaatcctcagagtaacactgtctcagcatgcttcaggcggccttctgcagcttttaccatgagactgtgcataacaaaaaagccacaggttgtttttgcctctctgccaccctcctggaggtctgtagggagtagagaagagctagtgtgctaatacccttttctctatgcacgtgtatcatggttggccccatttatggcctcctataatgggaaaagcactgtgctgggtgcctcacgtgcattaatctctaatgatcccgtgaaccttcagaataagtattagtgctgtcctcacacttataaggaaattaatggttaaaacataaaataactcatcaagggccctgaatttatagctggcctagacagtgttcaggcagatatattggcctccctgccccaagcctaatcctggctgttttatcaaataatctcagaacttcaccctggactatgcaaagtgctaacaacccaggcaacaatggagtggctgacaaatttaactaactgttttgttaccacctttagaaagagaccattacctatagggttgccaaaattacagggttcttgccacccatacatactatctgcaattaattagatattacagtgcagaaatatgtttataggcctgagattttaaaaatatagtactcctggactccttttagagttattaaaagtattctggctgggcgtggtgactcacacctataatcccagcacttgggaggccgaggcaggtagatcacctgaggtcaggagttcaagaccagcctgaccaatgggccaaacccccactctactaaaaatataaaaactagacaggcatggtggtgcatgccttagtcccagctacttgggagcctgaggcaggagaatcgcttcaacctgggaggtggaggtgcagtgagctaaaatcatgccactgcactccagcctgggtgacagggcgaaactctgttcaaaaaaaaaaaaggattctgagagcaaatatagctgcatggtcagataaaagcatgtcctaactcaaccatccacatatagatttaagtgactcagttatgaacccaagaaccagtccatctaaaggagacacacaccgatgtaaagaatcataaccagcagttaaattccatttacacctgaaacacaagcccagtcctaccgaatgaaactacagaactaggatcacagaatggaggaagaatccacggaggtcattcacttttctcactgcagtgcccttaacctttttaaaactacttccatcagcttatcagccaacttgaattgtcataaaactgtttgatactccaaacttacggcaatttcttcattttaacacgtttaggcttatccattttatttttattttcttaagtggaaaggcaggaatcctccttattaaatttgttcttattctaacattggggtcttcactttccagagttcctgttttccatacttatcagggagaagaattttgtttaaaaatggtaagttcaggatacagaatgggacatggaaaattttacttaatcaacctacaccactccttgatacaatcgtgtccaatgcatactagttctttgtcgacaaacttattaaactttgaaaaatctccttatgtaaagggaggttataagtttgtaacaaactgaaaatcaattgttttctgacacctgttgacattcatgatgagaattaggtgctttcctctcccagcttattcagatatggacaggggagacggatccatcaaatacatcctctcgggagaaggtgctgcatcgtgtttaccatcgacgacaccactggagacatccacgccattcagaggctcgacgagaggaaagagcccagtatactctaagggctcaagccctagacaggcggacgggcaggcaatggagcccgagtcagagttcatcatcaaaattcaagacatcaatgacaatgagcccagttcctggacggaccttatgtggccactgtgccagaaatgtcccctgtgggtaaggtgtgactcgctgattttcacaaatagcacctcctatatatatacacacacacacacatatgacatgcacacacacatgtagatacacatatattcagaacaggagagcatgagaggagaactcaccaattataaagcaaccaaaaatgacgaccaagccctttggctggcaggaagctaatagacattggaatcaaccagagcaagtaataataataagcctattaatgttttttagtctgattctttaaaaacaaaatattagctagacagatttgtttcataagggagaaatatttgttattatcaaaagagcaatagggttaggcgcggtggctcacgcctgtaatcctagaatttgggaggctgaggcaggtggatcacaaggtcaggagatcctggccaacatggtgaaacccgtctctactaaataccctgtctctactaaaacaccaaaaaaattagcctggtgtggggtgcgcacctatagtcccagctactcaggaggctgaggcaggggaatcacttgaacccggaggtggagatttcagtgagctgagatcacgccactgcactccagcctggcgacagaggagactccatcttaaaaaaaaaaaaaaaaaaaaaaaaaaaagcaatgaagagcccaaagctgtgtccttatcagtcattcagaatttaaagcacaaataactcttatccctactaaacggtacaagataagagttatggaagcttgacctagaaaggggactctcccaatgaagcaacacatttgcaaatgctttaagatggaccgctcaggattgcatccagcctttagctattaacttgaacaggtttctacctcttctcttccccaggtacctccgtcatccaagtgacagcacagatgcagatgacccgacctacggcaacagtgccagggtggtgtacagcattcttcaggccagccatatttttctgtggactctaaaacaggtatctgatacaagggtcgagtcagggtgtttattccctgataatttataactgctgctatgacagacccaactctcctttttaggactctccagggagtgtattaaccagagaagactgctcttagctttaggattaagagacaaactagcactgccctgacaggtaagagcagcactatgcatagacagtgagcagtgtcgattggagaggcaaaaagcccctctgcgcaaacacacacaaaataactccccaatagcctcaaaaaatcctatggttatatttattcccagggactaaggtcttttataaccccatgagacccaacaggattgacacattcacctgggtcattagagaactagaagcattgattgtgaactggaaagagccttgggggaatcatccagtccatcaccatttgcttatcagataaagaattgggaaattgagagctactaaagttcatctagtgtagagaggtctcttgacatgtgtctgatgttctttctattgaaccaaccactgtgcactcagcagagaagtccaaaatgaaggttgctggggcagacaggttttgatgagggaggaaagaccaggtgggatgtggcccccaaaggcaggtcctgattgggaagctctcacagggaggacatcagagagaactgaatggggaggagcaatgcggcagaaaagacaaacaggagtttggtgttttgtttgcttatttattctgtcttacccgagagctttgactacagaatttacctttggatgtatgaaagatttcattaatatgtttgagcttggcaaagttattgtgatatcattattatcttatacttgtgccagcttcccctcttattaatactttcataaacattgccatatttgagcttcccaataatctgtaaactagcaaaagatataggaagtattattacttccattttatatgagggtaaacatggacctaggagtaattaacaaggaacttgagtaaagaaacttacagccacagaataaagtaatggtgaacactcaaagtcacctctttatttgaaaaagaaaaaatacatttctattatagcaacctgatcgaatttttttcccagaagtcctgagggaaaccagacattcagaaaatgtatcataaaagtagtaagggagtgtaaattaggaggaggaaagaaaaaagattgcagtagagacttctataaaacagtaactttaacaattctactaagggcaagggggagaatgagagaggaagggtgcccacagggaggaaaaatgcagggaggaagagggtaatgtgtccttatatcctaagaagagtcttagattattttgacagctcccggggggcatctgtagtgttaggtcaaaaatacatgaacagagagttatagctgtgcccatggggggccttttaaaaaagaaatgctgcatatatcactggagaatgttatactacaatgcaatatatacattatagggtaaactggggacggattattgttcccagtcccttccattttcatgcaaaaggtctatctgccaagagtcatgttgtaaagctgtagtaagtaagcctttaatctttgcctacagtgtaagaagtcaacttttttaagttgcagggttaaaagggagacaaaacattactgtacaggctggcaggatcacaacacatttcaacggatttggtgtaggcctctcttcttaaatgaaacgtatctgctgcttgctctctggggaaattcatatcttatgcatggtaaaaataaacagccacagagcatctttcatgtcctagctcacaaaattaaaagcacagaggtaaacagaagatgtcacaaaacagaatgaatatgtaacaacaggaaaatccaattagaattccaaccctgttacaggtagtagggaagcaagaaaaagcaggaatgagttacctaaagaagagccattccactacaagggctctaggggctgaagaaactgagggagaattatctaaattcacagattgtagacttatgaggctttgttttctggacccaaagcccccagttttccttggtgagacacactgtctgaaatcgccttggaccacaatttcccagatctgtaagagaaacattgctgcacctcctgttcactttcagtaatgttgccagaagaaaccagccctctgagctcttcctgtggaataaaagttttcattcaccactggtttcagtacagcccatttttgaagctgagattttttacctcaaatttaaaagcacaggtgacttgcacctcacttctaggcattaatggtcaccagggagacacctagaaaccaatctttaaaaactggacctgtggttttatttttataacaaagtcatttctatcctccaggtgtaattaggacagcgctcatgaacatggacagaaagccaaagaatactacgaagtgattatccaagccaaggacatgggagggcagcttggagattagctgggaccacaacagtgaacatcaccctctcagatgtcaatgataacccacccgctttccccagagtgagtacctaacccaagagagcacagacctcgggcccagagggacgacccgttgcagaggtgcgggagaaagcccagtttgagtttcctcattaaattcaattatcatagattcctttcttacattcatcatgcaattctcgcataactatttgccttcagtgtccagcttcccatagtactaaaccaggatttctcaaacatatttttccattttctcctcctgtggaatctttttagactttctttcctgattgccacgcccacccaccccacataaaatcaatactaaggaataagttttgttgggtagaactggcctttagtgggccacaaactagtatgctgagacttttttcatcacagccctggaaacctatttttgcccccagggggccatatgatccattgagaatgcattcactgatacccaaagctgtagatggacacacctgcccattgacgatcttcaccaatcactccagtaggtaccaagcacttgcttggtgagacccctggcatgaagggcacaggaggcttggaatcctgtctctgcccttgtgaagcttcaaatccactgggaggacacatcctacacacaagaaaaattaaaccgtagtagcatttgctgccacttaacagtgcaagatgatgccttcacacaaactgagatgaatgaagcctccacagaaggatagatttcaacagggggctaaagaatataacaggtttacataggcagaaaagaaaacattcagaaggggaagtcattcatttacttattcattcaaaaaatatttattccaggcactatctatgaatggaacacaaagctgtatacagacaaaacaacatctctaccatcctggagctatttgagtaaaaacctgaatggaagaaaaaaaaactgctgcctggaaataagttttcacgtcactttacgttcaaagactcctaaaattaaaacctgctctttcaaatgtgctgtatcccagtggaagccatagaaacgtttttgagcaagagggagacataaagaaaggctaatttgtagccatgtagaggaggggttggcaagggcagagactaggagcaggggagtcggttagaggcatttagagtggtccagacttgaactgctaaggacttaaggaaatagcaggatgagggaatgggacaaatgaggaaacatggacttctgcctcttgatttcctggctaagggaacatggcagagggtggagtcaaagatgacaatgacgttttcactctggatgacagggagaagattgtactactaataaaaatagaggacgcataatggaacgagtggcagtgaaggaggggacaaattcagatttgaatatgaagtgacagcaggacaatcaggttgaatgtccttaagaaagtggaaatatagagctatgaacgtggaacagagcccaggaatgaagacataagtttagaagcagatgcctgaaggaagcagcgggagaaatgagagcaggaagtgcaattccagggaaacacttagctagggaaacggggcttaaaaaagaaaaactaaactaaaaggaggaaggtctagccagactagccagactgtcagatgaatagttgcattttgaatcagccagaccagctaaccttcccttgtatctatgtaaacacaggagatctcaaatatttacatgcaaatgaatacacaaagtccccatgagcattcatgatggaaaaagcaggatactagataagcattcacaaagggtgcaagtaactaagttcctaagttgcttggtccaacagtgcagaattcgtttctgcatcacagaacagtttgtgaaatgccacatggatggactttgtgttgctttggtattctgtgggttccatcttcattacttcatgaagggctcatattactcacactatagacataaattcttgaacacccttgaactacttggctttttacatttgacactagacaggtgttctgatggaggcagaagggacagtagaaccagctaattacatagctcaggttattacatgctcaaaggtagatggattcggacatattgccgggagtcatgttaccccaaacatggcacttcacaatagcagaacactatacaaggattactggggttttagtcttgcctccgaaacaatatctttttttttttttttttttgagacagggtcttgctctgtcacccaggctggacgcagtggtgcaatcacagctcactgtagcctcaacccccaggctcaagcaatcctcccactcagctcctgaatagccagaactacaggtgcacaccaccatgcccagctaatttttatttttttatagagatgggattttgtcatgttgcccaggctggtcttgaactcctgggctcaatcatctgccttcctcaggctcccaaggtgctgatattacaggcatgagccaccacaccagcctcaagccaacatcttaataccattctaaagcacacattttaagttgtcacttttcaaaatatagttttaatggagactccaggatagagtggaagcatggattatgtttcatgaagacaaaagagaaatataaaaaagtttaaatctctgtgtctctatgcattctacacacttatcgctgcttcctcttttttgaccttttaaaactttgcattctctcttcattaaatattccccatctatttgctaaaactaagtttagatgaccttgatattccataaacctatctggctatactcttatgcctaattaatctaatgagtcttcattgtaggaattccattttgctctttttcacaaatattactataactgattgtggaatgttgacaaaatgatacacctacattttacattgaataagctaagccacctttaatagaaccaaatataatgaaacatcaagtctcaagctatttatttataatataatgtatcatgtagaaattgtatgtagatgtttaacatataacatagctttattgggatgaggaaaactgtaggcagatgcttgtttttcccaaagttctgcaacagcaaagtgtaatccatcaacaactttggaagtaaatggaaagagatctgaaatccaattccctgccagcttagtacaaactttaaagatttcctggctcatgtttgaaagaacaagcatcatttcttctcctgcgcaaggcagggtgctgtgagctggctgggtgtgtcaacctccctgattctttgtgaaacttgagccctcacacctgaggctatagcttacaagcatattagaataaaagggaacacgtacatattgaaaatgtgattgtgtgatttttcttgttatttagtcagtcacattatgattgacaaaataacaaaaaacgtcaaaaagttgaccccagaaaaagtaagttggtaaaaatacgaattcatggagatgaaagtgaactaaattaattgtgagctcaggatatcatgtccaaaaggagatgaccaactctgagcttcttacattgtgagaacctttttagtattttattctggaataagaaaacaagaagcatgaagggtcttccatggagaggcaggctggggcagtctggggtgtaaggacacactgaggggcagcacaggagctgatggagcttgctctccacggctgccccccctttatagatcactgatctccatacctctgatcaggtgttgctagagacaggcactcagcacacaggccaggccatgaaaaaaagatggacatttgaagcgtaaacagaataaatacgcactttgtgaccacaatgtttatactctcagaaggaactgcaatttaaggaaatacttcagttcactaggaagcactaaaagtttgaatccaaggtacttcctaccactcaagctacagtcactaggactaagtcgttttgtttcaccctgttctactgaagcctttttgactcctccttattgaacatccaatacaggcatggcctgtatgaccgtttgctcagcctttctggaccttagtttttatctgtaaaaactaagttttactttttgaacccagaaaaaaagatattttgcacagcactcctgatatgatatgatgaggcattttttatagtgacggattatcaagaatgcgtgtcctggcttttcttcgagaacattaccagatgagtgtgttggaatcagctccaattagctccactgtcgggagaggtttgccaaggacttggatgaaggcatcaatgcagagatgaaatatactattgtggatgagatggtgcagatgcctttgacattagcacagatcccaatttccaagttggtatcataatgtgaagaaggtaatccaactcctttttctaaaacactttcatgggtgctttgaatgttatgaaatgctagtaaggactgttgtattattgatatgcattgcttcaaatcatctgataaagtgctttcctattatttaaaaaaaaaaacacacagaaaacctcttaacccttatgttacatgaaaacactggctgtgccatcattttactgaaaaggtaccaggtcatgataaaaaatattataaatatatttctaaatacattccttctacccagccacttaaaaacctgttgtgcttaactttctaatgatgttaatgacttgatcaacatttgcacttgaataacatatgcttgtagcataccatacctaacaataaagtaagccataatattatttatgaatcaataaaaacatgcaagggttttttaattgcttctcaaagatctgtaaattctaattaaacttgaaaagctttatcaaacatagctgctgaatggctgttatcacttgaaattcctttgttttataggtaccaagataagctatcaattctttctgtgacataaagcacatatggatatactgactagaagataaaactttttaaaaattgaatctttaactccatagtaaatatatatctaagaaatacattaattttaaatgatattctcaacaaatttattgagtgccacctatgtgccgatattgttacaggcatttaatacagagtaaataaaacaaccaaaaacctctgccctcaggagtttacattctagcaagggaagaagacaatcaaaacatcaagtcactaaagtagttattagaaggtaataactgatatgggagggggagccaggaagcagaacagaacacaataatgaggccaggaaagctaagatgatttcaaacttaaattggatggttggctaaatgcccacaatcaaagagtggataaaaaaaactgtggtaaatatatataatggaatactacacagcataaaaaggaatggactaacagcattttcagtgacctggatgagattggagactattatattattattattatttttcgtgttcgagacagagtctcactttgtcacccaggctggagacagtggcgcaatctcggctcactgcaacctccgcctcccaggttcaagcaattctcctcttcagcctcccgagtagctgggactacaggggcacactgccatgcatggctaacttttgtattttagtagagacagggtttcactgtgttacccaggctggttgtgaactcctgagccaggcaatctgcccccctcagcctcccaaagtgctgggattacaggcgtgagccactgccccagctgattggagactattattctaagtgatgtaactccagaatggaaaaccaaacaattctgttttcattgatatgtaggagctaagctttgagggcgcaaaggcataagaatgaacagtggactttggggacttggaggaaagagtggtagaggggcaagggataaaagactaaaatatggtgcagtatatactgctcaggtgatgggtgcaccaaaatctcacaaatcagcctaaagaacttactcatgtaaccaaatactccctgtaccccaataacttatagaaaaacaaattaaataaataaattgggtgattgggactggtgtcacagagaagtggcgtttatgcaagacttacagtgagcagactcataccactgagttaagcaggttgacagtgtgggaggtccctacaaatgactctttgtgaaaagcatacgtggcagtcctagagagaagaaatgggctgaactattgaggaaagcgttccaagcaaaaggacagccagtgcaaaggctttgaggtggaccatgcctgttgtatttcaagaacagcaacagtggggtcataaggctgagtggagggggaactcttaggagatgaggtctgaaaagtaacaaaggagccagatcatttaggaccattaagctaactataaggactttggtttttactctgagtaaagtgggaaatgactgaaggattttaacagatgtatgacatgactcggttttcattataaatactcagtaggctgtgttgggtcaggggagtttaaggagagaaggacagaaagagggagaccagctgagaagctattgagtaatccaggtaagagatgatgagggtttcacctaagtagtgggaatggaggtgataaaagtggtcagaatctgtacatattttgaaagcagagccaacaggatttcctaaaaacgtgatgaggatatggaagaaagagaagagtcaaccaagcaacaagaatggaattgccattactgagacagggaagtctgcaagtagagcaggtggcaggggtgacaagtattggaattcattctggacatacatgtgacatttctagagtctattagacatcaagtagagacgtgtcatgctttggttataagagcgaggagtttgtagaagggtcctgcactggaaatatgaatctggaatcataagcatatagatggtacttaaagcaaataaaacaaatgagattccaagggacgagcatagacagaaaaaggacagtgaaacgagccctgaggcacaccaacatgaagaggtaggggaagtgtaaggacaggcaaggagactgaggggcgaccagggaggcaggaggataaggaggaagtgcagtgtcctgaaggcatgaagaacgtgctcccaagggatggagtgatcactgtgacaaatgctgctacaggtcaaataagaacatcaggaattcaccacagactttagaacatggaagccactgacaaccttgacaaaaaccacagttataacattaaaatgtaactaagttaatgggtgtttataacttttttctatgctatttgatagaactgaattaacactgttcagaagggaataagggaccagttcatatgtttgttctgtatttatttaagatgcaataatcacagcaaaggaacagaatcacagcaaaggatccagaattccaccaaccagaaatcttctatcctgtaaacaatgaccttgacacaatgcaaaaggctgagattgacttctaaatatcaaataaatctagatgtaattaaaatactataatttcttattctcattctttgagaataataacacatgctagaattataataggtgattaaaataacaatactattttggtatattcataggttcccctactatgtggcatgcctcaagtaaacaataatacattgctaaccatactagtaactgtaaataagggaaatgctcaaatttttgaattattgggttttttctttcttctttctttcttttttttttttttgtttatttgtttgaacagagtctcactctgtcaccaagctggggtgtggtggcacaatcatggctcactgcagccttgacctcttgggctcaacaatccttccacctcaccatcctaactagctgggactataggcatgtgccatcacagcccctaatttttgtgttgttgtttgtttgagacagggtctctctctgtcacccaagctggatgcaatggcatgctcatggctcactgcagcctgtagtcccagctactcaggaggatgagtggaaggattgcttgagcccaagaggtcaaggctgcagtgagccatgatcatgccacagcacctatttttgttgttgttgttttgttttgtttttgtagagacaaggtcaccctatgtttccaggctggtctcaaactcctgagctcaagtggtactcctgcctcagcctcccaaaggctaggattacaggcatgagccaccgcaaccagctttactgtttctttagtacgaaaacctattcaaacaattaagcaaccagaaaaagaacttttgggattctcaatatttaaatgtatcttatgtcttaaaataatgtctgagataattctaaataataaaatattaatttatgtagattatcacaatatagtttagactgtattacaagccatttgttttaaaaagtctattactgtaacaactctgtctctgaaagaaatctcaaaatgtgttttcttcagctcccttaccgcagaaaagatgaagcctcttaagacagagtactgtttttcactgtcattactaaaacgtatccatgtttaatcaaaatacatatcaattttgccaaggtcactttgatttctcttctaacttatgagctgccagaaaatggaattaagaaaaaggtcaataagttgggtagatggaaaatcacatataataaatattttagaggccactgacagctcagtctacgcctttgcaacacattcactcagatgtctgctccacgcccatcttcccactttgtcattaataatgtcattaaaattgaaacaaaagttctgcttttgatttatttcccttaggcctattatttgtctagaagcccatactttttcaaaaagaggaattgatagaattgggtcttcaggaccccacacgattactacccagtaccttgggtctttttagcttttaagtaatcaatcagtcgattttcgtctcttaaatgcttgaagtataacttgaaatatataattttcaggatgttctttattcgaataagcatgatgtaccattttctagtcttctgcatatcttccatcttacgacaagaaaagcaattgtttagagtccattctcttcttaggcaggtcataaagaataaaaattctattttcatcaaatctgagatgtcatgaattataaatctcatcattgtcttatgggtcatttagaacagttcttgccaatttaaataatacaatactttcttatttcttagtttagtgtcttaaagtactctcgtaggcacagttagacaaatttgtttcaccaatgttagattcactcctgccgctgtttccatgccattctccctacacaataaatcttgtttcaatgccaaatcatatataatatatttaaagacattttaatgtgtcccagagattctggtatgttgtgtctttttctcgttggtttcaaagaacatctttatttctgccttcatttcgttatgtacccagtatcattcaggagcaggttgttcagtttccatgtagttgagcggttttgagtgagattcttatcctgagttctagtttgattgcactgtggtctgagagacagtttgttataatttctgtcttttacatttgctgaggagagctttacggccaactatgtggtcaattttggaataggttggtgtggtgctgaaaaaaatgtatattctgttgatttggggtggagagttctgtagattctattaggtccgcttggtgcagagttgagttcaattcctgggtatccttgatgacttttgtctcgttgatctgtctaatgttgacagtggggtgttaaagtctcccattattaatgttgggagtctaagtctctttgtaggtcactcaggacttgctttatgaatcttggtgctccgtattgggtgcatatatatttaggatagttagctcttcttgttgaattgatccctttacattatgtaatggccttgtctcttttgatctttgttggtttaaagtctgttttatcagagctaggattgcaacccctgcctttttttgttttccatttgcttggtagatcttcctccatcttttattttgagcctatgtgtgtctctgcatgtgagatgggtttcctgaatacagcacctgatgggtcttgactctttatccaatttgccagtctgtgtcttttaattggagcatttgtccatttacatttaaagttaatattgttatgtgtgaatttgatcctgtcattacgatgtagctggttattttgctcgttagttgatgcagtttcttcctagtctccatggtctttacttttggcatgattttgcagcggctggtactggttgttcctctccacatttagcgcttactcaggagctcttttagggcaggcctggtggtgaccaaacctctcagcatttgcttgtcttaaaggattttattcctccttcacttatgaagcttagtttggctggatatgaaattctggttgaaaatttttttctttaagaatgttgaatattggcccccactctcttctggcttgtgggtttctgccgagagatccgctattagtctgatgggcttccctttgagggtaacccgactttctctctggctgcccttaacattttttccttcatttcaactttggtgaatctgacattatgtgtcttggagttgctcttctcaaggagtatctttgtggcgttctctgtatttccgaatctgaacattggcctgccttgctagattggggaagttctcctggacgatatcctgcgcgtgttttccaacttggttccattctccccatcactttcaggtacaccaatcagacgtgatttggtcttttcacatagtcccatatttcttggaggctttgctcatttctttttattttttttctctaaacttcccttctcgcttcatttcattcatttcatcttccattgctgatccctttcttccagttgatcgcatcagctcctgaggcttctgcattcttcacgtagttcagagccttggttttcagcttcatcagctcctttaagcacttctctgtattggttattctattatacattcttctaaatttttttcaaagttttctacttctttgcctttggtttgaatgcctcccttagctcagagtaatttgatcctctgaagccttcttctctcagctcgtcaaagcattctccatccagctttgttccgttgctggtgaggaactgcgttcctttggaggaggaaggcgctctgctttttagagtttccagtttttctgttctgttttttccccatctttgtgttttatctacttttggtctttgatgatggtgatgtacagatgggtttttggtgtggatgcctttctgtttgttagttttccttctaacagacaggaccctcagctgcaggtctgttggataccctgccgtgtgaggtgtcagtgtgcctctgctggggggtgcctcccagttaggctcttgggggtcaggggtcagggacccacttgaggaggcagtctgcccattctcagatctcagctgcgtgctgggagaaccactgctctcttcaaagctgtcagacagggacatttaagttgcagaggttactgctgtctttttgtttgtctgtgccctgcccccagaggtggagcctaagaggcaggcaggcctccttgagctgtggtgggctccacccagttcgagcttcctggctctttgtttacctaatcaagcctgggcaatggcgggcgcccctcccccagactcgctgccccttgcagtttgatctcagactgttgtgctagcaatcagcgagactccgtgggcctaggccctcggagccaggtgcgggatataatctcgtggtgcgccattttttaagcccgtcggaaagcgcaatattcgggtaggagtgacccgattttccaggtgctgtccgtcacccctttcttgactcggaaagggaactccctgaccccttgtgcttcccaagtgaggcaatgcctcgcctgcttcggctcgcgcactgtgcgcgcacccactgacctgcgcccactgtctggcactcctagcgagatgaacccggtacctcagatggaaatgcagaaatcacccgtcttctgcgttctcacgctgggagctgtagaccggagctgttcctattcggccatcttggctcctccccacaaatgtccaacaatgatagactggattaagaaaatgtggcacatatacaccatggaatctatgcagccataaaaaatgatgagttcatgtcctttgtagggacatggatgaaattggaatcatcattctcagtaaactatcgcaagaacaaaaaaccaaacaccgcatattctcaccataggtagaattgaacaatgagatcacatggacacaggaaggggaatatcacactctgggactgttgtggggtcgggggaggggggagggatagcattgggagatatacctaatgctgatgatgagttagtgggtgcagcgcaccagcatggcacatgtatacatatgtaactaactgcacaatgtgcacatgtaccctaaaacttaaagtataataataattttaaaaaaaaagcatttgagaaggcaataaagctcaacatgtgcagtaccaacaatgtgtagaactcccctaagtacaacatggacagctttgactaggtctggcttgcatgggcagtaacaactactgctagaaagatccctttgcctccctttgacactagggcacttataaggtgttatcaattgggaagcaacgctatttctaaaatatcaaaatatgaaaaactgtgcatcttacattactgaatacattaataaaatctgcatatactatcactcaaccagtaaatgttaatactcacattggaaactttttgcactgttcaatgtaacaatttttttaggtttttgctacgctttgagttctggttttgctaggcagtggggaataaaaatctgactaagtcatagcttttgcccttggtatggggagtgggatcaacacagaaagaaatatttgtaatacaaaagaaaagctataaggaagtataatagtgtgctgtgagaacaaagaagggaatacttaatcctccttaattagaattgaagtttcattactattttgtgccataattttcatgactcaatttttaaggatatatggctttttgtttttgtatcctctaacttgaagaagtttcttgaatttggaaattggatctcagatattattacttttttattttctattatgaatacagaaataaataattatttgtatttaaaataaaaaggacacaaactattcaagaggaaaaagccaaaactcattatcaatgtgggcaatttaaatgttaagagctgagcagagtggttgcagcttcttaggatggagggggaggatctcttaagcctaggagtttgagaccagcctgggcaacataagcaagagttttgtcagtacataaataattaaataaataataaagtttagacaattgagggcaatgtttttttccattttaaatgtggaagtgagggagacaataatcttagatagttttaaagtcttagtaacttacttaaaaagaatttcagtaataattaaaaactcacgctagtgctttcaacaatgctggaacaattggataccatttgcaaaaaaaataaagaaataaacctcaattataccccacaaaaaaactcaaaatgaatcatgcacctaaatgtaaaaacctaaagctataaaattctaaaaggaaacttaggagaaaatctttgcaatcctgattggacaaagatgtattcctattacatcagaatcccaacctaccaaagaaaaagtaagacttcatcaaagttaagagttctgctcttcaaaggacactgttgtggcaagatggctgaataggaaaagctccagtctgagctcccagtgagatcaatgcagaaggcaggtgatttctgcatttccatctgaggtaccggctcatctcaatgggagtggttagatagtgggtgcagcccagggagggcaagctgaagagggtggggcgttgcctcacctgggaagtgcaaggggtcagggaactccctctcctagcaggggaagccatgggggattgtgctgtaaggaacagtgcattctggcccagatattacgttttcccatggtctttgcaaccagcagaccaggagactcccttgggtgcctacgcctccgggacctgggtttcaagcataaaactgggcagctgtttgagcagacaccgaactagctgagtttttgttgttgttgttgttgttgttttgttttgttttgttttgttttacccccagtgcacctggaatgccagtgagacagaaccattcactcccctggaaaaggggctgaatccaggagccaagtggtctagctcagtggatcccacccccatggagcccagcaagctaagatcactggcttgaaattcctgctgccagccctgcagtctgtagtcgacctgggacactggagttggtggagggaggggggtccaccattactgaagactgagtaggcagttttcccctaacgtgtaaacaaagccaccatgaagttcaaactgggcagagcccaccgcagctctgcaaagcacggtacctagactgcctctctagattcctcctctctgtgcagggcatctctgaaagaaggcagcagccccagtcaggggcttatagataaaactcccatctccctgggaaaaaacactgggggaaggggtggctgtgggcacagcttcagcagacttaaatgctcctgcctgccactctgaagacagcagtgaatctctcagcacagcactcaagctctaagggacagactgcccctcaattgggtccttgacccccgtgcctcctgactgggagacacctctgagcaggggtaacagacacctcatagaggagagctccagctggcatccagcaggtgcccctctgtgaagagcttcaagaggaaggatcaggcagcaatctttgctgttctgcagcctccgctggtgatcccaggcaaacagggtctggagcggacctccagcaaactccagcagacctgcagcagaggacctaactgttagaatgaaaactaacaaacagaaaggaataacattaatatcaacaaaacaacatccacacagaaaccccatccaaagttcaccaacatcaaagaccaaaggtagataatccatgaagatgaggaaaaaacagcacaaaaaggctgaaaattccaaaaaccagaatcctcttcttctccaaaggatcacaactcctcaccagcaatggaacaaaactggatgcagatgagtttgacaaactgacagaagtgggcttcagaaagtgggtaataacaaacttttccagctaatggggcatgttctaacacaatgcaaggaagctaagaaccttgaaaaaacattaaggaattgctaactagaataaccagtttagacaagaacataaataacctgataaagctgaaaacacagcatgagaacttcgttaagcatacacaagtatcaacagtcaaattgatcaatggaagaaaggatatcagaaattgaagatcaacttaatgaaaaaagcataaagacaagatagagaaaaaaagaatgaaaacatatgaacaaagcctccaagaaatatgggactacatgaaagaccaaacctacatttgtttgttgtacctgaaagtgacggggagaatggaaccaagtggaaaacacttttcagggtattatccaggagaacttccccaacctagcaagataggccacattcaaattcaggaaatacagagaacaccacaaagatactcctccagaagagcaacccaagacacataatcgtcagattcaccaaggttgaaatgaaggaaaaaatgttaagggcaccagagagaaagatgaggtacccacaaagggaagcccatcagactaacagtggatctcttgcagaaaccctgcaagccagaagaaagtgggagccaacattcaacattcttaaagaaagaattttcaacccagaatttcatatccagccaaactaagcttcacaagtgaaggagaaaaaaatcctttacagacaagcaaatgctgagacattttgtcaccaccaggcctgccttaaagaactcctcaaggaagcactaaatatagaaaggaaaaactggtaccagccactgcaaaacataccaaattgtaaagaccattgacactatgaagaaactgcaacaactaacgggcaaataaccagctggcatcataatgacaggatcaaattcacacataacaatataaaccttaatgtaaacaggctaaatgccccaattaaaagacacagattggcaaattggataaagagtcagatccatcagtgtgctgtattcaggagacacatctaacatgcaaagacaaacacaggccaaaataaagggatggaggaatatttaccaagcaaatggaaagcaaaaaaaaaaaaaaagtaggggttgcaatcctagtctctgataaaacagactttaaaccaacaaagatcaaaaagacaaaaaggccaggcgtggtggctcactcctgtaatcccagcactttgggaggccaagtgggtggatcacgaggtcaggagatcaagaccatcctggctaacacgatgaaaccccattctactaaaaatacaaaaaattagccaggcgtggtggtgggcacctgtactcccagctatcgggaggctgaggcaggagaatggcgtgaacctgggaggcggagcttgcagtgagcctgatcgtgccactgcactccagcctgagtggcagagcgagactccgtctcaaaaaaaaaaaaaaaaaaaagacaaagaagggcattacagaatggtaaaggtatcaatgcaacaagaatgctaactatcctaaatatatatgcacccaatacaagagcacccagattcataaagcaagtcttagagacctacaaagagacttagactcccacacaataatagtgggagactttaacacctactgtcaatattagtcagatcaatgagatagaaaattaacaaggatattcaggactgaactcagctctggaccaagcagacctaatagacatctacagaactctccaccccaaataacagaatatacattcttctcagcacgacatcaccagtctaaaattgaccacataattgaagtaaaacactcctcagcaaatgcaaaataatggaaatcataacaaacagtatctcagccacaatgcaatcaaattagaactcaggatttaaaaactcactcaaaacacacacaactcatggaaactaaataacctgctcctgaatgactactgggtaaataactaaattaaggcaaaataaggttctttgaaaccagaacaacataccagaatctctgggacaccgctaaagcatgtttacagggaaatttataacactaaatgcccacaggagaaagtgggaaagatctaaatcaacaccctaatatcacaattaaaagaactagagaagcaagagcaaataaattcaaaactagcagaagacaagaagtaactaagatcagagcagaactgaaggagatagagacacaaaaaaccttcaaaaaaatcattgaatccaggagctggttttttgaaaagattaacaaaatgatagattgctagccacactaataaaaaagaaaagagagaagaatcaaatagacacaataaaaatgataaaggggatatcaccactgatcccacagaaatacaaactaccatcagggatactataaacacttctatgcaaataaactagaaaatctagaagaaatggatacattcctgacacatacaccctcccaagactaaaccagtaagaagtcgaatccctgaatagaccaatacaagttctgaaattgaggcaataattgaggcctaccaaccaaaaaagcccaggatgatcagattcacagccgaattctaccagaggtacaatgaggagctggtagcattccttctgaactattccaaacagtacaaaaagaggaactccaccctaactcattttatgaggccaggacatcctgataccaaaacctggcagagacacaacaaaaaaagaaaatttcaggccaatatcctgatgaacatcgatgtgaaaatcctcaataacatactggcaaactgaatccagcagccatcaaaaagattatccaccacgatcaagttggcttcatctctgggatgcaaggctggtcaacatatgcaaatcaataaatgtaatccatcacataaacagaaccaatgacaaaaacccatgattatctcaatagtgcagaaaagcccttcaataaaattcaataccccttcatgctaaaactctaaataaactaggtattgatggaatgtatctctaataaaagctatttatgacaacccacagccaatattatactgattgggcaaaagctggaagcattccctttgaaaactgcccacgacaaggatgcccttactcaccactcctattcaacacagtattggaagttttgccagggcaattgggcaagataaagaaataaagggtatttgaattggaaaagaggaagtcaattgtctttgtttgcagatgacatgattgtatatttagaaaaccccatcatctcagccaaaatctccttaagctgataagcaactatagcaaagtctcaggatacaaaatcaatgtgaaaaatcacaagaattcctatacaccaataatagatagagagccaaatcatgagtgaacctcattcacaattgccacaaagagaataaaatatctaggaatcaaacttacaagtgatggaaggacctcttcaaggagaactgcaaaccactgctcaaggaaataagagaggacacaacaaatgaaaaaacattccatgctcatggataggaacacgcaatatcgtgaaaatggccaactgcccaaagtaatttatagattcaatgctatcctcattaagctaccactgacttcttacagaattagaaaaaacttctttgaatttcatatggatccaaaaaagagtctgtatagcaagacaatcctaagcaaaaataacaaagctggaggcatcacagtacctgacttcaaacttagtacaagactacagtaaccaaaaaagcatggtactggtaccaaaacagatatatagacaatggaacagaacagaagcctcagaagtaatgccacacacctacaaccatctgatcttgacaaacctgacaaaaacaatcaatggggaaaggatttcctagttaataaatgatgttggaaaactggctagccatatgcagaaaactgaaactggaccccttccttatgccttatacaacattaactcaagatggattaaaaacttaaacataagacctaaaaccataaaaaccctgaagaaaacttaggcaataccattcaggacataggcatgggcaaaggctttgactaaaaaccaaaagcaatggcaacaaaagccaaaatcgacaaatgggattgaattaaactaaagacttctgcacagcaaaagaaactatcatcaaattcaacaggcaacctacataatgggagaaatttttgcaatctatccatctgacaaaggtctaatatccagaatctacaaggaacttaacaaatttacaagaaaaaaaaaaaacaaacaaccacatcaaaaagcgggcaaaggatataacagacacttctcaaaagaagacatttatgcagccaacaaacatgaaaaatagctcatatcactggtcattagagaaatgcaaatcagaactatattaagataccatcttatgccagtagaatggtgatcattaaaaaagtcaggaaacaacagatgcaggagaggatgtggagaataggaatgcttttttacactgttggtgggagtgtaaattagttcaaccattgtggaagaaatgtggtgattcctcaaggatctagaaccagaaataccatatgacccagcaatcccatactgggtatatacccaaaggattataaaactttctactataaagacacatgcacacgtagtttattacagcactgttcacaatagcaaagacttggaaccaacccaaatgcccatcaagacagactggataaagaaaatgtggcacatatacaatatggaatactatgcagccataaaaaggaggagttcatgtccttttcagggacatggatgaaaccaccattctcagcaagctacacatggacagaaaactaaacactgcatgttctcactcataagtgggaagtgaacaatagaacacatggacacagggaggggaatatcacgcaccagggcctgtcaggggtcgggggtaggggagggatagcattaggagaaatacctaatgtagatgacgagttgataggtgcagaaaccaccatggcacaggtatacctatgtaacaaacctgcacgttctgcacatgtatccaggatttaaagtataataataataataataataaaggacactgttaagagaatgaaaagcaaatcacagactaggagaaaatatttgcaaatcatacatctgacaatggacttgaataaaaatatacaaagacctcctcaagaagacatagaaagatgcatcacgaggcagtaaggagtgccaatcagaactacaatgagataccacttaacgcacactaggatagataaaaatttaacactggcaaaaccaagggctgacaaagatgtggggtgactagagctttcatatactctggtgggaatacaaactggtactgcctttctgaaaattcatttggaagtttcttataaattaaaaatatatttactatacaatcccacaactccagtcctaggtatttaccccactgaatgaaattttatgctcacacaaaaacctctatgtaaatattaataggtttactcataacgtcagaaattggaaaaaaacacaaatgtatctctagtgaagaatggataaatcaactgtgtgcatccatacaacagaatactacgtggaaataaaaaaagaacaaactcaccaggcatgtagctcacgccagtaatcccagcactttgggaggccaaggccgaggtgggcctatcactgaggtcaagagttcaagaccagcctggcccacatggtgaaaccccgcctctactgaaatacaaaaattagccaggcgtggtggcacacacgtgtagtcccagctacttgggaggctgggcagaagagtcgcctgaacccgggaggcagacgttgcagtgagcccagattatgccgcgcactccagcctgggtaacagagtgagacgctgtctaaaaaaaaaaaactcctcattcagcaacatggatgaatctcaaatgcatcatgctaagtgaaagaaccctaactcaaaagatacatactgaatgtagtttatctgacattatatgacattcttgcaatagagacagaacatcatgaatcagtgtttgccaggggctgggtgggaggggagaggttgactacaaaggggcaagagagggtcacgggggttttgaaacagctctatagcttgattatcacggtagacacatactgaatacactagtcaaaacctgccaactttatactaaaagagaaattttaatgtatgaaatatataaatgtatgtaaatatcttattttttaaaacatacaaatttcacacaaaatagaaaaacaatttaaaattaaagggaaaacaagttttgcctagctcaaacctaacacaacaacggtgtccacaactgtgttacaaatacataaagaattttaagagcgtataaatgtatttaccaggaaagaaaaatgtttcgatttagggagcaagcattaaatgaattggtaaaaagtccttcaaatatatcattaatctgactggcagatttccctgtttatgaaaaccttgcttttcaatgacaactagggaggcaggctggcaggtggagatgggcgtctgggtttgaatgggcttcttggtttggatggaaatggctggcgactcatgaaacgggaagcactatgtctctactaagtaaatggtaaacaagcagtaacccaacaacagcaacaaaacaaaaaaaacttattaaaatttgaaaataacaattatatgaatgcattaaattattacatgtaccctgaaatatgtacatctattatgtatccatttttaatgtaatttttttgagacaaggtgtctcttcactcaggctacggtgcagtggtgccatcatagctcactctaaactgagctcaaaccacctcctgcctctgcctcccaagtagctgggattacaggcacatgccaccacacccagctatttttttttttttttttttttttttggtagcgatgtaggtctcattaggttgtcttggtggtcttgaaatcttggcctcaagcgattctcccacctcagcttcctacattgtcaggctacaggcatgaaccactgctcctggccaaaaagttgactttttttttttttttttttttttgagacagagtttcactcttattgcccaggctggagtgcaatggcttgatctcggctcccgcaacctccacctcccgggttcaagtgattctcctgcctcagcctcccgagtagctggattacaggcatgtgccaccacacccagctaatttttgtatttttagtagagacgatttttttaagtaagaaaataacaaatctagttaaagcagcacctaccgatatttttttctgaaagccaagcagttgtttaaatgggtacatgcctctctctaacatgaaatgtgctgccatcaacatattttatgaaaaaagtgatgtttagctagaaaaatgtaagttattgctatgttacacacaacttttaagttctagtaactgctttgctatccacttttattttgtgggacttacattccgagatgttctgaaatacttgttgcttaaaacacacatgttcatcagctttaacaacaatagattagtcttcagaaatagcattttaagttcacgttctgccctggagcacttatttattttgaaaaaaaaaattctgaagataggaataaatcaaaatagagaacaaccaaaaaattgtattttacgcgatggaattttatagacaaaattaaagtccttgtggaagagtgtaaccacgtcagcatactccaggcttctgagcttcctgcatcttgggttcttcaacttaaaaggtcaaataagggttttaaaggggattgtcagcagggtgtggtggcttatgccttaatcccagcactttggaaggttgaggtgggtggatcatctgagatcacgagttcaagacagcctgaccaacatggtgaaaccctgtctctactaaaaatgcaaaattaggcaggcatgtggcacatgcctgtaatcccagctacttaggaggctgaggcagaagaatcgctttaactgggaggtggaggttgcaatgagctgagatcacactgttgcattctagcctgggtgacaagcgagactccatctcaaaaaataatagtaacaataaaagggattgtgcatgatgaactaatatacaaacattgatctgacacagcacctgagaaccttgtgtggcacagtttcttgaaagaatcaatattgcctttgtactcaagaataattttttaaggaaaaaaacaaaagcctggcctcagttgcatgaatattctaatagatagatagatagatagatagatgatagatagtagatagatagatagatagatagatagatagatagaatagatatatggaatatatatggagtttgtgtttggaatacaaacttgctcttaattgttgtgaagtcttttcaaatgagcagcacctctaaagataatgtgaccaaccgtcctggtttgcctgggacagaatagagtcctggaaatgaaacttttgattttagaactgagacagtaccaggcaaattgggcccaggagtaggggattcctgggatctctctaaagaccaggctgattgaagggtagacaagttaaagcaagtttgcccagaataaacgggcaaactattatcaaactggcttccttaactatctctgagtgactgatatcttatcttctttacccaaagtgttgaaactgacattaagaccaagaatacagaacaagacaaagatttcccttctttcccgtttacctttttcccacttaatgaatggagaatcttcccaccagccatcaatattgggcatccttttgaacgttgacatattttgatcttgaacctcagtggcgaatcaattttcctgtcattgcttttcagcccctgagttttaaagcaagaaaagctacaccttaaaggtggagggagccaatcctcacctagagatgcgtttctgaacttgggcccatttcaggacacaacaacagtgcacatcagtgtggaagacgtgacgagccccctgtgtttgaacctggcttttactttgtggaggtgcctgaggatgtggcgttggaacaaccatacagatcatttctgccaaggacccagatgtgaccaacaactcaatcggtttttccacagatttcaccttttccttatatgctggaatcttcccttcccttgtatgaattttctagcacttttccctttgtttctttcttctctatcccatttctggagactctctctttgagttttttgtgttgtttttttttttttcccttaaataacatggccttgccaggtgtttagaagtgtcattatatttataactcactttcaattggttgagacacacatacaccacacacacacacacacacacacacacaccccttagttctcaatcatggtcctgttgactttgggggtggataattctgtgttgttgtggaggggttctcctgtgcactgaaccatgttagcagcatctctggcctttacgcacgaaatgcagtagcactctctgagttgtaaccactaaaatgtccccagatattgccaaatgtccagggaagtggtgtaaaatcaccccaggttagagctactgattcagataaagtataatcagacacacagatgtcaaaatgttaaaatccttgactctcagtggtaaacataaaggaaatcatcatgtattcttccatcttttatgaattttgacatgttttactttttaaaactggggaaaacaatatatactacatatattccacaactatagaaagagcagacatagaaactacttctgttgtcagcaacttcaatgccttgtaactggccagacagatgggtctttgtatggcaataccaagtatctatctctccaaagcatttttggaattaaagattccaaccaagatgcttccgctcaagaagatgagaactgctcttcagtcatggccatctctcaccaactggaaccaaagtgcaaatagttgatggacaggttgcaccacaaccttccagagcagctgccaaacctatgaagcgtgacacaaaagatcagaatccaaggatgtcggaagccatctgtcacattaattgttgaaagccacacagtaaaatgaactggggctttagtgcagataacacattttaaacataccgcactttatcaaatgccttttcgtcagctggctgcttctctcacctagtgctgttttgtatttaatgaaaacgtgcttcttagtttaacaagaacggctttctccagagaataaccatactaggggcaaattcacttccctaaccaaccagtaaacattttacatgttcaggcattaaaatggcaaaaacgattttattgaattctgatatttgattttttcaaaggcaactaatgtattatataacaactttatagtgttgtatttcaacctgaagctttttaaatataaactaggatggggagagattagtcaacatattatccccaaagcaatcacaatgaaaacaaaacattgtgtgtattttcagaagccagaatatataccttctgatcctaatttattaattatatatgtattaatccaccataggcaattaatctattcctgtaacaaaagaccctatgagagaaactttaaagaataaaactttaccactggcatgaagtaaaatgaggtagacaaaatgaagaaatcttgtctggctaacagaaatgctgcttcagatgatgaccaattgaaaactatcagttggccagcacatccgttagatcagggaggttcatattggagtgtctggctaccccactagaacccaggcaggatgaatcaagagtgaacaggccagaggcacagggcagggtccactgggctgttctggggcaggacgcagatcctgagatgaaaattggtgagaacaaggccacaaggccagaggtaataagacaggctcaggcacagggggcaacgtgaaattccaatgatcagatctggggataattctcccctgcattttggttacaaagaaagagaggaattcttattgctaggtatgaggtccctgacctttgtactatccaatagcaacaaagaatggtccctggacccaagaagaacactgggggcctagactctcagagggaaaagcacttaaaactcaatgaactccctggctctcatttcaaacccatttgggaattcctttcttctgttatctttcaccaaactgctcttcttatcctttttttcatattaaagttactttcttttaaaataatgtgtatagttatatgctgcatggcaattcatcatctgcatttttgttacgaagaataaatgagatttatattcttaaagagaaatatctatcaaataattcaaaaaatcaacacatcaccggaagttaaaatgttacagataaaggccatttaacaaattattaggacttttataatctcctttctagaaagttgatggtggttcaggaatatatgctggtcctcacttatttataatccccaaaacaaaatcaccagattagtgatatttacatgaaaagacaatgtttggatcccctgaatttttaatacatgctcaggactttttggcaggcaggatactgagccatttggcaactgaaagaggcttctgctgattggaaactgcctgccccccagttccttcccagaatgtgtgtggatttaaccagcctgctctgacaccccacctccaaattgctcccaaattcagaggatgtcctcagctaagtgacaacagggagtccggaaagcaccagctactgctggctctgggcagctttgtacctgcatgatccgattctgctcataggaggttagaatgtaatggttaagaaaagaaaaccacctacatattcacgagtgtgtcccaatttcctcgttttccatctgtatctacacctttaatttttctctgcctcctgaaaattaacccagcatcctattcagggaaacaaaggctattattccctcattctggccccattggggaaatcagagagggattcccctcgatgagggaggcttctctgggaaggctcctggtgcgtcagcccggcaatgctgtcaggggtcctgtgggttagttattctatcactccctctcccatgcgacattcactatattgccgtaggtctgagtatagaaagtgctttctcataggctgcctctccccttggcatcatgcctgcagcctggagagctgccacagggacatggctccgtggaccacatggctggctctctgcatgtgtcaggagctgaaaggaagactgtcatgagccaatcggtgtttttttattttatattagagaaaattcaattctaaaatagtaaactttaaaagtaaataacaatttatgcttaaaaagtaataatctagtccttttaaatgaactctgaagcatgtgtttttctttattaaaaaggcaactattcgctgtcctctgatgtgatctggctctgtgtccccacccaaatctcaccttgaattgtaataatctcatgtgtcaagggcgggaccaggtagagataactgaatcatgggggtggtttcccccatctgttctcatgatagtgagtgagttctcacgagatctgatggttttaaaaggggcttccccttcccttggcactcattctctctcctaccaccatgtgaaggacatgtttgcgtcccttccactacgattgtaagtgtgctgaggccttcccagccatgctgaactgtgagtcaaacaacctctttccctataaataccctgtcttgggtatgtctttattagcagtgtgagaacgactaatactcgtatctttaaaagataaagtcttgtttccttagacaatctcttatagacatgtgtcaataaggcagcatggcctggtggctgggagcagaacctgcagccagactgccgggcttgattcccagcaatgtgaccttgggcaagggacctaacctgtctactcctcagattcttacctgtaaaataaggatcataattgtgcctacctcatggtgttattgtaaagataaatgagtccatataggtgatgtgtgctgagcagtgcctggcttacagtgaatgttcataaatagggtcacaggcagagagaaacattaattttcttccttaaatttcctaactcttaggagtcataacttaaatgattctgatttctctagctcttactcatcagctttctctttattcctaattcctaaatagccatcctgaatctctgcagaaaaaaaatatacattgtatttatacaatacattttaccaacgatatatatgcacaactgtatacatgtgtgtattgtatgatatatatatatatatatatacacacacacacatatatatgaaaaacaaaagctttacacaatatttacccttactgcatgtgatagtttggcatgcatatattctattctatttcatttctttctatgctaatcataacccaccaaattgatttcacaatccactaagctacatctaaaaacaatgcactatagtaaagaaaatgtttattccctccaaaattgctgcttctccgctctacaacgttaagatatggattacagttgctggcaactttaaatcaaattttgaaccaatatatttcccagtccctatttaaataatttttaagaacatagtagttataattttgttatatagcttcaaatcaaacacagtagttataactccataaagatggcttcaagtcttactcttaaattattacctgtgtaattgcataaaagtgacttcagctagttgcagtggctttgcctgtaatccccactacttgggagattgaggcaggaaaatcacttgagggtaggagttgaggagtttgaggccagcctgggcaacacaggctgtttaaaagactttgtcttttaaataaaaaataaaaaaaatttaattatccaggtggggtggtacctgcctctagttccaactctcaggaggctgaggcggaaggatcactggagccgaggagtttgaggctgcagtgagttggtcatgccactgcaccactccagcctggatgacagaaagagaacccatttctaaagaagaaaaaaaagtgacttatttaagcctcagtttccttatctgttgattgggataataactcctcccagagatgttggaaaaattttaaaagaagctgtgtattaagtacatagtaaagtcctgatattcagcaaatggcagctattgtaattactggtcttttaaaaacaggattgtttcttgttattgagttatttatatattttggatattagccccttattttatgaaaagaatttttctcccaatctgtgggttgtctcttcactctgttgtttcctttgttgtgcagaagttttagtttgatacaatcccattcatctatttttgcttttgcatgtgcttttggggtcattccaagaaatcattgcccagaccaacattgtggagcttttcccctaaggtttcttctagagtttgatggtttcaggtcttaacatttaagtctttaatccattttaagttgattcttgataaggggtcagataagggtccatttccattcttctgcatgtgggtatctagttttctcacactatattggagagactgtcctttccccattatgtgttcttggaatctttgtcaaaatcagttaattcactgtagacccatgagtttttttctcagctctctatcctatttagttgttgatgtgtctgttttaattccagctgttataattactatagctttgtaatattatttcaaattaggacaaatgaccctgttaaaaaaaatgtgcaaaatgcctaaacagacatttctaaaagaagacatacaaatgaccaacatacatgaaaaaatgctcaacatccctaatcatcggaaaatgctaattaaaaccacaatgagatatcacctcacaacgttagaacgtctgttgcaaaaacatgaaacgtaagtgttggctggggtgtgtagaaaaagggaacccttgcacacgttgatgagaatgttagtacagccattgtagaaaacagtatggaggttcctcaaaaaacaaaaagagaattaccatatgatccaacaatcccatttctgggtatatatccaaaggaacggaattaatatgtcaaagaatgtctctactttcatattcactgcagcattattcacaatgccaagatacagaaacaaccttagtgcccatcaacagatgaatgggtaaaaataatgtgcatacatacacaatggaatattcgtttcagccttaaatattcaatacagctttagaaaaaaattctgtcatttgcaacatggatgaatctagacgacattatgctaaattagccaagccagaaagacaaataccacatgatctcagttatatgtagaatgtaagaaagtcaaactcaagaagtagagagtacaatagtgattgccagaggctggtgggtaaaaaggaaaaagaatcaaaagttcaaagcttcagtaaggggtagtaagttcctgtgatctattgcacagcatggtactgtagttcataataatgtattgtatatttcaaaatagctaaaagaatagattttaaaggtatcattgcaaaaaacaaatacatatgtgaggtaatagacatgttaattagcctgattgatcattctatgatgtatacatatatctaaataccacattgtacactataaatatataaattattacttgtcaattaaaaaaataaaaatggctggacacggtggctcacacctgtatcccggcactttgggaggctgaggcaggtggatcacttgaggtcaggagtttgagacccactggccaacgtggcaaaaccttgtctctactaaaaatataaaaattagccagggatggggcaggcacctgtaatcccagttacttgggaggctgcggcaggagaatcacttgaacccggaggcagaggctacagtgagctgacatcatgccactgcactccagcctgggcaagacacaagactccacctcagaaaaaaaaaagaattaaaaaataaaaatgataaaaattacttgcctttaccaaggactacataaggttctcattgatggttctcaatcatggctacatatcaaatcccttatggagggtttttaacatccacatgcctgagcctccatccatatttattgatcttccaagatggggaccagacgagataacacaggtgagataacacaacagaattggatgccaaatcaggttcaacaggaaatatagatcctacccaggagctagttaactaatggctaaatgatacagacaacagcaaaacatgagtcattctccccttggagagctctgaaactgcaggcacaggtgcctataaatgtccttttcttgcataaagatgcatgttggtccagactaacatgaaaagtagaagcaatggacgaagtgcattgctcgaacgcaaagatccattttttgatggaacatttgcttgttatacatcattaattacatagcttatatgacattttccagaggctgtaccccacaaatttataaactctaggtttatttacagtaaacaacctagccagtccggtccatcctgctaaaagcataccacagttaaggactctccagctagcaaatacataccattattgtatttgccagaaggtgggtcattagcatgttaagaaagggcctggtacaggcttcttttctcaatagttgatacaaattataaggactggaaccactaaactacacctttctccttttctagtttcagattagcatttgagaactcatttgaatacaattctttttaacaaatatatacaggactcgatactcaggatgtcccaaaattcttggggtaattccaagattacgtagcataaaccatatttaaatagcttacaacttccccaagactgtcggcacccgtttatttcattttttgaatgagaaaattgaagcaatatttgttttgtttattggaggagaggtgacttttgtttctgaacaaataaaaccacgaatgcagtcttccagtagccataatcagaagtggtggaaccatgtttcatatggtaggcactcagttgtctcatgtggtatgcgtcatatgcttacccaaatgcaaatgatgtacgtaatccatgtttctgcagatactccatgatagaagcagtgaccctggaagatttttctatgttgacattacaacaggtgccctaagacagcaagacccctagaccgggaagaattttcttggcataatatcactgtccttgctaggaaatgagtaagtagcacagtaagttggtctccatgcagtgacaaaatataggtgttaagaaagtggaagtttctagaacttgttgtaacaaaaattatatcctttaagggaagaaaggaaatcatgctttatgcaagtaagtaaatgcgttcagttcaaatacttttttgaggctgcttgtatacttagtcctgtgctagagataaaagcaaacaaaacatggaaaacagtgaagacagcattcttatcccaaggagctatgaggaaaagggaagattcctgagaaatctaacggctttcaatctttaatatgattgtgaatgtacaaagagtataaaatattactgtatgaaggaagcatttataacatatcactcttattatacaaacatatacatatccatgcccacagaatttgagataccttacaataaaaggcaaattgattaacgtaataaacttataaatggatggaagattaataactacattaatatatattataaacataataaaaattagattatgtctactacattcctttttttttccatactggtgatagtaaaggcttagaaaaatggcagtcctaacctattggctatataactaaacagccattcaggagggcagtttggcaatatgtatgagattctccaaaatatttatactctttcaggaaatctactgctagtcatcatattaagaaataattacagatatcaacaaagatttaaatgtgaaaatttccactgccatgttatttaaaataaggagaaaatggaaattacttaagtgtctaataataggagactaaataaatttggtacaacctatagtaaaatgacaatataatacagatgctttcaaaacatattcaatgcaaaggataaccttaccctaaaatattaatgttctgaattcaatctttctattttgcttaatgtaacttctgtgtcagggggagggtgtataactccaattttagacacccatgttgttaatgtcatatatctaatggatatctctggtggtaggactgtggatcatattcatggatcatctatgcttttctggaattttcattattccttagacaaacaccactgttataatgaaaaataaatcttaattttgctagcatattatggtaaccaagcaatagaagtatttagggggaaagagtagagcataattttttgggaaagaaaggaagaaaaatatgattcagaagaacatgcattttgggatttagtaaaattattaaccaagaataatttctgtgtctcgcaattttgttttgtctccttggggtggtgaccaaaacagaaaaagacaggaggagcactaccagactgtgaaactgtctctgcatggcagtgccaagcaaaagacacagatcacaaagacacagtccccatgagtgtctatgaccccagccaaagatatggatttggtgtgtgtttgatcctgaatatcctgttagtccctaagcagaaataaatgtgcagtgttatctttattccagtgaaaactcgaaacctttgcaaatgtaattcaaagaactgatgattccacaggaagaaagccagcagtgccacacagtatgcatccgattggcaatgggctcttttaaagcccagaatacagactgacctgcctttaattccaagacttgaagtctgagccaaatgggagactgaaaaccttttttaagattcgttttttgacacttgctccctttgtctcacccttcccttcatactgcgatagcaaaggttcaccaacacacaccttattctgtccaaacttctcatgtccggccacctcttagtaggcaacacatggatcctatgctcttgctaccatctccatgtacttcatccctcctttcaaatccagactcaccaagtaaataactactttgttttttttttgtttgttttttttttgtttttttttttgtttttttttttttttttgagacggagtcttactcttttgccaggccggactgcagtggtgctatctctgctcactgcaagctccacctcccgggttcagccattctcctgcctcagtctcccaagtagctgggactacaggcgcccgccaccacgccggctaattttttgtatttttagcagagatggagtttcactccgtgttatccaggatgtttccaggatggtctcgatctcctgacatcgtgatcctcccgcctcggcctcccaaagtgcgggattacaggcgtgagccactgcgcccagtcgtaaataccgacttctagcaaaaaccatactctttttttttcttttggcattactaaactctcagatttggttttccttgtgttcctttagacaatccctcccaggttggaagtgttcctgtcacaatcaaagtcttagatgtgatgacaatgctccagagttccccagattctatgaagcttttgtctgtgagaacgccaaggaggacaggtaaggtggcctgtgggtggtgcactctgcttaacccctaacttctggaaacattgttagataaccaaattcaccatcaaagccattttgactccagaaacgaacagttcaaaaacagagtccctaattcccgtatatcaggtttcaaccatttatttgttaagacaacttttgaggctaggtgtggtggctcatgcctgtaatcctagcatttttggaggctgaggcagaagatagtttgagcccaggagtttgagaccagcctgggcaacatcgtgagacccaatcctaaaaaagtgaaaaaacaaaaaactatttggaacctacattaccttttatggcctaaaagcactttgagggtggccagatgcacacaatggccgtataaggtatgtgtccacctggaactgaattgtgtagcacccatggcagtaacacctgctctgaggcctggaagtgagagacaggaagaccaggaaaaggaggaaaaagctactcttttcccgagtgtggtaccaattcctaaaatatcttgcagtaggacaagtttattttctatatctttccacctccctttcttaactctggcaagaagtaccttatttagggactccctggcctatctcagaatgctgccacctaaatgacctaccttctctccttcctcaattaaaacatccattttcttagtgctgctcatgcaggtaagttttgagaggaaagtaatccaaaaggataaaggtctacttatttgaaatatcctccataatcttcagagacatatttgtgtattttttaagtatgcccttaaacctaactaatatttagttgatcaaattctaagtggtgtaattaagaaacatctggaactccatttgagtgcccatgtagcaatgcatgtcaggctgttgcctgccctataatctgtccatctcctcattctgctcctgcttttgtaagatgctttcctcccctgtgtatgacccagcaaccctaagatcccctaatagtcctcatctactgcccttccccaccccagtatatcctgtggtccttggatgctggtgctggatcaatgggctggaatggttttaacatgaaagctggggaagcgatattgataaggcagggactcatgcattggtaattctggcccctgactgtaatctaacttgccttcatgtattagtccattttcatgctgctgataaagacatacccaagactgagtatttataaagaaaaagaaggttaatggactcacagttccacgtggctggggaggcctcacatcacggtggaaggcgaaaggcacatcttacatggcagcaggcaagacagactaagagcaagtgaaaagggaaaccccttataaaactatcagatcttgtgagacttattcactaccagaaaacagtatgggggaaactgcccccgcaattcaattatctcccattaggtccctccccaacatgtgggaattatgggagctataattcaagatgagatttgggtggggacacagccaaccatatcacttcacttctctcactccctgggagtagtacctccagcatcttgctgcaagagagactaggtctgcataaccaaaacttatgttagctctctgaactcaccaaagatgactcgacgacacatctttaccatttactcagccaaagcaaaaagtgatttatgtccctcggggaagaaagatgttccatcacgattctgatctaaatttatctaacaatccttgaaattggtgcaatggtctatagccctcctaaaagattcttttcaacaagtctaggataattcttttccacatctagtgaatttctagtctactaagacctgaaatgttatgcagccaataaagttataatgcagaatttacagcccaagaaacgatccatgttattataagtaaagaagggggtataaaaactacacctacatgcttgcagtcatgtaaaattatgactgcaagtgaacatgatcgagagggaagatgcaaaaatagtataattactgtgctaaggtagttgagtttaatgaggagttttgggtctttattttaataatttttgttttatattataaaatttatatattgtaatataaacttgttataaaattatatgaatattttgttatgataaaataagctaatttaatctataatacaaagagggtgataagtagcagagtaaattaaacctccttccccccaaataaagggcttcagagtaggagaggttgcattctaacaagtgaagaacatttcaacttctctcctgtttttgtaatcaaacaaacatagtccccatttctaaatgcatcttttaatgtttgttatacagtgatctgaagtacagatctttcacttcaagttcagtctgtcccattgtcacctttaggccaagatactgaaaatattaacctttgatttgggctctgggaaatgtttgaagatttttcaaaagcatacagctcagagatacatctggtttataaagtatcgggctccttgtgtttacttgttggatactgtcctccgcttcacatctgacaagtccagacacagcttccctcttagtaagcagccttgaaggaagcccataaagaaatcagataacatacttgtgatggacaagggcggaatgaaaccagctgagcagaatattgcacgacaagtggggctaggaagaaatctgacctgctgggagaacagagagcaggagagcgggccatgcgctcccacccagacttagcgatttgtatcttcactcactcatgctttaaagccctgtaagcaaccactctgtgcctcaggccccagtctcaccaatatatacacaatacgcaggccagatattctaaacgactttcccaactatgtttatcaaattacgtagaatcacctatgtgtaacatgcccaagaaatatgttacctctctatgtgtttggcactacaagcaagctgaaaagtgccggcctgtctccaggcgggataggacaggagggtaatcctggagtgtgagcagcactgatactggattggctgtgagcaagtttatctccattagtctcctggccctcaccttcctgggaacccattccccctactttcaggttcaatagttggggtctccaggaggcataccctgagatgagttccagtataaggtgtttattaaggagggcccttggggccagcacctgtgggagggagtgaaggaagcaggactgggcaaaagaagtccagctgccatgcagactaactgccttagtgacttctcagagagttccagaactagagtttccccaagttgagatgggatagccagaccgtatactatcacattaattagtcactggatgtcgccctggaaggatgtggtgaccatggtgtctcagtcggtttgtattgctataaaggattacctgaggctgggtaatttataaagaaagaggttcatttggctcatggttctacaggctgtacaagaagcatggtgccagcatcgcatctagggagggcctcaagctgcttccatgcatggaggaagggggaaggaagccgactgtgcagatcacatggtgagaggaagcaaggcaggaggggaaggtgccaggctctttttacaatcagctattacaggaacaaagagagtaagaactcaactcatcaccaggacgactgaccaaaacattcatgagggatccacctggatgaccccaacacctcccaccaggccccactccaacaatggggatcagatttcaacatgagatttggtggggtcaaatatgcaaaccatggagtgggtaggtggctctctgcaattggcaatccctaaagggactggtaggtgacgggaaaaatccttcattgaagggggatctgagcaacacagtgtccaaaaggccccgatgggactccccctaccaccacccccagttatttaatcttcagcatattgtgagagttagctttactcccctaatttacagatgaagaaatacaaactaagcaagcccagctgggacctcaaacgacctttgatgtcctggttcctatggtggtagaagcacagctggcttttaaacagcaggttggcaagtctacagggctgggcccaagatgggtaggaatagtctgtgctgttgcttggagaagaggaaacacatatgaaggaggctgccgttcaatgcctcttctgtaaccccctcacctgccagctcctgttccagtcgtctgtttcacacagatttctttaatagcttttacatatggtctcccagacttcatgcaacttactcctttgaaaaacattatggaaaaggcaaaagtggccagtgagtccaagaggaagccacctgacctcctgctctccccactccagagttcgcttctgactcttgtctgttctgcatttctactctggggatcctgtgctatctttgctactctccctcctgccaacaaaatgtgactctctgtgacccattccctcatgtctgttttcgttaacctgacatggccaatgccaatgggtcactcacttctcttcaggtcatggtcattttaaataggggcttcttaaagacagcaatttagccctgaaatattgggccagtgatgagttaagtagatgaggtgagaagaaaatatggggtcaagcaggactttgtggcacccgagcctttaactcaaagtctcttattttttagactgcctagaaacggctggccgtggtggaagatatatgttattttgatgtctaacatctgaagtatttaggtaacatttatcctatgcctctaacatactcaagcccaaccctaaagcaaaattaaatcccaaggtgtgtgatggcatgagactgtgcagggaagtttcacatggaacgggagagttcccttatcccccttgcagaacggggtgtgccctgctgctcaaacccctaggggaagcatgcagacgggcaggtgcagaagcatggggagcgcttttgggctctggcccaaaggcagcgtctaggactcctgaagcccaatgggcgtgtgttacagtgtgctcactctcagctacgccttctgcagacggcttgtattactcaatagaccctctgccttatcacaaggacacagggccagtgtgacagcctgagttctgcccagtgaactggaaaaatcagatcacacatgggctggaaggctgagtgcaacgtttatgagtggtgaaggtggttcttagttaaatggatgggaagccagaagcgggggatggagtggaaggtgatcttcccccggattcgggcttcccagtggccagattcttctccaactgtccgggctgaacttcccttggcatccgcatcattccaccatcgctagtctgccagtgtctgtggtgtgctcctcttctcctctcaacatccagctgcttgtgtctgtgcccgctaaggtccaagttcatatgggtacagaatggggggcgtggtgggccagagtggtcttggaaaatgcacatttgggcccaaaaacaggagttcctattctcacttagatccgtgggcacaggccagggatggagccctcaccaggaaccctgcccttctctacccagcatttccctgcccctctccataccaatgatatccttctcataaggtaaaacatcccaccatcgcgtttccgggtttggatttaactgggccctggtgctttttcctttggctccaactcacctgatttcatgtcccccctcagctgatccagacagtgagtgcggtggaccaagatgacccacgcaatggtcagctttctactacagcttggctcctgaggctgctaacaaccccaactttaccataagggacaccaaggtaatcaggtggatggttggctatctgtgcttttctacagcataggccagctacttgggttactgtcttatgcaaacagtgtcaaaggctacctgttccataccagcagggagatgttaataattcagtgtattttttttttttttttgagatggggtctatgttggccaggtggtcttgaactcttggcttcaagcagtcctcccatctcagcctcccaaagtgctaggatacagacatgagccaccgtgcccagcctcacagtgtcttttaaagttttgtttcagaacacaaacacagagaaccctttgccaactctaaaactcattcagtcagtaagtcggcagattttactgagtgcctgtcccgtgccagaaacactgcaaagcacagaggcaaaatccttcatcccactggtagcagccctgttcatatgttctgtaacaacgggaaaaatctgagaaagaagaaagtgatctaggataaaaaataaaataaaataaaataaaaaacccctgggggcacattctaggcagagatcaaagcaggaaacagtaaaaagctctccaaacaataaggagacaaggataatagagataacaaagggcaaatacaggaccataaacacagttttggcactgaaaagctttattactttagaatgatttagagaaatactttcaggtagggttccctatccataactgctccccgctatagctttgatggaacagaattctaggcccctcttttccaacaagcttcagaccagctaaggggctcatagacccagcacactcttctttgggcacagatgggaaaggaaggacttttgttctgtagccagatgatttgcttcaaaagaaaaaaaaaggtcaggcaatggaaaaaataagttaaactgtcaaatgaacctcatctgttgttaactctgctgccgctagccagctgaccctgggaaggtcatcacttcttgagactgcagtagcgtcattttcttccgattctaaaatattaattgccgctttgtaaaaatctaagcaaagggtaacaaaaatcatgattaggttaggcacgcctggttttagtttcaaacatcaattatttgagattaaagtattacttcaaccccacatgacagttttctgctgtaaaacttgagattctcaaacctgtttcttctaaatgggaaagcattcttctaagtcatcccttcaacctcctacatgtcacctaaaaatactataataattctggaaggaatggtaatatgaattataaaggcagaaatactcaattaaatatcctgaagttcttattgggtcaaaattttgaactattcatttatctgctcatagggaaactattcccgcaaaaagtgctttcaacctaggattggctttacaaaggcaccctggggggggaaaataacacattgtaacacattatattttttcttcaactgttcagtaagctatcattctaatgagtgaaacaaaatgcagcaaaatgctgcaaatttcttaaagggactttgggcaccaatttatggaaccaattccttaaaaagatgggccaccggcactggtgactatagtaagacgtgactcatctcttggaaggtttcccaaaacagaagtcagcacacttcaacagaaagcatgaactcttaatctccaaatgacaatttatctcacgagtatccttactggggctcattttaaaactgaacaagtctaggcacagtggctcatgcctgttactcaacactttgggaggctgaggcaggagaactgcttgataccaagagttcaagaccagcctgacaacacagcaagaccctatctctgaaaaacatattttaaaaattagccaggcatggtgcacacacctgtagtcacagctagttgggagcctgggacaggagggtcacctgaggccagagtttgagatcagcctgagcaacacaccaagaccccatccctaacaattttttttaagagccagacatggtggcatgcacctgtagtcccagctacttgggaggctaaggtgggaggtcatttgagcccaggagttcaaggctgcagtgagctatgatcagaccactgtactccagctgggtgacagagtaagatcctgtctctaaaaaaagccaccacaacaaaaactgactaaatagggcagatctactgtcaactacctctgttcctgtgcctgaaacatgatgtcctttttgaacacaacagggcactatctccagtaaagcctttttttacttttcagccccaaaacatatgaaaagaattatgtgtatatagtactttacagtttcaaagtattttcccatacctttttgatatttacaataattctgtgaggctttaaggaagttattaatccctctgattcttttgtcccatctgatagatgaggaaagtaagcaaatggcccaagaccagagtcaataagcgaataagcattaaaactgggattagaaattgagtcctgttttaccatgcccccccactaacccccgccccacacacacagtgttctgtgtcacctcagaaaaaaatgctgtttccaaaaagttactaaagtcctcattatcacattcaacaaaaattttccaagtggctactatatgcaggccccttccagcactggactcagcaatgtgatgctctgatatttttctttaatcttaataattcttagatcaagaaacatatatatcgtaggtataatacttttatgaatttcggtctagtcagactttctaaaagtctcatgacctcacctggattaaaccaaaaaaattaaaaaaagttctgattagagaaaaacctgctttctgaaaaaacaagcaattaaaactacaaatggaattgatagtatttagctattaagtctggaacacagaaaggtgcacgggttgtttgtaggtggaaatatgaatataatcctcaggttggcatcctttctccattgggaagaaaatagaagtagcctgtatcaaagcaggaagaggttatgcttatctgaattttttttgacagtaatattactaaactaaataagcagttatgtagcacaatggaacatgtacatgttttggaccagagagaccagagttcaaatcccagctctgctactaactaggttagtggcttcaaacaataataaaatcactctaggccttacttctatttctgaaaacgagtaagattattactagtccaaattgtgaagattgagtgagatactgcatgcaaagtccaggtacatggcacatggcctttagtaacaatagctgttagcataaaaagcagagtggaggaagaaaagttaattaggggtaatgtgttactcagaatagcccagattatgctatgggaacaactaccacaaaaactcagtggcttagcacaactacagttaatttcttgctcacatacagcctgctgtgggtcgagctcagcgtcccaggccgccccgctctgcatctcacaccctgtggttctttctcagtactacagcaaggaaagagcatggagacttacacaccagctcatacagacttctgcctagagtaacacaaatcactattgctcatcaactaaagcaaatcacacagacatacccacattaagaggatagaaaagtgtaatcctttattatgtccaaaatgggaagaagaaccagaaatttgataatcactaataatgttttcttaggttaggctctcaaaattttttgtgatgttctgactctttcctatgaaatatgaaacacatccatgggacctctgtgttggtggtattagcttgagaatcacttcttgcatgtcctactacatctctcaaatttttcctctgctgaaaatatctgagctttgcaaaagtatatctactttagaattcaaacctacaccaggaaacttgaaatgtagattttaaaaatgaaaactcccacaacacaatatgtgaatataaatgtaaacaacacacatacacatcccaactttgtagaaaatatctaataatttgactaatcccctttaaactggaggaaagatttctagtattgatcagtaacaaagtttcaccaagttcattttaatgcttaaagtgagaccaccaacccaggagaaataacaaggtgtgtcatatgattaggggtttcaaagaagcttctactaaatgagcaggttctttaggaaacacaggagttggtgactcatttcagaagcataaaagaaaatagtaaaagacgtgaattccagacaaagcggcaaaataagtaatctgccacagtcacacaggctcctcagcattcttttcctggaggcgcaaagcgcactggggccttggcaagctgctgagcaggaacaaacagtgaccacaagtcaccagtgttgttcttttctgtcaagctttcccagggacatttttgttagatctgaagtctgacagttgccttgggcactttatgtcacaaaggataagacagactcaaaaaaaaaagaggctttccttcttaggcctcagggttttgcctaaaagcaagcaaaaagcatggtttctgaatccaatgctgatccaggcaaacccgccatggttgaccactaccagggaatatctgactatcctcttccttcctacaccctgcccctgcccccttgctttcctcaatccaagaaattaattcacttcccttttccaatcctggaacccctccttctttcagataacacagcacggattctaacaggaggtctggtttccggcagcaggagcagagtgtctttcacctgcctatcctgatagcgatagcgggcagcccgtgctgagcagcacaggcacactgaccatccaagtgtgcagctggatgacgacggccacgtcatgtcctgcagcccagaggcctacatgctcccagtcagtttagccggggcgccctcattgccatcctcgcctgcatctttgtcctcttaggtgagtaagggctgctttcccttctgtggagtcctgccagtgcgcactcagacatttgttcattaccttctgacacagctattcagaactggtcttccacaccttgcttactcaaaaggtggtagagtaggctgcacaaaaaacagtaaagaaattgaggacagtcccttcttcgaggtgtctgtggaagatcaaagcacatatacttataaagtatctactatgagctggggcaccacacaaggtctaggattaataaaacagacaagtcctggccttcctgagtttacttcagaacaaagcagttcattttgacatcatagaatcaaaattacaatttagacaggatttgatgatcacctctctaaccccttcatttaagtagtagctaagtcacaaacgggtaagtgacaggctcaaaacaaagtcagaggcacagccagggctgaaatgcaggcaggctatatacactgggcaccccttggctcaaaggcactgcctttctcctaaatgctcatcccgattctggaggtggtattacggaagggaagagggataaggtatcctggttggaaaagtgacagggatagacgccacttcaacagggtagtcagggaatcccttactgataagacctttgagcagagagctgaaggaaggatggtgtgaaccacacagatttctggagaataagctgtttggggtgattagtacacctctaggcaccatggccatctaaccaggaacagtgactaaacagggtcagtttgcctctgcgaagaaataaggacataacaggctagcagtggcagaacactactggggtaaggaaccctccttcttcctctcaagtcatactgcaaggtggctccccaactccctggtatgtaaggcctccttgcaattcttttctaattccacactcaaaaacagtgaaataaaaacacctaaaccactcttgcaaaaaagaaagtatctgtacatatatccttgctcttcttattgaactaatcatagcatatatatcatgcttagagaaaaacagatttagtagatactagtattattcaatcaaaagaagtccgagttttctgagggaaaaagccctgaggattgaaattagaatagaggacagatattcacatacacccttgatcccaagttcacctctataccaagagacagaccaagaaagaagttcctgtgtaaaatgtcaacacttgattttctaggtaggtccgtgcaatgtcttctcaaaatacatttaaaaatacaacatgtggtttaattttgttgttttagttcagtctacgtaaagagaggaagagtataaataagtaacctttctaagttcttggatccctgtgcaagagaaaattgttacggtttctggtccctgactgcattgacaagtaaaacctccctgaattccttgagtttccataaggtggcattgggagtcctttagcacagaagtggacgaccgtaagaggcctttgaagaaacttgttcctgggaggaatttccagactggctgtccttactctatctttggaaaatgtcgaagttaaaagttcaccctggcccacaaaaagccatcattcagaaatactgatttaaagagactggcttggagaggctctcaagttaaaaatggtgtgcagggacaatttatcttatcccttcccacccacgatgatgtcttgtcttttaaaccgtacgaaaaagtaaacagttttcaggagctaaattgagcagagctgtcataaaatcctcacagtttaagtacccttacttctaagagtacacatcccacattaaaaataattcatcaaacttaagatttgacttgcatttgtcaacaaaatactatattttatagacaactaaataaattattctgacttcctgggtttttttttttcatgtctcatatatgtatctagtgcctagaaaactcataagctctacgcaccgtgcctatagtacacgaagaataaaccatccctagaactattctcttctgtcagagaagcctttcagctgaataagaccattttcctcaaaatctgatttcagggcatcatgtaatatttgttatgtaatatttgttatttacctaattagattacctaaaaaaaaaaagacatgtagctgtctttatttttcaaaagacggactagttctatataacggcctaattctccatgaccatcagaattctctccagcaaggtattcaaaagacttccattttgcttcctagcgttatccaaaataccgcccctaccacttcaaggtcacctctgtgagccctacccagtctcccaggtaaaattcactggccctgcctctgtactctcccagtgaccttgtggctctaacagcccttatcactgtctgacttgcattaattatcagcatccataactccttagattacaagctcacaagagcagaatccatgtcacactcaatattgtttccccttgcttagcatagaggattaaaaatacttgggtttaataactttactgaatcctgcaaaacagcatgctcacttcgaatctcacgtctccaacctgcatcaatccaaatcacactccacctttcaggctcgattcaagcccacgcttccttagagtcctattagtctctttttctctggaatcccaccctcctttcagtccacgcctcgtatttttgcacacagggaaaatacacagagcgtatcatcgtttcctgtgtatgttttgtcaccaaagctatctgggaaaatattactattaatgtcattaattgcaattgataaaaaagcacatctacattcaaaaaaatttttaatcattgttgtgagttttattagtcggtaatcttttactgcatgtatgaatgtactccatttctccccttggataaactggggtcttattttgcagtgctgtcaaactgtcactgttcccagctataacaaagcacaccagaaaaaaaaaaaatcaatagcagttctacagctaaaactcaacactcttcctggaaaacgttttcagagagataaatagctcaatgggattatctcatctctcctttaaaccccagcgaacacattctaggggggaaaaatgcatttgttgggataaattttatccaaacctgcaagggcacatctaacagtgtggtgtttctttgataacatgtgaattatataaaaggccactgctcattctctgccttccataaatacccttgggtccagaagccacaaccacctctttaatgaaaggcttctctgaggaacctgagtttattggacccagggatcacttatgttctgttgttttttagaggtataaaaagactacaactttggtgcaacttagtatgtgtgtctctatgcatattaagatatgattatatacagagtagaatcctataagatgctaatatacggaagcagaattccacctacataataagactttcacattataaaggataaatgtatatttttcatcatataaacagagcacgtgatctggtccttagagtatttggtccatagcaggcctttgtgctttgttagtgggattttaaattgggtgttaggtgtgacacacaatttcaaaacagcaagctgatggtaagcgactataggcaactttttctaataaaccatttgaagaaatacagggcttcattgtccacaacctgacttacagaaagaggacaagtggacttaaattagaactccccgaggtttcagatatccaaaagctatctctgagcctccactcggtagcccttcccctatccgtggtgaatcaagactacttctagtcaccgcaccacagccacatctcctcggtaaacacactctcctttttgttcctggcagtgctggtgttctcattttgtccatgaggcggcaccggaaacaaccatacatcatcgacgacgaggaaaaatccacgagaacatcgtccgctacgacgacgagggcggcggcgaggaggacaccgaggcttcgacatcgcggccatgtggaacccccgggaggcgcaggcgggggccgcccccaagaccggcaggacatgctgcccgagatcgagagcctctcccgctacgtgcctcagacgtgcgcgtgaacagcactgtccacagctacgtgctggccaagctctacgaggccgacatggaccttgggcaccgcccttcgactccctccagacgtatatgttcgagggggacggctctgtggcgggtcgctgagctccctgcagtcggccacgtcggactcggaacagagcttcgacttcctacggactgggggccccgcttccggaagctggccgagctctacggggcgtcggagggaccgcgccgctgtggtgacggaagccaggaggcaggcgcgcgtccaaatccagacgttctcccgggtgcttcgcggacaaggtgcagccaaccacacgagcaatactgtgctggagagtgaaatgggggtgagcaggcgaacagagctctctctggatcagctttacttgggtagattaattaaataagcaaaaggaaacccagaaggaagagggcagaatctttaattacctttttttttttctttttgatttttctgacactgtgtgcgaaggcttggagtccaaggtgttctgacagggtggcttttctctgccattcgctaaggcctttgtcacttttccaccacagaaaggcctggccttggatacagagatgccaattgaaagcagaaagttctactctcgtatctgtttttatcttatcttattctccatttaagagttttgctggctcaaaccacagaaaccaaccccaagaaagaacaaaaaacttgttactcagtgaaattaacctacttgttctgggatggatgaatttcccgtaacccttttgagacaaggttaagactgaatcagccttgcatgggggtgatgggtgggagggtgggtgaaggaagagacattgactttatgctcaagtttagtggctgaccaagagatgttggcattacagctcatccaacgccatcaagttagagtgctcgtgtctctctcagctatttaactgtgcccctgcaaaattgttcagaatgaaaccagaaaaatctgctcttttgcactgtagatgtctcttccatgtgccaaatgtggagattagatgctacaaagaaagccaaataaaaaagaagtatctgacaaaagcatgggttagagggctttcctaatcgtgtgaggtcaatccaagggatgtttacatactgtagataacctacttgaacaaaaatcgtattatagagaataaatggatgtaagaaaattacatgtacaagttttgtatatttgttataattttggtaataaatatgatgtactgcatctcagtaccttagcacttcttttaataaagttaaatagaaggaaaagtctattgtgaatttgtttaattgctgaacaggtagaagagactttgtaatcctgatctagcctcaggctcccggggttggggctaatttgtaaggcaaagcaatggaaaagaagtgtgaggctgcattctgtttcagtagctaaccatatgaacatttggttcaaactgttaagcttttaatgaacaccctccatttcttcatccctgaaaagagcaagggtggtttggtaatatcaactatacaatggtgaatttagcccatatttttcattttcaaaaggttattacacatagcccccaatgaggcaggctactgtgctacttacatctctattcattggcaaattgagctcacagatggttgaaaccatattttattcatctttccttttctacaatagctagcatactcttctgcatacagtaggtgcttaacacttcttggctacatatgggagggatctctatttgacattctattactaaaaaatattttacacaactatcctccaactgaggacaaattgtgaacaaaatcattccctgagagccttgattatagcaacagtctcaaattttaatgtatcagaatcacgtgaagaaattgttaaactacctcacccctagatttatgattcagtcgatttggggcagtttgtatttctaacatgttcccaggagatgctgtgctgctggtccaggaaccacattttgaaaacctctgatatgtagttactcactctctacacatgaagattaaactatgtcccatctgtactgggtcccatcttcccgcagagtggtgtgtgaattgttttctcagtaaaacatgaacagtttacagaaatgtaaggaaagctgatggggtctgggaggcagtaggatgtgcttttttgcatattacacattacatggtaccattaatggtacattaacagccaccaaattctcttcagccttcagcatactaaccctttcttccatgaaaggcaggcagctctcacacatcctcttcaaggatagagtgcaatgtaaaaataatacatttaacaaagcaaaagaaaaagcatggacttgagtccaaactaggctttacaataaccaattatatggatgtaggcaaatcaacctctataacattcttccttcctaccacagcctgaggataattttgtgagtatttcactttgtactgcttatgttacaactgagaacagcgttatcctaaccacagggcgttatcatgccccacatcctgcaaatgtggtccccatgatttgggcatgaagtaattaaacaaaatctcctgaatcttctggtccctgggaggatagttatggtgtaatacaggaagcgtgattgaagcacaaaatagatctatttcagcttcatacttaagctaagagattcccactccaaatgagttttaaaattccctttctactgccacaatgaatacaaatgctgatccctctgggaataaagaaaaagaaaaccatcatcatctctatacgacaatgtgatcaggttaggccagagagctgtaaaattattcagccatttgtttgtcaaaggtatgacagctagcctataatttacatgttggagggaaacaggagaatctgtagaaacaattgatgagactcaatctgaaaatgtattctgaataagaacacaagcaaagataaaattagcaatgaaaaatttaaaaaagagaatattcaagcatggcatatagcaaagacaaactggggttgttcacacaagaaagaatctatgaatcctgaaaatggtattcaacaagttaaaatcagtgcaggcacattgattaaaagttgtcattaattcactaatattgcagaactagccttgatgacagaattcacagtatttccatatagtgctgggactatatgaatgtaggacgacacactttacaagcagttctcattgcagattgactcactgtcatatccatttgtcattttacaataaagaaccttcaacagattattatatataaatatctggattggggaagctttgctttattcttaaagatcaagtttctgatagaagaagtcgataaaattaggccaagtgtcctcttttatttgttatttttttaagttatactttaagttctagggtacgtgtgcacacgtgcaggtttgttacatatgtgtatatgtgccatgttggtgtgctgcacccattaactttcattttcattaggtatttctcctaatgctatccctcccccctccccccaccccacgaaggccctggtgtgtgatgatccccaccctgtgtccaagtgttctcattgttcaattccccctatgagtgagaacatgcggtgtttggttttctgtcctcgcgaaactttgctcagaatatggtttccagcttcatccatgtccctacaaaggacatgaactcatcagttttcgtggcgcatggtattccatggtgtatatgtgccacattttcttaatccagtctatcattgatggcatttgggttggttccaagtctttgctattgtgaatagtgtcacaataaacatatgtgtcatgtgtctttatagcagcatgatttataatcctttgggtatatacccagtaatgggatgctgggtcaaatggtatttctggttttagatccttgaggaatcgccacactgtcttccaaatggttgaactagtttacactcccaccaacactgtaagagtgttactatttctccatacctcaccagcacctgttgtttcctgactttttaatgatcgccattcttactggtatgagtggtatctcattgtggttttgatttgcatttctctgagggccagtgatgatgagcatttttcatgtgtctgttggctgcataaatgtcttcttttgagaaatatctgttcatatccttgcccactttttgatggggttgtttgattttttcttgtaaatttgtttaagttctttgtaattctggatatgagccctttgtcagatgggtagattgcaaaaatgttctcccattctgtggttgcctgttcactctgatggtagtttcttttgctgtgcagaagctctttagtttaatagatcccatttgtcaattttggcttttgttgccattgcttttggtgttttagttatgaatccttgcccatgcctatgtcctgaatggtatcgcctaggttttcttctagggtttttatgttttaggtctaatatttaagtctttaatccatcttgaattaatttttgtataacgtgtaggaagggatccagtttcagctttctacatatggctagccagttttcccagcaccgtttttaaataggtaatcctttcccaatgtcttgtttttgtccagtttgtcaaagatcaggtgttgtagatgtgtggtattatttctgagggctctgttctgttccattggtctatatctctttttggtaccagtgccatgctgttttggttactgtagccttgtagtatagtttaaagtcggtagtgtgatgcctccagctttgttctttttgcttaggattgtcttggcaatgtgggccttttttggttccatatgaactttaaagtagttttttccaattctgtgaagaaagtcatggtagcttgatggggatggcattgaatctataaattaccttgggcagtatggccattttatgatattgactctccctatccataagcttggaatgttcttccatttgtttgtgtcctctttattttgttgagcactggtttgtagttctccttgaagaggtccttcacatcccttgtagttggattcctaggtattttattctctttgaagcaattgtgaatgagactgcactcatatttggctctctgcttgtctgttattggtgtataagaatgcttgtgatttttgcacattattttgtatcctgagactttgctgaagttgcttatcagtttaaggagatttttggctgaacgatgggattttctaaatatacaatcatgtcatctgcaaacaggggcaatttgacttctcttttcctaatcaaatacactttatttctttctcttgcctgattgccctggccagaactccaacattacgttgaataggagtggtgagagggggcatccctgtcttgtgccagttttaaagggaatgcttccagtttttgcccattcagtatgatattggctgtgggtttgtcataatagctcttattattttgagacatgtcccatcaatacctagcttattgagagtttttagataaatggctgttgaattttgttgaaggccttttctgcatctattgagatactcctgtgtttttgtctttggttctgtttatatgctggattacgtttattgatttgcatatgttgaacagccttgcatcccagggatgaagccaacttgattgtggtggataagctttttgatgtgtgctggatttggtttgccagtaatttattgaggatttttgcattgacgttcatcagggaattggtctaaaattctctttttttgttgtgtctctgccaggctttggtatcaggatgatttggcctcataaaataagttagggaagattccctctttttctattgattggaaaagtttagaaggaatggtaccagctcttctttgtacctctggtagaattcggctgtgaatccgtcggtcctggactttttttggttgataggctattaattattgcctcaatttcggagcctgtattgttctattcagagattcaacttcttcctggtttagtcttgggagggtgtatttgtcaggaatttatccatttcttctaggttttctagtttatttgcatagaggtgtttataggatctctgatggtagtttgtatttctgtgggattggtggtgatatcccctttatcatttttattgcatctatttgattcttctctccttccttctttattagtcttgctagtggtctatttgttgatcttttcaaaaaaccagctcctggattcactaatttttttgaagggttttttggtctctatctccttcagttctgctctgatcttagttatttcttgccttttgctagctttgaatgtgtttgctcttgcttctctagttcttgcttctctagggtgttgattttagatcttcctgctttctcttgtgggcattcagtgctataaatttccctctacacactgctttaaagtgtcccagagattctggtatgttgtgtctttgttctcattggttt

SEQ ID NO: 2916 - DNA, 38492 bp, Homo sapiens
tatgaataattggattggctagagagatcagattttattgttcaaaactgggcaaaattggcataataccttggatcaccatctcaaaaaaaactttttttctggatagaaagaaaatatatcatttaagagagaaaaatggtaacttttaacctgtttacctgtctttcaaaatgctacattgatcagaccagcctggataacaacagtacaaagagagctggtgcatgcacttgccgccattaattaccgggtttaccattctttatgactttgtatttcaatatttaacagtcagagtacatgaggatatgtgtgcataccatacttaagaatcattttatgccaccatccacaccatacttaagaatcattttatgccatcagaaagacattttttaaaaaagattttcgattggaagactaactgaagtagtcaaatatgtcaacaataaatacagtataacaagaaattcctaagcttgtcaatggcttgggtcaaatttaacatcataattcaaaagcacccaagaacatatcctaacagtaaattagtagtaccccttcatattaaatgaactgcactatgtttaattgtaaatattgatatattaggcattttgaaacttaaataaggaagtagagttactccttgaaacattgtataaggaattttgtaagatgcattaccttaccactcacagttgcctgataccaactcttattaaaatcatttttttccatctgtggttgtcccatcccataattttaataatattaagatagttttttaagaaaaggtaaaatcatgactcattcaaatataaaccaaacccgtgttcaagattttatttaactcaaaatggaaccaggcagagaagataagaaaatcccagaattagacaccttagagcaggaatattgaaataaatgtgcaaaaggagcaaaacttccactgaatctctgagagaattcgcatgtcttgacaataattatttagcatgatgtcacttacctagtttacgtaactgaaaaatagcttttttagaattagttattccaggggtgttaagatagaatctaaactatgtagttttccattgaagcacacacttctcccctaataatataatgcacagcacctgtcagggatattaaccatacatacccactcaaatgcccctttcccaccaagcttattaaaataatagtttgtggccacaatttcttcccttctcattatccaatacacagcaatcttgtttcaaaactcctatgctgctacagctgtccacagttcatcatacgcattctttgctattgcaattttcttgaatatggaagattagctgaacatcattaagctcaggaaactctaaagaaaatcagataatgtagacaaaagtctaatttctagctggctgcagataccttgttcaagaagcgccggcaggatcttcttttgtacagctatgtagctttaattttgcacagctctagacatcagaactcatttctaaacacttctatgcagtcaagaataaaagtagcagaaatgcaagagagaaaagctaattcccacttggtgaaagacacttaagtctcagtgagcaaacaaggaggagtcagccttggtcacttccccctcaagcgccagagagcggaaacacaaagccaggccagtgtcactccagggattgcgggaacctagcaacgcaccatcctgggctcagcgtctacccacccctcacccgaggtgctctcggttcctagaatgtccagtccacaggaacggcaacacggacttgtctttgggactacaaccagcagagctcccgcctgccccatttcacctgcaccctagggcgcccgcctccttggctacagcccactgttcctagtgcccgccgactgcccaccctttcacttctcgtagagacggcgtcccgacaacgcctcgggaaagaacctaaccaacatgcgaggaagtggcgccaggctcgttctcaagagaagtgacagaactaaccctcagcctgcaatcctgaccagggccgagtcccgacgcctcggaccgcgcccccggccctctccgccccgccttccctcccggcctcagtccctctctcacagcactctggtggtcccatccgggcggcgggcggcacggatcaggctcctggagaaggcggccgagcgacatctccggcgaccctcagcaggagcgcgccgagtacggcgatcaaagtcccaggagactggagtgaccagctgcaaatgctctgggctgcgaaacaccggttccgctcctggccagagctcaccaatcagcgcccggctttctccgtcatttcctcctaaaggcaaagggaacctctggcggaagaggcttccggaacggacccggaaggggcaggtctgtgggcgggtccaatcggctgggagcctcgtggaggctgaggtgagtcctggaggtgctggttggggcggagagcattatctgcggctccgattttgcagattctggctgaggcgttgtgatgtcagcagcagccgagacgggcgtgttaaaggccggttgctagggctgggggaatcaggtaactacgggcgtccccacagcagtacttggaagcccctcagctactcggcgcgttgcgggtgctgagcagagctgcctgaccgtgcgtgtgcacgggctggcctgaggatgaatgaccgtgtgttcggtgtgtggaaccctccgtcaccctcccctgaccgaagactcgttaggaatgtgtggcaggtctgttgccacggtccaggccttcagtgcatcttggaaacatcttttgggggctgtaggttaggaagcggagatcatggggtctcggaagaaggtttggtcggaactgtcagaaaggaggcgaaagctgtgcacgtggaacaaagtgaacagtgcaagttgatgggaggtagtttaaatatcgaggcgatgaaaaaaggctgctagaattgggcttactcaaaggaagtgggcctcagaagataatattagttaaaagaagtagaggagaacatggatgtattctaagtaaaacgaataatatgaagaatacaaggtcgcgggacgaggaaggaaactgccagcctgacaggaaggtttattcgagaaatacgggggttagataggatgagtttttgaaactggcaaacgatttagccttttcaaggctttaggatagggaaagctcatttgaaaaattagtcggtagtattatgacgtttaaatgaaaagagtgaaaaacatggaggcggaggtctaggtggaaaatcagtgcagtaatccagtgataaagagctggaactgaaagtgctggaagaaagggatcctgtttcagagtaacagtcaggtggaattgactaaagagaaagaggcaagagaagcagtttagcatagtggttaaaagcagaaattttggagttagactggctggatgggatctggctttggcaattagctgctaaatgactttgagttagcaatttgccatctctggtctgagttccttgtctgtaaaatagagataggaagagtgacttcccttgtggtgttatgtggagaatttgtttatttatttttagagacagagtctcactgtcacccaggctggaggcagtggcgtgatcatagctcactgcaacctcgaacttctggactcaagtgatctttctcctcagcctccccgagtgcgtcaccatgcctggttaattttttaaaaaatgttttgtaggataggttcttgctgtgttgcctatgttggtctgaaactcttgactcctaggccttggctcccaaagtgctggcattacaggcatgagccaccataccaggtccttatggataattttttatgctcatatttacaatgtgctagaggcttttctaagtgctttgcatatgttagctcgtttcattaattgctgtatgtaattaaacaattgcataatgttatcagttactatagcgaagcactctctaaatcttggctgctataataatatttttttattaataattcaaaggttttaaatggttttgagcctgaagagctgggaaaattgtgtcttagtgtcagaagaaaagaaggggtaccagaagtaaggtaggcttggttatagacatgttaaatgtgaaactataaggattcaagtggagatgttcagtaaatattggaaactctataattagtattcatgtaggtgaaaggactggaaatagacagatgggagtccctggacctaggcatgctatatgaattctcaaggaaaacactgtagaaggaggtggtagatggccaaagacagacaaacataaggaacactacagagtctggaggaataagaggaattgggaaagaattaatcaaatggcctaggctagagcattatcaccatgttaatattatctttccttgattttaaattggctttatgttggtcctgtgagagaagcaatgaggccagtaagtgattattaccagaaaatattatcagagagtgagattgaattttttttgtgttagactaaaacagcatttgataattagaaagaccctgagagttaagccaaccaaccaaagaaacaaaaaacaatagcaaaaagaaacagctcctcaaaaagactgtaacttctttatttttgtgtgttttaagttgcatgggtgttttttggggaactttttactcttccatgtaaagaacagatgggactgatttgttatctccttcattcactcttgtcccttttataaataaccagtggattatggattttcagtgaatttaataaaagtcagaaattatggcatctttccaaaaatagtgtgccaagttgctcaaccattttctatgcaagggtaagtggctgctctgattttgaaatgaaggacagactttcatgtactagtagtttcaaagtgtggtccaagaactgcaatagcagcatcacttggaaacttgttagaaatgaaaattctaggccctacctcagacttatgaaatcagaaacaggtgctgggagaagagatgaatggtgttttctagcaatgttttcataagccctccaggtgatttggatgtatactagagtagagaaccactgtacaagaaggtaagtaccatgaggttagggattttgccttgttaatgtgtatttccagtgtctagaatggtgcctgtctaattggtaggttttcaatagatattcttgaaaaatatgttcagtctcagactgccaatctctgtgtaaaagctttgatgctggttaatgggcagaagtaaatcagtttagctgcattgagcctataatgtcagatatgcatgagtgggcatgacaacgtgactaatttggaacttgaggaatgagggattatattgagtcaacctgaataaaaaatgatgtccaggtattttaggtcaatgattcatttagagtaaataaagttaagaagtcacaagttacatgcttttaatgacatgatcaacagttggtgttgttctgggcagtggctaacacctgtaatcccagcactttgggaggccgtggcggatggatcacttgggtgaggctttcgagacgagcctggccaatatggtgaaaccccatctctactaaaaaaaaaaaaaaaaaaaaattagccgggtatggtggcacatgcctgtagtcccagctactcgggggctgaggcaggagaatcgcttgaacctaggaggtggagtcagctgtgagccaggatccaccactgcactccagcctgggcaacagagtgagactctgtctcaaaaacaaaaaaacagtggtgtttactaacctagtagaaccaaggcacccaaggagctgagttttctttgtttattgcacagattgcttcacctgtggtatcagacatcacaacatggggctcaccaagcagtactacgctatgttgctagtgcggtctttggcgttatcggcagccaaaaaggtaatattgttttgtgacacttcgtggtgagaaaggacgttatgtggcagtaccagcttgtgaacacgtttcatctgggacttaaggaaaggagagaaggtgagcctaaaatgaccagtttgatactgtttattggtatttgaggatggagaggtagtagaagtgggggggctctgatttatttatctgagtttttttgtgtctgtgcccttagaagaaaaatctttttcctttaggtctagctagcaagcatcaagttcctttgtgttcttcgccactgaattctgaaaaccacaatgaaatagagcttatttcttagatgtctatttgttggaatatttacaggtcattatttgcagtaatttttattcctgatgtattttttctctaccaattctatttttcaagctcgacttatgcttaagctggttataaaatattaggcatgtaaaaggaaggttagtctattttggcagaatcttttctaatatggataatgcccaagtgttgttaaagtagactttgatactttgtgtgactgattccctaagcctaccacttttgccaaaccaaatataggcattttgatattgtccattcttttgtgattcccaagaggttagtactttgattcttgttgccaccaagagtcctttgtgttaaaaccactgcagtactctgttgccacacagattattttcttataaaatgggtctcattaaaggaatttataaacctttattgaaaatcacgtagtgttgttctagggttaagaatagattaaagggattaaatttattttattgcctagggagtttttatatgtattacaacaagtagggctttggagaaaataattaagccttttcttaaatgtttcattgcctagtacaaaactaatttctatattaaaaaacttgaaatggattgtggagtttcatttttattcataaggtaatttggaattattggtgctcttaattttactgtgcctgagtattcctatgcttttccttgagttcatgcttaactcttctacattgtttttaatttttatgatttcagattcttaccttcaggggcttaaacaagaagttacttgcttatgcccctccccagatgggctacactagctgttgggtatgaggatgggtcgatccgaatcttcagtctcctgagtggggaaggaatgtgaccttcaatggtcacaaagcagctatcactaccttgaagtatgatcagctaggagcagactggcatctgggtccaaggtgagcctttgaatcagcccaggctttgatctattaaggaatgtaaggcttatgctgaagcaagttgttgacaaaaattgtcaggtaaaacaatggctgtcaatatacaaagtagtataatgatagagtgaagaggatgggtgtgaattgggtggtcattttgtttccttttgttcattttgtcatattttctgataaaagcctcttaagtgtagaataagatgaagagagccatgataactcttattgtggaagtgctacgcaaaacagtaaataaggaaagaaaacaaagactggaaaagaagagacaaaataattatttgccattgactctgtaaagtcagtagaatttcctgtatctcacaagtcatgagttagaaaatataaaagatccattcacaacagattaagtaacagacataaaaataccatgaaactttactgaagaatgaatagaagacttttatagagatataatccatgttcttgaatgggaagacaaggtattgaaagatggtagtgttttctaattgatttatatagctaaagctatgtttagacatatgttatatagatacagatatatttaaatagatatcttaaaggttttagttgttacttagaactgacctaatatggaaaagcaaaggaattggaaacactaaaatttgggaagaaaagaataaaaaacaggggttttagatattaaaatgtcatataaacccataatttaagaagtatcatatgatacttcaatgcaagtaccaatgcaaaatagattattgcaaccaaatggaaatctcaaaacacatccatgattacattcctaattagtatattttaaagacgacattttaataagtgaaaaatgatagattacttataaaacagtccttagacaattggctatttgagcgaaattttaaattaaagctttacctcatgctatataccaaaatgaaacaaagattaaagacttaatattaaaaaatagcattttaaagtaaactagaaaatatgtaagtaaatatccgatagcaggtagaaaaggactttattagcaaagaaataaattaaaaaaggaaactgttggtagattgaatacttgaaacatttgtacattaaaaacaagtcagaggacactgaaaaagttaaaattttaatattttcaatataaaaagaaaggattagtatcattcatctattaataacttacatcaaataagagatgacactctaagaatgatagacaaaagaaagtcatgaattggcaattaaaagagatactttatggccaataatcaccataaagcatgtaaaatatttctcatttgtttcataaaaaatgtaaattaaaataaatattaagactgaacattttttacttatgatattgtagtagtttttgagaaaactaataatagagttaaatgaatggggaacaggccttgtctacatatccctgctggttctatagatttacccaacctggagatcattttgatagtatgatccaaaactttaaaaataaacatatcatataacccaagagcttttcattttagtttttttaatcagagatacatacagaaatttgtatataagaatgttcacttctgcatatttataaagcagaaggttggaaactaaatgtctgaaacagaaaaatttttaaataagttgtgctatactttagaattgattattatgtgagcattaaaaatgtgaacactctggaataacatggagaaatggaaataatattaaatgaataaagaaaaggttgtaaaatgatatgaatggcatgttttagtcttctaataggaaaataacctggattatacataaagactagagcaataacaagtctggggattatttctggttggtgagaataaggctggtgtttattcccctgtactttcccatgctttccaaattttctgtaaggactgtgtattgcctttttaataattaagtctcatgtttgtcaagttgggccatatatggtaaagaaaattatttttcatctgtattatttgaccctttaggacacagatattattgtatgggatgtgatcaatgaaagtggtctgtaccgttaaaggggcacaaggatgccatcacacaagcattgtttctacgagaaaagaacctgctattactaggtaaagaaataatggtttaatttccagttattttctaggaagagagaatttgtttattccttactcatttctctcatgagcagtgtgctcatgcttatgcattagttttcttcctgttctcctgcattccttctttccatttcttctaagtagtatcgtagagctatccaagctatattatttttaaaatcatttttctaatttgtcattcttttttcttgatatcagttttctgtgtttcttagccttttgaaactcattatagaatgagctttgtctaccttctagtctctagaaagccaggaatcagaatatggagcagagggaagatatgaataccaggtgttaattcggcttgccttttgaggagagatgtactgtacttcataggccttctgaacacctataggatgaaccatttgaaatttttatttgtgtacataaaaaatcatcaaatatcaacaatttatattgttcaacctaatataataatgaatattcctaaagaatggccacctaggaaagctgggataccaaggtttgccaggcattaattagaggaaccatagtaatgactcagaaaagctgtgagcactaaatgctttaccaatggtggatttgtttctgtgggataggatacagtaaattagtgtcttgttcagataacacaggttctgtaagagaatgattctatagttctatagaaaaaatatatattacagcttagggaatataaaggcaaagaaataacactgtaaggggggttatatgggacggactttgtaaatcaggtttttgagcggtgtttttttccagtttctcatgaaggaggattatattagatttatgtagtgaggaggtagggaagaggtgtttgacaggagtagtagaggccattggctgcgagaggttatatttagggggttaagaacaaataataggaaattttgagactgctgccaatgagcctgactttgattctacagggaacattgactagtgcaaatattaaaaattaaggttatctgacagttgcacattggatgggatgagagacagcaatggacaaagagaccaaatgagaagctgttaaaataatccaggtagtaggactaagttcaggttagtgtacagaaatggactagaggagttaatacttagaaacttcacagagaggcattttcaggacaagagactaactggacaggaagacaagggagtgggagcggtctagatgtttccatggtagactgtctgaggggaatgccagtgctgtgatgatggaaatgatggaggaaggcctgatggatcaaattctgtattctttggtactctgcatctaaagtcattttgtgcttataggtggaacattttattttctgcacaggaataactacaaggaaagttagattctttgcttttcaaaagtaagatcagagagaatcggagctttagacattattgaagctatgttccttttaaagcaacagtgagttttggatctccctattcgttgaatgagttttctaaacaggctatatatttttttcctgtttcttcttttagtgggaaagataccatggtgaatggtgggaccttgatactcagcactgctttaaaacaatggttggccaccggactgaggaagtgtagggtcatgggcccagggaaataatgggaaggcaaaagggaaaaggtggtggtttctcttcccctttcatggctctttgtttttagtgcacacagtaattatcatatgccatttgagggacagtgaggctggtatgatggaagcaatgccagccattggagcagatactgcgctctgacatgtagtaaaaattggccttgcgtggtttttaattcctgagtttcatcattctaaataataagtgtccacttttatgaatgtagggaagtttaatgatattatatgtgcacacctagcttattgacaggtaagcagcacgtggtagctgttaaaatagttacttgaacaagatctattcagttgagttcagggactgttttttatatatctttgcatcctcagtgcttattcatatcaggcattcaggaaggtaatacctagaattaatgacaagaagattaaattcttgttgatttgcaacaatattattttcattatttaattcccggatacttgaagctgaaattatgcaatggacattagtggggcaccttttatttgctagacactgctaaaagcaaagaatagaagacttaaaatcatcatttgagtggattctagttaagatttatgctgaacagccttatcttaatttgattatacgaggttagagacaaactgctagtatcacaaaagtaacaattcaccgcaggccatttttttctctgtaaaagtgagacttctcttagtgcattttgaaaggttgtcgatatgccttttctttgcctttaaattgctagacattttactacggtgtaacgacttttggaatgtcatattatgctacctggaatctcttgaaaatcgtattactcaaattttttatattctataggtatgggggttggttctgttgtcagaagaaaagcgactcatcatggggcctcagacagtgaactgagggtatgggacatagcttatctgcaagaggtaattattcttaaaatcatgggcaatatgtttagaagtttcataagcaccttggatttagaatcaatgtaattattcagtacttcacatcatattagaaggaattctatcacaccaataacctgaacacttaaaaaagcttttcttccttatatgctcattatccttatttatttgagctcagttagctttaggcttacagcttctggtaatactaatgttttagtttgtggcactcttaatagatattcttggacctttgggtgtccatggatggccttcagaatatctgtgaacctttccctcaaatatatatgtagaattttatgtttataaatatgtatattctgaaaagatctatactttttcttagacattcaaagaatttacatagaagaaaagcttgcagaccttaggtttgctgaatttcggtgtgtgctgggtccagcagccatttcgatgggagttacattagtaggtaggggttatcttttctttatttaaggagaaaatgtatctacctgtcttgcgatgctttgcaattcctaatgccaatttgaattttttgttctataatatggtcaacctttcacctaatacagaaaattttgaagttagtgaagagtggggtcattattttttcaccattgtcactaacagtagtccttatgctatagaaagtttttggagatagtataataagtaatattttgttgtatattatgtagtcagtttttaataagttctgatacctgccttgctactgaagaggttgataagggagatcactgattagaagctgttattggccataagaaagatttctaagtcttaggattaagagttacctcctgggccaggcacagtggttcatgcctataatcccagtacttgggaggctgagataggaagatcacttgagtccacacacacgtttgaggccagcctgggaatatggcaagaacctgtctctacaaaaaatttaaaaattagtcaagcacagtggtgtggcctgtggtttcagctatttgggaggctgaggtgggaggatggcttgagcccaggagataaggctgcagtgagatgtgatcatgccattgcactccagcctgggcgacagagtaagacctgtctccgacaacaacaacaacaacaacaaaacaacaacaacaacaacaacatgcctctggaacatactatttcagcttttattttctcatttttataaaacagattgaagacccggagaaccagaccccaagaaaatcaaaggatcttctcctggaatacaagatactcttgaggagaggatggtgcctttgagacggatgaagcccctgaggatgtaattcattttcatttctaagtttaattgtgttgaataatgggaaagtaagaattgcagatttttagggaatcatcatttagggaatatttttgtcacttgcacttattagaattatgtttttttcagaagttcagagaacttacatctaaccttcatctgctcttgcttcttctgtagcgaatcctttcatgcaaaaagctggttccataatgcgggaaggaagagacagagttgtaaaccttgcagtcgacagacaggcaggattcttgcttgccatgtgagtaccatacttaggagaaaataacaaggacaggctgttccttccaaacactcattctttcatattcaatgtaaagatgactttttcttgctcatgttaataattcattatatggtactgtgtggacctataatctctagctttattagataacaacaaaaatattaataattactattaggttggtggaaaagtaattgtggtttttccatttaaaaagtaataattgcaattacttttgtaccagtattattattagcaaccattattaaatgcttgctcttctaagcaatttaagagcatttaacttcttgttcagccttcaggcaatgctacaagtaggaaatggtatcctcattttacagatgagatagcaaacccagaggattaagttgtccaaggtaatacaactactaagggaagaaaaataaatattgttgtttattttaattgagaattaggtaaattacaaattacctctccttgactcacattaaccttttcctttctagggaactgactctgtgctagaattgttttgtatcctttccaaaaaggaaatcagaagaaaatggataagaagatgaagaaagctagaaagaaagcaaagtatgttttcttatacttacattaataatgaagtatcctgggtaggccccatgttactgaaaaaaaactggttctttcatatttactgtcttatcaattaccattaaaagttaaagaacttgtgaggtatgataacccaaatttgtcaagtctcagagagacagaaaatcatctgatttggcaaatctttgatacctattctggtttatttaacatggttggattgttaagtgcaggttaatgagtttctaaaaagtcctgaaattagaaaaataaccggagacatttcagtggaatagttggaattcaaggaccttgttacaagaaattttatgggctattgcattcagaatccatttcttaaggtacctattaagtgaaataatactttatgacattgtagtgtacaaagcatttccacttatctacattgtttaattatcatggtaatcctgtgtggttaagtgacttttccagaataacaagtttgttggtcaaggggccagattttgaactcaagtaagagcaaagctgcttctagaaaataagagcatgatatacttttcttcttccctctagattacattctagcaaaggagaggggaagatcctgaggttaatgttgaaatgagtctgcaagatgaaatccagcgggtgactatataaaaacttctgccaaaatcaagtgagtaaaaataaattatctgaagttatagaaatgtaagctaccaagtattattggctttttcatgctatttgtaagctgtctgtatgaattaatatgtggagacggtggtcatgagacatctgtgtcacactctgctcctgttgtcctaatatgggcccactttttgtcttgtatttggattattatagtaccctttttagctagtcattactgtcttttcctgcagctaatttaagaaaaagaaaagtgtgtcccacgttcagaaaggtataaggtcacttataaagaatacatacacagaaccaaagtatgtatcagaaccaggattgagcctagttttttttttttttttttttttttacttaaaagcctactcagctactactaatactcggagcactcttttaattttttttgagatggagtcttgctctgttgcccaggcggagtgcagtggcatgatctcggctcagtgcaacctccatctctcaggttcaagcgatttcctgcctcaccctccgcagtaactgggattacagacttgtgccaccacactcagctaattttgtatttttaatggagatggtgtttcgccatgttggccaggctggtctcaaactccgacctcaagtgatccacccgcctcggcctcccaacatgctgggattacaggcgtgagccctgcacccagcctcagggcactcttacttgaaaaattgtttatagttattcaaactttaatagatagaggacattgtaaagccttttcctggaaaaagtaaaccttgtgagctaagatgtagctagaacatttatgattattttcttgtacaggtcctttgacttgattcattcacccacggagagttaaaggctgtcttcctgctgcagaacaacctggtggaattgtattcactaatccatccttgcctactcctcagcctgtcaggacaagcagaatcactattgggggtcacgcagtgatgtgcggactttgtcattcagctcagacaatattgctgttctttcagctgcgctgattccattaaaatatggaacaggttcgtgaaatgatgttttatatagctgtagttgtagtatttcttttaattttttttggtactcttaagggttagttattaactccttaaggcctaaatacaattatctttagtgcatttgggccattagcctgtggagcttagagaagaaaagttgccttttaaaatgtggtgcaaaaaaaaaaaaaggcaagcttattccatgtttaggcttgtaactgtacttggctagagaaaaacacacaaccatactacctactctttaaactaataaaaagcaggctgttattgctgcccagtaattgtaccctaatttctcacccttctttactttcccagatgactgttttataccttgcttctgttgtcaaatcaaatacctccaaaccttgaagctaatgatcatatctcccaccttaaaggaaataataaccctctctcaccccgcattgctctccagttactaccccattctctgatttgttttctccattctgtcttcatcgtctcccatcaagcttttgtccccactgtttcaccaaaacagtcattgtcatcagtgatttgtttccaaatccattgagctaaaagctttattttatgctttgtccttgaattgatgatttctgtctttgacacactctttgactttcattatttccccttcccttgctgtctgtttttctcagtcctcgctccatctttcttatctttatgacgtctaagtgttagagtgctttaggcagagtctttggaccttttgtgtatctaaactcactttatgtaatctgtcatgtagcttctctgtatgatgacacataaatttatatccagctttaacctcctccctaaacatcaattcatatatacaaatactttgtgtcaccacttggatgtctaattaagcatttcaaactttatgtgtcccaaaccaaacttacgttgttcatgtctccaaaaatcttcccacctgctatccttcagacttccctatcttaataaatgattacttgctaccagttgtagtctaaacctttagccattcttgattttcttttatttatttatttattttgagacagaggctcgctctgtgcccaggctggagtgcattgatgtgatctcgcctcactgcaacctccacctcctgggttaagtggttttcctgtgtcagcctcccgagtagctgggattacaggcgtgtgccaccacgctggctaatttttgtatttttagtagagacagagttttaccatgttggcctcaaactccgacctcaagtgatccacccatctcggtctcccaaagtgctgggattacaggcatgagccccgcacccagcccattgttgattttcgtatcccatattcatccaatctattagcaaatctatcagctctaccttcaaaagtgatcccaaatccagcctcatcttaccacctgcactgcactaccccattcaaaccactgtcatctctcatctgggttattgtaaagccccctgactgtgtccctgctttcttgcttgcccctctatagtctgttctcaacacagtagccagtgtaactttttatagtggaagttagatcacttccagtagttccatctcactctacctaccttaccaccttatctcttactactctccttttctgctccactagagccacactggtcttcttgcattccttcaacagaacaagaatgtgcctttcttatggctgttgtgctccctgttctttcgcctgaatccatcttccccatttatccataagctttttctgtgtcttatcagatgacagcctatcattcttaccctactccttgcactcttcatcctcttctcccagcattatgttgcctatagcacctaacacctgatataccaaatatttagatatttattattcccaaagaatgtaacctttatgagattaggaacctctgctgtttcatccactgttgtatctccagcacctgaacagtacctggtaatgtagtgggcattcagtaaatgtttgttaagtggacatttgattatatttgattaattaattaatgtttgtggtcctataaaaaatgtagggatatgtaatgtgtactaatttgacttgtaatccttcagactcactcacttcttggtaatggcagattggctccgtggagcccagcagacacttttctactctgcttttgtgtgatttctgttccttagatttggaggccttataaagtaaacaaagtttggtgctttttagtattttctcccatgacataattgtgtgtgagtcaagggtttttaagacttttatcttcttttatgttgatctgtcaagtgcattgaaacctacacactgacctctaaaatggggatgcagattctcttaacatggttctttattttttctttctcataggtctacactgcagtgtattcgcacaatgacctgtaatatgcactttgctcattctttgtacctggtgatagacaggtagtcataggaacaaagtaaatggagactttttctgggatatctggatcttttctactcaaaattcataaagttaaaaatctggttcttctttttagcatattggaaatggactggagctaagtaatctgggaggtgttagtttattacatattttgtttactgaagttttactttattttttaaaaattatgagaagaaaattaaaatcatgaccctgagataactaccattaacattttggtgatcatccttcatgtgtctttttatgggcgcatatgtaattgtgttttaattaatgataaaatatattagggtaataattaaatatattaagtacctaatatcatgcttggcagacagaagcattcataaagacaaactgatcaagtccttattcctaggtgctagtcagattgggagacaaccattggaaataagcagatatggatttggatttagtttctgccctttagaaataggtaatttggccgggcgcagtggctcacacctgtaatcccagcactttgggaggccgaggcaggcggacacaaggtcaggagatcgagaccatcctggctaacacggtgaaaccctgtctctactaaaatacaaaaaattaggtgggtgtggtggcgggcgcctgtagtcccagctactcgggaggtgaggcaggagaatggcgtgaacccgggaggtggagcttgcagtgagccgagatagtacactgcactccagcctgggtgacagagcaagactccatctcaaaaaaaaaaaaaaaaaaaatgagtaatttggagcaagtcacataactgctcatagtgtgttcctttatattatgggagacgacacttgctttttgacagcagctttcgtaccagatggactggtaccagcctctggacttactagctatgtgaccttaaccctgttagccttggtgttctcgtggaaaatgacgtactgacccatttcacagagatgaagtatacaaaactcttagcagagaaactagcctgcacgaatagctaatcgataatagagctggtagcagacatagcagtagtgattgtaccagtatgagaataaaatggaacaaggtctatggagtgttttgaaaagtgctttgcaagtatttgcattattattcccataaaacaaagccatatgtacatgagttttattacaaaatgtatggtcacaatggatatttcttgcttcaacaaaaaaatgtaggctggagagattttaggaacatgccaggaaacagtattcacatctcaaaactttccttcctttttcactctttcaacaaagtccatctctgatttgccgtcgggaaagtagttttttaattgcttaagactacccatgtgctaaaatgcaattgtcggcttactggctgtgctaggcaattaatgtacattatctcattaatcctgacaacatctttgaaacattggtgatataaatttcattttacagatgaaaaataggttcatggggatgaatttaccaatgggcacaaagcagacctggtactcaagtctttagcttatgctgtctgtaccaccttgtgcagaagctcatcgtaaaacaggctttgcctcttgtgtgttacatgctgacaccatgactatggcatatacagacctctaaataggaattttgagtgattgctttctatgccattatgatttttttttaaattcactgccttccttagtgcgtaggtagatcccatttcttattgtcaatgtattgcagaggaggaaaccaaaagcagatgaaaagaggtggttgcttaagccaataactatagaggatcatccgcttaaaggattggcaaactttaaaggcttttaggtttgcatttgctattttgtttattctgatttgcctatggcatgatattttccttgtgaagttgtgtaaccaatgaaagtaatgcatccagtactgcatgtggtattattccatacttctacactatggtagccctgccaaggttaacccagcacatcgtaggggatttaatagtatttaatcaggtaggaaatacagaacatggaatgtgggatcctttcctaagcaatggatcacatttttgcagcttggttatgaagtcttttctaaattgtgagtcatgaatcatggaggttgtacgtatgttcattggagctgtgctcattttgtgtcttccagacagggaagctgcagctttatgacttggcttcagggaatctgctggagacaatagtgcacatgatggagctttgtggtccatgtccctctctccagatcaggtaactaaaccagttttaaagccctggagttcagccctgtggctaccctgatttctctcagggtttctttaagaaagcctgaggtttttttttttttttggtctaatctttagtgtttgtatatgatgcctcttataaatgaccacctgtcattatgaaatgaaatcttgtttggctacttttgcttatcgcagcgtgacatcaaattgcttaccatcatgatttttttgccaatgttttgtaatacttttaagggggaatattctcttgggcaacatgatgcagagaactgaatagactttgctgctcccttttttcctcaaacaaacatctatgactgtataagctaagtagttttagcaagtattcagcccttacaagtcaataaatatgtgctcaccttcagagcagttcctggcaaaagtagcttattctaataatggtgctgttgcttagaaaatcttgagatttttttttttgacaacccttaagaaattttggcccatttatttaaatattctcaatgatagacaattttcatccgtgaaagtagaacttagttttggaaaaaatcactgaagtttagagtgtttaataccacttgggtccaaacgaaacagctgtgagtctaaaatagtaataaatcttgcatttgtagagtgtctatcttttccataaactgtgtggtctttttttcaacaaaactagggatttacggaaagttgtttcctgtgttataaatctatgagggacagacacttgagatccagtgttctatgtctttacactaacactgccatgtaatgagactaattttcttgataacggaaaacagcttcaaactattttaagtagggacattgcaggactaaatttatatccttctgaggtgaatacttaaacaaatctagattatccattctatgtatatttttcaaactggtttactgagagttttgtttcttcttgatgctagataatagtataactagaacttttcattagttattatttctcctatgttagtcgatggtaggaattttcacataaggtttgtggcagcagacccaaaagacagtgaaaggggctagggagaaccacgtttttcttaatttttatcccatgacgttaaataaaatactttcttagacttttaaaatgtatcttcatagcaaagtttttatgctaaaatatttttaattgaaatttcatttgattttcagcgtggctttgtgacaggtggtgcagataatctgtcaaattctgggattttgagttagtgaaagatgaaaatagtacccaaaagaggtggtagacattttttgtgtccattttttggagtgaaaatggggagctatggaatggcctttgacgtcttatatcatttgttgtgctctaaagagttaggatttgtctgaatttgtatactatttattttttcttgatgttttttgtggtgctagactttctgtgaagcaaacccgaacttgcaactagatgaagatgttctgtgtgtcagttactctcccaatcaaaagctattggcttgtctttgctggactgtactgtgaaaattttctacgttgatactttaaaggtacagtggtatgcctgcggatattttccctttctgactgactgaccttaagaatttgggttgaggcttaaagaagtggccttgactgtgcccagcgatagtacatttctaaaaatgtgtgtgtgaacaaagcaatgtaactatgctagggaagctagcattttaaaataattctatggttcatgattttgtttaaagcaagttatatttcatatgttcaaaaaatcttgtggacagaaaattcttcatactaagtagttataagagcattgctaggtgtcctgggcagtgatttcacacttggtatatattaggatcatctaggttgcttttaaaaatatagattactgagccctatacccaagagttgataggaccaggttgggcctgggaaatttttttgtgaaacaaatgccctggaacttttcagtgaggagatacagagatctgactgaggcagtaagcttctgggggcttccttcctccactatactgcagtattcttggcaagcacatggagggtctgtgtagtggacacagtactcctgccaagctgtcttttgtgggttgtctttgaaaatacagatataaagcaatttaaaatgtgtttaaagttatattttagacctacatgtaataaattatacccatattttatgacagacattaattatgtttttttgatgtttagttttttctgtcactgtatggacacaactgcctgttatatgcatggacatctctcatgtaagtagtttaaatagtgtctcagtaattgttgtcttttttacagcagatactttcttaattctggcttgatgtcttcatcttagatatttgtttttatcatcattctgttatatatctttctccaaaaacagtctcaaattaataatattgtatcttatatatattactttaatgttttcagaataattttgcaaatatcatctaatcaatccttataaatattatctctttccctcttgtagctctcccaaatagtactttatgtttaaaatactataattggtagagtacactaaaatatgaaagactttaaaaaggcatcctttttattctgaaggataatgctgctgaggagctcggatttatatttggatagttacgtattttacactatgtagacttttggtctcttgaccaaaatcatttatttcccaataccagttttgattaggagtggcaatgtatattaaaaacaatgtctattctgcagagtgagacccgtctcaaaaaaaaaaaaaaagtctattctgtgtgaaaggagttgacctcatagctgttgtggtcagtgcactaacaaagttaagttacaatgttaaatgtatttctttttttttttttttatgttgacaaccatttggaccacgcattgaaataggagagataagagaaatactgtagggaatgtgggctacataaacattctagtagagtctttctcagcttctcttctgttttttctcccactttctttccaaatcccatgccagagattagaaaatctttttcctatctacgaagtaaatagataaccctatgtcaaggcacagcactgccctgtgacagtacgaaagttttaagccacagagttcgtgcttttacttaacaagctttttaagttcctctgtaggtaaagcaaagaattcagtgtttttagtagagatgaaaatcagttttttggcttcattttaattgtttgaaagaaatgggttaaatattctggttagctttttattcatatacggaattcaaaatcaaggtagtgttttacttttatttctcataggatggagcactcatagcaactggctcgctgataggaatgtgaaaatctggggtttggactttggggactgccacaagtctctcttgcacatgatgacaggtatgtatagtcttttcaaatgtctccctttgagtcacctgtaattatcactttccttgagcatctgtgtctatttttcagtgttctcaggcagtgatacaagtctaaaatatagtcagacaccctagaactagctagtcaaaagctatttatgtgtgtaaactctttttactaacctggaatttgatgacattttaatatttctgtcacttttcagtgtgtgtacctacagtttgtacccaagtctcacctcttcttcactgccggaaaagatcataagttaaacagtgggatgcagacaaatttgaacacatacagactctggaggtaaccacatgcttctgtgcttgcttggtacttaagaaatacttttaagaatatttacattacccactaagagtggtcaatgaatgaggtattctttattttttttttctcctccagggtcatcaccaggaatatggtgtttggctgtaagccccagtggagactatgttgtatcatcgtcccatgacaatctctgagactttgggagagaacaagggagcctcttattcttgaggaagaaagggagaggtaagaactttaggcttggttacaaatatgccagtaggtatctgacaggctgtcctagtgaagttttctgtctagtgcagttacacctgatgcattgccaagtccaagaaccttcagagatcttttcaagaccattgtcacccatttcagaagctaggcagagataaagatgccatagggtattatgttgtcaaaggagcagcttctcgcttcctcatttctcttcatatagagacatgtttttttctctcaaattaatgtatatctatctcatggcaggaaagagaagcagaaatgaggagagtgtggccaaagaagaccaaccagcagtaagtaaattttggggaccttgaattatgccccatatatagttatcttattgaaattgactataatgtccagaatttctaatgaattaaaattgaggctagaagttgcaggtatcaccagctgataaagaatctgtgtaatctttctcttcaactgtatatcctaattttgtggttcaagtgattgaccaaatttgctacgaataattattctgtcaattgagactttagggaattattttattcactgtagcacaaaataaaaattagaaaatttggatattctctttttaaacatttgcaggatgttcttacaatatacatatgctaagttctgttactggtagctgataacactgttagtattttcataaaatataatagctgttctcatatggatgtaagattaatttatcagctctttaactcaacagtcacagtgttattcaaggatttctttgtttctggcaggttccaggagagactcaaggtgacattactttactggaaagaaaactattgaaacagtgaaagcagtaagttgatatagaatgtgtatctcgttttttaataagatctcaactttttagtaaaagttttattctgtatcaaccgaaagccatttttttggcaaaaagttgatgagatttaaagatggggattataacctgttccttctcttgtaaccaaagatgggagtagtcctgaatctctttgatcaatatgtgctccttcaggtgttcctgggacctgccctattcagagtgtctagatatcatcccacctgagtcatgacactcagtctcttccctgtacattaaaaaataagaaaaccaaaaatgtctttaaagctttttggcactctattcgcacgtctttattaaacagattgaagctatttcatttggcaatttctggtcagttcttccagtttcagtgtcctgggatgatggagtatgttgtgatgattctttcctttctcatcctctgtaggctgagaggattatggaggctattgagttgtaccagaagaaactgcaaaaatgaaggaacacaaagccatttgtaaagctgcagggaaagaggaataagagagtacagtaagttacagtatcaataaagggaattcccaaggagaaaaaccatgttttgggatttattaactaagatcaggatatgcaataaatggaatagaatctttccactcactatattagaagaaattgaggaagtgtgggaagaagggaacttggtcttaatgaagcgaaggaaaggaaattacagattgaggtgattattgtcttgagtagaaacccacgttcatgttggtttgggaggcagggtaaccatttcagatttctagataaaatacattgtccaactcattcatgagtactatagaaactaacaggtttgataattcttttacactctgtcagtttttagggtctcttttttcccttttcaaaattataaaatacagttaccactctgtctatacaagtgctacctaagtctcagtttttttaatgacttgatttaataatttcttcataggtccacttcccagcaaccccatcctaatggcttatggcagtatctcagtgagtaaaatgttaacggttttcctttgtttattaaaaggttacttacaaggacaagaaaggaagtagaggattatgatttggggatggattattgggaatactttgtcttcaaaagtctcttttgaatctggcattctctaggatattttgtatttcaaaaggaccactttagtgtgacttcccaagcagcctttttggttggactggactggcattcttctgttttctagtgcctgtttatgttcatgtccaaagccctctgaagattctgttaatctaaattaacttttgaatcagccttcagaggaaagttgacagaaatcagtctgatgagataaagaagagagagaggggaagagtgatggagaatgtatgtttatctagtaatctctaattagtattttattgcatgtctcatcacagaattttgtgagtcagggtatcttcaccttatagataaggaatctggcttgacttgtagctagttggtaaggggcagagttcagttgtcaacccagatctgactgactctaaactcatgagatcttgccattttagaatactttttctgaagtaagaaggaggggttcctgttttatagagatagaaattagagaactttagtagaaaccaaccaagagtatcactaatggtattaaccttcctttatagccttcagcttatgtattagagatttttaaagggatcaagtcgaggtagtgagtccttgcgcacaatttttgtaatctgtcagcaaacatttatgaagtgcttatcgaacgggaaataaatagaaattataattgatggttatcttataggtttaactatatcaagttttgatggaaaataatttataatgttctttttgaagtgctagaactaggaagttcctctaaagtatgaagagagatgcttttaaggacaaataaaggggagtgatttatgttgtagcgatgaaataatatataattcaattagaagcaccaattgttaatttgttttatattttgcttcttttctatgtacatacacaattggaatattatataaagttttatattctgttcttttcacatatttcctgaacatttgtttgttgttcatattcttcaaaaaaaaaaaatcattgattcagaattattccattgtatgaataattactcgatattgcatttgtttctccttttggctattatcagtggcttcactgaatatgtttacacatatatctttgtcatcattattgttatttttcttaagagtcctagcagcctaataactgaccagtaggcataagcttttaaattttatattgccaaattactttccagggtgattatactgatttttagcaggctttaaaaatttgttgccagtgtgtgagccaaaaggtaatattttattattttcatttcttttgactttaatgaagttaacatttcagcatatttgttgaccatttgtattttgtcctgtgaattttagttacctctttttgctcttaagtattattttactggtttttaaagaattcttgctggcacagtggctcatgtctgtaatcccaacattttgggacacttgagaccaaaagtttgagccagcctgggcaccatactttattttctttgtcatacatttttgcaataattgttatatatttgtgattttccttttgattttatttatgagtttgaactactgaaggctatcattttataatgaaccacaatatctacatatatattccttacaagaaacaacacttgtcttaggaaaagatgaaacttcactacaggaatgtaaaagaaaattgattaatgtggaggttacaatcatttcaagataggaagattctgtgttttaaagatttaacttttcctaattaataggttgtaatcccatttgatatcctcttaagattttaaattggaattgatgaaataataatactgagctagttctagagggaactattttcccagattaaaaggctacaaaattagcaaaattaaatagtgtagcattggtgtcaggatcaatcatcatgtcaggatcagtcatcataatagctctaatggactcaatatatggtaaaagaatatcatatgaagatggaatattcaacaaaggctttggagatattgtttatctggaaggaaaaaaagttagattttcccatcatgccatgaccaaaatgcattccaaatagattaagatattaaatacaaaaaacaaagagagtcatcagcttacagatgaatatttaactctaggcaagatgtatccaagtataaaatcagtagaaaaataataaagggaaggatttaaaaattgaccatgttaacaacgttaacaaatgtggcattttatatttattttttctttttcagtgagctggaagaatctctacttgtgctgccttttcttatgtcccagacattcttaaactctttaacgaattcattcagctgggctctgatgtgaacttatatgccggtgcctcttcttcctccttaggtaacatccttttccaaagaatacatgtctgttcagcagaactgcttcagtagtaccttaactgaagctgtcaacactttgggttaagaaatagtatgccgaactcggtggctcacacccgtaatcccagcactttgggaggtgaggtgggtggattgcttgagcccagaagtttgctaccagcccaagcaatcagtcttgctttaaaacaaggatcatgatgacccacctctttaagtaagaagtcatggtaatacattctcaggaatgcttactcagtcataggcctccatgttacaatcttaagatagctctggtttagtcagtttgccaaaagccaattatgattggccagtttgcctcatttgttgtttctttaagccaaccttgtccagcctgtggcccgcaggccacatgtggcccagtatggctttgaagtggcccaacacaaatttgtaaactttattaaaacattatgatttttttgtgatttcttgttgttgttgttcatcagctatcattagtgtattttatgtgtggcccgagacggttcttcagtgtggcccaggggagccaaaaggatggacattcctgttttaaagtgtttagtgtaactaacaggttttgctttgtcctttaccaacattttaagaaagtcagtttatttctcttgtctctacaggtgcaaatggaaatgtaggggcatatatagaggtaaactaaggaacataagcaaatatgttcattaggctatattcttacttatgaagattctgttaataggtagttgaaagaatatatgcacaaaggcttgatattcttctcatctctcaccctcattctcaagcggtacagcagagaacagggatggagacaaattgaacattccttcaaatactgttatgaagaaaaaactggtcagccaatgccaaatagttaaacaggtatatgtagtgaactgaccaaatggtatttggtgaattggcctggttttatgattcttaaccctccatttcttatactctatcaggatagtagcaagagaagaagaataatatgttctgttgccatattcataatttggggaacttgtaaagacataagttcatatttaaccatgttactaacaatttttttttactgcttggtatacgtgctattgaattagggttgctggttctacgagtaacactgtgaatacttaagcgtatcagaggcttatggatgggtactacctgacaggtatggtagggtcatcaaggaatcttggtactctaggtcagagtttgaatctcacgaatgtctcttttttgctgtggcttattagaagtattaatgcatctttgttaagttagcatttcttagaaggctcattctgtcttgagttttccttaaagtaccactgtcaaaatctgtagccactggcaggttgctgggctgaagaagagcctttgcaaatgagttgaatgtgtcataaggtttaggacagtattttttaattgtcatcaaattgaactgaatagtagagaaagaaacttctttggctttttttttttttttgctcgaaacatttctataatgtatattttgttgttgctttgatattgtgtctgtttatgtttctagaagggttaagtagggctagaacctctctgcaacatggctgtgttttgttttctatcaggattcactttggacagatcactagcaatcaaatgcttgtgccagtgatagaaaattaagggaaacaactatttcaaaagtcagccaagtccgggtaagtgtctttgtataagataaaataatgaggcaaattcctagtgtgatttagaaatagtatagtatgctgtgcttgtctttagcaatacccaccaccgataaatccatatttgagatagtttttgttagaattgtaggaatagaaaaaacaaacaagaaaagttcttaatgagggaaagataagtaacaacactgaagctttggttaccctaactctcatacgctgctataatgaattgaagtgggagaaattttttaatatttcttgtattgcactccaggatgttatcggcttcaatatggctggtctgattatctcaagagggaatgcgaggcaaaaagtgaagttatgttttttgctgatgctacagccacttggaagagaagaagaggaagaggaaaaagagggagaagttgattctaacgttacttagaactgaaatgtggtatctttttttttttcaactttttcctttaaaggactcctaactaagcacagaagagttggcgtcatcttaaaaataccaaataacagaagatcgcattcagatgatatcaggatgtggtttccagctttgcctgagggaattccaacatgagattatggctggctccatttcttggacttaaaatgcattattagtttaaaaatctttctgtgctccaaagcttgagccttgcagctcaagcttgttgttccctttatattctagcagggaataataattgttttaattaggtatttgtttcattggagttgaaattaacatttcaaaagttttcgtatttttttatggcagatgatttgtcatttatttatattaggttttactgcctattggacaaccaggtgcataattgattgccctttggccataaaaatgcagtgtcatggatcttgagctaaaaaggactgtaaaaattacccagaacagcgtcctcagacttaaccttctgcagttatgtctgtatataagaagattctaattgctaactgtttatacttttctgaataaaaagttgtttctaattaaaaagtagccaagctaagatgcctggctgggcttctgaggaattatacactcgtgtgtgtgtgtgtgtgtgtgtgtgtgtgtgtgtgtgtatgtgtatgtgtagtacacatacatatatatagttgacacttgaaaaatgcaggtggtaggggcactgaccccccctacgccccgcacagtcaaaaatctgcatataacttttgattccccaaagtcttaatactagtagcctgttattgactgggagcctgactgatgtattatatatattgtatactgattcttaaagtaagctagagaaaagaaaatgttacttagaaaatcataaggaagagaaatatatttactgtgtttatcaatactataagtgtatgtcatctgtttataaaatgaattgctgtctggattggcaggcaaccacagccgcagacctcaatctgtggtacttatcaagcacagctttttcttgtaatgtcatgacttttctctgctttttgggagcactgtgatatgcatttactggggcgatgagttgttcatgcacaggtgattagtgtcacagcattttaagtgctacgcacaacacttgagctcactgcatagcaacaggaggtggctgtgaaattatttcagaacatactgtgtattacagttcattttatgcagctatgatttaatactgcatctttacatattttacatttctcccaaaactgtgaattgcaccatgtatgatctgtatttgtgtgtgtaatgttgataatagatttgcgtgtattttatggcagtaaatgataaaatagtctagtactacatatattttgtgcattcatgatataactacttttttcctaatttttttcatctgaacttttctcattgtttcagatctccaaaaatttttccaatatatttattgaaaatatctggctgcgtgcagtggctcacgcctgtaatcccaccactgtgggaggccgaggcaggcggtcacaaggtcaggagttccagaccagcctggccaacatggtgaaacctcatctctactaaaatacaaaaaactagctgggcgtggtggcaggcgcttgtaatcccagctactcaggagctgagacaggagaatcacttgaacccggcaggcggagattgcagttagccaagacagtgcaccagcattccagcctgggcaacacagtgagactccatctccaaaataataatagtaaaaaaaatctgtataacagtggagccaagtggttaaaacccatgttcaacggattgtctatgtatatcttcatggtaaggatttggggaatgttctaggaaaagatattgacagataccctgggtctgggcttttcttttggggaagtttataaatgactaaatcatacttcttgttaaggcctgtttagatgttctgtatcttcttgagacagttttgctttttatcttttttgttttgttaatcccaaagatttaaaactatggtttctgtctgaatttggtcattgcaaccaattactgtgttgtggggccaccattttcttctaggctcagatatgcagtccttgtggcttccgatttgtgtcccaaaccacaagtcttaatgttcttgagcataacacaatcactgaaggagtaagggatgcagtggtgttatttgttgggcagaataaataagtgaattttggcataagtttctgaaggcataactatgaaggcaagagaataggcaggcaggataatgcattctagtgctttccaaggagtcagtgttgtttaggcagctattcctgccaccagggagaggagtaattcttgaaaaaaaatttaattttttatgagaacagaagttgattcaatatccttcttgagttgctcatcagaacataaatgtcactttctagtaacatttttgatggtttccaaacaaaacaagttccaggagggcattcgagatgtatacatcatcaataattactcttatgttaaagttgctgttttcccgtagctttgccaccatttataactcaaaagcctgatagtgctgggaatgtaaagatgtttctgtctgctaagtgttatactaatcgaagagaaggagaactttatgataaagtgacatgtacagaacctagccaagttacaatttttggtcaaaatacttaaactctttaactctaaaagtttaaggtcaataggtgcattataaagtaaattttaagcaggcaaatttctagtcattaagtcagtattcattgccttagtcagccattggctgtataaatccttaatataaaaaccatctaatgactaatatctcttgcatattgtgaagtaagttcctatagaaattctgtagtaccataaagaaaagccttttgagattgcagtgagctgagatgtgccactgcactccagtctgggcaacagagccagactccattgaaaaaaaaaaaaaagctcttgaatgatgtattgggagtaaaacatttaggcttatttttaaaaatgtatatatcatccacttagagaaaatatgcttaaaaattttgaaattcactggctggaagctaggtgtttgtatatttggtattaaattgtttctcaatggcaaatgtcataaattatatctcatttaaagatatctagcaaatctccagcagagatctaggacagtgcccaggaaagcaatggttctgttggtaggtacaggactgtatataggactctattcacttagctgtaaatgatgagctgctcaatgcagccttttcaggccagattagtcttcagaaagagagggaggttgtgagagaagcttaatgaagaaaccacattggcttacagttactgtctgcaatccacccccattctcacaatttaagctcctaagtttgagatggggctaaggttcttaaaggtagtatcacctatattcaagtcctttctctttatttctgaggtttttgggatccaagcagccctggtattttttagaacacagtacacattgtgtaacagtcactgagcccaactcttacatagggccggcagtgttgcccttgtgtatcccttccccttgagtatggggtcggacctagtgactggttctagtgaacagaatacagtaaatataatgggatgtgtcttccaagattagggtataagcactgaattctaccttgcatgagcattacattttataatatatataaagaagcaactatatagttatttaaacaaatattttctttttttttttttttgagacagagtctcgctctgctcccaggctggagtgcagtggcacgatcttggctcactgcaagctccgcttcctgggtcacgccattctcctgcctcagcctccagagtagctgggactacaggcacccgccaccaccttggctgattttttctattgtttagtagagacggggtttcaccaagttagccaggatgtctcgatctcctgaccttgtgatccacccacctcggcctcccaaagtgctgggattacagtgtgagccaccgggcccggcctaaacaaatattttcattcattcaggccaggtggctttaggtttctgactataagaagaggggaagaaacctggggtctaatacctcaaatttgaagcttgacaatcaaattcccatttattacttactgtacctaatgtggagaaactttacgaacatgaagactccaagtgtggaggaataaattgtagaagttctctggaccattggatttcttttccctggggaaagtcttttggtcgtttatcataattgctgcttgttaaaacaggtaaatacttgttaagggctgtgcttttcatgactaaattatttgcatatataaacctaaaaacattttagaatcatagaatttcttctctggcaacatcagttcaattttaggtaactgctatccaatgcaaattctgcatgctcaggcttgggggttagaggatggatatgccaatgctagaatgtcttctgttctccctagtgtacatttctctcctaactgtgactggctttcttaaggagccatcagtatggtcaagccccaaaccatatctacatcagatttcatgcttttttttttttttttggtggggagagggacagatcattgttgacactgtaagtaagtagataaagatctgataagattttttgccctttatctgtgtctgacaggttctctctaatctatagcagggaaatagaaaatttattataaatacaaatgatttcattgctatgatcagcagcatgactcaggtatttgcatctaataacctgtgtggagagggtaagggcacttgatttagtaccagaggaaaaaactagttctttggctagtttccttctgtcacaatggaaaaaccctgcattactcaaaggaagagaaaaagggaggggaggaaggtgagaggaagggagagagacttcccagtgaggactttcctttcctattttatattttgctccattgtacttactgccatcttgtttatggtttacttactttatgtattgtctgtcctcccactggaatgtaagctacaaaaggcaggcgtttcggcatctttgaaagcataaatgaacaaatgaactaaacttcattattgacatcagtgctatctgacacaagttcctttaactttctccttcacctcggaatattgaatcatcagctatcttcagcttctcccttgccaagactaacccttcagctctgtttttattattcttttgccctgttttggatattgcagtttcaatcacttctactcattcatattttaatatatatcttctgctccactctcttcagcctacaaacatgtaggtctacattaactgaaaatccttcctatattctgttgcatccttgagtaacatattctcttgctctttccttaataaattttcttgaaagaatatccataactaatgtttctgctttcttaatacagtcttctttaccttttgcaatttagtttttatcccaaccaaatttaacactttaaatctgaatttctttgacatctcaatagcatccgtcaattgtgtccgtcttttccttgaaattcttctaaggcttttgaagtatttcaccattttctaattgctgcttttgtctccactggctcttttcctcctgctccctaaaccgactccagatttctgttccttgcccatacattcagccatacctctgtgtaaacgatgcttaaaattattatatctccaattctgacttctcagttgagtctaatattacatatacatgattcattacctcagcccaaaactttgaagttgaactcgagtcctctttcttccatccatcaatggcttctacctcagattttgcagtttccttcccccccatgtctttcattcatgtccctcttttatgttgactgttcccccactcccagttcttgcctcacacatggcccattcaggtagacttctaatggtacttttacacatccagttgttccctttgacatgtcctgcacaataaccctggattcatcttaataaagatatgctgatcattcacccacagggtcaggaatctgcagtggttcactgctgcttaaataataaaattcaagcaaggatttaagatctttcataacttgactccaacctactttcccactatattcctaatctcaagcttttggcaagttgaactccctgccaatcatcccaaacacctggagctttcctttgccatggttttgttcattatttttacttaaagttcccgtcaatcaagttttcacatttataagatccagctcaaaaatcaaataaatagagaactgtaacacaagcagcacacaatcatgccactggagaaagtacaaaatagaaataaaatgtgaagactttatttctgctacaattatataataccttttaagacagagtccaattatccatttttatatatgataaactatttatacagtaccttggaggtaataggttcttgatatctatctaatatctgtttggctgagacactgataaggaggaatgcatgcataattcagtgaatacccaacctttataataataggtatttcctatccttccataaaattataatttttttgtgatagatacttgctgttttatattctgtctgatattccgtagatagccaataacatttacatttattcaatctgaagttctgcacatatactatgtgtcaggt

SEQ ID NO: 2917 - DNA, 77358 bp, Homo sapiens
tagagattagctgtagagataaaaaggccccatttttgcctcacagctcttacaactcctagcttccactgacacccactgcacccattctggcttatgcatagggcattttccaaagaacccacctcaggattggtcaagatgcccctgataatactgcagtattttccaaatctttcaaggaaataatctgtgtgacctctggccggttgcagtctgaaacacaggtttccccattggaaaatgaaaaagatgaaacagcttgaggttttccaaacagcacaccgccaagccttcatcattgagctgatgcttcagaatttggtgcctgacaaagggagccaagtgagagccgcatcctcactttgatcaaagcagcaccacttccaagtgtcatttagcagaggcccataacaaatggtctccgaattgcgagggcttgacttagggctttttaactttgcaatggtacaaagccatgcacattcagtagaactagactttgagtatcataccaacattctgtttttcctttcagtattcaatagattacagagatattcaacactttaatataaaatcggctttgtttaggggattttgaactgcagggtatgtcagtgtcctgagcgcatttttaggctaggctagctatcatattctgtaggttcgatgcattaagtgtatttttgacttacaatatgggttaccggaaggtaacgccatcgtaagtcgaggaccatctgtacgctgttctatggggctcagggtggaaggatgactctgcagctaaaaaatgatctgaagatcaggtgatgttaatgggtcacttagttctacttgtgcttctgatatttaggtggatacaaaatacaacgcatggcttgaacgcaacagttacccagtgattgaatgaagatcaaattataacaatggaagttagtagccttaacttcttattgcaatcctaagtaggtgctatatttcccaaagaattacctagatttccagcttacctctgacacaagggagaaaaaaggtaatactttccttcctattatagcattctagatgaccactgattcttatcaggcaagctctggaaattccaccctatgtaacacaaagaaatgtgccagcctgggcaaccaagtgagaccttgtctctacaaaaaaattaccaggtgtggtggcgtgcacctatagtcccagctactcgggaggctgaggtgggaggatactggagcctgggagatcgaagctgcagtgagctgcgactgagccactgcactaaagaaagagtgagacgctgaaaaaaagaaaggaaggaaggaagggagggaaagaaagaaatttgaggtttatagtttagaaaacaagagttactttgatttagagtatcattttgttcatattctaagtggagggaaaaaagtagtctacaagtcaacatgcaagtcaaccatttatttaaatatgtatacaaacaggctgcaagccacatggtagctatgtctggtggggttcaaggccagatctttagtccacagaagataaacacaagcccacaagggtgggacactgctatctcctcattgtcttggtgaaggtgagctggagcaactattcaggttagcttgacacacaaatcctatggatgtcatagacattgttgcgttggtcttaaatcccaattctgtgtttaccaaggaccctctgatctcagtttcacacctgagacaataatgtaacaagataatgtccacattacactttactattttaatgagcaatttggtgctctgggttacagatccttggtgggatcatggtgtgaattgattactcagagaatagccacgcttttggatgcactaaaaagaaaaatccaggccaagtgtggtcttaacacctgtaatcccagcactttgggaggctgaggtgggtgatcacctgaggccaggagtttgagaccagcctggccaacatggtgtaacctcgtctttctaaaaatacaaaaattagctaggcgtggtggcacacacctgtagtcccagctactcagaggctgaggcaggggaatcacctgaacctgggaggctgaggttgcggtaagccaagatccaccactgcactccagcctgagacagagtgagactctgtctcaaaaacaaacaattcctaacatgaaaaaaaaaaaaaaaaaaaaaaagacagtctcccccacaagccctgaggccagaggttccatctcaactgatatcagcctctcttacccctcttaccacactaactgccacccacaggactgagtgtactcagaacaaccttgaaactaatgccagatgcagaaacccactttcgccttttgtcaaagcagggcagagaggtaggggagagaatgaagtatcaggaagcatgtgtttgttctattaaggagaaacaggatttcaatataatatcttgaaaattaaaattcaacaaatttcttagaactttggtttatcagcatattagcatattgacacagtctcacagaagcaggaacaactgtctacaggaggtatctctgcaaatgatggcctctgggccagattggtgttccttggctgtgatgtacagcccccctgctaagtagagtttttacattgctgaaaatggtttttaactttttttataaagttgttttttaaaagaggcaaatagcaaaaaaagaccctgagagagaaagtatcaggcccttctcagaaagtttgtcaacccctggtttacagaataatgaactctcctccgtcctgcctccaccaaccaaaacaaagtcttaaaaaaaaaatacacaagaccaaccagaagcacaggtggaaagatgactttttgaacaaaagactacctcccctccttgatcttagcaactttagtctgaatttgcatgacagaaaattcaaattttgtaataaatcaaaataaataaattatagggttgcactgagaaatttagtggacattgaaaagtcaaattggctggctgctcttcttgaaggtagttgaaaaaaaaacaatttaatgtaatatccatgcatgcacagaactttaaaggtagaagaaactctcattttacagatgcataaggaatttggggaatgtaaggttctatgaaaacaaagaacatgaaatgaaaaaaaaagtttaagaattacttagtccttttgatatccatgtgaggtagggagagcaatattcccagctaagcacaaaaatcatcaagccaggacactaaaaataattaaagagatggatataattaataactttgaaaacatgtatttcttgattgcatatttgctttatgtctatattgatagaatagaagatgtatttactcaaaccttattttttaaatatctttcagaatgcaccataagaacttgtttggattatatttttgtgcatgcacaaaaaaagggctgcaatatgaagtattttttttttactatgaataccagacaaaagtttttaaaacactgtaatgacctgcaggtgtgtcaagccaatgacctgttataatcctactgctacatccaaaagaaaagttctttagaacagtacagtgaggtatcataaaacagtatatattgccactaaagaatgcaaagcaataagatagtatacatttatagtataaacagtataaatagcaacttatattcatttaactgaatttcttttatgttaaaccacattaattcgtctccattatagattagttctgacatccagaaaataaaatcaaaagaatatatatatataaaaaacataaaatgagcacataaaatttccatcttaaccattttaaaattaaggaacttttttaaagtgtggtttattttcttataagtagaaatttacttaaggatatacatacccatatataagatataaattatatatacatttatatataattatatagatagaaattatatataggatataatatatagagaggatataaaatacagagaatatatataatatatagggtacatataatatatatggatatctatatcctaagtacatttctactttataagaaaataaaccgtactttaaaaaaagttcctggccagcgcgctggctcaggcctgtaatcccagcactttgggaggccgaagcgggtggatcacgagtcaggagatggagaccatcctgactaacacagtgaaaccctgtctctactaaaaatacaaaaaaaaaaattagccgggcgtggtagcgggagcctgtagtcccagccattacaggctaggcaggagaatggcatgaacccgggaggcggagcttgcagtgagccgagatcgcgccatgcaccacagcctgggcgacaaagcgagactctatctcaaaaaaaaaaaaaaaaaaaaatccttaattttaaaatggttaagatggtaaattttatgttatctggttcctaccacaacaaagcatataaaggtaattttaatataaaaaaagaatacataaaataggatataattaattctcatttatttaaaaagttaataattgtggctgttttgtttcttttgaagtatatttgtgtaaaaagtatagatagatatttctctctgtgtaataagggaagggtatatatagagactgtaagggacaggtatgtgaaaagcaggaattataccaagaacaggaaaaactgattatcttcctgatcacataaccaagaaaaaagataatgtgttccaagatgacgcattaatcaatgtcatccaaaaagaaaaaagttcaaagataaaaatataatgccatgttcccaaattatgttgtgacagaatgtcagggcacccactgacaaactaaatgaattccaagatgaccatgtcagggcgtctatacaccatgatgccccagctcagttaactcctgtaagtgctgaaagtatttacttttaaaaaagagggctagatgaaatgtggtctcctgaattgaatcctagacaatgaaagaatattagtggaaaagtggtgaaatctgaatattgtgtgcagtttaattacagtgattgtaccaatgttaacttgttagctttgacaaatgcatcttgctatataaaatttaacattaagggaagctgagcaaagagtagacaggaactttcctcactatctttgcaattttctgtcaatctaaaattatttccaaattaaaagtttattaaaaagtggggagataataagtatcaacctatgcacacagaaacacaacacttggctgtagcaatgttctcataacgcaacagagggaaatacatcaagtgtcatttcaaaaataacccaggggtaaggaaggaatagtgactgggagaatggctgagtaggcttttgtgtgctacaatcttctatttcttgactgaattgatggttgcacatgtgtgttcattttaattcactgaactatattttttggtacttacccttcaactaaaaaaataaaattaaaacatttccctattactgatgaaggttagatgaagagaacataaggtatataagtaggaaagaaaacctatgtagggacagatgttaatgttattaaatcctaagtaaaattttcagaacttggaaattaccaaatccaggagtggtcgattcctttatgaaggtagatctggagctacttaggccagatttttgtattttagcaaattcctcagatgattctgacgcacacctggattataaaccactaaaccactgaactacccaagaaggttacgtgacctcccagagctagaatgttccagaaatggtgcaagaattctatactggactcctggccctctactctacccacagttccaaaccctcagccaagattcctgaatattataccactagacaggaatatcagtaagttctattaactttaatgtgcttatcaaaagattttttttctatcacggtggctttttttaccctataagacagaatcttttttccacatattttcaattttacatttccagtatagcattaatacatttgtcatttattaaataaggcaaaccatagcatcataaagtattaagactgaagggctactaacctacctattcatttaaagatgaggaaacaaatgccagagacagtaataacttgtcaggagtttccagaattcattctccttttttagattaataaattagaccagatttcttccccatggttactgtctgagagattaactaatatgcgatacatgatgtcttgggttctttcatgtttaattcagtttgtgtgatttctaaaaatgtatctctttaaaacaattgctgctgtgcaacagtgtgatggcagggaacagaaaacaacaaaaaaacttgattgaatacttcaatcaaagtgcttctttttatgtgaggataaatcatactgaattaaggggaaatttaagaatattttttaagaaataaaatttcaggtaggcaattgtgaggaaaataacaatcatacaagccaaggccacgtgattttccacaagccccagggtgagagatcgatgccctgctttaccaaatattcttcgccagtcatctgaaattaaacagaaaaagaatataacttcattcctagcatccgtcaaatgttaccagtatatccactgttccttaaaggagcctaaaattgaaccaagcctttaataattacccttcagatatcatagctaacagtcattgtgtgtttacaattttgctagacactaacaaaaacatggacctaacttagttaattcctaaaacaatccaatgtgatagacattgtacacattaaaagatgaggggactaacgtttaaggaacttgaccaggtttacagagtcatactttaatcaccaagtttttagcctactcaaatttattggtttccaaatctgtaatgctgctcttccaaagggcagaaatatttatcaagtaatagttcccttatccctgataaagaaaatattgcttaaacagatgacacctgtgacccttactaagatgatcaaagctcttacagtactcttacgcttacaaatagccataaaaaacaacacaggttaagaattccaaaaccaggaaaaaggtgtgcatgggtttcctgccaaagtcatgttctgtcagctcttgcaccaagactgtgggagcatcacagatactcaggtacaagacattcccagcagactcagctatcaggtttaaccttaagtggcagctagagtagagtaggatgaactccttgccacaggttaggaaatcatttgtactaaaaagaccttggacagccacagttactgcctgataccatttttgtgcaactttgggaattcagcaattccaaaaacatacatagcctctcttttactataagaatagcttctcctggccggctgcagtggctcatgcctgtaatcccagcactttgggaggccaaggcagtggatcacgaggtcaggagacgagaccatcctggctaacatggtgaaactccatctctctaaaaatacaaaaaattagccaggtgtggtggtgggcgcctgtaatcccagctactcagaggctgaggcaggagaatggcgtcaacccgggaggtggagcttgcagtgagcggacatgtgccactgcactccagcctcggtgacagagcgagactccatttcaaaaaaaaaaaaaaaaaaggaatatcttcctcctttgtctactgaggatgaagcctcatcttccgttaccatgagcccatggtggttcctccttatctggtcccatttttcccatccacttcatcctgaccacctgatcaagccaaaagagagggacagaataaagaaaacctctctgtacagaggatttctgtggacaattcaaaagagtaatttgtcctgttattcagaattatttatattctacttgacattcaggagattgaggataatatcaacattctcttttctctcattaatttatgtatcaaatcaaaccattagcaatcatagaaaaggcacgtgttactaaattcttaaaacaatatatccagtgttattagaatctgttttaacattatgtgaaaacggggtttttttctcaactattcaagtgtttcttgtttttttagaggataaatcgattgatagggagtattccaagttatttaaaaacaacaacacatgactatgcggcctttgatttcatgatgtcttccaaatgctgaggcagtggaagtgccaggatcttggcagggaaatgtttactttctttgtgctattgtgcctatttcattcttactactgtccgtgggttgggctcagaagtatccgtgagttcaggacccatagatttcatataatccatacagttcaggaaccataagcccttgataaaatataaagcacctcacttcaatctcaaatgctctgaaaaccaagaattcaaacccacaatcaaatatcaaaaggatcttttaaaaggcccaaaacaataagaaacaaacgtaagaaacattgtgcatgttaaagacaatttttactgcagcagaatactgaggggttgtgccacatgttcaatgcattcgcgcacaactcactttatggatgagaaaacgtaggctcggaaaaattcagtcccctggaaggactcatacagatctaagcccagtagcctttatacatcacaccatggtataacaaaacccattttgacactgaacaaaaacttacgttgcatagttacaaggattgttcctgttgcattgagtcctgggcagaagttttgtcccaaaaattcattatgctgcaaagctataacacaagtgggagcagggcaaggtaaacagttttaaattttaagaagtttccaaaagttatcacaatcatgccctctgagtttaatctttattgttatttctaaaaacatattccagtctttgtctcaccaaaccaactaatgttattttccctggcaatcaagaaacctaggttgggattttggcttccaatacaaaagaagtaaagtattttgccaaagcgggagacctcggctatactacaccatagctccttcctccttctctccccaattttgtaactccataaacttctaattaaaatgatacagtggtgctcaatgagtattgttaatttacagtgacaatcttcattcttgtttgttttcattagaaccagttgtaattcttggatgttagaagcttggtttactatattaagacacagatagtttactttggagttaatgagcttgcaaaagccaatatactatgcttattatatggtctttgctcttctaattttcctttcattataaacatatgtatctagtgtcccatcctctcatttacttccttattgaactgaaatgcaacaatgtgttttcatcaattagccaatctttctcctttactaggaggtatctcccctagccctttaaaggagactgaggaaaatagcaaatgactccccagccttgtgttaaccaaggctaacaggaaatctcattccttgctcctaaaagggagtttctggatgggagactttcacagctcatggtcaggaaatgagatgaggacacttgatttccattgttcctagcttgggaatgcagtcacagtacagacaaggaagacataccgtaaatccatatcgtggaatgctgaagtactgaagccatacagccaagatgcaatggttgtgagattgaccaacagacctgaaaaaatctacaaaaagaaatactaagagtcaggcctgcttgagtaatttcatgcagaattctagagaataccctctcaagtccctaccactttgtaagtatttcttttaaaaccaactctttcttgaagttctcccacttactcaagacactcactaaactcttctcctctgcatgtgcacatctctatatagtgaagtcatttacggttttaaaggaagaacaaaatatctaatacatattagatattccattaatcgtaagatcctcaattgtcaagactatgtactcaactttatttgtaactgcaaaaatggaaggtcaagaagcactgactattctaatgacacaaccactatgtgtgctcaccatacacctggcattggaagaatctataccagataaatcctgagcgtcacatgcccactgccctcacataagatttgttatttacaaaggtttgcagtctatatccatatgactttagcaggatatgaggttctgaatgcaggcttaacataacccaaagtctagaactgatacagagttaatgtagtgagaggtagagcataagcaggatcagtgctatcatttaaagctgccaaaagcaatagcgcaatggagatgccaggaagacctgctgaagattgacaagagaactaattgcaccacaagcatactggtatatgcataacaatgatgatgttgctggtatgacaatatatttcagacttgacctgaccaagtgcttagcatataacacagcatctctgagtaaaatacattttatgactagtttttaatgttctgtgtagaaatctttaaataataataaatcaaacaaacatttgtatttgctggatgacagtatgggaaatataaacaagcctatcacttcctcataatgtttgcattggtagttttcaaatccagaaatggaagaattaaactatggcaagagttgtgctaattatttttatttaaaggcatctactcctactctagcagacaggacatgttctgtcaagtatgatgttgaaggggaaaaaaatgtaactggtttcattcacctgttgattctctatgtgcaaaatttaggggcatgtaagattaggattaagtaaccattaaaaaaaaaagataagcagaaacatattgaatgtcaggaacgaaacccagaaaggaggtacttagtaggtgtgaactctgcaattttccaatatttttaaaacactctttttcaaaatacgagagggaccaaaatagactactcaaaccatactctgttctgcttcttatgaggcttaatatgtgtttggaaaacagtattataaatccaaccaaactatctctgctggtgggtaaacaagctagagttcaatgctgtatgtgggaactttaaaacataaattaaaaatgttaaaaaaaaaataactagcagttctctaatgccagcatgaaagtcgggcaaataatctgtaattctcaagagatctgccgatcaaatgtcttctgatttttgaaattccaatttattaaggtttcataatagtcacaaagaaacgccttttaaaagctcattagtaacaatattaactaaaattattggacttcattagaacagtagcaaaaaaggttggataagggcaaagaggaaagttagtatatttctaacataatctattccagtagatggccttaagtaaagcagagccccatttacagaatctcaaaacaggttttacatgacaagtgaatgtgcaggaagaaatgaaggaaagaaacaatccttatcagagcaaacacagttcagactcaccatcataaacacaaaacagatggtcatagaagtgttgctacagaaaccacactctgacctgctgctatggccagtgccatggaactgctgaataagccaccatcataagggtaaacatcataacgaagaaggcatctgcctttggttcaatccttagtcagaaagagaagaagtagttaacccaactgcctaggtcaccgtatgttgggattgcttattgtgcaaatttaacactaatattttgagaaactaatattagaatgaaaaaagtcatccactctccaaccaccctcggtctccaatgttgtgtctgtccatgtaatgcataaagttctcttataacacttatgtgccattatgtataattacagacaatttctggttcctgagatgaagagctacaggcagtacaactaaccaaaattcaactgccttctctttcacaggaaactcatcaatagcacattcatttgcccatacatcctcacattactcattggtgctgtaactttgtgagtgaagggactgggacgatcgggatgccatgacctcacagtgttgtagtatctgggggagggggagggggcctccataacccaagcctccccagacagatcccacatcactctggattgaaatgagactaaattacgtttcataaactgctttctaaacttagtgagctaatactacaggtaatacaatctgaagatttgaaacagccacaagaacaacatcaggagtctggagatctagatcctaaccctgattgtttaggacacacctattatttgcaaatggaaggtttaaactcaatcggtagttcttatcttgtagtgtcaaaatagatattccgggggttttgtgtgtgtgcatgtgtttatcagtgaaatatatggaaatcagatgcaagagcctggagtgaagcctgagcataatgcacaaatgagtctccacatctaccaaacaagattttttttttaattaacaagccccaaaaggcaccgtctttctctcattaaagaagcaggatgggtaatatatattaaataaatacatatatatatatttaatcattttatgtatctcaagagattaaatatgtttaatcattctatatatctctaagtgtgtgtatgtatatatattacatatatagagagagacagggagagatagatagatagatagatagatagatagatagtagatagatagatagacagatagaaaacatagataggctataaatatcccagcttctccgcatagtctcaaagttttataaattctttccatgtttgtgtataacacaagcatctctcgtaaagtgtagttttataagtggttttaaaagttcaggctgggcacatccgctcattccataatcccagcactttgggaggctgaggtaggaggactacttgaggccaggagtataagccagcatgggcaacacagtgagacccaatctttaccaaaaactccatctttctgtgtgcggtagtcctagctacccagaggctgaggtaggaggatcactggagcccaggaggttgagctgcagtgagatatgatcaccactgcactccagcctgggtgacagagcaagaccctgtccaaaaaagcgaaacaaagcaaacaaacaaaaaagttcagttgggaaacagtcttgacaaaatagctgacagtgaacaactgtttcagagagtgcaaaatggacaggtgtttccttatccatggtttggtttatagttttgagaaccaaaaatatgcttgcaaggtgcaactgacttccccataggcaagactaaagacatgtccttttttgttttgttacatacttacctaacatgagtacactatacaggtaaatataatacttggtaacatcctcatgggtaataaatcagatacagttttccaaggaaataagatgacactctgtagtatccgctgatgtattcatgtctaagaacaaaaatacgtatcatacatccaagattagtttaagaagccacagggcaggctagcttgtctgttacagacctctgctgacagcaggggttgaacaagccagcttcccacatcccagggctagacccactatgcatgcccatgaataccttgggtgccagcctccctgagaaacatcccatgaagctctgcgcacagcccctcttctcatgacactgttccctcctattgctctctttctagctcctgaacactcagtccagggaaacagattccacacatcctccctctctcaaagaatgcttcttttccttctttgacgggggctttccttgaagaacagcacttcagagccgattttggcaggaatagaagcttttctttttccctatttctgatgaggaaggtggctgttattctccaagccccctagtgcagcttcagatgactaagctcttcttacttcttcactcccaagttaaaaaaagaaaaagacttcttctttcaatgatcatgtcttccagccatcatccctgtcaactaccaaattgtaatctttcctcttcctgacatctttctcccacaatccaaactcttccacttccttcattatttccctttctaataattcctatatgtgacatgtcatttgggaaaatgtgatccatccttgaaaaatacccagcctgggaaacatagtgagacttctctctacaaaaaaattaaaaaaaaaaaaaaaatagccaggcgccccggtgcagtggtcacgcctgtaatcccagtgctttgggcggccaaagggggtggatcacctgaggtcagggtttgagaccagcctggccaacatggcgaaaccccatctctactaaaaataccaaaaaattagctgggtgtggtggcgggcacctgtaatcccagctacttgggaggctgagggaggaaatcgcttgaacccgggaggtagagattgcagtgagccaagattgcaccattgcactccgcctgggagacagagcgagcgagactctatgtcaaaaaaaaaaaaaaaagctaggcatgcagttactcaggaggccgaggtgggaggactgcgtaagccccgcaggtcaaggcagcaagagccatgatcatgtctctggactccagcctgggcgacaaagcaagaccctgtctccaaaaataaataaataaataaataggaaaatacaataaattaaaccaggctgctctttactgaagaatgccttccggctcgtgccacttccctggtccaccgagggctaagcatggtcacgtctttgtcgacttaatctccccacttccaagttgctgcttaatctctaccaagcccctcaacttttcttgtgaaggtcatcagtatttactaaaaacaaaatatacttttcagtcccttattgcttgctctctccaacatttggattttctgactgtactcaaatctagaaaaactctttctctggatatcaggtcccaaaggctcaggattttcttccctacctctggctgcttttctcaatgaatattggtaacccctatacatattttcaaaacatcatgttgtatatgatcatatatacaatttttattcatcaatttaaaaataaattttaaaaagtactggtaatcctcggatcccatccttggccccaaccccagatgtaatcagtctaaccaatagcccctgctgtggacagccccgttcctagaacaaagacctactcacatgaagagcttcttctctaccacaagagttccacggctgaaacactgctgaaacactggttggtcgtcaggaagaagagaacccagctctgccatgaaaaggggaaccaaatcaccgcagtcaactcagcattcttagacaattttctacccacaaaactctttccacaaatgacagtgtataaagttaagcaggaaaaaagggaaactgttctggttggaacagggaagcgtgaaccccatcaagcctctccccatctttatgtctccacagtggtactcattttgaaactcacagtcttggattgttgtggaatgattgcgtctccccccaccaaaattcatatgttgaagccccaacccccaatgtgatggtattgaagatgggccctttggaaggtaattaggttcagatgaggttacaggatagggaggtgggagagtgtaatgggaagagcgtcctaataggaagagacaccagagctcttgctctgcccacaaggaacagcaaggaggcaagtctgcaagccaggtagagggccctcaccagaacccgcaatgctggcatcctgatctcagactttcagactagaactgagagaaaatacatttctttgtttaagccacttgctctatggtattttggtatggcagccaggccaatacataatttaactaacaaaaatgccaagtaccattcctaatgtacaaacagaaaagtggtaagctaaaaaagtctgtaaagattaagaaattcaattagccactttgattttaaagttgaacaaagatgtaagtcatgtggaagcaaaatgaaagacagtgaagggaaccttcaatcaaccccttatatatgcataatctacatgcaccacactaccatcagcagggccgtgacattatccttgacacgctaagacagccagccctctatgaggtttccagagtgctcagaggaaaccaagtgaacttactgataaagaaaaatctaatttgtgtatcgtaatgaaaaggaacactattagtgttgtttctcagtgaagtaactagatttaaaaaggaaaatgttggccgggtgcagtggctatgcctgtaatctcggcactatgggaggccgggtcgggaggatcatgaggtcaggagttaagaccagcctaaccaacatggtgaaaccctgtctctactaaaaatacaaaaattagctggcgtggtggcaggtgcctgtagtcccagctactcaggaggctgaggcaggagaatcgctgaacctgggacgtggaggttgcagtgagctgagatcgcgccactgcactccagcctggtgacagagcgagacactgtctcaaaaaaaaaaaaaattaaaaaataaataaataaaaagaaaatgctaagttaatctacactttgatacaaatatgcattttatgaaagcatgccaactccctgaaacaccataacaaaacaatataattgacagtaagggtgtgagttgaaactgaaaagaggtaagtgacacatcatttaaatggcgtaaaaacaagagaacattttaaaaaatcaaacccaagtgaacaacacaattacattaaaagaaaaaaaagagtccatagatacctaagaacaaagatctaagggaacaggctagggtcttttttgttttattttatttttagagaagagctgccctcggtcacccaggctagagtatagtggcatgatcataaactcactgcaatgagttgaactcctggcctcaagcaatcctcccagcttggcctcccaaagtgctgcagtacaaatgtaagccacggtgcccagccagagcagttttaaaagtatgtacatataattaaatgagtgaaaaatagccaggcctggtagacatgcagttatctcactttctgtacacaaaaaacctaatatcaagtaaaaagctaatttcagaacatggaacatagcaaagattcaattaatttgttgtcttaaatctatcagtacagtaatgtccataatgattctgaaaaagtagaaatggaaacgttccttctaaatactaagatgatttattttaaacacagttttttcttataaggaagttaattcattctaattctttcaaggtggtaatccacatctgttatatctactattggtctgaatattttttattttgattttttaaattataaattggcatattatggttgatatatttgtggggtaccaagttatataattcatgaatcataagtgtgaaataattaaacaagctaattaacacatccatcgcctcaaacatttattttttgtggtaaaagtatcttaattttagcaattctgaaatttacattattatttactgtgttcaccacattgtgcaatgttctccaaagaaaaatccttattcctcctgtgtaactgaggttttgtaccctttgaccatatctctccattccccacacacctctagcctctggcaaccaccattctactgtctctttcgttccattgtttcagattccacattaagtgagattatgtgacatttctgtgcttagcttctgcgtttggcttatttcacttggcataatattctccaattccatccatgttgttgcaatgacaaaatttcttttgtttttccactgtgtatatataccacattttctttatcaaatcgacccttcgggtgattccgtatcttggctattgtgaacaatgctgcaataaatatgaggtgcagaaatttcttcaataaactgatttcacatctttggggtaaatatctagaagtgagtgactggatctgaatactgtttttaaagtataccttttcccttaatacacactaatttgttagctatcaccacaactctgtaaagcagttattccagaggtagctattaattcaaagagcttatactctacatatgattaaaacccagtttctcagttacacgggttagagaaagagagagagtgctttcctctctcagagaattcatccccaaagaagagaactaaaccactggctcgagcagttttaaattatgaagtactaatattcacccctgaacaaaactttgagaaccgtttccagagatgatgctgaaacattttttcctcatcaataaatcactaatcatcccagagggattaaatcatatacacaggccactttaacatagtccaaatgcttatttaaaaaatatactggggtcaacgagaagcagtgggaggaagaacatcaggaaaaatagctaatgcatctgggcttaacaccaaagtgatggattgataggtgtagcaaaccaccatggcacacgttaactatgtagcaaacctgcacatcctgcacatgtaccctagagctttggggaaaaaaaaaaagatagcaagcttaagtcacaaatacaaattatgagcccaggagttcaaagctgcaggagctatgactgcactactgcacaccagcctgggcaatattgtgagattctgtttcaaaacaaacaaattaaaataagattaatgccctatttctccagaaaacatctgaagaaacactaaagttcttctttatttctctggatttttctaccaagagctttaatggccagatttccgtcctcttcaaagttccagttgaggaccaggttactccatgtcctttccaaatgcttccgctgcacaatataaaaggcccactgcctttagatcctgtgatatattctgtgctgggttagacatggcatctacacagcacacaaaccatcaattactagcaagtctggaaataatccgatacctcagccctcagggaaagtaaaaacaacaatgacatcactctggtaaactgctgttaataacactctcatcgtagagtaacactatctgattccatacaaaagaatttattttcttgagtgaggaaccaacttttatgcttattctttaaaaaataatcagcctttccagactcaaaataggctgcacataagcgtcttcaactttcctcaatagtaaaatggggatactacatctaccccctctaaatcactgggtggtaacctgagactatggacagcaagcactacgagcacagtatctgccacaagtgttctccatacatgaaataaccagaactctgagggctggaaattcctgagtgcttatgttcagaacacaatacagtcgataaaaagtcccctcataaatgaggtttttaagggtccactgtgactgaaactaggtaaggatcacaacactaacaaagtgctaaccatataacaggaaaagctgagtcccacccccatcacacccctaagtcaaactatatatttaaaaagtgacagaaattagctcacaggcaacaaaagaagaaattgatcaatggactacatcaaagttaaaaatgtttatgcatcaaaggacactatcaatactgaaaagcaacccacagagtggggaaaaatatttgcaaattatgtatctgataagggattaatatccctcaaaaatataaagcactcctacaactcaacaacaaaaaaacaaacaattcaattttaaatgggcaaaggacttgaatagacatttctccaaagatccaatggatctctactatttaaagggagaaaaagaaaagtgttggtaaggatatggagaaactggaacccttgtgcactctggtaagaatgtaaaatggtacggccactgtggaagacggtatagtagttcctcaaaaaattaacagaattactatatgacccagaaattctaattctgggtatatatccgaagaatgaaagcaggaactaaaatagggttttttttgtttgtttttttaagagacagggtcgaacctgtcacccaggctggactgcagtagtgcaatcatagctcactgcaacctagaactcctggctcaagcaatcctcccacctcagcctcccgagtagctgggactacagacacatgccacacacctggctgaaagagatatttgtacacctagggagcactgtttacaacagccaaaagtgaaagcaacccaagtttccatctatagatgaatggagaaacgaaatgtggtatgtactacaatggaatattattcaaccttacaacggaaagaaatctgacacatgctacatgaatagccataaagacaacatgctaaaggaaatgagtcagttaccaaagaatatctactgtatattccacttatatgagggtcttagagtagtcaagttcagagacagaaagtagaatgattctgccaggggttaggagaggcagatatgagatgggaagttattgcttaatgggtacagaattccacttgagaagacaaaaagaattctagagttggatggtggtgatagttgcataacatgtaaatgtacttaatgccactgaactgtacatttaaaaataattgggccaggtggagggctcacgcctgtaatcccagcactttgggaggccaaggtgggtggacccacctgaggtaggagttcgaagccagtctagccaacatggtgcgaccccgtctctactaaaaatacaaaattagctgggcgtggtggtggatgtctgtagtcgaggctacttgggaagctgaggcagggaattgcttgaacccgggaggcggagattgcagtgagctgagatcgcgtcactgcactcagcctgggcaacagagcatgactctgtctcaaaaataaactgactcatcctaccctcaaaaaagaatgacatttacactatacttgtcttaaattcaaattcttaatggatttcaatagcttgaagaaagtaacagcattttctgaaaatcaagatccaaatttacttacctgttctgattccagtagaatcattttttagcccaaagtaaatggcacctataaccagtcccagtagactgtgacaatgatcttttcaaaaagaaaaatgcaaaaaaaggggaagagtttcaattgagataaaaacttatacacaccatttattagtataatatatggttacataatcagatcttccattaagataaacactcaatggcttggccaacgtccctgggagaaaataaaacagcaacattatttagactgcttcctaagttaaaaattaagttatctgtgctttggggagagtgtaggacacaaagcacactgctggaaaagctggacttcctcccattgcaccacccagcagcagttcagggtctgcttcaggttactgagcttgtgaataccacacaggatagcagagcatgcaagtatgtagcaaagcaaagtccaagtgcctaagagttttgaccctgaactgaacttcaacctttgtgccaatgaacatgagtcattttatatttcaagaggttaaagtgaaaacggatatctttattcttaacattaaaaataaataaaaattttaaagcacacattaaaaaattctaacaatggaattttgcacagtgaggaaataggggtgagatggagcctgcctatccacctctagggagtccatgcctgcactggaaaagtgcattgtcactgtcaccaaagcattggccggctttctctgtgcacacactgcatgcttccactacccatctcctgtcactgcttctcatcgcttcagccagtgaggcctatagccaatgctgcagacctaagctgccaattcttgctgttctcacctatcttcaccactcaattgatttctatagctcctaaggagactggaaaacaccactcttgtttctaggataaagggtctcttaaggacacttcaataagcaaaggttaagggttacgttatgatataatttatctgagaaaatcctatttatatttactcgtgattaaatattaaaaaacaagaaatgggctgggcgtggtggctcatgcctgtaatatcagcatttgggaggccgagggggcagattgcctgaactcaggagtttgagaccagcctgggcacatggtgagactccgtctctactaaaaaaaaaacacacacaaaaaaattagccaggcatgtggtgtacgcctgtagtcccagctactcgggaggctgaggcacaagaatcacttgaacctagaggtggaggttgcagcgagccaagatcataccactgcactccagcctgggcgacaagcgatactgtctcaaaaaataaattgataaataaataagaataaaaaaataagaaatgtaatctaaagaagacaaaatatcctaccatatcttggaatcttcaaagttaaaaaaacaaatctcaatactgcaacagtctaatggtatcaagatttaaagtaactgatcaaggacactttggcatgaagcaaaccgaactgcaaaaacagtaccatgatctgtgataactagtttggaagaacctagtctggaaagaacattattccaatgtttctacttatgagctgtcttttaaattcacttagaaattttggggggaaatccattatgctggcatattttcattaccctcaaatatacttcaacagaccaagcttccaaaataaatgcagatgactgtatcaacaggcatcatgaatgtgcatacaagagtctacgttttcacacagtaaaacttttaagaatattcaatcaggattttttttttttttttttgagacagtctcgcactgttgccctggctggagtgcatggcgcgatctcggctcactgtaacctccagctcccaggttcaagcaactctcctgcccagcctcccaagcaactgggattacatgcgcccaccaccaagcccagctaattttttgtcttttagtagacacagggtttcactatgttggccaggctggtctcgaactcctgacctctgatctgcccgccttggcctcccaaagcactgggattacatgcatgagccaccatgcccgcccagacttttcaaactaaacattccaaatgctttgtcaagttttcattcaaacttgtatcttatactaacactgagtattatgattaagatgtttcctaaaagtttcaaagttctaaaatgttttcaaagtcagctttcaaacatattgacaaaataatcaatcccgtaaccttgcatgcttttataaggtgtgtctgtgttattctttctggcattaaagaaaggaaaacaaaaggcaaactaaacagtgcacaatggagtgcacagaccccatctgcttccaagttgagctttcagaaaacccttggcaccttaaatgaacatgcaatcttctcatacagataatccattattctaagattttccaaatacaacctttggaagatgcattatcagaggccaagtttgaacatgtaaagaaataactagttcaagccaaagtgcagctgtaaagcaacagattgaagattatcagtagagagtcataaaacattttaacaactcaattttcaagaactcagaattaaacaacatacaaaatcataaaccctgaatcaggaatcattaagctatagcccacaggtcaatagggccagccacctatctttgttcacctatgagctaagaatggttttttactttatttttattattttttagagacaaagtctcactctgtcactcaggctggagtgcagtggtgtatcatagttcactgcagcctcaaacttctggtctcaagcaatcctcccacctcagcctttgagtagttaggactacagacatgcaccaccacacttagctcattttatttatcattgaaaaaaagtcaagaataataatatttctcacaatataaaatttatataaaattcaaatttcgtgccaatgtataatgtttcattggaataaaatgaaagttacctttttttttaagataggtcttggccaggcacagtggctcacatctgtaatcccagcactgtgggggactgaagcggtggacccacctgaggtcaggagttcgaagccagcctggccaacatggtgcgaccctgttatactaaaaatacaaaaattagctgggcatggtggcgggcacccgtagtcccagctaccgggaggctgaggcaggagaattgcttgaacccgggaggcggaggttacagtgagccgaacagcaccactgcactccagcctgggcgacagagcatgactctgtctcagaaaaaaaaaggggtcttgctttattgcccaagctgttctcacactcttggcctcaagcatccttctgcttggtctcccaaagtgctggggttataggcaggaaccactgcatctagccagcctttcgttattattggaatactgccatgttcatttattcatgttatgagcttggctgctttcacataaaacggtagagctgactacctgagacaaacaccacctgatctgcaaagcctaaaatattactacctgatcctttacaaaaaaaaaaaatatatattgcctactcctgccctaagctatattccagtttttcacaaatcgaaacaaaacttgtcctgctaagcagatgctcagggaatacaaggtcctattcttaatctaagagactgccactgctctgaacatggctggaattcttttgtgaaagtgagttcactgatgaggcagggaagctaaacctagaggcactaggccagtgttagcattggaaggaagcccagtatcaaaacatgcagaatctcagtgtgtgaaaaaagctctgtgttctaattatgccctctccagtattgccacataggcgatttggacaagactttataaaccattttttgaagcaagataattcaagttattttccaagtaagaaaaatctatgcatacatcacactaaaaaagcaattcattacattatttcactgttgacaataagtacccaggttgatcctaccagactgatttccaaatgatatcaaatctatgctcaaagaataaattttgcctttaattgatagtatataaaagtgccagtgttctgacagaaacaccaaatatacgtaccaaaaacatttggagaaattagcaatatggttcaactagggatacaagctctagataaatttatatatatacttaactagcagtatggctatacatacatatatgtggcttacatatatacatatatatacataattagcagtatggcttaactagggatacaagctctagatatattttatatatacttaagtatagaaattatgatgcacaagtttaaacgtcagtatattttactagagccaacaatgtgccatcttttagtactcaacagaaactcaatattgtaataaaaataacagccccaaaataaccagctaaattgacttctttgaagaatggaccatgaactgggagtactaatgttttgggtgacagaggggttaagaataacagaaaaggccagcatggtggctcacacctgtgatcccagcactttgggaggccaaggcaggaggatcgctgagcccaggagatccagaccaggacaacatagtgagaccctgtttctacaaaaaattaaaaatcagccaggtgttgtggtgcacggctgtagtcacagctactcgggaggctgaagtggaggatcgcttgagccaagagtttggggttgcagtgagctatgattgcaccactgcactcagtatgagtgacagagtgagacccagtctctaaaaaaaaaaaaatgtgtaaagaaaagataacaaaaaccacaaggagtaataatcaccaactatcacagagccaaccaaggaacaagaaacattatctcattttgattaacagaaagttaatctaacaatgaatagccttgttcttgaactcaaatttgcttactacgtttgtttcacctgtaaactgtctaaggaaggtaaatacaaggaacagcactttgcacacaggctcttcccttggagtggccagcacatactcccttcaggtgtattcagtgacagtaggtgaaggtttccctgatcacctgattccaactgcaatcaaccttcttctccctacttctctctcttcctcccctttctccaccccttctctgcttaactttccccatagtttcttctaccatctaacatgctatctatttaatttctttattattatcataactgtcttcctcaaaaaattagctccatgagcagagttttatttttgcccatttgttcactactgaattcacatccctaaagcacagcacaggccctataagaacaagttgatgaatcagtgaacaaaagtgaacagctaccagaaaaccccaaaactggctgacacttcttcacaatttcccaaaaaaaaaatttttctactcagattattcattacagcttgtctaatcaacaaaaattctgagttaggtagtctaagaaaccactaaaaaaaagaacctggccagtgtggtggctcacacctgtaatcctagcactctgggagactgaggcaggagaatcgcttaacccacgagttcaagaccagcctgggcaacacagcgaaaccccatctctacacaaaaccaaaaattagctggacgtggtgggacacgcctgtagtctcagctattcaagaggctgagtgtgaggatcacttgagcccagggaggtcagggctgcagtgagctgagttcatgccacccactgcagcctgggcaacagagtgagactctgtctcaaaaaaagggaagctttccaaaataaaacttaattgtcctttatttgttctgctgactggttctatatcccaggtggagtgagataacaaataattggaagggtgggtagaagataaacatatcctgaagcagatgataacgaaccacattgttcccatttgagtatttcaaaagaatctgctggttacctgagctatagggcctggggattacccagcaagtttttgaatgaacgcttggaaacccatctgagttgatacagaaggaggtggtgtagctgatctccttgaagactgtgatcttcttcttcttctcaccccggaaagttgatgtaattcagcttttgtctctttgtagaaggaggagttgacataaactccgctaatttttctatgagtggcttatcctgcttggaaggctctatgatctctgtggtttgcaatcagtggataaaaaggaaacacaaacaagataacaacaaatttagcccatttttctgtgaaccctttcttggatgcttccctaacaccttcattctaaagctttagaaagaaaaataggccaggcacggcggctcatgactgtaatctcagcactttgggaggctgaggcggtggattacgaggtcaggagttcgagaccagcctgaccaacatggtgaaaccctgtcttactgaaaatacaaaaaaaattagcctggcgtggtggtgcgtgcctgtaatcccagccatcaggaggctgaggcaagagaatcgcttgaaccagggaggtggaggttgcagtgagctggatcacaccactgcactccagcctgtgcaagagagcaagactccatctcaaaaaagaaaaatagaaataaaaaattattagctctgtcattagaaaagtataacaggccaggcacagtgctcactcctgtaatcccagtattttgcagggcagaggcaggaggatcatgcgaggccagaattcaagaccagcctgagcaacgaaacgagaccctgtctctataaaaataaataaagaagtaataaattaaaatgtatatttaaaaagagaaaaagaaagaaaaagaaaactacaggaaatagcctgtctattgccatagtcttatgaatatagcaaacaaactgacgttttctattgaccttaattcttttaaaatagacttcttaccatatagttctaattcttaatataaattctggtcgtggccaggggcggtggctcacacctgtaatcccaacactttgggaggccaggcgggaggatcacttgaggtcaggagtttgaaaccagcctggccaacatggtgaaactcatctctactaaatatacgaaaattagccgggcctggtggcacaggcttgtaattctagtgctcagtaagctgaggcaggagagtggcttgaacctgggaggcggaggggtcagtgagcgaaatagcaccattgcactccagcctgggtgacaagagctagattccttctcaaaaaaaaaaaaaaaatctggttgttgcttcctactatatgcaaatgcatatattgccaagtttctattttaaaaacactatataaacactgagcattttttaaaatgttaactcctcttggaatgacaacaccatataaattctcatttataaattaatcaaaaacaccaacagcactcacaacaacaaaatatttgtgttgactggtatcagaagactgcatcaacagaaattcacaaagcacattttaattagccaccacattgctaaacttcagccaattcaattaggcaaaaatctggactgtaacagattcatatacctttaaagtcttcttctctgtttaatgccacagcagtgaatctccattaatgatgtccaagaagaagtctgcagggttattataggcctcacagtgtaacctatgaaagaaggcagctcaaaaacacaaacttgatggtcttggaaaacaaagagactcactttcagagggtgagggaggtaaggctagagaagacagaatctaatgacttttcttaactttctttctctcttcttcccacgtaattttaccctttctttttatatattcagttctctctctctctgtctctctctctctctctctctctctatatatatatatatatatattataatttatttatttattttgagacagggtctccctctgtcacccaggctggaatgtgtggggcaatcttggttcactgaaacctctgcctcccgagttcaagtgattctcctgcctagcctcccaagtagctgggattagaagcacgcatgaccacgtccagctaatttttgtatttcagtagagacacagctttgccatgtcggccaggctggtctcgaactcctggcctcaatgatccacccgcctcggcctcccaaagtgctgggattacaggcatgagctactgttcccgcctatcacacaatatttcggcaattctttgtctctgggccaaaaaaaaaaaaaaaaagaagaaaagaaaacactccaagccaaccttggatttgcagggcattttgcattagtgcttgtccttacctatcataattcatgagacctgaaatagctatcagtatgctctggtgcttacagtacttcctcaaaaatctaaatatagacccaagaaaaaaatccaaaagcccaggtgtttctgctctctgagttcaccgacagaatgccagaatgatagaacccacattagcaatgatacttccccacatactaaattcagaggtccagcgctgggtgcaatggctcacatctgtatactagcacttcgggaggccgagaccagcaaaccacttgagcccaggacttccagaccacctagccaacatggcaaaaccccatctctactaaaaacacaaaaattagccaggtgcatggcttatgactataatcccagctactaaggaggctgaggcacaagaattgcttgaacctggaggtggaggttgcagtgagctctgaaagcaccactgcactctagcctgggcgacagatgagactctgtctcaaaggtaaattaattaattaattaattcagaaatccaaatcaactctgtgctgctgtaattccaaatagagaacaaatcccctgagcagtattctcgatagaactggccagcacagcacacctgaaccattcagctttggatgatgagatcatctgaactcaggtggcctgaagtctgactcttagttcatcccctttattaaaacctaattaagaaacatgccaatgaatatctaaaattatatttaggatcatagggaatcatttataatcatatccaatatatctaaaatgatgcagaccgcacaagccattaaaaaaaatcacacatttctatctaaattttaaaaatcacacatttcaatttgaaataaaaagaaccatgctgtccaagattgtagaaattttggcccatctaagtcaggtttaggactaaccactctattgaccgatacccatcaagggctaaagctgcaatctatagttaccagaaaattaagtagtgtctgccggtcacgtggctcacacctgtaatcccaacactttgggaggccacagcagattgctttagctcagagtttgagaccatcctgggcaacatggcaagaccccgactctacaaaaaatacaaaaatagatagccatggtggcatgtgtctatagtcccagctgcttgggtgaggtgggaggatggttgagcgcggggggttgaggctgcagtgagtcaagattgtgccactgcactccagcctggtgacacagtgagatcctatctcaaaagaaaaaaaaaaaaccttaaataaaatttgctggtgcagtggctcacacctataatcccagcacgttgggaggccgaggtggcagatcacaagtcaggagatcaagaccatcctcctggctaacagggtgaaaccctgtctctactaaaaaatacaaaaaaattagccgggcatggttgtgggcgcctgcagtcccagctactcaggaggtgaggcaggagaatggtgtgaacccgagaggcagagcttgcagtgagccaagatcacgtactgcactccagcctgggcaatagagcaagactccatctcaaaaataaaaataaacaaattaagtagcatttccatgagtgctcatcaaggcagaccaacatgtgcaaggggaaaaaatttaaggcctcatctgttatatggtcaagaagacaatcatattaggccttcccaaaaatttcaagtgacagaataaatggctataaggccaacatattaattactgagcttttaagaatggtcactgtaactaggaagcagaatataggcccagtagaaatacacacatgcatgcacttgaaataagacaagaaagatacctaaataacaagctggtgctacaaaaatgaagaaaatactagcaccaaatggaacaaacacattttgaagtgatagattctcatggtatgtctaccaaagaccaaacagcactcctgcagaccccctttgctctccttcaggattctattaatgagcattttacagcataaaaaagtcaaccataccagctgattcaaagtatcccaaggcctctgagcaggcccgtggaacataagtcttcctgaggccaataaggtgaggctatcaaacacttgaagatggaatatcgaggctgatgaatggagaagatgattgttcgtccctgcttagcatcctaagttaaaagtgagacaatactaagtcattaaatatctgaaacttgtatttctagtaaaatactctattcttgcctttagattgtttgctctagttcagcctgactttgtctactaacttttcatctcatattatttagctatagttagcaaacctaaattcaatgcttttttaaaacagaataggaattttcagtgtgttgtattgacaatctagaatcaactagaatattattaaaaatgcagattctaggacagtcttcccagacattgaattagaatctctggcataggtctagggaatccatattttaagaagcaacccaggtaatctgcaagtatttacaagttgagaactaactatggactgcatattaaaacaatggtcatatatctcattctgacttacatttaggtcttctggctctttaaaaattggttttcactcttctgccctaataatgcaataacataactgagtacttactatgtctttgctaaataatttagagataacttcatttcattttcacaatattgtcatgaggcagttccaatattattattattaccctcattttataatatgtcttaaaggatcaagcaactggccaagggatcacagttagtaagaggcaaggctggatttaatctctggtctaagtccatgaccaaaatagtgctaaagtaccttttcacaggattatgacttacaggttgataaggtttggctgtgtgcccacccaaatctcaccttcaatttaacaatccccacatatcaaggatggggccaggtggagataattgaatcatgggggaagtcccccatactgttctcgtggtactgaaaaactctcacgagatctgatggttttataaagggagttcccctgcacaagctctcttgcctgctgccatgtacaacatgccttttcttcttgccttccacgaaaattgtgagatctccccagccatgtgcaactgtaagtccatgaaactctttcccttataaattacccagcctcaggtatgtctttattagcagtgtgagaacaaataatacagtaaattggtactggtagagcaggatgctgctgtaagatacccaaaaatctgaagccactttggaactgggtaacaggcagaggctggaacagtttggagggctaagaagagacaggaagatgtgggaaagtttggaacctcctagagacttgttgattggctttggctgaatgctgacagtgatatggacaatgaagtccaggttgaggtggtctcagatggagatgagaacttgttgggaactggaataaaagtgactcttgctatgttttagcaaagagactggtgcattttgcccctgccctagagatctgtggaactatgaacttgagagagatgatttagacatctggtagaagaaatttctaagcaacaaagcattcaagaggtgactcgggtgctgttaaagcattcagttttattcattcacaaagatatggtttgaaattggaacttatgtttaaagggaagcggagcatacaagctcagaaaatttgcagcctgatgatgcgataaaaaagaaaacccattttctgaagagaaattcaagcctgctacagaaatttgcataagtaatagggaccaaatgttaatcaccaagacaatggggaaaatgtctccagggaatgtcagacgtctttcagcagctcctcccatcacaggcccagaggcctaggaggaaaaaatggtttcctaggccggcccagggccttgctgctttgtacagtctcgagacttggtaccctatgtttcagccatgttaaaggggaccaacagagagttggcggcttccatgtggtgttaggcctgcccttcactagatttcagaggatgtatggaaatacctggatgtccaggcaaaagtcaactttaggggggagccctcatggagaacctctgctagggcactgcagatgggaaatgttgggtgggagccctacacagggcccccactgaggcactgcttagtgcagtagtgagaagagggccatcatcttaagaccccagaatggtagatccaccaacagcttgaattgtgcatctggaaaagccaagacactcaataccagcctgtgaaatcagccacaaaaggggctgtgccctgcaaatccaaaggccagagcctcccaaggccctgggagcccacctcttgcatcagtgtgacttggacggagatatggaatcaaagaagataatttcagagctttaagatttgactgcccctttggattcggacttgcgtgggacctgtagccccttcgttttggccaatttctcccatttggaacagtgtatttacccaatgcctgtactcctattgtatctaggaagttactaacttgcttttgttttacaggcccataggtggatggaacttgccctgtctcagatgagactttagaatgtgacttttgagttaatgatgaaatgagttaagactctgggagactgttgggaaggcatgatggttttaaaatgtgaggacatgagatttgggagggaggggccaggggcagaatgatatggtccccacccaaatctcaccttgaattgtaataacatttgtaataattataataacaatcacaggtggaagaagggccaaaatcactgttcaaaactgttactattcaaaatattttagtgaagagtcacttcaattttaacattttctaagaacttactgtatgctagcagtgtaccaaaaacattctgcctcaaagaggatcaggccagtaggtcaacaatttcagtacaatataaatagaagatgctaaggattcctcataagcaaaatgggagactcacaacccagtctgagatgatataagtagagtaaaaaaggcccaacaggaggaagctaagaagaaaaagaaaaatactgaaggtggaagaataagatgaaaaaggtgtgaaataaaaaggtctactcagaaaatacaaaatgttcagtgttatagagcagagagagggagaaaaaatgtgtatgtgtgtgtcgttggtgttgagtaaagaagctaaagagacagcagcaaaacaggcccaacccccctacacctcatcacagacatccttccctacattcttacctgctttgtttttcttgataatgctttcatttgttaactgactttcactccaacagaagaggaagaaattactttgatcatttctaaccccctgccccaagaatatctgggacatagtagtgataagatattaactaaagaatatgtttccagagcatttaccttttcaggagcaaaaggacagcatttgctgtgcttgagtcaagccagttgtaggctcatccaagaacaagatggaaggatcagtgataagctccattccatactagtcctttttctttctcctccagacacaccacggataaactgagttccaacctaatcacaaatattataattgtcaatgataacaaccagtcattatcatttggtgagctcctacgtgtgccagtcctgtaagagacactttatctcattaagttcatttattctgaacagcaataagtggatacctggtagaaaaagtaggtatctcttttatcagatgagtaaacttagttcaggtcacagctggtcagtaactaagcctgatacaaagcacctccttgggtgaggcttgcctcacccaggaagcacaaggggtgggggaagtccctcccctagccaagagaagccggagggactgtgccacgagggatggtgtattccggcccacatactgtacttttcccatggattcacaacccgcagaccaggagattcccgcaggtgcctacatcaccagggccctgggttcaaacacaaaactgggtggccatttgggcagacactgagacagctgcaggagttttttttcataccccagtggtgcctggaatgccagcgcgacaaaactgttcactcccctggaaaggggctgaagccagggaaccaagtggtctagcctagctcagcggatcccagccccacaggcccagcaagctaagatccactggcttgaaattcttactgccagcacagcagtctaaagcaacctgggaagcttgagcttggtggggggaggggcatccaccattactgaggcttgagaggccctcacagtgtaaacaaagcctctgggaaattcgaactgggtagagccgaccacacttggcaaagccactgtagccagactgcctctctagattcctcctctctatgcagggcactctgaaagaaaggcagcagccccagtcaggggtatatagataaaactcccacctccctggacagagcagctgaggtaaggggaggctgtgggcacagcttcagcagacttaaacgttctgcctgctggctttgaagacagcagtgaatctcccagcacagcgctagagctctgctagggacagattgcctcctcaaatgggtccttgacccctgtgcctcctgattgggagacactcccagcaggggtcgacagacacttcatacaggagagctccagctggcatctggcgggtcccctctgggaacaaagcttccagagaaaaaaaacaggcagcaatctttggggtatcttgctgttctatagcctctgctggtgatacccaggcaaacagggtctggagtggacctgcacaaactccagcagacctgcagcagagaggcctgactgttagaaggaaaactaacaaacaaaaggaatagcatcaacatcaacaaaaaggaaatccacaccaaaaccccatccaaaggtaccagcatcaaagaccaaaggtagataaatctatgaagatgaggaaaaacctgtgcaaaaggcagaatgcctcttctcctccaaaggatcacagctcctcgccagcaagggaacaaaatggatggagaatgagtttgatgaatagacagaagtaggcttcagaaggtgggtaataacaactcctccaagctaaaggtgcatattctaacccaatgcaaggaagctaagaacactgaaaaaggatagaggaattgctaattagaataaccagtttatagaagaacataaatgacctatgaagctgaaaaacacagcacaagaacttcgtgaagcaaacacaagtatcaatagctgatcaatcaagcggaagaaaggatataagagattaatgaaataaacttaatgaaataaaggtgaagacaagattagagaaaaaagaatgaaaaggaacaaacaaagccttcaagaaatagggactatgtgaaaggacaaaacctacgttttattggtgtacctgaaagtgacagggagatggaaccaagttggaaaacattcttcaggatattatccagaagaacttccccaacctacaagacaggccaacattctaattcaggaaataaagagaacagcacaaagatactcctcagagcaaccccaagacacataatcatcagattcatgaaggttgaaatgaaggaaaaaatgtaagggcagccagagagaaaggttgtgttaccaacaaagggaagcctatcagactaacacagatctctctgcagaaaccctataagtcagaagagagtggggaccaatattcaaaattttaaagaaaagaatttttcacccagaatttcatatccagccaaactaagcttcataagtaaggagaaataaattcctttacagacaagcaagtgctgagggattttgtcaccaccaggctgcctttcaagagttcctcaaggaagcactaaatatagaacggaaaaactggtaccaggactgcaaaaacataccaaattgtaaagaccatcaacactatgaagaaactgcatcaataatgggcaaaataaccaactaacatcataatgacaggatcaaattcacacataacaatataacctgaaatgtaaatgggctaaatgccccagttaaaagacacagactagcaaattggtaaagagtcaagacccatcggtgtgctgtattcaggagacccatctcacatgaaagataacataggctcaaaataaagagatggaggaagatctgtcaagcaaatggaaagcaaaaaagcaggggttgcaatcccagtctctgataaaacagacttaaaaccaacaaagatcaaaaagagaaagaagagtattacataatggtaaagagatcaattcaacaagaagagctaactattaaaatctatatgcacccaatacaggagcatgcagactcataaagcaagtccttagagactacaaggagacttcagactcccacacaataatagtgggaaacttttaacaccccactgcaatattagacagatcatcgacatcaacaaggatattcaggacttgaactcagctctggccaagtgaacctaacagacacctacagaactctctaccccaaagcaatagaatatacatcttctcagcaccacacagcacttattctaaaatttatcacataattggaagtaaaacaccctcatcacatgcaaaagaacggaaatcataaccaacagtctgtcagaccacattgcaacaaattagaactcaggattaagaaactcactcaaggccaggcgtggtggctcatgcctgaatcccagcacttcggaaggctgaggcaggtggatcttgaagtcaggagatcaagaccacctggctaacacggtgaaaccccgtctctactaaaaatacaaaaaattagctgggcgtgtggcgggcacctgtagtcccagctactcaggagactgaggcaggagaatggtgtgaaccgggaggctgaacttgcagtgagccaagatcgcgccactgcattcaagcctgggcaacaggcgagactctgtctcaaaaaaaaaaaactcactcaaaactgcacaactatgactgggcgggtggctcatgcctgtaatcccagcactttgggaggccgaggcaggcggatcatgaggtaggagatcaagaccatcctggctaacgtggtgaaatgccatctctaataaaaatacaaaaattagccgggctaagtggtggaagcctgtagtcccagctacttgggaggctgaggcagagaatggcgtgaacccaggaggtggagcttgcagtgagctgagactgcaccactgcactcagcctgggcaacagagcaagactctgtctcaaaaaaaaaaaaaaaaaaaaaaaaaaaatgtagaactacacggaaactgaacaacctgctcctgaatgactattggataaataatgaatgaaggcagaaataaataaattctttgaaaccaatgagaacaaagacacaacgtactaaatctctgggacataactaaagcagtgtttagagggaaatttatagcactaaatgcccaaggagaaagtgggaaagatgtaaaatcgacaccctaacatcacaattaaaagaactagaaagcaatagcaaacaagttcaaaaagctagcagaagacaagaaataactaatatcagagagaactgaaggagatagagacaggaaaaaacccttcaaacaaatcaacgaatccagggcggttttttgaaaagtttaacagaatacatagacctcaagctagactaataaagaagagaaagaatcaaatagacacaataaataatgataaaggggatataatcactgatcccacagaatacaaactaccatcaaagaatactataaacacctctacgcaaataaactagaaaatctgaagaaatggattttcctgtacacacacaccctcccaagactaatccaggaagaagtcgatcactgagtggaccaatagcaagttctgaaattgaggcaataattaatagcctaccaacaaaaaaggtccaggaccagacagattcacagccgaattctaccagaggtacaaagagggctggtaccattccttctgaaactattccaaacaatagaaaaagaggaacttctccctactcattttatgaggccagcatcattctaataccaaaacctggcagagacacaacaaaaaagaaaatttcaggccaatatccctgatcaacatcaatgtgaatatcctcaataaactacggcaaactgaatccagcagcatatcaaaaaccttatccaccatgatcaagtcagcttcaccctgggatgcaaggctgcttcaacatatagaaatcaataaatgtaatccatcacataatagaacaaatgacgaaaaccacatgattaactcaatagatgcagtaaggccttcgataaattcaacaccccttcatgctaaaaactctcaataaactaggtattgatggaatgtatctaaaataataagagctatttatgacaaacccacagccaatatcatactgaatgggcaaaactggaagcattccctttgaaaaccggcacaagacaaggacgcactctctcaccactcctttcaacataatattggaagttctggccagggcaatcaggcaagagaaagaaataaagcgattcaaataggaagagaggaagtcaaattgtctctgtttgcagatgacatgattgtatattagataagccccttgtctcagcccaaaatctctgaaggctgataagcaacttcagcaagtctcaggatacaaaatcaatgtgcaaaaatcacaagcattcctatacaccaataatagcaaacagagagccaaatcatgaacttccattcacaattggtacaaagagaataaaatactaggaatacaacttacaaaagatgtgaaaaacctcctcaaggagaactacaaaccacaaggaaataagagagtacacaaacaaatggaaaaacatttcatgctcatggataggaagaacaatatcatgagaatggccatactgcccaaagtaatatagagattcaatgctatctccacaagctaccattgactttcttcacagaattagaaaaaaaactactttaaatttcatatgaacccaaaaaaaagcctgtatagccaagacaatcctatgcaaaaagaacaaagctggagcatcacgtgacctgactttaaactatactacaaggctacagtagccaaaacagcatggtctggtaccaaaacagatatatagaccaatggaacagaacagaggcctcagaaataatgcacacatctacaaccatctgatctttgacatacctgacaaaaacaagcaacggggaaaggttctgtatttaataaatggtgctgggaaaactggctagccatatgcagaaaactgaaacggaccacttccttacacctctactcaagatggattaaagacttaaatgtaagacctaaactgtaaaaaccccagaagaaaacctaggcaatacccttcaggacataggcatgggcaaaacttcatgactaaaacactgaaggcaattgcaacaaaagccaaaactgacaaatgggattaattacactaaagagcttctgcacagcaaaaaaaaaaaaagaaaaaaaaaaactatctcagagtgaacaggcaacctacagaatgggagaaaaattttgcaatctatctgacaaaggctaatatccagaaactacaaagaccttaaacaaatttatgagaaaaacacaaccccatcaaaattgggcaaaggatatgaacagacacttctcaaaagaagacatttatgtagccagcaacatatgaaaaaaacttcatcatcactggtcattagagaaatgcaaatcaaaaccacataagataccatctcatgccagttagaatagcgatgattaaaaagtcaggaaacaacagagctggagaggatgtggagaaataagaatgcttttacactgttgatgggagtgtaaattattcaaccattgtgcaagacagtgtggtgattcctcaaggatctagaaccagaaataccattgacccagcaatcccattactgggtatatacgcaaaggattataaatcattctactataagacacatgcacacatgtatttattgcagcactattcacaatagcaaagacttggaacaacccaaatgcccataatgatagactgaataaagaaaatgtggcatatatacaccatggatactatgcagccataaaaaagaatgagttcatgtcctttgcagggacatggatgaagcggaaaccatcattctcagcaaactaacacaggaacagaaaacgaaacactgcatgttctactcataagtgggagttgaacaatgagaacacatggacacagggagtggaacatcacacctggggcctgtcagggtgtcaggggctagggatgggatagcattaggagaaataccgaagtagatgatgggttgaagggtgcagcaaaccaccatagcacatgtatactatgtaacaacctgcacgttctgcacatgtatcccagaactttagtgaaagataaaattttttaaaaaagcacctgcttttaacagtttgttcttcaccaagtcaaatatgtagtttgaagttcagaaactaaaagataggtgacatggtgaaatcacagtctaaaaagggagataaagtcaggagagaaaatgtgaatgcaactataattattagtcttctaacactctctcccctcccagcctcaggtggacttacaataagagcatgggctctgcagctaggagagttcactttctctcatagatattaacaccttttcaattaccatgaggctccccaaattgaccccatatatacctaagttaataactgggaaatctatgtaaatgatattaattgtctcattattatattaattatctatagccatatcattactatagtaatcagacaattcactctacatttctgttatgtttaaatttcacaaaaagtaacatattttaaatgtattgcttcaattatttagataaataaataggaagtcaatagctgtgccttcacagtctattttccctagatatcctaacaagcaactagggcaatggctgcctgaaggtaaagaatagagtggaacaaaacaccttactggtaagtaaaatcaaacagaaccaaagcaaagaaaacccaatcactcataaagcggaaataagtatgaatggtggcatctcagagttactcttccaaacaaaatacagtaaaacaccctgaacaaaaggactgtcagaaagcataatatgaagtatacaccattagaacatctcattcttcatgcttctaagtaagggatatcacaggggattacactatagccattacaatgcaaaaagctattttcacccaaagcttcaaatatcttctcagcaaatcttccaaacatattaatcaatttaaagttcattcattcatgtcatttttttcttcacgatcctctccaacccacaagaggagagttactttgtctctcttgcccacaattgtatctctagaacctaaaagacagcttagctacaaaagtctgtaaacatttggcagaagaaaaagaggcagagaagggagggaatgagaacaaaactattaaaagaaaggctattaaaaaaaacagacactacataaatgagaaataatcctaatttgaccaaatataattttggaagccaaattataggaaactgaaacatatagacaggggtccccaacttctggggaaccaggatgcacagcaggcaagtgagcaaagcttcacggtatttacagccgctccccaatgcttgcattaccacctgagctccacctgtcaggtcgtggcggcattagattctcataggagcatgaaccctattgtgaactgcatgtacgaggactaaattgtgtgttccttatgagaatctaatgcctgatgatgtgtcaccgtttcccatccccccaaatgggaccatctagttgcaggaaaacaagcttagggctcccactgattctatttatgatgagttgtataattatttcattatatattacaatgaaataataatagaaataagtgtacaataaatgtaatgcacttgaattatcccaaaaccatcccccctaccctggtcctagaaaaactgtcttccataaaactggtccctggtggcaaaagttggggactgctgataagagcaagaatccttggactctcatcacttatcaatcccagaaatatacctcaatagcatggaacaaagtcccttggaggaagagtgactaaaaggaggaagagaaaaagaggaagaaaaaagttagtgcagacacggaatgagacgtgacttaaaccatgaggtgggggaggagcaaaggaaaggccaggtgatgaacactttcacgtacaacaccacattgcctcacttcaggtcagaattcaaccaatgtgaagattttttttccaggttaatttccacgttcatattatgtacaagccacttttctcattgttatggaaagcaaccatttttgaccatacacattacaggaacttctgaatcagagtcattttatccacacagggaaagtcctacttatgctgatcatgtgctttcagtttttccacattaccttggagtctgccactttatccagacctaactcttgatgaccctgttaatccgttcgtttttttcatgattcgtcatagttgttgcaagccgaaggctgctgagaactgtaagttttctctcaccgtcagagtgcccatcacaacatcatccttaggcaaatagcattttaatgagacataatgataatgagtcttttctaagaccatgactgttagtatacataacataatccacaaagataacataactaaggtaaagttctagctaatgtgaacctgcagttctgcaaatgacagttaactccatagatgtctgcaaagcctgctatatcatttttcaccccctatctgtacacccaaatagaatgcaagtaattatgttaactaccgcagacatttccaaactgcttcatacaaggatttgccaaaatatctttctaagctagggaaaagaaaggtgaaggaaaggcaaaaaaggataacagtagtatgtatcattttagaaatatacaaaaactagaattggtatcactgtccttacaagggccatattccagattctccctccttttcacataagtgtctatgagaaattaagaaaagctgctgtaaagaacgtcagttcaggaccatgtcacataatcaactggaagcacattgaactatcagccaaagcacttaccctatagaaacagaggaaacagaaaatgcaaacccactaatacttacttgtaccacgtaactgaattacatttgaaattggcaggtcgcggtgctccatttatcagaacatctccagatatccacttggatctttccttgcagctaagacatctaataacctataagaggacatatatgtgtgggtctaataacctataagagaatatatatgttgtggggtttttttccctccaacaatgctatatatctcatggctactttgaatccaaattctactttagttagaaaattaactgtcaagaaattctatggtttaactaaaattatgcttttaaaaattctcacctttctctttcattgtacattacaataaagccccaaaacataaagcaagacaccattggctgatcaagacagatctcccaaatggcccttccagctgtctgaccttggaggtactaacacaggcaattgctcttttatctaagactcatgcctttacttacatcttctgcttcctttccctactttaatattctcccattctttttcctccctattagctgataacatggtcaactgctacatgtaatcaccttatcaaatcctattagtaaagctaacctaataagactacctggtctttgggaaaaaccacgcaactacagttatccacagcacctagaaccagacctgacatgcgttgcaatgctcaataaatacctgctcgcacacaaaaaaaagtggcttttaaaagcacattaaaatgcacagaaaacgcttacttatactctcttatactcacgaagatttgcctccacctgtggtcccaggatggcgttgagaccaggtttcatgatcccactgtaaacacaaaaacagactatttactattccattttaagtcaggttctattaatttagggtaggcactgaatatactcatgaaggttgatgaaattacaaatagaacacaagcacaaaccaactcttaaagaaaacaacaaacaaaacaggtcatgcatggtggctcaggcctgtaatcccagcactctgggagacaaagcaggattgcctgaggccaggagtttgagaccagcctgggcaacatagggagacacgtctctacttaaagaaaaaaaaaaaagattgttgatttgatgtgtaatatataatggatttaatcactggtcaagtcctacaagaaaaatggcatagattcctctaaattcctttcactattctctaacccatttatattttctggaaaatgacattcaacatttaacgttccttgaataactaacagattcttgtgaaacatctccgttacacttactgctcttaacacagtgtgaacgaaatacatggcgtgttctgagtactgtttgatgatcagtactgtatcttcaagtgtcacatttgctacctagtcaaattctacacaattaataagtcgctaatttgtggaatacggtagaagtattctcactgctaaaatctaatcagcccaagaaacatctaagtagaaatcaggctgggataaagcacttcaggataaaaagaaaacatgaccgaaagaaaaaaaaagcctaatccatttagaaaagtaaaagatatatcctcaagatatatcattttcttccttgttagagtcagataaatacactggaaaattccaagtttagaaggagaagacatcactttggtaggtcatcctttaagaatatgaagacgtggtacatacataagcacgtttcaaacaaagtgatgtctgagggtagtgaatattcagatagagaaggaaggtggaaaaaattatggcagtgtgactgtgctgagacccaagaagacagcaaatagtttgattttctcctaaagatagcaatagaatgataagtgaaggaactggagaaaggagaatttggccgggtgtggtggctcatgctgtaatcccagcacttcgggaagccgaggcgggtggatcacttgaggtcaggagttctgaccagcctggccaacatggcaaaaccccgtctctactaaaaatacaaaaattagccagcacggtggtgggtgcctgcaatcccagctactcgggaggctgaggcaggagaatcacttaacccaggaggtggaggttgcagtgagccgagatcacgtcattgtactccagcctgggcacagagcaagactccgtctcagaaaaaaaaaaaaaagaagaagaaaggagacttcagggggggcctggcttgttcctttcaaaacacaggtatctatgcccattctctccttagaattataagtaagttacaatatattccacagagaaagtaatatctattccaaatggaaggtcaagccaaagactatttcattctcaaataatgattagcacagaggccaatcctatgatccttacaattatgagtgataagcaactgcaccacagtgcttaaacccaagactccctgagcattactgcctgttgtacttgaactatcacaattgtacaatggctggtgggtacaagggtgaatgtagctttcactttgctcattaactggggtatctctcagtgaaacgctgcacaaagcaatgggagttaggtaaaccaggagcaagatctaacagaaaaatctcttactctttcagggactcttccctctaaatgtgtaaaacaacatactaatgattgggcaaattttcaaggtcatttatctatagctcttgatgcatcttctttataaacagctccctaataactgcctctaaatcaccataagcttgttattcactaaggctccactgtcagaaaagctttccaggttttaaaatacctactcaaataaagaccaagcaatcctaaatgattaacccaaacctcaacagaatgttctaagacaaagagcttggcttactactttgggatgaaaccctggcattacagaaacaacaacaatgtccagtcataaatgccaagagtttccatttggagcagtggctaatccaactccatccactcaacacaatgatcaagtatttactgtgtacatacaagatattctctagggcatgggagagttgagaacaaaacaaacaaacaaacgaaaaacaaagtctgagccttgtggagtttacattctagtccagggatcagcagttttcttagacaaagggttgttgaacagggccgtgctcattcccttacatattacctagggctgctttcatgctacaccacactgagtagctgcaacacagacgcatggcccacaaagctgaaaatgtttattaatactattgccctttatggaaacagcctgctgacctctgttctagtctatggtctacaattcactgcctgcccaccccaccctccacccttctatcatccctgaaactgcattccccacccttattattgctttacagcatttgcatgcaggtcagtgtccctcactataaaagtctgtcaacagaacagcatgccacattgctaccacctctcacaccctcctgcccatgacatacagcacattgttgtaaaccactgaacatgaacctggaacacagggaataaaatttaccccaaaattcctgtcacctctattacattttagtggataatgattaatcccttggtcttgttttgttttggacaagagaggtcaatgctcacctccctcccaccctcccatccctacacacacaaaacttcactttctcaatcaccacgcccgggccctccaatttagggttggggctcccattggtcttctaatcaatccttttatcagcgtgaaagtgtgttctgaatcccccactaggctttaggcttccctgaactgaggatttacctgtgtcactagcatcttgcacaatgtcctgcacagcaggcattcaaaatttgttgaataaataaatttctgcatttttataaatgggattactctaaaaagacaaggaaaaatgttttcaccttttaaaaaacgttgagaagagatagctgagggtggggagattgtttatattatggaataggaaaattaggaagtatatccttaacgtcatccttaatgtacttgctgattttcttattccataatataaacaatctcccaccctcttagccaattagagctagatttgtcactttttgaaattttactaacatggaaatatagacgaatcttgagggttcagatgagaattggagaaattaatgagaagccataggttttaatcatatacaaagacagctatagaaacataaagatggaaactcccagggtgctgcgggaatgtcaccactgctcccccagctcttctcccgcccgctttggccagatctgtatgcacctgccgtgggaggtagttttttaaaaagttatgcatgtatgtgtatgcgtatgtgtgtagacgatacacatacatatcttctctaggtctcactccactgagaaagcctagaaacaatgacacccaatagcaatgagcattttaaacacctagattttggttttgtaaatatctcctccataaaatcaacagctgattctaggtctgaggcagggtaagtacacagtgagtctggaactgtcgctgtgccaagcaaatattcaaagaatgaggcaaggtgggagaaacacttgagcccagagtttgagatgtgcctgggaaacatagtgaaaccctatctctacaaaaaacttaaaagtagctggaagtggtggcatgtgccggtggtcccagctactcaggaggctgaggtgatagatcacttgagcccaagagattgaggctgcagtgagctatgatcatgccactgcactccacctgggcaacaacgtaagaccttgtctctaataaaatttgtttaattacaaaaagaggcgggcacggtggcttatgcctgtaatccctacattttgggaggccaaggcaggtggatcactgaggtcaggagtttgagaccagcctggccaatatgatgaaaccccgtctttactaagtacaaaaaattagctgggcatggtggtgggcacctgtagtcccagctaggaggctgaggaggagaatctcttgaacccaggagccggaagttgcagtgagccaagatcatgccactgcctccagcctgggcaacaagagcaaacctccatctcaataaaataaaataaaataaaataaataaaataaaataaaataaaataagaatgaggagatatatccaaagaatgagagacgggagagggaagaacccaccttgaaagatctcccaccaaatcaggaacaataagagtatgaggtaaaacataataatgcgttaattgaataaaatacaaatccctgactctatactggtgtagatgaaggtttttccttttagtaaaacaaactaagagataatgataatagaaaatcatgtttggcgactatgatagtggtggctgactcaggcaggagtcatccagtggggactgagttggtgaagtttaatgtagaatggagttctggaataatgtcagtttatctctcctcatacactaatcaattaccaaggggaaagggtgacattatagccaagtttggcagacatcaaatgaccaagtgatcaattttaacatcaccaggggtgggatgagataagaaaataccacgtgaatgagactgaagagacaggatatggtggcagtcaaatatgtgaggggcatggttgaccaaggccctgaggacctaccacgaccttcattacaaggctacatttccccttggctcccctggacaatgtctgagtggttatataggagagggtcgttttttcaagaacacacacaaggagttaaggagaaggaagcaccatgtggacagcctgcactcacacggttcagaaaaaaagtaatgaccatgggaacatgaagagacaaagtgatgagaacaaatgcagtgaaatgttgctgagaacctgaatgaaaagggttatgttcctgaaacgtttaaatttaacatcaggccggtgcagtggctcatgcttataaccccagtgctttgggaggccaaggtgggaggatcgctaagcccaggagttcaaggccagcctgggcaacgtaggaagaccccatctccacacacaaaaatttttaattagccaggcattgtggcatctagctactccagaggctgaggcgggagatcacttgagcccaggagttggagcttagagtgagctatgattgcagcaccacactccacttaggtgatgcagcaagactccatctctaaaaaataaataaataaatttgaaatcattcaaaataagttattaattaaaaatgttccaagagtataatgaatttctcttaaaataacggacatccacatatctatgggaatgaatttttttttccataagatcttcagcgttggtggggaaagctcaaatgctgggtatggagacaaacaagcataagagaaagatttgtcctaatcagaagaatcacaactttttaaattctcatggtcagactgtttttatcttcttcccccgcagaggaaatcaggttatagtgacttagttctagaagtgaaattacaaaatgtccagagaaaaaccaaaatcaaaattctcatcagcttttttggaatgtagatgactatctgaatgtgatgctgctatcaaacacaaatcaaaagtaagataaatgacagcagcccttcctctactccagaaactgtatttagagttggagccagcagataggagaaagactggaaatactacaccaaaaaggcctttctcatggatacttaaacaggaaatgccagcagcaaaaacaccaaccctgatgacctttccactaaaatgtgaaagaattgcaagatctgactgcatttttatgacctagtaaggaacacagttctattcatgcagtaaagatgaactcatctattgctgaaatcatgccatttgaccataaaaaaaaatgcgtggcctggcacagtggctcacaccccagtgtttgggaggctgaggcgggtggatcatgaggtcaggagttcaagaccagcctggccaactggtgaaaccccatcttgactaaaaatacaaaaattagccaggcatggtggcacacaccgtaatcccagctactcgggaggctgaggcaggagaatcacttgaacccgggaggtggagttgcagtgagccgagattgtgctgctgcactccagcctgggtgatagagcgagactcccctcaaaaaaaaaaaaaaaagtgtgaagccttgagcagacgagacttctagtgcatcaagtactcatctactaactttaaaagataaaataagcaaaataaatgcaccctcacaaagtagctttttctttttcttttaagataggctctcactttgccacctatttgtacagtgggacatcatcgcccactgcagacttgatatcccagattcaagccatactcctgcctcagcctccaagtagctgggatcacaggtacacaccaccacgcccagctaattttttgtattttcagagagacagggtttcactatgtcggccaggatgttctcgatctcttgacttcatgatctgctgcctcggcctcccaaagtgctgggattacaggcatgagccaccatatccagccacattggtgcattttttaaaaaagtctggcagttactttgagagttaaacatatacctaaaattggcccaattatttcactcctagtttagctaaaacaaatgaaagcatgtgtctgtatattgtgcaaagacttgtacaaaaatgttcatagccagtttcttggaaatagccaaaacctggaggttcactgtaggtaaattaaaaagctgtctttttacaagttcatgtacatacttgaattcgataatatttctttctcaactggttttcgacaaggtagaaagccactcttcagtttactcgatagcagatgttatgaaaacttaacacagctccttcagtaaatgccttcaggtattggaagctgtcgcggggaagccattggtgtttccttgtgacactgggataaaaacttgacattactggaagacatctggagagtttttatctttctgcagacagaaaagcaatagtagttgatagtccagataaatgagattgcaaacactaggtgacaatacatttaaaacaagccatttttaaatgtgtggcaatgagcagcttcatttccaatgaatggcccataccattggataagaacatcctaaaaacctaaatgggaagacaggcacaacttggaatgcataaactcaattagatgtcaaatacatccctaataagtaaatgggtcctaataagtaaataggaaggtatgaaaattacaaaaaactgataaagcaggaaaaggatggatgagggttagacttgttggcttgaaaagcatattatgatataagtcaagtgcagggacagactacatgctcatcacagaatctctgtattttttttcaagaccagcctggccaacatggtgaaaccctgtctctctaataatacaaaagttagccaggtgtggtggcgtgtgcctgtaatcccagctacttggaggctgaggcaggagaatggcttgaaccagggaggcagaggttgcggtgagcagagatctgccactgtactccagcctgagcgatagagcgagactccatctcaaaaacaaagggaaaaaaagaaactctattttttttaattgcggagtttatagcatcattattatcaaaaggggttagccaagcagtcaggaacaggagacatttctctgaatttatagctccagactttatgcggaagttgttatgcaccttcaatcagcaaagaaggtaaactccaaaattgtttgcaatacataataatttccttaattaataagtatatttaaattctagggagatttaaagttaggacgaaaatcattaagtaaatcaaaccaaaagttgagcaaaaatttaaaacaaaaaagaaattaaatgtatcaataaaatgtgaactatttcattaaacaaattacaaaaggcctcaaaaagatttatttgagtaagaccttaagatgagcttaacaacttgtgaaacaggtttgaaagttaacttcaataaatgtagttttaatttttaaaagtcaaagtaatccatgacgaacttctctctgcctatgattgagttgctgttcccaaacagtcctcctaagcacaacgacaaaatagaccaaaaaaagtaagaagaaactgttgaagagttctgtctgataaaagcaaccaaacggccaggacatgaggaaccaaaatcacggaatggcgggactgaagcactgaaacaaacctgcattccgcgtgccctttcctcttaaggtgggtatttgcacacaaaaattgtacacactggggcacagctcagacaaaccaagcaggaagaagctgctagaagaaatgagtcggctactgaagcctctactatttctgagcagatatttcagcagtctgtcagcactagggagacaaattttgttggtgttgagtgcctaacagaggaggagccctggaaagagatcccaaaagattatgctctgggaatgtggacaaaccaaaaaaccagtctactcaatcatggcgatctgtcagactgctagaagaaggttaaatccactctctatgaagatatcatccaaattttcaaaaaaaattgccaggcatcaggaatctctctgaatctgctgtgattctgaaggctgcctgttcacgaatcataagtttaaaaataatgaaaaaaatttttaaaattgccaggcatgccaaaaacagaacctgatgttccggaaatgagaaaatggaaacagacccacaagtaatctagctggagttaacagacattgacattaaaacaaaagattgatgtgtttaagaaaattaaaaacagactctcaccaaggaacaaagatctacaaaaacaaacaaaaattaagaattcaatcatgagtttaacagcagctttcctagtttagacacaaattaggaaagagaatttagtgaatggaagactagtacacagaaaacatccaggatgaaaattatgaatgatgaaaattattacatgaaagggggaaaaaatctcctaattaaaaagaatgagaactacataaaagagcatacaaacatatgggataagatgaaaaaggtctgtcatacgcataacaggcaacctgagagaaagggaaaatgcagcaaaatgggtacttagacagaatcagtatttgaagaaatactggcagtattttccaaaactgacaaaggtatcaagccacagattgaagaaactctaggaacacaaagaggatgaatacaaaaaaagacaaatctaggcatatcataataaaactgccaaaaacaaagttatctcctaataactgtttctgtaatccagaaacataatcatatttacaagtcattcatttggagtctggaaaagtagaaaccatttaaagactgacacccagcaaattcaagtacatggctgggttttaatctgtgaacacaatgaatggtaataattagccaaaattctttctcttgaagcagtgaaagagaaggcacaagtacagtcagcagccctgtccttgagtttgcatctgaagattcaaccagtcgcaaatcgaaaatattaaaaaataggacaggcgtggggttcacacctgtagtcccagcactttgggaggtcaaggcaggcagatcacttgaacgcggaattcgaggccagcctgcacaacatggtgaaaccccatctctatcaaaaatacaaaaagtagccgagtatgctggtgcacacccatggtttcggctactcgggaggctgaggcaggggatcacttgagcccaggaggcagagattgcagtgagccgagatcatgccactgcactcagcctgggtaacagagtaataccccatctcaaaaaaattaatatttaaaaataaatataatggatggctgtgcctgtacacaacatatacagaattttttcatcattatttcctatacatatagtatcacaactattaccataacatttacattgtattaggtattacaagtaatctgagatgatttaaagtatatggaacaatgcgtgtacattatatgcaaatactatgccatgtatatcaggaacttgagcatatgtggatttgggtgtctgaggggagtcttggaaccaatccccagggatctctagagataactgtaatgtatggacttcacacctttacttcaaaaagttttaaaccatctccccatgtattcagaaaccaaaatacaccaattccaacactagcaacacttcttctactgccatccccatttgatgttccttcagccactgaggaaaagacttctaagagtatcaaataacttattgcttgaatttaaatagctcactgactcaagacggaaatttaaagacacttttgtgaggtttccacaaataaaaggcaacaactagagctaaagtaccaagaaagagtgatcacccatgcccatacaagacagagggtaacacttataaatacaatccaatcttagaagtgcctgcagagaaagagtttgcctttcctgtgataggattaaatgtgaattcacattactcaggagctgtttcattcctggctaggattctaacaatcttcctcggagatacagggccttagtcattcatgagtcacaaaccaagtgattagacaggtataaccaggcacaccatcaagctgaagcacgttacatcaaaaagaaaggaaaaaaaacaaactttattctaacaccaatatggagcaatacacttactctaagaaaaaaaacatagtaaggattaataaataaaatataccaactcagcaccagactcatctcaaagtgcccgatctctaatgatatagtattctgggtttagggaactctctaaaagtaacaactacctttaagcaaacaccgtctttccccatggtcagaagctttctggacatgtgtgctgatctcattggattagcatatctttttatatcaaggaaaatacccatcacacaacgagatgtccctacaacaaaaatcacctcccacctgttgccgtttccttatttgcagattacctgctaaggctaatccatttcttttctctttctgtgtcctagaccccctgcaaagccttaagtgaaaggaagccttcaaaggctttacactttacctgatcccagccgattcatgttatttggcctgattatgtatcttgccaactcaaaaagccctttcaaataagacagaagggatttgcatatggagattctttcccagctctgctgcctctttcgtgctggtctacctatgtcattcatacctcgcctttcttttgcttcctaactagcaaggccacatttttactttttttttttttttttttttttgagaggagtttcactcttgttgcccaggctggagtgcaatggcatgatctaggctcactgcaactccgcctcccgggttcaagtgattctcctgcctcagtctccctagtagctgggattacggccgatgccacaacgcccaactaatttttgtatttttagtagagacgaagtttcaccaggtggtcaaggctggtttcaaactcctgacctcaggtgatccgcccacgtcggcctccaaagtgctgggattataggtgtgagccactgcgcccagcacatttttacttttttgagaatttaaccatttgtcttcaatatatgctggtactctattataaaaatgataatctgcattcagataccgtatttctcaatttttttactctttatcaaactcttaattgtatagaacacctttacaattggaaagctcaaattgcgcaactcaaaacaacattttcatacaatgaaaatgagaagaggaaaaaaaaaaaagtgcacaggtagagcctaaagtcttcagcctgccaccgcccagctggaactactgcatttgttggtagaagccaagatagcctcaagttgagaattcagactctactcttccttttttttttcctaggatgacgctagtatatggagttgcactcacctcatagccatagggcatgctgcataaattacatacctctttaaagtgtttactgagttaatctcaaaagataacaatcctgagcaatcaaatcactgtcaggcgattgctacaaattagcagtggaaaggaaaaggaacacaaaatctgaagtttaacttacataaattgtccctgtctttaaaaggtatcatggtattttattgcctttaaaaggttgatccatgggctttctgttatatccgatttgacagatttgtcctgagaggtccagtgttgattatattcaggccaaagcctgcttgtatggtggtttcagagttaaactggctaggtgctctaggaccccacacatggcagcacagtgatctggagaacgcggcctaattcccgacagacaggaagagacccatcaccaaagggctgtatggtcagtgagaagccactgaggccttttaatcaggaaaggccacaaccctaatgatgtttataaaggaacactctgggccaggccaggtgcggtggctctgcctgtaatctcagcactttggaaggctgaggtgagcagattacttgaggtcaggagttaagaccaccctggccaacatggtgaaaccccgtctctactaaaaatacaaaaattagccggcgtggtggtgtgcatttttgatcccagctactcgggacggcaggagaatcgcttgaatcagaaggcagagattgcagtgtgctaagattgtgctgctgcactccagcttgggcaacgagcaagaccctgtctcaataaataaataaaggaacactctgctgtgtggagaacaacagaggagggagaggcaagtgtggaagcaaggactagcggggaggtaactgcaaaaatccagggagccatgcttggataacagaggcaatgacagtggggacatcaaaggttaaggctttagagggatgaacttttgttaaatcagaaccaaccaagactcatggatgacaaacctgccaccctccttgggtcttcagtttgcaacaacgtatcgctgttaggttttcttaaatgttatttagagaagaaaaaatccttttccatctcccctgtgggttccctagctgggttcctagaattaaactggcaatagacaggttaatatgaccaaaaaaaaaaagtttccttacataagaaggtgggagtttcataaacaaatcagagtctaggacaaatccatatgactgaggctttttttttcttttttcaagacagagtctcactctgttgccgaggacgtagtgcagtggtgtgatcttggctcactgcaagctctgcctcccaggttcaagcaattctcctgcatcagcctccaagtagctgggactacaggcgcccaccaccacacttggcgatttttgtatttttagtgagatggggtttcaccatgttggccaggctggtcttgaactcccaacctcaggtgatcccctgcctcagcctcccaaagtgctgggattacaggcatgagtcaccgtgcttggctaaacctgttaatttttatagcaaatttagccaggcgtggtggtccacacctgtgatcccaccactggggaggctgaggtgggaggatcccttgagggtccatgagacggaggctgcagtgatcgtgattgtgccactggaatccagcctaagcaacagcgtaaccctgtcaaaaagaaagaaagcaaagaaaaaggagaaagaaggaaggaaggaaggaaggaaggaagaaggaaggaaggagggaggaagggagggagggagggaacaggagaaagaaaggaaggaaaaagaaagaagaagaaagagaaagaaaaggaaagaaagaaagaaagaaagaaagaaagaaaagaaaggtaaggaaaggaaaggaaaagaaaagaaaagaaaaaagaagagagaaaaggaaggaaagaagtaaaaaagaaaactaaaagaatccattgaactcttccaggcaccctcacaggcttcccatgaaagtcccaaagagcctggcactattgtgcctgaaattccagctgtgaggctgaggaggaggatctcttgagcacaggagatcagcttgggcaacatgacaagaccctgtctcaaaaaacgtacctaaactctctagcaatatataccagtatttagataacagctttaacaatcagcattaaaacgttctgcaagcttgggtcacagagcatgaactttcttcttcttcatgtctttgcccttgtgtctatcctacactaagtacacagaaaaatgatatttatgaaagtattcctttagaattccttgcaaatctgcaatttctaaaagtcatatttggatttgaaaacgaatttctctacagaggctggctatcataaaagcagggaactatttttgtttcctgcaggttcttcagactctgttctcaattattcctattaagtgaaagattaaatcaatgtgtcaactctgttgcaaggtagcttaataaagatgttagcactagcaagataaagtcactaacctgttaaggagtagattttgacaactcttctacagaatttagattctggtaagattactgactgcctataaaatttagagagcaaaaacacacatacagaatagactgagcatgaaattgtgaaaggtaagcacaaatccgaagcaaacctatctaagaacgcagtatgattaacacactgtagttcacaaaaactacaattatcctgtttcaatgcaggacatacttccagccaggatgtccttccccacctgaatttctacaacctcacattcctttgataactgagagattaaacagttccatccctgagggagcacaagacctgcgaggtgggagggtttagaagcaagttctagagaagacagaccaagtacagctgaatcttgaacagcacaggtttgaagtacatggccacttatacgcagatggaagaatgccaaacccatgtatacagagggctgactctgccttacactggttccacagggctgcttgtgggacttgagtatgcagggatttgggtatatgccccaaagggaccactgtaccccaagggacccctgtagatggaaaagaagaaaggagaaggaaaaagctgttctagtaaaggaatgcaaaatccttaatcgaaagagatatgttgggtctgtataccattcatgaggctggagtttagttttcagaggggggcagtaacaaaatgaggtaaaaaggtaagcaaagaccatcaaaagggtgcagcgtgcctgatcaggagctaagactgaccctggaattctggagggtccctgactgcaaggtcccagctctaccctctcctcactctatatatcctgatcctacaagattttcagtaaagccagcaaggtatctataggaaattataacttacagaaattaatacttattactaaggaaaaactgttttggaagggatcctatccaactgtacacacggttctgcctaatctttggtttttttaatcatgtttattggaaaccgtcaacaggaaacagtattgtaaacagtaaaattcatcctttttaagagcacagtttttgacattgtaaagtgtacacagtcctgtaaccactacaatcaagacagatcattcatgtaacccaaagaaatcccctctccttaccagagcccctgacaaccactaatcagttttctgccccttaatttttcagcttaatctaaatcctctctttgaatagaaacaaatgaacataaaccctacaaggctactgttttttcatttacattcccacaaaaatctgcaggaattctgccgtctgtacaaaaaataaaattgaaaaattagccgggtgtggtggcacatgcctgtagactagctacttgtgaggctgaggaagggggatcccttgagcccagggagttccaggctgcgtgagtcaagatcacgccactatactcccgtctgggtgagagcaagatcctttctctaaatataaaaataaataaataaataaaagaattctgtccaaattggttttaatctgtgattgaaagccaaaacttcagtctagaaaatcgtcaaatcataaatgaaattagaccaagtgcatttacatgcgtgttacatcccaaattttcttaatctaatctgcaatttggccagcagttcccagagggaacggagatgttcaaatcctaaggctgcccataaaatgctatccaatcctcacagaatgtgtggggtttcagctccttctccccttaaacttcctagccacagaacccggagaaactgcttagcctctccaagcctgtttctcacctataaaattaattcggccgggatggtggttcatgcctgtaatgccagcactttgggaggccgaggcaggcggatcacatgggtcgggagttcgagaccagcctgaccaacatggagaaaccctgtctctactaaaaataaaaattagttgggcatggtagcgcatgcctgtaaccccagccactcgggaggctgaggcggagaactgcttgaacctgggaggcagaggttgcggtgagctgagctcgcaccattgcatccattctgggcaacaagagcgaaactctgtctcaaaaaataataataataattcgatattactagacttctattatctggcaggcactggacttacaggagtgaacaaaacaaaacacagataaacatcccggccctcagtgaggttacatatgaaaaatatcagtcaacagtgctcggagaaaaaaaattaaagcaaaagaggaagggtgggccagaaatggtggctcacgccttaatcccagcactttgggaggccgaggtgggtggattgcttgaggcccggaatttggagccagcctggacaatatggtgaaatccttatctctattaaacatacaaaaattatccggggtggtggcgcatacctgtaattcctgctacttgggagactgaggcacaagaattgcttgacccgggaggcagagattgcagtgagccaaggtcacaccaatgcactccaacctgggcacagaggtggtcacggaaggcctttccagtgaggccctcaagcagagctctgagggtggcttctggaggagcagtatatgtccaagtgctggtcgaaggaacagcaaagaggccagtgagctgaagcagagtgagggaggataagagagcaggaactcgggttgtatctaccactgacacaggaaggactttggctttgatctgaatggcactggaaggcacaggaaagttctgagtaagaaatgatatctatatttaaagcaggagtgtccaatcttttggcttccctgggccacctggaagaagaattgtcttgggccacatataaaacacactaacattaacaacagctgatagctaaattaaaaacaaaaatcacataatgttttaagaaagtttactaatttgtgttggcttcattcaaagccatcttgggccacatgcacgttggacaagcttggtttaaaggatcatctgactttggtcatgggtagggacaatgcagggagaccacataagagtccaccataatatatcaagagccaagatgaggacactgtcctgcacccctccctccatagcctatgagagtccctgaaacctattatctgtgcatgttctgcaaaatcgcctgccccaaacaattccattcctgacctcctcttacactgcccaaactgggaaaacaaggtcaaaaataaatgacagtgttcagcttcaggcccacaggaagtgaataactcatttacatttaagaggggactgactagaagcccctatgaatttaaataaaaggagtagtgactggggctagaagacatagggagacagcggcagaagctctgggaaagtcatcaccctttctcttctccctttgcaaggttgatccaccaaattggcactgtgggaagattagcagcagtgaggtgggtcattagaacatttgggatcctaagtccccagggggaaacaaaatcaagttgagtgtgagttagatttacccaaaccacacagcattgtgcctacaacccagtccttgttctccgtgagtctagtacatgtcactacatgaagatcaatatccctgctcccttccagtttataattcaatcatcggaattgagtaaaaattatgaacagaggctgggtgcagtggctcatgcctgtaatcccagcactttggaggccgaggcaggtggatcacgaggtcaggagatcaagaccatcctggctaacacgggaaaccccatctctactaaaaatacaaaaaagtagctgggcgtggtggaggggcgccggagtcccagctgctggggaggctgaggcaggagaatggcgtgaacccgggaggtggagctgcagtgagccgagatggcgccactgcactccagcctgggcgacagagtgagactccatccaaaaaaaaaaaaaaagaattattaacagaaaattaaatgtgagcagcggcattacttccaaaattctgagacctacaataaaaaacatcatgatccagtatacaaagatataaaagaggagcatgtaatgtgtgtgtactccaaaatcatagaagggctcattaattattgcaaggatcctctctctaatccacgggtacagttaccatctcagaccaaataatgtctcatcataacacagtacttcttcattgctagtatgactaacataaatatgggtctcaaatccttttccactgtgaattcaatcaacagataccaaaattataatattaggatgtagtttaagctaccagctaataaaatgatcctggtttcttaccagagcctaatagatagaagctcacatatgattatttgttttggaagcactggcagggtttcatttgagaaaaaaatgggagctttaaaaattactaaatactaccaattttacttctttcccataagagactgaatccaagttggcaatacagtcaggtcctctataatgtttaaactttaaggcaatatgaattttcactcgcgtcgtgtgaagagaccaccaaacaggcttcgtgtgagcaataaagctttttaatcacctggtgcaggcgggctgagtccgaaaagaaagtcagcaaagggagatagggatggggccatttataagatttgggtaggtaaagggtaaagggggtttgttctctggtgggcaggggtgggggtcacagggtgctcagcgggggagcttttgagccagaatgagccaggagaaggaatttccaaggtaatgtcatcagttaaggcaggaacaggccattttcagttcttttgtggtggaagtcatcagttaaggcaggaaccaaccatctggatgtatatgtgcaggtcacaggggatagatggcttagcttgggctcagaggcctgacattcctgtcttcttatattaataagaaaataaaacaaaatagtggtaaagtgttggggtggtgaaaatttttggggggtggtatggaggagaatgggtgatgtttctcagggctgcttcaagtgggattaggggcggcgtgggaaccaaagtgggagagattaagctgaaggaagattttgtggtaaggggtgatattgtggggttttagaagaaacaattgtcctatataagtattggtgatggcctggatacaattttgtatgattgaaaaaagaacggaataagacaaggagaaaaacaggtattaaaggactaagaattggaggacccaggacatccaattagagagtgcctaaggaggttcagcatagccctgccagcaagatgatttatttactttaagagttgagagtggcggtttggggatagcaccaggagattcagctgtggtggcttggagaaacagtgtaaaccggcagtgtaaacaagagcagggcattatgagtagttgagaatggtgaataggagtatgactagacagaagatagtagggatgacagtttttgggggcgcagtccaagttggtctggtgtctggaatgagactggggcctaataaaaggagcatctatacaggagctcaaatgggctgtattttgtcgcattccgaagacaggccgaattctgagaagggcaagtggtaaaagtattatccagtcctttttaagttggtggcgagcttggtgaggtgtgtttttaaaagaccagtagtccgttctacctttcctgaagattaggatggtaagggatataaatgtttcactgaataccaagagcccgaaaaactgcttggcgatttgactaataaaggccggtcctctattgaaccgtatagaggtgggaaggccaaaccaggaattatgtctgacagaagggaagatatgaccgtcgtggccttctcagaccctgtggaaaggcctctacctatccagtgaaagtgtctacccagaccaagaagtattttagtttccgactcggggcatgtgagtaaagctaatttgccagtcctgggcaggagcaaaaccccgagttgatgtgtagggaagggagggggcatgagaaattcctgaggagtagtagaatagcagaggaacactgagaagtgatttccttgaggacagatttccacgatggaaaggaaatgttctagaggcaggctagcggcttgtaacctacatggaagaggttatgaaatgatgacagaataaatgggcctgtgaggctggaaggagatattttccttggtctaagaaccatttgctttgttgggaagagattgataggtggaagtttcagtgggggagtaggtgggagtgaccaatgcgagaagaaaaactgaccctgagggacagaagttggaacactagttgcttttttagctaactatcagcataagcattgtcctgagcgatgggatatgatacctttttgatggcccttgcatgaatgactccagcttcctttggaagtaaagcggctttgagaagcgtttttattaaagagcattaatgatagaggacccttgtgtagtgaggaaacctcttgcatagtggtgcaggattggaaggcatatttagagtcagtataaatattgatgtgtagtccctttgcaagagcaaggcttgacttcaggcaatgagttcggcttgctgagcggtagtggaggggggcagagtggtgcctcaatgatagatgtggaagatactatagcatagcctgcctttgctggtgagtggcattaggactggtggaactgccatcagtaaaccaagtgttcagggtgaggaacaggaaagaggaaatatgcggaaatggggtgaatgcccggtggatcagagagatagtcatgggggtcagtgtggtatcaggaataatgtgggaggccggattgaagtctgggccaggaacaatggtattgtgggagacgcaacaaagagtgagtatagctggaggagccggggagcagaaagtatagtgtcaggtgtgaggaagaaaatagattttggaagttatgagagctgtagagagtgagtgagcatagtttgtgattttgagggcctctaaaagtattagggcggcggcagccactgcaggagacatgatggctaggctaaaacagtaaggtcaagttgtttggacaaaaaggctacagacgcgatcctggtccttgtgtaagaattctgactgcacagccctgcacttcggctgtggtaatgaaaagggttgggatgagtcagggagagctagggtggggggcagtctctaaagcgtcttgaaggaatggaaagaggagtggggaaaggatttaggatctatggggtcagctagtttccttttgtgagtttatataatggctttgttaggatggcgaaaccaggtatccaaagcgaaagtatccaaccatgcctaggaaggaaaggagttgttttgtagaaggtgttggggttgagagatcagtcagacacgattggcagggagagcacgtgtgtttttatgaagaattatacaagataggtaacagatgaggaagaaatttgggtttgactgaagtaatgggggctgtcgtgaagccttgaggcagtacagagccaggatgagccagaaggaggaatttcacaaggtatgtcatcagttaaggcaggaaccagccatctggatgtgtaagtgtaggtcacagaggattgatggcttagcttgggctcagaggcctgacaccaatcttttcagacttagcatttgctagtcacaaactttttattatacataaaaagttcaaaagtaactctaggccgggcacggtgctcatgcctgtattcccagcacttggggaggccgaggcgggtggatcacccaaagtcagagttcgagaccagcctggccaacatggcaaaacctcgtctttactaaaaacattaaaattagctgggcgtggtggcacatgcctgtaatccctgctactcaggaggctgaggcaggaaattgcttgaacccaggaagcggaggaggttgcagtcagctgagatcccaccattgcacctggcctggagcaagactccatctcaaaaaaaaaaagaagtaactctaatagaacatccgtgtccagatattagcttctaataccattctaaagcaaaataatcacagtgccttggagaatggatcattccaaggttgggacatggaaaatacaaaataagcctgagcattctctgagccagaaatcaagaaatgcattaaaaaagaaaaagagtccgggcatgatagctcacaccgtaatcccagcactttgggaggccgaggcgggcagatcacttgaggccaggagtttgagccagcctggccaacatggaaaaccccgtctctactaaaaaatacaaaaagtagccaagttggtgctacgtacctgtaatcccagctacttggtaggctgaggcacaagaatcgcttgacctgggaggcggagggtgcagtgagccgagatcgtgccactgcactccagcctgggcgaaaagactccgtctcaaaaaaaaaaaaaaaaaaaaaagaaggaaaaagaaaaagcaagtgatgtcaaagtggcacaggcgccaacctgaaaaaggtcccagtggtgaaagccagaacaattgagcagcaaattaaatactgataatattggattataacccatataacaaaacaaataccatgagcccatactgatacaaataactgaatcaatgaacaggagagaagggtcaactctccctacagaagggaattttaattaaaaaatgtagaaggaagaaaataggggttttgttaaccattaggaaaaaaaacccgctaaacaacatgttccacaaatggatgcttaaattaagaataaaagtttaaggaaaaatggcagtgcaggtttctctcccaagatctcaaatacaagggaatctggcaaacagattaacatcataggtaataagaagtatcggctagggcacagtgctcacgcctgtaatcccagcactttgggaggccaaggcaggaggatcactagaggtcagagttcgagaccagcctggccaacatgaaacctgtctctactaaaaatacaaaaaattactgggcatggtggcaggcgcctataatcccagctactcaggaggctgaggcaggagaatgctagaacctgggaggcaaaggttgcaatgagctgagatcgtgccactgcactccagtcgggcaataaagcaagactcagtctcaaaaaaaagtattgacatcatgtacccaatatgaatactgagatggaaactttacttctgtgacatttttccccaaaatgcagaacattcatcaatcatgacactaaacatcaagcaaacacaaattgaggggcattctacaaattaactgacgggtcttcttcactagtgtcaaggtccatgaaaaaacaatgaaaggctgaggaactgtacagatcagagaaaattaaggatatttagcagttaaatgcaaagtgagatcatcgattgatcctgggcagaaaaaggacagtggaaagacaagtgaaatccaaataaagtctgtagttagttcattgtattatagtagcatgcccatgttattagttttggcccttgttatgcatgaattatgggaactctctgtactattttttgcaaattttcagtaactctcaaattatttcaaattaaaagttattataaaataaataataaaataaccaacatctttcaatgtttataatgaagggtaatgttagacttaacatgccatctttgtcgttgaaacctttctcatcaagattcatcaagatctatacaatccagtcaaagctgtactctgaaagcactgttttgtaaagatatcaataaaaaacatctcttccttactactctggtgtatttatttatgactagctgacttcaaatgataagagagctgtaagatcctcctaaaaaccaagctttaggggatatctctggactgagaagggagtaagagcactcaactatccacagaaaattacaaaagggagttcataattctttagcaaaccatccaaagctttaaagggattgaccaataatttgtcatttactattcccaattgtcattgaccaattcctatattggtcaacccctttaaaatattaacataacaaatgtttcctccacctatagtaacttctgtgctcagtgggtttttatccttccaaatcaactttaatttcatacatttggagaaaggccaagagtttttaccaacccacacttacacactatgggacccagaatcagtttgcaccagggcatcattttctgaaaaaccactttaactgtcagttttaaactgcatacccactttcaaatgaaactgcgaaaggctaaaaaaccagtcgtctcgtttgaacggttaccgattttctaacaaatatatacacaacgcccaccacctttccagacacacactctcagcgaaactggttttacaatttactcactcagcttaatgagctcggtcttaaccaaaggctcaggatctcaggatgcgtgcgctcggaggcagcgcttaacaattaaggatgtaaatgttgggatgagtcacccggaccttccaaacaaactctaagcagcagtttccacttaacaagaccaccaagcatgtgcacggtgcgttcctaaatcctaccagttcctccacaggctgcctccttgccgcgtctctcaatctcagtgggagtggcgggactgcctcttccctcctgcgcgcccggaaccttttgagtgggcacagcacgcagcccgccgcggcacaaccccttcccccaaccacacccggcgcgcccgagcgctcccctcgcgcggggccggcgtgggaggcgctgcggctggaggtcacgatgggagccggcgggtggccgcctgggagacccggacatccaggggacgagctcaggcagcgctgacacgaacttcctaagcccgcttcgggctgtggaccgccagagctgaacgcagtggcccctccccagcgccccgggttccccaggtcggggttcgcgggcgggggtgaggcgtggccccgactgccgggccgcgatagcgccctgcgacccggctgaaagcgcacacgtgtcctgccgcgctgagccgccagcagactggtaccaccgccctccctcggggctagggtcaccctgccgtgacacgcagggacaaccaaacactcccgcctccgggatcgaacggaatgaaccagagtgattaactacgagaataccaggcgctcattgggctgatcagtacctcgtctgacctagctgggtttggtcgccgtactggccggagcgccgaagcaccggggacgctgacgcacaggttgcccagtcacaagcgtgctcgcacccagagcaagttaaatgggtggtttctggtgaatgggattctgagaaagtgatgcttgcgccccagggcctaaaaaaatcaggcactgaatctaacccaaggaaggaaagggagaaacttactgaatgaaaatattaccatagtttaaatgttattctttacactccttgactgacatacttctgtgcaatattccgatggtgtggaaaggctagaaagtgattgcgatgttcaggaaacgggccatcaggctttgtgagtgagtgtagccatcccaacatctaccgctgcatctaccctaggaaattagtacctgcatgcagatattttctggtttgcatttacaacaaaaatcatagtatcatttaagttgtttaaatcaacactaggaataactattaatgttcacccaatgcaggaaagttttagctaggaagcctagataagaaaattgactatacatattttttaaaaagaattttaaatataccataccgcatgctttttaaaagaattttaaggatatattcatgatgcgcccaaacatttgggtaaaattattcttttgaattaatttctgtagtttcaagacccttaaaggcccatatagaaatacatgttagtcatacttcattttaagcaaaattaaggccagcacggtggctcatgcctgtaatcccagcactttgggaggctgaccaggcagatcacttgaggccaggagttcgagaccagcctggccaacatggtgaaaccctcctctactaaaaatacaaaagttagctgggtgtggtggcgaggctgtaatcccagctaccgcgaggctaaggaacaagaagcgcttgaacacaggaggcagaggttgcaaatgacccggatcccaccactgcactccagcctgggccacagagtgagactctgtctcaagaaaaaaaaaaaattaagataaagttttcagacctggccgttaacgactgtttgcaaaaactgaaaatctccgaaaaataaattttattttaattttctttttagctcacccagataagtgaaaagataaaattttatgataccagaaaaaatgaaaacatttccagcaagatctgaaggcactaaggaggagactgaacaaaaatggagaaaacacacacgaaactgatatgaagcacattttaaaaatggatacttagttgaatatagcattctgtaattatgcaaagtaaaaacaaatcaaaccctatacatagaggccaggcacggtggctcacgcctgtaatcctagtactttgggagccgaggcaggtggatcacctgatatcaggacttcaagagcagcctggccaacatggtgaacccttctctactaaaaatacaaaaattagccgggcatggtggctcatgcctgtaatccagctacccaggaggctgaggcaggagaattgctggagccagggaggcagaggctgcaggagccaagatcatgtcactgcactctagcctgggtgacaacgtgagactccatctcaaaaaaaaaaaaaaaaaaaaaaacctatacgtagaaaattgctgggcaaggagtgacagctcctcctgtaatcccaacactttgggaggcagaggccaaagaattgcttgagcccaggagtcaagaccagcctgggcaacatactgagaccctatctctacaaaaaaaaaatattttaaatacactgggtgtggtggcttacacctgtaatcccagcactttgggaggaggccagaggatgcttgagcccaagaattcgagacaagcctaggcaacacagggagcccctgtctctacaacaatttttttttttaatttttttttttttattatactctaagttttagggtacatgtgacattgtgcaggttagttacatatgtatacatgtgccatgctggtgcgctgcacccactacgtgtcatctagcattaggtatatctcccaatgctatccctcccccctcccccgacccaccacagtccccagagtgtgatattccccttcctgtgtccaagtgatctcattgttcaatcccacctatgagtgagaatatgcggtgtttggttttttgttcttgcgatagtttactggaatgatggtttccaatttcatccatgtccctacaaaggacatgaactcatcatttttttggctgcatagtattccatggtgtatatgtgccacattttcttaatccagtctatcattttggacatttgggttggttccaagtctttgctattgtgaatagtgccgcaataaacatagtgtgcatgtgtctttatagcagcatgatttatagtcctttgggtatatacccagtaatggatggctgggtcaaatggtatttctagttctagatccctgaggaatcgccacaccgactccacaatggttgaactagtttacagtcccaccaacagtgtaaaagtgttcctatttctcacatcctctccagcacctgttgtttcctgactttttaatgattgccattctaactggttgagatgatatctcatagtggttttgatttgcatttctctgatggccagtgatgatgagatttcttcatgtgttttttggctgcataaatgtcttcttttgagaagtgtctgttcatgccttcgcccactttttgatggggttgtttgtttttttcttgtaaatttgtacaaacaatttttaaaaattagctggatgtgatggcacatgcctgtggacctagctatttggggggctaggtggaaggattgcttgagccccggggttcaaggctgcagcgagccatgatcagagtggaccccactctaaagaaaaagagaaagaaagaaaatagcaggaaagtgttcatttgttcgggtagtaacatggaatgtcttttatcttgtattttagtgtaattttctaaattttatgaacaaatttagaaaattataaattttataatgaaaaatggattttaaaagtaaaataaatgataaaatatacatataaagacacatgacaatagagtcctcacttgaaataggactaaactaaaaaaaagtttccttaattttagtctaattttaaaaatattttagattgtgatgttcatatttataggtcggtttatttgctaactaaagttacattgggaggcagtggtaaataaataaaaattcaaaataaagttttattagttcctaacctcatcctaatattttatcaattctatttgataagttcagattaaagccagcattttataaatgtattgcactgtatagaatgagtcattttaacttgtaagttagcattgtttttggagctagccatagaattttagaaaaaaggaccttcctcattaggtcagatgttagatgactttcctcattttacagataagcaccagtgcaaaggagactgatttgcacaaggttaaaggttaagtgactcacagccttcaagccattgccctctgccctccaccacaggacctttcttttattttaccaggcaagagtactgcccagtatttataaggccccatattgagactcctgctgaatgcctgtgcaccagtgcaaagagctggtaaggccccagtatgctacatttcttagtgcttactccaaaggtgaatccagaattgtcaattttccctggcaaggtcaggtttcagacaggattcaccatgggccggggacatttgggttacatatataacagatgtattcagtccgagtatatctattttcataccactccaagttaagaaaataacagtggaagagaggctatgtgcacagtattcccccaagcccagctcacagctatcagggcctttgactaatttggcaagagaaagttcagtctatatggtgcaaacagttattgtaaataaaataatggaaacagtttaaaactcttcctaaagtttcagtataaaaggaaggtgagagaaaggaatatagctagaggctatcttagggttcaagaaaatattcatttggtttgaattagacagactagaacatgtgtgcatgccaagaggaaagccataaagaaagaaagggttattggtagtgtcaggtcccttaggaagcataatgaatgggatccagaggaattagaattagaaaagaaaaggaaacttaagaatccctcacgctctcttttccaaattgggccaggcagaatggctcctgcaaagaaaagcggcgagaagaagagggctattctgccataaacgaggtagtgacccaagaataagccatcagcattcacaagccattcatagagtgggcttcaagaagtgtgtccctggggcactcagagagatccggaaattgccatgaaggagatgggaactccagatgtgtgtgttaataccaggttcaacaaagctgctgggccaaaggaataaggaatgttccataccgcatctgtgtgcagttgttcagaaaattaatgagggtaaagaatcaccaaacaagctctatattttgttacattcctggttacctaatacttgttaccattttcaaaaatctgcagatagtcaatgtggatgagaactaaccactagcatcaaatacatcaaataagttataaaattgcctttatatattttttttaaaaaggaattgatatggttttgctgtgtccctacccaaatctcaccttttttttttttgagacggatcttgctctgtcacccaggctagagtgcaatggtgtgatctcagctcactgcaacctctccttgcgggttcaagcgattctactacctcagcctcctgagtagctgggattacaagcattgccaccatgcctggtaatttttgtatttttagtagagacagggttttgccatgttggcaggctggtctcgaactcttgacctcaggtgatccaccacctcggcctcccaaagtactggattacaggcgtgagctacggctcccagcccatcttgaattgtacttcccataatcccacgtgttgcgggagggacctggtgggaggtaatcgaatcacaggggtaattattcctatctgctgttctgatagtgagttctcacgcgctctgatggtttcataaggggcttttcccctttgctcggcacttctccttcctgccgccatgtgaagaaggatgtgtttgcttcccctttgccatgattgtaagtttcctgaggcctccctagccaggctgaactgtgagtcaattaactctttcct

SEQ ID NO: 2918 - DNA, 100000 bp, Homo sapiens
  misc_feature 57531, 57532, 57533, 57534, 57535, 57536, 57537, 57538, 57539,57540, 57541, 57542, 57543, 57544, 57545, 57546, 57547,57548, 57549, 57550, 57551, 57552, 57553, 57554, 57555,57556, 57557, 57558, 57559, 57560, 57561, 57562, 57563: n = A,T,C or G
  misc_feature 57564, 57565, 57566, 57567, 57568, 57569, 57570, 57571, 57572,57573, 57574, 57575, 57576, 57577, 57578, 57579, 57580,57581, 57582, 57583, 57584, 57585, 57586, 57587, 57588,57589, 57590, 57591, 57592, 57593, 57594, 57595, 57596: n = A,T,C or G
  misc_feature 57597, 57598, 57599, 57600, 57601, 57602, 57603, 57604, 57605,57606, 57607, 57608, 57609, 57610, 57611, 57612, 57613,57614, 57615, 57616, 57617, 57618, 57619, 57620, 57621,57622, 57623, 57624, 57625, 57626, 57627, 57628, 57629: n = A,T,C or G
tgtgactctgcagtaatgggactgattttttaaaaacacggattcctaaattcacatattgattatgggctcttcttagagattttaaatatttttccagaggtatttttactactcaaaactttctaaggctgggtgtggtggctcacacctgtaattccagcactttgggaggctaggcaggcagatcaggagttagaggccaggagttagagatcagcctggccaacacggtgaacaccatctctattaaaaatacaaaaattagccgggtgtggtggtgcgcacctataattcagctacttgggagactgagacatgagaattgcttgaacccagcaggcagaggctgcatgagctaagatcatgccactgcactccagcctgggcgaaagagtgagactctgtcacaaaaaaaaaaaaaaaaaaaaaaaaaaaattctaactcctctcttagagcttgccttcaaccgcagtgtatttaaaaatttatgtatataatatgtatctatgtgtgtgtgtgtatatataatgtaatatagatttaagttttgtaactagtaggtgttatttagtgttagtcttatgaagaggtgggaaatcaagatgagtaatactctatctaaaatgaagtatgactgtagattacgagtctgatttttttcagacttggtaaggcttttcactttcaaaggaggaattccactttattgtgtgaaaaagcagcattattacaataagtttgttgcttttcaaatgaacatgaagaaaatactcatttagatatgtgttctgatgtgtttattaaaagttctaactctgtgtaagagccacacctagaaaaggctatgaactttttgcttgctaggaaagtggtgtggaaacaacatgagagcctgagagcaggagctggcatcgattacatggtgccgaaatagggctgtgtgattgtgtggtaggttaggaagccaggtggctgactgggctcccctcttcgatttcaacataccctctgtattagtccattttcatactgctgatagggacataccagagactgggaatttataaagaaaaagaggtttaatgaactcacagttccacgtgggtaaggaggcctccaatcatggcagaaggcaaaagccatgtcttacatggcagccaacaagagagaaatgagaccaaatgaaagaggtttccccttataaaaccatcatatcttgtgagtcttattcactacacgagagcagtatgggggaaaccatccccatgattcaattatctcccactgtgtctctccacaacatacgggaattatgggagctacaattcaagattagatttgggtgggaacacaccataccatatcacccttaaaggtgaaagtttgtttttgtcaaaattttccctctgcttttccctttaggttttcttttgctatttcttttatccatattagcttataagaaaaggtcacatcactgaaagaccttgagttgagtgtttttgtgtgtgttagatttctcttaattcctgtcatcacagtattgattctagaaatggaaagtaaagaaggaaagcaattggcaagaggtttaggatggtttcttaaagtaggtgggtgaaactaatttgaactaaattctggagcaagagatgacaggcattgcttcagtgcacgtgaactttacatttgtataatggctatacatttttgtctaatgcatggtagcattgtcttctacattagaatgcaaaatacttagggcagggctagttctcctgatcctttgtaccttacagcatgtagcagagtgcaggatgtactttcaaggcccagctaagctttccatgactctctcctgacagagttgttactcctcgggttcatcacgtttctttaagcaaactctatgtcttggtcagcatgggctgctgtaacaaaatccaaggactgggtagcttaaacaacagatatttatttctcatagttctggaagctgagagtttaagatcaaggtactcattgattctgttcctgatgaggactctcctgccttgtagaggccaccttcctgctgtgtcctcacatgatgaggagggcagtggagggggaagagagagcagagagatgggaggggtggggggagccagccagcatgagagctctctgatgtctcctctacaaggccactaatcctattgaatcagggtttcctccttatgacttcatttaaccttattgctaatatagtttggctgtgtcctcactcaaaatctcatcttgaattgtaatccccaaatccccatgtgtcaagggtgggaccaggtggaggtgattcaatcatggaggtggtttatgcatgctgttctcgtgatagtgagtgagttctcatgagatctgatggttttataagtgctggcatttcccctgcttccactcactcagtcctgccaccccatgaaaaggtacctttcccatgattgtaagcttcctgaggaatgtggaactgtgagtctattaaacttctttccttataaattacgcggtctcaggtatttcttcatagcattgtgagaacggactaatacaattctttctccaaatatagccacactggggttcagggtatcaacatatgaatttgggggaggacagttcagcctattgtaccctggaacatattatgtgtgttgtaacaatttgtttatgttgctgccagtggactgtggtcttctcacgtgctatgcactgtgccggacattgagaatccaaagatggatcctgccctcaaggagttgtattaattttctattgctactgtaacaagtaccacatacttagtgttttcaaacaacacagatttattatcttacagtgccgtgcattaaagtctgatgcagggttggtcatggtggctcaagcctgtaattccagcactttgggaggcgaggcagatggatcacttgaggtcaggagtttgagatcagcctggccaacatggtgaaccccgtttctactaaaaatacgaaacaaaaaaaaaatagctagatgtggtggtgcacgctgtagtcccagctacttgggagtcggaggtgagagaattgcttgaacccaggaggcggagttgcagtgagctgagattgtgccattgcactccagcctggacgacaaagcgagactgctctcaaaaaaaaaaaaaaaattttttttggaggctctgagggagaatgtgtttcctgcctttccactttctagaggctgcctgcatttcttggctcatggtcccctttctccatgcattcggggacccttccccagttatatctccctctgatgcagattggaaatgttctctgctctaagaattcatgtgagtagagtgcatccacttagataatctagaataatcttcccatccaaggtccttaattatatctacaaaggcccatttgccacttcaggaaacattcacaggttcagggattaaaatgtggacatctttgggaagggcattatagtgaaagagagggacatgtaattagtgacttaatgcaatatgccaagggcaagaatgaaaatctattcagggtacataatatatgtatatatgtgtatatatgaaaagcatagaggaaaacggttgtttgagaaatgtggttgtaactgaggcactggcagcaaggatggacagaaaatggcttctaggaaggtagatgggtattatttgggtaccaatttggtgtaggggatgaaggagagagagggaaaaatgagtgagaatgacttccagattctggattgggattgggcaggcttgtccctgagataggggcacactatctctagtgtgagaatgtatttataggattctttgactgcaagtaaaagaatatgagttgaattaggttaggcaaagaggagaatttattataagtttattggcggggagttgtacaaggaactgaggacaggattacagttggacatcagacatgaacaagattgaggtacaggtactatccggatcttccctcttctttccctgtgctcctctccttgtgtcttttacttttctctttctctgaagatgagcacttcccttctactggtgaaatcttactaaccaagttgccaatgttattcctcacttatagttcagtcactcagacaaaggccaatctctcttcaattgcatactcctgggaaaaggctttgattggtaaagctcaagtcaggtgcccaattggtgcacacagctatggccagggctcagtttttcttcatgcctttctatcttcatgacgctctggctacaaccatgcattggatggagtgtttcttagaaaaggtttcctgggcagaattctaatagagatccacttcagtggagatgcattcagttttatttgtctttttctgctctttaaaaaaaagttgagatgtaatgtacagtaaaatgcacatcacttaaaagtttagttgaggagttttgacaaatgtatgcccacatcccagtcaagacatgggacatttccatcatccagaaaatttcctcatgcctcctacagtcaatctccactcctcaaagacaaccacagtccgatttctattaccatagaatagctttgctggttgtagaacttcacatacatgaaataaaccaatatggtctttggcctttttcattctacataatgtatctgagattgttgctattcaaaagtcttttttgtggcagagattatttcactatatatatataccacgtttgtttatcattcacctgttgatagacatttgggttgttttcaggttttttgacattatgaacatttaatatgtctttttagagttagaaggaactgtacattaaatgctgagattacaaaagatacttcagttttgaataaattgagtctgtagtacttgtaggacactcaggtagtattctggctcctcttggagtacagtctaagttgcagaagagagacagggtctagcaatgtaaattctgtagtcgccagccttgattcagagttaaagctatgggaaagtcctcaggcagaggacaacattagacaagaaaatgcccatatatgaaaccctgcgaagcatcagtatttgaggagagactaaaaaggaaccgtctgtggaggctaagagaagcatggccatttatctttgtgtccgatcatcaggcacaggaccccacacacagtcacttctcaatgtgctaaatttcacagatgcgtccagggtacctggttctggatagatccggtagaaggagatagaccgggagggcaatggcatgaggagtctcacaggccagagtgattaaaggggtgtatcggggcggtaaacctacagactctacctgtgcttatgcggggctggggaggacgagtcattacagatgaagaataagtaaggtcagaccactcagggccttagatggatgtcacattgaagaatttagactcaacaggcctgccaccctgggaggagtcatcgcggattctggagaagggcgtgacagagggatttcctttcgggaagtgtagtctggcagcggtgccccggtggtggcggcggcggtgcgctgttgctggtgatcgtgtggtggtgttagcggcgatagtgctttccactgggctttgcttggtagccgctgaaagagaacaacgctgccgctgctgctgatttcatgccatttcctacccggcgctgtaacttggcctctgagccttggccacagaacgcagaggccgtggcatcggccgcagctgggctgcagtgcgtgcgcgcctggcctggtggtccgatgggaagcccgggcggggcagccgcggggcgggggcggggcgtcgcggagataggccacgcccctgcccgccgcgcaggcgcgctgcgggtcgttagctgtcagagccaagcggcgggctggcggcgggcccgacgtctgcgccaggacctggctggctgagcccggcgcagcagcagcagccagggcacgcggcccctactccctgtcaggtcgtagaggcgagcagggaccagctggtcgccggccctcgggcaagatggggaaccgggagatggaggagctgatcccgctggtgaaccgtctgcggacgcgttttcggcgctgggacagagctgcctgctggagctgccgcagatcgccgtgggggcggccagagcgccggcaagagctcggtgctcgagaacttcgtgggcaggtaagcgccagggcgcggagtaaggatgcggcagtggggcgaccccgctgcgggccgttggaacgtgacgggcagcgggagccagagggtggatggaccaggcgctgcggtggaatggggggcagatggaatggggggcagagtggcggtgtccgtggggcgggcggggtcctccagctctgggctcctccgtcccctgccaccccccgcctggtggccctcctgcctgcctttcatcgtgcgaacaaagccatttcctccctgtcctccagtcggggagtcgggggaggggtccgccccgggtcgacccccaccccctcggtgcgcgccagccccgggcagcctccctgcgtagcgcgccgaagcttcccagtgcccctctcctgttttcccagctcaacacccccctccttttcctgtcccctccgtgaggctccctgtgaggctgtggggctttatcccccgagccccctcccttagtggagatgctttccttctcgccagggttctcgttcctctcagctgtctactgttgcctgctctagctggggaggcggggtgcgaggagaaagacgtcgtttgttgtggtgaagctttaccagagacgcttccccaccattctcctcccggagagtcgaagaataaaaggtggtgtgttgcgtgtgcacctattcacagcttcaggcaattgtgagagagcccgaggcacagacttgcagggggtggacgtggacttatgttgtccaggtgccatgtcattcctgcatcatctcggactgaccagcatctttctcgcactctctctgcgccccctcccccagcatcatcttccgtctctaagctcctatttgtcttgctagccttcaagacaacattctgaatctaaattgtagtgtggttttcctcatgactcttaatacagaaacagctaaggaattaattttcgaattagaatcagcatttcttccactgagcaattcatgagggattaagttaccttaatggccttgctgaagagtgcagacatttgctaagaaaagcccatttaaaagcattatgaaaactgaaattgtttcctagtaatagaaaaccaggtagaaatgtacagtatccaagaaaaaatgctggcagattgtactttattctttttatttggctcattcgtgacttgggatgcagaaggttccttttctgttccttttttctttttttgttagtgcttggtgatgtgtagaatttagagctgatattcccacatttcctttggaaatgttagtgttcataaagtacatattcctttctctcaatgatattccatctctcagatgatattttttttcctgtatgaactagaaagataagaagctaacaaagtaaaattgctgacaattggcttgtatccttgagtaattcacttaatcactcacctcatttttatattttttttgattaatgaacaaagtgaaggtaaagcattttgcctcgtcatcttagacttttggtgaagtgatggatttcaaacatataacagttactttctttatttgttgccaatgaaatttacgagatataaagtggcatccaaagagtgagttttggtacatatttttggctttccaaagccagggcatttttgtcatgacaccttaagagttatttactatttttgttttttaaacaaatacttaaagattaaaactgtaagtatttcaaatgaaataccatatttttatgcatctcccatatatttacttggatgagcctatattgtatgcaaggcattgtttgtggtcagagcttttgaacttaatgtcagttgtatgcacataccacaatttacattctaggttttgaaattctaacattcttcctaatgttataataaaattgtacacactccccacactagctatgttcttttggaataatttgaaaaaagaaatgtagaagagtaaatatttaagtttgaatatttttcaagatggaataaaaaatagggacaagtataaaaatcgagcacgtaccagaatgcattagtaatttgttgtactttaaaaagttttaccactaattactgttagaacgccaaatcaaagaaaaggatgaccatagaggaaaaaggtcatttaattatatgtaaagtcttaattatatgtagagataacacctgcctagcagagcttacatattaggagaaaatttaattaggaaggtcatttgactttaataaagatttcggtcattgaattatgaggaatctaatttctaattataaaccaaccttagggaaaatggagttttctattttgtaagttattcagcctaggtggaaaaaattgtatccattttctactgtaacatcttagcatttcttgtcattatccaggaattttgcaataaaaacagtttctttcctaaggatgcaacttcctcttttacacgaaacagttttcattttaagactcgatctaatgtgcagttattgatgcagccataaaaaccaagggtcatcacttgtgtaaattcattgtgtttgctcttgactaagcttcttctctacaaaataatgatgcattttctcaacaatcctcatttagtggactactgtatcttctctcagtttgtttatattgagtttttttggacaccaatgaatgaattcgatgtgaatatgtttacttcatttagcggttgctgtaaaagctgatttttgggtgacaggttgagattgttatgaataaaatgagtcatgaatgaaccacttgtttgtgattttcttgcgaagtgatgaacttgcatattaatgtgatatagcatgagtaaccagattgttcttttggggtgcaggatgagatatatgctggcaatgagaggcagcttaagatctaatgaatagaattgagacctataatctgaacataggggtttactagctggcttgggtctgcctactggtctatttgtatacagaagaattgaatttattcaactattttcattatacgtatacatatattatagtgcagtggtgatgataataatggttaacatttatagagtgcctgttatgtgtaggactattctgggtgcttttatatgaataatctcatttagtcctcatacaaccccaaagagtaggtactcttatgatttccattttacagaagaggaaatcaagatttagagagtttgagaactcactcaaggataatttaatttaatataaaaacagtggagctaagattcaactagagtgttgatgaccataacccatgctctagaacctctgtgccatattgcatcctccatgttaggtttaccatttcctctgataaatacttttaacttctgtcttgctccctatataaatgtacctatattaataagaagctggccaggcacagtactcatgcttataaccccagtatttgggaggccaaggcgggaggattgcttgagcccaggagtttgagaccagtctgggcaacgagtgagatcttgtctctacagaaaaaccaaaaaataattagccaggtatggtggagcatcctgtagtgccaactacttgggaggctgaggtaggaggatcacttgagtccaggaggtcaggctgtaagtgagccatgattgtgccactgcactccggcatggctgatagagcaagacctgtctcaaataataataataaacaagaagctactatgttaatgattttattaatattttttacatatgtttaccttgcctcatttcacagaagatttgaggtgaccccttaggcagagcaacatttattaaaagataagtatttttctttgctatattagacattcttgaagagagtttaaaatgtaattggattgtttatttaagtatgtttttagagtgcatataactcattttagaggtgttaagtgaaaactgtactagttgctaatacgcagatgttttaaaatgacaccttgttagaaatattagtttttcaatgctaattatataggcagaagagtccacattatttattctagtctgagtggtaaatagactctcaattctgcacaaatagaaaaagttttttgttaatggggacgaaataaaatatttttaaaaagtgattatgctgatatttttcaagaaatgcttctaagtattatagttattagataaatggtgcttacaattaaaatgtcataattatgagaaccatacttcatagttcccaaggtctataaataaagtgtcaaaacatgaactttcttcatgcaacaatgaattggtagaacttgaaatcacaaaaatatttttgctgaattaaattatataatatacttttaggttatcacaaattcacagttgggtacttaattactaccacaaatgaattccttttttattaataatgtctgagagcaatatatctaagataactagacggataggatatctctgttttggaatttacttatgattaacagttatccaaaaatgcactgatttaacttctttaagaatgaagttgggcagtcacccagaaccttggaggaatggaaattaatgtttagctggattagagggtaggctattgggttctctatcaatggagtatacattagagtgttaggtattcttcttaggtagtaccttttgctatggctagtaagttaaattagaagttttatttattattgtcatttattttagagggacttcaagtatctagaaagaaatgattatttttttcctctgctaccagagccaagtcaagagagtcccaagctcatatgctaatagaatgatccaatttaattttctgtatggccaaagttttgcaatttatcctagtccagtttgcattgcagtttctcacactctctgcattgatttaaaaattcttatggattatgtatactaaatacattctataaagtagacggaaaaaaggggccaacatttgcttagccatttggggtagcagacatggattctgctagatacttttcataccttctattccttacctgttccatatccccatgtcaataggggagaaaattcagggttggagagacaagtcattcacccggatcgtatagctagcaagcagccaagctgggattcagtatgactcctcctggaactctgagaaatatggacacataaaaccaatgaacatgtatttattgagttctaagtttactggtaagaatatacaagaaaatatgaatacatagaagcttatgtatgtataaaaagagaactacaggataaagtatgagacaactttcaaatgcacatgtaaaatgaaggtagtcagatatatgcaaactaatcaggataaaaaattatagtatgtcaatttatttttacaaaaatccctaaaaactacagttctgaaattgaactgaatataagtggaaagtagacaatatatgcattccagtgtcatctggcagcccatatcattttagctcaagcctgcatgtactgaagtatcttgtcaaagcaggaaggtggtgatctgtgtctcagtttctgagttgacaacaaggcattgatttagactgtgactttatcacaaagagatactgtatattggagagggccctagagaaggcagcaaggaaaaaaaaaagagattggagagattaaaaatataactggatgcagtgaagttaattgagagtgggatggatcagatcaagtattttataaggacttccaaggcactaatcttaagggaggtgaattctattttccttttaaagaataagtcatttagttaaaggagtaaataagtcaaagacacaaatgtcagggaaaatgtcctaaaggcaaacctgaaaatggaagaattgtttagaatgggaggagggtaaaggagttgacactaaatgatttgcatttcatgattaaaaatcatttccaacaaattagagggttcattaataccatattaattactctctcctctctctctgtgtgtgtgtgtgtgtgtgtgtgtgtgtgtgtgtgatcataggtagcttgcttttcttcctttaatagtagcaagactggcatttgatgacattattataagaagctttctctggcttgattttctctaacttcctggagcacagtaggatacagagaaaccagagattgcccaaggtcagaagaaatcagagctaggtttggaacttaatgttaggaactgggagcctgtgccagttcatcatcttctcttcctcctgttattgttttagagcacctccctccaccctcaccctgcctcctccttttcccatccctttgcattgggccagcctttttctcttcgtgatactctctttcattactcttcttgatagttgaccagcagtgacattgcattttataccttttttttcccatacagaatagtggagacagggagcagaatttttctcagacttagcaagttaatttgactgaaatagtatactcgtgagtaaagcgtgacttttagggaacagagggcccaggaaaagactaaataagatattggatgtttttacacattattaatatttatcaccaggtgggcattagctagaaagatatgcctgagatggtcatcaataggccttgcttaaccaacacgagcttctgaaaagttgtatgtaaataaataatctaaatggaaatgttatttttaaacaagtgggtgaacttttaggtaaaataaagatgtatttgtgtagcaaatctgctccttcagtttgcctgttttctattctttttgtgtgtgtgtttgcattcttagagtgcatgagtgacattgaggtccattaatgttatagagattattttaacaatttttcaacaagcttaatattgcattgtctttagtgttaattgataacaaaaacagagcagttgttgaggaaatgatgatacatttaattccggaattatatgaatgatacaggattgctttagatcttgttttctctaatatccctgctgcaagtcctctatttccaagggtttaaaatgtacctcagtcttctttgtgacagtgtgtcatttttatttcccactgcttcaaggtcatgatatacccagaatagcatatatatacatgatagcagtagctaggtatcctgaaggacctcattgtttaccttccagtggcttggaattgaaagactaatctatttgataagtaatttgatgggtgacaaacttgtttatggtgcttatttttttagatttctcaaaagtgagtatttgaagaggagcatcacagcatggtgatggagtgcaggctttgctggcagctcttgagtcctgcctctgatctcactggtagcatggctcctcattacggaatctagcctcacttggcctcagttccttatctgcaaaatagggattgcagacttcaccttttaatctgtgtgtgagttctgagtaagtggtatcaagtgcctggtccatagtatgcattcaataactgattgctcttaatttaaatttttatttagactggacattttttgagtgttttaaaaacaaaagtaagttgaggcagatgtaatgcgtatttgcaaattctttttgtgaatgttggaaaattacagttgcatcaaaatcttacttgtagataaggctaatagaatatatttgagccttctttaaagaaagcattgccacattcgttaaatgcattatcacaatgtgttcttttttttttaaaccaatatatacaaatgaacccagtttgtatactcttcccttccaagagttccaaagcagtttttatcatttcataatccttcgaatttctgtgagaagatagcaaaagcatgttttgtttactttaatttagaataaaaaagattaagctggaaaaaagttgggtgacatactggggtcacatggtgagtatagaaattaatgaacaaaatagacttaataacagataatagaattaaaatgaatttttcgacattatttttagttttctcctagagaatatattttaaggaagatatttgatgctgtgtataaagtaaaccattcttagcatattccttttcttttggaaatgttagatgaaattgcggcaaagatggtgtagaagggggaaaaacaattgaggaagtctagttggcgaagcaggatacttagcaagagtatggtctgagcccaaggaaaccatctacaaccaagtgttcaggagtaaggtgtaattagatcttaaaagaagtaccaacatttttgtagtagatgttgaaataaaccaaatcactcttttttccagtggaaagattcatattctgatttgattgacattcccaaacttgttaaccatcagttttagctctgagctagtcagctggttctgtttggaattacatatttttaagttactagatatacctcagaagctttgaaaagaatagctttgggtttctttctagtggaggtttagaaccctgtatatgtgtgtctgtttatgttttctggttaataaactaagacccattctcttcatattttgaaaagaggggcaaaggcttgcaattatttttatgatcctagcattcatggttctgagtcctactaccaggacagcaacaattgtgtggtgagtttctgcattctcatctaaataccgatagaacgacctgcatactgaagtccttgtaaatcaacttaagaaactttagcctgtttatttaatcctaaaaacatatcatgtaaaatgtgttgtgtgggtacttgatttgaattatgtactttgaaagttacatattctcttagggcttttttttttttttttttcctcagagtaagttaagaagggaagtggcagaaggatcatgagtccttgcttgcagagtaagtggggagatgagaaggaggaagcaatgcttttgtgagtgtcaccagattgtagggacatacgaagagaaaagactggtaaggttcaaccactgtgagaataggagtatttgtgaatgagttagtctggggtggctttggttctctcctgctccctgtggaggtggtccctgcatatttgttcaaagtgtgccacaggtaagcaaggtagcatgccaagacagtgagagctgggtttagtctggcctctgctgtcatctgctggtcttctcagctctactgtctgatttagaggcccctccttggtggcccttgttaatatttcactgcacaggaattaccgaacagttggttgcctcctctgtctgctcaactatttgcagcttccacgaagccagagctgtgtctcctttatcattttccgtagtgcagtgccggcatatggcaggagctaacgaatgaatcagctacttgactctgtacaagccatttatctaagctgaaacatacctttgcatcaataaattggttgagaatagttgagtgggcttggattagaacggttgttgtttttgagacagagtctcgctctgtcgtcccggctgaagtgcagtgagtggcatgatctcagctactgcaacctctgcctcccaggtgcaagcaattctcatgcctcagccacctgagtagctggactacaggagtgcgccaccacacctggctaattttcatatttttagtagagacggggttcgctatgttggccaggctggccttgaactcctgacctcaggtgatttgcccgcctctcctcccaaaatgctgggattataggcgtgagccactgcacccgacctgaacagtgcttttaaactgtagattgtgacctaatagtgggccatgatatcagtttagtagatggtgtgtgcagtgttaaacgaagtatcagactacatccaaggtagttataagtaccactttgtgaaattttgtattagttgcatatttgtatatgcatactaggctgcaatgtaaaatgtatttctactatgggttatcctcaaaattgttgaatgcctctgatctagattaaatctaatattactctagtcatttatttggttattctctatttaaatggcaggacatatctttttattagagagacacaattcacactataccattactattccactaggatgaattaaaatggaaataacttattaatttaaaaaagctgtcttttaattgaaaaagtgatatgtacatgtaatacaaatcagacattccaaaatacattatatttataccacataaatccctttcccctattgaggttcttagtaagatgtttcatttacctgcctatcttccagattacttctgaatttatatttctttatatgaaatttatttgagttttgaggacagagagaatttaataaacttgtttgtagtagatgatacaaccagttaagaaaggacatgtttgaaaattcttttagcagatggattgtccatttactgagtcatttacaaagaatcatatgttgagagtccacaatatgccaggattgtgtgaggctctggtatgcaacagctccttcaaagagcttggtgatccagtgggtacggattgctatgcactgcactgtcaggatacccaggctaacaattcttatgagagccattgtcagagaatagttggtgagttcatgatactgtctctaaatatttgaggagctgttactggaaaaggattagactgactcagttatctccccagaagacataattagaacaaatgggtaatgttacaggcagatagacttaaacttaacgtagaggagactgttcaatagaacacttaaaaaatggaatggattgcctgtgaaacagtaagtattccatccccataagtgtagagatggcgattgatgacttgctggctgcttggcatggtgtagtcaggagaggggttgaacaaaggactttgaaggttttttgtttgtttgtttgtttgtttgttttaaacagtctacgattggcttgatggatgtcagagagaaacctggctttaaaaaaatgtgtgttttctataggtttctgtaggtagataagaaatgacagacttataaaagagttaagacctctctgggtctagccttcaaaaaatcattatgcctgtcattgtatggatgtaaagaagctggactctctcctgaatggctaattccatgaagcagctgtggttaagggtgttttagaggtaaactgtatttttctttttttttttgagacaggctctagctctgtcacccaggctggagggcaatggcataaaactgctcactgcagccttgatatccctggctgatgagatcctcccacctcagccttcgagtagctgagaccacaagtccgcaccaccatgctcagctaatttttaaattatttttgtagacacagggtctccctatgttgtccaggctggtcttgaactcctgggctcaagtattctcctgccttggcctcccaaagtggtggcattacaggcatgaaccactgtgcctggtcgtatttatttattttttaaaaaagcttaattttaaaatctgcttttctaattgacccaattctttcagtggtatactagtctagaaacttaaaaaataaacatagtttagtttccttttttatttttaaaatcttcctatatctaacacatcttgtaatttctttattcaaaacatcttttggtcagccttttcctctttattctcattctgaccatcagagtctcagctgtcctctttcgcatgtgggataactctgacagcatcctgccctctcactctctccatttcttattatctattccatgtaaatattgctgctctcaggttaatcttccaaaacacaagtttaatactctgtcctcagtaacctgcagtcccctccctcccctttaaaaatctctacttggttttaaaactttctgaccattcagctttgttttccactcctcccagaggtattcacctcattttttcatcttttctgtgtatgcaatggcaatttctgatgacttaagaacatgaatagcttagtagagcatattttatgaccaaaatgggttcaaacaatcaacctatacttgagttgctctttgtgaaagacattgttttgggatggaaaaaaaaatatttgcccttaacagaatctatgtagactagcatagagtgtagtcagaacttacagagtgttgaggtaaagaacatgtatctgtggagcctgactccctgggttcacatcgtagttctgccacttaatagttctgtgatgaaggcaatcacttaacctgcctgtgcctcagcttcctcattggtacaatgggacaatatagtaccctcctcatgtggtggttgtaaaaattaaattaatacatgtaaaacacttagggagtgtctgtcacatggtaacatagttacctgtttatgattattattactggggatggagtttagacagaatttgggtgcctttagaggtgcagtgttctggatgatcaaaggaaaaggcaatttttcctttttttttgagacaaagtctcgctcttgtcgcccaggctggagtgcatggcgggatctcagctcaatctatcaaattcttactatttaatgcccatttaaaatcctctggtttacatgaaatctttcttggactctcccaaagaaaaattgaaagacctctgcctccagattcaagcgattctcctgcctcagcctcctgaagagctgggattacaggcccccacagcatgccaggctaatttttttttttttgtggagacggggtttcaccaggctggtctcaactcctgacctcaggtgattcgccagcctccacctcccaaagtgctgggattacaggttgagccactgtgcctggcccaatttttccttttttaaaaattattattttaggttcagggcacatgtgcaggtttgttttataggtaaacttgtgtcatgggggcttgttgtacagatatttcttcacccaggtactaaatcgagtacctaatagttattttttctgatactctccctctcccacccttcaccctcaaggaggccccagtgtctattgtttcctttgtgtttatgattctcatcatttagctcccactaatgagtgagaacaggcaacatttggttgtctgttccgtgttagtttgctaaacttaatggtctccagctccgtccgtgttcctgcaaagaacatgtctcattccttcaaggctgcatagtattccatggtatatatgtaccatattttctttatcaatctgtcactgatgggcatttaggttgattccatgtccttgctattgtgaatagtgcgcagtgaacattcacatgcatgtgtccttatggtagaatgagttatgtttctctgggtaatacccagtaatgggattgttggattgaatggtacttctgcttttagttctttgaggaacaccatactcctttccgcaatggttgaactaatttacactctcaccaacagtgtataaggttaccatttctccatatctttgtcagcatctgttgttttttgacttttatataatagcatgctgactggtgtgagatggtatcttcattgtggttttgatttgcatttttctgatgacagtgatgttgagcttttttatttttttcttctcatatccctgttggccatctgtatgtttcttttgaaaaatgtctgttcatgtcctttgcccacttttttcttgtaaatttgtttagttacttacagatgctggatattagacctttgtcagatgcatagtttgcaaaaattttccccattctgtaggtggtctgtttactctattgatagtttcttttgcagaagctcttaagttaattagaatccctcttgtcaatttttgcttttgttgttattgcttttggtgtctttgtatgaagtctgcccattcctacgtctcagatggtattgcctaagttgtcttccagggttttataattttgggttttacatttaagtccgtaatctatcttgagttgatttttatatatgtgtaaggaaggggtccagcttcaatcttctgcatatggctagccagttatcccagcacatttattgaataggtagtcctttccccattgcttgtttttgtcagctttgttgaagatcgatagtcgtaggtgtgtggccttatttctgggctctctattctgtattctgtcccatcatctatgtgtttgtttttgtaccagtaccatgctgtttggttactgtagccctgtagtatgtttgaagtcaggtagtataattagtttagctgtgttctttttgcttagcattgccttgctacttggctgttttttggttccatttgaattttaaaatagtttttttctaggtctgtgggaatgacattggtagtttgataggaataatattgaatctataaattgctttgggcaattggccattttaatgatattgattcttcctatccataagcatgggatgtttttccatttgttgtgtcatctctgatttctttgagcagtattttgtagttctcattgtagagatcttcccctccctggttagctgtgttcctaggtattttattctttttgtggcaattgtgaatgagttgtgttcctgatttggctctcagcttgggtgttgttggtatatagaaatgatagtgattttgtacacggatttttctatcctgaaaccttgatgaagttgtttatcagctggatgacctatggggttttctagatatcaaatcatgtcatctctgcaaacagggatagtttgacttatttctttctatttggatgccatttatttctttctcttgcctgaagaagcagtctttcatttttctttggagagtccaagaaagatttcatgtaaactagtagaatttgaaatgggcataaatagtaagaatttgatagatcgagatgaagccagacgcacagaaataaggatgtgttagggaacagagaattttctatgtgacctatgtgtctagaagaggagtggtgggagataagctggcagagtgaattggggccctatggaggattgctaagatgaggaattggtactgatttaggaagcaatgaggagctgttaatgatttgtaagatacattgcagtgtgcctggagcaggctttaggaagattaagttggccacatattaactggaggatacatagatggagggaacatctgaggtaccagtggggaattaatgattgaatggtaatagggcttgaaaaagtattttactggtggaaatggatacaggtcatttcagagacagaggctgtgattacaaatggtagtgacagaaaggcagagagggaataaaaaataatttcaaactttgagtagatccctggggaaggatagtaaaattcatagaagtaaataagtttagagagggaaggaatgcattctcctctacttgcaactggtcagatcttccattctaccatcaagctcagggttatccatggacatcccatttgaacactctgtctatgctgattttgaccttctcagatgtcctgatgactatggttcaaaactgtttaaaacttgaatatttctgactgtttcattaacattagcttttcttctgggacagactgcaaacccttaattagtattccccacagtatcttgaatgatagtttttaggtaccattatggactgaacgtttgtatctcctccacaaattcatgttgaagccaaaccccaaatataatgatatttggagatagggccaattaggaggtaattaagattaaaaggtcataagggtgaggccctgatcaaataggattagtgtccttataaaaagaggcactgagagctctctctctctcttcctctgcacaaaaagaagaggccatgtggatacagagagaggcaaccatcatcaagtcaggaagacagcccacaccagaacctgaaccagctgaatctaattttgggcttctagcttccagaactttaataaataaatctcttttatttaagtgaccagcatgtggtattttgttatggtagcctgagcagactaataaaagtacttaacttttatgagtttttgctaattaaattgttgatctgacttagatgggttggtactgagagtgaggacatgtgtttaagtaagagatttatttttacatttatgagaaaaaattcactgatgcactatattcttagcttgataagctagtgtccttagcccatgtgcctcagtttttgaggtatcattctttcacctgtacttctctcttcattttcttaatgatgtaaactacttgtgagtctccatctcaacctttgccctcttcagctgctgacttagctttcctacccgataaccatcaacaactctcactgtctaaatgcaggaaccaaatggatttgaaaaaaaggattatgatacgaaaagattggtccatcccagcatctcccaaagcaagtatatggatatctgtgtaagattacctgaggaacttatgaaataaaggttcctaagctccactaatggaggcccactcagtggtctggaggtaagccatggtaatcggtatttttcagaagctctcctcatgctcctgatagcagccagatatgggagctattaatcaccacttccacaattcccattatttctgcagcgaggataacgaatgcagtgtgtcttccttccccatcagtacactgaaaccgcccttcccaggtcaccaacgatctccagacagcttaatttactttccaaatatgtctgaaactgatctctgtgcttaattcctacaaccactgactgagtacaagttgtcatcattcatcttctggctgtaacaatagactcataatactttccccatttgtaaccttccaatctgactttcacaagccatagcataattgatatggaattcaaattaaatcacatcactgtcatagttaaaattttcagttcctaatgccaacagcataaaatcatcaaagcttcttgggatgtcatacaagccctgtgtagcccagcttctccaggttatgtgttgttattcttttacctggctgtgtagataccccctagacacccaccacgctgtttcattgcctttgttcacgttgttattgttctcaccccactattattatcttgaatttgggtctcctttcctctgggataccccaactgcccccacttcctcatgtctcctaggtttcttgtccctcttctgggtatacataattctctggcatttctctcatgttatacttaccacattgtgttaaattatcttatttgcttctatcataaattgtgagcctctcgagggcagggtctcttttatttgtttatcttcacttctagcaatggtaatttctgaataattattcaatgcattaatctacaaatataatggagagctttcgcctttttcatacctgatttatctgcaacatgtgatgccttttattgaacatccactgttgccaggcactgtcttaagcaccagaaagacagtaataagtgaaaaagcacattccttgcattttggagcttgcagtctaatgaagaggcatataataaacaaataaaaatgtataatataaatcagtatggatgccatgacaggaatgatcaggatagtgatagaacatgacagaggtgacatatttatcagttggtcagggaagccagtctgatcagatgacatttcagctgaagacaaggaatcagtcataagaagagccaggaaaaagcattccttgcagaaggaacagtagtgctaagacttcgaggggtcacagaagtctgtgtgttggaggaacttaaggtaagtcatgtctccagagctcagtcgagagggagaaatatagcaaggaaagatagcagagggaagtcaggtaggctctgttggtgccaaaaatagattttatccagagtgctatggtaagtgactaaggaaggattttaatcaggttagttatgtaatctgatttacattagagaaagattacttaggtcagtgcttttcaagacaatagtcactaccccatgtagctattataactaatgctctgagaaattgaatttccagtttaattttagttactttaaatctacttttaaaaatatacgaattcagttaagtatgttttggtacatgaagctactttttcaactataaattttgtgactttaaatatagatcaggtatttctgataaaaatttagcatccaagttgagatgtgcttaagtgtaaaatacacatgaaatttcaaagatttgctatggaaaagaatacaaactgcctattaatgattttatattgattattaatacatattgaaaggattataagttggagaaatgggctaaataaaatgtattgtttaattttacttgcttctttttactttttgtaatgtggtattagaacatttaaagttatttacatggctcatattatatttccattagacttgcattcactagatgctgtgatgataatggattggaggcaggcaaagtagcagcagagagatgggtaggaatcttttgcagttgtctaggtgggtgataatggtatctttgattagggagtggcgtggaaatggaaagaagtataaagagtctacaaatattttggaagtagagtcataatgattgctgatggactagatggggaagggaagaatgaaaaacgactctcaagtttttgactttgactggattgcagtgttgccatttcctgtagtgggaagactgagaaaaaagttgggagtgaacatctaaggtatggatttgggcatgttagagcctgtaaggtatgcaggtggttggtataagagcctggggcacagaggagagtttaactgaagatattaatcagtacttgtcaaatatcattgatatttaaaaccttaagactgcacaccaaaaactatacaacatcattgaagaaattaaagaagaccaactaaaatggaaagatatcctatgttcatgaacttgaagactaagtgttaaaatggcaacacacctcaaatcaatctgcagacttaatgaaattcctatcaaattccagatgccatttttgtgcagaaattgacaaactgatcttaaaatttttatggagtgcataggattcagaatggccaaaacaatgttgaaagcaaaacaaaacaagttgaaggatcacacttcccagttctaaaacttactacaaatcagtgtaatactggtgtaaatatacaatactaaatgaatggaatagacttgagagtccagaaataaactgttacattcgtggtcattgatttttaacaaaagtaccaagataattcaatggaggaaagagtagccttttcaacaatggtactgggacagcagtatatccatgtgcaaaagaatacattggggcccctacttcaatcatatatacagattaactcaaaatggatcaaagacctaaatgtaagagctaaagctaaaaatttttagaagaaaacacaagtataaatcttggtgattttagattagacagtagttcttagctacgatacccaaagcataagtgacaaaataaaaaatagttaaagtgaacaacacaaaattaaaaacttttgtgcttcaagggacactattaagggtatgaaaagataacccaagaatggggggaaatttttgcaaattatatatgtgatagggaactagcatcctgaatacaaaggaactcttataacacaacaataaaaagacaaataacccaattaaaaattaggcagagacttgattttctaaagaatgtataaatagctaatatgcacatagaaagatgctcaactcagtagtcagtagagaagcaaattaaaatacaatgatatgccaccaggtatctcactagacagctatgataaaaaggagggatactaacaactgctggtgaggatgtggagaaattgaacactcatccattactggtgggagtgtcagattgtacagacactttggaaaacagtttgcaaattcctcaaaagttaaacatagttatcataatgttatacgaaacaattcaactccagattcatgctgaagacaaattaaaacacaaatatgtacatgcaaaaacttgtgcataatgtttatagtagcattgttcataatagccaaaaggtggaaacacccaaatgcccaccaatgatcaatgaataaacaaaatgtgacatacattgaatacaatggagtattattgagccaaaaaaggaattaagtactgatacaggcatgctacaacatggataaatcttaaaaacattcactaagtgaaagaagtcaacgcaaaaggccaatagtatatgattccatttatatgaaagtatagagtagagacagaaagcagattggtgtttgccagggcctagggagaggaaggaaggagaatgactactaatgggtatggagtttttcttgggtgataaaaatattctggaattaatagagatggtgttttataatatcatgaatatactaaaaaatcaccaaattatacttcaaagggtgacttttatgatctttaaattatatctcaattaaaagaaaaccttaggacaggataaatcactttgagggagagtatatgaaagaaggaaaagagaagcagcaacagaaggccctgcaaggaagcccaagaaggagaggccaaagaactagaaagaaaatctagagactcttagaactgagagaaaagagtagttttgttggagtggtaggagttgggaagccttactgagtggttgagaaaatgagaggtgaataaatggggacacagtgtgtagataactcttctggaagttggaagagagtctagggcaaaggagggtgtgctttttttttttttttaaagacatacataacattcaaaggggatgctttttttgatgggagatattagagcatttttgtttgtagtaggaatgacccagaagtaagatccaagaagtaaggtaagacccagaagaagatatgatgacaaagtacagaaaagcagaagagagaggcaggacatgcttgagaaagtatggtggatgggcatcccacagaggagtagggatatcttatccactgtaactgaaaggtaaagaactggtgcagacaagaagggtgtatagatttggtggggaatgtagggaagctccagtttatgaagtgatagcatcagctgatggtagggtaggaagcagagggaggggcagaaagacagaaaaaagtatacaaagactatttgaggaaatgggaatgtgagcttagtagagaaatatatcaaaatatttatgaaatttcccttttcataagccaataacagttacatgaattttctaaatgcatgttttatcaaaccactctactgctaaaatccctgttacccagcttctaagcagctgtagagtttccttcatggtctgccatctgtctttatgtccgttctctccttctcctctatgcactggggtgtgcagtcctgctgaacgactaaggttcctagaatgcagcaagcctttcatgtctccatagcgttacacatgttcccctctacctggaaggctcttcggtttcctattgccaggataactctacttacaagaactagttatcacctcttcttgaaagccttcataagcccacaggtagaaggtatttactaagtgtgtgttgaaagactggagatacttagttgagccttattgaatgaatgagctctttgaacacagaagaattatcgagagtctgggcttatgtgcaaaacgccaaggactttaaaacttatgtggctttcttggtttatttactcattgcagaatggagataataaacattatctcaattccctttgcagagtctaaaaagtgggtttaaatgtctaatatacttgtcaataaatgatagtttaaaaaatagtacttaagcaaagtttgcatgtagcaaaacgtgactgagagattgctttcattgcagggattgcaaggacactgctgtatttaaaatgctgcattttcttggcataccatttaagacaaattacaaaaaccataactgaagcctgtttttccaaaaggtacgtttcctggtttggacctgtgggtagtgatggaagaacacatttggtgtagaaggaaaatatgtatatattctgatctaccctgcatatttccattaaggtctccagctgcctgaacattaaggagctgtgccagtaaggaggacaaacctggtaactggttaaaagaagctaacagagctcatgataaggcttgccagcctagagacaaactgccagttgtctatagaacagacaggacttgtgggagcatagtgtgttaagtgaggcccctgagcttagaaaaaggggctttcctattaggcaggaaccaagagaagcacaagagatcatagtttataaatatgcaacagacacctctgtttggaaggaggcacaacacttttgtggaattgtcattgtgtggcttgcttttttcaataaattccctccttaaaaattttatatagattgaatatttgtaaatagtgttttattattgatttacattattatgttagtatgctttaattttcagttttgcttgccaaaaattttctaattcttgcttaaataaaaaaaaaactaattgtatagcttggagttccaaatttagaatgagaatctttttgtgaggctaattgttttgtaatgaaattaatcattcattaatttgcctcttaaaatacagacttatttaaatctagtgggttttcttaattggacggagagacattcttgtaattcataagaagttattatcttctctccaaatgaaattattttaaaatttaaatttatttatgtcttgcttttctcaaaggaattgaggtggcttcctacaaactacatttatttattcattcttttctataacatttatggaattattagacatttaaaataaaacattaaagtcaaatagaagtgaagaggagggctgggcgtggtagcttatgcctgtaaccccagcactctgggaggctgaggcaggcaatcgcttgagcccgggagttctagacaagcctgggcaacgtggtgaaacctcatctctcaaaaaaatacaagaattagccaggtatagtggtgcatgcctgtagtcccagtgcttgaaggctgagactggaggatctcttgagactgggaggtcgaggctgcggtgagccatgatctgccactgcactccagcctgggtgacagagcaagatcctgtctcaaaaaaaaaaaaaaaaaaaaaaagaatgaaaaaagaactgaagaggcaggaccaaggtaagataaaaccaagaatggagaatgaaaaattcccaaacctaaatattgacctaataatgggattaaacacatgtaacaccccattaggggaaaaagtgaaatatgatcacttagacagttttgttatcttcgagattaagaaacatttttattcatacatattcctctagaggtgagtaaaaaacaatttctatattttataacagcaaatacagtagcttcctttctctgtgatctcacttctcatcaggtttagctgggtgggcaactttggatcttgagtctgtatccctttcctacattttcagatcatgttgagatttcaatgtaaatactcatacttttactaatagattcagcatcttccccgagaggtcatgtcctctgtgtattctcttaatcaacaaaccttgaagctttcatattgcttcatctttcctttccccacatatactaaattttgtacattctacttgagtagtgccttgttctcgttggtgccctttcatttctgttgctgttgtcccagctcagagcttactttcccttgcctgatttatcctaataacttatttaatagcatcagttcttccagtgtcaaccccaccttagtcattctaaatactcttgacagaattctcttaaagcactactctaatcgctcctttccctacacaatagaatcctaacttcttggcataactttaaaagcttttaatgatcggctaccaactacttcccagcataattttccatttcttttgtacatcataggtagccatctctgaaaccgtccttgtactttctctcctttgtgtcatcactcataccattccctccactagaatgcttttgctccttctattcctcccatttcagttgaatccagcaaatctgtacgagtgtttgctacatgcctaaggattgtaccaactactttggttccaaagatgaggatattatcctttccctcaaagatctcacagacttatgtagaagaattggtaaattgaagttgcatattgcttcctctataaagctttcctaattttcaagtttaaattaatttttcttttttcatatgcttttcttttttttaaataacactgacttgtacttttcaaatagaatgtgtgatgttttaaatataaattatttcatatgccccattttattataagcttctatggcatcagttatctgggtccttaggtctttaggcatgccacattataattctcacatagtaggtgtcagtaattttttgcaaggttgtgtacctggtgaatgtgctgagatgacatagatcatgtggtatcactgtcaaagcagtcacactcagttgtacttttagggtcttgctttaaaagctcttttaggtcgtattttaaaagtttaggtgcacctaaggttccaacaaaggctaaatgttttaaacttttaagtgacgtgtgtaaccacacatggagttcagcctttgaagtcagcagaactccacacagcatgtagagaagatcctggaacacttaggaagggggtaggagtgtggctttagggcagggctccctaaaggataaaggagctgaaggtcaggctttgaactgatttaagaaaactagtgtctatgttagaggtgattgcttttgaaatttgatataattctggctatccattgtgaaaatggctactggttaagtagttgaggaatactgtgcttcctgtgccttgtgattgctttatttcactaaaaatttgtattttaatatggctgttcgtgcttcaaactcacatatttggaatatgaagtcacatctgcgctaggctccagtaggctgcatccctggttatccagtccatgattcttctgctaatagccaagtggcattccatggggagatgcaggcacattgtttttctttcagatattaactctatgctaaggttagaggcacccaaactggttttgtatatttatggtattgtcactcataaatttttccatacttcctttggatctactttatttaaatatctctttgtggaataatgttttcatcatatttattatccactttggacattttaatgggttccaaactcacatgactgagtgtcaaagaacatccccatcatcctagttttggtatttgtgggttttacttcagtggtaccgttggtcatatatcacatatataggtctgtatttaccataacccaccatattttattcatcaaagatgtcacacacttaagatgtgcattattttatatacagctaagaaagaaaaagaaaatcattgttaattaaactaagatctttcttatcacttaacatttttgttttatagttaatggaaaatatcttgggttgtagaagatttttatcatatgccactcttataggtatataaactataagatataaatgaaatacttggtaaattactctaaaaatttcttcacattgagtccaactctttatggatcttccttagctcaaaattgttatctgtgtttttctacccagtgtcatcccccatgctactaagagtttggtggtgaagcatttcttaaaaggctgcttcttgcttgagtgagtgttattttctaaagacaggatctcttaggggtaatcagtttgggaattccttggtcaagccctgggtcctacctccctgatgagggtgacaagaggtgtcctgcacacagctcctggcatgccaggcattatcttctctgtggtctgctcaggccaagaggcagaaactgaactgccctcaaatacttgtacccagccaagtgatttttcctgttttcaaccttgacactgcaatctgcggattgcgtaataagtggaaattttcgagcaagaaatagcttcatgccagttctatttgaaatgttcaaccacctatttaatggcatcttcacagccatgcataattgagttagagatgtcacaactagacaatttttcaggcaggaagaaagaattggctctcttctaagttagtaccttctggcactctggcttgttttatcaagcaaggatgagcctctctctatttaaaaacttaattttttgtaccctcttacattgattgagcagttgtggtgtgagaaggaacaaagatgcttctgggtcctttgtacaatttcttttttttttttgagacggagtctcgctttgtcacccaggctgagtgcagtggcgcaatcttggctcactgcaacatctgcctcccgggttcaagcgattccctgcctcagcctcccaagtagctgggattacaggcatgcgccaccacacccggctaatttgtacttttagtagagacagggtttctccatgttggtcaggctggtctcgacctcctgcctcaggtgatccgcctgcctcagcctcccaaagtgctgggattacaggcgttagccacgtgcctggcttgtacaatttcttaaactacaattgcagagctaattattcttgcatgtgttttttaaggctgtgtacctaaacatcatgtggttggtttttttttggagaaaaccatttgtgaatgcttttggatacaaataattgctttccactctgaattaaggtatgtgaaaaccctggcacagagcccaggcactgtttcctttgccctccccatctggtgctgccctcccctgcctgaggagctgtgggctgcttgcttacagctcagccacataggatcttggaagagtcaaatttctccaagatctccagtgtgtgattttcactcttgctaagtgtgtctctccagagcatttcctcataaggaaagaaggtagttatatctgtcagttacaattagctgtagaatgtgctgttttacccgagaaatcctcttctccagttatactaaccaagtttttcctgtataatatccatatagaaacttaagctcttgacctgaatttttctggctgttcatttctccttttccacttacttaattacaaatggattcgtgtcatgaagggtaatcattagttctcatgacatatgatgctgagttattgctggtaaaatatttcactgccctgccttattgttatgtttgaaaatgtaaagtaatgcttataggcaatcaatatctcatgctacctcaggacagaattgaatcctgaccaatgactttcagtttaatttaaccttcatctagttaaaagtggaactgaaaacttttacatgaactcaagataatttttagattagggaagttctgatgattctgtaattttaattacagtagctcatatctgaccctcagttttcttcactaatcatttggttgtaaagctatagttaggctcattagacagagtgcagaagtgcagatatagtgtctagaagatataaatgtccattgaagaactagccatggaagaactatccttgctcagggaagactagccttaactaggtctggtggcttgcttcaggacctatttaaatactagcacgtttgtattacattttccattattctgaaaaaattattaaataacaatatccgtttgacatgaatgccttttatattccttactgatttaaagtaaaattggggtaacatatgatttttatagctctcactctgttctcattaagaaggcattactgaagataaattttaggtgggaccaatacagactaatgcagttatatagtcattgtgatctagctgaagaccaggagtcttttaatagttaaaaacctctgcagcctgggcgacagagtaagactccctccatctcaaaaacaaaaaacaaacaaaacaaaacaaaacaaaaacaaacaaacaaacaaaaaaaaaccctctgaatctctcatgcactattctgtgttctgcaaaacgttggccctaattccctgaaataaaaatgaggaattgatcttcagtaagagtcttttgaatgcttattatgtgcctatcactttgcaattagattatgtatcaaaaggaggtttagagtagttcttgagctcaaaattatattctctgaggaaagatatgacacaaaacaataaaaaaacagcataaggctagaaaaataaaataaatgcgaaactgaacacaatcaggtacccaaactgcctgtatttgtaatgtgaagtccaagggaaataatctgtgttgaaaggtagtacccaggaagagtttatgaaagaagtatcattgagatgggccccagagtacgacagaatttgagaagacagagaaaaaggtggaagatggtctggagaaagaatggcatgaataaacacttgaagacatgagagattctgaaattttcgggaatagcttgggcagagggttgactaaagaggctaaagaggcaagatgtgctaaagagcaagattccaaaagatctcaaatggtaaaaatcaaaagtttgcaatggacatcgtcagaatattgggctagagagggagatcaggaagggatcagtacatgttgtcgagaaataagtacatgatgtgcaattatgtatgtgctcaccactctatactcaacgcccagagccccaggtacagagggtgttattttggcaactcaaattgacaggaagcattgctgtcagggacctgtttttcaaaacactaaacaattctttataaagttcccaacaaaacaaagtatagtcttcctcaatttacatgatagttgcatttccggaaaattcaatgcattgcctaaatctttggttttctggataaaacaggattaggatccagcccagataatttcacctacctgaatgtgcacaaaagactgaaaaatcatgtaggatgtgggatcattgttcagtgcataggattctcgcagaactgtaggatgtttaacattgctggtcctatgaacaccgtgaaacatcctcacaaatttttaattggtcaccttccccctagtaactattgctttatttctatattagtgaccattaagttacataccctaatttgccttttttggttaaaattttaattgttgctttatttgttttacttgctaaatagaatatttaaaatgtattttctctggaatgttagattctgtgggttaagaggtagtaaattatttctttattggttactatataagttacatatcctaatttcctttttctgttaaaattttagttgttgtcttgttttttttttttttgctaaatagaatatcaaagtgtattttctctagaaagatagattcagtgggttaagaggtagtaatttttttttttcaatttagccaacaattgctaagcctctaccgactgccagcctccatgcagacgactatggccattgagctcacagagctagctgataacccatcaggaaaggaatgtgataagtgtgtagggagaatttgagagatgacaaagcattgtagagggttgagggaagatcagggaaatgacagagatcatcacatttgagttagtgcttaaagaataattttaacaggatttagagtgtacttctttataacagaaagttgaatttgaaatgactctcaaatcctattcatttataggctttgcagtgaattaccaaatggtatattttgagatgaaaaagcttctttgtttctcccaccccaaaatagtttttcctttttttttcctttttgcagttctccatcatttgtttttcatatttagatctggtcttcctaaagagtttatgaggatagaaactgtgccataactttactggatctcctgtagtgctaggcatattggaccttagatattttcaaaataattacgtaggaatgaataagctattcttaggcgcaaattgtttgtttattctttttgtattgcatttcctaggaaagtgaagtcaggatgttagtaatgaggacaccaagaggatgtcccgctagtctctcggcatgctggccagaccctggttgtgctctgtctgagtccacagaatccattgcttttctcctagtccctatctgtaggtaagagaaaatgtggaaagtcgatgtttctctggaagttatagaaatttccactcagaaggtccttctttctgaagaaatgtttgttttttttaattcaggtccaatttggacaagatactcttgctttttcgagtcagttgaagacaagataacaggtgaaaagtatttcaagagtttagatcaaacttgataatatttgtaaaacatgaactgtaaagtattacagaaattgttattcttttgttgttattaagattgaaggggagcagaatcatcccataattactcctgggggtctgagtcttgtgtttgattagctttactcacattttgttattgtagttatcagatggatttggatatttgtaagatataaaggttctattctttaagaagtcaagttgaatcatataagataaagagatcttgaagggagcttactagctgtgaagttgtccaatctctataagtgacacatttctcatcagaaaaatgatcgtatttcccagggtgttgaagagttcctttagtgggtttgaagggtacagcatggtgccgacctgtagtaggtggtccataaatgttagctataaaatattactattatttaaaaggtatttaaaaccctgaattcagcagacatttattgaacacctactgtgtgtcaggcactgtttaagagctagaaaaaagccataaagcaaacaaagattcctgtgcttgaggaactcaggtttaactggggagatggataagcaatacccaaagtaaataagtaaattatgtggcagatacaagattattagggccatggaccaaaggaaaggcaaagcagggtaagggggatcaggctgtccaagaagaagaggtgagatttaagcaaggacttgagggaggtgacagcattaatttgtctcatctcctcagtcaagagttgatgtttcaaatggcaagataaatgactgtaaaatgcctgatgttcttaactattagacttaaaccatacgaaaaactgtacgctttttctttctcgttctccacgaagtaagaaaatactgtccctttctttttcccctcaatgacaataaataagtatccctgatgatattatcaaatcctttttagaagctgtttcctttacttcctatggatttagctctaatccaaaccagaagcacattttgagtcttttctgatatgacattatacagtgagtggtttctatttttcttctaagtgttgcttgaacacaggaaaggaatgtggaagacctcttgccacagctgaagtatatattagagtacattatttagtaaacggtagaagttctttccttgaaactcatttgaacatttattgtaatgtgaactaagttttttcaatcctaattagagatggtagtttttctgtattttaaaattggatatcacatccatgtacattatacaaacacacataaatttctcagatattaaaatgggatgtcactaatatgcatatagtatatgcatctatatatacatatgtggatatgtgtagatatacacatatgcatagtttgttgattaggttaattatctcttaattaatttcttaattatttcaaagaattggggaaacagcagtttttatagttaaatattccttgaaatgaaattaattgtggcattggtacaagcaaaataattcagtgttttggtagtggtagtatctgtgatagtcttaggcttagatattcagtgacaaagtatccagtggtagagttgatgaaattgtatttttatagacgtatttgagctattatgcttttatcatcaaaatataatattcatatagttcattacatggcaaatgccatgtatgattagtgagcctggattagtagccttgctactcttgtacttattcagccacttaaaacataatgtcaacttttattttagatcagggggcatatatgcacgtttgttacagggtagattgcatgatgctgaggtttggagtatgaattatcctgtcaccccggtagtgacatagtacccatagtatccagtaggtagtttttcagcccttctcccttcctttacttcccatctagtagcccccagtggctattgtcatctttatgttcatgagtacccaatgtttagtcccacttataagtgggaacgtgcagtatttggtttgctgttcctgtgttaattcacttggataatggcctccagctctgtccatgttgctgcaaaggacacgattttgttctttttaggctgcatagtattccatggtgtgtagctatcatgttttctttatccaatttactgttgtgggcacccaggttgattccatgtctttgttactgtgaacagtgctgcgatgaacatatagtgcatgtgtctttttggtagagcaatttattttcctttgggtatatgcccagtaatggattgctgggccgaatggtagttctgttttaagttctttgagaaatatccaaactgcttccacagtggctgaactaatttacattcccaccaacagtgtataagccttccctttcctcgcaggcttgccagcatcttattcagccacttctagagttcattattactttgtctgaatgtttgtaccaaagttacttaaaaagccagtattatttcattgaactcattgtgctgttgacctttttttctttgtctttttaagatgagttggaatatagtatgtaaaaatgacacatagttagatttggcatctgaaggagtaaaccaaatatttactggcaatagagtgtgccatgcatttgagagcattggaatgagcctgaatacctgggttcaaatctcaccttgccacttctacctggacaaccttggggaagttaattagccttctaggctttactttcctcatctgcaaattataaaaatagtagtacctaccttactgcattgttttaagaattaagtgagttgcatttgtaaagcacttagtacagtgtttattaaatagatataaataaataccccagcaagctaaaaaaagagttgtctctcttttttttttttttttgagatggagtatcgttctgtcgcaggctggagtgcagtggtgcgatctgggctcactgcagcctccgcctcctgggttcaatgattcttgtgcctcagcctcccaagtaactgggactacaggcgcgtgccaccatgcccgctaatttttgtatttttagtagagacggagttttaccatgttgtccaggatggtctcgtctcttgaccttgtgatccgcccccctcggcctcgcaaagtcctgggattacaggcgtggccactgcgcctggccaaaaagagttatcttttaaagatacgtacttacatctttattgtgaaatgatgggatgtcttagatttgtttgaaagtaatctggtcagagagtgggacatgagtggtgagacagtaggtggatcaagatggctcatgggctgataaccattgaagtggaaataggatttattatactactaggcctactttatgtaagcttgaaattttccaaataaaagtcaaaacaaaaaaaggacagttcacttcttccaatgttctttccttttttttcttttcttttctcccctaaatctggcatatcattcctgtcttttggggtatagttcaaatgctactgttgtgaagcctccttgataaccccagccacatctcatctcttctcttctgactcatgagccccctggactcttcttgagcacctatacatgttgtggctttgtatttattcctgaggtcttttccttcttccaggctaacctccaagtggattaggatcatgttagtgacttccaggcagatacctttctcacagtaggtgcccatcaaacctttgttgaaaaaatgacatttatgactataatctagaaagagcaaaagcaattattttgtgtgtcacaattactactaaagactgtgtttggggatgaaaggttgttattcgaattttttagtggtagtttgaaataggatacctgtggctttatattaaaatgtttttgctatttgggggcatttctttttattctttcaaagacttcatttaggaagttaatgttgttccaggcgattagcaaagttacaaatatgccttctaattctggcatgttgagaatctgaacatgtgaaatacttgtgttctattttatgttatggaaagtaagatttttttcatctgtgggcccacattattttttctatttactgattaaatgatgcagagaagagtctagtatgaaactggaaaaagttaacaatgaaaacctaatcacagaactttgttttgctttaggatacgtcctgaaaccatgggaataaattataatttagccatcctcccctccctcataacatagataagcttttctttaggcatgttcttaaacaccatatgtaaaacacctgttggtaagttaaagaatattttaaacccaaggattttattctattaaacatattcttaaatgaaatgattttataaagcaaagactattttagagcaagaattctccttaacctctcatttaaatgttttgcaagtttgcttgtttatcagttgaactatctaaggtgaatacttcattcattttagtctcttctccacaacaaatcatttttgttaacttcgatggaagtcaagtagtgaaattgggctaccttgagtttcacttcggcctccttctatttccatcctcaatggaggtgctaattataagtgaaatagtttaaaactgatactagagcaaaaagtgccaaagaacataggtaatctataaactaaataatcaaattcaagaaggggttatactgcctgaaggcattattgccatgactttctcacttgcaatggagagttaaaaaaaactctgcttttgatttttctccacttgctgctctgttaccaccccagtggcatttctcattaacccaattccttgacctttggctattacactgaagaattcaaattcacaaatgtgaattgcctcattcatatctacaaggtttgaatcgtggttaagacttagaccggggtctgattatgaacaggctgtaagtgagagtgggtgttcctttgtgaagatctgtacttctcagctgtattgcttcgttgactcatttagagtttctatagtacttaggacaatgatttcagcacagtcattgtggcctatcatgctatctttggctgacaaaagtgattctgagatatttaaaagtaaagtaaaatttttatttaaaaatataacacatgaaataatttaagaaaatgaaagagtaggtattaaagataagacttccaactccccaaaagtaaaattactaacacttgcagaagctttaatgaaattatttttaacacagattgaaaaaaaccatgtgagatctttttctctatagatcataattccttggggatagggaccttgtttcctattctgttgtactctccatggcagttaataaggtactttgtacaaattgaagagacagaaaatattaaaatcctttctttttttttttttagaaatttggaaaacctcaaatctgttgagaaattggattttggaaatttattcataaaaaattattgtagctgaaacttacctctctcagataccaacatgtttctgtagaaggatctgctggactacctctgtttccctcatgaattggagagattgtgttaagtgacagagagaaagcaagccctaatctattcccttctttttctgcatggggtgaactcagattgtttgatttgctacccagtggagagccaggtggccataactttatttcttttatatcatatttttatgtgaaaaggcataccattagtacccttaaggaataatctatcgttttaatccctagtggtacttgggtactgttgggaccttcatcaagcagattccactacttcaatgaatgtatttctgacttttcaggctcaagctttcttttttttttaataatgaaacaaaagtatatgaacaaatggaaataaccagtgggaatgaatgatccatctgatagatcctttgtcattgtgggaaattattacattattccaacctgtagaaatttcctaaatccccacatggagtcccctatcttttctgtcagagtgtatgtagttatgcaagtgcactaattttatggaacatcctcatgattcaatctgctgctcccaaatcaaaactaatatgctttggcttatgtactagtttgaatcatttatattattctgctcacactcagtaaaactacatatcttcagggtctgccatatgaaaggtgctgttttagttgttcaaagaagcaagggtggaagaagttagactgttcttcctttgctattgctttcaaatatcaaatcatcacaagttgagtgaaaaataatttaatgtattgagtagctatgttttaaaagtctagggttcttttgttgttgctcagagagaagaattaaagattatatgatgtactttgattagtgctgtctctgaaaatccacaccactttacattattttgaatgtttgaaagcatgaaagtgttcacattgaatgtttccaagtagttgtcttaatattttatcacttagaagtcagttacagataaggaaataattctaactatttaagaaaaaaatagaataataaaaacaaaagcatttaccaaaggaattaggtgcttactaatctaatcattggactctagactgggcctctaagaatggttccagaaaggcacagtggactgcgtgccaggggcattgcttccattattactcctaggagctaggaactaaaaaagcctgcatgtcaactgctggtttcaaatcacaccaccctagcacaaccaggagtcacgaagcaactgttgtcttctgggatattctactttagctgtgattagggatcagactgctaccagcattgttagcttcagagctgtctgctgcctgttagatttcacaagcaagacaaaaccttgggtgcttcttctcttccgcttaactctgaattcaagtttatggaagtggcgctcatggtgaaacccaaattggaattcaagtcttatggaagtgcatttaatggtgaaacctaaattgtgttgagaatgctagttacaagggagtctgggaaatgagtttttagttttctggcatctgcagtgtaagaaggcaaacatggagattggaacagaagtgagctggccaatgtgctgtatcagccacagatgcttttgtgttatttcctgtgatggcagaaaacaaacttagaatctggctgattgagtaaggaaacaattttcagatgtaaacctgtatattacagtctccaagtagatttttaaaatatatttttttgtttgcattatctgagatccagaagagcatccagtaatcagtaattacatagtcagatgtgccaggtggaatgatcaggtatctctatgtatttgtagcttgaatcctgtatgtcttctgtttagaacttagcctcttttgaaattaagcttttttccactggtgattatgctagtgcatttaattgggattatttttggcacagcgatcattaattagagcaaatggagcataagcaacgttagttgaataataatgaatttaaagagtctatgaaggttaaatagcatactctggaatgttctatgaagaatttttcctttccatgctacatactgtcaagataactagtctaacccaaggttagataaaaacaatatgtagagtgtttcctgcaatattttcatgaaaaatatatgtgtaaaaatgctaggatggtctaagagaaaatatttatattgattactgtgaattagaatagattttttgtttgtttatattaaaaacatttaatcccatgagcacatcatcttatcagaaaatgattcaaaaagttcttctgtgagttttatcaaccaggagttctattcaaaatacataggcagataaatagtaaagtaaaaaaaaaacctatgtgtcttttatttctctgctaactttgaatggtacatgtgatagactttaattattttgtggctaatttattggaaattgttttttggttggaatacaatgtcttttgttgatatctccccaagtctcaggtcataatcataaattattattttattgaaggcagttatgataccatcttgtcacttttcctaataattgtataataaaagttgtattcacattatattgatctatttactttttcagttaattccgtatgaaacattgtttactaagatatcaaatcaaccacaaattaccattcatagataaaatggaattaatcttaatgatgtggcctttttaggacatagttaaaattctttaattttgtgattatgttattagtatacattaagtataatgtagaatatacttatgatattggcccttctttcaggaattaaaatttaaggaaatgggcaatgtatgatgctatttaattatgaaaattctcctgtgcgttttgtcttttcatgttaggcctaagcagagggcctaaagggtgtggttgtcagttaacttgggaaaatttataggagtgggaaattctcaaatgagatcataggggtctccaggcgagggccaggctgagccacaagcagctccatagagccagggtcagggagctggagagtcggatgaaggtcatgggtaaaatataattctgggcattctgctgaaatggcagacctctcgtacagtatagatatgcaaatgctaacacccagagtgtctgactttgatgtgctgccaacacctttggcctccagtgggtgctgactgaattggagagattccagattcagcaaagattctgttagcagaggaacaggattaatgaagggatttgtccctctcttacctcagtttactaaggagagggttttattaattggcgtgaaaacgttgcataacattttaggaactaaatctagaatttcttttaaaatagtacatttacaataattatcaaagattttttctttaaaatattttttcagatctagagttattttaactttattttgaaataatttcaaacttgtagagagttgcaagaagagtattaaaaccctcttgtggccgggcatggtggctcacacctgtatcccagcactttaggaggccgaggtgggcggatcacctgaggtcaggagttcgagaccacctcaacatggagaaaccccatctctactaaaaatacaaaattagctgggcgtggtggtcatgcctgtaatcccagctactcaggaggctgaggcaggagaattgcttgaacctgggagcggaggttgcggtgagccgagatcgcgccattgcactccagtctgggcaacaagagcgaactccgtctcaaaaaaaaaaaaaaagcccttttgcataacaactatgaatgctttgcccatttgctttatctcgttttgtctctgtctctctctatacacacacacacacacacacaacacacacgcaccatttaagagttaatggtcaatatcacacccctttactcctaaacattcagcatgtatttcttaagaacaaggacattctcttatataaccacatagatatacagccatattcaaaatttgcctattatcccaataatattttttagagcatatttcctcttggcaaataagtcatgactacatattacctttagttgtcatgtcttttaaatttttaatctggataatctcgtaactccattttctttcatgacattgatatttttgaagggtatatgccactgttttatagaccaatcctttattttgatttgtctgattcaatattttttatcaatgacttatactttaatttgaaaaacatggaaatatataaggaagaaaacattcacccttgatctgctgtccaaggatacttctgacatttagacatacttccatttttcctatgactcataaatcagttacaaaattgaacatacagaataatcccatattttatacatattaatacgtataaatatgtatagtgtatacatattaatatgtataaaaatatgggattattctgtatgttaattttgtatctgattttatgagtatttttccatctcattaaatgctctttgaaagcatttttcctggctccctaatgttctttattacagttacactatcatttatgtaaatactctttatcattggatatttaaattgtttctatttttcttattacaaaaacactgtgactgcagcagtggctcacctgtataatccctgatagtcaggaggctgaggtggaaggatcatttatgctaggggtttgagattagcctggacaacagagtgagactccatctctaaaaaaacaaaaaggaccacacacacacacacacacacacacacacacacacacacacacacaccgtcaaatgaataccatcaatctataaactgcatttgattcctctttttcttttttctttcttttttttttgagatggagtctcactctgttgctaaggctggagtgtaatagcgcgatctcgctcactgcaacttccgcctcccgggttcaagtgattctcctgccacagcctcctgagtactgagattacaggcacacaccaccacacctggctaatttttgtatttttagtagagacaggttttaccatgttggtcaggctggtctcgaactcctcaccttgtgatctgccctcctcgcctcccaaagtgctgggattacaggcatgagccaccgcacccagcccctgattcctcttttcctaaaattacttaagcacatgtatattaaacaaatgacttttcatagtggacttatcataaaccagtaattaaagtcttgatgtgtgcagaaatgcaaaacatttcccagtctgtttttggggcctctctcttataagggtttgctttcccataatgtatcgtctgctcagtggcttgccacactatctgtggtgacaatgtattgtcattctcttggtctgactgctgggaatcacagggagctgagtgccgctgagttaaacagatgttcagcatggctgcatcttcaagttttgtctggttccagccctgacgaaacttctagggccctgagagaaagagaaagttttagttgaagtaatatcctatagtttgttagtggaaacagaagcacgtggtttctgatttgttctggtgttctctttggagatttgtatcagtgatgaaaaaaaggaaaggttggttaatctgttgcctcctgaagtggttctttttatcagaataaagactaggcatcatctcctcttgaactttttcctgacactcctgttcatcttccatgctggacccattaggattaatcacttctcctttgagttacccatatatgttatctttaggtctgctacagccttcgcactgtctacaactaattgtatataagtctagcttccctatgaggcactgggttttatatgcattaatccatttgccctgcaataagccaccccaaaacttagtggcttagaacaatagccattatttagctcatgattctgtggaatcagcaggttggtctgggctcagtagggctcagctgcttctgatgggactcactcatatggttggctgggggctggctgattgatgactgggatactcacttattctcttgtggtttcccatccttcaacgggctagttcagacttgttcacatgtgtcaacagggttcccaaaagcatcaacagagcatatcctttaatgtacaagaactttcaatttctgcttctgatacatttgcttctgtcccactgtccagaacaagtcacatggctagcccagagttattgtgtgagagcactacaaaagggtgtgaatacagggatgtgtgagcaatggggcattactgcaatcagtccactacatgttccttgatgtcagggttacatctcaacatcttttcatctctagatcctatcatgttgcttggcacaaggtagttgcttggggaatgtgaattgatctatatagttatctagtccgtttagcatcccctcaaacttgggtaaactcagggcacaaggagggcattaggcaatgttcttagatgctgagctttaagggagtttttcagctggcttttgatgaggaaagtctatggagagaaaatgggtatggcacttggtaaaaaaaatcgggagattgttttacggaaaaataaaatttcttacctcctaagcaaaacatcaaacaccaaaattttattttttacggaaaagtaaaattttttacctcctaagcaaaacataaaacatacatacttatgttgtacttttatttttctttcaaagaatgttcctcatgttatttaatctggctttattttgtgaataactagggagagagtacatagccatgtttgacctggccccatattctcagagtcaaggcctctgaaaaattttttgaaagtttgaataaccagaatagaatcatccttaaacctatgtgatgcgggctgctttcttaggcctaaaattttaggggccttgctgttttttctggcgttgcctatccccatcttgctagtattggggtgtcaagatgtgacaggggatatgcccacctagagcttgaacccttctaccttctaacccatgtacaggaaactgggactctaaaattctctgcctaaatgggctcaagctgctttcaggaccttgtgggctcctttgcttttctcctaaaggcagactctaccagtgtataccctttctaggccaaggggtggccaagggtagctgtttgcacagtgagggttagggggtggatagatcttgactttggtttggggtgcttataaccttgctttggagacccctgagggtacaggatgaactgagagtaggatgagatgttgacgggccttaggctagggaccactttgaccggactgtaagattgggggtggcctgattagggatctcataaggctgttgacaggagtggaatcttcatgggagcaatagtcagatttgtctcaacttaaattctgggaattttgctaaaataagatggcttctgagatataatgagctaaacctgaaatgttggttcttgtaaatacatggtaaggcgtgagattagaatttctcttttaggaaacctgtcaaattgttaagctccttttcctttttatttgtgatctaagtgatttgtctatacagcctcacagatagtagatccagtcagaccaagtacatgtgactttagcgtttgtctataaatcagatggccacttaatgggtataaatagaagggatggtaatagaggttcatactgaggcatttaaaattgttttaagaagatcagagagggaaagtttgaggcaaagggaacacaaaaaacaaggggatactggtatcacttggctggaacaaattttaatgatgcttttctggttcccacttccccaacccatttttttttaaagaatctatggccaatcactgcttgcttgaaaaattgcctttgttatttacattagcttttaggaattttagaatgatatgagagtctgtaatagaagagtgagaatcaaagctattgtttccaggctatggcttgaatttgaaataagaaaggcaaaaatacaagttttaattttctaacctgaagattaggttaagaagtcattagtagtgaacaagtgtctagtaatttatttataaggcatttgattaatgactacactataaacattatttccaatgcacacagcttcttaaagccaactttttttttgtgagttggcacagatttgtcatcgtttctggtttaagttttgaaagagtcattatacaattccttagaagaaagttatttccctttggttatagtaaattgtattttaatgtgatgtgatttgataataacgtaaaatcgtcaaatacaagggcggagaaggtagatttattaggtaattgaattactagagatgctattgctgtgagagaaactcaattacctgtgggctgtggacaaagagcttcctatttcctgatggggatctaaaatgattagcttcaggcttgtagaagtcttctgctattattaatagaatcaagaattatagaatagaggaattttagaaatcatctaatctactatcctcactttaaaagtaaggatattgggtgaaaggtcccatgtccaaggccacactgcagtcagtgactggggccagaacccaagctgttcccctgaactagggactgttacttcgaaatacagacaatatctgttcttggtcctagagtatatattttgagggcagggtctttcttaaaaaatgtcttctgtatactatttaaagattttccatagttttcatggatgcataaactataaagccaaattcttggcctgttttaagttctttggtttgactttgttattgccagggtatctcagtgtagcaaaataactccttctttatggatctttttctgatgatttatgggaaacttaagataaacctttaattaattatttttttttgtttactttgttgactggataaaattctttcacgtggttcaaaaaaattctgctgtattttaacatttctttgataatctctaaacacttttgtgtaacttaaatattgtcaatgtatatgcatatctgtagatttgagaaaatctggggatttatttaattcattttaatttattgtaatcaagttggtaaattattttaaggcatcatctaatatgtttttttccactgtctttttttttctcaatagggatgaatgggaccttcaggatgtatgtaaaacatccttataggtgaaaatctaattgatttttgaaagtcaaaaaggattttgattctattagttctctgaaacctgtcttgtatttgaatacccatatggtcaaacagttcttggttatacctactgaagctttcttcttttttttttttagtctttttttttcttctattctcttatattagaaatcagcatgttttgacaattatatattaagaatctaggagttaagtaacagaatttttctttatcattagaaaaatcatttgcttgtgaagtgtgaaaaaagggtaatgttaatttgtagtagagttttgaagccagatctcaaggctatacagttaaaggatagtggagcgggaataaaaccaaggtcaaatgaaattcattctcacttagagtagggggggaataatgcatttccccagagaacatactctgtagctattagaaacatttaaaagaatttttaatatgattataaaactggcatagatttaaaaataatagcatcctaatgtcaactgggagtgtattctgcagtatagaggaaaggatgcagaaataggtctcaatctccatttgcttggcctctgacctcgagtaaataatttaactgttttcagtctcgggatgataatacctgtttttctaacttctaaggttattatgagggtcaaatatgataatacaacagtgctgtgtggatgtgtagcatgaagccagagcatctgatgcattcttgttttatcttgccagcagtggtgtcattctttgaaggtggacaaagcagtggggagaattgcaattctatatcttgaaataactaaaaagatatcttggtcataaggtcttaaagaaattctgggaaaaggtgaccatataagagttataatatcaaagcaaggcagcattgggtatcatttttttaaaagtagattttaagaacttagaaacaaagtagatattttagaagggattgtgactcatgaggatggtacataagagaaaatgaaattctgattatttacttacgaatgattttttggtttctttttgagacaggcctctctctgtctctcactcaggctggattgcagtggtgcaatcacggcacactgtagctcaacctgcctggctcaagtgatcctctcacctcagcctcctgagtagctggggccacagcatggaccaccatgcccggctaatttttttgtttttgtagagacagggtcttgctatgtgcctgggttggtctgcaactcctaggctcaagcaatcctcccaccatggcctcccaaattctgagattacacgtgtgagccactgtgcttggccgtgaatttaaataggagagagagcgtatggacaaggtgatttattaaaaataaaacaaaacaaaacgacaacaacaaaaaacatggactatatttatatattctctagccataaagtatgtgaataatattaaaaaaatcaggtaggggcatatacgaaggaaaaatacataagtggcttttaattaaaatggagctggtactttccagtagtagaattggctttaattaaactatgcatttaacagaacatacttcaagttaaaagaatgtctactagctactccctcactcttgacagaaagaatttgcatgaaggttaggtatgatagcgtcagagaggctaaaactgagaattggccaaagtttttgaaaaggtaaggcaaaaacaaaaacaaaaatgggttaaagacaggagaaagaattttttttgttgttatctagaagtcggaagagagaaagccattgattagggaagatggaaaaggctctttaagctattctttaccggaaatgtattagcagagaccgactgaacagtcatctgggataattcagaaggtgaaagttgggctttaagtatctttatttcacccattaatatttaatacataagtatagctgacatgcttacatggacatctaggtgtgttgtagctgtcctgatttgagttaagcttcattttgtgttgctctcaccaagatttaccagccatattttacagatttgtatgatatcaagtgctgagaactaggataagaggaaaattcgaagagaaaaactacaagtaatccgcctttattctccgaaccatttctcattatttagagtatgatgaatgaatcaaacatgatcttgggtatagttcttcagatatctgttctcaaacagtgtgggatctaccaattgaatgctaattgggaactaaaaataatattcatagtaaatctgctttctggttttatttaagacttggctttttaaagttttctccatccttgtttggaagtactcattctgtgaattatatagaagtagcatttctggccaagcagaaaaaccaactagttggttcattttcctagaaactaccagatgccttcctagagataaagcataaccgagtttatttaaaattgagttgtgacttccttgtgtaaaactgactttaaaatatgcatttaacaaaccatatttcaaagtctaactagctacttactccctgactcactgaatgaaaaagtattcatataaagttttagtgtcagttgaattaacttataaccaacttccactgggaaaagatatcattaagttgttttttttgttgatactgttcctgaaaaatgtatttgagaattataaaggtggcatagtttagttagaatactactaataataaccttcaattctgtgtgtatggggcatgggaaatatgttacgtctatttaggaggattatttttgtgatgattattagagaccaatcacagcagcaaaaacaaaacaaacaaacaaagaaccaaacaaaaacagttatgcatcctgaatgaaaggtaaaataatactggacatggtttcttgaactcctggcctcaagtaatcctcccaccttggctcccaaagcactgggattacagatgtgagccactggcacccaactgggacatagtttcaaaagtcactccacatggctattgaaaagtcttgtcttaaaaatagttggtttctgaaatcttctcatataattgacttcatattgttttgcaactaaattgtgctggaaggacccatgtctacctgagagaggaagagcatcaaagtgaaaaggctgcaatgaccaatacagtctctatataaggaaggtgaaggaggcaggtgatgcaaattacggcattagagatggggctgcggtatagatttggcagtcgtcctatacagtaaacatcacagctttttccaaattattttttcaaatgaacgttttctttaagaagagttttagattaatagaaaaaattacatgggcagtgctaaaaaaaaaaaacagaaaaattacaaagagtacccatatatgccacacttgttttgcatttattaatatcttacattagtatggtatgtttgttgcaattaatgaaccactactttacaatattattaattaaaatccatattttattcagatttttgttgtttttagcctgttgcctttttctatccaggatcatatccaggataccacattacatttcatcatcatgtcctaggctcttcttagatgtgacaatttctcagactttatttcttatgaccttgacagtttgaggagtactcattaggtattttataaaatacctcttaattgagatttctctgatgttttctcacggagttatgtgtttttgggagaaagatcacagagggaaattaccatcttatccatcatatcaaaggagcatactgttagtgacttagcactgttgatgttgtccatcatcactggctctggttatggttgtcaggctttccctttctatcctgtattctttgtaaggaagcactgtgcataacccacacttaaggagtggggagttatgctccatctccagagagtgtatgtattatctacataaattatttggaactcatctgcgtgggagttttgtctattattctcatttgtttatttattcaataatttatatcagtatggactcatgaatagtttatactttggttataatccaatgctactttatttatttatttgctcaaactgttcccgtgggagctcttcagttggttctatgtccgtttgacatagtctcgtaattgtgtgtgtgtgcgtgtgtggtgtctatgtgttttgaatacttcctaattttctgtcactacaagatgctcctggatcacatctatatatcctcccccagttctataattgactatttttccaaggagccctggttctttgtttggaaatggtgttagaaaccaaaatctaggcactaggtgtactcattgttattgattgtagctgcttttaggctctctcagctgacagagcaagggaatgtatttgcatatacaacctgtgtatatacacatatctacaaatatttctgtatgtaatcatctgtatctatgtaagctaaatatgagtttagactgatgtctccaattctaattcatcaccacatggataatctagcctcctcctcttgcttacctataacttcccattctaacagtcagaaacttggttgcatccatccacttaattgttcatttatgtatacatgtataacagtatcagaattaactgtatccccagaggcaagaactttatcaactacagcagcagttcccagcctttttggcaccggggctggttttgtggaagacaatttttctatggctggctctggcagggagtgttttggatgaaactgcccatgtgtcacttagttgacctaaggcgcatgcaacctagatcccttgctaagcagttcatgatagggtttacactgttatgagaatctattgccaccactgatcagaaggaagcggagctcaggtggtaatgctgttgcccacgggtcacctcctgctgtgcggccagttcctaacaggccatggataggtgttggtctgtggcgcaagagttggggacccctgactagagtacagtggttatgtgtggttccttttccctttagtcttgcagactccactcattccaaagttacttaggtcaactaccctctccccttaccccttcagtgaggttgtttcatcatttgcaatagagttagactgtctgttttgtcacattctgcattctattctgggatccttgatgtccttaattatttttgtttaaattgcatggactaaggtttactttttgtgctgaaagtttcataggttttgacaatgccttgtgccatgtatttgccaatacatactaagatgtttgagctatttaattttatattattatattgtattattttatgttatttactagtacatgcattgtcaaaacccataaagtaaggttttgaaatagtccaaactattttcaattattaatatttgactttttttttttgtcttttgagacagggtctcactctttcacccaggctgagtgcagtggcttgatcacagttcactgcagccttgatttcctgagctcaagcaatcctccacctcagcctcccaagtaactaggaccacagatgcacaccaacacaccgaactaataaacaatttttttgtagagatgaggtctcattatatcacccaggttggtctcaaactccgggctcaagtgatcctcctgccttggcttcccaaagtgctgggattacaggcatgagccctgtgcccagccttgaccactttttttggaccggcaattttgagtggttcaatccaataaagttgaaatttaagccaatctattatttacatgcagttacatgaaatagctaaaactttgagtaagtattgttatcataaagatatctcataatcttaactacatagttatatatattattttttctcctgcctcagcctcctgagtagttgggattataggcacgcactgccacacagacnnnnnnnnnnnnnnnnnnnnnnnnnnnnnnnnnnnnnnnnnnnnnnnnnnnnnnnnnnnnnnnnnnnnnnnnnnnnnnnnnnnnnnnnnnnnnnnnnnnacctcatgatctgccacctcggcctcccaaagtgctgggattacaggcgtgagccacagcgcctggcccaattttgtatttttaatagagccggggttttaccatgttggccaggctggtctggagctcctgtctcaagtgacccgcccaccttggcctcccaaagtgctgggattacaggcacgagccacacacctggcccccacctttcctgtctgtgattcctcccactgtccttgagcagggaaagtgtgaaaagacagtcaggatcttctttgccactggaaaaccggaaagctctggtctttctcaaaagctatttgctttatttttacttattttattttattttatttatttttttgataagaatctctctgtgtctcccaggctggagtgcagtggcatgatctcggctcactgcaactccacttcccaggttgatgcaattctcctgcctcagcctcctgagtagctgggattacagtgcccaccaccatgcctggctaatttgtttgtattgattgattaatttttattatgctaaagttctagggtacatgtgcacaatgtgcaggtttgttacataggtatgcatgtgccagttggtttgttgcacccatcaactcgtcatttacattaggtatttctcctaatgctatcctctcccagcccccgactcccccagcaggccctggtgtatgatgttccctgccctgtgtcaagtgttctcgttgttcaatttcccacctatgagtgagaacatgcagtgtttggtttttgtccttgtgatagttttctgagaatgatggtttccagcttcatccattctgcccttgtatagttttctgagaatgatggtttccagctttatctatgtgcctgcaaaggacatgaaccatcgttttatatggctgcatagtattccatcgtgtatatgtgccacattttcttaatcagtctatcattgatggacatttgggttggttccaagtctttgctattgtgaatagtgctcaataaatatacgtgtgcatgtgtctttatagtagtatgatttataatcctttgggtattacccagtaatgggatcactgggtgaaatggcatttctagttctagatccttgaggaatgcccactgtcttccacagtggttgaactaatgtacactcccaccaacagtgtaaaagtgtcctctttctccacattctctccagcatctgttgtttcctgactttttaatgattgccatctaactggtgtgagatggtatctcattgtggttttgatttgcatttctctgatgactatgatgatgagcatttattcatgtgtctgttggctgcataaatgtcttcttttgagaagttctgttcatatcctttgcccactttttgatgggattttttgatttttttcttgtaaattgtttaagttctttgtagattctggatattagccctttgtcagatgggtagattgcaaaattttctcccattttgtaggttgcctgttcactctgatggtagtttcttttgctgtgcagagctctttagtttaattagatcccatttgtcaattttggcttttgttgccattgcttttgtgttttagtcatgaagtccttgcccatgcctatgtcctgaatggtattgcctaggtttcttctagggtttttatggttttaggtctaacatttaagtctttaatccatcttgaattatttttgtataagatgtaaggaagggatccagtttcagctttctacatatggctagccagtttcccagcaccatttattaaatagggaatcctttccccatttcttgtttttgtcaggttgtcaaagatcagatggttgtagatgggtggtgttatttctgaggcctctgttctgttcattgatctatatctctgttttggtaccagtaccatgctgttttggttaccgtagccttgagtatagtttgaagtcaggtagcgtgatgcctccaactttgttctttttgcttaggatttcttggcaatgcgggctcctttttggttccatatgaactttaaagtagttttttccaatctgtgaaggaagtcattggtagcttgatggggatggcattgaatctataaattaccttggcagtatggccattttcacaatattgattcttcctatccatgagcatggaatgttcttcatttgtttgtgtcctcttttatttcattgagcagtggtttgtagttctccttgaagaggccttcacattccttgtaagttggattcctgggtattttattctctttgaagcaattgtgatgggagttcactcatgatttggctctctgtttgtctattattggtgtataggaatgctgtgatttttgcacatcgattttgtatattttgtatcctgagactttgctgaagttgctttcagcttaaggagattttgggctgacacgatggggttttctaaatatacaatcatgtcactgtaagcagggacaatttgacttcctcttttcctaattgaataccctttatttctttccttgcctgatagccctggccagaacttccaacacttacatagttatatttttatttagtagtaaataaactatgacaaaacacttgcaatttttttctgataaaatagtcatgttaaaggttatattccttcatcctctccaaatatgtacgctttcaaagaagagtagatactaatcgaatatatcctacccagtgtgaggattttaggcagagttaacaatgaattaaaaactttaggcagtgtggggaaattttgctttctaaagggaaaaatttgctcccttaattgttcttacatactactgcttctctcatttcattttctgaaagatttaagtcttttggaccatctaaagtgatcccaagccacatcttctacatgaaacagggttatatttcttcattcaacactatatatatatattttttagcatcttcttcatgtgtaacattgcgttaggggcagaattcaaattgtagatcagccaccttctgggtagctaaaatgcacttggaagcagtggcttccgactgctgaatttcacgaatcagttttaaaaaatggcaattagtgtagagttgccaccttttatttttgtcaaatcaggtcatagcaaatgaacaccaaacaaagttttcactaggttgatttgttttgctccttccaaatgtctaatttaaaatttatactatgtacttttttctattagaatattttacatatttttccctattccatttttatttgaagtggattattcttaactcttcagctattatcctctactccacaaatgtcaaggatagacctttaatgagtagaaagatgtcagggatttgacagtagtgaataatcatgtctatctcttgtcaatcttttgatttaagtgagggaaatgctgtggagaattgtttcttttgttgaaaacctagattagtacagctatgccatagtgaatgcttaatgaatacatgccaaataaataaaaaaaagaatcttccaaattcttattcattgacatgaagatataaaatctagcatgttgataacattgaacttcttaaataattctataacaaattctcttctttttgtatggatttttcatacaatctgtgtaacatttgcttgtgaaatcaattagaccaactagaaaaatacagttaaatgtttaaatacttttgatcaaatggcttttgtttgataaatgctatcaaaaaggactaatcaagtttcaggtctgcggttcatttttttttttgactaatacttgtatttgtacagaaccttttcttggagtttattactcttgtctataacattttcaggatttaattaggagagggattttcctttcaggatatgtataggtcagattatgatgctgtggcatgtagaccataccttagaatttgttgtatttggcaagaacttcatttacttttaacaatctggcattttctacattttatgatggaaataataaaaatgggatctttgccctaattggccagtggtaaaatttaaccttgttttcatggtcttagactttttcttaataagaaatttgtttaaaattagtacatttctattaccattttcattttgaacctaatttcacaagtaagcatttttactgagcatccagttgtccctttgctgacctagtgattctacaagtcctataccatttgtaagaatcaacaagctgatacaataaaatttattttaaatcttcaggatacagatacaagtgattatatttataagatttagagatttataaaatttaatcgagagattatttcatttttaaaacctatttttcttcttattaaagaaaatacatgttcattaaaggatattttaaaaacagataaaactaaagaaaataaaaatcacctataatccagttacttggaaattagccacttttaacattcgtacagatttatcttatgctatattgtattatactgttatatgatttaaaagtgtgtgtgatatacatatatatatatatagagagagagagagaaatcatattgtacatttgggcttgtagctttctttttcacttaatagtagagagtgaattttttttttcatatttactattctttacctcattcttaatgattacttagtctacagtgggtgataaatcctctctttttggagtttatattatttctgataacaatttcattttaactgttgttagttctacaggaggttagcatttgactttttacaagaaaggggtgatgagtagtatttgaaactaacgtgagtttgagggccgtagtgtcctccggatgttgggagctattgctctggggcattgttcctcttagccctccggacgcttgcctagctgggctgaggcaggctgaggcctgtttgttgttagcccgctgcaagagcagtggccttagtaacgtcagcaggaacagagcaggcttcatctctacctttgtctggatttggtgctggtgtgttttccccgctgctgccatgtgatggctcgtaagagcactacacactggatctgtaactccttttgaaagctctattgtgagatgctgctgcgttcagtggaggggagatttttgctagtgtgccacttttggtttctttcaaatgtggatggccttcctctaaagaatcctaggtaaggaaagcactagttttgaagtgactaaaaatgattaaattatcctttcctccatgcttcctatggtggaacggtagtaaaataggaaagtaatactcagatttccttgcctactttgcattatagttaatcaccacgggagaggtgggaaagagagagtgagagtgggaatcagggaagatttcctaaatgaaataatatttgaatgagggataaagaataataatgggtggcaggaaacacagaaatgtggataatggtagttactaaggtttgtttatgtactcatccataaaacattagttgagggcctatgctataccaggagtatactagactttggatacccaagaattaattagacatggttcctgctttttacgggttgcagtctggttgggaagatggaaaatagacaaaacatatatagtgggttctatagtaaagtttctacaaataacatggaagtatcatagtccagactaggcaggttaagaaaagtctttcctaggggttgacacctgagatgagacttgaaggacaaatgggcaagggagaaggtacacagatagaagaaactgcatgtgcaaaggcaaggatgcaagaaggaagctggaatatccagcactgcaaggagttcagtgtacagcaaaagagagactgcacagtgggggaggattggcagaagtaatttacgagggcttaagacagtaagggacgtggagaaaatcaaggacaaccccagatttttacttggttggtagtgctattcgcactgtatgttttcattgcagaaaataacaaggagggacagattcaaagaggacaatagcgtattcaaattaggacacgatgcgtttgggtacttgtgatatatcgatataacaagtagaaatctggggctcagaagagagattgggctgcagattcacgggtggtagccattagcagggggtggatgaaaccaccgagggggagacatgcagagtgaaaagatggctggaaaaaaccccaagaaggagcggacaaccaaagatctgagaaggaggcaaggagttggaggaaaagcacagaagacaggcgaggagacagaggtagcagtatcaagtttttctgaaagaagaaatcagataaattttcaccacttttaggaataggccattggtgatcttggtgagggcggcttccagggtgaagtaggaaactgacctgaattcagcagggcagcagtcagggtggcgtgatttaagaattttcctttaagaagcttgtcgtggaggaaggagtgaggaatgatagcagatctaggactgtatgaaacaggatggagaggatgatggtttacttgtctttttccccaaggttaaaaagctggaacatttttatactaagccgataaaatatgcatattattgatactttgaaatgtatgaggccgggcgcggtggctcgcctataatcctagcatttagggaggccgaggcgggcggatcacgaggtcaggagatcagaccatcctggccaacacggtgaaacccagtctctactaaaaaaaaaatagaaaaaatagccgggcgtggtggcgggcgcctgtagtcccagctgctcgggaggctgaggcaggagatggcgtgaacccgggaggtggagcttgcagtgagccgagagcgcgccactgcactccagatgggcgacagagcgagactctgtctcaaaaaaaaaaaaaaaaaaagaaagaaatctataagttcagcacctaggaaagatgacagtcttgtagtcataccccacctgccggaattgaaaatccaaaaatttattgttttgtaattgtgacagaaaaaaaaatcatctatgatgtctatacagcattttcgcactcttgatttttccatataatcccgaaagaagacagcacggaggacaagaggtgaatgaaataggccctgagcagctgaggtggtggagcaaagttcctctaattactcaccagtgaacaattcaggcccttgcacagagcccactcagctccacacaacttcaccagtcaacttgtctgacatctacacccattacagaggaggagcaaggaggagccggtgggtgagggcaggcacactgatgcccgggagaagtggtagtcaatatgctgataacgaggagggacagacatgtcagaaaatgcctccaaaaggaataataatgccaataaaagctacaacttgtgcagggttaccagacccctctgtaatagcaactgaaggcatcactatgtttaacatagtagcaataattggtatttcaaatgaatgctccatcaagaaatgtttaaatatcggtatactatgttttaagaacgtgaacaagaaaatgccaactgcattttatagtttgcattaaaataaaattttggcaattaaagtgctagctgggacctttcctaaagggtctcatctgttactatttgtagggcatccaaggcttagtgcttcttacataaattgatgagagaagagctgtgatgtgtagaaggtacagaaaacctggttatagatgaaaagaatgcccaggagctatattagttcaagtttacatttccatagcacatttaaaaaaataataattttcaactgtattgccctgtgaaatcataaaaaggttaataaatagaatttttcaagaattaataccccattctattctgaaacctggaaaacacattaactttattagcttttaagtaacaaaattcctcttttaattctaaactatagtttgcccttttaatccatttaattgaaatagtacctatagtagaaactattaaaaatcaattatgaaaggtccattaaatttctttaaccagtacaagaaataagtattttaattgttctttgagaactgccaatgaacaaaatcagactttgtaaaatgaaagtaaaaatgctcatgattgaattgtggtagccctgttgatattcaggaggataagccttgaaacctcctgagatccaaagtttctgatgtgagaaatgtttttgtctttataatcaagagtctgaaatctagacaatggcttaaaatcaaagtagtgacctggaagtttgttgttgactctacagaaatgtgttgaggagtgataatctttgccaaaaggaggggtattttttttaattgatcaaaggcttaaatctttttttttttaaactaacatttggttagtcagtgttacctaccgtcttttatgttgaaattcagaagcaacatactttagtgattacttatctgttggtgatgacatgttatgacatgttgttaggtgtttatcaaggattggaattccaatttgccacgtaaaagaatggttactggttaaaaactacttgtattcttctgtctatgagtgaaaaatttctatagcatctatgttaaaaaatgcttgttaaagggttgaacctcatgtctgtaatcccagcactttgggaggctcaggcgggaagatcgctttagtccatagttcaagaccagcctgggcagcatagtgggacctcgtctctacagaaaataaacaaagatccaggcatggtggtggactgccaaatagtcccagctatttgggaggatggggtgggagattgcttgagcccaggaggtcaacgctgaggtaagctgagatcgtgccactatacttagcctgggtgacagagcgagaccctgtctcaaaaaatatatataaataaataaataaaaaaaagggtttaattaggggtgaaaatgaggtagaagcataaggaaaaattctaattgagaaaataagataaaagtgtcattcttaaaaaatgttgtatgtatatagtttgctgtcatagctagacagtggcaaatactgtaactttatcatagatctttcctttgtacttggataccatttgaattttatttttctgtatgtatttttttccatttaaatttatgctccaagatggagttaacagtaataccaccttactttctttttccacgttacaatttttagagacatttccaagggctatcttatttattaatatgtgattcaagtacactggggaaggtaagtatactatgttattttacaaaggaaagtacaggtaaaagagagttcagtaacttgtttaaggtccttagctagtgtcaagactaaactctttcttacttgtacttcattgtcttttaatcatagccattattaatgtggaaattgataaagacatttttgttggaagtttaattgaactttgaattgaaaatttaacttgtagacattttactcctgaaaaagggggcttaagtaacctaaacggaaagacattaagggctggaaattttacatagaccttgaacattttaaaattttgcttaaaactgcttaaaatgttctattatagccaagataatcacagagctagaattcattctcactatacatgggcactacattcattgtaaccaactagtgttcagtagaagtataattggaaagaaggaagacttaagttacttatatatgtaacaaggcagcttattaagaatttactggctgggcgcagtggctcacagctgtaatctcagcactttgggaggctgtggtgggtggtctcttgagcccaggagtttaagaccatcctgggcaacatggtgaaaccccgtctcctcaaaaatagaaaaaaaaaaaaagccagcgtggtgtcacgcacctgtagtcccagctactcggaggctgaggtggatcacctgagcccaggagatagaggttgcagtgagctgagattgtccactgcattccagcctgtgcggcagagtaagaccctgtctcaaaagaaaaaataaaaataccataacttgatgggaaaatgcaactttattgtttgttctacagcattaagagaagctacaatccatccttggggatgggagactgtccactgcattcctaaataataaatcctcctattcccaaggaaggtaaataggctcttggatggtcctagaattcatggcccaggctttaggatcatcctgcacctaaagcccttgggagaacaaccaaaccctaatgctgttgaaagtattaggaaagacatgagggttttctttagaagactggccagtttctctcaggaaagaagacatttcccagagacaggaagtcaaagatggcctgttttttttgcgggtagttgaagcggtgctttactgaagcagtgtcttggaggtccttatggtaggtatggctatgtgggtgtggggatgactgagcactgagaccatgactttgatatccatggtgaaggtccttatagatacttggtacggaggctgagggagggtggcatggagggtaagcagtgaatgctgccagtgaaagaagttaccttcaacagaaccacggggtttagacaatgaatttctccagggggattcgctggacaagtgactacaggccttgcctaattttccttcattgcatcatctttgaggtcttacaccactcaaggggtgagagaagagctcttaggcatatctgatatttagatttctactgatgtggctgactcttagctttgaagtctgaactgatttgaatttgaaaaatgaaagatgtgacattttttgtttcttgagtcttgtggagcagttcatagctttatgtgcgtacttcattcatatacacatgcatatgttactgtatactgcatacttctctttaataccccttggtctttacatatccatcctgaaatgtcgtcatcctcatctgacaacctagaaaatgcaactcatcattcaaaattcatgtcaaatatcagtcttcctttctgagtatgcagggagtaggagtctaaaaataattcttggcttcttaatttgtgatatagagatattgcctgccttcttaaatcacagctggttatgagaattgaatgaaatgacttaccttaaagagacagaaatagctaagggtgggagagtccaagtagcaaaagcatggtgtggagaaatttgatatgcaggggagagggcctgagggagacctgtctcaaggtagctgaggatttttctttttcggtaatgtggtggggaggaaaatagctaaaaaatatttacttcatgtaagactagatttagggagaatattaaaactcaggaagaggacttttaacataatgaggtggttaaaaggagacaattctcaatagacaagggaggtattttgaatagatttttggaaatggtacacaaaattagtttattgaagagtgaaagagctggacagatgggaaaatcatcatggagactagtagatttgagggtgaaaaccatgagtaggcttaaaagtattgtctcaagacaaaaaaaaaatgggtattttggaagtaaagagtttttaattccaggaggtggccctctactgatgtaagcagatgtgatttagtatgtgaaggatggatgtaccagactcatttcccagagggaagaggcagtactagattgtttagcctcttcacatgcttgtaatattgttgctttcaaaggtttgctgagaaatgaatgaaatggcttgtcaagtattagtaagatatttctagctgtagttcaattcattttttttttttttttttgagatagggtctccttctgtcacccaggctggagtgcagggtgtgaacatggctcattgcggcctcgacttcctgggctcaagcgattctcccatctcgcctcccgtatagttgggaccaaaggcacgtgccaccacacctggctaagttttaaatttttgtatagatggagtcttaccatctttcccaggctagtcttgaactcctggacccaaggatcctcctgtctcagcctctcaaactcctgagattataggtgtgagccaccacgccctccaacaaaacttttttttttttgcccgacccccagcaacaaaacttttgattccttcctataatagtttctttttaaataacttggacaagaaatgtttgcacagaatctcactgatatgtactttaacttgaagagtatgaaataatcttgagtctactatttttgttttttaatgaaatgcattaatcatttacattttttaagatacccaatttattttggaagctatatgttttttcataaaaaattcttaacttacagaatgtccactgcttaggatttcctgtttttttgtattttaaatatatctctaacaaataatcatcacgaaggaaaagaggttacatttattcagtcctgctatgtgctttatgcatgttatatagtcctttcaaaaacttttcaagtaaggatactatttttattttatagatgtggatcatgagatttagagagacgatgtaaaatatgccaagataatacagtctcagtcagaggtggagctgagatttgaacccaagtctttttgaaacaaaatttgattctcaccacatttcattccagggaaaaaataattccatcctggcttgtttttatttatagccagaaatggaccacctctaactgtctccactgctgccattctgtctaggcttccctgatgttttgcctctattactgtaacatctcctaattgttttccctgttctctctttgatccccacagttgatttttaatggctaatgcaatcctttaaaaacgtagtcaggccgggcgcagtggctcatgcttgtaatcccagcactctgggaggctgaggcggcagatcacctgaggttgggagttcaagatcagcctgaccaacatggagaaaccccgtcttactaaaaatacaaaattagccgggcaaggtggtgcatgcctgtaatcccagctactgggaggctgaggcaggagaatcacttgaacctgggaggcggaggttgcggtgagccaagatgcgccattgcaccccagcctgggcagcaagagtgagactccgtcacagaaaaaaaaaaaaagaagtaagtcaggtcatgttactcctctgctcaaaattcttccatcactccccatttacatggagaaaatacagagttcctacaatggctgaggtgatctggcgcccctttctttcctctgacctaatatctgacttcttccccttgctcattcctctctagcatgccaggcacagtctgcatggctaattcacttaccccttcaagtcgttactaaactctcactttcacaataggcttactttgatccactatttaaaactgtaactccagtgggacttaagatgcaaaaattgtgattttcaggattttgattatatgctttaaatatataaaattctctgctatgttcatgataactactttttcatgttgacatacagaattggaatatatctaaaacaccaaaaaatatacttataagtagaatagtaaagatacacataatgttttctaatcgttgactgtattcattgtaagaaatacattttattgtgacctcgtgtatctatataaaatggaaataaaattttataaaatacttagcatttctgtgtgttacactcatatagtttctgttgaattccatcctttcttttccattatgaaaatatgttggtcaagttctacaaaatttatttcacaaccatttattggttacaacctatagcttaaaaatattgggctattcttcaaatcccattaagcaggagataagatatgaattttttgcattaacttcttgaaaacatacactgcagaggggatgattgaaaagtcacttatacttttgagttattgggcatgtagctattactgcatttgcatattcatgctcagattaacaaaagtaatatagattaggttgcataaatatgtaattaataattataagtgcttatattttgtcaatattatttgctaatggtagaactcttatatagaagtggttttttccatccagtggatcaggagatttctatcttttttcccccctaattccaaatttcagtattttaatttttgatggattggtgcttattttcctatctttattgatttagatactgacagtgaagaaaaatattcaataataaaaatttgtgcttcattttaaagattttaaatgaataataataataaacatataaccctacatagcttattgtacatttgttattagtatcttaatttcttcgcactgaaaacattaacagatacctctataatattctctatatggtgtattctctaaatttgaaatttcctaatgtaatctttcttaaaagtaggagaatatattccaagcttatcttttaccattgtcctcttacatgtaatgctatagccatattaatgtggcctgtccctccctccttccctacttcccttccttccatctttccttcctcctcctttctgcctccttccttttcttcctccctcccttttttccttccttttaactaatattttgaacacctgctatgtgccatgtgtagtagtgggaagaaaataaatgacatagtcttgctgtctctgaacttaaactggatactaacagtcccagttatgaaagtgaaaacagaaactttaagattatttagaaagtcagaggtggtggctgggcattgtggctcacgcctgtaagtcagcactttgggaggccgagctgggtggatcacttgaggtcaggagttcaaggccagctggccaacatagcgtctctactaaaaatacaaaaattagccaggtgtggtgctgcatgctgtaatcccagctacttgggaggctgaggtgggagaattgcttgagtctgggaggcagggtttcagtgagccgcgccgagattgtgccactgcactccagcctgggcaacagagtgaactctgtcttaaaaaaaaaaaaaaaaaagtcagaggtggaatcagattctgtgaagaatagaagaggcatcagaagacactctttagtcttcgtattttaaagatgtagaaactgagttcttatagattaaatgatgtggtgaggttacagctgaaacccaagctggtttcttgactgtgctctttccataccacctcttctctcttgactatcacattgcctgcccagatcccatttgtcatatatttttgtatgtagtttgtgctgtcaaagacctcttttcaaaatgcacacctcaaccatagactgttaccgttattggttttgttacttgaaattataattggaacaatagagatgcgtcagtggaaaggcaatgaaagaaggccattaagtgctaataaatgcctctctcatgggaacggagatcttttcttctctatgtatttgagctcttttcactggtgctttaagtggctagaaataacacttgccacacgcttgtggaatactctggatgccagggggttattttattctgtatttgaattgagcacactgcggttggaatgtgtgttgattcttttgtgatttaagcattcattccatgttttgcattaaccttttctcatggaagacagaatagtggagctcttagagaatgaagtctttaggtagctgatgactttccaagaaacagatgaaaagttaaagttgtaagtgtttatgttgatatattttccttttcataacaccctaaaatctaatacaatagtcttcccttatctgaagttttgcactctgctgtttcagttacccatggtcattgcggtctgaaaagactcaatggaaaattccagaaatacacaatttatgttttaaatgcatgtcattctgagtagttagttaaatctcttaccattctgctttgtcccacatggaagtaaattatctctttgtctagcatatccacatggtatacactatctgcctgttagtatttagagtcaggtactatctgtggtttcaggcatccactgggggtcttgggacatatccccgcaggtaagggggagctactgaacagtgtgacaaattggatgtagccctccctaaagctcatgcttacctgtggctagcaagagataatcactacttgttgatatggtgatatattagttcagaaacgaatttaggtaaataatgaatgaattccagaataacttaccaatactaaaatgatgacaatgatagtaatgatgatgataaggataatagcagctaatatatttgactattactatgagcctgtaagtctgtgccttatagaaatgagcaaggttgtcctgtcctaaggaggctacataggagaggatttgacttgggctcctggtacttttggaaaaaacaggagggcatctaaatatgccggcatatcaggaaatgcttcccacaggaggctgcatcaacatgttttaagagtgagttcattcctcaataaagaaagaggcattagacaaaggcttctgtggtaaggagtcaacactgaagtgtgaaattagtgtagaatcccttgggagccagctgttctggaataaaaagtttgcgtgggggaatcatggatgtggcttctagagagtgagagagaagcggatccaggaatccacttaaatccttcctggttaattggaaaatcagattccattcttttaaataaacaggatgtgaccatggtagtgctccattctgttttagtggagaaagcaaccacacttttttggcttccaattaaatacctcactttaccccaacatctttttttttttttttttttttttgataaagagtttcactcttgtcacccaggctggagtgcagtggtgcaattcggctcactgcaacctccacctcccgggttcaagtgattctcctgcctcagcctcctgatagctgggatattacaagtgcgtgacaccacgcccggctaatttttgtatttttagtaagacggggtttcgccattttggccaagctggtctcgaactcccaacctcaggtgatccgccgcctcggcctcccgaagtgctgggattacaggtgtgagccactgtgcctggcctctacatcttaaaatagtgaaaacaaaagagtacactattggctggagaagctcacttctacctatccacgctcttcttttccagcctcctgccaaggagctggtaatgtatattcaggaccaggacagtaattgggccccatttcttcatctgaagccttagcaggggaggggttgacgtagctgtctagaccagaactgccctggtcagcgggtaagtgttctcttgctgttgcttctctcactggctggtttgtcttccacaggtggaagacaaacttttctagtcactgtcgtgtaaagaaaagtctgagattcatgtatgggcttcgtggagaggggcaagggaggcctttgacctctttggtaccaggccttagggctacctcttacctaggccaaatgaggatttcatgtgtccagcccatgtttccaggattggaaagggaatacattgaagtttgcagcaaaacccactcagtttgtcctttccacatgcatttcttttagaaactctgcaggaaggggtggctaaagaactgaatgtttagcatcctgagttttattttttgttgatgtataatacatattctcgttggggtgatattgcccccaacagggcaaaaactggttcttgggggacaaaaagagtctactctttttatgtttaaagcgcaggtgtatgtagagcacatatactggtatatagtattctatgatattaaacttaataggggaacatttaatggggaaaaatatcaaataagtttcttaggggaaccataatgaaaagaagggtgagaaacactggcttaaatcattgtctgtcttctgtctctctctttttctttgtctccttcctaggtagtacaaggctggttccagtgactataatgtcatcactatcctactctttgttcttttctgatcttccatctgcacaattacttgtagtattaaggtggttgttgcagctccactatcatatatagctgacagggagacaaagaagaggaagggtaaaagttacacattaacgaaatcagaaccttttaaaggaactctttgatgtcactcaaaacctctaattacatcttactgggtagaagttagtcatgtggacacccatttgcaagggaggctgggaaatgcagattgatttgtctattaaagttgggcacattccattcccagcaaaattgggattctgttaataagaaagggaaaatagatattaggtaggaaccagtgatctttttactagtgctttttgccattcgttttcctggcagccaacttgggaaaatataatctgtgatttggaaaaagtgaaagctaagtgcctttattttatgccaggatcattcatctggtgctttaaattcttgaacagactgacttagtgcataagcaaataaaaggattaaatattaaggcattaagttcttcagcatgtttcctggtggggagaacacttagatttgtaaagtgagaactgacttctttgttcagtttatagatccctgactcagaaactttgcattctaaatgtttcagtgggaaccattaattattgattatttagatttcatgaaaaatgttgtttagaaattttgaattttgtgaataaaagcaaaatattgggattcttaaagagtcaacaaaaaataagtaaaagcattgtatttcctgcaattgaatttgtagatatgttttcagataaaattatgatggtattgagtacttcatattatagagtagctgacagcatcaaatatgattctttgtaaatctgtaagtactaatattcttaatatatgccaataatttagaaaaaaaagtaaacttcagtagaaaatttccaattaaatctgtagattttggtaaaattattcctctagcgattaaaattgcattgtaatggttggcaaagttcccggatttgggcatgaagtacagagctattttaatagcaccattgtgttcagggtgtggaactggattcttgactcagtgcttcttggagcagggggtgggcagtatttgtgtgatttgtctgtctttctcttctatctcctttcttttgcctgtttccctttccttgtttctttttttgttggatcagtatttgaaatattgtgagatagtactcctataggaattattttggtgcacagatttttttttagacagagtttcactctgtcacccaggctgaagtgcagtggcatgaacatggctcactgagcctcgacctcctgggttcaagcaatcctcctgcctcaggctcccgagtagctgggacacaggctcaagccaccatgcccagctaatttttacattttttgtagagaagggagtctttcatgttgctcaggctggtctggaactcctaggctcaagtgatcctcctgccttggcctccaaagtattaaaattacagatgtaagccactgtgcatggccagaaaattgtattaaatctttgaaaattaagttttaaaagagatttctctgttttttggtttttgtttttgttttgtttttttgagatggagttttgctcttgtcgcccaggctggagtgcaatgatgcgatcgcgctcaccgcaacctccgcctcctgggttcaagggattctcctatctcagcctcccgagtgctgggattacaggcatgcaccaccacgcctggctaattttgtatttttggtagagatgggtttctccatgttgatcaggcttgtcttgaactcccaacctcaggtgatctgccggcccggcctcccaaagtgctgggattacaggcgtgagccaccgcagctggctgagatttctcgtttttaaggaaaaaaattttaaaaatatattggttctggatttttttttaaattttatttcttccaattctattccatgtcattagacagagtcaataatattggcccacctagtatccgtattttgtaatttggtgaatatatttgggtcttaaatgttcataatatcaatttaatgaccccagcaaattactggtgagttgagagtcatcttgcctattcttttggtccatatatgccttgtagctgtctgccagttgtgaattagatgtaggattgttttctctctatgtttgactatatggaacaatgacgaatcttcttgaaagggtatgtagaaagtgtaaaaaatattagtgcctaggcactgaaggaggctctgagggaacacacaagggtgagggagcagacagtgtgtgttgagagcttaggtagagacatgtgggggtggggggacctcgagaagactccagagaagatgacatgcagctgagtgttgaagatttagggggatagggatgtgcctagaccgaagtctaagagcacagatgcgcacagagacttacactagaggacaaggctttatttcgctttgtttactgttatatctccagtgtctaaggcttcatttagcttgtagtagacacaaatgcacatttgttgaattaataggttaaattaattgtaagaagttctatgcctctgattagggtttcacttggagaatgttcagaaataaaatattttgtaagtgatactaagatttgatttcatgctaaagatcctggggagtcattcagtgatttaaagtctggtaatgatgtgtagaacttacatcactgttaaagttggataggagggtgctcaaattagatgcagggaaatagttgtgagattagtgtagcagtttatatgatagttggtggaagctggagtggtgatcaaatagacaagagagggtgaatttaagagatattaagatagaatcaacaggacatggtgccaacttggagcatgaggatagaggtagaaggaggatggatgattcccaggtgctaggctggcggacatttatggatgctgatgatgtggattatgattgggaatgaaggaggagaaaatttggatagattgtaatgaactgtagagatgtttggttccagacacctagtggagatgttaagaggttaatatgattgtaatgagttgtagggatgtttaagaggttaatgtgattgaatgagttgtagagatgtttggttccagacacctagtggagatgttaagagttgtagagtgtttaagaggttaatgtgattttgagttctagtgtttggctacctctctggtagctccttctattctctcagttccacttctttcaggtacccattaaatgttggtatttctgagagccatattaatcacttgtttccactccattcctactcatctgttcctttggcttcaacttctgctctgttgctcactgtcaaattattgtctccagacaagacttttgtcctgagtgccactgttcagtctaactgcctacatgttgtttcaatcagatattccccaggcatgtaaagtaaatgtgtacaaataaggaccactcattttcttcccccatttcttttacaatgtagagaaaatggtcaagagcacagatgctagagttagactccctagatttgagtcccatatgtccttactagctttgtgaccctgtgcaaattatctgacttttttgtgcctctgttttctcactgtaaagtaagaataacaatagtaccttcctcataggatgttatgagatcaaacaagtaatgcatataaagcaatcagattggtgctggcacatggtaagcactatattaatcagatttcctttatttcctgtcctggttagtgataccattgttcaaccagctacccaaaccagaatgtgacatttatcctaactcttccatatcactacatcagaaggagattcatcagaaggggggcatcagaaggagattccacatcaaagcaatcattaaatcctgccatttgtcttcttccatctctaccattactgccttggacttgacatttattgtcttctttctgaatgacatcaccggctactgactagtgactcatcaccctgtctttgatctttctcttcttcaacgtttctatataatccccagtgattattctgaaatgcaaatctgatcacttaaaactctataggccttcctgttcccacagaaaatagacaaacacaaactaccagtaaagacctctgaggttgttctggcttccttctgtagactcttctctgtctcattctgatctctctttaatgtttcagttctgtgatgttttgtgctactctggtcttccatgtcttcgtatatctgattttcttggaatgcctcctacctcatatttcttctcagatattgtttctggcagctcctccaagcggatagatattctttgctgtatgttgatactctaccttgggtggagcttaagcatagtactgttatgcttattatagttatttatttgcatgttgtcctcctccaaggctgagcttgttatttttgaataaattggctccatgaatcaacttctaggaaactatgagttatgcctccatcttcagttaagggcagatgttaaacatttatttactgtacagattatctggttaacatcatttacatctatattgaagaaaccatctctgtagttactttatttgctgccggggggattttttttagttttcttgatacagctagtgtgttctttttcaggcttccaaagatcatcttttcctagtggagcaataactatatttcctggtaactcagttactggaagagccaatagaaatgtcatcaaggtggttcttaaactatagtgtgggaattgtactctatttttttgctaggagtcaggaagccatgaaagagcattaacttactgcctgaagaccagctgttaacctgaagattaacgctttattgagatgggttgagagagaagaaaggcatttgatttgtagtgtcatgtggcatccagagggaagcactctctctgactgaaaatctgtacagttcaacccaaataaggcatttgggcaatataacagaatcaatttaataacactgagtcttcaggttctttttgaaggtacattttgcaggaaaaatggcatacatattttctttttatatagataattagaaaataaatttaaaaatatgtagtctaaatccaaagtaatgctaaaggaatagtattatttttccagcatttatttaaaaaatgttttcccataaaacatgcttacaggttttccataaaatatgcttacgggagaaaacctattgcacagaaaatgatacaattcaattggtggtggtgctcagtggctaatgaactattcaatattgttcgtgtcagtgctttggctcctgttgctgaaggcaggcataagtgctttccaaacccttgcaggtgatcaacaccaagagatagttcaaatggggtctgtggctcctatctccaaattccattagcaaaatgttaaaatttgtatgtaggcacttagttttttaaggtaagcgaatactacaatatcagggaaaacacctgtggctgtgttatatcaaaaataatagtaacatttttccgtggtgcttgggttttaaacggttggcgtttgttgcatttcttttgatccatacaacttgggccatagttagcattactcagtttagaagtaaaagaaataggttcggagagaattttgcccattcagtggtagagtaatattcaaaggaaggttctgtgtttctcattcgaggactcatctcctgagctcacacgcaagagtgtgctgggcatatggttttcattttgctggaccatcagaaggagacatatcttaggatgttcagattaggtgctcattcttcagaagagagaaacttttctttagcacttgttgtacttcagagatgcctgtgaaacaggatagacttcgaaatagtaaaatttgattacaaaatttttggcttttggtgagaatatatctgtcagtggtaggactggtgagagccataagggaactagtaactgtgagttaataagaagggggttggatactggaatctatttattctcttaatgcaaagttctgtttgcttaataaaaaaaatgtagagaaaaatgttagatgttctgtgtatttttagtcaacacataattatttgctatttataatgtttgatacattctatttgctttaacaacattcacagggattgttactaaatctacatataaatatatggtcacagcatgaattgaaacaggtctcagcatgaagatataaagtgactaaacctttttttctttttcttctctctgtcctttcttctctgccttttttcttgaagaaaatattttattgactgttaaatggcattattcaggccattcatcatttttccttggcattttatacatcctaaatttcactcatggtcctcacggctcaaacagatgccctccagctctttttatttttatatctgacttaaattttttttattattatactttaaagttctgggatacatatgcagaacatcaggtttgttacataggtatacacatgccatggtggtttgctgcacccatcaacccgtctctacattaggtatttctcctaatgctgtccctctcctggccccccaccctctgacaggcctggtgtgtgatgttcccctccctgtgttcatgtgttctcattgttcaactcccactttgagtgagaacatgcggtgtttggttttctgttcttgtgttagtttcctgagaatgatgtttccagctttatccatgtccctgcaaaggacataaactcatccttttttatggctgaaagtattccatggtgccctccagctctttactctggagttttgcttttttccctccctgcttcattttgattctcaaattaacctgttcctttttggttaaaaataaaacaaacaaaacaagtagatgctttgtttattttgattaaattttaaatgattgttgaagccatctaaactgcagttattctaatatagcgcatgaagaatattaaaagtgtatttagttatatgtatttaatatattcaaaacatcattataaagagagtattgttctttctcttttctgaactccaagtagtttatcttcccttctttgatggttttcatgactatgttttgttcccattaggttcgaactcctggtgtctacccagcatgagtccatgcccacagcatctccctagcacttcttatttctcagtgaattttttttgatgaataaataatggtatttcagtcgcattttcaaaacacatacaaatttgtaatttcactattttctattgtagtcatatacgttgacattctaatgaactttggtccttgaagtcaatgagaaaagtcattaacttaaggttgttcagtactattcctctgtcagaacacacagtagcacttgccaaataaattagttgtagtaggagaaattggcttgattttatctttttgactctccattccaaactatcagtgcagctaaacacttggttttggagcattctcactgtcctttgcctattttataagctgctgttcattgaaatccatctgtgttgaagctctgttctgccaaatttcctacaaaactcatagcacgccacatgcattattgcccactgaattgttgagtaacatatcctgacttgaggccagtggttttcaaacttggtgagcatcagaaacatctgggagcttgttaagagtacaaatgctgcatgccttccctgaatatgatgaatctgtagcttcaggatgagtcctgggtgtctgtggttataatacttctgatgggcctggaaccacattttgagaaaaactgccactgagtgaaaagtttatttgaatggaattctgtgatgattcctctaaaagttgtgagacattctaaatgtgtttaaaactgtgctataggtatgtttttgaattcttcgacattgcagaatcagcaataatttatgtgcattgcagatgtaatattatgtagtactatctttgctgcagttttattagcttagtgttattaatatgtcatttaaaatatgatctttatcaaaacgtccatttatcaggaataagacaaatggaatgagaacaaacaaaactcaatttgcaatgtttgttttctgctgttaattttatagacaaaatacttatttctacttgatcccacattttatgtgtccttttttttagacagagtctcactctgttgcacaggctggagtgcagtggtgcgacattggctcactgcaacctgcctcccaggctcaagcgatcctcccacctcagccttctgggtagctgggactagagcccacgccaccacgtctggctggctagtttttgtagggtttttttttttcttttttttttgtagcgctgggtttttgctatgttgtccaggctggtcttgaactcctggactcaagcattcaccagcctcagcctcccatagtgctgggattacaggtgtggaacactgtgcccggcttgtttccttttattggagaaaagtgtcagtatatttagaggatacaatctaatgtgccttagtagtggtatatgatggtgctaatattgatcttgaggccaaagagcgtactgggtttttaattatcaaaaagagtttaagaattaatttcagtatcacatattttctttaatgctattctctgaaaatcaaaattcattgataatacacagaaactaagggcaaacttttatcatttcagctagatgaatgaatgacatattccagtgaagtcattatgataatgtacatggattctgtgcaatataaggccctcctcctccttttttttaaatttgaaaatgcttcttttataagatgggcctatcattgtttggataagcgatacattgaaaggttgggaattaggagattgctgtggaacttggtttatgaatgtacaggtgataagaattccttcatgccttaatcgtatttcttactttttttagggactttctccctcgagggtcgggcattgtaacaagacgcctcttgtgctgcagcttgttacttctaaagcaggtaatgaatgaagatgtttaccgcaggatgggcacatcctgtggccccttttgccttcataggtgtgggattgtacaaatagaacgtttttgtgatcgccccactgtgggcagctgcccacatttctctccagaatgctgcctcttcattgctcttttcattcctttgattacattaaaggggatattttcatagattttttaaaatacctacttaaaaaaatgttttattgctcattgtaatccatctatataattttacgtacagcacaaccactaatactcctttggtatgctttgtgtgtgtgtgtgtgtgtgtgttgtgtgtgcgtatgtgtgcatgcacatgcacttggggattaactcataaaattcaacaacatataatatctgtatggatgtgtatgtgcgtatctatatttacactgtgctatgcttcttctctctcttacatcatgataatttgataggtaaatgatgctttgtttttattttcatttatttcagcaactgatgatgttgaatttttttttcatgtttatttgccatttgtatttttctctcgtgaattggccatttttctttttccccatttctttttggggattttactagtttcctatcaatttctttgaatgcttaagactgaagcacctcataaaaatcatctatcataattgcaaatatttttaatagcttgttaaagatacagtttacataccatacaacttgacaatagaagttaacagttgaatagattttagtcttttcacagatatgtgcaaccatctcccaatcagctttagaactgtttgatcactcccaaaagaaagcctgtatgtttctgctgtccctcttttcataacacctttccccaccactccagcctaggcactactaacctatgttcttctctatggatttccctattctggacatgtcatatgaatagaatcatttaatatgtggtttttgtaataggcttttcttgcttggcataatcttttcaaggttcatccatgtcgtagctgtattagaacttcatttctttttatggcctaataatattccattgtctggatagatcaattttgtttgtccattcgttaactgaggagcatttgagttgtttccaccctttggttatatgaatgatgttgctataaacattcatgtacatgtttctgtgtggacatgtgttttcattctcttagaaatatacctgagtataattgctgggccatgtagtaactctctgtttaatttttaaggaactgacagactgttttcaaagcagctgccccattttacattcctaccggcatgtatgagggttacagtttttctatatccttgctaacccttgtgggtaagaagtgatattcactgtggttttgacttgcgttttcctaatgactaaagatactgagcatcttttcatggcttaatgatcatttgtatatattatttagataaatgtgtattcatttcctttgcctagtttaaatttggttatttgcctttgtattactgaattgtaacagatatatattaaatacagtcccatatcagatatttgatttgcattttttttttctattttataggcccttttcatttcttggcagtgtcctttgaagcacaagattttttattttggtgaagtccaatttatctattttttctttcatttctcgttatttttgtatatatctaagaatcctttgccaaaaccaagttataaaactttattctatgttttcttctaggagatttatagctttgatcttccacttggtctttgatccattttttaaaattactaatttttaaattttaaatttcattttagattggggataggtacaggtttgttatattgcataatgtgtaatgctgaggtttgggtttctatgaaactatcacccaaatagtaaacgcagtccccaataggtagaatttcaaccttcaccctcttccactcttcccccttttggagttctttgcatctgtttttcccatctttatgtcctgtttacccactgtttagttcacacttgtaagtgtgaatgtgtggtattttatttcctattctgttatttctcttagaataatggcctccagctcagtccatgttgctgtgaaggacagatttcattcttttttatggctgcatagtattctatggtgtatgtgtcccctgttttcttatccagtcaactgttggtgggcttaggttgattccatgattttgctgttgtgaatagtctgcagtaaacatacaagtataggtatctttttgaaataataatttcttttcctttgggagctacccagtagtgggattgctgggtcaaatggtagttctatttttagtcctttgagattctctatactgttttccataggggttaaactaatttacattcccaccaatagtttatagtgttcccttttctctgcagccctgccatcatgggttatttttgactttttaacaatagtgtatcagtctattttcacactgctatgaagaactgcccaagactgggtattttataaagaaagaggtttcattgactcacagttcagcatggctggggaggtctcaggaaacttacatcatggtggaaggcaaaggggaagcaaggcaccttcttcacaaggtggcaggaaggagagagccaagcaaaggggaggagccccttaaaactatcagatctcatgagaactcactatctgagaacagcatgggggaaactgccccccattaattacctccacctggtctctcccttgcatgtggggattgtgaagattatggggattacaattcaagatgagatttgggtggggaccaaagcctaaacatatcaatagccattctgactggtatgagatgatatcttattgtagtttgatccgtatttctctgatgattaatgatgttgagcattgttttcttatgtttgttggtgcttttatgtattcttttgagaattgtctgttcctgtcctttgcccacttttttttttcccctttttgagatggagtctcgctcttcttgcctaggctggagtgcagtggcgggatccggctcgctgcaacctctgcctcctgggttcaagtgattctcttgcctcagcctcctgatagctgggattacaggtgcccaccaccacgcccggctaattttttgtatttttagtagaacggggtttcaccatgttggccaggctggtcttgaactcctgacctcaggtgattcaccacctcggtctcccaaagtgttgggattacaggcatgagccaccatgcccggccctttgccactttttttaaattctttttattttatttttatttttgagacagagtcttgctctgtccccaggctggagtgcagtggtgcgatctcagctcactgcaagctccgcctcttgggttctgccattctcctgcctcagcctcccgagtagctgggattgcaggtacccaccaccacactggctaatttttttttgtatttttagtagagatggggtttcatcatgttagccaggatgtctcaatctcctgacctcgtgatctgcctgccttggcctcccaaagtgctgggattacagtgtgagccaccgtgcctggcctttgcccactttttaatggggttatttgtttttttctgttgatttgtttaaagttcttatagattctggatattagtcctttattggatgcatagttgcaaaaattttctctcatcctgtagatcgtctgtttactctgttggtagtttcttttgagtgcataatgtctttagtttagttaagtcccgtttgtctatttctgtttttgttgcatgcttttggggtcttagtgagaagtccttttcctaggctgatgtctggagaagtttttccaggttttcttctagaatttttatagtttgaggacttacatttaagtctttaatccatcagagttaatttttgtatatggtgagagataggggtccagttatattcttctgcatatggtaggcagttttcccaacaccatttattgagtaggatgttctttcctcattgtttttgttgctttgtggaagacgtgttggttgaaaatatgtggctttacttctgagttctctgttctttacattgatctatgtgtctattttcatacaagtaccatgctgttttggttactatagcctgtatagtttagtatagagtagtttgaagttgggtaatgtgatgcctctggctttgttcttttgcttaggattgctttggctatttgggctctcttctggttccctattaattttagtttgttttttctaattctgtgaaagatgatgttggtaatttgataggaattgcatagaattgtagattgctttgggcagtatagtcattttaaccatattgattcttccaatccatgagatgggatgtttttccatttgtttgtgctttgatccattttgagttaataattttatgcataagtgtcaaactttattttctgcatgtggatatccactagtcccagcacaatttgttgaaagactattctttcctcactgtaggatcttggcccctttgtcaaaaatctgttgaccaagaaatacaggtttattttgggactctcagttcttttcgactgatatttatgtctatcctgggccaatagcatactctcttaattacccttgctttgtggtaagtttcaaattgagaatgcaagtccttctactttattttttttcaggattgttttggctatcctgggtctcttgagttcaatatgaatttcagaatgagcttgttttatcccgggaatgtaagattggtttaactctgaaaatcatatcagtggaatgaaaaaaaatcacagaattacctcaatagattcagaaaagtatttgacaaaatctaacatgcattcatgataaaactcttagtaaataaaggggaggaacttcctcaacctggtaaagggcttatatgaaaaccacatagctaccatcatacttatggtgacagactggatgctttctgtctaaaatcagtaataatacaaggatgtctgctctgtcactcttattcaacattgtacggtaggttctaaccaggacagctggggaaagaaagaataaaaggcatctaccctggaaaggaagatgtaaaattatctctatttgaagatgatggatcacatgtatagaaaaacttaaagagtccactaaaaaactgttagaactactaaacttgttagcaagatttcaggatacactatcaatacacaacaatcagttgtattttttaaactttattttaggtttgggggtgcatgtgaaggtttgtcgcataaataaacccatgtcatggggtttgtggtacagattatttcatcatccaggttttaagtccagtaagcccagtgctcagttatcttttctgctcctctccctcttcccactctccaccctcaagtagaccccagtgctactttttccttctttgtgttcaaaaattatcatcatttagctcccacttataagtgaaaaatgcaatatttggttttctgttcctgcgttagtttgccaagggcaatatagcctcctaaagacacacatatgtgaatgttcattgtagcactattcacaatagcagacatgaaattacctaaatgcccacgaatgacagattagatttaaaaaaatatagtacatatacaccatgaatactatatggccttaaaaaagaacaagataatgtcttttgcaggaatatggagggactggctatattgtccgttattgtaattcttagtttccttggattgggttttgccatcctctgaatctcaatgatctttgttcgtgtccatattctgaattctatttctgtcatttcaacagcctagcctggttaagaactcatgttggagaactggtgtgattgtttagaggacataaatactctggccatttgagttactggagttcttgctttggttctttctcatctctgcattgggtgttcctttaactacagtgtagattgaatacagttgatagacttcttttctggatttttcagcaagccaaggctttgtgcagggttgttctttgaagctgacttcttatctctgcttcagggtggggtatgttagtgaggtatttttggtgttgaagctttggggtgtgatccgtaggtggcacttaggctaattaatcaattggtagacttttcctcagttatgtggctccctatttttcctcacagttgcagctctgttccctctcaacactctgaaagggtgggttctctccctcttgagtgctggctatagactgtggcttggcattcctgggcttctcactgccatctggtgtgatctcagtacttgtgttccctcctccacttggaggcagtggaggaagggacttagtagtgattgtggccaagggtcttttgcttggttcctgggggctccaccccagaggatgcaggtcagcaattgcttagtgcaatcagcccagggtggagggtctgtgctatgggccaagccaggggttccctgtctggtgatgagcactggagggtgtgtgggacccatgtgaacagtctggccttcctccttaggtcaactgcagcttgctggaggtgtgaataaggcactaggatctttgcttcttcattagtctgagggtagcaagggtagttccactgcagaggcagggcagagaggcttttagttgctcccggaggctttgtccagggaattgccaagctgctacggcttgattgctctggcgcagggtggctggaggaccttcccggtgaggagatatgggaagggcacccatctaacagtctggctgctttttcatagagctcttgtggtatgcttggtgctgctctggtccctagtcactttgaattttctagtacctggaggtatcaccagtgaaggcgcaaaacagccatgatggcggcctgcccctccctctgggagctccgtcccagggagttaagacctgttgccagcccaaacactgtaggaggtggctggagaccctggttgggacgtccttccaggaaggaagaatgggattggagacctgcttagaaaagcggtctggctatgttttatagagcagctgtgctctgttggggcatctgctttagcccctggttgcctcagacactcaaagcctgaaggctagaatggttatgttgcccaaacagcaaagatggcagcctgactttcctctgggagctctgtcccagggtggtttgaaacctgtgtcagccagagaacaccagtgggatagctagagaccctggttaggaagttgcacctggtggtgaggaacaggattgcggaacattttaaaaagcggtctggccatgtttttgtaggacagctgtgctgtgctgggggtccttcagtccctggttgtcttggactttccaaagtttgaaggctggaacagcaaagtcaccaaacagagcattggtgaggatggctggagaccctggttgggaggtcctgcccagtaagaggaaggggactggggacctgcttaaaaaagcagtctggccacatttttggagagtagcatgctgtgctgggggaccgcttccacccctagtcagcttggattctccaaagcccaaagctggatggctaagttgcccaaacagcaaagatggcagcctggccctccctctaggagctcatcccagggaagtttcaagtctctgttggccagaaaacaccagctgaggtggcagaagccccagttgggaggtcccgcctagtgaggaggagaaacagcattggggatcctcttaaagagtggtctggccacattttcgtagagcagctgtgatgtgctgaaggacggcttttcccccagttggcttggactctccaaagctgaagtctggaatggctaagtcatccaaatagcaagatggtggcccacccctccctctgggagctctgtcccagtgaggtttcaaatctctgtggctggagaatacaggtgtgggtgtctgcaggctctggttgaaaggttccacctggtaataggaacaggatcagggaccaggttgcttagaaaagcaacctggccacgtttttgtagatagccatgctgtgctgggagatcccttctgcccctggtcagtttgaactctccaaagtcgaaggctggaatggcgaagtcaccccaacagcaaagatggtggcctgcccctccccgcaagctctatccagggaggtgcaatgctgctaccagtggctggctggatttccaagccagtggtcatatcctgtgaggtgccgtggaattggggcctgcagacagtcacttctcagcccctggattcagcctctttcctagggttatgtatgggggtctatcctcctgctttgccatagtgcagctgcttttgttggaaagcctgggtatctaaggctcctggtctctgcatgtgcctagtggctgctctgctgagattccacaaagctctgtgtgtcagactgaatgccgtggtgggtgggttcatgagggaatctcctgaactgagggttgcaaagatccgtgggagaagcatgatccctggggtccctcatttactcaccgcttccctgggtgggggatgttcctctggctcgtgttgatcccaggtgggccattgtcctgtcttagttttctccgttctccacgggtcaattgtttccttgattagtcccagtgcaagtacttggatgtttcagttgagcgtgctgtattacttgccccttctgtgcctctccatgagagccacacatgctagctgattctagtcggcatcttggccacctctcatcaattgtatttctatacatttgtgatgaacaatccaaaaacaagttaagaaaataattcagtttataatagcatcaaaaagagtatatcgcttagggggagtgtggtggctcacacctgttgtcctggcgcataagaaggtaaggccaggcattagagacagcctgggcaacataggaagccctcatctgtataacaaaaagagtataccacttaggatcaatttaacaaaagaaatgaaaaacttatgctatgaaaactataaattattgttgaaaaaattagagaagatctaaatatttggaaaaatattccatgctcaatgactggaagacgtacagtgttaagatggcaatgccttaaaaactgatctacaaattcaatgcaatccctgtctaatcccagctgatatctggagaaatcatagatattttaaccatttttataatgttataaatctgtattaagtttgattcaaaggacaggctcaagtcctgtcatttgaaaaaagtaattatttgtaacactgtttgtggccctgaggatataaaagtgattaggacaaagtttctgacttctggttatttatattctggatttattattttaaatatatagaagttttactctatgttatgaaatctgtacatttagatttttaaaaagtaaatatttagcacagtgctcttcatttcataggtaaaaaattttaaacatttctttactttatctgaaatttgttttcatgtagcagaaacaattttttccccaattccctttatcttatattacagtgtggtaactactacatctatttctgaatatctttctgttttattgtaccaattccacagtgttttacttttgtggtttataatttgctttaaatatctcacctggcagggctgtagtcctctcccattacttttttaaatttaggggttctattataattgtgtggaaaagtctagaaaaattttgtaaagtgaaactattgccactagaattattttaaaccagtagatttactagggaataactgatacttaaaaatatttattatttttttaatccaaggaccataatgtatcttttccttccctcctccctcccttccttccttcctccctcccttcctccctccctccctctccctctccccacccccaccctccctccattcctccctccctccctccctcccttcctcccttcttcccttctcccttccttcctctctctttctctctttctttccttctttcctcatttttgagataggtctcactctgttacccaggctggagtgcggtggcatgatcattgctcagtgtaacctcaactcctcagctaaagtgatcctgctgcctccacctcccaaatagctaggactacgggctgcaccaccaggcaaggctaatttttaattttttttttgtagagatggggtcttgctatttgctcaggctggtcttgaactcctaggctcaagtgatcttccgaaaacaatttacctgcttggcttctcaaagtgctgggattacaggcatgagccactgcactccccacccacctctacctttttctttgtatttcttagtaaaaaaatttttcccttccctcacttcaggcatctattaaaatttttgatggttttatatagtgttcatgcttttctagatagggtattcatcttattttttattgttcttttagtttaggttattttacagttatattttcaaactccttatgctgatcttaaaagccgttgcattttaaactttttaattaaccatcttattctacattggtagattaaagcattttaaatttattctcttgggtattttagttatacagccatttcattgcacttcttaatttattcagtaaatactcatcatgcaaatactggaatggctgagaaagagacattgactagaatattaataagtttctttgcagtggggaccttttggtgagtatgacatgggaaaatattcttacatattgagctccttcaagaaggcctaacgtgcttctttccataactttttgcctcgtgtcttctaagtccttgaccattccttctttttttttcctgtaatcagtgaggatcatagcacacatagcacctcacttttcaggcaaaatagactagaattgtttcttcagggaagactttctgtctacagtctttcaggtacctcaaaatggggttttgcattacagcactccactctggctggtgtcagctgaaaactgggctaatttattttcacctaagtgaacttgttcatagagaaatctcatgtgaccgtagacttgggttgacggtggctaataaaatgggggaaagaagcgatctggggtgtgtgttcactgctcatgcagtttgctgtgccttcagatcttaattgggacataatataagtatgacttccttttgattcattcattattcaacaaatatttattgaatgattactaggtgccaggcaaatattactgtcatcaggggcttacattctaggtggagagaaaccaacaatgaacaaaacaaatacacagaatgtaggtgataaagaaagtgagtgttcaagccacgctgatatttatgtaggcagaggtaagtagaaggttgtagatgggagcggcttatgtgtttgaagtttagaaaggaggcaagtggggtggaggtggatgagtgagacggggtggtaggaaatggggtaaagagagctactgttgctcaacagcaagaaagctgattggggagggtcttgtgagccagggatgatgaaagggaacagatagaaggattagcatctgaaagtgggggccactgactgtaagtaaaataaaggataggtgattgagatattggagagtgagctagggtaattcctttacacacaaggaggatgggagacgcctcctctattgcaaccaaatggaaaaaggaaaatgtgggcagctgtggttatgttgtacttttagcggtagagagttaagggattcttcatttactgactttattctctccagaagtagaagataaagtatttgctgatagtaatcattttctcttctcatttccattagtttgtctctcattcctcttcaaagttttattactgttggctaggacttcagaacaatgccttctcctagttgtgatgaaaatgccttttgtgttatactatgcatatattacttactgttatttgtcctggtgaggaattattttattttagattttaaaaagattttaaagcataacaataggtgtgtaattttcttgagtgccattttggcatctattgagatgatcacttaaaaactcttggacatgtttacccttacatttatagatttcttatttaagcatccttgcattccaagatatacttgattatagcaattaatacttttattgtactgttgaagtaattccactatttatgttatttgcatttcattgtctctgtatacatttattattgtcaagttattgaataaagctatactagtcagcatagaataagttagtaactctccctctgcttctcttttacttcttctattagcttttgcaattcttaaaagcccagggatgcattttagtctctctttccattaaggagcgctactagccttgttttttacaaagtgtatgtctttgactcagggcttcgaactagcagctgtggtaagagcttaggcaaggttagacctggggatgtggtggcacctggtccggaggtgtgggatgtcaggacactcagggactattcaaaaccatgtggatactggtgtccaatgcagtgactttgtcataaccctagaaagtcttataaagagattggcaggccaggacagatactatgtgggaaactaaaatgatgagtagctaccattttttgagcataacagcattatcagcactgcacattttgatgctattttcatttagtccttacaaaatcttcgggatagatattatgatttccttttagaataagagacccattttagaaaaagagacttagcaatttatccaaagccgcactgttggtaggagtggggaattttactcgtatctgtatgtactgctaatattgcatttttaaaagagaaaactcctacggcttgcttttatatttgcaaatatattgtatattttatagtatatttttaatgtaaaggagaataaatatataaatataaatattatttggttaattcagaattactatctaatttccaacacaatgcctatttagtatatttaactgcttgtctccatctgctgttgtattagttgccaaaccgagccaaaaaatagaggccctaagccttattcggtgtaatttgttataggacatttagtacttagtacaggaagcattccaggaaatcacgtagtattgtgagaaaggtgaggaaaatcatggcttctttttattaataaaggtaaaaattttaagtgctaggtcaaggtaatttggtttcagagagggcatttctgaaggtgtggcttgggaggacaagagatgtacaaaacattgatgaggtcttggtgatgactgcagtgtcatgagcaagggagcaggagagggtctttgtaagacaatgggaagtttcagtgcgttgtggcttcctccagcgccatgttgaaactggcttatgccagctccaagatctgattgtgtgcctctctttccatgtccatattcagtgacatcatgatggtagcagaaattagtcatggttggagtatttacacttcagaaattggcaaatactacaaatcaaactttttttttttttttttttttttttttgcctctagggagccagttgttaagcatttacaggacaccactaattcctcctttctcaatacctgatcttactgtttactggttaagcctgtgtcaaactgagaaagcaaatgtgcctgagggtaatttgatgaactcctgagcacattaacgtattacagtgttgctaatttaagaaacaatccatttggaatttgatatgcccccgaagaaggtgttttttttttttaagacaccagaatacaagtcactctttgcattaaaagtactgtaggctgggagcgatgggtcatacctataatcccagcactttgggaggccaagggggcaaattacttgaggtcagaagtttgagaccagcctggccaacatggtgaaaccccactccactaaaaacacgaaacagccgggcatagtggcacatacagctacttgggaggctgggcaggagactcacttgaacccgggaggcagaggttgcagtgagccaagcccaagatcaaccactacactccagcctaggtgacagagtgagactctgtctcaaaaaaagaaaagaaaaaagaaagttactgttggcgggttataacagtaaagtctctgggtcaaggttaaggacaatggttttgtctcctggataatttttctgttaaaatatctctctaaatgctactatatttttactctgctttatttcaatgacattagtataagaaaggaagatactaaaataagaaacacaaagtaaataagttaagggtaactttaaattaccaaagtattctttcttttgtagaggttttcttgctatttcttcctttcatggatgttaaatgtattattcatttaatttacccctttatattgtatctattacataatgtaaagggtgtccatgttttaaaatttttacatacttggaatttattagataattatcagtattgagtatttgggatccttggctggaattgtataaataattattttaataaagaaagatacccagtaacagaaatcagaaaacttgtttgaggcaccaagtaagcaatgatgaatcatcacattctgggagaggggctccacaatggggtcatgtttagagcagccttagagcactgtgagtctaggcagactgagcaaaagggaaggatggattcctacaacaatactcaggagtcactaatatgagaacaatgtcaacttttcacgatgagatattttaaggatgtttatagattagttagactttgtcttgatttctgtacatgtcaaggacttgttctctagtttcataaattagactgatacatagcaaaaaca

SEQ ID NO: 2919 - DNA, 73072 bp, Homo sapiens
tttctatgccattatgatttttttttaaattcactgccttccttagtgctgtaggtagacccatttcttattgtcaatgtattgcagaggaggaaaccaaaagcagatggaaaagaggggttgcttaagccaataactatagaggatcatccgcttaaaggattggctaaactttaaggcttttaggtttgcatttgctattttgtttattctgatttgcctatggtcatgatatttccttgtgaagttgtgtaaccaatgaaagtaatgcatccagtactgcatggtggtattatccatacttctacactatggtagccctgccaaggttaacccagcacatcagtaggggattaatagtatttaatcaggtaggaaatacagaacatggaatgtgggatccatttcctaagaatggatcacatttttgcagcttggttatgaagtcttttctaaattgtgcagtcatgaacatggaggttgtacgtatgttcattggagctgtgctcattttgtgtcttcccagacaggaagctgcagctttatgacttggcttcagggaatctgctggagacaatagatgcacatgaggagctttgtggtccatgtccctctctccagatcaggtaactaaaccagattttaaagcctggagttcagccctgtggctaccctgatttctctcagggtttctttaaagaaagcctgggtttttttttttttttggtctaatctttagtgtttgtatatgatgccttcttataaataccacctgtcattatgaaatgaaatcttgtttggctacttttgcttatcagcagcgtgaatcaaattgcttaccatcatgatttttttgccaatgttttgtaatacttcttaagggggatattctcttgggcaacatgatgcagagaactgaatagactttgctgctccccttttttctcaaacaaacatctatgactgtataagctaagtagttttagcaagtatgtcagcccttcaagtcaataaatatgtgctcaccttcagagcagttcctggcaaaagtatgcttattctataatggtgctgttgcttagaaaatcttgagatttttttttttgacaacaccttaagaattttggcccatttatttaaatattctcaatgatagacaattttcatccgttgaaagtagacttagttttggaaaaaatcactgaagtttagagtgtttaataccacttggggtccaaagaaacagctgtgagtctaaaatagtaataaatcttgcatttgtagagtgttctatctttccataaactgtgtggtctttttttcaacaaaactagggatttacggaaaggttgtttccgtgttataaatctatgagggacagacacttgagatccagtgttctatgtactttacactacactgccatgtaatgagactaattttcttgataacggaaaacagcttcaaaactatttaagtagggacattgcaggactaaatttatatccttctgaggtgaatactttaaacaaattagattatccattctatgtatatttttcaaactggtttactgagagtttttgtttcttctgatgctagataatagtataactagaacttttcattagttattatttctgcctatgttatcgatggtaggaattttcacataaggtttgtggcagcagacccaaaagatcagtgaaagggctagggagaaccacgtttttcttaatttttatcccatgacgttaaataaaaatacttcttagacttttaaaatgtatcttcatagcaaagtttttatgctaaaatagtttttaattaaatttcatttgattttcagcgtggctttgtgacaggtggtgcagataaatctgtcaaatctgggattttgagttagtgaaagatgaaaatagtacccaaaagaggtgagtagacatttttgtgtccattttttggagtgaaaatggggagctatggaatggccttttgacgtcttaatcatttgttgtgctctaaagagttaggatttgtctgaatttgtatactcatttatttttcttgatgttttttgtggtgctagactttctgtgaagcaaacccgaactttgcaactagtgaagatgttctgtgtgtcagttactctcccaatcaaaagctattggctgtgtctttgcggactgtactgtgaaaattttctacgttgatactttaaaggtacagtggttatgcctgcgatattttccctttctgactgactgaccttaagaatttgggttgaggctataaagaagtgccttgactgtgcccagcgatagtacatttctaaaaatgtgtgtgtgaatcaaagcaattaactatgctagggaagctagcattttaaaataattctatggttcatgaattttgtttaagcaagttatatttcatatgttcaaaaaatcttgtggacagaaaattctgtcatactaatagttataagagcattgctaggtgtcctgggcagtgatttcacacttggctatatattagatcatctaggttgcttttaaaaatatagattactgagccctatacccagagagttgatggaccaggttgggcctgggaaatttttttgtgaaacaaatgccctggaatcttttcagtaggagatacagagatctgactgaggcagtaagcttctgggggcttccttgcctccactaactgcagtattcttggcaagcacatggagggtctgtgtagtggacacaggtactcctgcaagctgtcttttgtgggttgtctttgaaaatacagatataaagcaatttaaaaatgtgttaaagttatattttagacctacatgtaataaattatacccatattttatagacagacataattatgtttttttgatgtttagttttttctgtcactgtatggacacaaactgcctgtttatgcatggacatctctcatgtaagtagtttaaatagtgtctcagtaatatgttgtctttttacagcagatactttcttaattctggcttgatgtcttcatcttagattatttgttttatcatcattctgttatatatctttctccaaaaacagtctcaaattaatatatattgtatttatatatattactttaatgttttcagaataattttgcaaatatcatctcaatcaatcctataaatattatctctttccctcttgtagctctcccaaatagtactttattgtttaaaaactataattggtagagtacactaaaatatgaaagactttaaaaaggcattcctttttatctgaaggataatgctgctgaggagctcggatttatatttggatagttacggtattttacctatgtagacttttggtctcttgaccaaaatcatttatttcccaatacctagttttgataggagtggcaatgtatattaaaaacaatgtctattctgcagagtgagactccgtctcaaaaaaaaaaaaaagtctattctgtgtgaaaggagttgacctcatagctgtctgtggtcaggcactaacaaagttaagttacaatgttaaatgtatttcttttttttttttttttatgttacaaccatttggaccacgcattgaaataggagagataagagaaatactgatagggaatggggctacataaacattctagtagagtctttctcagcttctcttctgtttctttctcccatttctttccaaatcccatgccagagattagaaaatctttttcctatctaacgaagtaaaagataaccctatgtcaaggcacagcactgccctgtgacagtacgaaagtatttaagccaagagttcgtgcttttacttaacaagctttttaagttcctctgtaggtaagagcaaagaatcagtgtttttagtagagatgaaaatcagttttttggcttcattttaatgtgtttgaaaaaatgggttaaatattctggttagctttttattcatatacggaattcaaaaatcaaggtgtgttttacttttatttctcataggatggagcactcatagcaactggctccgctgatagaatgtgaaaatctggggtttggactttggggactgccacaagtctctctttgcacatgagacaggtatgtatagtcttttcaaatgtctccctttgagtcacctgtaagttatcacttccttgagcatctgtgtctatttttcagtgttctcaggcagtgatacaagttctaaaataagtcagacaccctagaactagctagtcaaaagctatttatgtgtgtaaaactctttttataacctggaatttgatgacattttaatatttctgtcacttttcagtgtgatgtacctacgtttgtacccaagtctcacctcttcttcactgccggaaaagatcataagattaaacagtggatgcagacaaatttgaacacatacagactctggaggtaaccacatgccttctgtgctgcttggtacttaagaaatacttttaagaatatttacattacccactaagtagtggtcaagaatgaggtattctttattttttttttctcctccagggtcatcaccaggaaatatggtgttggctgtaagccccagtggagactatgttgtatcatcgtcccatgacaaatctctgagctttgggagagaacaagggagcctcttattcttgaggaagaaagggagatggtaagaacttaggcttggttacaaatatgccagtaggtatctgacaggctgtcctagttgaagtttttgtctagtgcagttacacctgatgcattgccaagtccaagaaccttcaggagatcttttaagaccattgtcacccatttcagaagctaggcagagataaagatgccattagggtattagttgtcaaaggagcagcttctcgcttcctcatttctcttcatatagagaccatgttttttctctcaaattaatgtatatctatctcatggcaggaaagagaagcagaatatgaggagatgtggccaaagaagaccaaccagcagtaagtaaattttggggaccttgagattatgcccatatatagttatcttattgaaattgactataatgtccagaatttctaatagaattaaaatgaggctagaagttgcaggtatcaccagctgataaagaatctgtgtaattctttctcttaactgtatatcctaattttgtggttcaagtgattgaccaaatttgctactgaataattatctgtcaattgagactttagggaattattttattcactgtagcacaaaaataaaaattaaaaatttggatattctctttttaaacatttgcaggatgttcttacaataatacatatgcaagttctgttactggtagctgataacactgttagtattttcataaaataataatagctgtctcatatggatgtaagattaatttatcagctctttaactcaacagtcaacagtgttatcaaggatttctttgtttctggcaggttccaggagagactcaaggtgacagttactttacggaaagaaaactattgaaacagtgaaagcagtaagttgatatagaatgtggtatctcgtttttaataagatctcaactttttagtaaaagttttattctgtatcaaccagaaagccattttttggcaaaaagttgatgagatttaaagatggggattataacctgtttccttctctttaaccaaagatgggagtagtcctgaatctctttgatcaatatgtgctcctttcaggtgtcctgggacctgccctattcagagtgtctagatatcatcccacctgagtccatgacactcgtctcttccctgtacattaaaaaataagaaaaccaaaaatgtctttaaatgctttttggactctattcgcacgtctttattaaacagattgaagctatttcatttggcaaatttctggcagttcttccagtttcagtgtcctgggatgatggagtatgttgtgatgacttctttccttctcatcctctgtaggctgagaggattatggaggctattgagttgtaccgagaagaaacgcaaaaatgaaggaacacaaagccatttgtaaagctgcagggaaagaggtaataagagatacagtaagttacagtatcaataaagggaattcccaaggagaaaaaccattgttttgggtttattaactaagatcaggatatgcaataaatggaatagaatctttccaactcactatatagaagaaattgaggaagtgtgggaagaagggaacttggtcttaatgaaagcgaaggaaggaaattacagattgaggtgattattgtcttgagtagaaacccacgttctatgttggttgggaggcagggtaaccatttcagatttctagataaaatacattgtccaagctcattcatagtactatagaaactaacaggtttgataattcttttacactctgtcagttttttagggttcttttttcccttttcaaaattataaaatacagttaccactctgtctataacaagtgctcctaagtctcagtttttttaatgacttgatttaataatttcttcataggttccacttccagcaaccccatcctaatggcttatggcagtatctcagtgagtaaaatgtctaacggtttcctttgtttattaaaaggttacttacaaggacaagaaaggaagtagaggcattatgattggggatggattattgggaatactttgtcttcaaaagtctcttttgaatcttggcattcttaggatattttgtatttcaaaaggaccactttagtgtgacttcccaagccagcctttttgttggactggactggcattcttctgttttctagtgcctgtttatgttcagtgtccaaagcctctgaagattctgttaatctaaattaacttttgaatcagccttcagaaggaaagttgcagaaatcagtctgatgagataaagaagagagagaggggaagagtgatgggagaatgtagtttatctagtaatctctaattagtattttattgcatgtctcatcacagtaattttgtggtcagggtatcttcaccttatagataaggaatctggcttgacttgtagcatagttggtaggggcagagttcagttgtcaacccagatctgactgactctaaactcatgcagatcttgcattttagaatactttttctgaagtaagaaggaggggttcctgttttataggagatagaattagagaactttagtagaaaccaaccaagagtatcactaatggtattaatccttccttttagccttcagcttatgtattagagatttttaaagggatcaagtcgaggtgagtgagtcctgcgcacaatttttgtaatctgtcagcaaacatttatgaagtgcttatctgaacgggaataaatagaaattataattgatggttatcttataggtttaactatatcaaagttttgatgaaaataatttataatgttctttttgaagtgctagaactaggaagttccttctaaagtataagagagatgcttttaaggacaaataaaggggagtgatttatgttgtaggcgatgaaatatatataattcaattagaagcaccaattgttaatttgttttatattttggcttcttttcatgtacatacacaattggaatattatataaagttttatattctgttctttttcacatattcctgaacatttgtttgttgttcatattcttcaaaaaaaaaaaatcattggattcagaatattccattgtatgaataattactcgatattgcatttgtttctcctttttggctattatagtggcttcactgaatatgtttacacatatatctttgtcatcattattgattatttttctaagagtcctagcagcctaataactgaccagtaggcataagcttttaaagttttatattccaaattactttccagggtgattatactgatttttagcaggctttaaaaaatttgttgcagtgtgtgagccaaaaggtaatattttattattttcatttcttttgactattaatgaagtaacatttcagcatatttgttgaccatttgtattttgtcctgtgaatttttagttaccttttttgctcttaagtattattttactggtttttaaagaattcttgctgggcacagtggccatgtctgtaatcccaacattttgggacacttgagaccaaaagtttgagaccagcctggcaccatactttattttctttgtcatacatttttgcaataattgttatattatttgtgatttccttttgattttatttatgagtttgaactactgaaggctatcattttcataatgaacacaatatctacatatatattccttacaagaaacaacacttgtcttaggataaagatgaacttcactacaggaatgtaaaagaaaattgattaatgtggaggttacaatacatttcaagtaggaagattctgtgttttaaagatttaacttttcctaattaataggtttgtaatcccattgatatcctcttaagattttaaattggaattgatgaaataataatacttgagctagtttagagggaactattttcccagattaaaaggctacaaaattagcaaaattaaaatagtgtgcattggtgtcaggatcaatcatcatgtcaggatcagtcatcataatagactctaatggctcaatatatggtaaaagaatatcatatgaagatggaatattcaacaaaaggctttggaatattgtttatctggaaggaaaaaaagttagattttcccatcatgccattgaccaaaatcattccaaatagattaagatattaaatacaaaaaacaaagagagtcatctagcttacagtgaatatttaactctaggcaagatgtatccaagtataaaatcagtagaaaaaataataagggaaggatttaaaaattgaccatgttaacaacgttaacaaatgtggcatttttatattattttttctttttcagtgagctggaagaatctctacttgtgctgcctttctcttatgtccagacattcttaaactctttaacgaattcattcagctgggctctgatgttgaacttatagccggtgcctcttcttcctccttaggtaacatccttttccaaagaataccatgtctgttagcagaactgcttcagtagtaccttaactgaagctgtcaacactttgggattaagaaatgtatgccgaactcggtggctcacacccgtaatcccagcactttgggaggctgaggtgggggattgcttgagcccagaagtttgctaccagcccaagcaatcagtcttgcctttaaaacaggatcatgatgacccacctctttaagtaagaagtcatggtaatacattgctcaggaatcttactcagtcataggcctccatgttacaatcttaagatagctctggttctagtcagttgccaaaagccaattatgattggccagtttgcctcatttgttgtttcttttaagccaacctgtccagcctgtggcccgcaggccacatgtggcccagtatggctttgaatgtggcccaaacaaatttgtaaactttattaaaacattatgatttttttgtgatttctttgttgttgttttcatcagctatcattagtgtattttatgtgtggcccgagacggttcttccagtgtggccaggggagccaaaaggatggacattcctgttttaaagtgtttagtgtaagctaacaggtttgctttgtcctttaccaacattttaagaaagtcagtttatttctcttggtctctacagtgcaaatggaaatgtaggggcatatatagaggtaaactaaggaacataaagcaaatatgtcattaggctatattcttacttatgaagattctgttaataggtagttgagaagaatatagcacaaaggcttgatattcttctcatctctcaccctcattctcaagcggttacagcagaaacagggatggagacaaattgaacattccttcaaatactgttatgaagacaaaaactggcagccaatgccaaatagttaaacaggtatatgtagtgaactgaccaaataggtatttgggaattggcctggttttatgattcttaaccctccatttcttatactctatccaggatagtgcaagagaagaagaataatatgttctgttgccatattcataatttggggcaacttgtaagacataagttcatatttaaccatgttactaacaatttttttttactgctatggtatacggctattgaattagggttgctggttctacgagtaacactgtgaatacttatagcgtatcaaggcttatggatgggtactacctgacaggtatggtagggtcatcaaggatatcttggtatctaggtcagagtttgaatctcacgaatgtctcttttttgctgtggctttattagaagtttaatgcatctttgttaagttagcatttcttagaaggctcattctgtctttgagttttcttaaagtaccactgtcaaaatctgtagccactggcaggttgctgggctggaagaagagctttgcaaatgagttgaatgtgtcataaggtttaggacagtattttttaagttgtcatcaattgaactgaatagtagagaaagaaacttctttggcttttttttttttttttgctcgaacatttctataatgtatattttgttgttgctttgatattgtgtctgtttactgtttctagagggttaagtagggctagaacctctctgcaacatggctgtgttttgtttttctatcaggttcactttggacagatcactagcaatcaaatgcttgtgccagtgatagaaaaattaaggaaacaactatttcaaaagtcagccaagtccgggtaagtgtctttgtatagagataaaatatgaggcaaattcctagtgtgatttagaaatagtatagtatgctgtgctttgtctttagaatacccaccaccgataaatccatatttgagatagtttttgttagaattagtaggaataaaaaaacaaacaagaaaagttcttaatgagggaaagataagtaacaacacctgaagcttggttaccctaactctcatacgctgctataatgaattgaagtgggagaaaattttttaattttcttgtattgcactccaggatgttatcggcttcaatatggctggtcttgattatctcagagggaatgcgaggcaaaaagtgaagttatgttttttgctgatgctactagccacttgaagagaagaagaggaagaggaaaaagagggagaagttgattctaacgttgacttagaacgaaatgtggtatctttttttttttcaactttttcctttaaaggactcctaaactaagcaagaagagttggcgtcatcttaaaaataccaaataacagaagatcgcattgcagatgatacaggatgtggtttccagctttgcctgagggaattccaacatgagattatgggctggctcatttcttggacttaaaatgcattattagtttaaaaatctttctgtgctctcaaagcttggccttgcagctcaagcttgttgttccctttatattctagcagggaataaataattgtttaattaggtatttgtttcattggagttgaaattaacatttcaaaagtttttcgtattttttatggcagatgatttgtcatttatttatattaggttttactgcctattgagacaaccagtgcataattgattgccctttggccataaaaatgcagtgtcatggatcttagagctaaaaggactgtaaaaattacccagaacagcgtcctcagacttaaccttctgcaagttatgtcttatataagaagattctaattgctaactgtttatacttttctgaataaaatagttgtttcaattaaaaagtagccaagctaagatgcctggctgggcttctgaggaattaatacactcggtgtgtgtgtgtgtgtgtgtgtgtgtgtgtgtgtgtatgtgtatgtgtatgtacacataatatatatagttgacacttgaaaaatgcaggtggtaggggcactgacccacccctacgcccgcacagtcaaaaatctgcatataacttttgattccccaaagtcttaagtactagtagctgttattgactgggagcctgactgatgtattatatatattgtatactgtattcttaaataagctagagaaaagaaaatgttacttagaaaatcataaggaagagaaaatatatttacgtgtttatcaatactataagtgtatgtcatctgtttataaaatgaattgtctgtctggatggcaggcaaccacagccgcagacctcaatctgtggtacttatcaagcatcagctttttttgtaatgtcatgacttttctctgctttttgggagcactgtgatatgcagtttactgggcgatgagttgttcatgcacaggtgattagtgtcacagcattttaagtgcatacgcacaaacttgagctcactgcatagcaacaggaggtggctgtgaaattatttcagtaacatactggtattacagttcattttatgcagctatgatttaatactgcatctttacattattttacattctcccaaaactgtgaattgcaccatgtatgatctgtatttgtgtgtgttaatgttgaaatagatttgcgtgtattttatggcagtaaatgataaaatagtctagtatctacatatatttgtgcattcatgatataactacttttttcctaatttttttcatctgaaacttttctcttgtttcagatctccaaaaatttttccaatatatttattgaaaatatctgggctgcgtgagtggctcacgcctgtaatcccaccactgtgggaggccgaggcaggcggatcacaaggtaggagttccagaccagcctggccaacatggtgaaacctcatctctactaaaaatacaaaaactagctgggcgtggtggcaggcgcttgtaatcccagctactcaggaggctgagacagagaatcacttgaacccggcaggcggagattgcagttagccaagacagtgccaccagcatccagcctgggcaacacagtgagactccatctccaaaataataatagtaaaaaaaaatcttataacagtggagccaagtggttaaaacccatgttcaacggattgtctactgtatatctcatggtaaggatttggggaatgttctaggaaaagatattgacagatacctctgggtctggcttttcttttggggaagtttataaatgactaaatcatacttcttgttacaggcctgttagatgttctgtatcttcttgagacagttttgctttttatcttttttgttgttgttaatccaaagatttaaaactatggtttctgtctgaatttggtcattgcaaccaagttactgtgtgtggggccaccattttcttctaggctcagatatgcagtccttgtggcttgccgatttgttcccaaaccacaagtcttaatgttcttgagcataacacaatcactgaagtgagtaagggtgcagtggtgttatttgttgggcagaataaataagtgaattttggcatagagtttctgaggcataactatgaaggcaagagaataggcaggcaggataatgcattctaggtgctttccaggagtcagtgttgtttaggcagctattcctgccaccagggagaggagttaattcttgaaaaaaatttaattttttatgagaacagaagttgattcaatatccttcttagagttgctctcagaacataaatgtcactttctagtaacatttttgatggtttccaaaccaaaacaagtccaggagggcattcgagatgtatacatcatcaataattactcttatgttaaaagttgctttttcccgtagctttgccaccatttataactcaaaagcctgatagtgctagggaatgtaagatgtttctgtctgctaagtgttatactaatcgaagagaaggagaacttttatgataagtgacatgtacagaacctagccaagttacaatttttggtcaaaatacttgaaactctttactctaaaagtttaaggtcaataggtgcattataaagtaaattttaagccaggcaaattctagtcattaagtcagtattcattgccttagtcagccattggctgtatataatccttaaataaaaaccatctaatgactaatatctcttgcatattgtgaagtaagttacctatagaattctgtagtaccataaagaaaagccttttgagattgcagtgagctgagattgtgccactcactccagtctgggcaacagagccagactccattgaaaaaaaaaaaaaaggctcttgaagatgtattgggagtaaaacatttaggcttatttttaaaaatgtatatatccatccacttgagaaaatatgcttaaaaattttgaaattcactggctggaagctaggtgctttgtatattggtattaaattgtttctcaatggcaaatgtcataaattatatctcattctaaagatattagcaaatctccagcagagatctaggacagtgcccaggaaagcaatggtatctgttggtggtacaggactgtatataggactctattcacttagctgtaaatgatgagcctgctcaatcagccttttcaggccagattagtcttcagaaagagagggaggttgtgagcagaagcttatgaagaaaccacattggcttacagttactgtctgcaatccacccccattcctcacaattaagctcctaagtttgagatggggctaaggttcttaaaggtagtatcaccatatattcaatcctttctctttatttctgaggtttttgggatccaagcagccctggtatgtttttagaaacagtacacattgtgtaacagtcactgagcccaactcttacatagggcctggcagtgttcccttgtgtatcccttccccttgagtatggggtcggacctagtgactggcttctagtgacagaatacagtaaatataatgggatgtgtcttccaagattagggtataaagcactgaatctaccttgcatgagcattacattttataatatatataaagaagcaactagtatagttattaaacaaatattttctttttttttttttttgagacagagtctcgctctgtctcccaggcggagtgcagtggcacgatcttggctcactgcaagctccgcttcctgggttcacgccatttcctgcctcagcctccagagtagctgggactacaggcacccgccaccacacttggctgatttttctattgtttagtagagacggggtttcaccaagttagccaggatggtctcgatctctgaccttgtgatccacccacctcggcctcccaaagtgctgggattacaggtgtgagccccgggcccggcctaaacaaatattttcattcattcaggccaggtggcttataggtttctactataagaagaggggaagaaacctggggtctaatacctcaaatttgaatgcttgacaacaaattcccatttattacttactgtacctaatgtggagaaactttacgagacatgaagatccaagtgtggaggaataaattgtagaagttctctggaccattggattttcttttccctgggaaagtcttttggtcgtttatcataattgctgcttgttaaaacaggtaaaatacttgtaagggctgtgcttttcatgactaaattatttgcatatataaacctaaataacattttaaatcatagaatttcttctctggcaacatcagttcaattttaggtaactgtctatccaatcaaattctgcatgctcaggcttgggggttagaggatggatatgccaatgtctagaatgtttctgttctccctagtgtacatttctctcctaactgtgactggctttctataaggagcctcagtatggtcaagccccaaaccatatctacatcagatttcatgcttttttttttttttttggtggggagagggacagatcattgttgacactgtaagtaagtagataaaagatctgaaagattttttgccctttatctgtgtctgacaggttctctctaatctataagcagggaaaagaaaatttattataaatacaaatgatttcattgctatgatcagcagcagtgactcaggatttgcatctaataacctgtgtggagagggtaagggcacttgatttagttaccagaggaaaaactagttctttggctagtttccttctgtcacaatggaaaaaccctgtcattactcaaggaagagaaaaagggaggggaggaaggtgagaggaagggagagagactttcccagtgagactttcctttcctattttatattttgctccattgtacttactgccatcattgtttatgtttacttactttatgtattgtctgtcctcccactggaatgtaagctacataaaggcagggtttcggcatctttgaaagcataaatgaacaaatgaactaaacttcatttattgacatcgtgctatctgacacaagttcctttaactttctccttcacctcggaatatctgaatcatcgctatcttcagcttctcccttgccaagactaacccttcagctctgttttttattattctttgccctgttttggatattgcagtttcaatcacttctactcattcatatttttaatataatcttctgctccactctcttcagcctacaaacatgtaggtctacattaaactgaaaatcttcctatattctgttgcatccttgagtaacatattctcttgctctttcctttaataaatttcttgaaagaatatccataactaatgtttctgctttcttaatacagtcattctttacctttgcaatttagtttttatcccaaccaaatttaacactttaaatctgaattttctttgaatctcaatagcatccgtcaattgtgtccgtcttttccttgaaattcttcctaaggctttgaagtatttcaccattttctaattgctgcttttgtctccactggctcttcttcctcctgtccctaaaccgactccagatttctgttccttgcccatacattcagccatcacctctgtgaaacgatgcttaaaattattatatctccaattctgacttctcagttgagatctaatattcatatacatgattcattacctcagcccaaaactttgaagttgaactcgatgtcctctttttccatccatcaatggcttctacctcagattttgcagtttccttcccccaccatgtcttcattcatgtccctcttttatgttgactgttcccccactcccagttcttgtcctcacacaggcccattcaggtagacttctaatggtacttttacacatccagttgttcccctttgacagtcctgcacaataaccctggattcatcttaataaagatatgctgatcatgtcacccacaggtcaggaatctgcagtggttcactgctgcttaaataataaaattcaagccaaggatttagatctttcataacttgactccaacctactttcccactatattcctaatactcaagctttggcaagttgaactccctgccaatcatcccaaacacctggagctttcctgttgccatggtttgttcattatttttacttaaagttcccgtcaatcaagttttcacattctataagatcagctcaaaaatcaaataaatagagaactgtaacacaagcagcacacaattcatgccactgagaaagtacaaaatagaaataaaatgtgaagactttatttctgctacaaattatataaaccttttaagacagagtccaattatccatttttatatatgataaactattttatacagtccttggaggtaataggttcttgatatctatctaatatctgtttggctgaagacactgataggaggaatgcatgcataattcagtgaatacccaacctttataataataaggtatttccatccttccataaaattataatttttttgtgatagatacttgctgttttattattctgtcgatattccgtagatagccaataacatttacatttattcaatctgaagttactgcacataactatgtgtcaggtatttttttagatttggctaggtgctttcaaagatgaatgaagatgtctttgtcttaataaatttaactctgattttgaagatagaattaataaagtagagatgcttttgacttccatgttttcctcactcgtgtaatttctgcactatatatgattactcaagtgaactttaaaggatatttgcttccacaggtaggaacagaacctcatgctctgtcataactcgatattgtgagagatgtgtgctgatcccttggccccatcctctccaacagctgtggaaataactctatattcagttctgtctgcataccagctgccacctataagacacaaggtactttaggaccagacaactctgagttcaaaccttgcttttaataatatgaatttgagcaattacttaaactctcttacctttggtttcttcatctataaatttggcactaacaaatggtgttattataagcatttagcggaattacttcataatgaaggtagaattccattaagtaaagggagccagggtaaattgttgaaggggcaaaccaggtgctatttaggaaaaagcataagaagctaaatgccaggttattggaagtggaactgaaggcaaaattttgcaatactcctaatgtgctagtttttgaatgtcggtagtgactttcagtagtgaaatctgcaatagcggctatgcagacaaagataaatttaatctaatataaatataaatcaggaggctgaggcaggagattgcttgaacgcaggagaattgcttgaacccaggaggcagaggtttcagtgagccgagacgcgccactgcactccagtctggtgacagggcaaaactccatctcaaaaaaaaaaaaaaaaaaaaaattcatctaacagacttggtgactaccataactttcctaccctgttccttgcggggtgtccaatattttggcttccctgggccacattagaagaagaagtattgtcttgggcacacacaaaatatactaacaataacgacaggtgatgagtttaaaaaaaaatcgcaaaaaatctcatcatgttttaagaaagtttaggaatttgtgttgggctgcattcaaagccgtctgggccatgggttggacaaatgtgactttagggtattcctaatgcaggatgcataaaatatgaaaccagtagagggagataaaattagtttaaatgcccaactgcttagtttgaaaaccgtggaagaggattgcaccaacaaagaagaaacctgatacagaaggaagaaggaacacacaaggcatgggcgtcttgccttgttctttgaaaagaacactagccagcaaagagagagcatttatgtttctaagttgcctctccaggaggtgggttaaaaagcagacttgggaacagtatctagaaaaaaataaatctgaaactaccacatgaaaagcaattagatacaaatggaatttttcttcaatatagttttataaatagtagaattggaaaatgtttcacagttttttcaaaatgtacttgtgagcatatgcatactggaggatatccagcagcagacccttctcctccagtccagcagttggagcagggctgggtaatgatgaaattcagcatgaagagagctggaatctgccatcatacaggtttgcccaggctttgagcagattcatttagtgttggcaactaacaagctgaacggtggttagatttacatatggggaagtctacagattatattttttttgccgagccaaaacctactatcaaaaacttaaaaaaataaactaaaaaaaccttatggtataggtgagcttcaaagactacgtgctgggtttttagtacctataaaagttgatccaacagccttttggcttttggcataatccctactttaaattaaaatgagatttgctaacttcccagacagtggaagaagggcttgttttgatttttgtcttttgctttatgttgtgaaggttctgaatcttgacacagtacagtgatgaattacttcaggagagtactcatgaattagtggatatatcccaaaatgtttctgtttggagtttcagcctgtataatactgttttctatagagcatttacagctagaaggggctaagaaataatctggtctgaactttacagatgaggaaaacaagctcagagcattaactgaactgcttgatggcatagtcgtgacaagaagccaactgacttgtgctacaccaaaccaacccttctgtgtgagcctataactggggctgctttaagagcttagactcagggagcattgggtgcttgttaacaggactggatacttttgtgcactgttctccaggcctatgcactcttcgcatctgtgatgaatgggtcatacatctgccagactaactccttcattctgtcattcaatcacacctctcttgagtacccactatgtgcctggctctgtagctgcttacgtgtcttactcatttttaacatcctctgcgccctgaccactttaaatggctatgggaggaactcaaaatttgctgagtgaagtatgaagtaaaaggggtgttaaagcagcagatgatgcactgataaagacaaatgtgactttatttaagatgaacttacgtttacatatcctatatttctgaaattataatttaaagtgagaatatgctattaatatgcattttttttactaaacatgccattttggaggatgtatcaaataaagtcagaacaggttgacatttttattttgtattttcagagatctttggagaaatgaggcaattgatgagtttaataaatacatttcttggttgggcgcagtggctcatgcatgtaatcccagcactttgagaggccaagggggtggatagagaggccaagagttcgagaccagcctgactagcatggtgaaaccctgtcctactaaaaatacaaaaattagccggacgtggtggcatgcgcctgtaatcccagctactaggaggctgaggcaggagaagtgcttgcacccaggaggcagaggttgcagtgagctgagtcatgccattgcactctgacctgggtgacagagtgaggctctgtctcaaaataaataaaaaataaatataaataaacaaatatgatttcttagtatggcattaaataatattctctgaaaataccaagagagcaaaccagatttacgtaaaatatgaagaacggaataattatttttacttcgcataaggatttactttttgaaaaggtagtttttatacaatggtaaataactgtatattgggacaagtgaggtgagcttcagaattgtttctatagctggcagtttaactctgttatgcattggattggtctcatggttactacatggaatgaatgccatcaagccacatacgtatcactacgagaaatcttttgcttatgatattaaaaacagtagacttatacatagttaaaaggaatgggcagaatggtttcaaagcccacttcactggaaacctatacatagtcactgcatgcacgcaagcacacacaacagatgacatataggacttacaggtccaggtttgtagtcactttcagtcctgtgctgggtgggggctgctttactttaaacctacaaggcagaaaataaaaataaatttatgacataatgaaacccatgagcaatgaataagctgggatgttataaataaggaaggtgttaatatttgctacacaggagccgggggtccataccattagaaaacaactttaatattcaattgggagaagaatctggggcccatttcacaactgcctttccaaagttttcatcagcgtaaaacgggctccaacctgagtttcaaccctttgttactggttgcgacgagcagcccaggcttgggcagtgggactgtttggctggtgcgtgcatttcagcgtactgccagcatgaacgcaaatgctggcagccgggtcattaagttgaagaataaaggctctttggaaggcagtggagcatgggagccagccttgctctgtcttggtatggggtttgcatgttgaggagaggagaaacagaaaggctcagaagatgtcgaagaacttgaaaagctccgagtcacacatggtgcttattgatctctctcccttcctgtggtttgtggggtctgcttgaagttaaagacctggagtaaattaaaatgccaaggaaagcctgcctccactctgaccccaacctgcttcttcctccatcaaccttgctgtctgctctatcgtggctgaattaacaagctgagagtgaaatctccaaaactaaaattttatactggagcgacaggacccgcacgaatgagtttattagttcgaggttgactgtctatttcttcccacccactttgttggcaacaacctaaaaacaatcgtgtgatttggtggcctgagttccacatcagattgtttctcaggaagcaaagttattcctgaagctggggatttgcctcaactgaaataactgaaatgggacagggatcttcaaactggatgcttctatcgttttttttttatctgatttccaatcatcaatccagaatacaaacattcttgaaggacttaccactcaactctgaaaatggctgcaactgaaataaactatattccattttaatggaagtaatacccatgcttatgtttaattcaagatacaatagtgacattttgtaattgggaatggtttggtagaggtatatggtttaccgatccaatggaaagtttgaaatttcacacaaaacaaagcattagtaaagcaaagtatatggtgggactcagggatctgaagtctggcctctgctagctgacaagatgttacaacaagttacacagtttctcttttatagtagtctctaaggtctttccctccattatgcagaaacaatgtaattaaaagccctttcagatcataatgtgcaaacaaacatcagctagtattattatagttagtggatttagaaaaagactttcaattattgtgcattagttgctgtaacacttttgtacaacctcccctttttttccactagtagaaatcaggatgtgagttgcttttaccaaagtatgaataatgagactaggagggcaaggaagtatctaccatataattggaacccgataaacactcactgattgttgatgaatgaatgaatgagttagtgtgtaaatgactgaatgaataatgtgaagattaaggagtaattacagttcggttcaataaacatttattgatggaggtgaccaaagacaagcacagggtagggaaaggtaacctgagcagacctttggtcccttggcctcacctgcagaatccactccaacattcttgagctttacaactgtggcataggtatgtccttccttaagcacccaaacttgactgatgatgggagaagatggaacccaaaaagggatgactttgcattattatggcagcagatgcaacagaggatgtgttcacttttcctccaacagaatcttgcaccttgcattaagaaaaaattaataaaatggttctattttgagttcccaagattaaaaaaaaaaagtccctgtcaccagaggaaaataactgttgggttgctggaggaaatgaatgtttacagctcatgtcatccttacaacagtcctgtgaggacgtattttaggctttgttttaaggataggaagtcaagttcagagaactgaaagatggataattgttcaagtggtaagtggcatagcaagattcagactcaagtttgcctgattctagagtctgtgctctttcatctgtgccagtgtcatcaaacgttagcttccatcagaatctcctggaggactcataaatacacagattgctactttacccccagagtttttcattctgttggtcgggggcagggcccaagaatttgcattataacaagttcttagtgttggcaatgctgctggtcaggcaaccacactttgagaaacatggtctgtgcccttattattcctcacatcagcagtgctgacatcatctcagagtttgttaaactgcagaatctcatgccctacaccagatctagtgagtcagaatctgtattttaacaaatcccgaggtaattcatatgcacattaaaatttgagacgtactgtaatttatatattgtagttatatatatatgtatattacaataaattttgtgatgaagatgaacacagtatgccaggaagaaaaaaaaagataattatcaaaactggtggactccagaaggtttcccaacagaatggatggaatcttaatcttaggggctctgagcaagaaaggaccttggtatttttaaagatgaagagaaatctacaatggctgaattatagtgagtttgactcagggtgagggtgaagagcaaatggggccttatcctcatgctaagtcatttggattttatcctaagagtcatggcacggtggccaatgattcctttagccagtagtagtatgctggtaaactggctctctgaaaaaattctgatttctagtgtttatcaattttgtggtgctagtactcccagcatggctgattcaagctatcagtggtttgataactggctcataaaatttctcccagcagcctgtatgagcagctccaccaaagcaccatctgagtttacatgtgtgagatgtaagtttaaagagcttcaggtgagatggtagatacggtcaatagcagtacacagtggccggaaactaataacttcaagaatcagaattacataaaatctacaaaaggagcaggattgaaaaaaataaaaaataaagattccatcaaatgctgattggctgtggggaatttgttccaatgtttgttttacctttgcagaggttgagacttaggcttggaactcagcaaataatgaggcaacttcactttttctttcttgtttgtcccgcaacatcctgcagcaaggactgggttggaattttcacgggctcatagattctgcttctgttagagagaaagcttaaattatgccacatggacattttattcaaaccatttgaagtaatatcagaatgtatgacaacagaaaccaacttggaaactttttttcttgcttttcaaagagcttatttatttatttttattttaatttcaatttttcttttagatttctgcaggtttgttacaagggtataatgcatgatcatgctgcccaaatagtgaacatagttgcgataggacatttttcagcctgcctcctcccttcctccctcctttcagagtccccggatctcttgttcccctctttatgcccatgagtgtccaagatttagctcctactgaagtgaaacatgtgattttgggttttctgtcattaatcttcttagaataatggcttgcagctgcaccatgttggtgcaaagaacatgatttcattcttttttatggctacatagtatttcatgggtacacgtactacattttaaaaatccaatccatcattgatgggcacctaggttgattcctgtctttgctatcatgaacattactgcagtgaacatgtgagtgtatgtgtctttttgatgaacaatttctttttctgtgggtgtatatctagtaatggaattgctgggtcaaattgtattctatttttagtgtaaacagcttatttaaaaggagaaaagtcttctgttaattctcatttatgccttttcattttagaaagtgattttacatacatgacctaatactggtcctcacacaaccgtataaggtgggcagtacagatgctattagcatcttttttttaataaatgagaaaataagattctaagaagtcaagtggcctgtctaggatgaactgaattatacccagatctcaaggttccttctattaaatcaacattatataatacaatacaacattaactctgaaagattattaaaactaatgagtaaaaaaaaaatcccaagcatttctttgattctactactatatcatagttttaaaaagtggtttattaagtatagataaattaagccagaaaattagatctcagatcactaaatttggtgagttgttcttttcctcagttacatgagggaatgagcaagttaggaaatccatgcagcagtagctgtgtgtctttgttccacagatccaggaggtggaaaaagaatagtattttagatcatggtagttaaaaatcctttcctgcattcaaatcaggaaggaggaaaaggaaggggactaatatttgagtgtccacgatctgcaggtgagtgccacacagtttttacaccggaatgagggggctctggcagtgataatcttggactgctcagcattctcccatcctccatctctatgcaaactcctgccacacacatctggtgccaggacgtccctgtcccaaccatgaggagcaaagcccagtcaatgagggcccttccctggatatttccactgagcggacagcgataaccccatcttgcatactaggttatggatctggaagaatcagaatctaggcctttatggtcatgatctctgccacatggaaatagcctgtcctttgtaggagaggtaaaaccaaacaggaacaagtagggatgggtcatggtggaggcaggggggatgtggagaaaacaggcattcagacacaaatactctcctggaaagccagagtacctgaagccaaatgccctgggctagcaccacagtcacacagccactattctgtggtttgcttttggtcaccaataatttccttttttgttgttgttcaagtgaatttgagttttagttctcatggctgtaaacgagaagtcctaactaatatagtagtagtgtctctgttttttttgcttgtttgtttgttttaccaaaggggaaacagaggatcagaggattaaataacttgtccaacaaactataatgaggtcagggctagaatgtggacctaagtgtgttggaaccacaaggaacatgctccttttatactccgggtgtcccaagcccattcgtgaatcaccgtctgctgggctgcttttggaagatagagatttccagggcacatgccagtaaagccctattcctgaccaaaacagaatcagaaatctgggaatggaactcagtgatcagtgtttttatgtatttattccctttgatcactatctctgcagaggcaagcattccagtagtttggtatagtttttgttcatatccttgccgtagtgtactacggctttgtgtgtatgcatgtatcagtctaataagtactaatttgttgctctactattattattaatagtaaatatggtatggagtttatcatgagctggacactgtgctagcattttacatacattaactaatttaattctcacagccctgtgatgtatatagcattattcccctttacagaagagaaataggaagagataaagggtttaaataatgtgcccagtgtacatagctattacacaaggagcccggatgtgaacccaggtagagcctgtactcttagcttgctctatactagactgcctcccataaaacatgcagatgattattccactgagcctacctccagggatcaggataatgggggagggagtccttgagggtcttggagcagtggctgattccagctgacacagaggtcctttagtatttgaacaactggtacaatccaactattgcattgtctgaatattactgctggacctgagccgagtgaagaaccagtagtggttccttgttacatgctgaggaaggtggattatttcttcacaattatttatttccccattgaggatggcttcctgtaggtggaagatatttctgctccattgactctgagcttggctacggcacttgcttaaccaacaaatgtgtctgtggatggcagtgtgtgccaggctgagcagaggctgtgagggtagcatgtgcttctgctggactctcttgagctttgaccttctgctgtgaggatggcttgctgacgtggtggctccttggctcccacagtgtggcattcttggaatacacctgaacattcctgcagccggaggtgtgctggtgaatggttaacaactacctttcccagggtaaactgcctggtttgtaccagtctggggcagagctgccatggacatccacaggccctcagactggtgttttaagccactacaggatttggcagtgcttccatgcagtattatcacagtcagcactaacccatgttttattttgcaagtccacaccttctctagctgactctattgtattttccaacatcatcttgtattattaccaaataaaaactctcttatttacttacactgatttcctgtcatttctcccttcaagcttttgaacacattcattttattttaaataaaatattcaggcgggcacggtggctcacacctgtaattccagcactttgggaggccgaggtgggcagatcactgaggtcaggagttcgagaccagactggccaacatagtgaaaccccgtctctactaaaatacaaaaaaaaaaaaaaaattagctgggtgtgatggtgggtgcctgtaatcccagctatcaggaggctgaggcaggagaattgcttgaacccaggaggtggaggttgcagtgagtcagattgtgccactgcactctagcctgggcgacagagcaagactccctctcaaaaaaagaattaataaaataaatattcttttctcttccctacatcaggaatgtagtgtaacataatatgagaattaagagtcttaaaactcattccagccctagctcagtcacaaatttgctgtatgtttttagatgtcacttgacttctccaggtttcagtttccttaagtaaaatgagggttgtgtaggtgattcacctcttaaatcttaaaatctatgaaattctgtttatttttcaagaccttcctcccataaagctttctccactgctttgtgttaattccttcctactctgaatttcttaaactttttatatcaaaatttaattttccatttacagtggagtcatattattgtccctatctcaagtacctcggtatctgggggtgcagtaggtgtttcaaataatttatttttcctcttcaaagctttgtttctttgaagcttgtgccatcagactgtattagttactacttctcaagtggttgtcatttactgaccactctcgatcattccttttattcactggtgattttaaacctgagagggtctcccactttatctttcctgatgacatcacctggatgatccatccaaaccctgtcttatctgattcttgatcacaccgtttcttcatcttttccacctcacagagttcatggccacattttttaccttgccaaccccgatcattttaccattttcaaaatctgttccagtaccctttctggattaccacctcctattcttctagcttattattctgtcatatccgcaggcgattatttgacctcactgaggtctctcaccaacacttcaccttacacaagcagccctcccttcttgttttgctttcctgcttatctggaatagatctgatgctctatcattaatccactcctttgcaatcagacaggaattccctcatccatcttccccacaccaaacctacaacctgcctgcaaatgtatccctactctctctcttctctcctgtcactatggagaagggaccttattcatatctaaggttaattctgtcactcaagtttttccccagatgccatgttttccatcttctttaggaccttgtggtcttgcaccttaggtgcctctttctctggcatcacaagttctctctggcatggaattatcatcatttgcaaatcaataggctctagtatgcctatctttagaaaaatatctcttccttgactacatattcctcttttatatgcaattccattctctagtcttttaagcaaaactctagggtaaagctgtgtacatttgtgctgccactatttatctattacccacttcacttaggcttcaatcccctccatgctctgaaactgcccttgtaagttcaccagtgatcttcatcttgttcaatcccatcttcctccctcaccttgcagggggaggggcatttgaccttgcaggggcatttgatacactccaaacactcagtgatttcacatcctgtttttctgctaccttactggcttcttcctcttctttttttttttttttgagacgagtttcgctcttgttgcccaagctggagtgcaatggcgtgatctcagctcattgcaaccctacctcccgggttcaagcgattctcctgcctcagcctcctgagtagctgggattacagtgcatgccaccatgcctggctaattttttgtatttttagtagaaacggggtttcagcatttagccaggctggtctcaaactcttgacctcaggtgatccacccgcctcagccttccaagtgctgggattacaggcatgagccaccgcgcctggcctactggcgtcttcttaatggccttactagctcttcctctgcctgacttttaccttctagagttcgcctcaggacagccatttcaaggcataaacctatatcagcaacatcagcaccacttgtgaactcatcaaaactacaattctcagcctcacaatcagtttaacctaagaatcatccttgattcctctttttgtctcctcctgcatcctcttgagcagcaaattctattggctccaccctcatgatatagttcctataatttccttctcaccattccctcttcgcccaccatagcccaggtcttcagcaactctccatgtgccacttcagttgcttcttccttgcttgctctttttctcactcctccctttcctgccacgagctgttatcctcacagagtgatctttttaaaataaaaattagccatgtaactccctgctcaaaaccttccgctgacgtttgaataaaactgcgctgagaagtactacatgactaatctctgccccactctctgacctcatcttcttttactttttcctttgctcaatttgtctagctacatgcctccttaatgtttctgcccctcaggaacttcttacctgctattcttctacatgaactattgctctcctaatctttgcagggctgactccttcttatacttgtctcactcaactatttttttacaatgaggccttctaatctcctaatggaatgttgcccctctcccaagtcactgtccatacattgtactgttttattatgtcataatatttattacaacctgatttatctgacttatttatttgtttacatattgtctaggtttgcccataatatgggagggtctagctccatcagatatgggaggggtctagctccatcagactgtgccctcattactatgtatatccatgcctagaacaatgcctagcacacagtaggcattgagtaattatccactaatgaataaaacttgtaggagagaagtttaagtcagaaacacaaaagtcttgtatggggaaatcttttttttcttttttcttttcttttctttttttgggatggagtctcgctctgttcctaggctggagtgcagtggcatgatctcagcccactgcaacctctgcctcccaggttcagcgattctcctgcctcaggctcctcggtagctagcattacaggcaagcgccaccatgccagctaatttttgtatttttagtagatacagggtttcaccatattggccagtctggtctgcactcccgacctcaagtgatctgcccacctcagcctcttaaagtgctgggattacaggatgagccacagtgcctggccaggtaaatcttttaattcacacttaaatgtggcaaaatattgctctataagagataactgaaacccatcagtagattcccatctcacattcagcatggacatgcccacaggaaccaagtggtggcaaaatcatctacacaatgcaaattagtctctcatctctcttttgtgatcaactatatttagttgaattatcttagcgaaattagcataatggactccactgtaactagatattatcctgtattattttatatttcaatttctgctagtccataagattatgtgctatgtaagatagagactacatcttacatttttcttctagcacctgaggaccaagaaagtactgagataacaggtaaatctaagtaccaaatttctggttactcagaaaagctatcagtgtcatctgatcttcaataaatcatacaagttctcagagaactaaagggataaaattaggtaaaaatgaaataaaataacatcaaaaaaggatttctttgtattttttccttcagtctggaacttgcagtcattctcaaaaatgttatttgagatacttcgatggctaagaagcctttgcaaagctgcatagctccaggatccgtgaccctctcgattttttttgtaactctcaacctcgcctcctagcgccatctcccatatgccaaaaagacataatgttagtttcaagaagcaataagataaaaaagactgccataccttcaggagattttgttaaatttcagtttggttctgagcagtgaaatccttcttatctgcagaaatctctggttttggaaactaggcacacttgaggatttctgttctgaaaccttatgtggcttgaaatctagaaaaccaaaatgaaccttataaagtgatattttgtaaaatgatataatgactactaatgtttgctgaacaaacattgaagaaggtgttttacaatgaatgaggtaccttttctgccactctcttagaaagactaaatataagaaagccattaagaggcagggattcttaaaatatgatataagtttgccattaacaaacagtaaagtatttgcaaagtttgtactccctaggagctagctgttctttatgggcattatgactaaatagtagagttgtcaccttgttgtgttatgtagaagggccaagtaatttgtttctacttttacctggtaacggcaactgagatgttatcttttttagaaatttccaaacttaaattcattcattactgtgaaaacgtagctctttgttaaatgttctctttaagaaataggtacaataggaaacaaattttaaagaaatttatctaggattgagaggcaaatacatttcagtttgtgtgtgtgccaaccctggttgaatagtcctggttgcccaagtactgtgctgaaaagacttccgcagtctcactccatttcaagaggagaataagcatgtttggttagtgctgactgcccaggctgcaggaggtctgagacgcaacctaatagccacaatttctgatccctgatttctccccatcacatttataagtcattgttccagccttaattttggtttaccaactctgtcataattagatatttctattgtatgcgttcattatagacactgaacttcaagtatcgtatggtacagtagaaaattcctctatctgcttatttttttttttttttttgagacggagtcttgctctgtcgcccaggctggagtgcagtggcacgatgtcgctcactgcaagctccacctcctgggtccacgccattctcctgccttagcctccctagtgttgggactacaggcacccgccaccacgcctggctaattttttgtatttttagtagagaggggtttcaccgtgttagccaggatggtctcgatctcctgacctcgtgatccacccgcttggcctcctaaagtgctgggattacaggcgtgagccaccgtgcccggccccctatctggtattttaactactcagtttactagagagaaacactacattttatttcatccctaaattctcagcatgcagttcctgagaatgaagacattctcctacatattcacagcaccatcatcaacccaagaaattaacagtaatttaacaatgtcctctcttacatagtctcctaatcaaactgtgcagtttctccaaaatatcttttatagctgttttttcctcaatcaagcatccaatcaagcttaggtttcacattcagtttttatatcactttagtctgttttagtttagaacaatatcccatcttttttgttttaatgacattgatttttgaagaggctgggctggtcgtcttaagaatgtctgcattttggtagacatttttctctgtttcctcttgattagattctggataggatttttggcaagaattctctataggattgtattagtcggttttcacattgcttataagacatatccaagactgggcatgtctacaggaaaaaggtttaatggactcacagttccactagctggggaggcctcacaatcatggtggaaggcaaggagaagcaagtcatgtcttacaaaatggcagcaggaaaatagagagcgagcttgtgcaggggaactgccccttataaaccctcagatctcatgaaacttattcactatcacgagaacagcacgggaaagacctgcccccagattcaattacctcccaccaggtacctcccacaatacatgggaattcaagacgagatttggtggggacaaaaccaaaccatatcaaggatctatgcactttgtgttgcattacatgagactcacttactgctaggttgtctcattgttggtaggagtttgatgacttagttaaggtaaaaatgctgaatgtctccattgtaaagatacattttcctccttataatttgtaagtaattgtgggttgatattttgagaccttatgaatgtcttgttccccagtgaactttcattactccttgctttttaaattagtcaggtctcctaaatgcatttaggccaattttaagcatacagatgaaaactaaatgttatttacatatttgttttctcatataactcagccagatctgtctatgcaggtcactgtaggctatgtcatcagctatcactggttatgtcctaagaggccacgttaggtattattcagttacggacatttaataggaatatgtgctatgctaacatattactagattaagatcagatgtatcttgaacagctgtttcgtttgcatcttcatttttctttgaaaagaaggcagttttttggaaagactgtccaggtgattatactgaaaggaaaaaaaaattattttagacttatacatggctgaaattcaactgtcgcaaatatgttaaattaataagaataatgaaaacatatttttaatgccctgaaaataaagtttacaaactaaaattctacagagactgattaacccaattctagcttttgttaactagtcataatttcctgtaatttctttgaaattttcatagaaatgcagggcgttctgaacatatgaaaatattcgctttgcttcaggttttaatgaacttttggccagtgatgggaaggtcggggctgtggtcctacaggtaggtgaaatagaacaggagaagagcgttctccctccctgagcttccaagaactcacaatctctagtgctatcttagcagctgatgggtgaggaaattttaactgaataaaaacttcaaaatggttatcagaggacaatcaatgataggaaagattctgcctaaaaaggcttaacatagatggagagggtaagtaatagtgagactgaaaggcaggatggggtagtgatagttatacattcagagaacttctacttaggtgcaaggcctgaaattagtcttccttatcacatgcttgtggaatatggatttgaagggtacaggttagtcagccaggtcgatgcaggaaagaattaaacgcatcaggaaagacagattacataataacatatgcaatataccaaatttataaaaactttattagattatagttcattatattcaattacctgagactgatataactggttcaattcaatttaaaaaagggtggtattatgcggttcttaatatccattaggtaattctgtgttgtccaatttccttcctggttgatgtttccatgatgatgcaaaagaagacatagaatattttaagtgttgtttgtttgtgctttagctctaaatcccacaaaaatgaatgcaatcactaacataaaactgacaagaattaatttattagatatttttgtcaacttgttttggttaattttccttcttttagaatcactcacatttcctacttcaaaaatcagactctcatgtaagataagaataatgataccaggtgttagtttgattttgtagttgatctcaaaaggctaaaaaccactagccctgtaatggttaaactttttgaggtttttcaattctctgaggttgaaatgacagtagagtctactggttttcataatttctgtagcagtagtaacaaaaaaacccaaacaaacaaaaacaaaaacttgaggcatgatttgtgaataatgtggtcagtggttatagagttaaaaaaagcaatcaggatagtactgctttccaataccagaacccctatgttggggagacatttatagggaaagccaatgagatgtaaacttaagtcattgggtaagagtccaggagcttttaagagggctgactcaactgggaaacttttcctggtccttgcctcatgtctttccctactcctgaaatatgaatgtaatggctggggctgcagcaatcattttgcaactatgaagtaagttgagcatggaaatgatgtactaagaatgatggaacagataaaaagaaggaatctgaatcctgatgatgttgtggtgcttcctaccatcaactgcccacctctgacttttttcacgttggaaaataagcccctttttaatacaagcactgatttggaggttttctgttaaatgtagcgaactcaatcctccctgaaatacttttcatttttaagtgcttattgcactaaaaaacttagttttgcaaaatattttacatttaatcttacaataaccctgtgagttactatttttatctcactttatgagttgaaaaaccaaagcatagagaggttaagtaacctattccaaatcaattaccaataaagggtggaatctaaattaaaacccaggttgcttgcctccaaacccatgtcttgacaactgcacatgctagtcagccgtcagtcccccagtgtgagagctaaaagagacttagatatttggcagtccaattagcctcagtttattgatgagcaaactgaactcctgagtaaatgttactgaagtgaaacaaccagccagcatcatacgttctgtaagtaatcaaatgtaactgactggatctgtgaccagtgctcttatactagttgacctgtctggaaatatcaacaggcatgaccaaaatacaaacttacttaaacaactttcacttcccattaaaagtttctatctctactgcctcactggattcactcatcgatctacggcagtctggctgctgcccacactctcttaaaattattctcacaaaagaaactaatcaaccttgtaactgataaactcaattccttttttcattcccatttctgatttttctacagcatctgacatttgctgaccagctctatttccttgaaactttctctttccttgacccagttcattttccacattgccaacactgtatttctgtgacactcatctaattatatgtttcactcttcttcaaaaaactttcactgcttgccattatatacctataagttaaaacttgaaattgttaatgtttcaaaatttaaaagtttgtatagataatacaggcatatgtacacagtttaaagaacactcaagagtatgtaaaatgaagtctccatctcatcctataccccatctctcaatctccttcctctcaggcaatcctgtctcttggagaagcctttagggatattctgaaaataatgtgcttcagggaacactacttaaaatatggcaccttgacacactgaatattttcagctgaaggaatttgagaaaatgcagaaacaggaaatttactctcaccttccctctgctcttcttccctgaagcaggacataaacctagaaaggattttctgaccttcccctgaagcagctcataagactctctcatgagagtgcccttgaaatacccacaggaaaggagcatccttatctctgaagacacagatgcacaagaggaatctgagcaacagaccttgctatagccccccagcttattaccattagattgtgttttttgccctatcatatttctccatgagtgtccattcttcatcaaacctagcataaagcactcaggtttagccatttatttgggtcttcatttccttataaagactgtcatgtcacgaaaacttaagctatcctccctgcagacagtatatcccttctagtttgaccttgtatagggaggtgacccatgaggcttaaagtcttatctcagcactcccctaacacatttcacaagaaaccctgacatttttatgaagaaacatattaatcctgaagttatcctgaagagaagccagcaaatgtgtacaatagatagtttcatgagtactgctacatagtcaacaaatatatctgcttcttttctctttgacaagacagctggagttgaaatccccagctaggactaaaaggaaccaaaccatataatgcttagagcacattcctcctgtgaattataagaaccttgaaagttatgactgtgttctgcattaagttccagaatatttattagtatatcagaatcacctaaagacattgagggcctagagagctttcttgcttaggagaggaagaggatctatctaatggtcaatgggtttcctcaagagacagtgatgtcatcacacagagctgaatgaccacttggtagcatgttgcagaagagaatcaaataacatctgggtgcctggcaggacattttggcctatccattctcagtctattactctgggccctttcaggtccttatgtgcgttttggggtataatacctcgttttgtctatcttttctttccagcgttttgaggatgctgtgtgtctatgtgaaggaaaggaaagtatggtgaaaaggggcaatgatttcagcttaaaaacaaaaccaaaaacctcaccactatatgatgaattattaatagtatgggagatgaagggctgtgaattcattgtgtagtcaccaaaagttatagcacctgcatattccatttcctcaatcactgcatacctatactaattagaacacattattggattagcttacctccatgtcttttcaaagaaatctttccaaatgtgtctggtgggcattttggaggcgtagccaaagactgcttgaataaatcagtaggtgagctgcaactttaaacatagatgtatttaacttttatccccacttctttataggcaacacacaatcagtacacaattactcatttgagatgcctgttaagagcctatatagttatctatcaagtgtttactaggacttacatgaccaagctgtaatacaacagaaaactagatacttttatgaaatatcctactagaaaacacacaacttatagtcaaaatgtaaaatgcatgatatctcatttatcccatattattaggggaagtggtgttctacttaactgaatttcccatatctgaagcagcaaaccttaaaacaaattaaccataacattgaaattgtttttctgatattttcctgttcccgaatctaagaacatgattataagacaatggttgttcaacaattaggcagcgattctcagtttattcacaaaacacgctcttggtgggatgtcaatgggagataaaaagaggaaaagattttcatgtttcacggttatatgagcttgggaaacactgatttaccaaggttaaataggtttcactacttttccgcatctttaattaattaacgtcattgtgatcactaagaaaataagacaatatgaagcattatccaaacttattttaatatgaaactcattttggtggagtcttctcatagatgagtgttttaggaaatactatgggaaaatattgattaggatcattttaattaacatgtcaggtatgcaacagctgtttatttcctggaactgttgtttaaaaaaatacgttagtttgtatttcacttttggaaaacctatgtgttttcctttgtgtgcctgttccttgtcccagaggttaaaaattcaaaagctacagggtagcgttgccagtaaagtatagggcccctggttaaatttgaatttcaaataaacaaacaactttttattatagtatatcccaggcttctggggacacactgtgtctcagcctgctttgtgttgctataaataatacctgaggctgtgtaattcataaagaaaagaggtttctttggctcacaattctgcggctgtgcaagaagcatggtgcggtcatctgcttctggtgaggaccttaggctacttccctcatggaaatgggggaaggggagctggcatgtatagagatcacataacgaaaaaggaacaacagagagaggggtgatgccagactcattttaccaaccagctctcatggcaactaatgagtgggaattcactcaccaccaagaggacagaaggtaccaagccattcatgagggatcacccccatgacccaaacacctcccattaggcccctcctccctccaacattggggatcaatttcttttcttttctattttttgagacagggtcttgctctgttgcacaggctggagtacgtggcatgatctctgctcattgcaaccatcacctaccaggcgaaagctatcctcccacccagtctccagagtagttgggaccacaggcatgcaccactacacctgactaattttttttgtattttccatagagatggggtttcgccatgttgcccaggctggtctccaacacctgggtcaagagaaccacccactttggcctcccgaagtgctaggattacaggcaagagccaccagccgggcctggggatcaaatttcaacatgcgatttaaaggggtcaaacatccaaactatgtgtacttatactaaaaaaaattatttgtcattcatctaaaatttaactaggccttcttatttttattcactaaatctggccaccctactacaggagttgcccagggtaaaagggtgacacagagtatagggacacggagacatagggggttgtgatggactcctgtgatggtcatttaaagaagcagctgtcaattatcttcagccaaatttactatgtaataatgtgagatttcagaggagaaaaatctggataaacaacaacaacaataaaaacaactgtacaagcccacacgtggaggatactcagaacctatctgtgggctgaatgaagcgcatggctgccagtttatgtctttgccatatcgccaacaaaacaaaacaaaaacgcaccaaattcctactgcttgtttctgtgagctatgaaaccatctaaccacatttgttagggctgtgtatatatacctccaaagaatattctttgaatgagatctaagagtaaactacttgcactacatacagtgtaaaacatgcaaagttttggttataacagtgtagttgctcaaaaattttgtgtgtgggagggcaggtgttggttggttgactgtttccttcctatatcttcattatagttgaggctaacataaaatcaaatgtcaacatttttcacttaatggatgaaagttaaagatgaatgagagaaaatcaggttttctaggatgtcaaagctcaggcagaacaatacaggcagaatgacttacaaatataaccaccacaacacaacatggccgatacaagaatggagatatgtacatggtgtcttgtttcagataagagaatgaccgataagtgtatttaagatgattcctttgaaacttgtaaataactgcagaagaatattaaatgcaacttaccttcagtaacatgactttttgtagtttcctcattttagggaaagactgaaatgaagatagaattacttatgatgattatattacttacagacttactttgtttagaaacattctctcaagctgatcttttgtaaaaactactataaaagaattagtttaaaaatactgatataaaattaatttttctaggtcattctttctacttcataatgtctaaaaatggaaatgattttaacttgtaaaaattcctttttcttcttctttccatttcattcattagttcattcagcatttcaataaatatcaatttcttttgaagacaataaagtttcatttaagggccttgtgaattatttatgaagagcctaaaatgtatttggaaaagcaatatatagacaaatggatttccacaaaaattgaaaattatgaggagggagcaaatgttcatggaagtggcagaagcagctatttcttacgatattttgtcctgaaacatttaatatgaaacaatagtaagaacatgggtatacaaggcattttctcaccataaccagcttgagggatcagcagcattgcctctctcctcctcagttctggaatctttaaccatcatttcctgcgctcatcttctttctttagaatatagtttatgtaatcctaaatcagcagaataaaatactagacaaaaactaggaattaggaagagagagatacaaaaatggtcatcaacttgaaatatacaaaaaatgaagaatatataggtttacagtgctcaacaactgtttactagtcaaacacctgaaaagactttttcttaatatgttaataggaaaaacctgagaagtgcaaaagcaaactttaagggccacaggatagaactgcatgggggcctcagagaggccctgtttctaactggcacttaagtgtcctcatcaataaaatggacagaattgggttagatgatgtgtaggatctttcaggtatagtttttttattttacctgtaaatggaatttgcctagttcatgtctttgttcgaagagaaacgtactttatttttttcataagtatttgatcaatttctataactaatataccctgctctgtgccaggtgctaggtatataaccataaacaaaacacatataatcccgtactgagggagttaacaaacttgagatgttatagacatgatcatacaattaactatattttacaaattcttagaccgcttccaaaggcttttactctgtggacaaatatattaatattagttctgtctttttccagtggtcactatatcagttttctatacagtgacaaagatggaggcactatatagtaatcatttacaaaaaattcttactttttcaatgtctttggggcttctaataatttctacaccttatgggaaccattaaatattttctacctctcaaccctctacttgaaagactgacatccttgtgttgcactagacaaatattggtagaattacataatttcagtttcttaggaaaccaaaagcaatgattgctctgtttctgattcttttgggtcaggtcactagattccattaccttaagggaaacctgcagcctcagtttcacctcattctttatgactcatgctgaatgaattggcgcatctgtagcacactggggctcttgagtatggcacccgggcactcactagctgtttggactcaatgcaaaggcctttccaaatctgagtaccaaacggggtcctggagtttttttctgttaacaaaacaaagcaataacaccaccaaagaaatcagatgttttcacattcaaattttttttaactgttcatttattacatagatatcataataacttttagggacacagtggtgaaaaaaaatccttaacctcaaaaagttctgcaaatataaggaaatcgataacagaactgggcctgctttcctctttatttatgttactaagatactggattttaaaaatcctgttgcatggtgtcctgggtaggatgtagaagagtgctaagcaatgtatagcagcctagcttatgacaaatggatgtggctatttcttagtatccacaagtagctgagacatttggaactgagcagtctttcactttctggttctgtgttgattttgacctagaaaattctttgcaagagaaataattccatagatctgggccatctttgagcttaatctagactagcatgcctccagagtctgaggatccctggggcagaaaaatctaccttagagtaaactccattatatgttatacttgtgatcgattttcaggaatagtgtgctttgctgccctactatttctcaggtgtgctggatgtgcttcatttcaaaaggcctggcctgtgacagccacttagggctttgcaggcctgtgccactcctaccagatgtagaaggtcagagcataagggtttcaaggatgagaataaacttccttcaataatcttagatgtggcataccctttgtcatcatgtgtacttaaaatttggatatagccttagtgtgccatttggtgtgacctcctcattttcaggaaggaaatggagacccagtgtgacttgtccaagatcccactttaataaggggtagaataggaccagaattcaagtcaccttcatattaccatgttgactatagtcaccaaatttaacacagggctaggaggtcattgtaatcttaaatgttcatcatttgtgtttgctattacaagtttagtgtaggacagcaaaaatgatgacaatcaaaaacattatctcaattaacactacttcaatctctgatcataccatcaatagcttcactgatttaattatttaacacctgacaattgttggacatgtgacataaattgcttgtaaaatgaaatggtaaattatgcaagatgcagacttcattgattcttacccaagatattttatttttttaaaaaatttagctggagcttctttaactgacataattacaatgtttactttctaacactgcaattgcaaatgtgcgtaaaaccttcatattgttcttagatggtcagttcgtgcatttttaatatatgaagaaaaaaaggagagtaaaaggcacaaaattgtgtgttaaaattaacaaataagaaatgatagaaggaaaatttctgtatgatataatatcagtaattccatgacagaggtgtaacctggcttactcagaagaatgtttgcatattataggaagatgttcaagcctgcaatacaggataaaagaaataaactgaaatgagctagccaggagtattcctctgaaatgttgttgccacatctacaaatgtagaatcttcaaatataaaactccttgagcacattaaaaatttacataagaatgaaaattatgaatatatgggagaagacttaagactctggtccattgcccttggatggatgtatacctaataaaatgactttttagaagaaattatatacctcaactgagggaaatgtttcccataccttgaccggagattaggagggacaattgtatcttccttttttacttgccatggtgatcttcatggaaagggcgaaggactgtgatggttagggtgcctggttcaaagaaagttgtcgaagaccattacccattgaaagtactcagagaaaatgaaaacgcattgactaaattcaaaagctctttttgaacagacttagacatgaaagactaatgagacacaatgactatacttagaaccttacaatcaaataagaaggatgaagcttttaggcactgtgacacctagagactaatttagatcacctggaagtattcattgacacctcatcgtccctcaccaaccacatacaattctgtcagttctcccaataaacttgttgagtccatctttttccctctctgtgaaccctctttatgtgcctcaaaaagatcctgctctagactacagcaacaactggttttgccaccttatatactctgtgaatgaaccttcccttgcagtcagggtgactgattatgttagtccatatgaaaactcttttttgccttcacatcgctcatgagataaaagatggtccttaacattctttgcctctacctcaacttgtactattcttcccctctgtgcttcagctactttggccttcccccaacccgtgttttccaatgctttatgctttctcctttatgttttcttttccaaaaagctctctctcttaccttaattaaccattacctacccactagctcttggctcaggtgtctcagggaagccttcttgactatgtcagtttcttctgttagattctctcatagaactatgtctttcccctcggagaccttatcccaacttataatcatacagttgtgtgactttatagtaacatctatctctcccagtaacctaagagctccactgaaacagggtccatgcctgttttgttcaccattgtattcctaacacccagccagtgtttagtacatggtggtttgccaaataaggttagttaaatgactaacaaaccaatgtgagatgaattcttattctcccacagttcctacatgcaccacactgactgggggtcagtcagagtcccccatattccatattcacaaaggcaaggtgtattaatgtcatgcacatgtgcattgataaactaaaagttataagggcacaaaatgcaggcatatttataaatgcacacaaaatgtatcccaaaacacagaaaaaagatgaataacacacacacacacacacacacacacacacacacacacaaacctaggcacagcactaggttttgtacacagataatatgtaggctaatatctatatttaaatacacatattacaatactggatggttcttacttaatgttttatgtatctctaacctctggcaaacaccaattctttgaagttgatgaaaacaatgtaagtacccaatgaatgtagcttatataagttaccggtatttcaggttggcattataactcacctatcaatttcatcaaagcaatatcttcaaaagacaaaaaatgaatttacaagagatatctcactgttctttgttttttcttaccaagatgaatgaactcataaatcagaactttggtacatacctaaacacagatacaaatctgcgtatggagaagagggatacatactcagcgtatgcagactggtgctcagatgtatcttgatataacataaattcaagtagctatataaataagttgacatgacttattcatgtcaacttattttgctctactttccaaagtagagcagaaaagtgagcaaagcggaaaaagtaagatgacataagatagactggatagtaaggaggatgagaattggcaaagagacaccgtgcattccagaagtatgggtcctctacctggctgttcctgcactggctcttggagaacaacagtatttgatctttatatgccaaagatagatattcttctatgtcactgtctcgaagaagttccattccgatccatcagcatacataacaaaaaacctatttgaagaaataaaaatataatcacttcagtattccgttaaaattctccttgaactcagaattaaaagtaaaattatagtattattctttacctggggacatgttcaccatagatttgctgatgattcttttcaaggtgcatagaggcagactatcatagccctcagttttctcatttaaatcatcttccaattttttttcaggtatatagttgatatgctaccatcagccatgacctaagggataaagtatgtaagcaactaaagaaaagaaagtcataatgcttaaacttctgctgattcaatttgagaaaacagatgatttgtgggtttactcacaaaattggagatgtttatttgcaaggtattgtttactaagtagagctgcattaataaaagtaaaaacctagcagcataactctacttataaatgacacctagaaaggaacacagactgaaacatattcagaatgaagtgaataggatggggaggatactccaacctcatactgtgaagataggttcaagaaattgggaatttaaacatggaggaatgggtaccatgcaatagttgtcttgaattatttgcaaggacctttgaatggaaggggcttataatcgggatgtcaaacacacaattgtggctcatgggtagaatacattgggaaatagatttagttgaatatgagaaaaaatgttctagtcctttattactgtctaaatatggcccgggtctctcaggaaggggtgtgattcatgctgcaagaccactgaaggggatgcccaagaggagtatcatgcccagaaaaatgcttggcttagagggttttgagctttaagtttctacttcaatttgtgtaaattgaaatttgtcagtttgaactcatgctgtgaagagtttcagttacttagcaagaaaaaataagctggatcagggcttatctacatatcaaaacaaagttaggaattctgtttataactccaaatctaaaaaataacttcatacctactagctgatagacaaaatttcactttgaatgagaagtaaaaaaaaaaaaaaaaagaaaagaaaaaagataaatgcctagagcatggttggcaaatcttttttgtcacaggcacgatagtaaatattttagagtttgagtttgaggccatacattctctgttgcagctactcaactctgccattattgtgcaaagcagccacgacagtatgtaaacaaatgagcatgactgtgttccaataaaactttataaaacgacattaaatttgtatttcctataattttattgtgtcttcttcttttgctttttcaaaaaccattacgcatatatgaaaccatttttagttcatgggctatagataaacaagtggccatagtttccaattcctgacctagaggtgaggggatagtcgtggtgttgaaagacaaagaagcaaatttttctcccattctgtaggttgtctgtttagtcagttgatagtctgttgatagtttctttgctgtacagaagctttttagtttaattaggtcccatttgtcagtttttgcttttgttgaattgcttttggtgtctttgccatgaaatctttgccagagtctgtgaccagaatggtatttctgggttttcttcaagggtttttgtagtttaggttttacatttaagtctttaatacacttgagacaattgttgtatatggtgtaaggaaggggtctagtttcaatcttctgcatatgctagccatttatcccagtaccatttattgactagggagtcctttcctcattgcttgttttgttggttttgttgaagatcagatgattgcaggtgtgcaactttatatctgggctctcatttggtttcattggtctatgcatctgttttagtactggtatcatgctattttggttatgcagccctgtagtacagctgaagttgggtaatgtgatgcctcaacctttgttctttttgttaggattgctttggctatttgggctctttttttggttccatgtgaattttagaatagcttttctgattctgtgaagaatgtcattggtactgtgataggaatagtcttgaatctgtaattgctttgggcagtatggccattttaacaatattgattgttcctatccatgatcatggatgttttcccatttggttgtgtcatctctgatttctcttatcaatgttttgtaattctcgtgtagagaactttcacctccctggttagctgtattcttaggtattttattttttggtgctattgtgaataggattgtgttcttttattattattattatactttaaattctagggcaatgtgcgtgcaggcttgatacataggtatacatgtgccatattggtttgctgcacccataacctgtcatttacattaggtatttctcctaatgctatccatcccccagcctcctaccccgacagtcccccatgtgtgatgttccccgccctgtgtccaagtgttctcattgttcaatcccacctataagtgagaacatgtggtgttttgttttctgtccttgtgacagttttctgaaatgatgtttccagtttcatccatgtccctccaaaggacattaactaatccttttttattctgcatagtattccatggtgtatatgtgccacatttttttaatccagtctatcattgaggatatttgggttggttccaagtctttgctattgttaatagtgcggcagtaaacatacggtgcatgtatctttatagtagcatgatttataatcctttgggtgcatacccagtaatggattgctgggtcaaatgttatttctggttctagggccttgaggaatcaccataccatcttcacaatggttgaactagtttacactcccaccaactgtaaaagtgttcctatttctccactcctctccagcatctgttgtttcctgactttttaacgattgccattctaactggcatgtatggtatctcattgtggttttgatttgcatttctctgatgaccatgatgatgagcatttttcatgtgtctgttggctgcataaatgtcttcttttgagaagtgtctgttcatatcctggcccactttttgatggggttgtttttttcttgtaaatttgtttaagttctttgtagatttggatattagccctttgtcagatgagtagattgcaaaaattttctcccattctgtaggtgcctgttcactctgatggtagtttcttttgccgtacagcagctctttagtttaattatactcatttgtctattttggcttttgttgccattgtttttggtgttttagtcatgaagtactgcccatgcctatgtcctgaatggtattgcctaggttttcttctagggtttttatggtttaggtctaacatgtaagtctttaatccatcttgaattaatttttgtctaaggtgtaaggagggatccagtttcagctttctacatatggctagccagttttcccagcatcattattaacagggaatcctttccccatttcttatttttgtcaggtttgtcaaagatcagatgtttgtgatgtgtggtgttatttctgaggcctctgtcctgttccattggtctatatctctgttttataccagtaccatgctgttttggtaactgtagccttgtagtatagtttgaagtcaggtacatgatgcctccagctttgttctttttgcttaggattgtcttggcaatgtgggctctttttggttccatataaactttaaagtagttttttccaattctgtgaagaaagtcattggtacttgatggggatggcattgaatctataaattaccttgggcagtatggccattttcacaaattgattcttcctatccatgagcatggaatgttcttccatttgtttatgtccttttctattagttgagcagtggtttgtagttctccttgaagaggtccttcacatcccttgtaagttgattcctaggtattttattctctttgtagcaattgtgaatggtggttcactcacgtttgctctccgcttgtctgttattgatgtataggaatgcttgtgatttttgcacattgatttttatcttgagatttgctgaagttgcttatcagcttaaggagattttgggctgagatgatgggttttctaaatatacaatcatgtcatctgcaaacagggacaatttgacttcctcttttctaattgaataccctttatttctttctcttgcctgattgccctggccagaacttctgacctatgttgaataggagtggtgagagagggcatccttgtcttgtgccggttttcaaagggatgcttccagtttttgcccattcagtatgatattggctgtgggtttgtcataaatagctttattattttgagatacgttccattgatacctagtttattgagagtttttagcatgaaggctgttgaattttgttgaaggccttttccgcatctattgagataatcatgtggtttttgtgttggttctgtttatgtgatggattatgcttaatggtttgcgtatgttgaaccagcctgcatcctgtgaatgaagccgacctgaacatggcggataaggttttgatgtgcggttggatcagtttgccagtattttattgaagatttcacatcgatgttcatcagggacattggtctaaattctccttttttgttgtgtctctgccaggctttgatgtcaggatgatgttggcctctaaaacaagttagggaggattccctctttttctattgattggaatagtttcagaaggaaggtaccaggtcctttttgtgcctgtggtagaattcagctgtgaatctgtctggtcctggctttttttggctggtaggctattaattattgcctcaatttcagagcctgttattggtctttcagagattcaacttcttcctggtttaggcttgggagggtgtatgtgtccaggaattttccatttcttctagattttctagtttatttgcatagaggtgtttatagtattctctgatgtagtttgtatttctgtggtatccgtggtcatatctcttttatcattttttattgtgtcatttgattcttctctcttttctgctttattagtcttcctaatggtctatcaattttgttgtcttttcaaaaaaccagctcctggcaattcattgattttttgaagggttttttgtgtcctatctctttcagttctgctctgatcttagttatttcttgccttctgctagcttttgaattgttttctcttgtttttctagttcttttaattgtgatgttagggtgctgattttagattttcctgctttctctcatgggcatttagtgctacaaatttccctctacacactgctttaatgtgtcccagagattctggtatgttgtgtctttgttctcattggtttcaaagaacatcttattgctgcctttattttgttatttactcagtagtcattcaggaacaagttgttaagttccatatatttgtgtggttttgagtgagtttcttaatcctgagttctaatttgattgcatgtggtctgagagacagtttgttgtgatttctgttctttaacatttgctgaggagtgcttacttccaattacgtggtcaattgtaaaataagtgtgatgtggtgctgagaagaatgtaattctgttgatttggggcggagagttctgtagatgtctattagttctgcttggtgcagactgagttcaagtcctggatatccctgttaaccttctgtctcattgatctgtctaatattacagtggggtgttaaaatctcccattactattgtgtgggagtctaagtctctttgtaggctctaaggacttgctttatgaatctgggtgctcctgtattgggtgcatatatatttagatagttagttcttcttgttgaattgatccctttacaaatatgtaatggccttctttgtctttttgatctttgttggtttaaagtctgttttatcagagactaggattgcaacccctgcttttttttgtctttccatttgcttggtagatcttcctctatccctttattttgagcctattgtgtctttgcacatgagatgggtctcctgaatgcagcacactgatgggtcgtgactcttatccaatttgccagtctatgtcttttaattggggcatttagcccatttacatttaaggtaatattgttatgtgtgaatttgatcctgtcattatgatgttagctggttattttgcccttaattgatgcagtttcttcatagcatagatggtctttacaatttggcatgtttttgtatggctggtactggttgtttctttccatgtttagtgcttccttcgggtgctcttgtaaggaggcctagtggtaacaaaatctctcagcatttgcttgtctgtaaaggattttatttctcttcacttatgaagcttagtttggctggatatgaaatttggggttgaaaactcttttcttcagaatgttgaatattggcccccactctcttctggcttgcagggtttctgccaagagatcactgtcagtctgatgggcttccctttgtggtaactcgacctttctctctggctgccataacattttttccttcatttcaaccctggtgaatttgacacttgtgtcttggggttgctctctcgaggagtatctttgtgatgttctctgtatttcctgaatttgaatgttggcctgcctgctaggttgaggagttctcctggataatatcctgaagagtgtttcccaacttggttccttctccccatcactttcaggtccatcagtcaaacatagatttcatcttttcacatagtctgtatttcttggaggctttgtttgtttctttttactctaaatttcttttctcactttattcattaatttgatcttcagtcacttataccctttcttccacttgatcaaatcagctattaagcttgtgcatgtgtcatgaagttctcatgtcatggttttcagctccatgaggtcattaatgtcttctctacatggtttattctacttagccattcgtctaagcttttttcaaggttttagcttccttgcgatgggtttgaacatgttcctttagctcagagaagtttgttataacgaccttctgaagcctacttctgtcaactcatcaaagtcagtctccatccagctttgttcgttgctggtaaggagctgtgatcctttggaggagaagcactctgatttttagaattttcgcttttctgctctggtttctccccacctttgtcgttgtatctacctttggtctttgatgtggtgacctacagatggagttttggtgtagatgtcctttttgttgatgctgacactattctttctgtttgttacttttccttctaatagtcaggtccttcagctgcaggtctgttggatttgctggatgcctgggtatcactagtggaggctgcagaacaacaaatattgcagaactcaaatattgctgcctgatccttcctctggaagcttcgtcccagaggggcacctgcctattgaggtgtctgttggcccctactgggaggtgtctcccagttaggctacacgggggtcatgacccacttgtggaggcagtgtgtcccttctcggagttcaaacgccatgttgggagaacactgctctcttcagagctgttggacaaggatgtttaagtctgcagaagttgtctgctgctttcgttcagctaagccctgcccacagaggtggagactagaggcagtaggccttgctgactgcggtgggctttgcccatttcgagcttcctggctgctttgtttacctactcaagcctagcaatggcggaccccctcccccagccaggctgctgcctcacagtttgatctcaggctgtgtttagcagtcagcaaggctccttgggcgtgagatccaccaagccaggcatgggagagatctccttatctgttggttgctaagaccattggaaaagcacagtatttgggcaggaatgcctgtttttccaggtacagtttgtcatggtttcccttggctaggaaagggaaatcccctacaccttgcacttcccaggtgaggcggatgccctgccctgcttcatcttgccctccgtggctgcacccactgtccaactggtcccagtgagatgaaccaggtacttcagttggaaatgagaaatcacccatcttctgtgtcgatcacactgggagctgcagattggagctgttcctatcagccatcttcaggattgtgttcttgatttggcactcagcttggatgttggtccacttcccactttcaaccctactgtatccttcttaccatcttactctgtgactactcaaagaaattgcctcctgtcttgtgtttgctctgacttcaacttggataaggaccattgccacatcatctttatgttggcattattttcagatgtctgctactgtttcttcctttctgttctaatttttatttagccctaacatttctatcccaccaattattcggcttgccattctccatgaaatacacttaagaatcaaaggaaatgtattgacattcattactgcttgcccaaagtattggagtaagtggataattaatcccaaggcaactaaggtaaaaatctacatggaagctttgtatgtgaaatatctcaaaagcaaagccacaggctctctctccataccaaaggtgcactttactgaaaagtgtttccctcaggatccagaacctcacagataacctctgaagtatgcctcagatgtacctgccagctcgcagctgctcacgcttttgaaaaggatagtatatattactgctgactcatggcagtacacagctgaacaatccttgtcaatataaagagagcctgtgtttgaggtaacacctgaaagagtaacagaaagacagaaattattaaaattttcttgttaaatagtgggacttggaaaaccattttaggagaaagaatacccatagatcctagtcacaaactggtttgcaggaggaaaacattaatcaagggaggacttaaggtttggaaagggctactcgaaaagaggcaaactgaatagttaggatatcatttctcctgtatcctcatatcttatctgccgctttaatatctcttctaactaattgtcttatgcccccttatttctaatatttaacatttttagctgaggttacatacatgtttggccctattcatcctattctaaatgtttggggtgctcatgatcttggataagaagcatctctgaaagggtataaaactgtgcgataagtgctttagaaactcatctctcctctctctggtggctgacacggtccttaagtaatagacttcagtaatgaattctggttcaaacagatctttttccgaaatataatttacatatcatagattaccctttaaaagtgtataattccgtgggttttagtatattcaaaaatgtgtgaagccatatcactaattccgtaacacttttatcatcgcccaaagaaacgctgatcctgttagaaattttctggatcactaggccttaggccctggcagccactaatctactgtctatggatatactattctagatacttcatttaaatggaagcatgtactctgtggccttttgtgtctggctttttcagttagcataatgttttcaaggttcactcatgttgtagcacacagtactttattcattttatggataagtaatattccattgtatggctatatcagattttctttattcacttagagttgccatcatttgcattgttttcagttttgctattattaaagatgttgctgtaaatttgtgtacaagtttttgtgcagatgtatgttttctcttggatatatacctaggagtggattgctgggtcatatgacaactaagtttaccttttgaggaagtgccaagttgttttccaagtgactataccattttccaagtgactaaccactttccaaagtgacttataccatcagcatttctgagggttccaatttctccatacctttgctaacacttgtgattatctgtctttttattacagttttctagtgggtgtgaagtgatatctcattgcagtttgcgctgcagctccccacaactaatgatgttgagcatcttttcttggcttatttgctatttgcatatctttggaaaattcaaatcctttgctcattttaaagtgggttattagtctttttattgttgagttatagagttctaagttgtagggtactctgtacatgagaccattatcagttatatgattttcaataacatcttctattctgtagtttatcttttcacgttcttggtggtgtcctttgaatcaaaacttttttttgattttggtaaagcttgtatgtttggcatcatatctaagaaactattcctaatcaaaaacatgaaaatttatatctatgttttctttcatctctcacttccagcacttccttgccccataataatctacactggatgaagaggtggaaggataacattatcagaaagatgagagggataaactgacttcagcaactttcacagtaacaaatgtttgccagtgagtctttgtctatcatcttctagcttttagctctcagtatctagtgacattgtttgcaatattttgctctagtgtcctttctccagcaagtgaaaagctgaaagcaagtccttttaaggcaaaggaactgcatgctgacactggatggttgtgtttaaaggggaaatgcagaaaggtaggaaggtgctaactgctcctccttggccttccaaggacagagctttgcttcagctaggagactgccctccagggaccacacacaccatgtgctctgtcttgtgctgctaggactttgagagagtagtgaggactgactggaggtgggaaggatggataatgagaatgagggtcgaggcgcaggaggtgaagctggtctgttaggcacaagccaaaccatctaagtgtttctaacaccacagtgcctagcacataagaaatcctcaactaacacattttggtttataaccttggtccaaactaccgaagttttgcaaaacaagcaggacaatgtttttctggcatgggatgtaaaagggatgaataaataagagtttgagaagtatattctaagatgttagtattataagagaataaagcaacagcagtgtacattgcaggcatttttactgccccagagaagtgggttttctcgctgaatagacactcatctttggcgcttctcattttcctcgtagacctacctggtatgtccctgtggctttgcaataatagttgttccatctccaaaggtggcacagcagctactgtctcacagttggcgataacagtggcatagcgtgagctttctacccgcatacacttcacctgctggtgacagtccgaggaccctcggctacaagcaaatgcaaggtaagcagatctgatagatgtagacattgcaaaacagacctcagcctattgattttgctgctgtttcctggctgtcggattccccatggaaaaaacacaattgtaaagtctagagcaagtactgagaactccacaggttggagtgtggcctgctgttcttgtcaattcataataattcttccagaaaaaatcttttaatttagtatgctgtcttattctcactatttatttgcaggagttgagaacatctgattttcaacttgaaaaattgaaaagcataaaatataatttaagcactcagatattcatcaataaaatttatactttttaatacatatgtaaaataaaaattacagataatattgaagttttccttatatctgggcttatttctatcttgaaattcatttttacacttttatgtacatattatcatgaacaatataaatgtgtgtgctttaaatgtatgtaagctatatgttactctattatttatgtaattactgtactgtcattctacacctgcttttttcatttaatacagtttcagacctcgaaccatcttgatctatatgtatccatccatctatctatacatatatgtgtgatagatatatttatttgtgtgtgtatgactccccttaacaaccttatagtattattttgaggaatttaccacattttgtttttctattctgccactgatggacatttatattttcccatatttcaatattatactcaatgctgcaagtcactcctctgtatttgtttccttgtgcaatgtgtatgagtgtccctctctctataagcagaaataaagttagtgcatcataatatgattgcatgattttgtgggtggggtggggagatgtaggtcaaagcatataaagttacaattaacaattatgtaagatgaataagtataagaatgtaatgtatagcataaaaactatagtcataacttgtattgtataatgacgattttccaagagtgtagactttaggtgctcataacaccacacacacacacacacacacacacacacacacacaaactatatgaggtaagagatatataatttgcttcacttagtccactatgtatatggatatcaaaatatcattttgtacatctaaatatatccaataaaaacattgacattaaggaaagggaactcacggaataacttctcataaaaatatttcttaaattaaggttcagaagagtggaaggcttttagagtctttgagcagttccagttaattagcagctaccgtttccttttttctgatgccacctttctgacgaaagcatgctgagactgaagacctatctgaggtcacctatttatgcaaattagatgccttgagatcaaaggaaacatctgaaagctagtatctaggacagatgaatatggttattaggttttgttgccaccaatcaaagactattactaaccatcagctaactagagctgttatcactccctctctgttgagataatgatcataataaaaggtcctaatgcatcctcatattcattgcagattattcacaaaaaccaagatttggaatcagtctacatgttcatcaatggatgaataaaaaggaaaataaagaaaataaagaaaataaagtaaatataggcaatagaatactattcaggttaaaaaaaaagaaatctgtcatttgcaacaatatggataaacctggaggacattatttaagtaaaataatccaggtacagaaagacaaatagcacacttatatgcagattctacagagttgaactcatgcaagtagagagtagaatggtagttaccagccattggggtgaggaatggggagatgttggtcaaaggatataaaatttcagttatataagaggaataaattaaagaatatactgtataacatggtgactatagtaaataacatattgtattttgaaaatttctaaagagtagattttaagtattctcacaattaaaaatgataagtacaaagaacaaagctggagcaaccgtaaccgtgctactcaactataagctatactacaggactacagtaaccaaaatgcatggtacttgtaccaaaacagcaaaacagacacatagaccaatggaacagaatagaggcccagaaataaagccacacacctacagtcatctgatcttaaacaaatcaacaaaaacagcaatgatgaaaggactccctattcaataaatggtactgagataaatggctggccatatcagaagattgaaactgcaccccttccttacaccatatagaataattatctaaagatgaataaagaataaaatgtaaaacccaaaattataaaaaccctgaaagacaacctaggcaatacattctagacgtagcaacaggcaaagatttcatgacaaagataccaaaagcaattgcaaaaaagcaaaaattgacaagtgagatctaattaaaacaaagaaattctgcacagcaaaagaactatcaacagactaaactgacaacctacagaatgggagaaaatatatacaaactatgatctgacaaaggttcatacatgctaacatccagcatccgtaaggaatttaaacaaattacaagcaaaaaaccaaacaaccccattaaaaagtgggcaaaaaacatgaacagttttcaaagaagacataaacgtggccaaaaaacacatgaagaaaagctcaacatcactgaacattaagaaatgcaaatcaaaaccacaatgagatacactctcacatcagtcagaatggcaattataaaaggccaaaaagtaacagatgctggccaggttgcagcaaaaaatgaatgcttatacctgctggtgggaatttaaattagttcagccactgtggaagacagtgtggtgattcttcacgacctgaatacagaagtactattcgacccagcaatcccattactgggtatatacctaaggaatataaatcattttactgtagagacacatacacacatatgttcactgtagcactgtcacaatagtaaagatatggaatcaacctaaatgcccatcagtggtagactggagtaagcaatggcatacatatacaccacggaatactatgcagccataaaaacaaacacgatcacatctttgctggaaaacgcatggagctggaggccattacccttagcaaactaacacaggaaggaaaaccaaataccgcttcatctcacttataagtgggagccaaatgatgaaaacacatgacctatagaggggaacaacagatactggggcctactggaaggtaggaagaaggagaggacagaaaaaataacttatgggtactaggtttaatacctgggtgacaaaataatctgtacgcaaaccctgttacatgaatttggctatattacaaacctgtacatgtaccccttaacttaaagttttaaataaatgaatacataaataaaacacacacacacacagacacacacacacaacagtgaggagtgtgttggagaaacttttggctgctgggtgctgctggtcaaaaaaaattctaagaaagtagacagattttaagttttctcacaactaaaaataagtatctgagggtatgcatacgttaattcacttgattgagtcattttgcaatgtatacttatttcatcacatctattatttattatatatatatatacacaatatctgtcaattaaaagaataaattaaatttataaagcaaatatcaaaataagtaatgatgataataataatactactaaatccttataaccctgctttggatggcatgggttttctttagttggctaactttaccaaaaaattattttcttatgtgtatgttcagcagtcagtgaggattctatctaacttacgctaaagagttataaatattgtcatgtactcagaaaataaaacatacttgtttcttgatcatctggcagaatatttgatcttcataaacttgataaaaggttgtgattctggtaccatcagcatgatccacatccgagtaccatctttcctttcaactatgacaactttgtcttctcgagttgtcataactgaacatgaagaggcaggacataatcatttggccacatggttcatcccaagtgtacttattttatccattgaatacgaagatggcaccatcaaagtcctagttatttatttataggcaagttttatctcatctacctgatctaaccttcataacaatcttggcaggtaccctcatttatagatgaggaaatgtaggcttagagaagttgagaagcttgctgaaagtcatgcagcaataagtatcagggcatatttgaggaaacacttaacatctggactgggttaacccaggtcttctggaaaaatgaccacaggccctgtttccttggaaactacggagtaatgataaatgcgcatattgtggctgccttgtgtgctgtgaaacctctgctctgcagaacttccccagatgggtgaactgcaagatggcctgcaagtgtcgggctaatgtcatcagagcagtacttgaagatggtaggggacagaggctgtagcctctctatgtcaagttgacctgtgcatgtatctgctctcagtgccgctgcatgcctgtgagcttgaggggtatgagaagcggtgtgcgtgggttgtgctcctgagctctgcactgggttaaccatggctctgttgtgtttgcctcatagttcagttttacctctgcccattactgctttctccctcctcctttcacatatatgtctctattaaatcttgcacttgggacttcacctcagtgtttgcttctggaaagctcaacctgcaactgcgtactgtaaattgcataatgcatatttcaatcattgggcattttctaaacttacactatctaactctaaggaacataatgtttcactgaaggtctggatggacgtgagagtgagtttgtagctgttttctgactccaaagttcatggctattgggagcaggtgattttcacctgtttgctctttatggtaggtggcagtcactacttaagagagaaatgaatgccgatcattatttaggttcttatcattggtgctttcagccaggaatgtatactaagaaatactgctgtgtaagtggtggttgagagcatgagctctggggttaagctgagtttgaatcccgactccgcaaaggctgggtagacttagggatgttgcttaacctgtttgttgtctggtttactcatccacaaatggagccaacactagtatcttcttggaaatgttatgtgggttaaacgagatgatgctgtaaagtgcgtcacacttggccatcatgttagtaattattgatagcggttttttatctatagagatatttacatattatgatttagaattattgaaacatttcgtaacgccacataaaagtgacattttctggtcaccatagaataggataatcattcttagtggtggcaataacacgtaacaaggatatttctgaatgcctgttagtgccaggtctggtactaatcttctcaacagtaatgactattatctccagtttatgaataagaaaccagatgagaaacttgccaaaagtatacatctggtaaggactatggctagggcttgaaacacaggtctgcctcaccccaagggagtgctcattcctttagaatgtaatatttcatgtcattttcaattttgtttcatatgccgtttcttgagatctgggacacagtgttgaggtctacattctggctctaccatttgctgttgaccttgggcaaattacttaacctctctgtagcttagttgcctcatctataaaatggaacaatagtagtttgttgtgagaattgagtgagttagtatatggaaaatgcagagaacaggcctagtacacagtgagtgctcagtaaatatcactattattgctcttattctgttgggctttggtgtttttaattcatgcttgaatccaggttcttggatgctggttcatgcttccaaatggtgatagagatgaatgagggaaattaaaagttaacaaagaaatgttaatcaaacttcatattaagccaaataatctacctcaggggccgaattaaagtgagttacttgaaggaacaaaacaaacattaaaaaacctcgggaaacaaatgaacaaaaaacctttctgagatcatagtactttgagtcttacaaaaaaaggcaactagcaaacaaagtaagagattataaaattattcagaagtaggctgaagaggaaaaaatatttggttagatcatgtaatccatcttaatacaagctggcattttgctttttacagcagcacatggttttaaacaagggtaggaagttcaacacaagagttaaggcacttaggaacgtcttcattttgtttagattcagagggtgctgcaatctccatataagatgttaaaggaatagctaaggaatggaaagagctcagtttttggtacaaacaactggctctaatcctggcttcagcactttctgaacatgtactcttgatcacatacttaacttcctaaggctcaatttctcatctgtgtaatacacatttggtgtgagggctaatgagataatgtgtataaaagtccccaaagaaatcctggtagatagagggccgggcgtgtggttcatgtttgtaattccagcactttaggaggctgaggcgggccgatcacctgaagcaggagttggaggctagcttggccaacatggcaaaaccctgtctctactaaaaatacaaaattagccgggcgtggtggcaggtgcctgttatcccagctacatgggaggctgaggcagagaattgcttgaactaggaggtggaggttgcagtgagcttgcactccagcctgggcgacacagcaaacctctgtgtcaaaaaaaaaaaaaaaaaaaatcctggcacacagaaagtgctttgttcattccaggagttttgctttcatataataaacagaaccattatgttctgtaccataatttgtcatgtattcttatgctacaaataaagtttttgtaaagtttctctagagtttggattcttgagttatttaatgtgtgtcttatctctttcaatataccataagtttttccaatcaaaggatcatgaacaaactcctttcaccaactgcaagtgggcacaaataagtagtatgagacactcacttccagaagcctctcacttccagaagataagacattttacacacataattcagcataaggaagcacacgacgacatcattaatcacatatatcttaaaaatggcatgagaactcatgaactgccgctcacctcaaaaattagcattttgttctgacgtggttgtgccacaacacacaaaaatagtccctaatgatactctccatttggcaaatacaccacaagagtttttagattttggaaaatgaatccaatcatccatccatccacccatccatccatccatacttaacagacatttattgaaaaaatattatcagctaggcactcttttgggtgttgttcagaatactaatgacttagaaaattttgcaataaacaatagtttgtcataccgttccatgacaggatctgtggcctgaaaggataacaatggggtcaagtctgctattctttctaatctttggtgccgatccgatttccttcaggtgtggttgtaaaccaggtgcctatgtgaacctcacaggagttacagtttgaactgcctctggaggagggtcatggatttcacccttatgggcattgatgactgacttttgtgactttttcctgtgaagttcaagtaaaatcaaacaacaaaatataactatagtatcaattatatacatcattcactatgttttgacacagtacaaactcctcagatactgtggcatagacaattctaagtggtattcatcaattatattatttctcatagggaaaagtatcaggttatgaatagcgtaattttagcacttaaaccatggctaaattccaccactttcccccagacatacacatgcttacacagctcactgtctagggcacaaaaatattctggtcaacttctgtactcttttgggtcttgcatacttctctctgggtcccagatttgggttttgtattctggtttttaaagcctacctttgctctcacttatctgtcaaacttcagcctccttttgacatattggactataacagttactaaatttttaactcttgattccctgattttgcccttttgtcagtaataacaggaaacatctttcttcaaccctggatctgggaacctcaccagccacgcatatccctggggagaggagtttgtgcagtttaattagtacataacaattgtctgatacattttcctctccatcctttacctcccactcatttggaacaggagagagaactgaagacaccctcatggaaatccttgaccaatatttcagttgctctatcaggtagacatactccatttccatgaataataatgagtaatctgtagatgagacttgacagtttatcacatctcaatgatgaggtaaactcagaccctgaaacaaattgcaagtaatgatataaaggaatgttaactcttggaagattctccagattcagaccatgaaatgtgcagcaggcatgcatctcggcctaactgatagggactcaactaatgggaagaaccaaaggcagataatcaggttgagccttttcattgccctaaaatttgatttggacatatttatacttctagaaattagtagagagtgaaaatggtatcgctttcagaataattcctctagaaatagtaggaatactttaggaattatctttttttctatattctccctttttctcctatttccctcccctcccttctgttcttgttactttttctaatcaaaaaaggtgagctatggaaagggcattccacataaggaacataagaaatacaatggggtaaagaatagcatggtatacacagacaactatagcagaccagtgtgaccagatgatacatttcaagcagattttggttgagtgaagggacggagaggcaggcactgattcaattgaggggactttagcagtacgttagagaccttggaattttcctacaggtgatatttaataactaaagtgttataagagagaaagtgaggtatttgaagattagttacatgcttttggcaggaagatgcaaaatcaatactaataaaagcaggaaaacagttagaaggttttaaagtattagaaattcaagttggcagaagagataaacaggtaaattttgatacaaatgtatattggggaacaaatttggatatgaaaggatgaggatggcatgaaaggataagagaaagaatcacatgcagatcctgaaatcttaatcatctattttcttcattaagtatatgggtcaacaaagcaaactggccaaggatcagctcaaaggtaagaggaggaaacaagcagggttggagttccattttcagcaacatcacagactagataccaataatccactgaaaagaaccataactgctagaaaacatctttaaatcagtcttcttgaaagtgttctgagctggcaactataagtaagatcagcacaagccatggactaagtaaatgtaggaaccaaagaggtaaaatagctctgaagttggattttgtccagtgggtttttgtcaaactgttgattctgagtatttgttttcttagcattgtgggacttaggcagaaatgaatgccagaactgcacaatctggatggaaggtttgatatgaggccctcaaatgactacactctcagactagtgtggattattaacagaaatcattcgtgtcctttcccaccccactctagaactgtcaaaagcttgcctgtgttcaaacttggtgctgagcagagaaaacaagaaagtacttaagagttgtataaccacaagtagatccttatataggtttgaagtgaaaattcataccacttgagggcacccccagaaattccttaaattaataatttaaagtgatccaagactgttggttccctatcaactgctaaagtcctttctgaagccaaagtcctttataaagaaatgcactattggcaggcacagtggctcacacctataatcttagcattttgggaggccaaggtaggaggattcttaagcccaagagtttgagactagcctggccaacatagtgacacttcactgctacaaaaaaaaaaaaaaattgctgagcatggtggtgcatgcctgttgcatggtgatgcaagccaattttcaacagcaacactggaagcaaaagaatataaaggatattgtcaatgtactgagagaaatatctgtaagctagaattctatacctagtgaaattatctttcaagaatgaagacaaataaagacattttaagaaaatatttggtatataataaacggactaaaacatctaaagacagtcccagctactctagtggctgagatgggaggatttcttgggcccaggaggttaggctcagtgagctgtgatcatgccaccacactccagcctgggtgacagagtgagaccatgtctaaaaaaaaaaaaaaaaaatgcacttttataccagctcaagaatttagaattaaagcaatagaaaaaattatcatctcatagtcaaaaagtaccgagacacaatgaaacaaggcaattcagtgagagccagaagaagcaacagaaaatggaattagatctataatactttagatattgaatgatcagacacagaatctaaaatgcatactttatgtgattccagaaataaaaaggggcaaaaatatgactaaaaagaagacagattataaaacaaaacaaagaagtgttagatattaaaaatgtaataactgaaatttaaaaaattaacatgcagatttagcaggagacaaaacaagcttaaaagagaactgaaagacctaaagtaattgtttagaatgaagctcagagaaccaagcatagaagtaaaaaaaaaataaataaaagttcaaggcctcttaaatatgtttaactgaattccagaagcagagaagaaaaaagaaatggatcagaaacaatatttgaagagataatattgagaaatctctagaatcaatgaaaaacacaaatttacagattcaggaagctcaatgattcccactttgataaatgaaaagaaatccatacctagtcaaatttattgaaattgtaaaaaaaatcacagggaatattttaaagaccgttagattatcctcaaagcaacaacaacttaatgatagccaacttttcaacagcaacattggaagcaagagagtataaaggatattttcatgtactgagagaaaatatctataagctagaattatatacctcgtgaaattatctttcagaatgaggacaacataaagacatttttagaaattatttgatatgcaataaatggactgaacccctaaagacaaacgttttcaaattgaattattaaaatattcacctatttgctgctttaagagacacatttaaacataaaccacagaaggtgaaatataagtgtggaaaaagttatccggtaaggtattaaatagtagctggggtagctataataaaataagcaaaatagacattgggtaaaaagaatcctagaataaagagtcattgcaggccaggcgcagtggcttccagcatctggggggccaaggcaagcggatcactttaggtcaggagttcaagaccagcctggccacatggtgaaaccctgtctctactaaaaatacaaaacacaacaaaacaaaaattagccagtttgatggcacgtgcctgtaatcccagccacttgggaggctgaggcacgagaattgcttaatgtgggaagtggaggttgcagtgagctgagatcacgccattggcactccagcctgggaacagagtgacactgtgtctcaagaaaaaaaaaaaagaaagaaagaaaggaagtcattgataatgatgaaaggttaaattagtgaagatagatacaataattctaaatgtatgaatattatcatcatatccttaaaatatataaagaaaaatgacagaactataaaaaagacatattatttcacaaattaagaaataatgattaaattataaggaacgcagcaccaaagagattatctagcttttcaggagatttaaacatccttttgctaagtaaattgatgtagtagattaaaaaatctgtaaaaatatagaataggggttggcaaattgtggactatggacaaataaggccgctgtctgttttttacagtcggtgaagtagtaattctttttacatttctaaatagctaaagaatcaaaagaatagtaataatttataacatgaaaattatataaaattcaaatttagttatttagtgcatataaagttttattagaacacaggcttatttaataacatattgcccatgctgtttttatgctccaatggcagagttgagtagttgtgacagtgaccatatggcccacaagtctaaaataaactttttcagaactttgaaaattaaccaaagaattgtaacaatctgggaacaattcaagaaaaatggctgaatctcagcaggaacagttgctttgtggttttatacttaaaaagtttttgataaaatattatctataatatttcatttagttgatgtaatatcattaaattaatatcaattaaactgtgataaaaagaaatgagctatcaagccataaaaagaagggaggaatcttaaatgcatattactaagtgaaagaacctggtctagaaaggctacataggtatgattctaatcatatgacattctggaaaaggtaaaactatacagacaataaaaagtcagtggttcccaggtgtttggtggggtagtgtgtgtgtggttcaggatgggtggaatagaagggtgaataggtgaagagggatttttaggttggcaaaattattctgtatgatacagagacatagaatgtacaacaccaagagtgaaccctaatgtaaactatgggctttagttataataatgtaagattggttcatcagttgttacaaatatacaacactaaagcaagatgttataattggggaaactgtgagcagagtaaacaggaactctgtgcactttccactcaattttctgtaaacctaaaactgctctaaaaatagtctattaatttaaaaagtgagtgcatcatttggatggaagggctgtgaagaaatctgggggacactgtgctagaagcagaagtcctccgaaccagggtaggctcttagaaaaatggctacacagactagtcttatatcaagtcctcttatcaacaaaagagggaacccttgagccgagaaatttggaaagctatctggatacttcttaaccagaaaccttctgctactactcaaggaaaatctgttttactaaatattgagtaataaaaagtaatctagttgcttccacacaatatttctgggtactgtggtgagatgtgtgaactgacaaaaaaggagtaaatccaggtttctagatttaaatctagatcattaaaggcatagagaaattgagaaaagtttgtaaggcaggagaggcagcgtaatttaggggttagggaccagactcaaatctcagctctaccacttgcta

SEQ ID NO: 2920 - DNA, 41041 bp, Homo sapiens
gattttataaaatgcaggagcattttctttttatattaaatccagaactttaggacccggatgtttagaagagagcccaagggcactaggattctagaacctggagaggaggcaggactgaaagcaccgatggccaagtcctatcctcccgccagagctccacctggggattggttgtagatgactgaggtcaactgctttcatttgatttattttcaaacaggaaagggaaagatagaagatatattgtgtatcttctcaatgaactctaaaaaaattgagtacgatattcatgaatcaccttatttcaggaccagcccagcagaaatctaggcagtgatctgatgtttattccaatcgtttggtttttatatgtagggattgggatggtcctttgcatttataggcaatacttaattccttttcaaatatcttcatttaacacagctaactgaaaggctcaacactccaggaagaagaaaccacaaatgatgaacaaatgttttgtcactctttcagattcagaaatttgcttgaaaaaagtctgaagaaactaatttaggaaagaaacctctgccaataactctaaaagtttgaattggttgcctttattcctaacactatgatgttttgggataggaactagtagtggtattttttctttcccattggcagtatatcatttacaacagatgttcccgactcaggtaaaatgtaactggcagccagagtcacccaccagcccctgaggaaagggctcaaccttggaacatctggctggcttcaagaaggtcacacaaatacaagatgatgctgaggataagacagtggttttgagagaggaaaacctttaaaaatatttggaagagtcctgaagaccaataaataaagacactgcaatacttcatggacaccagagagcaatttaacactgaaatgaaagcacatgttgcacctgaacactgaaaaaagcccatgtgttaagaggaagaagaaatatgcattcactgcaataaatattgaacctttaaaaaacagaaggaacatgaaaactaaaggacatgggccacagcaaataaggtggcggcagccatcccataatgattacatgatctccatgatgtaaaatgtatatgccacctgaatttattcttagaccttctctcaaagatgtctgcatcaacacaggcaataactgcaggtaatagtgaagaatccttcaggcatgatagaggaacaactaagtgtgggaaaaggaagaactaggccgggcgcggtggctcacgcctgtaatcccacactttgggaggccgaggcgggcggatcacgaggtcaggagatcgagaccatcccggctaaacggtgaaaccccgtctctactaaaaatacaaaaaattagccgggcgtagtggcggggcctgtagtcccagctacttgggaggctgaggcaggagaatggcgggaacccgggaggcgagcttgcagtgagccgagatcccgccactgcactccagcctgggcgacagagcgagacccgtctcaaaaaaaaaaaaaaaaaaaaaggaagaactagtcaaaattgctaataaggccggtgcggtggctcatgtctgtaatcccagcactttgggaggctgaggcaggccgatcactaaggtcaggattttgagaccagcctgaccaataggatgaaaccccatctctacccaaatacaaaaattagctgggcgtggtggcatatgcctatagtcccagcgactcgggagggtgggcaggagaattgcttgaacccaggaggtggaggttgcagtgagccgagatcatgcccatgcactccagcctgggcaacagagcgagactccatctcaacaacaacaaacaacaacaaaacagcaaaaactgctaataaaaattttaacgagaatatttcaggaagtgaatgagttggttcatcttcaaatgtgtgaaaaattattcagtgaaaagatgggcagcttagtcttatgtgctctagacactatcatcaggagcattgggtacaaataggaaaacaatcagagcagtaatacagggaatgtgtattctgcagtcaacataattgttggagttgttagagaggttactgtgtgtggagagaagtatgacgaaagtccagtaatgaagagttttgttttgttttagcaagatgactaagtgataagaaattcatttgatgcctgtgtaatggggcattttgctataagtaagctgttataatcagacttttcttgttcatagattggcaaagcatcatattggatacttagattactgacatcttaaaaaattaatcagcctaatatttttaaatgcatttcttttgagtttacttttagttgaattttgagatttgtttcaatcattattggaattttgtagagtcttctgatttccctagggaatgcctttgtgtccaagaacaagaaacataaccaataagaacaatacatccgtagttttcctatattagtagaaactatttaaaggagatgaaaatgaaagaagatcatgaaaaaaataaaactccaaaaatggagctacaaaaccgacttgtaggccaagatcaatgaaagtagaatacggaagtctggaaggaactatacattgtccctgactacgtaacagagaagaaagttgggaagaaaagtgtgggcaacctccccacaagagaccagttaaaagccaggaagaaggctgggcacggtggttcacgcctgtaaacccagcactttggagcccgaggtggacggattgcttgaggtcaggcgtttgagaccagctggccaacatgtgaaacctgattctactaaaattactatatatatatatatagtaatatatatactaattattatagtatacatactctatatataattgctatatataatatatactatatataattacttacatacagtatactatatatatacacacatactatatactatgtatagagacagtatatatatatatacacacacatacacacacacatacatatatatacacacacatattatataatatatataaactgtgcgtggtggctcacgcctgtagtcctagctactcaggaggccgagcaggagaattgcttgaactcaggagccagaggttgcagtgagccaagactgtgccactcactccagcctgggtgacagagtgagactcagtctcaaaaaaaaaaaagtgaaaccccactccactaaaaatacaaaaaaaaaaaatagctgggcttagcagcagacacctgtaatccagctacttgggaggctgaggcaggagaatcgcttgaacctgggaggcggaggttgcagtagcagagattgcaccactgcactccagcccgggggacagagtgagacttcatctcaaaaagaaaaacaacaacagcaacaacagaaaagaagtaactcaaaatgtttcaaagaagtaatcaaaatgtttttctttctttcttcctttttcttctctctttctttctttttctcctcttttttcttctctctctctttctttctttctttttctttctttctttccttcgttctttcttctgtctctctctcttttctattttttttttttgatggagtctcgctctgttgcccagctgaagcgcagtggcgtgaccttggcttactgcaaccactgcctcccgggttcaagtgatctcctgcctcagccttccgagtagctgggactacaggcgtgtgccactacgcccgactattttcgtatttttagtagagatggggtttcaccatattggtcagtctggtcttgaattctgacctcatgatccacccaccttggcctcccaaagtgctgggattacaagcatgagccctgcgcctggcctagcaccttctagttctaattaggctgcatccatgagggtggaagaatgtctctggaaacaagcagtaattaggatgagaaaagttgtgttttatggggttatgcatggtgagctttgtttgatcgtttaatgggggaaaacatggaaactcatgccccctaaaagtttatataatagtatccccgcactgaatttttctaagtcagacttggcccatacaattagagttgatatcctgtgcttttatgttgctttcccagtttctctatttccatcagcagcgatatctttgtagttgctctagagcagagggctcagtcttttcaatcttgtggtcccttacactcttaagaattattgagaaccaccaggaatttttgttaatgtggatgggttatattagctatatttatatattttaagttaaggctaaggaatttaaaaatattcatttattgatcattttaagatagtgatgcacctatttcatgctaacaccaataacttatttttatggaaaaaaacaacaaaatgaaaacagcgctttagttcacatttttgcaaatctctgtaatactggttgaaacggagacagtgggagtctcctcactgcttctgcatttgcagaaccacacccacactcttgggagcatgagaatgagaagggcaagtaacacagagggtcattagataaaggttttgaccttatggactctctgaaaggaataggaagtcctcaggggtcccctgcatcaggcctccctgatcaagggagccaagctccaagggttgctggggagctggaggaggtgaatggggcagagaggccgttgtcaccaaaagcgtgtttaggctccattcacttcaccccagtggcctactgagcccacatggccaccagcgcaactgaagcagaccccgatagaatccttgtagaattattttaggattcacccatcttggcatgcacaagccatttcaattgaagaagttttctaataacaaaacattgtaaacctaagtatgtggcaatagtaatgattaagtaattatggtttcccgaagcccagtgctctgcagccatcagagagtaaaagcgagaatgtgtcagtggagatagcctcaggatatttaaaagcagagagcacaaagtatagaatcgtgttggtatgttatgacctttttttctgtgcttttgaaaaagagaatacacgtatagcaggaaagacacaccaaactactttatataattggttgtttttgtgtttggtaagatgtatgcactaagaggaaggtttcgattttttttttttttttttttttttttttgagacagggctttgcctgtcgcccaggctggagtgcagtggcgcgatctcagctcactgcagcctcgaccgcccggctcaagcgatcctcccacctcagctgtcccagtagctagaactacaggggcgccacccgcctggcgaattttttgtagagatgggttctctccaggtggcccaggctggttctgaatcccgggctcaagggatcttcctgcttcagcttcccaaagtgcggggattaccggcgtggccaccgcgtcccgcctgtttttaatttttagcagttttaaatcttctggcaatgagtatgttatagtgtcccagatgtttggtcctttaagaaaaggatagcaggacgggttatctcgtgggagcgtgttccacctctgccctccgccagccgccctcgccggggatgcacccaggattttcctccggatgcgtgagtggctcgcccgcggacacgccagccccgccccgcgagccggtttccccgccccctccccgcccacgccctgcgctcccttcctattggtcccatgcccgctttcccgttcaatcgcagcgcttagcgccagaatttgaatcttcgttttcgtttgattgggcgggcgcgccgggctggaagaaggaagtggagggctgacgctgcgggcgggcggcgggcgggaggactcgactcggtgggagccgctagagccgggcgcccggggacgtagccgtagggccaccgggtccccgtcagaggcggcggcgggagcagcggggactgcaggccgggtgcagcgaacgcgaccccgcgggctgcggcccggtgtgtgcggagcgtggcgggcgcacttaccgggcggaggtgagcgcggcgccggctcctcctgcggcggactttgggtgcgactgacgagcggtggttcgacaagtggccttgcgggccggatcgtcccaggtgagctgcggcgggactcctgggagctgtccggggtcgagggctgagccgcggggaccccccgagctctcggggacgggcaggggacagacgcgcggcctgggcccgactcctcctgggctctggcgaggcgtctcggtggaagctcccaggaggcgcaggcgctggcgacaacaccccagctgccgactttggggcgccgggggctgcggtcggatcgtcctggggtccccgctagctagctgcgtgtgcgcttctgtggccggggataggtgaattgggcacggggcccttcttagctcctttctatcagagtaactcgcacctcttttgcagtggaagagttgtaaatttgcttctggcctcccctacggattatacctggccttcccctacggattatactcaacttactgtttagaaatgtggcccacgagacgcctggttactatcaaaaggagcggggtcgacggtccccactttccctgagcctcagcacctgcttgtttggaaggtgagccccgcgggcgcgcgcggacgtttagctgagaaagaggaaaataccttagtcacagaataaagtccagaaacgcgctctaggttgggtcctgccgtcacttttccttggtgcttctcccattcgttactaagttgacatagtgtgtttttttgttttgtaagtataaatttgatgctagtttgtatgtttaagtggttttaaaatcaagccaattaaaaaaatcgatttgctaatgttgcggtaaagaaagatgtagatatcttcatatgtcactggctgcaggcaggcgtctgaagacactgtgcgcccccgggtgctccacagtgggcatccctggccactggggacacagagaatgaaggaaggaagccatacattgcctcttggctccttgtggcaataggaaaatgggacagaaagtcttcctgcctggaatcgagaacgtttcctcttatattgctgtcctgtttggtggtggtaataaccctgtcccttataacaggtatagttgctgacagtgccccatcagcctctgacatgtgtcccactagagcctgagaaggggggtcatttcccgtgtggtcatttcccagaccacacgggattcaggcccaccctgtcctcccaaccccatcccggcctcaccctgtcctcccaaccccatcccctacttgttcctcccgcctaaggcattccaagcctttgttcaccttggtacttcttacacactggaagtttacaatgggaaagttctccccttcctcaagcttgtgtgatttccatcattcagcatcaggtgaaatgtcacctctgaggaagccttgcatgaaaacttgtatttccaacccacagcttcaggggtgagttgtgggtttgtctcccactaggctgagctccccaaaggcaagactgtcttgttactaatcacgtgtgtagggccagggatggtgtctggcatagggggtggatcaatacctagcattctggcaagggtcagtagaaacatgggctggagccatggatttcaatctcttgagaacagtggttctcacaggagggtcatctaaccttccaggattcatttaatttccatgtcacaatataggacaggggcatgcgctgtcatcgcggaggagaggtcaggtgggcatcctaccaggctcagggcagcccccacaatacagaagcatctggcccaagattcaacagtgccaaagctcagaaacacccatctatagtcgtcctcctgccaaacaaattccagttgtaagggatagtctttcctttgctctgatgtcctgttaccttaaaatcaaattatttattggggttaaggaagcttttcactttccatagatacctttctcttgaaaaggaaaatataaacatttcatctccagtggcagtccttttgcttttttatacagtactccttgaaatatcttcatgcaagattttataatttagaaataattcctaagtgtttggtcacatgactgggtaggaagagagattcttagactccaaaggttcagatggagaacagacaggccattcatagtttattcaaatttttaagatcacaggctagaacaggaacactgaagactccaagacctactaacaaactcttctgattattagtttgtataggtttaggaattgtctcttctgtactttgccatggtgttagctttctgtggaaaaacaagttgaatttagatttttttttttgtcgcttgcaaattagtatttttattgtttagagacttgaatctgtcagtaaattcaggtagttttaaaacaacaatgaaaagcttacccataatgagcatttactatgtgctaggcaattagtgacatgtacaaccatttaattgaacatcacatgatgtaggttctaatgtaattctttattgtatatgaagaaactgatgcacagaagtgctagcatcaaataagcacatttgggatgattaaacctctaaacatatttaacattacaaacaaacgtttttgaaaaagcacgagtattaaaaatagtcattatccaaaattgatgtaagtattcctttgtgtcttttaagatagcttttcatataaaaggtaattcgatttgtgttctagtgttttcccttgtttttattactctctgttttaaagatctaatagttacatgtttaatacttccaaaagttctttgcaaatgcaagatcgtttacattgcccattttgtttgttactcctttatgtcatatttacagtcaaacattctagtcaaattgtgttttattttgggaaattgaggtaatcttttaaaaagtgcagcaaccaaaaaaaccttcttcttttgcatgaaggggtattgaatgtgacatccgttccagcttcctgttgtgtcaaaacaacattgcaaaattgaaatccatgagcaggaggtggtgggttttttgaagatctacttttaaagctttttagttcacttttaatctgttcattattacatatttccccttcttttcacttgcaggcaatattacataatttcagttccacaaaccaacacaagtaaatgggtctgttattgatgagcctgtacggctaaaacatggagatgtataactattattgatcgttccttcaggtaggtaaaagctgattggtctaacagtaaatgcatcttctgattaaccataaactagtgtcaaagtcaactgtcattcttctttaatgttctggatgtcaaagtatttcaggttttcattctcaacactaatcttaatttaaaaggatatgatctaggaagatgactaattgggacaaaatgtgatggaattcaaggatttgggtgcaataattatgcagagggaggttgaccttgtcctaaaggagtttgttattttcttccaagtgtttgaaactgcatgagatttttctattcttttttattttaaagcaaaatatacacagagaaaaggtacaaaacaagatggacaggtcaatttatcatgtgaacacccttttgatcacccctattatggactgatttgtgctctcccgaaattcatattttgaattcctaacccctcgaccttaggatgtaactgtatttggaaagagggcatttaaaaaggcaatgaaggctttttagctattagtatgggccctaatctgatgattggtgtcattataagtggagattagggaaacgtgcacagaggaaagcccatgagaagaggcagcaagaaggcagccatcttcaagtcaggagagaggcacagagaaatccaatccagctgacaccttgctcttggacttccagcctcagcactgagaagggcatgtctgtttttcaaggcattcagtctgtgggactttattatggggccctagcagactaatacatcctcagctcatatagaacatttccagaagctttttaaaatgctgttgtctaatcactacttcattccctcagcaagtaaaccaccgttttggcttttggatatcataaacgtctcgagtttcactatctaagcatggatctctgaacacgatagtttgtctgttcttataaaagtccttaacagtgatacaagaatgtatacatttgtgcctggctgtgcttttctgtgtgtgagattcatagcatgttggacatctctgtagtttgttccttccatggcataagtatttcactgaaaaaaaaatgtttaatatatacaataatatacataacatacagaattcattcattcttgatggacatttgactaatgtctagtctttgaaatgtgtaaggtttgctttatgagcagatatggctaattatcttactaatctgccttgtgtaattgaaactgtattctacagtgtctcatatatatgtaatatataattatatattatatatatccttatataatatataattataatatattatatataatcatatataattataatatattaaatatataatattatatagtatatactatatgttatatagtaatatataatataataattatattatatataccatatagtatatactgtatacagtatatactatatggtatatatatacatatacaatatatatacaatatatttatattatataatatataatatatacatataaatatgtaatatatatacacatatacagatacacacactcccgttagattcaaatctatatcttagtaaattttcccctactattattctaagagatatgttcaaatcacctactgagattgattgattgatttgtttttatctctatcagtttttgctttgtatattttgaggctgactatggtgtacaaacttagaatgatgtcttggtgcatggaactctgtcatttagagattcctctgtttttagtagtgctttcttttctgcttaatgtttcctttggatgatgagtatgttaaactaatttccttttgatgagtgcttgtgtagtataacttttccacccccttaatttaacttttcataattgttatggtttaagttgtctcttggaacctgttgtcaggtgacccttgtgtttaactggaatatcttcttgctggattgatccttatataaaatgtccttttttctatgaataacttttgtctgagatgattttgtctcatgttagtacagtactccagttccctctgcttgctgtttgcatggtatatcttttcccatgcttttattttaaaagattgtgctttgaatcaaaattgtgtctcttgtagacaacgtattagttgggtcatttaaaaatccttctgctaaatgaatctctgttattgtcttcatttgtattagctgttttttaatgcacccttaaattccctagtcatttcttttactgtgcttctgggaagtttgccttcatttttaagagtatttttattgaatacagacttctatgtaggaagtttttctttttttctttttcttttgtttgtttgtttgtttgtttttgagacagagtcttgctctgtcacccaggctggagtcagtggtgtgatcttggctcactgcaacctccgcctcccgggttcaagtgattctcatgctcagcctaccaagtagctgggattacaggcacgcgccacaacacccggctaatttttgaatttttagtagagacggcgtttcaccatgatggccaggctggtcttgaactcttggtccaagtgatccacctgcttcagcctcccaaaatgctgagattacaggcatgagccactgccccggcctataggtaggaagcttttgatgtttattggagggctgaactatttttcaaaaaagatattatccaaattgagataaattcagatgattaaagacatccaacaaagatttgaagtgaatcttagaaagagagacttgattccaaactctctaccatgagaaataatatcagtgtgtgactgcttcagatcttacttaggttgcctataaattcaaatcaggtcatttcacgaggccaaaagttttcattatgcaaaataaaggattgcttctatgacttgatcactgagtttgccaggacaattatgtatcttgctaaaggtgatcttcttaagatgtacctgtcttgtcagatacagactgaatgtgtgggaaactgaagtgatcatagtgttctaaaatataggttgtagttaccctgtagtgtaagtgtagctttttatttaccctgaagtatgtaacttcacacgtgagaaagattcagttacctacaggcttcctggctggccttccaagccatccgatgtttccatggacttaaactagaagaaacttgactttgctctcatgtgcattagcttatgtatagaaggtgcttggtaatattgtcaaatcatacctgggctgttcgtcagtgatcagaattaatctgggtccccagcctctgacagtggtatttcaaaacaaactcgatgcaactaatctagtttttagtgtaaaagcacttttctaactctaaatttatttctttgtataaggtgagtcttgaactaaacccaaagtttgttcgttgatccttggacattaagtggatatggagattccgccccagggtataaatttttaatcaggatctttgtcgttctataaactgcaggtagaaaatgaaagtcttcagagtggaaggaagtcaactgaatttccaagaaaaatacgtgacaggtgatagaaaatatccaagtttgggctgattcgtttcgatgatatgaaatcatttagtatgctttaatgatttcttacttgaaatcagttacaaagagggtggttactgttatagaggaaaatgtaactaaagtataaaaacgagttgaacttagacgtattaaaataatctaaatgatatttcctctttattgttcaaaatcagagcactaagttggtcttacacttttagcaaaaagtctattagagcatgttgcgagctttttgcaaacccatgattaggataaccccacacgtagagctaacatttgggaattgcattatctggtggctcattttgtcgcccagtcatgtactcatccgtctttatgtgtctgaaataatcacattatgaaaatcatgagtgccaagatgcttctctattttgatagatagacgacccatgaaacaggaaaagggatcctgtgcttgtcttgtgagagaatcctatagtttgagtgtatcagtgtggaacaggtattccaattgacagcttatgaaaacataattgtcgacacgtgcttcgcaatttagatagtttgagtatacagtgtggaagaggtattttagttgtacagcttattaaaacacagttgtcggcatgtgctggaaatttagtgggatttaggcttaggatgagccctgagaattcatatttttcctacatttagagtgctcctaaagctagtttcagatgagctccttggaatatcttggcttaggaggttatcttaggtgcacctgaaattagcagtaggtactcttgaatttcaacatttctgccttttttttttttttttttctgagacggagtctcactccgtcacccaggctggagtgcagggtgcgatcttggctcactgcaacctccgcctcctgggttcaagcaattctcctgcctcgcctcccgagtagctgggactacaggtgcacaccaccatgcctggctaatttttgtattttagtagagacagggtttcaccatattgaccaggctggtcttgaactcctaacctcgtgtccacccacctgggcctcccaaagtgctgggattacaggcttgagccaccatgcccagtcatttctgccatttaagtactgccttcttccctagaggagcagccttaatgttgaatctatggtcatcagttcccgtgctggaagccagtttctgaggcatcccacactgtagccaccggcaacttgctagtctatgggagtaaataaaccaaaaagccagttgaactgtgggttagtatgtgccactcagcagtctaggaactgtttgttctgttactggtctgtgatatagtgatactgaaatggagtatgtagtaaatatgacagcaattcgacagcaattttgtggctattaatgtaatcgtacaacaaaagtgagattatatactttacatattcataattttattagtgttcatttatattgtttagtcataagattcttgttccacttcagattggaaataaaaaacatccctcacatagatagttttagaagcaaggtgttacgtatcaagaaacctaaaattgttaaggaagttagattctttgcctttgttaatattttttagatattttcttaataatccgatgataagcttttcttcctttggggcatcagacttttataaaagttatatatatatgtattctttagttcttccacccttccggaaataattccatatgaaggaaagttagggcgcttctctggggagccaggtgggggcgctgcgcctgctcccaggctgtgaggttgcagaatcgtgaatataccatgtgtgcctgtaccatgaatttacctagggtgaatctaggctctcagtccaccctaagtatccaccagccaagagggcgcacatgccaagtggagcctcagttcatgacaggtcctatggcccatttgtgagaaaactgatgacgcagtcagtagttctgagctctggggggttacagatcttcagtataggtgatgtttaatattgactttggttcttccgcataggatgttgggaaatatctttaaaggaagttataaaaacacaccgaggtttgattttataattttaagcctcgaatttgtttcctattaatcactcactattttttaatgagtcagcaataagtacttttatcctgaccactagctcccaactgacttgagctcatttctcaaacatctttaaaagtcatatacgagtggtttggtaaagaaaacaattttttattgtttttattttattttttgagacagagtctcgctttattgcccaggctagagtgcagtggtgcaatcttgctcactgcaacctctgcctcccgggttccagcaattctcctgcctcggccacctgagagctgggactacaggcacctgccaccacatccagctaatgtttgtatttgcagtagagagaggttacatcatgttggccaggctgttctcaaactcctgacctcaagtgatccgcccacttggcctcccaaagtgctgggattacaggcatgagccatcatgcccagccagaaaacataaataatattttcactgttgtgactgtcatcatttagaaagacctgcaaataactgttttattttcccaacttacaggagccagcacgtcgtgtctcaagatctagcttctcttctgccctggtgagtagtggttgggttttgttccagaatcctgaaagatcaggtctttgcgaacatattggcaaagaaggggcaacaagaatgcaagtgctaaatgtctagcctgtcagaaaggaggaggtgtcatttaacatgtcaacgacagacagatgcctaactttcccttggtgacgatggtatgctatgcttaggagagactctagatatgagaaaattgcctgttcagctgtcactcagttctcagtagttagatagcatgtgctatttcatactggttattggagctgatagatttatatatttgtatcataatactagtatcataagacttgcaagttttaggcattaataatttgtaggccaagtaaaagctagcttataagacaacctgaaacaattaaaatattgattccacaaatgttaatcattgagaaaatgctgaacttctgtttcttatttcataattcttgccaagatgagaaagctcaagattccaaggcctattcaaaaatcactgaaggaaaagttcaggaaatcctcaggtacatatcaagaatgtcaaagaagacagtaccgcagatgactaaaagacagtgttgctcagggaacaactaatgttcattcctcagaacatgctggacgtatggcagaaatgcagctgatcccatttctggggattttaaagaaatttccagcgttaaatagtgagccgttatggagaattgaagtctgttcccactacacaatgtcttgacaatagcaaaaaaatgaatctcccttttggaagctttatgagtcagtgaagaaagagttggatgtaaatcacaaaaagaaaatgtcctacagtattgtagaaaatctggattacaaactgattacgaacagagaaagaaagtgctgatggtttacagggggagacccaactgttggtctcgcgtagtcaagaccaaaatctggtgggagcggccacgctgtggcagagcctgcttcacctgaacagagcttgaccagaacaaggggaagggaagagacgtggagtctgttcagactcccagcaggctgtgggcgccagctttcctctctatgagccggctaaaatgaagacccctgtacaatttcacagcaacaaaattctccacaaaaacataagaacaaagacctgtatactactggtaaagagaatctgtgaatctgggtaaaagtgaaggcttcaaggctggtgataaaactcttatcccaggaagctttcaactagaaatcgaacaccagctaaagttgaagatgcagctgacttgccactaagccagaaaatctctcttccaaaaccagaggaagtattcctacagatgtggagttctgcctacggaaactgaaattcacaatgagccatttttaactctgtggctcactcagttgagaggaagatccaaaaggattccctcagcaagcctgagaaattgggcactacagtggacagatgtgctctgggttacctggtcttagttcagttgatatcaacaactttggtgttccattagtaagtttatttaattgtaaatttatttttctaaaagatgaacaccttctagtagctgtgagaccttcattctttcagtagtgattagctttgtggaagagaatgtaagccataaggcacagggataagacagacacgcacgctgttttcgctaatagatgaatactgaggcctaggtaattgtaacaaggaatgacagaagagatggaagttgtcaggcaatcatgagcaggggttattgaaggagatagggtggccccaaaaatatttgattctcctccatctatacaaaatagaaaagagaataatcataattgcttttcacatggagtttaattctgaactaaatcaactgtatcatatgagtttggtcatgtggaataaatcactggtaatcattaaacaagcggtagttctcaggtgttgatactctgttttcagagtgtcctacaaacaatttgctgaaacactggactgtacccatgagtccatatgccacatgaacacttgatccttggtgcaaagcagtgcccgtggctaggttgtctttttagagctatgtcacacatgaggaaacgcacacccaaggccagtcaggaagtggcagaggtaggacctttatagcaggtgtggtagctcctgggagcttcctacactcctagggactggctattagaagaaaagttgtctgggccacagagcagtattcgtactccaggctgtgtttctgcaggtggcctatagcggtggggcatgaggtgtcgataaaataaggtttgtaacatcagtctcagtattccaccaagcttcctagtgggaagcatcacttaggcaagggatttacattaactggtggctcaggaaaatgtgtggccggactgggctcctgtgaattgactcagaaccacctggaggagtttttacagctcatgcatttggtcactgggtggctcaggctgagacccaagtgcatgtctttagagagttctctggcttcgtccccctactctaaggtgaaatctgctgctgcagactcctcctttctatgtccacaataatgtttcaatgttttaaagaaagcctctgtactgtccagtggcaacttgacgtcttgtggccactcccgcaatcctttaggaactcttagtagcttagcttcaccaggattgcaaaatagaggcgtgctgtaggtactgtgtttcgatgacttttcacttggtttgtctttaatctaacgtgaaataaatcactagtcttggtatgttttttcattgctctttccacatttgttccgttactttagatgagagtgacggaatacctttgaaaagaaggcgtgtgtcctttgggggcacctaagacctgaactatttgatgaaaacttgcctcctaatacgcctctcaaaagggagaagccccaaccaaaagaaagtctctggtaatgcacactccacctgtcctgaagaaatcatcaaggtgagttgaacaagcagcatcccattcacgcccagtggctcacacaccggtacctattcctttccaaatactgacacaagtagaattatgatgaagacctttatttattattaaagaaacaagtttttaaaaagacgaatgaaagctcattgatgtgggcaccagcaaggagcccctgggtccctgaccgtggtgctgatgcgaccgagtcgggggagtccttgatgtgtccttttcgtgcagaagttcccagacacccacgcttacagcactgcgtaatcacctgaggcaccgtcagaatagccaattacaaagattctggatacattaccacgtcgacccataggattgttttattttcttttagagttacaaggctatagttaaggcatttacctggtgtgaggaaaatcaatggcacatcttccttttacaccttcagctctttagaatatttgcttgctgttcctttgctgtgttgtccttcctgggtttcacacctctgggaagtcatggccctatgctcataacctttgtaatagggcctgggcggtctttctttccttctcttcccagcaggatggaaagtgatgtctggctccctttccattttacactggctcccaggggcaagcagtccccctccatgtggactgccgggggctgggtgctcacagctggtatttactgggactgagacagaccctgcttgtctttcactgatcaggatgttccttccacctttttacctgaaatgactcacttcagacttggcttgcttctctttccttttccttaaatgactgagacagtctcactctaccatagtcttcaaagacagtggcttaagcatttgatgcttcaagatttaaacagtgaaattcttaactgaataggtttttatcagtcattccagagatgttagatccttgttaggcttcttgtaaacaattttgtcttgtcaggaacagcctcaaccatcaggaaaacaagatcaggttcagaaatccatgtggaagtgaaggcacaaagcttggttataagccctccagccctagtcctaggaaaactccagttgccagtgatcaacgccgtaggtcctgcaaaacagccctgcttccagcagcaaatctcagacagaggttcctaagagaggagggagaaagagtggaacctgccttcaaagagagtgtctatcagccgaagtcaacatgatattttacagatgattgttccaaaagaagaagtggtgcttcggaagcaaatctgattggttagtctgacattagatacatatattaaggtgaattttttcatgaatgctaatttttgaaaagtttcgtcttttcctttgacagttgcaaaatcatgggcagatgtagtaaaacttggtgcaaaacaaacacaactaaagtcataaaacatggtcctcaaaggtcaatgaacaaaaggcaaagaagacctgcactccaaaggtaggggcctcactgaatggctgctttacacataccggtgtcatcgaagctgcattcagtgtggatttatgctttaatgtcctgtttacctccttcctgttttctacagagcctgtgggcgaagttcacagtcaatttagtacaggccacgcaaactctccttgtacctaataatagggaaagctcatactgaaaaagtacatgtgcctgctcgaccctacagagtgtcaacaacttcatttccaaccaaaaaatggactttaaggaagatctttcaggtaaaaactagtcttagatcttataaatcttttgactctactgttttttactgtgttaatgtttgtttgctaactttgtttatctgctgtgaaagagattataaaataaacgactcaatcaccctttggggtcttagtgttcagggaagataaagctgttttggcttgcaaagacaagtctctgcaatttttgggatcacatgtcctgcatgaaataggtgtggaaatgtcaaatgcatgtcttaccctggagagcagcgtatacatagaaagctggaaggtgctttacagtgaagagagttacttgttaatctgcaggtacaataatagtttatcccaggtgtgggccagttgttgttgagaacattttgcttcttcaggattgactttctaggtagcttaactttcttgaaagaaagcctatgagaagattcccataaacgattgttgaagaaatatttccattcaattcccactctcgtaaattgtggcctgacttgtgtaatttaaagtggggatggccggcgcagtggctcacgctgtaatcccaacactttgggaggctgaggcctcctatcattccaaacagaatgataatatattagattttcaaaaatatatattattacttgacagtactaaaaatgggcagctcttgtcattttctaaaatgtgggtacgtgttatttgtacttaaaatctagaactgagcacccagactttgagaagcatgaaggcatttggcctctagatcctagcagggaggcctatgggttcaggagcccgtcaccagcctccgtgctccagagctcacgtgtggggtcttgttaggagacccagaggtcagctaacttcatttgtttcctttccaagaaaagcaaagcgaagagcatacatatcttctctttgctctcttttttacaaaatgagtacattattaatggaatcactcttttatgaggcctatgtaccaggatttcaagggaggaatctactgttatttcccaccattgcacgttacatgtgagggctgggatggttgtctgcatgttagcaatatgtcaatcactttcaaatattttcatttaacaggaatagctgaaatgttcaagaccccagtgaaggagcaccgcagttgacaagcacatgtcacatcgctatttcaaattcagagaatttgcttggaaacagtttcaaggaactgattcaggagaagaacctctgctccccacctcagagagttttggtggtttccttgtttcctaacactgtgatgttttgggataggaacatacagtattattttttacaagcagtatgatattacttctctaaaacaaatgttcctggcacaaaataccatttcgtcttctctgttctaattgaaagggagatttcaatcagcagttgaactaacattggcatcattgacttatatagaaagaaagactccgttaatgtgtgtaaatgacctgtgtacactttggcttctttattgtaagtaaccagggtgacatagcaaaaaaatacaatggtgtctcacatatttacatataaattactcatattcaaaattactgccaattacaaaacagaaagatacagtttgtatactgtgcaattattcctgctaaccttttaggtgggagcaggcccggggaagtgtgagatgggagatgagaatctgtctaatctctcatttggcactggtcactgtatcctgtcacagagggaacagcttgctaccctgaagatgtttgcggtaggtaaatatttccgtgtaatatggaccctaaccacataaggataatccatgttattttattggcgatttaagcaagaaacagctgtttgtttctaatgtttgaaggaaaaaatgcctatatttacgtcaatacacagggcatggcaacctttggaggaaccttctgaagcagtatttttaccttctatgacatttcagcatctaactttgcttaatgatgaccccactatagcaccaaataacattattttaattgtgcatggctcttataagacagatttatagacacataagtagcctcatgtcgtcagtgaatacgaagctaaatatttagttttttaccatattttatgaggctgtaatactcattgacatgagacactaatagaatgtttttattgtgtatgtttttatttcaggaggaaagtgttcttcagtgcacagaatgcagcaaaacagccatctgataaatgctctgcaagccccccttaagacggcagtgtattagagaaaatggaaacgtagcaaaaacgcccaggaacactacaaaatgacttctctggagacaaaaacttcagatactgagacagagccttcaaaaacgtatccactgcaaacaggtcaggaaggtctacagagttcaggaatatacagaagctaccgtggaaagtaagagtgaagaaacaaatacagaaattgttgagtgcatcctaaaaagaggcagaaggcaacactactacaacaaaggagagaaggagagatgaaggaaatagaaagacctttgagacatataaggaaaatattgaattaaaagaaaacgatgaaaagatgaaagcaataagagatcaagaacttgggggcagaaatgtgcaccaatgtctgacctgacagacctcaaagcttgcctgatacagaactcatgaaagacacggcacgtggccagaatctcctccaaaccaagatcatgccaaggcaccaaagagtgagaaaggcaaaatcactaaaatgccctgccatcattacaaccagaaccaataaacaccccaacacacacaaaacaacagttgaaggcatcctggggaaagtaggtgtgaaagaagagctcctagcagtcggcaagttcacacggacgtcggggagaccacgcacacgcacagagagccagcaggagatggcaagagcatcagaacgttaaggagtctccaaagcagatcctggacccagcagcccgtgtaactggaatgaagaagtgccaagaacgcctaaggaagaggcccagtcactagaagacctggctggcttcaaagagctttccagacaccaggtccctctgaggaatcaatgactgatgagaaaactaccaaaatagctgcaaatctccaccaccagaatcagtggacactccaacaagcacaaagcaatggcctaaagaagtctcaggaaagcagatgtagaggaagaattcttagcactcaggaaactaacacctcagcagggaaagccatgcttacgcccaaaccagcaggaggtgatgagaaagacattaagcatttatgggaactccagtgcagaaactggacctggcaggaactttacctggcagcaaagacagctacagactcctaaggaaaaggcccaggctctagaagacctggctggctttaagagctcttccagactcctggtcacaccgaggaattagtggctgctggtaaaaccactaaataccctgcgactctccacagtcagacccagtggacaccccaacaagcacaaagcaacgcccaagagaagtatcaggaaagcagatgtagagggagaactcttagcgtgcaggaatctatgccatcagcaggcaaagccatgcacacgcctaaaccatcagtaggtgaagagaaagaatcatcatatttgtgggaactccagtgcagaaactggacctgacagagaacttaaccggagcaagagacggccacaaactcctaaggaagaggcccaggctctggaagacctgactggtttaaagagctcttccagacccctggtcatactgaagaagcagtggctgctggcaaaacactaaaatgccctgcgaatcttctccaccagaatcagcagacaccccaacaagcacaagaggcagcccaagacacctttggagaaaagggacgtacagaaggagctctcagccctgaaaagctcacacagacatcaggggaaaccacacacacagataaagtaccaggaggtgaggaaaaagcatcaacgcgtttagggaaactgcaaaacagaaactggacccagcagcaagtgtactggtagcaagaggcacccaaaaactaaggaaaaggcccaacccctagaagacctggcggcttgaaagagctcttccagacaccagtatgcactgacaagcccacgactcacgagaaactaccaaaatagcctgcagatcacaaccagacccagtggacacaccaacaagctccaaccacagtccaagagaagtctcaggaaagtggacgtagaagaagaattcttcgcactcagaaacgaacaccatcagcaggcaaagccatgcacacacccaaaccagcagtaagtggtgaaaaaacatctacgcatttatgggaactccagtgcagaaactggacctgacagagaacttactggcagcaagagacggctacaaactcctaaggaaaaggcccaggctctagaagacctgctggctttaaagagctcttccagacacgaggtcacactgaggaatcaatgactaacgaaaaactgccaaagtagcctgcaaatcttcacaaccagacccagacaaaaacccagcaagtccaagcgacggctcaagacatccctggggaaagtgggcgtgaaagaagagctcctagcgttggcaagctcacacagacatcaggagagactacacacacacacacagagccaacagggatggtaagagcatgaaagcatttatggagtctccaaagcagatcttagactcagcagcagtctaactggcagcaagaggcagctgagaactcctaagggaaagtctgaagtccctgagacctggccggcttcatcgagctcttccagacaccaagtcacactaaggaatcaatgacaacgaaaaaactaccaaagtatcctacagagcttcacagccagacctagtggacaccccacaagctccaagccacagcccaagagaagtctcaggaaagcagacactgaagaagaattttagcatttaggaaacaaacgccatcagcaggcaaagccatgcacacacccaaaccagcgtaggtgaagagaaagacatcaacacgtttttgggaactccagtgcagaaactggaccaccaggaaatttacctggcagcaatagacggctacaaactcgtaaggaaaaggcccaggcctagaagaactgactggcttcagagagcttttccagacaccatgcactgataaccccacactgatgagaaaactaccaaaaaaatactctgcaaatctccgcaatcagacccagcggaaccccaacaaacacaaagcaacggcccaagagaagcctcaagaaagcagacgtagaggagaatttttagcattcaggaaactaacaccatcagcaggcaaagccatgcacacgcctaagcagcagtaggtgaagagaaagacatcaacacatttgtggggactccagtggagaaactgacctgctaggaaatttacctggcagcaagagacggccacaaactcctaaagaaaaggcaaggctctagaagatctggctggcttcaaagagctcttccagacaccaggtcacactgagaatcaatgaccgatgacaaaatcacagaagtatcctgcaaatctccacaaccagacccgtcaaaaccccaacaagctccaagcaacgactcaagatatccttggggaaagtaggtgtaaagaagaggtcctaccagtcggcaagctcacacagacgtcagggaagaccacacagaccacagagagacagcaggagatggaaagagcatcaaagcgtttaaggaatctgcaaagcaatgctggacccagcaaactatggaactgggatggagaggtggccaagaacacctaaggagaggcccaatcactagaagacctggccggcttcaaagagctcttccagacaccagaccaactgaggaatcaacaactgatgacaaaactaccaaaatagcctgcaaatctccaccaccgaatcaatggacactccaacaagcacaaggaggcggcccaaaacacctttggggaaaaggatatagtggaagagctctcagccctgaagcagctcacacagaccacacacacagacaagtaccaggagatgaggataaaggcatcaacgtgttcagggaaactgcaaaacagaaactgacccagcagcaagtgtaactggtagcaagaggcagccaagaactcctaagggaaaagccaacccctagaagacttggctggcttgaaagagctcttccagacaccaatatgcactgaaagcccacgactcatgagaaaactaccaaaatagcctgcagatctccacaaccagacccgtgggtaccccaacaatcttcaagccacagtccaagagaagtctcaggaaagcagacgtgaggaagaatccttagcactcaggaaacgaacaccatcagtagggaaagctatggacaccccaaaccagcaggaggtgatgagaaagacatgaaagcatttatgggaactccagtgcaaaattggacctgccaggaaatttacctggcagcaaaagatggccacaaactcctaaggaaaggcccaggctctagaagacctggctggcttcaaagagctcttccagacaccaggcacgacaagcccacgactgatgagaaaactaccaaaatagcctgcaaatctccacaaccagaccagtggacaccccagcaagcacaaagcaacggcccaagagaagcctcaggaaagcagagtagaggaagaatttttagcactcaggaaacgaacaccatcagcaggcaaagccatggaacaccaaaaccagcagtaagtgatgagaaaaatatcaacacatttgtggaaactccagtcagaaactggacctgctaggaaatttacctggcagcaagagacagccacagactcctaagaaaaggctgaggctctagaggacctggttggcttcaaagaactcttccagacaccaggcacactgaggaatcaatgactgatgacaaaatcacagaagtatcctgtaaatctccacaccagagtcattcaaaacctcaagaagctccaagcaaaggctcaagatacccctggtgaagtggacatgaaagaagagcccctagcagtcagcaagctcacacggacatcaggggagacacgcaaacacacacagagccaacaggagatagtaagagcatcaaagcgtttaaggagtcccaaagcagatcctggacccagcagcaagtgtaactggtagcaggaggcagctgagaaccgtaaggaaaaggcccgtgctctagaagacctggttgacttcaaagagctcttctcagcccaggtcacactgaagagtcaatgactattgacaaaaacacaaaaattccctgcaaatccccccaccagaactaacagacactgccacgagcacaaagagatgccccaagacacgtccaggaaagaagtaaaagaggagctctcagcagttgagaggctcacgcaaacatcagggcaagcacacacacacacaaagaaccagcaagcggtgatgagggcatcaaagtattgaagcacgtgcaaagaagaaaccaaacccagtagaagaggaacccagcaggagaaggccaagagccctaaggaaaaggcccaacccctggaagacctggccggcttcacagagctctctgaaactcaggtcacactcaggaatcactgactgctggcaaagccactaaaataccctgcgaatccccccactagaagtggtagacaccacagcaagcacaaagaggcatctcaggacacgtgtcagaaggtacaagtaaaagaagagccttcagcagtcaagttcacacaaacatcaggggaaccacggatgcagacaaagaaccagcaggtgaagataaaggcatcaaagcattgaaggatctgcaaaacagacaccggctccagcagcaagtgtaactggcagcaggagacggccaaggcacccagggaaagtgcccaagccatagaagacctagctggcttcaaagacccagcagcggtcacactgaagaatcaatgactgatgacaaaaccactaaaataccctgcaaatcatcccagaactagaagacaccgcaacaagctcaaagagacggcccaggacacgtgcccagaagtagaagtgaaggaggagctgttagcagttggcaagctcacacaaacctcaggggagacacgcacaccgacaaagagccggtaggtgagggcaaaggcacgaaagcatttaagcaaccgcaaagcggaagctggacgcagaagatgtaattggcagcaggagacagccaagagcaccaaggaaaaggcccaacccctggaagatctggccagcttccaagagctctctcaaacaccggccacactgaggaactggcaaatggtgctgctgatagctttacaagcgctccaaagcaacacctgacagtggaaaacctctaaaaatatccagaagagttcttcgggcccctaaagtgaacccgtgggagacgtggtaagcaccagagaccctgtaaaatcacaaagcaaaagcaaacttccctgcccccactgcccttcaagaggggaggtggcaaagatggaagcgtcacgggaccaagaggctgcgctgcatgccagcaccagaggaaattgtggaggagctgccagccagaagaagcagagggttgctcccagggcaagaggcaaatcatccgaacccgtggtcatcataagagaagtttgaggacttctgcaaaaagaattgaacctgcggaagagctgaacagcaagacatgaaaaccaacaaagaggaacacaaattacaagactcggtccctgaaaataaggtagaggaagtattacagcatcactcaatatcgtcttggatagttgtgaatttctgtgttaactttgcatgtaacctgacgttataagtggttatcctttccccagagggtttcctttaaactgaataactgcaggccatggtaaagaatcttcttgggacctatagagggaatagactatatgggaaaagaactagtcaaacatgattaatgcaaacttagaagagtttctcaaaagcaaatgagtaatgttcatcttcaaatgtttaaaaaattgatcagaggataggtgggtggtcagttctatgttctggatactgtcaccaagaccaggactgggttaaaaatcctatctagtcactattttaactatcagaacaatatcaataaggaatgtgtattcttgagaaggggaactgtctggactgttagatagagaggctcccactgcatgcagagaagtttggggaaactcagaaatggcaatttcctgttctgccttagcagtgatggttaaaggaataggaattcattactccctgtaaatgaatgaataacggaccttctttctataatgtaaactgtaaaaattgatttgatatatatcttattaggcattgttattgaaatttatcctgaattccttatttaaatttgtcagcagagacagtcatttctccataggagcaaagtaccaaggcattaccttgctatcctagatgacaagtctcttagacaattcatcagtgtgtgattttcaaatgatttcccttttaggttactgttgattgtgctccctgttgaattttgaagtttgttttactaattttggaattttgtggatgtcttctcatttctttagggaatatccctgcgctccagacgccaaataagactgaggcagaacagcaaataactgaggtctttgtattagcagaaagaatagaataaacagaaatgaaaagaagcccatgaagacctccccagagatggacattcagaatcagatgatggagcccggaaacccatacctagagacaaagtcagtgagaacaaaaggtgctgaggtctgctagacagaatgagagctcccagcctaaggtggcagaggagagcggagggcgaagagtgcgaaggttctcatgcagaatcagaaagggaaaggagaagcaggaaattcagctccatgtgcctgagatcaagaaagacaaaaagccagcctgcagcaagcactttggagacgaatctgtgcagagagtaacgcggagtgtcaagagatgtgcagaaaatccaaagaaggaagccatttactgtttccctgttttaaaagacacagaatgttttgatgtattttttgccaaggttgcaaaggcaaacaaaaagcattatcttcaacagcactctgccagctcccagttcattaatggaaggagcattatgctaagacataaatttggtcattttagttatattttgtgtgtctactttgggaatttcacttcaaatagcaaattcacgttatgaagactttcttcaaaagaaaaggaatttgtctagtggctaatttctgactgcttatgatgtacctcatgataaattgtaggtagatgtcttcagcctttctgtagttcaaaatcacctcttgaaacaggaaattctttttccaaaaaaaactattgaaacagaaaaatttccaaggcattctttggaaagcagaaggaacagaagttgggatgtccctgagacacatgctcactatgtgagagttcctgtcagtgggggatgcgtctgccctccaaccctcctccagccagagactatctaagctaataactttaagtgctactgaaatcacatcaagttgagccactcataattacaagcatgtggcaaatccataagaatgattagattccattggtgttcttctggggaatacttggtttagcaaaataaaaataggttgaattgctccctttttgtgagcaattcacaaaaatataatataatttaattcttagcacacacaaaatttggacctaaaactaccatattctgagttcagcaacgaaactcatgtagcaataacctcttcagatacagaattctggcaagtacagctgtccgacagaccctcttcggcacaaactaggaagcttcaactgccaagaaaaggaaagattccaggtgtccccagtacctgctgcatagccaggcagccagtggagggggagggcttgtgtgctggatggtgggcaggaagtcctagtggggagatgcccatagactgttccagagagggagaggagaggctcaagaagggcactgatgcccacacaggtgtcctaagtcagagactgtattctggggcaggctggaagcagaagacacccgacagtgccagacaaggtcctagaaacccaggcacaccagggacgcaacagctgacgtgggtcagcacgttcacccgtcgagtcttaaataaaacgcaggctccaggcgcttaccgaattcacagtctggaaggtgctgcttcctcgaatgaaaccaaagaagggtgaaagcgaatcttttaactaggatgattcctaaacacaggcaaccaggcccaaggctgagccaggcctggtgtgttctgccgggggcgttccagcctctctcacacacaagcacccaggagacgcccaacacacacatgctcctctttgccgagctctcggtgggtgtcggtagtcctagaaaatgcatatataagatagattttttccagtaagagcttgtagccatgcttttcaccatggttcctctcccttagccaaggggtgagaactactcaagagtaaaggccaaggcaggtcccctgcatgcaagttgggcatgcttctgtctacagggttccttggtttaggagacccaaaagacttaatcctggttggattcactttttctgaggacattttttagtttgtgaaaatgtgtgcatcgatgaagaaattttattatgaattagctaaaaatgcattaggaacttctgtatgaaaagatcacattatttaagtgtaaaaaaactcataataaaagcagttcaagtcaagaaaaacaatgttaatggaatatattttaaaactttttccaacctcaaaattaattttctgcaactaaggacctgcataatacctagtaagccttggggttttgcagaggaggtcgattctaaaaatgggtgtttaaattacttaagagttctttttttttcttcccacacaggctgaggacaatgtgtgtgtcaagaaaataagaaccagagtcatagggacagtgaagatatttgacagaaaaatcgaactgggaaaaatataataaagtagttttgtgataagttctagtgcagtttttgtcataaattacaagtgaattctgtaagaaggctgtcagtctgcttaagggaagaaaactttggatttgctgggtctgaatcggcttataaactccactgggagcactgctgggctcctggactgagaatagttgaacaccgggggtttgtgaaggagtctgggccaaggtttgccctcagctttgcagaatgaagccttgaggttgtcaccacccacagccaccctacagcagccttaactgtgacacttgccacactgtgtctcgtttgtttgcctatgtcctccagggcacggtggcaggaacaactatcctcgtctgtccaacactgagcaggcactcggtaaacacgaatgaatggatgagcgcacggatgaatggacttacaagatctgtctttccaatggccgggggcatttggtccccaaattaaggctattgacatctgcacaggacagtcctatttttgatgtcctttcctttctgaaaataaagttttggctttggagaatgactcgtgagcacatctttagggaccaagagtgactttctgtaaggatgactcgtggcttgccttggtctcttgggaatacttttctaactagggttgctctcaccgagacattctccacccgcggaatctcagggtcccaggctgtgggccatcacgacctcaactggctcctaatctccagctttcctgtcattgaaagcttcggaagtttactggctctgccccgcctgttttctttctgactctatctggcagcccgatgccacccagtacaggaagtgcaccagtactctgtaaagcatcatcatccttggagagactgagcactcagcaccttcagcacgatttcaggatcgcttccttgtgagccgctgcctccgaaatctcctttgaagcccaacatctttctccagcttcagacttgtagatataactcgttcatcttcatttactttccatttgccccctgtcctctctgtgttccccaaatcagagaatagcccgccatcccccaggtacctgtctggattcctccccattcacccaccttgccaggtgcaggtgaggatggtgcacagacagggtagctgtcccccaaaatgtgccctgtgcgggcagtgccctgtctccacgttgtttccccagtgtctggcggggagccaggtgacatcataaatacttgctgaatgaatgcgaaatcagcggtactgacttgtactatattggctgccatgatagggttctcacagcgtctccatgatcgtaagggagaatgacattctgcttgagggagggaatagaaaggggcagggggggacatctgagggcttcacagggctgcaaagggtacagggattgcaccagggcagaaaggggagggtgttcaaggaagagtggctcttagcagaggcactttggaaggtgtgaggctaaatgcttccttctacgtaggccaacctcaaaactttcagtaggaatgttgctatgataagttgttctaacactttagacttagtagtaattatgaacctcacatagaaaaatttcaccagccatatgcctgtggagtggaatattctgtttagtagaaaaatcctttagagttcactctaaccagaaatcttgctgaagtatgtcagcaccttttctcaccctggtaagtacagatttcaagagcacgctaagggtggttttcattttacagggctgttgatgatgggttaaaatgttcatttaagggctacccccgtgtttaatagatgaacaccacttctacacaaccctcttggtactgggggagggagagatctgacaaatactgcccattcccctaggctgactggtttgagaacaaatacccacccatttccaccatggtatggtaacttctctgagcttcagttccaagtgaatttccatgtaataggacattcccattaaatacaagctgtttttacttttcgcctcccagggcctgtgggatctggtcccccagcctctcttgggctttcttacactaatctgtacctaccatctcctgcctcccttaggcaggcacctccaaccaccacacactcccgctgttttccctgcctggaactttccctcctgccccaccaagatcatttcatccagtccgagctcagcttaagggaggcttcttgcctgtgggttccctcacccccatgcctgtcctcaggctggggcaggttcttagtttgcctggaattgttctgtacctctttgtagcacgtaggttgtggaaactaagccactaattgagtttctggctcccctcctggggttgtaagttttttcattcatgagggccgactgtatttcctggttactgtatcccagtgaccagccacagggatgtccaataaagtatgtgatgaaatggtcttaaaacccatggtatttttattataggagagtggggaaagaaactaagtgtgggtggggcagacaggccagtgtaagagagactggtcattacgttccattttcatttctacaaggacttggctggatggtcattttctctcttgccaataagtcatcgcagctgcttttagtcctgcaggaatggcctgctgtatctcgagaatacctgcaaccgcagctgtgcctgctttgttgcaacagaggtgctgagttgagggatgggatttgacccagggctgccccaagtcagcagatgaaaatacatgccctgactttcctctgcaaccctgatttgacatggatcccgggagtgaatttgctggcaagttccaggggcagtgcctgcggtaggtcagttagtcctgaagaagaggcctttctgtcggagagaaaagtttgaggtgggtgcatctaccatcttgagaggctgaggagggagggagagccgtgctcggtggcagtctggtgaaggaagtgggttcagtctgcagcccacatcctgggctgtcatcaagaataacatggcaaacggcgactccataaagtaaactgtagctacttaactaaatgatttcggtggctgagatcctactgtttgctgggtttcctggaaaagtcctctagatgaactgcagaatctcctggcactctggttacagctggagaaactgatttctgtgctgtccaggtgctccagacccccaaggcatctccaggacacagtcaccaaacccccatcctggtattactggcttgagtgccacgtaggcacacagcactccataatttggaaatgtggatttcattgctatgctcttcatgagggaacaaataatatccatgatgtattggcaggaagccacgccccccccccccgctgccacccccacagcgcgcacagtgatttcaggaaggaggtttgattggtttttgtgtgttgccctgcaagggccccaatcagcttcctgctcatcagccccatctcaggcagtcccacatctgtgatgtcaagccctgagccgggtaattggacttggatacctgcttgctcatctttccagtgaggttcctaaggagcatccccaaccccacctcccagggggagcttcgatgtcacctgaagaacaaacaaacaaaaactgtgttgatggtacagtcccagggctcgtgactggacaggctccctgcgtgatacacctgtgtatgtcactacagaaatacagctgtgcaggcctgtccgcctctctcacaggtcagagtgttctaaaatccatcctggcccttttgtctgtctgcttggggttagggcaggtgctcctttatcatttgtaaagtttatgtgagtctggtatgtgttccacacccttgcagagtgtaaattcctagagagagttcagacttcgagtcaaatgcacaggtgcaaattccagcttgtctaatttgctgctgtgtgaacgtggaagtctttcaactttgctagtttcccatctgtaaaatgaggctgttcagtacctgagcactagcattgttgagaagattaaatgagacaatatgtgtaaaacacttagcattttacccaagcttggtaagcatcaatacatgctaattatcatcatcatcagaagatgaatatatttatagatgcctaaaactccaagatatttcccttggctcataaattctttatcactagggattctctatggaagtgaaggaagaatctggaacgtaacaggcctgaataaccaggggcagtgctcacacctgtaatcccagcacattgggaggccaaggctggaggatcgcttgaggccagagttcaagatcagcctgggcaacatagcgagaccccatctctacaaaaaaaaaaaaaagaaaaaagaaaagaaaaaattagcgggcattgtggcacatacctgtagtcccagctactgggaggctgatgtgggaggactgcttgagctcaggagttcaaggctgcagtgagctatgttgtatcactgcactccagcttggtcaacagagcaagaccctgtctcaaaaaagaaaaaaaaaatcctgaataatatgtctatgtcttcatcgagcccacgtattgaaaactacccaaccaccaacaatgcaaagaaacattatttaactaagagtcgagtaaccaaatttcagggtatccaaactgaatatggcctctgcaggagaaaagaatatgtgtgatgtggcagccacaactgataccatattaacactgtcttttatttttttttttttgagacggtctcactctgttcacaggttggagtgtagtggcacaatcttggctcactgcaacctctgccttcaaggttcagagattctcctgcctcagcctctgaggagctgggattacaggcatgcaccacacatactggctaatatttgtaattttttttttaggagagacagggtttcaccatgttggccaggcggtctcaaactccagacctcaggtgatccagccaccttggcctcccaaagtgttgagatacaggcgtgagccaccatgcccagtcaacagtgtctttaaatgacatcagatcgcagaatttgctgagcttggcccagacacaggtctggctaaaacaggtggtgctgggaccaggcaggccaggacatagggaagcacatccctgcatagaaaaggttctgtggattttaatccagtcagcaattagcaaactttttctgtcaaggaccaggcagtaaatatggcggcttcgtggccatactgtctgttatgctgactcacctctgctgttaaagaacagaagcggctgtaggcacacgcaagcaaacaggcatgtccaaaaaatggctaataaaaacaggctgtggggctggcacggtggctcacgcctgtaatcccagcactttgggaggctgaggcgggtggatcacttaggccaggagttcgagaccagcctggtcaacatggcgaaacccagtttctactaaaaatcaaaaattagccaggtgtggtggtgggcccctgaaatcccagctactcagaagactgagcaggagaattgcttgaaccagggaggcggagggtgcagtcagctgagatccagcccacttactccagcctgggtgacagagtgagattccatcttaagcaaaacaaaacaaaacaaaaaagcaagaaaacaacaacaacaacaaaaaccaggctgtgggcccattttgactgaggacttggtttgcatatccctgatctagagaaatgagtgatttaacatatatgcctcctaggaatatcacattgaaattagcagcccttgcaatataacgggtcatgagcagagggtgcattcactttgggctttggggtcttcccgggccctggaacccccaccggctcccagccccaggcgttggaagctgagaggcctggcttccaatcccagccctgtcccttgctcgctgcatgattgggcccattgcttggcctttctgagcctcagtttccctagctgggagagtgaagatgcaatttcttgcctcgtagggttgtgaggacaaaagaagaaaactcgggtggattgtgtacctggcccccattctcagaaggtctccaagcggtgccgtcttcctcttatcccagcgtgcctcagccttcgagaggcctagaactctgggaaaggagcagtcaggactggacacgactcaggcttttcttatttcttgtgtggggtctggaaaaggagaagtgcaattatatccaagcccctcttgggcaggggtctcagatccaggccaggctgatatgagcaaggggaggcgggcaggccaggcagcactgtcaattttgatgttgggagggaggaggggcatgactgtgtatagcaaattcctaaatttccaccctggctcgggagatgcagcttgtgctgaagtgagtcattattcctgggcccctcatctgcctgcttgcttccatgtcccctagagccaaaaacaacataggagcaacttaggggaaaagttacctatatttatatataagcgtatgtatttatattaaatatgataactatagatataatctaatatattgtgtataatataaattaaatatattaatgtaatgtatataacttaagtatattatatattcataactatataaaatatataaaatactaaatattattcactaggttttcatcattggcaacctaagttctatataaatataaaatattatctatgaaaatttatacacaaatatgtatataaaatgttataaatatatactacatatttaagtaaaaataatatatacataaaatatattatatgtttatatagatttagttggcaatgataaaaacttaatgaagaatttttagtgtaataaaaactagtctcgtggagctctttgtgtttcagaatccagctatttggctctgggcccgccctctgttactccgaaaagcactgctttggaggtaacacaacgctaggtggcccctgaggctccctgagcaccgccgatacccctctcagaagcacctctgccccctcctctgtacagcccgctttgctcgccgcctcttcctttggattccaggttggtcggggaagcaatgggccatgtgtgtgcaccgttgtgcctgccttcacccacacgagcctgttggaagacgacagccatacggaagaccgctagctaccccggccccccagcccaggctagttggggttacccaactaccagccaatccccgacgtgaatgtgaataagcccagccagcatcacagagctgcctcgtcaatgtctagctgccccagatgccacctaaacaatttgggtttctcacggcagttctcttcccaacctctgtcccctgggttcctaagaactaagggttgtgcccaccaatcaaagcaagagggaaacgggcttggattttaaggcgttgcactgctgtgacttgaaaagggatatggtttaaaatcattatttaggccgggcatggtggctcacgcctgtaatcccagcactttgggaggccgaggcagtggatcatgaggtcaagagatcgagaccatcctggccaacatggtgaaaccctgtctcactaaaaatacgaaaattagctgggtgtggtggctggtgcctgtagtcccggctactcagaggctgaggcaggagaatcgcttgaacccgggaggcggaggttgcagtgagccgagatgtgccattgcactccagcctggcgactgagcgagactccatctcaataaataaataaacaacaaataagtaaatgattaaaaatcagtcacttaaagacgtattctaagatgagaccccttgctctataaaactgaaggtcgtgtccactaagaagagtggatctgacctcagccctcactgtgacgccacattccattagggcagaggaacagcatctggcaagagaggtcgtccagaattctaaagaggcaggatggccctagtattcaaacttggaccacacagatctgcactctctcatcccagaaaggagaacccaaagtatgtgtctcggttcatgattctgaggatggggaattatggaaggcaccaagtccattcataaaacacaccaccccctccctgtcccggtaatgacagtgggtggtggcttgagcatcaaagtggcccatgatgtcttggttttgctactggttatgccatctggctttcttggtcttcgtccattcatttccctggagtcctggcctgctttgcttcttactaaccttatgcagaagccaaggcaagcgaggacgaggcatacttgagtattcccactggagtaacttctgcaactagaag

SEQ ID NO: 2921 - DNA, 98309 bp, Homo sapiens
gccatttgctgactagaggttatacgtgtactctgcattcccagaatgctcacactttttaactttgggacttacagctctcacctgaaccaaccaatcagaggtcatctgccttgacaatcagggctcaactgtattgactaatcagaacaaagcaagtttgaatccttcatttgctaaatggacctaattgggaactggggtgggaagttttgctataaaacctgggctttcccttgttctctggaaagcatcttcattttacatgcagggtgtgtcttcccagtttgcaaactttcactggaataagtatctttcctccaaattccttttctaagaaattttgttcacagtcatttttaagtgtctaacccatttttaattgagctgtgtgttctttatagacgtctattgatataaacttccatccattttatgtgtcacatatattttctttctttttatagtttgctttttactttcttagtggtgttttttgattaacacaatgtcttaaattttaatgtagttaatttattaatgttttcctttatggttaatgcttttttgtgtgcatcatttaataaatcttcctattctaaggtagtagttttttttttttttatgttatctttattgtcttacccttacagttagatttgccatccacctggaatttatttttgtgaatgctgtggggtagtgttcatgaaaggaccgtataggtaaagtgacccccgattgttctgtgaaagggctggatatgcaagtgacccacgaatgcaaaagaagccaataaaccaaagaatgaggcagacaaatctcgtggtgagtaagggatggtttattagagaactcatgtacagaagcctagtcttaggtggcgcgagacaggtagatttcccaactgttactccctaaaatcagagcttatataccataggaaagagtgtatgtgttccgtaaagacaatgaaaggcaaatcagagcttatataccataggaaagagtgtatgtgttccgtaaagacaatgaaaggcaaatcagagcttatataccataggaaagagtgtatgtgttccgtaaagacgatgaaaggcaaatcagagcttatataccatgggaaagagtgtatgtgatccgtaaagacaatgaaaggcaaatcagagcttatataccaagggaaagagtgtatgtgttccgtaaagacaatgaaaggcaaatcagagcttatatacctagggaaagagtgtatgtgttccgtaaagacaatgaaaggcaaatcagagcttatatacatagggaaagagtgtatgtgatccataaagacaatgaaaggcaaccctgtggaacaggaagaatgctgtgtgtgtcatagcctataatttgtatgacaatatcaaagttgctttgattaaagccaggatttatagtgagtacatgttctcacactaaggacagtaaataaaataggatcaggaggcattcatgggactggggttaatcagaagtcaacatggtgtattagcatccagatggagtcacgtttttcttcacaggtacggtttggattttaatttttttctttctttttttttgagacggagtcttgctctgtcacctaggctggagtgtagtggcgcaatctctgccactgtaacctctgcctctagggttcaagcgattctcctgcctcagcctccccagctggattacgagcacctgccatcatgcctgctaatttttgtatttttgtagagacggggtttcccacgttggccaggctggtctcgaactccttgccccaggtgatttgtccaccttggcctccaaagtgctgggattacaggcgtgagccactgtgcccagccggattttaattttttcttggatattcaactgacccaacatcattcatttaaaaaatcttaattatatctttattataatcaaatatccatccatgggtctatttctggcctccattttgttccattggccttatctcctcctggcacacctcatcatattaatcaatatagctttataatgaaccttgatatctgtaggggaagtcttctcattttgttcttctttaaaatactcttggctacttttgggttttgcatttccatatacattttaggatagatggatggatagtaatttttattgcaatttcatgcacccatagatcaatttgtagtcttccaattcatgaacctgatatatttcttcaacttatagatctttcatttttctcattaatattttatcgttttctgggtagaggccttacactcttttgttatattcttttttccaagtatttcatgacttttgatgctgttgtaatggtacttttaaatttatttaaaaaactttttgttgctggtatatagaaatatgattactctttatattaaccttatatccagtaattttactaaattcacttattaatcctactaactatcctagatacttttggatttttctataattgtacataatcatatcgacggtgaataaagacattttagttgttctttttcaatccttacccttttaatttctgtttcttactttatttcacggaagctccagtacattgccaaatggaagtaataataacgaacatcttttcctcattccaatcaccactcccacttcctgcctctgggtactcaagaaatgttaagtgctggccgggccagtggctcacgcctgtaatcccagcactttgagaggctgaggggggcggatcacttgagtcatgagtttgagaccagcctggccaacatggtgaaaacccatctctaccaaaaaataaaaaattagctgggcgtggtagcgcatgcctatagtcccagttactcagaaggctgagagggagaatcacttgaacccaggcggtggaagttgcagtaagctgagatcacgtgactgcctccctacctgggcaacagagtgagaccctgtctcaaaaaaaaaaataaaaataaaaaaaagcaaaaaacaaagaagaagaaatgtaaatgcaagtgcaccaccataccaccctctcactatccaagtcagctctgaggttatggaaatggggtttagcccttgtctggagattaaaaggcctcagtctcccctaagcataacctccctgggttcacacagctgaggagctcaaccattccctgttggcatcttggttgacgacagttctggagagaagggggagtaaagaggggaaatttctaggctgggctgtgtcacttgacctggtctagtgagacaggattctggaacccatccagttctggaggcatcctaaaatttgagagattattggggagtcctgtaatccaataagttcccctgctaatactttaaattcccccaagacagtaatacttaatcctgtaatcgtattaagtattgccttctccagatacttctctaaaaatgcaaatgcctttgaaagaggaagaaataaagtcagtgttacatagtgtgcaagtgtcaaacagttgctataataccagcacacacatgcacatacatgcataaacatacactgtatggcatgttcaccgaactgccctctctcattccagaaagacattggggaaatgtcccaggcaaagaaaagaaatgtcctttagtggttgtgcacatgggctctggagctagactgcctgaattcactgtctgcttcgccataccagcttattaatctatgagaagctactcaacatctcagggactcagcttccttctcttaaaatagaaataacaatactatctatctaattggcacatgataagctctcactaaatatgttgttattagacaatattaactccctgcctcccatgcctatgtttgatgcaaaccaatttacaaatagcaatagccaacttagactgccactgctttctaaggtctattcaatggcatcttcattcagcactgtgatggtcagttataatgtgtcaatttgaccggtccatgggggcccaggcatttcatcaaacattattctggacacttctatgagggtttcttggatgagataacatttaaattggtagactttgagtaaagcagattgccctccctgatgtgggtgggctaatccaatcaactgaaggcctgaatgggacaataggctgactttcttctgtgtaagaggaattcctcctgcctcactgccttcaaactcagctttcccctgcctttagacttgaactaaacgttggctcttcctggatctcaagcctgctggcctttcgactaaaagtacaccattactctcctggttcttaggctttcagattcagagtgaggctacaccaccagctctcctggtctccagcttgccaactgcagatcttgggacttgttagccttcataattccatgagccgttccttgtaatcaatctcttctgtccatatacatatgctgttagttttgtttctctggaaactccaatacaagaaacaccatcacttacaccactcgtctcctttgcttctttcaacaaagaaacagtcataacctcctttggctgaccaaggaataggaggccaggaatctttctgaggacatccctttaggcctgaagaaactacaaagatgacttcaatgagaagatattggatggtcagagtcaagttattggcctctgaatctccttctttggttaccgtctagggattaaggtcagggcaactgaccaggtcaagaagagggtgataagctgcaggacacttcgggcaactggcttcactctgttccttagacgcatctggctcatctctacgtcagtgctgtatggtcagcattctttgtcacaaggaaaaggaagtgactcttgatggcttaagcaaaaggggaggggagtagaaattaagcacacattggagaggatactaagagacagaccagacctagggacactggatcccattaatttccagagggtcaagaagcaggcagcaggaaacagcatggcgattgtatacttccaaaaatagctacagcaatatttccagtcccataagctcttccagatctttccacctcttatgatgagttgcagtctattggaactgggaggagctgccttgatgatagaatgtggcagaaacaacactaggtgacttccaacacaaggccataaaggcgagatgctttcctctggtgctccttctctctggatatgcttggccttgcaacccagctaccatgtgtgaggaagcccaggccatgtggaggggtcatgggtaggtgttctagctgacagccacgcttagggctcagccaacagccagcgtcaaccaccagcaaggtgagtaaatgagctttcgatgattccagcctccagtctttgagccaccccagctgttgctgagttgaccagagatgcttgtccccaccaagccccacccaaattgcagattcaagaacaaactgtcattattattttatttattttatttatttatttttttgagacggagtttcattcttgttgcccaggctgagtgcaatggtgtgatctcggctcaccacaacctccacctcccgggttcaagtgattctctgcctcagcctcccgagtagctgggattacaggcatgtgccaccactcccggctaatttgtatttttagtggagatgggatttctccatgttggtcaggctggtctggaactcctatctcaggtgatccgcccaccttggcatctcaaagtgctgggattacaggcatgagccacctgcctggccaataactatcattattttaaggcttaagttatcatttgcttgttacccagaattggtaactggaatacagcaactgtatcagcagaaatcacctggttagaagactgccagggcactaccaccaccaccacctttagtgccttctgaagcttctctccattctgatctttaagatccaagttccaggagggagcatatgcaccatctgagtcaaggcacccactgtggctgtactgagggcaggctgcagaaagatctgtcttcctcagcctaaggaagagaaagggcagtgggagatgggagccacgggtcaccctccccacaagactttgtgggaaaagtgatccccataagtgttattgaaaaggccccaaactgatgcatgtggcctctgcctgaaacacgttctctccgtctttgcacagctggctctgcatgtgcagtaaagcatagcagcggagagacagtctctgctggcctgagctcaaatatcaggtctgcatcttatgtgcttgcaattgttataaagtggcttcatttctctgtgcctcagtttcctcatttggaaagaggaaagaatatagcacctactttcttacgttactatgaaaattaaataaataggtgtaaggcacctgaacagttcctggcaggtaggaagcacgttaactaagttaaattttaatcattatttttatttaattattaacatttcagctcaaacgtcacttcctcagagagtctttctctggtacctcatccaaagtagggctatcttggctgggtgcagtggctcaggcctgtaatcccagcacttgggaggctgaggcaggcagatcatctgaggtcaggagtttgagaccagcctggccaatgggtgaaaccctgtctctactaaaagaaaaaaagaaaaacaaacaaacaaacaaacaaacctagccaggtgtggtggtgtgtgcctgtacccctagctattcgggaggctgaggcaggaaattgcttgaacccaggaggtggaggttgcagtgaagtaagattgcaccactgcactccgcctgggcaatagaggaagattctgtctaaaataaataaataaaaaacataaataaataagtaaggctatagggctatcttaactccaccactcagggagaggtggctgtcacttttacttctttttggcacttattcactaaatttaattagcttatttattcacgaatttgtctattgtttacttgtatttctcactgtatttttcatatcttttcaaatgtgatgaacacctgctccaccagctagaggataatctctgtgagcacgagcctaggcaacctatcatgtcactctctgttcttggggtttgacagaatgtaggtgggggacatggagacacatggctcagaacccctcaatggagggctcattcctcaaactgctgtgagtgctgcaggcagatgacccttgctgtcagctgctccagggctggcccctgctgtagagagctgtcttagccaaggtcatgcccttcctgggtgaatcgctaacaaaggcaggcataggaaagcccagccatcttggcccaactggacaactcagataggccattctagctccagagctgcctggggtcaggacaggcttctctgggcctgcaccatggttcgattccttcctctgcacactcatgctcccccactccttccatgggtgttgaaccctagatcactgttagatcaacatcctgcatcctaaactccactcagaatcagctttctaggaactcagcctgcaacagccgagctcgaggcatacagatactggcatttgctggaaggatgtgtctggagccatcacaaggggaaatggatctgggacagtggagcctccctgcgggaaggagcatctttatacgtggagtggcagatggcctcctgtccagggaagatgcttacagtgttcctttcacttgtggcagatgcataataggagaaaggacccgcatgatgagaggagggatccctggtcagtcgctccataaggattgggctatgaagcagattctcacagagtgacagagctaaaaaatccaggggggtcaccatgcttctcaaaatttctacccaagtgtctcaaagggaaaggaaggtgagcgcagatccctggctcaaggaaggctgtcttcacccagtgaccagggatatggggaaactcagatgagaatggaaatccaagctaaggccagatccatctgggacctgagtgagttcaggggtcagccagagcctgaataggtctcagtgtaggctcagagctcagtcttggatcagagctctgtttgaggttcgggctagtctggggtcagggttcacttaggattggagctcagtcatctgaggttggcatgagactcagtctggggtcggtactgtctggtactggaccaggactccacgtggagcccaagcttgtctagagccagagtcaagccaggatttagctatggtaggatccagggcttagtgtgagccaaggtctggggcccatctggcatcagggtcatgacctagttagcctctgagtcacgccgtctttggggtcacgagcacaagctggagcctcatcctagtttcagtccgaggcttgtaagggcttggccttggctcaggtttaggctcgatgctagggcaaggtgtagcctggtgcagagctcagtcctggagcaagattggaagcaatgtgttgtcctacggcaaggtcagtcactacaacctgtgggccaaacttggcctgccacctgtttttgtaagtaaaactttattgaacacatccaggctcatttgtttatgcactaagtatggcagttttcatgctatagcagcgagttgagtagttgtaacagagactctatggcctgcaaagcctgaaatatttactatctgtcattggcagaaaagtttgccaacctctgttctaaaggtttggaggcccctctggtattgaaagctcagatccctgacctaacttggtgtcaagggccttcatgaagtttcagataggtttaagagacagggggactcaatggaagcaggagtcctgagactcagtaaagccctgtgctggtgtccttctgagtgtcccatggccagccaattctaaggcttttctcagtcttgactacctgttctgcccttcctgtgttaagcgcatggtcagggtcttgccctaccagctgaaggaattccctacctgcacatttttctttgtaatttccaaaaccacattcccactcacatctcccttggacttctaagctgtcttctgtcaatttctctacctctcccactcacaagcgggctttctcattggctgttggggcggcttctgctttccactggggctggaataaccaggaggccacttttgtcccattaaaatgctactcgaaggcaccaagggcaagagcgttgtatggaaacagagctatgtggcaggtggccctcaccaccttcagctacattcccctccctaacacctacaaggggacttcaaaaggttcatggaaaagtaacattaaaacataaacataaaagtagaaactttatttctcaacatgagctctgtcaagttcaagatatttttgtaaatataatacctgccatttagtctattcctaagtaactgagggtccaggggatttaaccatgtaacacagtcttttttttttttttaacacaattaactgaagaaaaacgggcaccctttaagattttgtttttaagattaggaaacaggctgggcccagtggctcatgcctgtaatcccacactttggaaggctgaggcaggaggatcgcttgaggtcaggagtttgagacgcacctgacaacatggtgaaatcccatctctactaaaaatgcaaaaattagccgggcgtggtggcaccgcttgtaatcccagctactcaggaggctgaggcgggagaatcgcttgaacccgggaggagaggttgaggtgagctgagatcgcgccactgcactccagcctgggcggcagagcaagatctgtctcaaaaaaaaaaaaaaaaaagagattaggaaataaaaagaagtcagatggagcaaatcaggacagtatggtggatgcttaatgaattccagtcaaccctctcacaaaattgctttgtttgatgagaggaatgagcaggaacattattgtggtggagaaggactctctggtgagcttttctgggttttttttctgaaagcttcagctaactttatcaaaacactcgtaatagcaggtgttgttactctttggttctccagaaaaccgacaagcaaaatgtcttgagcatccaaaaaacagtttctacaagctttgcacctgaccggtccacttttttttttttttttgaacagagtcttgctccgttgcccgggctggagtgcagtggtgcaatctcggttcactgcaccttcacctcctgggttcaagtgattctcctgccttagtcttccgagtagctgggattaaggcacacaccacaacacctggctaatgtttgtatttttagtagagatggggttcacctgccaggcaggtcttgatctcctgacctcaagtgatccgcccacctcgacctcccaaagtctgggattacaggtgtgagccaccgcgcctggccggctggtccactgttgctttgactgaccatttccccctcttggtagccattgcttcgattgtgctttgtctttaggactgtattgtaaagccatgttccatcctgttacaattctttgaagaaatgcttcgggatcttgatccttgtttacaatttccacggaaagctctgctcttgtttgcagctgatctgggggcaacagtttggcacccattgaatgaaacattttctcaactttaattgttcggtcagaattgtgtagttgagccctgtgaggtgtttgctgttgtttgtgctgttagtcactggccctcttcagattggggctgcagattttagaggaatgcaatccagtttgggcccttcctttatcttcttagattatcctaggcagcaatcgcccctcagatcctgggcctgtgtcttcactgagggaaatctccctttgcttaaaatctaatgctttttaggatcgggacttaggaggtataaatggccacacatgggcctccactctgcctctagctcaccctgtggcctctgtaagtttccttctctctgtaatgggagtgttgagggatggttaggttccagctctgatacttttggattctcgtcaggactgtggggaggatccttggctcttgatgtggccagggcatttgaaaagcaagagagtccaagggtcagccagggtgacagcgaggtggcagggtggaagatggcagagctggtgggccagggtttctctgatgctcgggtctgtcaacctcccagccatggggatgagagtgaaggttggagaggctccctcggttcttacatcatctatggttgtccaaaagtttaagattactgagtgcaacacttcattttacagaagagtaaactgaggcccaggaggagaaggacttgcctaagtttacaaagtagggcagaggttgaggcaggattaactgaggcctcctgctcccatgtggaagagacaaagaatgggcaggaggaggacaggggccaaatccaccccttcagtccctcatgatccatcacttggcagtggccacatggacgatcacaaagcccttgagtccgggaagtgagggcttacaaggtccacctgcagctgccttgggccacttttggaggggtgatgtcaaactggactgaggccctctcctgaggctccagggtaggcacgctggaggaagggaggggagaaaggcagactgtcagtcctcttgccattctgagtctggcctgccaaccacggctccccaggctcctcaggatcaagttcaccttgtggcttgacattcaagcctttcaacatgtttgcaggccaggtgcggtggctcactcctgtaatcccagcacactgggagctgaggcaggtggatcatctgaggtcaggagttcgagaccagcctggccaacgtggtgaacctcatctctactaaaatacaaaaattagccgggtgcagtggtgcacacctgtaatccagctactcaggaagctgagacaggagaatcgcttgaacctgggagggagaggttgcagtagccaagactgcaccactgcactccagctggggcaacagagtgagactctgtctcaaaacaaacaaacaaaaacaacaaccaaaaaaacatatttccaatttaattttctcttctacccccacactcttcccatctagccaggctagttttctgtctgtgccctgaacttccccccttgggctttcatctgctctgttccacctaggatgcctttcttattccaatccacccaaggccaaatcaagttctctttttccaggagaccttccctgacaacaccagccatcaggtgttacaccaagacctttgcctggcaaaccgtccttacttcttgatacctgaaaatctcaattatcatttaaggctcagctcaaacaccagctccactgggacttcttcctggccccaccctacttaagggctgcttttgctcccccagaccttggacaagatctttttcacaaatcacacgtcctcatgtgaagggccatctgtatctgagagcccttctccaggcaaaactgtttctgccatcttagtgttcctaacaattacacatgggccagagtacaggtcagtataatcaaggccacatgagttgcaagtggatgaatggaagaatgaaggagtgaatgaatgattgacaataataagtaaataaacgaatccatgaacaaatgggaacatgtgtgaatgaatgagtgaagataaatgtaggaataagtgaatgaaaaaatgaacaaatgagtgaataaagagtaagcaattgaagaatgcatgaatgaatgagtgaaagagagcaaatgaatgaaagtgagtgaataatggataaataaatgaaagtatgaatgaatgatatgagtgaatgactgagtgaatgagtttatgatttgagtaaatgaatgattggatgaatgaaggaataaataagtgaatgaaggctatatgtatagtctgtgggctggttcctggggtgtccagaatctctctcacacccccatcctggcaacttctctctggctcatccacaaggaagagagccccattccctgccagcccccaggctggcacttactcgatgctgagctgttcctggagaaggccgctgccctccaccatcgcgcacagtccttcactctctctatgagggggttgactactgtcacttccactgtaactccactcccaccatggctgggcccagaacctgaaggggacaacacccatgagccatcgcgctacccctcctccctccaggaaaccgatggtcctggctgagttagaggatggatcattatcatgtccacccccacctccatataccccattgctgagtgccactattgcacccatcccttatgtccaacccactcctcccaccctggagagctaaagctggagttaaaggcacaaaccccccagcttctgacgccctcccccagctctggggagtgggtgccactaggaacagcatgtagatgcaggctgaggtcaccttgatggtgatgaagtcctctagagtaatgtccttctcaccagaagcttctctcctttggtgacaaggcacatggcagccaacaggatcttcttgtctctgtcaggtcttctttatacttagagtaagatattgtaattgggattctcttctctgaagggaaagcagaagtgggagttggggcttgatgtctttcttcaatggcactgggaagaggaagggaatgcacaactaatagctcctttctctctggtccttgcaaccattctgagacggctttattttcctcggttctcagatgaagaaacctaaggcccagagtgggtattttccgttcaaactcatataggaagtaaaccaagaaattaagatgaggtgggagtcaaatttagtcagggagctaccacaataccagataatttctccaagagcccccagagatgtttccaagtttccctacttattcaagatgaaaatctctcagcccatcatccattcatcccatccttcctgtttattgagcacctactatgtgctaggagcagagaagaggaagaccaaaggcatgctcaatcttccaatcctgtgaggccaattccctacaacttttccaaatgcccccctccataaggcccagtcctggtcagccccaccaactgagggaagtcttcactgacacctcctcccgtgctctcatgctctctgagctcctgtggtcctggccatctctgtctccctctcaccagcagaaacatccttcctaggtgttcttttcttgtaagcatggatcaccataaacctcagttttttttttttttggagacggagtctcgctctgtcgcgaggctggagtgcagtggcatgtctcggctcactgcaacctccacctcctgggttcaagcaattctcctgcctcagcctctgagtagctgggactacaggcacatgccaccatgcccagctaatttttgtattcttagtaagatggggtttcaccatgttcgccaggatggtctcgatcttttgacctcatgatcctctgccttggcctcctaaagtgctgggattacaggtgtgagccaccatgcctggaccatattgttttttttttttttctgactactatatattctttcttttaggttcaatgtgctctttcggtttgctcccaggccctctcattccctattgttctactcccactgcttcctttatttcgttttctttctgactctgaaggcatctgagtttttaactcatggaaaaggtccttaaaggctcaacttggctcatgcgctctgctaccccagggctttgcatatcgtagattctcctgatgccagtagggtgattcatgtgttaaagtatgattttgttttatgggctcccttagttagtaggtcattattggaagaacctttattacaataacagtaataaataataattataggcgggtgccgtggctcacgcctgtaatcccagcactttgggaggtgaaggcgggtggatccctgaggtcaggagttcaagaccagcctgaccaacatgttgaaaccctgtctctactaaaaaaattacaaaattagcagggcgtggtgttgtgcctataatcccagctacttgggaggtgaggcaggagaattacttgaacctagcaggcggaggttgcagtgagctgagattgcgcactgcactccagcctgagcgacagagagagactctatctcaaaataacaataataattaaattataaaagctaagttttactaagggattaaagtgtactgcacttggaagcgctttccagattgacttatttaatccttacaacaattccatgagcgggtattattatttttatttattgattgatttattatgttattgataatatattattattgataataatatcaaaaacatgataataaacataaattgaatgctcattaggtagtaagaatgatgccaaatactttattacattatatcatttactccttgcatggtgatagaccacggttctccaagtgtggtcctggaccagcagcatcagcgtcacctgggaacttgttagagatgtaaattctcagtctccacatgaagaaccatcatatgccaccatatgatacacatgagcagagctttgggcatcagccagatcctgggagaaaggaggagaaaagtagccctttaaaatgtttgcatcagggcttttgaagttctctgactcatagacaccactaacaatctaataaaagctgagacccctttcctagaacaatggttctcaatagcaccgtcactcagctgggctaactgacatctgcagaattttcatccaacaacagcaggatacgcattcttctcaatcttacacggagcactcaccaaaaggatcacattctgtggcataaatgacacattaacaagtttaaaataatagaaattatcaatatatgcccccagaacacaatgaaatcaaactggaaatcaatgacagaaagacagcgaaaaatctaaaatacctagggattaaacaacacacttctagaagaacacatgggacaagaagaagtcttaagagaaatttaaaagtatttcgaagtaaatgaaaatgaaactacaactatcaaaatttgtgggcacgtgcctgtagtctcagctacttgggaggctgaggagggagatcacctgagcctgggaagttgaggctacagtgagccatgattgtgccactgcactccacctgggtgacagaacgagactctgtctgaaaagcaaaacaaaacaaacaaacaaacaccctcccccaacacacaaacttgtaggttgcagcaaaagcagtgcttagagagaagtctatatattcaatacatatgatagaaaagaagaaggatctaaatccaataatctaaacttctgtttaggaaactataaaaaggagaacacgttaaactcatcttaagcagaagaaaagaaatataaaaattagagcagaaatcagtaaaattgaaaatcagagatcaatagagaaaatcacaaaaccaaaagctggttctttgaaaagatcagtaaagtcaataagcctctagcaaggctactcagaaaaaaaagagagaaggcacaagttactaatatgataaatgcaagagaggacactctacagattccatggacattaaaaggatagtaaaggtaacaagtttggggagttaggaaaaaacagagagtaaaggaatattatgaacaactttatgcccacaggtttgataatccgataaaagggaccagttcttgaaagaaaaaaatctgctaaaattcacataagaagaaacgacaacatgaataggcctatatctactaaaaaatggaatcagtacttaataaccttccaaccagaacacattaatcccagatgggttcactggtgaattataccaagaatttaagaaaaaaaattatagcaattctctacaatctcttccagaaaatggaagcagagaaatacttccgattcattctatgaggccagcattaccttaatgccaaaaaccagacaaagacattgcaaaaaaacaaaactacagaccaatatgaacatagatgcaaaaattcccacaaaatattggtaattgaattaacaatgtataaaaaattacatgctatgatcaagtgggatttattctaggatgtaaggctgggtcaatattaaaggtcaattaatatagtccatcagatcaacaggaaaaataacatgatcatatcaatagatgcagaaaaagaatttgataaaatccaacacccattctgataaagctctcagcaaactaggaatagaggaggaatttactcaacttgataaagaaatctacaaaaaacctacagcaaacattgtccttattggtgacaaactggaagctttccctgatgattaggaacaaggcaaggatgtcccctcttactattccttttcaacatcatattgaagtctttgctaatgcaataagataaaacaaggaaataaaatgtatacagattgggaagaagaaataaaacagtctttgttcacaaatgatataattgtttatgtagaaaatccaaagaattgtcaacaacaacaaacaaaaaatcctggaacttatgagtggtaatagcaaggttcagggtataagattactaatatacagaagtcaatcattttcctatataccagcaatgaaaattggaaattaaaattaaaaacataataccacttatgttagcaccaccaaaaatggaaacttaggcattaatttaacaaaatatgtacaagatctacacaagaagaactgtaaaacttgatgaaagaaatcaaaaaactaaataaatggagagatattccatgttcatggatagaaggctcaatattgtcaaaatgtcaatttttcctagcttgatctatagattcaatgcaatcgaagaagttattttgtggatattgacaaactgattccaaactttatgtgtgggtgggagcaggaatgaagagaagttggataatgggtacaagatagttagaaagaataagttctaattttcataacacagtagggaaattatagttaataatgatttatggtacctttctaaatagtagaataaattgtatagtttcgaacacgaagaaaagatacagataaatgtataaggtgaggatatcccaattaccctgattcgattgttacacattctatacatgtatcaaaatatgttacccacaaaatatgtattactaatatatatcaattaagatttttttaaagagccatgaataaaaaagtttatgtcaagaggcaaaagacccagagtagtcagtacaattgtacaatttacattattgaaggagaggaacaaagttagaggactggcactacctgacttcaggtaccttaagatttactataaaggtacagtcatcaagacagtgtggtattagtgaaagaatggaaaagacaggcataccttattttactgtgcttcattttattgtactttgcagatattgcatttttacaaattgaagttttgtggcaaccctgagtcaggcaactctataagagccattttccaagagcatgtgtttgcttctatgatcagtgatctttttttttttttctttaagacaggtcttgctctgtcacccaggctgtaagtgcagtggtgtgatcatagctcactgcaaactccagctcttgggctcaagcaatcctcctgcctcagcctccaggtagctaggactatggagcatgccaccacacccagcaggtattttttattttaattttttgtagagatggggtatgctgtgttgcccaagctggtctcaaactcctaggttcaagcagttctctcactttggccccaaaagtgaatgggattgggattacatatatgagcccctgtgcccagcccttgatcaggatctttgaggctactattgtaactgtttgttagcaccacaaaccatgccctgtaagatttgaacttaattaaaaaatgtcatgtgagttctgactgctccaccgactggccatttcctatctctctccctgtccttgggccttcctattcccggatacacaataatattgaaattagccaattaataaacctacaatggcctctaggtgttcaagttaatgagagttacatgtcttcactttaagtcaaaagctagaaatgattaagcttagtgaggaaggcacatagaaagccagatgggccaaaagctaggcctcttgtgccaaacagcaaggttttgaatgcaaagggaagttcttgaaggaaattaaaagtgctactcttgaaggaaactaaaagtgacataggaatgtaagaaagcaaaatagccttattgctaatatggagaaagttttagtgatctccatataaatcacaccagccataacattccattaagccaaagcctaatccagagcaaggccctgatttcttcaattctataaggattgagagacgttaggaagctacagaagacaagtttgaagctgcacaggttggttcataaggtttaaggaaagacgccatctctataacataaaagtgcaactgaagcaacaagtgctgatgtagaagcaacagcaagttatgcagagactctagctaagtcattggtgaagatggctacataaaacaacacattttcaatgtagaaaaaatagctttaattggaagaagatgccatctaggactttcatagcgggacagaagtcaatgcctggcttcaagtttcaaaggagaggctgactctgtgcattaaggagctaatgcagctggtgactttagttgaagccaatgctcatttaaatttctaaatcctagggcccttaagaattatgctaaactactatgcctgtggtccataaaggaacaacgaagccaggatgatagcacatctgtttaagcatggtttactgaatattttaggccaactgttgagacctactgatcagaaaagaagatcttgtcaaagtattactgctcattgacaatgcacctagtcactcaagaactctgatggggtgtacaatgagattaatgttattttcatgcctgttaacattcattctgcagaccatgatcaatgagtaattttaactttcaagtctttttatttaagaaatacatttcataaagcctagctgccatagatagtgattcctctaatggatctgggcaaagtcaattgaaaaccttcggaaaagattcaccattctagacaccattaagtatattcatgattcatgggaggaggtaaaatatcaacattaataggagttggaaagaagttgattccaactcttatggatgactttaggcattcaagatttcaatgcaggaagtcactgatgatgtggtggaaacagcaagagaatagagtgcagcctaaagatgtgactgaattgctccatctgatggtaaaacttgaacagagaagagttgcttcttatgtgtgagcaaagaaagtgtttttcaaagatggaaactactccggtgaagatgctctaaacgttgttgaaatggcaacaaaagattttgaatattacataaattagttgataaagcagtggcagggtttgagaggattgactccaagtttgaaagaggttcactgtgagtaaaatgctatcgaacaccatcgcatactacagagaaatccttcgtgaaagaagaaagtcattcaatgtggcgaatttcgttgttgtcttattttaagaaattgccacaacaccccaacctttggcaaccactaccctggtcaggtagtagtgttgcgatggtgtttgaagcattttactcacagtagaacttctttcaaacttggagtcaatcctgtcaaaccctgcactgctttatcaactaaggtagcagccatcaacattgaggcaagaccttccaccagcaaaagattatgactcagtgaaggttcagatggttaactttttttttttttttttgagaaaggtctccctttgttacccaggctggagtgcagtggcaggatctcagctcactgcagccttaactcccgggctcaagtgatcctcccacctcacttttgagtagctgagacaacaggtgttaccaccatgcctggctaattttttttgttttcttcctttatttattttttttgtagagtggggtttcaccatgttgcccaggttggtcttgagctcttgagctcaagtgatccttctcctcagcctcccaaagtgctgggattacaggtatgcaccgcctgtgcctggccccgattttagcattttatagccgtaaagtattttaaaattaaggtgtatatattttttaaaagaataatgctattgcacgctttatagactacagtataatgtaaatataacttttatatgcacgggaaaccaaaacatttgtgtgacttgctttattgcaatattcctactattgtggttgttggaaccaaacctgcaatatgtctgaggtatgcctctagatcaatggaatagaagagagtcagaaatagacctgcacaaacatagtcagttgatctttgacaaagtagcaaaggaaatcaatggagaaaagatagtcaacaaatggtgctgaagcaactggatatccacacggggaaaacaatctagacacaggccttacattctttacaaaatgtactaaactgaatcattgaccaaatgtaaaatgcaaaactacagaactcttaaagataacatgggagaaaatctagatgactgagattggtaatatatatatatttttttgagatggagtcttgctctatcgcccaggcggagtgcactggtgtgattttggctcactgcaacctccgcctcccgggttcaagcgatttcctgcctcagcctcccgagtagctgggattacaggcacccaccaccacgcccagctacttttgtgtttttagtagagatgaggtttcaccatgttgaccaggctggtctcaaactccgatctcaagtgatccacctgcttcagcctcccaaagtgctgggattacagccgtgagccccacatccagccggtaattttttttgatacaataccaaaggcatgatccatgaaagaaaaattgataagttggactttattaaaactaaaaactctgcactgcagaaaacactgtgaaagactgggaagagaggacacagcctgggagaaaatgtttgcaaaagacatccgataaaaactgttatccaaaatacacaaagaccttttaaaaaccagcaatgagaaaatgaacaaccgattaaaatatgggcaaaagacctggacacctcaccaaagaagagatagagatgtcaaaaagtatatgaaaagatgctcaatgtcatatgtcattagtgaatagtaaactctgatatatattacacacctattacaatgtcagtaatccaaaacacacaataccatctgctggatagatagggaacaacaggaatgctcatatattcctggtgggaattcaaaatgatacagccacttggaagacagtttgtcagtttcttaccaaaacatactcttaccataaggtgcagcaaggtgctccttggtatttatctaaagaatttaaaattcgagccgggcacggcggctcatgctgtaatcccagcactttgggaggccgaggcaggtggatcacgaggtcaggagatcaagacatcctggccaacatggtgaaaccctgtctttactaaaaatacaaaaattaactaggtgagtcgtgtgtgcccgtaatcccagctactcgagaggctgaggcaggagaatcacttgaaccgggaggcggaggttgcagtgagccaaaatcacaccactgcactctagcctggtgacgagcgagactctgtctcaaaaaataaaaaaaaaaaattaaaaactcaagcccacacaaaacctgcataaggatgtttacagcagctttattcataattgccaaaactcggaatcaaccagaagtccttcagtaggtgaatggataaactgtattccatataatggaatactattttgcataagaagaaatgacccatcaagacacaaaaaccgtaagggatccttaaatacatattgtaagtgaaagaagccaatctgaaaaagcttaattacactgtatgatttcaactagatgaatcatgaaacaggcaaaagtgtggagacagtaaaaagatcagtggtcactgggggttcagcaagggaaggagggatgaataggtggagcacatagctggaacatggggatattggagggtgaaactattctgtatgacagtggaatgttagatacatgtcattatacatttgtcaaagccatagaatgcacaacacagagtgaaccctaatattaactatgaattttagttaataaactgtgccaatattggctcattaattgtaacaaatgtaccacactaaagcaagatgttataacaggaggagaggcgtggtggtggacaggggtatgggaactctctgtacttcccactaaagttttctgaaaacctaaaactacttaaaaacctaataatttaataaattatatgtttaatagtctatcatttggccaaagaatttcacttttttttttgtttgtttttttagacagagtctctctctgttgcccaggctggagtgcagtggcgcgatctcggctcactgcaagcctgcctcctgggttcacgcctttctcctgcctcagcctcctgagtagctgggactacagcgcatgccgccacgcccggctaatttttttgtatttttagtagagatggggtttcactggttagctaggatggtctccatctcctgacctcgtgatccacctgcctcggcctcccaaatgctgggattacaggcgtgagccactgcgcctggcccaagaatttcacttttgtgatacgtctaacaaaagtccaaaatccagaggaaaaaaagtgatttctttttgcatcaaaatgtcacttgcttacctgacactctgtagataaacaaaagtttagtgttatttttaatagcaaaagctgataactacctaaaagaaaacataggtcaccatatatttatttaaagatctgttaattctatttatttaaatatctattaaaatgatgtttgtgaggagcttataaaaatattaaaatacaatgcaatatgaaaagagcagggcattaatgactatttgcaatatttaaccaaactgtttttcaaaaagcaaacaggcattaaggatttggaagtaaaatacattaacagttgtaggtgggtggtagaatcataggtgatttttctcttttgctttccaaatttttatgatatgtattacttttaatatgaaaaaaattgctgaaagccagagggaagtgtgtgttaataaaattttatgatgaagtgttattttgtgatttagactttgtgaaaaataaatgacaaaaaagctaaaaaagtgtgacacctccttcatacattttcacaccctgcgaaaatccacaacttcacttaccagaaactggcccagagcaacaatttctttgtttaattgaatccttagattcagaaagtatgtgaaaggagagagaggcaaaggagagatagagatacagagatagacgagagagatagagagacagatgaaaaagccaaagggacagagacagagagacagacaggaaggagagacagatggagagggagataccggcaaaaagacagacagacagactaggaaaaagtgcaagaataatcaaagaggatacatttaataaatcatccacgaagtgctatgtgtcaaggatcacgaaaaaatcctttaacctccgcttcctgggttcaagtgagtctcctgcccagcctcctgagtagctgggactacaggcgtgtgccaccatgcccggctaattttcttgatttttagtagagatggggtttcaccgtgttagccaggatggtttcgatctcctgacctgtgatccacccgccttggcctcccaaaatgctaggattacaggcgtgagccaccgcgccggcctcaatatatttttaaagaaacagttggaataaggtcagttaaaaaaatacaaaaactttaaaaagactgaaaccattctcttctgctatgaaatactaaggataaattttaggcaatgtaccattaggtgtgttgagcatatctggtgtgggctgacctgaccattccataactgcagtcaagcaattgcatcagctgagtaaatgtgcactgtggtcaacgttcctggcttgaaccctggctttgccccttcctggtcttggtcaggagtgtgtctctcatgccagactgctggatttgggtcctgcaactatgcacactgactgtgtgactctgaactcgtgacttcactttcttggtgtgagttttctcctttcaaagatggagctagcactagtaccacacacaagtggctggagggattgtgccgtcgcatgcagaattcttgggacaggacttggcacatttagcacttagtaaacatctctggcctggtgccgtggcttaagcctgtcatcccagcacttgggaggccaaggcgggcagatcactcgagtccagcctgggcaacatcatgaaacccccttctactaaaaatacaaaaattatctgggtgtggtggtgcacgcctgtagtcccagctaccaggaggttgaggcaagagaagcccttgaacccgggaggtggaggttgcagtgagctaaatcacaccacttcactccagcctgggtgacagagtgagactctgtctcaaaaaaacccgaaaccaaaacaaagaaaaccatctgttaccagtccagccctctcccacagaacacctgggccaaatgggctccagatttttttggattttagaaaagtaatgcatggcatattccataatgctgaaatacccccagcatgtatttatttggtgtgtaaatattcattctaattaaaaaatagaaactataaatcacatcttcatcagattgccaccagatgcatgtggacttgcatactgttattagtgttttgcccctccgagtctcagttttctcatctgtaaagtcgggacagaggcaaggcactgagcacaatgctcaggaatgtccccttccttcctggggatgaatgcgtcctgggaaatccctctgacctccacaaccctcctgaaaaaggaggtggtttggcctgttccaccaagccagcgtacacttaccttcttgcggccccagcctcacggcgtgggattctgcaggatctctgccactggcttgcgggtatagaggatggtggcaccgctcaggttgacctcacccgctgggcccgggaggtgaggttggccaagcacagggccagtctcaggtcgtgcccagcatgggaggctctagcaccttgaacttgccagcgatgctgggcttggtggcaggtccaggaggtcgtcacgccagagacagcgacccccagccctgcggatccagattctcctccagaggcttccacgccgaacagcctgttcaccgccttgctgtacacctgcctctctttcgggaccctgcagggcatcacacaacgtcagcggcaggcacccccttgctcctttaattactatggctcatggaagtcaaactggcagttcaagagccatatgcacaccggcgccacagccttgtgtttgattctctatgtaaataaagttttaaatcagttgccaggaaatttcactaaaaatgcaaatttccagcttctctgagagctgggtcaaaagcctcagataataatgaagctagcacttttgcagatttgctatgtgtactatagcacttggtgctatatttttttttctaggaggtactacagaggtattatcatcacccacatttaacagacaaggaagccgagcacagggaagtaaagtaactcctcaatcacacagcttatgtggtaagtgagggagctggacttgaaccaggcagtaaagctccaaattccattcatgctcccttaccactctctacatgcaataatggtcttgaggcaggaggcgggacttgactcaggagctggggctcaaactcagactagattatagacgaatggaaacagggaggaggcaaaagcacttctctataagacatcccaccagtgctatggcaacacccagaacttactaccccttttcaaggcaatcacctggagttaccacccttttcctaaaaatttctgcataatctgccctttaatttgcatgtaattaaactgagtataaatatgattacagaactgtagggtataacaacttcattcttttgcattgggtatacagcggtcccaacaccatttattgaaaagactatttttattctttctccatgaattgtcttgacacccatgtagaaatcaattgaacataattttaagggcttctttttgactcttagttcaatttctttgatctatatgtcccttcttatgccaatgtcacactgtcgggtttctgtatatttgtagtactttttgtttgtctgtttgtttttgagacaggatctcatctgtcactcagagctgctatgctgggcatactgcctatggggtagccctggcccacaagagcagcacctttgctgttgctgcacactgctgctttaagaaaagttgctaacaccactgctcatccttgaattctttcctgggtgatgccaggaaccctcctgggctaagcctgcatccctacctcagtctagagttgagcaatagcagccccccctagagggaacgcactctcttttgtccatggtcttcaccctgtaattctcactcatggggttctatcggtggggctcctgagacatgtgagtttagggcccctgatacaccactttccccactgctagtgcagacctctttttgagctccagaacaatacaaagaactggacagcgccccccaggtgtctcacaggtgctcaaatccaaccaaacccaccaactgcgcagcagcattcctcatcccagccaatggtgagccatgagcccgggtgtacaagccagaagcctgggagtgttcttgactcttctctcactttatcactcacaacagagccctcaccaggtcctgctgagcatcctccttaggctctggatctgtcctcttctctcacctctcttcccccatcaaaccaccatacaaactgcctcacctgaggtcagtgtgtgaacttttattactgttttcattaatctgtcccggcaagctttagtttcctatctgtaaagtggggacaagaggcccacaagcaaggcactgagcaggataatcagaacatcccctcccttcctgggaatgtaggatccatcccattccagttctgtttccacctgatgattccaaagtccaattctgatggttctccttccctatttgaaacctgtggcattggtcttcacaccactctcccctgaaggtaccctgatactgtgtgaccctggtctgatccttggtggtcacttgatgttgctgtgaacaccaaggttctttaacattccatgttttatattaaaatgtatgtgagttctgctactgtacaatatatttttactatgaaaatgtttcattccctgccaaagaatgtaatgccaccttctcatggaggccttctctgaccacctgatttttaaacaactttattgagatataattccataacacacaattcacccattttaagagtgaattcaatgtttcttagtagttcacagaattgtgcaccccgtcaccacaatctaattttgaacgttttttcacccccccccccaaattctgtaaccatcaggagtcacttcccattccccccaccccaaccccagccctaggcaaccactaatataattcataatttgcctatcctgacatttcatataaagggaatcatacaacacgtggtcttttgtgaaatttttccgcttaaatcagttttcaaggttcgttcacactgtaggtagcatgtatcagtactgcgttccttttatttctgactagcattccattggatggatatacattttatttatctattgatgggtattgagctgtttctactttttatctattttaaatagtgtttctataaatattcatgtaaagttttgtgtgggtgtttgttttcatttctcttggaaatgtagctgggagtgcagttgccggtcatggtaacactatgtttaacattttgagaaactgtcaaagtgttttccaaagtggctcacaattgtaaatttccaccagcaatgtatgagtgtttcaatttctccacatcttcaccacactaattgtctatctttttgatgacggtagttctagtggatgtgaagtggtatctcatgtggttttgacatgcattttcctaatgacttaatgatgttaagcatctttttatgtgctattggccatttgtgtatggtccttggggaaatgttcattcacatcctttgccattttaaattggattatttatttatttctttattttgtagagatggagtcttgctatgttgcccagctggtcttgaactcctagcctcaagtactcctctcgccttggcctctcaaggtgctagatgggccaagcatggtggttcatgccttggactttcaggtgctctcaaaaaaaattatttttttttatggttgagttttaagagttacatatacatatatttcagatgagagtgcttttccattcaatacatgatttgcaaatattctctcctattccatgggctatctttccacttcctgatggtgctgtttgcaggacaagttcttaactttgataaagtccaattttttccttgttacttgtgcttttgatgtcgtttctgaaaaggcttggtctaaccgaagatcatgaagtttactcctatgttttcttccaaaagttttatagttttagctctcacatgtaagtctataaccattttgagaaatttttgtgtatcgtgtgagataggaggccaacttcattcttttttttcccttttttaaaaatttttcatgtaaccagtggggtataacaacttcattcttttgatgtggggatgtacagtggtcccaacaccatttgttgaaaagactattcttattctttcccattgaattgtcttgacacgcttgtagaatcaattgatcataattttaagggtttattttcaactctcagttcagtttctttgatctatatgtccattctcatgccagtatcacacttctgggttactgtatatctgttgtaatttttgtcttgtctgtttatttttgagacagaactcactctgtcacccagggtggagtacagtggtgcaatcatggctcattgcaacctcaactcccaggctcaagcaattctcccacctcagcctcctgagtagctggtagccatgccacacactcagctaatttttaaaagtttttgtagagatgaagtcgtccatgttgcccagctgcctgaagggagatttcctgaactgaagggagtctcctgacttggcctcctaaagtgctggatcacagacataagccaccatgcctggctgtagtaagttttgaatttgggaagtatgaccctccaacttctttttcaagattatttgggctatttggggttcccttgtgtttccaaagaattttatgatcaggttgctaatttgggggaaaaaaactcagctgtaactttgataggttttgttgagtctgtaggtcaattttgagagtattgcaattttaacaatataaacccttcgatcaatgaaaatgggatgccttttcatttatttagatcattaatttctttcaacaatttttgtagttttagcatgtaagtcttgctcttcttttgttgaatttattcctaagtacttattctttttgatgctattgtaaatggatttattttcttaatttcatttttggattatcattgccagtatctagaaatctgattaatttttgtatattgatcttgtgttctgcaaactgctgaacttgtttatcatttctaatagctttttaatggattccttaggattttatatatcaaaattatgtcatgtgcaaatttctttccaatttggaaatttctctgtttccatttctcctccctgtcttcctccctctcttcttttgtcttctttctattttaaaaattgtgataaatacataacataaaatttaccatcttaaccatttttaagtgtatacttcagtgtcattagtacattcatattgttgtgtaaccatcactaccatctacccagagctcttttcatcttgttgaaactctatacctattaaacaataatgcccattctccccagatcttagcccctgacaccaccattctactttctgtctgtatgagtttggctactctaggtacttcatagatatagcggcctcatagaatatttgttcttttatgtctggcttatttcacttagcataatgtcccaagtttcttctgtgttccagcatttgttggtattttctttctttttaaggctaaataaattccattgtatgtatataccacattttgtttattcattcattcagtgatggacacttggttgctttcaccttttggccattttgatgagattgggcgtattcagggtggtatggctaagatgttttggctactttgaataatgctgctctgaacatgggtgtacaaatatctcttcaggtcctgctttcaattcttttgggcatatacctggaagctgaattgctggattgtatgtaattctatttttaatattttggcaacatattcaagacatcagtgccaaatccaacatctgaaacttttctcctatgtttttttctaagagttttataattttagctctcacatttagcccttgatccattttcagttaatttttctatataatgtaagagtctaacttcagtctttgcacatagatatccagttttcccaatacaattttaaaaaagatatctatttctttttctgcttaatttccctggctagtacttccataaaaatgacgaatcaacatgacaaaaaaggaatcttggtcttgtccctgattttggggtgtaaatgttcaacgtttcactattaagtatcttttagctgtagcttttttataggtgacttatcagactgaggaagtttacttctattctaatttgttgagtgtttttttttatcataaaggggtatgagattttgtcaaatgcttttttgcatctattgagatgatcatgttattttgtccttttttctattgatacggtgtattatttagctgattttcaatgttaaacccatcttgtattcttgggataaatcccacttgctcaggcatataatcttttttatatgttgctgaattcagtttatcagtaagctgaattcattcatattcatgaatttttgctttcattgttgatttttgctttcacattcataagggagataatatgtagttttcttttcttctgatgtcatctggttttggtatcaggataatactgactcacagaatgagttgagaagtattccctcatcttctactttttggaataattcatgaatattgatattagttcttttaatatttggtagaattcaccagtgacataatctgggcctgatatttctttgtgggaagttttcatattactagttcattatgaactattactagttttttattgttgtgaatctattcagattttctatttctttttgagatagttttggtaagaaagtgctttctagaaatttacccatttaatctaaagttatctaatatgttgtcacgcagttgctatagtatcccctaataaactgtcattaattatagcaattctgactctaaaagtgtggggtttctcataacaaccagttctccaactctctggacaccaactgggtctccagttcaattagttcaattcaattctaacagtagctacctggagttagcatcagactccacacgttgaaggctcagtcccacaagactgagacttcagactccagtcacaagtgttggttactcggggtactcacacttctgtccaactttgctacagatttggggttctcataactggccccagcctaggtttcataatttgctagaggggttcacagaactcagaaaaacagtttacttaccatcctggtttgttatgaaggatataactctggaagagccaagtgggagagatacacagggcaggtatggcagggggcaggggtggtgtggggtttccatctcctctctaagcatgccacctctcagcacctcaatgtcttccccaacctggaacctctccaaaccccattgtttagcagttttacagagtttcattacataggcatgactgattaaatcataggccttaggtgataaatcaatcttcagcctctctcccctccctggaggtcagagatggggtttaaagtccccaatcctaatcatgccttgatttttcaggcaaccagcccccatgctgaaagtgatctagatgccctagtcatctcactaatgtgctatatagctgatgctcttctcattctgaagactccaaagttttaggagctgtgtgccagaaactggggatgataaccaaatacttttctttaaaaacacactctatagttcttttcatttttgtagggttggtagtgacatcctctctaattttataatttgattcttctcttagtctagctaaaggtttatcaattttgtcagtcttttcaaaaatcaactggttttgttgattttcttttatgatttttctgctctttatttcattaacattatttccactttaatctttcttgtttcctctttctgcttttttaggtgtttagtttgctttctttttctaggttctttttttttttttgagacagtctcgctttgtgatccaggctgggtgcagtggcctgatctcggctcactgcaacctccgcctcccaggttcaggtgattctctgcctcagcctcccgagtagctgggactataggtgcatgcccccacacccaattaattttgtatttttagtagagacagggtttcccaatgttggccaggctggtctcgaactcctgactcaggtgatctgcacacctcggcctcccaaaatgctgagattataggcgtgagccacccatccagccatttttctaggttcttaaggtagaagattaggctattgatttgaaatcttcttctttaatataggttttacggctataaattccccactgtgtactgctttagctgcatttataaattttggcatattgcattttcattttctttcactgcagagtattttctaatttacttgtgatctttcctttggctcactggatatttagacgtatgtattgtttaattttcaatattataaatgtatcaaattctcttctgatactgatttctaatttaattctattggaaaagattatacactttgtatgatttcaatcctcttaagtttactgaggcttattttatggtgagcatatggtcaattctggataatgctacccttctactttccaagaatgtgtatatgtgctgctataatgtggagtcttctataggcgtctgttagagtctacctgattttaaatgcaaatgttcgcttcctctcaaccagtccctaaactctttcccttctttatttttccccaaatacttatcagtatctgaaatactagttattttacttatttgtttacttttacctgcccactagaatgtcagctcctttatcctttaagataaagatcatacgcattttgttcactgttgcctggcactcagtaaatgctcaataaacacatgccaatagaaaaaaatgtgaaaattggcttatatgtcctgtagcttcacataagccagtcctgcaatcaacaaaacaaggccctcttgatacagctcagactccttatggcattaaaagcccttcatatgctgttggccccattcattcattccgtgaatctgtactgagcacctactatgcagttgatgctgctgtaggattggggatacggcaatgaacaaaacagtcaggcttcctgccatcctagaactctcagtcaggagcattctagggagacaacaaagattcaagcaaatatcaagttgcgatatgtgcttgaaggaagtcaatagggtgctgagacccctggccaggcaaaagtttggggtgaagtcagaggtccttcccaggcaaagaaagcatcttgtgccaagtcctttaggtataaaagagcatttgtacccaggggctctgaatctttgtgctctagctctagcatgtgtcctggttccacaacagagcaagggctcatgactcagagaggcacaagcccctgtcatttcatctatagaatctgctcatgcaagtcaaggatgtcttggcttgcctgagcaatattgcccagcatgagtcggaatcctgttggactctgtcttcctggaatgccttctcaacctttcatctcctggctaatcttactcccttcagcattccctcccataggctgcttttcctgataccttctgccctgtcgaattagagactcctcctctttgttcctttagcctctggatgccccagtagagtgccgtcactccgaattattctgtgctgtcagctcaccatgtggtgagttctctggggacttcctttgtccccttgcctctgaatcatgcctgacactcaggagggtctctactttgagagccatgaaaaagcctagcatgctgtatggcacaccaaggccactcagcgaagatgtgcagttagcatagcagggagggcagaggccctaagagtagactgcctcgttagaattccagctctctgggctttggaaacttggggaagttacttaacctccctgtacctcagtttgcttatcataaaatgattttattttattttttgagacagagtctcgctctgtagcctggagtgtaggacgtaatctctgctcactgcaacctccgcctcctgacagcaagcaattatcttgcttcgcctcctgaacagctgggactacaggcaaccaccaccacgcccagctaatttttgtattttagtagaaatggggtttcgccatgttggccaggctagtcttgaactcctgacctcagagatctgcccaccttggcctcccaaagtgctgggattgcaggcgtgagccaccatgcctgctcataaaatgattttaaaataaatattaaatgaaataatgcttggacattgcttaccatttgcttagcaagttctagatactgttactattatttttgttaacctaaatgtaaaatccgttgcccacagtaggcagtcaataaacagtagacaatattataattaaatagtggcaggcagtgcagagtgaggagcatgggctctgggttctgcaggagagttctcccttactagcatgttctctggctgggtcaacttgcctctctgtacatctgtcttctcctctgtaaaataactttgtactagtgtctcacttaaaagctcatggtaagggctttgtaaacatttgttaataaaatgactacataacatgtgaaaatggccagcccacagccagcgctcagtaacagtgttgtcatcactgttatcatgtaacaggatgttaatttctcctgtggccatggttttttttttttttttttttttttttttttttttgaggagtttcgcacttgttgctgagggtggaggcagtgtgcgatcctggctcactgcaacctccgcctcccaggttcaagcaattctcctgctcagcctcccaagtagctgggattacaggcatgggccaccatgcctggctaattttgttttttagtagagacgggttttcgccatgttggccaggctggtctcgaactcttgacctcggtgatctgcctgcctcggcctcccagagtgctgggattataggtgtgagccaccgcaccagctggtcatagttaaatcttaggacaaaagacccacagacctcatgtactttttttttttttttgagacagggtctcactgtgttgcccaggctggagtgcagtggcacaatcttgctcactgcaacctctgctttccagaatcaagcattcctcccactggagcctcctgagtactgggactacaggcatatgccaccatgcctggctaattcttttgtattttttatagagaggggttttgccatgttgcccaggctagaccccacgttctaagttccagaagctcccagcgaagggacccagcaatcaatctgcaggtcttatcagagaggtggcagctcagaagaggcttaccacatagtcccctcatccatagcccatccccaagacagtaagaagacagctaaagggaagatgtctttgacagtcaagaaagtgccatgttcctggagataggagctaaagtgtagttgggggtgtgagtaggtgtttaaaagaatcagtgttaaggtttgggggtatcttcacaagaaatgactggctgatcaagattgggggtgcctacagaaagggaagttggtattctctccctgtgggaggtctgtttatcccgtcttacttactaagccatgtactacctgagcaggagaagagaattgaagggagacagcaggtgggagacagccagtcaagactgctccttcacccacaagtgtcaggtttcagttcccagccttggagtgggacacagtggaggttagggtgggggccacagccttgtaaaacctctgcagaacttggggacaaaaatcaccatgcatcgaaagaagctgtgttgaaaggacccaaatagcacaagaaatcagcagtgtctagaggaaagcacaggaattagtctggatggcagcaggttgtgatggagccaccatctgtcctcagcagcatagataggaaactagggcagcagcacccacccacttagccagcactgaatcctcaccagttaagacaaaggcatctgctctcttctgtcctctttgcctccctcttagcctaacgtgctctcagcattggttgcacactagagaccacctgggagctttaaaaagtcccagtgcaaaaccacatcccgtagagactatgattcaattagtcaggggtggaatctggcctgcttggtagattaaaaatggccataatgccttacaacttcccaccccttgaatctggattggctcatgaattgctttgaccaatagaatgtggcagaagtgacatggtgcacattctgagcaggcctctagaaacctcacagcttcatctctcaccttctgggaatgttgctgctattcaaaaagcatgggctggcctgttgggacatgagaggccgagtgggaacacagacccagccactcagcagtcccacgtgacagacatatgtgagatcccagccagcaccacctggagaagagaaccatcccagctgagcacagcccaaattgttgacccacagaattgaccaaataagtattattgtttaagatatataactgaaacagctccctggataattcaaatgtgcaacaagggctaggtgcagtggctcatgcctgtaatcccagcactttgggaggctgaggtgagtagacacctgaggtcaggagttcaagggcagcctggccaacatggtgaaaccccgtctctactaaaatacaaaaattagctgggcatggtggcgggcacctgtaatcccagctacttgggaggtgaggcaggagaattgcttgaacccaggaggcggaggttgcagtgagctgagatcacatattgcgctccagtctgggcaacaagagtgagattctgtctcaaagaaaaaaaaaaaaggcaaccagagctgtaaaatatgatgctagagagcagaaaagggaggcgaggaggtgttcgagcagattgtgtctcctctttagcaaccttccagggtcactgctctagcttgtgctcagggacaggaggagacagggtctaattcaagtttgagcttgaagtcataattacttggtgcatggatttaacaagcagaaatggttgaaaatatgttaatcagatcataacattgctaagaacctgttacacagtgggaaagggagatttttaaagtatatagttggaaacagctatagaaaaaatacaactgttttgtttttgtagcctaacaagtaggggctcttcaatgaaccatggccataaattggtatcacggcacaggccctggcagatgctaaacaggagatgctattttattagtctgaattgggcctgtgccatgcgtttgtcctaggtgttcaataaataatactgctactatcatcattattgttactagtagtgattattgtatgtgaacatacctaatgcgtgcctggtatatggcaagtgttcaaggagatgtagctattattattacaaatgggaaacttctaaggtagaagaggtgcttagcaaacagaggaagctattaatgtagcctaaataaggcacttggctcagagcacagagacaacgtgaatggaagctgctgtcagcgtcatatactggggtgaggcctggctccaggccacctgcagtgggccctctgcagctgatgggccatcgggggaaggtaataaaggccgccatgtggcccttaccttccggatacttgtagaggtcatgatgtccacgcgggagtcactgcccaccgccttggtgctgatgcatctcccaatcttctcgtgtttgagtatacacgctcccggctctcatcctcgtgccacagccaggtgatgtagcggcgttgacctccgcaaacacgaaggggccatcgtgagccaggtgcacatcaccctcgggatggcggtgactgaggctgggccgcaccggaacacacctgggcaggaggggtgggcagagcagcatgggtaaggaaaagcaggggtctggaacttaccccacccaattgagcgtacttcactctcctcctggggggtggcatccagaacctgccagccattgtaagaggggcctagtcctgccgggcaaaccagctctcattccagacatggaaattcctgccacagagagaggtgggtgaagctgcctagagtgagggcataggaagggaagatcctactgagaggcaggcctgggctccctactttccacaagaactgtggctgcatgttgtgaatcactcattcaaccaatgaatgagcacacagcattcacatatgtttgtatatatatgtgtatgtgtgtatatagtgtgtgtgtacatttatcaagaacctgttgttcaaggtactgcaactaagacagaagattttactctcatgctgcttacattctaacaaaggagacaggcaaagctaagtcagcagataatcaaacaaatgcaagtgacaataaatgttaggaagaaaaagaggggcttaagctagaaacaacccctatagacctactctaggtaaatgacattgaaggtgagacttcagtgagaagaataagctataggaagagtgaagggaacaatattctagaaagaaggaacagcatgtgcaaggtcctaagtgagacaagaaaaggccttgtgtgttcaaggagcagaaagtatttaagatctctgggatatggccagcagagggggtaggtagggttctgattatgcagagcaccatgactctggtaattccagccttatttttaattccccgtgttaaagatgagaatatgagtagaaacatgacatcacctgctcaaggtcttgcagaaagaaaggagcagacagaaacctgatcccggtttgcctgacttggcatctttacagccggcctcagaactcctcttcggcaggcactgtttttgttggggaaagtatgttgattagcatttggggattaaaggtgggaccctgtaacctgggtggtgacagagtccccaacatcaaaatgaagtgtctgtgctttctgcatgagaaaagagaagaatgcgagtattttgtgcttccagggcaagggaatgaagagaaccaaaaagaggagaggccaaggggagcaaagagatggtctgagctggaggccagctcgggaaggctcctggcacgctcccctggggaacaaggatacaaggctctctgtgtctctgtgttgtttttcttcactgtctctcctaatctttattttttaatttttatttatttatttattttggatagagtcttgctctgtcacctaggctggagtgcaatggcacaatcttggcttactgcacctccgcttcccaggttcaagtgattctcacgcctcagcctccccagtagctggggagtgtgtgtcaccacacccggctaattttttttaatttttatttttagtagagatggggttcaccgtgttggccaggctggtctcgaactcctgacctcaagtgatttgccagcctcggctcccaaagtgttgggattacaggtgcgagccaccgcgcccagccatctctcctaatcttagaaagttggctttgagtggcagacttgcacatgtgtgaacagacatttgaacaaggttttcactgaagccttgtttgtaaaggcaaacttgtttttaactgaggcaactgaaatgtcatccatatgggatggttagatgaacaatggctttttcatgcaattgagaggcagactggttcatacccttatgcttccactcactagctgtgtggccttggatgggttacttaacctcctgtgcttcagtttcctcatctgcgaaatagaatcaatgatcttaacttattcacaggtgtttgaagaaatacatgagttaatctatatatagcacttagaactggacctggcacagataggtgcttggtgggtgttacgttattacttaaaacattatggaaaataaggaaaactcgtgtatttacgtggaattgttaaatgttccagcaagaacagtatcacataaagctgccatactgtttaagcagggaaaaggcggggaggcactgtaggtatgtatgtgctcgtgtctgagagcatctctctgacaggagatgtagcagacagtgatagtgttgcctccaggaggaggtggggaggctggggaactgggcgggagggagacatcactgcaacccattttgtacctttaaatattaaaccacatgaatgtttttcctatttcagaaaattaagtaagttagaatgaatttttttttttttgagacgaagtctcactctgtcacccaggctggagcgcagtggcatgtcttggctcacagaggcaacctctgccttccaggttcaagcgattctcctgcctcagccccagagtagctgggactacaggcgcctgccacgatgcttggctaatttttgtgtttttatagggatggggtttcactatgttgaccagggtggagtgtaatggtgtgatctcagctcgtgcaacctctgcctcctgggttcaagcaattctcctgccttagcctcctgagtagctggattacaggtgtgagccaccgtgcctggcctggaatgaattttttaaagctttatgtgaaaattttgttttagctaaggaaggagtctgtttcccacctgagacacacaacacggagaacgcagctgatacggaagcaggagcctgatccagaggtacctgtgcagaaggagttcccacccaccccaccccaggaagccacagattcccagacagagtagaaccgggcgttcaaggcatcaaatcttgaggcccctcctgacctctgagtctacatctcttgacctcagaccttactcttggaagaggcaccactatccgcagggcgcctctcactccctccagagccggctcagttcaggagagctgggctctgggcctgccgctccctggtggtgttatggaagatgaggcctgctccacctgctgggcttccagagccctcgggcctaggctgggggcaggacccaccactgctgtcttctgtcaggtcctccagggtccgcccgaaggagtccacgtatttgtccacatcaggttctggtctgtgtcgtgggctgagttgaagttggacacgacccgtgtggctatcccaagcacctgaggactgcagagcagagaggctcggagcaggcgggaccctggcccctggagaggggcctggcttccacagcaggcgccctggctcatttgtggccaaagccctctgcaccccatctttgtctgtgtgtctagttcatcaggttgtggggctgagactcccatctccctctcagaaatgccaccatctcctgcacgttctctcaaggacttcaggatatgctgttgcacctcatgtaagtagacaggctttgaggctggcaggaacttggaagccacctaatagaccctcatcttcctgaggggactggaggccaagggagccgcagggctcgcccaaggcactaatgaatgagagacagagggagctaggactccttcaagataaaagatcagatatgaaggaataaattctctggcttctctcttcatcagccagacttcgttctccctgtcaatgaatcatcaatgaagatgggttgcagcatatgcaaatatatgtaaatacatttagatagaggaactgggggcacaggtaccctggggcccttctctcccagggtacctgtgcacaggactccgcgaagacccagcactggccgtacttgactggcttgtacctgcccttgagccacttctgcgaatggccacgctgccgcgccagtgcagcgggctggtgccgccgccgtacttgccctgcactgtccttgcaccacacctcggtcgttgttgctgttcacctgggcagaggagggcacggtccacaaccaggcagggcttcctacctcaagaaccgcatcgtggtcaaatcctgtccactttggaccaccaggtccatcggggtcactcttgctttttaactgtctgaaaattagggcatctgttgccttaaaatacctacttcctggtagcacttgtcattttcaattatcttcctttggatactgtgttgtaaaaatcattacaactttagagcatttcctatgttaaatgattgttttgggggactgttggcataatcattatagggacagctaacatttattaaatgctcttgtgtgccagacaccactatgccaagaattttgtgcacactatattaacctgttgaagttacaatgtaggtttcattattctttttttttttttttttcagatgcaaaaactgagctcagaagcattcagggacctgcccaaatcacacagcaagttagtccaagtggtgatccatagtctaggacttggacttgggagccttgagttcaggactttcactgtcctcagggctgtatgctctgctgtttgggattgtcactcatgttaattctctgtgctccaactgctctctgggtcttgaggaattgagagtatcaaataggagaaatatagctttgtgcaattttggaattcagatacccacccactgaccttaatacctgcatgtggtagagggaggtggtgggccctcagacaccttttgggaggaaacaccatagcctgaggcctgtgataggttaaagttgtcagcctcccacggagaggtgggtctatgtcccactcaagaagagggttcctcttgagtctggctggcctgtgactaatttgaccactgactatggtggaattgatgttgtgccagtttccggcctagaccttataagactgggagcttccacttcctctttcttggaagaattgcttgggcagggaggtgggggtggggagccattgctatgcatgaaactgccatattgtggggaagccaagctagccacatggaaaggttgtgtagaaagagtgatgactggtgggtcccagctgtccagccaccccagcccagaacctgacatgagggtggggaagccatcctggacattccattccaggagacatgacatggatggcaacctaggaactgccaaccaccagaaccaaagcccagacagaggtcctgttaaaccatcccagacatatgcagtcattaagatatccccagaaaagcatcttggagtggaaccaaaccattctcatggtgccctgcccaaattcctagtctaaaaacagtaagcataataaagggttgttttacaccactgagttttggggtggttggttcgcaacaacagcgaattaaaacaaggggtgatgggaagaatcacaggttgtggccccgggttggctgggggatccttgaggaagtacatgtgcagggatggaggggcttctcaccatggactgatgaccctggtgacgtagatggggttgtggcggcaggacacgtcggtggctgggtgttttggtgaccggggcttcgatccaggatggagaggcagatgttcaggatgtcctcctaaactgctccccagagaggctgtgcttagaggctgcgttcagtcacccatattccaggcctcccacagccctcacccggtcagtcaccccatctgtgcagggcagtttgctgccccctcaaccaccaggggcatcacagagcaccccctagtcttggaaacccttcctcaaagagtccctggggaatcagaacctcagccttaatcatgtctctcccctgctcaacaatctcctgtgctcctgactacccacagtaaagtctgagctaaaatcggaggctctcgagccacatccactcgctgatatgctcatttggtctacatgatgttttcaaacacatttgaattagttaacacatttaaaaattggggaatttttgcatacacatttaggtttctggtctctgataatttgaaggtctggcaacaaaaagtgggtgctgagtagtggctaccccttaggtggaccctaactcttcactataacttccctgcccagcacccgaatcccaaagcctttaaacccctggccgcagggcagtgcgtgactcctcagcctgacagtcaagtccagtctttcttccaccggggcctggagctcaggcagacagaattcctctagcagactcaagactccctacttcccacgtcgtgcggctctgcctgctcttccctctgcctgggcagatcctgcctcactgtagagaccaactacaatatcacgtaagcctccacaatggccgaagtggaggttcctttcaccctctttggactccctttgcttccatccctatcattctgactttttccttcccctattgcacctgtattggaactacttatctaagccagtggctgttaaagtgtggtcttaggccagcagcatagcatcacctgggaactggttagaaacgcacattctcaggccctgcccaagacctactcgtcggcagctctgggggtggggtccagcacgccatccctcctgggattctgatgtacgccgtgtttgaaaaccactgatcagagctattcatttttccacaaccatactgacctgttcgtgtccaaaccttgtccaaagcacctccccttccccaggacccagtgcaggccctggccagtgaatagtagatgaatgaatgaatgagtgggttttctctaggagtgagccccccttgccctcctgagaagagtgagcagacagagggactccagtcccaccgacctccccatgcccagcccacatccttgtctggcctgtgcccctggagacctgcccgtagttccagccctgggtcgtatgtgcttctccacgcctcggaagatgatgccgctgtcgctgagcacgtactccttctctcctcctctgaggccagaaacacatcgtcctctgaaaagcagtcatcaggcccgggtggactggggctctggccttgctggcctggggaaggggctgcatcagggatcagcagcgggcagcgcccggaggctgactggggcaggagaggtcaagagggggcttgcgagctccctgctgcctccctgccaaactccatccctcctggcaagtctttatccaagcagggaccaacccaaaagagttttatgggaactgacagctttgggtgggcctccttgatgtcagtagtacctcatatttctcatatttccttctttttttcttattttcttttcttttttttttttttgagatagagttttgctcttgttgcccaggctggagtacaatggcgcaatcttggctcacgcaacctccacctcctgggttcaagtgattctcctacctcagcctcccgagtagctgggttacaggcgtgtgccaccacagctggctaattttgtatttttagtagagacgggatttcccatgttggtcaggctggtcttgaactccccacctcaggtgatccccctgccttggcatccaaagtgctggggttacaggcgtgagccactgcacccggccatatttcttaaatattataataatactgatcctggccaccccttactaaggccttatgatgtatctcatacattacagtattagccctatgggtgttcaccatagtcataagaggtaggcactgttatttttccctattacagatgaggaaatggagactggtagaggagagcagctcagcacagctgggactaaccaaggcagtctgattcccaagtcctggctcttacccacccctgggcctctcttgcccctgggtcctctggcataggctttgaagcacctgctaccaggtttctctgaccattgcctcctctgcctaggctaagttcttgcccagctcttggcattcagcttcttgtcctttaaccacctcccaggccccctccaagggcaggctctcctctaaggatgtcttttggaaaaaccttgcattggacttggccactcctacctgcacaccatgggttgaaaaggagaacaaactcgccagcctccggttgctgtgtttgcggtgagaggaaagcctgatgctcagcaggtagcggcaatgacagcactgggagggctggcgagactgacggtcagagttttctccatctgagcccccttgctgctgtccagccctcaccccgctccagctccgatgtctggaacacagctttgtgtggagggcctcagaagcccggggtcctggaggagaggagagggaatcaggagaccctcccctgggaaacccagctttagagaagtgaaaaaagctacaggcctggaagccccacctcaccccctgaacttctgggaggctttgggagaaggacctgacaaagagcaagaaggccatggccaagtgagggtccacctcagctgccctgacatcccagccacttccaggccaaggaaaagtgacagcatcctttgaaaccaaagtctgcctatgtcgggccaggaaaggaaagaaagcttgggcttcaaagtgcttgacgggttttcatacccttccagagccctgggtgtctgtacacacagggttccagagaggtcatcccatccatcccactgtctgctggcagcacctccaaccacccccagaaagctgccaccagaagcctccagggttcaaggctccgtctacctaagtgacttgcttcccccagagcctgagctgctgactgcaaggtcttatgttactgagtctaagacaggtccctccagctgcagacgagaagagggtgctggcaagcccagttacctgttccaccgtgaagatgaggatctcctcacagtccagggctctgctcagctccagcgtgagctgaacgactggcccctgcgaaccaccagctcagggcaggggtactcctgggtgtggtggcagcgccattcctcgaccgctgccagtccaccttggtgactctgatccctgggtgggggaggacagggagatgaggccacggcctcctgtttctcacccactctgagcttgtcctccattcattctcggccagtcatttgttcatccagctgctatttatcatataccggcgattcctgtttgtttgtttgtttgtttgttttgagacagggtctcactctatcacccaggctgggtgcagtggcgtgatctcaattcaccgcaacctctgcctcccaggttcaagcaattctttgcctcagcctcccgagtagctggaactagcaggtgcacatcaccacacctgggtaattctttgtatatttttggagagatggggttttgccatgttggtcaaactggtctcgaactctgacctcaggtgatctgcctgccttggcctcccacagtgctgggattacaggtgtgaggaccttgcccagcctcttggtcattaagttctgtaaaatcactgcaaaggttgaattaatagaactggcccattgcccttagggaaaataaatacaggtttaggttcctgtgagcctctgtcccaacttattcatcagttgatcagtatataaccttattatatgtgcgtttctgtttaagatacattattaggatgggcgtggtggctcgcgcctggaatcctagcactttgggagccgaggtgggcggattgcctaagctcaggagctcgagaccaccctggggccaacatggtaaacctcatctctactataatacaaaaaatgagccaggcgtggtggcgggtgcctgtaacccagccactcaagcaggagaatcgcttgaacccgggaggtggaagttgccgtgagctcgattgcaccactgcactctagcctgggccacagagcgagactctccctctcaaaacaaaaaacataatttaatatatattgttgattcattaatattgaacttgtggccagcagcgcttagttcatgcctgaatgttcacctaacacatatttttagtgtaaggcgtgtcgcagcttcctgctcctaggaacatgagacagcacttcagtcctatgctcagcggccattttaaacaagaaatcaccaacaaaaaaagcacaaaaatgcaaaaaaaaccctagttttaaatgaacaagaaaggttatttgtttatagtatgacagctgaaatgaagaggcagaatattgcctgttagcttcagctgggaatatgcatgtcaggtcaggtgacaatttttccgcactctgtgcattctgtgaatggccaagaaagtgcagagtatagattttggctttaaaaataaatattagcacgtgcatatacagaatccacaagtgttgaggatggactgtataatctctatgccaggcggtgtctggtgctgagtatatagatgtgggcttgccctcaatgcatggtgcggtgagacgtatggctcaatggttatgaggaggtcctctgggggcagctgacatggattcagattctacctggccatctactggctgaagcaccttcctttttctgaaacagagtgtctctctgtccccaggctggagtgcagtggcgcaatctcggatcactgcaatctctgcctcccaggctcagtgatcctctcatttcagcctcccaagtagctgggtctgcaggcacatgccaccataccagctaattttttgtatttttggtagagaccaggtttcgccatgttgccccaaactcctagctcaagcaatctgtccgccttggcctcccaaagtgctgggattacaggcgtgaccacgttcctggcccgccttcttgacctctctgcctctcagttccccgctctgcagaatgggataatgcctgtggcgtgattgtgaggataatggcccctgtcatttagagtcctcgtaacagagagctcaatcatcgttacttattatgttccaggggtgacacctaagtaggtgagtcccataactaattcttgctttgatacatgctatcagggagaaggatgggagctgaaagaacctaacagagggcttggcctagtctgaaggggcacaagcaaggcttcctccagaaggcggactgaggctgagtcttaaattggatgagtgtctccaggaaagagttgagtgttggatctgtctcagcccaagcatcctcttcccctattcagggttcattcattcacgtgctgggcatgtgctggatgctacagacccaacagtccatcaaatacgcactggccctgacatcatgcattgatagcccagtggagaagactggcattaagcagatagacctcaaaccttttgggtcagctttgagatgaaccctaagggagaggcattgggagtcccaggagcagagaacacctaactcaagtagttagattagcaaaactatttgccagagtactataagcaacagcttaaaacccaggatgtgtgcagccttgaattctagccagcagctatggcgctaggcagagagacagaggaagcatggtgacttctaaaatttgagagaaagcagatgtgtggggaaggcaatgagttggaggggcccatagtcggcagaccaccaatgcttggagtgggatgaagagtctgcctttatcctaagggccgtagtcagccaaatattgttttaagcaaagctgtgatgtaatcagtttgcaccttggaaagatcattctggtgccatgtggaagattgattagatatctggtgaatgctttagtaagcaaagggatgttccaagaaactgctgcttcatcttgtcaaacatctctcccaaatctccactggatgccccattgtctcttatgatctgtccaagctccttcatctggacaaggaactaggcaggatcccattgctttccactcctccagctcaccccccacccctcacagctcagttactctttgcactggctgcatcagactctacctccacaacctcctgcccgacgtcgcacatatctctttcctgccttgtgcttttcctaaggcccctcctggttgggtgcctgtgattgtcttctgagatgttcctgcctcggccctgccaccagagttcatcttcctttgtccaatcagctattagatttgggataacacaaacaacaataataaaatcttttatgtattcaagtgcttatgcctcctaacatacacctaagggaggtactatggccccttcattttctagatgctgtcatgctcactgggttccctatttcacttcccctgtgcccccaccccgcatatcctcagggctcattctcaacatggaagccagaaggatcctgttaaaatcaagatcactcgttgttctcaagctctccattggttcctgtctctctcagcagagttgaatcccgacaatgacccacaagcccttcaagattgagcactttgatatcttttttgggcctcagtttctcttcccctctctcatccctttaagccacactgatctccttatttctctttgatctgcagacaggctccctcttcagggcctttgcacctgctgttccctgtatgtggatcctctcctttcagattcctgcagaacctgctcccttgcctccttcttcaagtctttgctcaatgtcaccttttcagtgggaccttcactgaccactcctttataaattgcaaatcaccctactctccttctccactattttcctccatggcacttactgacatcttacaatatatttttttctttattttaattgcctaccttccctttcaagaatatcaactgcataagggcaggggctgtgtctgttttgttcattagtgaatcttcagcgcctgatacatggaaggtgctcaaaaatatttcttaaatatattaatgaatgaatgaggaaactgagggaaagagaagtgaaaaacttgccaaagggcacacaaacaagcaagggctggagtggagtctgtgggcatcctggttccagctgttgaccactgggtcagtggttatactagttttattgtgattaacataagaacagttttaaatgttccatactccatatgcctgcgaacatacatacatgcacagatataactgaaacaaaagtttcattactatttccccgtattatgaatgatgaatactgaaatttttttctttttctgtcaaggctctctacccaaagaccaccaggaacacatcagtacaatgacaggaagggctcatcgctcacggcaatgagaaagaatgctcaccacaaagaatcacggacatctcgggaagacaatattagagaggacttacaggattgcggcttgtgttaggtggttggggagagttcaaagaagcagggctttgcttgggattggaggcttctctgggaatgagcaagtctatgtctgagtatcttaatagtccttacgtagaagatgggaagaatgaattgagctagtgtcataagtagtaaagaagcagccgttattcatattagcccatctatagggctatatgtcagtagatcgagaccagtaagtggcttagacaatgttcatgtttttgtctgtgtcactcatgattatggagtggccttgtttttgtcttgattcactacagtcgcaggatggatctgatcacttcatcatgtcttctggtaaagtttcaataagcatttacatacttaacttgtttagtgaaaaattgatttcctcttatttactatttatattatagttaggatacaatttttaaaaagtggagtatagaggtaggtaagatgtgtcaattcaatttcaggttggtgagggacactattaaatacttgttatattgagagggagggtattacggacaaaaaagttgagttttactcatctattgcttcttaaccaatctgtttaacccagagtttagcttggaaaatgataatcatatgttatctttcatggtttttgtgggtcaggaatttgggcagagctccatggccagctcttaattggagtttcttatggggttgcaatcatatgttagctggggccatttcatctgaaggcttgactgaggctggaggatccactttaaaggtgactaacttacatgctggcaaactggtgctgaatacaggttgaggcaccttggttcctttccatgtggatcttccatgggaatgcttgggtgtcctcctggcatggtgcttagtttcccctgagcaagtgactgagagaccatggtggaagatgcaatgctttttatgacctaacctcagaagttacacaagtcacctccgccttatcctatgggtcaaggcagttacaaaggcctatgtaggttcaaaggaaggaacatgccccatctcttgctgaaaatgtaccaacgtcatgtcccattgtaaaaaaatattgagctgagatgtatactgatatgaccaccctgtgaaatataatctgccacagtgagaaccactgaagttacatcaccaggtactccccaccaaaggacacttgtcatgcaaccttggctgtatcttatttgatgccaagcatacaggaaatgtcagtaattgttggctagacattggataggttttatttaataaatcttcctatgaaccaagtgcttttccaaatatttataaatattagctcatttaatcttaataaaccatatgagggaggtactactgttaactcatgtcacagatgataaaactgaggtacagagttacacagcctgttttttttttgtttgttgtttgtttttaatttgagatagggtcttgctatgttgaccaggctggtctccaactccggcctcaagcaatcctcccatctcagcttcacaaagtgctgggattacaggcataagccctgcacatgacccagagttacacagccttctaagtgatggagctgggaatctgcctcctagttggtggcttgtctatccccaggctatggtgcctttatctttgaccccataggagtccagcctagaagttacagactgtaaaattcaacgtgagcttcaccacaggcatcagatcatggcttgtgtgggcaagtgtctggacagggctggtcaaaatgtttggctttttaaagatccagcatctttgtaaaatcttttagttaacagcatgtggcagattgattttccaaaggtgttgcaataatatctcccatcccacatactcttctttcaatatgatgttgatactcctccattgcagaagtaaagcatatattcccaccctctggacctggaagacttgtggctaagaagagtgacacattgtgacttctaaggctagattataaaagttaatacagcttctttctgttcccttgggttgcttgctcttagaacccagccaccatgccatgaagaaacccaaatggccacggagaagctcacctggagacgaaccaaggcttccaacccacagcccactgagctccagctgacagacagaattatttggaagccatgggactgagccatctggcaagtgggtcctcagcccccaggcaatctgccccagctgatgcagacgcaagctgtccctgccgagctctcccaaattgcaggttcctaagcaggagaatgattgttgtctgaagcccctaagtgctgggcagtttgctacacaggaattgaaaactgaaacatggagagagccaagattcttgtctaaccacaacaacctcccaactgctctccacctgtgagctgtctgggctggtgctgtggtccaataatcaggcttgagattcatggaaaatactagttttagcttagcctaggccagaagccctgctggcatcatgatatggggataatgactgaacatgtgggtaggaactcacatagtgacacatgtgtcccaagattgggagctcctacagcccctgctgtggtgagtgagcacttgcaggaccagtgttcaacagtgaccccatgtggcacgagctggaacaacagttccaggggcttttccattacccttgccaattctcacaacagaaagtaaaaccaaatctttcacataagttagccccagtcattctagggcaggcacaaacctctgaaactccaaaactttgagccagatgaccttggtttagtcagaaaacacaagcaggaccctctcccgcaaccaggtacctgtacatagaattgtcaagtctaatatcagcagagctggaagagccattaggagctcagtctccatttactgacatataagctgagacccagaaatgggaagaaagggacttcttgccgaggacacactggatttgtagcccacaattcatgttgctacttcccaagcaatgtatgtgggacaggccagaacaggatgctattttttcagtggatgagtcagaagcagacgacgagttgctggatggtaattatctcagccctggtatgccccagggctggatacaaggggagttgggattggatgagggctgctggaccctgggtcatgggttcaagctccatggatcctgcatggtttccccccttccctgccacagcccaaagcagctcccagcaccctctgaggcatctcatccttatcacagacgggcaagaggaggtggtgggatgagtcagaactgccattatcacattgtcctggaatctcagagaccacctctctcacaacttcctgcccaggcacaaattccttggccgaattcttggtggatacttgatcatggtcccagcttgccatacctctgagagtagctcactcaccgcccagtgttagaaagcccttccttctgctgagccaagctctttctcttgcaacttctccccatttgtccctattttgctccccattaaccccatagaacacaatcttcttttgctccttgatggggttttgcagaaaccacctagaaatcccaatctgccagccccggcacctcccctgcccaactctacactcaccccataacccaggaggtcactgttctatccctgtggaatctgtccctggagctgctgctttggtgatctaagtcatccacatccacagcatcacacctccatgacctgccatatgtggtgtaatagccggggttagggtccaggttctgcagggggaactaccggtgatttcagatacgttctgtcctagccagtgtccctctagtcctcatggggacagtgagactgacgggcatggggagaggctcctaggtatacggcacccaaggcgaggagatagatgtgcacttgggatggtttccaggccccttgtcaaaataacccagtatcaccccttccatgtgctcagctcaaattcttttaagacggaggcttctgtccttatctgtgatcagggatgctgtgttatagttgtttgcttacatacgtctctccctcatggactgagagctccatgaaggcgaaggctgagtctccccctccctgggttgctagaactggttaagggcccagggcatattaggtgctcagtgaatgttggttggatgaatgaatgatctccttccccatcccttggctggggtacggaatggggagctgatgctctgcagcgtcctgggcccgccctcgaggatcagcacccacaccctgtcagctgctcacgctccgactgtcacaccccacccaccccataatccctctctcaagctgtcacattccaaagcctgcctttcttcttaacttctttccttccacagagtgagaaagaggagggtgtgtgaggcctctgacagggcaggcagactggccactgaccacccactcccacccactgcctctctgggtctgtttcttctctgtaaaatgacccagaaggaatctgatggtttggatagtctgtggtttgctgagcaagtgcttctgattacccccaaggactcctctcagccctcctccctacaagacaaccccacctcaacacctcccccctccccagccgagagagtgctgatgtgaagattgtcacatgcctctaggacatggttttcctgcactggttgtccctcttccctgccacagcccaaagcgctcccatcaccctctgaggcatctgcatccttaacacagacgggcaagaggaggtgggtgagtcagaactgccattatcatcattatcctcaaatctcagagaccatctccctcacacttcctgcccaggcacaaattcccttggccgaattcttggtgaatacgtgattatggtccagcttgccgtacctctgagaggtagctcacccactgcccaatggaggggatgggagagcagcatctgctctaagactgctccagttgacagtgaacccaaggccctgaggacagaacggcagcctgttttcagctctgggggccttcacccttggggtatgcaggatgagctcccacccaaggctaaaggctcgccaaccccagggctgaggctgtaccccccaggcacagggaaggatgtggtaagagtgctccctccacctgcctgttaccccaagcctcatagcccctccacttgtctgctctcctccccttctccctctcatcgtcttctcagcgcttcctttcactctcacagcaactagaagcctgatttcagaggcacacacttgagctcacatgcaggctttgccctcgttggctgtgtggcaagtgagtgagctctgaaactcagtctcctggtgacaatgaggtgatgatcatacccgcttcctcacgttgggaggattaagtgaaataattcacatagatatttagactggtaccaggcacatactaggttctcaggaaatgtgagtggtatcatcatactatttacacaagacctcctagctgccattcctgtgctctgccaattcatgacatcctaatcatctacttgttggctgtgtggccctggatctgaggatccgatttccttctctggaagtggcaataataatatctttcgtctagggtttcgaggaggattaaatggggtagtaatatacatagggtagtgataaaatgcaccacttaaagcaggaaattctgagagtgaaaggaaagccattaataaacacgctagggcaatgggcttccaccaggatcaacgtctccctattatcaggtacgtagcctggtgctgggtccacagtgatgagctctacgaacagggattttttttttttttttttttgagacggagtctcactctgtcgcccaggctggagtgcagtggcaaatttctgctcactgcaagctccgcctcccgggttcatgccattctcctgcctcaggctccgagaagctgggactacaggtgtccaccaccatgcccggctaattttctgtatttttatagagatggggtttcaccgtgttagccaggatggtctcgatctcctgacctcatgatccctcaccttggcctcgcaaagtgctatgatgacaggagtgagccaccgcgcccggcctacaacagggatttttacatcatcactcctttcccacatctcccccatcactttggtcctccctccccaattcctacatgcacggggtttcttgttattctcccctctttgcttctcgcttagcgactgtatggccccaacagcttcagagtgtttttcagctcaacctgttcaatccatccatcactatggagaaactgaggttcagagaggagaagggacttttctgagtgtcagcagtcattttccctgctcaagcaccatggaatctacagccatcttgttggcattgaaggtcttgacagtcaggccctgcccatcacttctggccctctgacctcctccccaactaatttgtcaccagctggccccagagctccacctaagaaagggaagggtccatgtgcagaacattgctcctgccgacttagctctccacccatccccacccccaagcctagctcatccatcttcccctcctgcccttgggtgataccagagagctgaatgatacaatcctccccaattctttgttcaggccagtgggcttgagccctggaaactctgttgaagccagtggcatcttccagacttggactaagcataattggtttttaatgggccccattataatcctatgcttagtacgcatatgagcacctgaactccatgactaaatgatttatcgagagttgcctggggcctttctgggccactgccccatctctctttccttcctggtcttgttggaagctgctggcctctctttcccaggaggcagtgactcatcaactccaacccaatgtcccagccagagccagcctcacatcagtattccactcaattcttggaatctctgagctgaaagatgattgtaatttaatcatgcaaaagggtctcacctcctttgccaacactgatcaactggtacttaaagagctgggttggcattctggggccacatccaggctccagagggaagagctctggggtcaactagggatgtcaccatggatggagtgagggaggggggatagaaggagctccaggaagatgaatacacttccatctaggatctgatgtctcagtcattcaggcacagagtgtgtggtaggcaggacctatgctctgaggaacagatcctcccaagaagccaagaggacccagaagacccaggaattgatccaatccaacacatagtccatttacataggcatgacaactccaatgctgacatttcacgacggagaaacagagcttcagagagaggaacccagcaagttagttacagacctgacaatggcatcatcatcaacttttttccttcctcagaaactaaccttcgcactgtcaagtttaatctgataggttatcaaaggcccagggaagagggatcatctaggtgaactttgagaagcaatcttggaggaacaaaggcaatcccctctgcaccagggccatcagggaggcaaccccagtctggacacaggcagtctgggctgtgagctggtgttggcaaggcctggtcttcagaacaacctatcctaggagcctgaagggcccaacacgtccagcaatgctgttaactgccaggagaaatatgaagaggaagctagactatgatgaggaaattcaaatatctgcctttgaaagttaaaaaatatttgattcataaaactgtcacataatgctgaacaattaaaactggcagacaagactcagaaacaccccttgaatacctgtgagtgtaggacccctggttctgctgacttgtcattaccgggccccagcatctaacagacaagttcttgcagagggagtttgctgctcacatattgaggtcgtgggggacacattatctttctttcttttttttttgagacagggtctcctctgttgcccagcctgcagtgcagtggcaccatcttggctcactgtagcctctacctctaagctcaagcgatcctctcacctcagcctcccaagtagctgggactttgggtgttcccaccatgcctagctaattgttgtatttttttgtagagacggggttttgccacattgcccagctggtctcaaactcctgagctcaagaattccacccccttcagcctcccaaaatgctggattagaggcgtgagccactgtgcccgacccacattttctgagtctactgtttacaagtcccacttgagatgtgtggtgggagaacagcacacgtggtctcaccaactcctcacagcaagctgtgagataatttgcattataatccccattacacagatcagaaaacagaggtaccaaggcaaattttcttgctcaaggtcatatagctgttttcacttgagccagagctgctcttgcctcaagtgcttggggtgggaatcaggcgaggatgcagccaatgggggcctctcactcctcccacgcaggccacaattcccaactatgcccagaaacgtctctggatccatggaatgtcatggggtgcaaggagattttctttcttctgcccctgccttcctgtgcctgcctccttcgtcctccgaggcacaggggtgagacctggccccagcccaggagacagcgcctgagccagctgggccatggccttgctgggtggcttaaagctggctttttcatcctgggcctcatgaaccacacgaagagttcatgtgttcatggtggactatccagctgtaaaatcctaacaatcgtgatcaaacgtcatcccacagacccatgtttcttgaagcccccctcatgagccctggtgcccaaggccccaggctctgcccacttacctgccatgtgaaggccagctggactcctctgtcctccacacagcagtgtgtgcaccgtcaggacagtgtggcgcgtcacagcagccagccgaccaattttaacaaggaaaaccttgggacactcctaggcaggaaagtcagaattcaaagaggaggcgtggccctccaccctagcagcgacacccacgagacacaaaatcatcctgtattgcacctagaggggttcactgtgggagtggctcctgccaagagaccttggaaacacgggttgcgaatgggactgtggagaaactgaggctcagaaaggtcacaagcctggcaagaaaagaacggggaaagagagaagactgagggaactcggatttatggttggccattcttagcctcacaacaaccctcaaatgagaaaaaacaggctcagcgccaggaccccgaagtacatggtgcacgctgcagtgccgggtcagtctgtggctccctctcccctcctgggtgagagcagagactcctgggcccacagctccactctgttctgcaggcatctaaagaggcagaggtccatatcctccttcagggccactagacttccttggtggacactagactcttgagaggaggtagtaagaaaaaggggagagctggttctgactcagaagctaggcccatctgccctgactttggagtggcctccagccaggagcttagaggcctggtggccatgggtgtcccgtgaccttggcaagacctctcccctcctggaaccctggtgtttctacctacaaactaaagggattggaccaattattcttcagggccattccagctcaaagtctaagattctgggcttgaaggtgctgaattcaaggcatctgaggtcttttgttaatgaaatagaggggattttattttcatggaaccggtggggtaggtttctttttgccggagaaatgctttgatggatgacttggggctatcaaggctggatgtggcctgggccagtgaggaaggggaagtgggagggggtagaatcgaggaaagagacaaggaagggtaaggagacaaccgtgtgctgagcacagtaggatgaggccgcccctgggatcaccccaacattcaggaaactgcataaaaaccccaaagtgtttgatgtggtggatttcttacagaaagtggcaaagaggctgagttctgcttcctggtttcacgcagataagcgtctttaatgagctgtctgcagacccacatagccttataattactgacatctggcgcagcccagggcagctccttcctcaacaccctgcaggctgctgccctgtagaccctgggcctgctgaagctgcttttctgcctatgcagggtcaggctcctccccactaatgatggtctattcagggcccttttatctttcatcctgggcttgcttggacgggagctcccagaagacgggcatcaaaatcactgcctgccccactgctcgagaccccaaataataattcatactcccgttttttttttttgagacagggtctcgctctgtcacctagggtgaagtgcagcggcacatctcagctcggtgcaacctctacttcccgggttcaagcaattctcctgcctcagcctctgagtagctgggactacaggcgtgtgccaccatgcccggctaattttttgtgtattttagtagagacagtttcgccatgttggccaggctggtctcaaactcctgacctcaggtgatcgcccacctcagcctcccaaagtgcgagattacaagtgagagccactgcacccggcccatctcagtttagaagtgagcatcatagcctggcagtagagtcctgggttctgttatctctggccaaactggctgtgtgaccttcagcaggtcacttaccttctctgggccttattgccttatctgtaaaatacgggtgtgaactaagtgttaccagttccaacattctctgattctgatatcaggctagagatgacagacgggagccaaagccttgggcggctcagggtaccccaatgcaggcataaagtgggtgcttcacaaattaaaatctgtgcctggggaataatcagatgcttaaaagcaatttaattgttcttctggctatagagataatacatactcaggtacaaaattaagcaatacagggagtgaagaaagtatacatgcatacggctgtatacacatggcaacaatttacatgaatcgcatcatacacagaagctgttttgtaacccgtcctttttgcttgaccaacatggtgctctcttttcttttctttttttgagacggagtcttgttctgttgcccaggtggagtgcagtggctcgatctcagctcactgcaagctccacctcccgggttctcaccttcttctgcttcagcctcccaagtagctgggactacaggcacccgccaccatgctcagctattttttttttaaatttacttttagtagagatggagtttcaccatggccaggatggtctcatctcctgacctcgtgatccacccgccttggcctcccaaagtgctgagatgacagctttcaaatcatagaatatagctatgcactgtcattattaatgtcatctcttgtgtgaatttaataattttactaacccttcttaaatttataagaatttaggtcatttccacttttttgccttataaagaaatttaattgtttgcatgtatttttgtgtgcttctatgatgggacaattttgccaagtgaaattgttgagaggagccattcttcaagacagcaattccatgtgcaggaattgtccgacagatggatccaaaagtgtggaaagatttaagtacgaggatatttattgcacattaattataacagaaagagtgaaaactctcctgtcttcattaatgggataaattatgtctatccatgtaataaaatactatgtagctatttaaaaagtggaggcagactgatgcactggatatgaaacagtctcctaggtacattgcctaattaaaaacaaaaagtaaggtggaaataaaaggaggtggtagaaacgagaagtcagggagaaacctaatttttgaactcttagaatgtttgactgtgggtatatactacctttcaaaaacattattattattattatttaaaaaacaagccaggcatggtggtgtgcacctgtagtcccagctacttgggaggctgaggtggaagatacagcgagcccagtttgggtccagcctgggcaacgtagcaagactctgtctctaaaacaaataaacaagcaaaattatgatatattttgccaaatttccctctagatacatactatcctcaaaccaccatttttattctgtggcactcctcattccaaaggccctgtggctttcactcccaacaaggtcctaagttcaaactctttatggtggcctccaatgccttttgcatacatttttttttttttttgagatggtgtttcactcttgttccccaggctggagtgcggggtgcgatctcgactcactgcaacctctgtctccccggttcaaacgattctcctgcctcgcctcccgggtagctgggattacaggcacgtgccaccatgcccagctagtttttgtattttagtagagatggggtttcaccatgttggccaggctggtctcgaactcctgacctaaaggatctgcccaccttggcctcccaaagtgctaggattacaggcaggagccaccacgcttgccagcagtaccatcttaatttatcccaagtctctttgttgctcttcatgaatacttggctcacacaggctcagcagcacccccccagaatacccccaagtccaccatggcatgaagatctgaacaagctacttccagaaatcatgttcttctatcctatgtgctcaagtaggagacccagccaacagtcagagtcatgaatctaaagtttagtaggttcctggcatgtagtagatgtcaatgtatgaatgtttagatgggttacctgtgtttagatggttgcctcagatcttggcctggagtcaaactgcctcagtcaaatttcagcttcatcacttagttctctattggcaaaaagttaacctttctaggcctcagttttcttatgtgtaatgtggggataaaagtagtgccacctcaaagggttgttgtaaaaattaaatgtgaatatatgtaaagcacttagaacactgctggcacacacccaacaaatattagttgtaattatttttactttcttctttttattttcgtattgctttacttttctatacaaatctgtattatctttaaagtcaggggaaagaataaaatttctcattcattttgcccctttttcccgtcctaaaaactgaattccagctccacgtcttccaggaagcctgattgccatagtctccaggggtcttgactgcttggagctcctgggatgtccatcatctgtccctctgtctgtccgtccacgagcctcacactgcagtggcttgttccttcccaccacagcctccttgatgaggatgtcttgagggattcaggtctctctgtcccccatctgctccccagcaccatgccctaaatccagtgaagaggaggtcgtgctaaagcacctgtcctttggggaggagttcagagaaataagggtctcttgatggggagtgaggatggagagaggctttctccagggagccaagcacagatgcctgggcagggcccctcccctttgactgtgatgagttgttcacatgcttaagacaccagtaaagtgtggataccaagcagtttttttttttttttgaggcagggtcttgttttctcccaggctggagtgcagtggtgtgatctggctcactgcaacctctgcctcctgggttcaagcagtttgattctcctgcctcagcctctgagtagctgggattacaggtgtgcaccaccacgtccagctaattttttgtatttttagagagacgaggtttcgctctgttggccaggttggtctcaaactcctggcctcaagtgatcgcccaaagtgctgggataacaggcttgagccaccgtgcctggcctgaattttaaaaaatttttaacattaaaaaaaaaaaatcaaaggactcaccttgggaaaataaaaactgtgttggtttacttaatttcaagtttacttttgttttaattatatggattggaagggcaccatgattttttcaggactcaaagcatctccctagccctgaatgtacagtggaattttccagaggttcatgatatataatgtttaaaaaattgaatacaaaagcagctatgagaatccagctgtctctgttaagcctgccatttagttaaagaaatttgcaaaaaaaaatttatatctaaaacatgccactcatactaatgctatttttgttcttggaaagtacagttatttttcataaataatgttgtatgtgttaagatgcaataggttttttagtttctaagtgaattaatgcatacattttgtaagtttctcattgttagcttccaaatcagtaaaaaaaaactatagatataaccacataagcaagtgctctttggcatctcaataatttttaaaagtgtaaaggggtcttgagcccaaaagattgagaactgctggcctagagtgcacttcccctctaggattccaggtctgcccttaagagaaaacttcagactgacccaaatcacaggggagggagcctgaggctgtggctcaagtaaagatgaggctgagggccagaaaaatccagagcagctgtgccctgtgggtgcaccccaggcctctctgctgcttggaacccccatatccagagccccgtgggtccagcaacacagacctggtaccgcccatgggtgagttccaagggccaagcaaccagctggacacagatcccctgtgcactctggctgggagtcacctgtgttgttttgggaattcatcctcacaaacaatgagttagaacaacctatcacagctagacctggactggtcgggcagcagggtgtccttcccctctctgggcctctgtttacctggctataaaatggaagatgatactgctcccttcacccttgggcaaagtcatcgggcaactaataaaagactgtgaagctctaactcaccttacatcacctcatccttaggaccatgcctgtagccggtgacataggtgataggcagctgcgttcatgctcttgcagggaggtgctcacccagttggaaggcaagatgctctagtactgcatcagcagaccttgtccttgcccaccttatgtgggccagagctgtgtggcaagcctggggtaagaggtggcctcatccctgtcacctgtgtcctattgtggcctcgtctgtctttcctacatcacacattgttagcacctacgagcggctctgaagctgcaaagacttcagatctcctgtgtcactgctttggatgctcaggaatcacctcacttatgatcccctcttcattcattcttccattctgcattcattaattcctgtcaaaactcattcagcaaatacttcttcatgtcattaaagggagaatcactgtggaacctattgagatgtcagcggttctaacacttttgtatcaacttctcgatgtcatctgattctagatcctccccttggttcagttcggctcactactctgtgatgaggatagtgtttttgaaatattttcagtcatatttctggtaaattatgtgacctgaggttccccacccactgaagccaagagtctctgtgcttccgggacagggcagggagactaattataatgggtcatcatctagcactgactgccctatcaggttttttggttctgttttgttttgttttgtccttcataagacaatgttgtttttaaagctaggctttgccagaaagcgtttagtaaactctttaagtttccattaactatcaggatccaggcttaatgatcatagctcattgtagcctggatctcctgggctcaagtgattctcccaccccagccttcgagtagctgggagtacaggcatgtgccactatgtctggctaatttttactttattttatttttgtggaggcagggtctcgcactgtgttgcccaggcttgtctcaaactcttggcctcagtggtcctcctgccttggtctccccatttgttgggattacaggcatgaaccactgtactggcctggatacaccatttcagggaaatcctttctaccagggcactgaggggagcccactgtgttgagtatggggaagagaagtgagaccaaggaaggagaagcaggcagattttctactgatttcagctttctggggcaaatttccatagtttcaggaaaaagccaaaattagaggcttttgccaaccaacctatggtaggaaaaacatcagaacagtggttgcctttgggggtgttagagacagagattggaaaggggcatgaggggagtttctggagtgatcattttttctaattttgattggaatattgattacataggcatttattaaaatgcagcaaatgtacactttgatttgtacatctcattatatgtgaatttaacaccaagaaaaaaactgtaaacaaatttaaactctagttaaccataggcatgctgaagtattcagaaggaagtgtaccaatgtctgcattgactttgaaatgcaccaaaaatttctggttggatggatgtgtggatggacgaaaggtggatggaagagtgataaaataagcatagtaaaatgttaatggtagaatcctaggtgagggcatatggtgttcactattaaattcttttaactttgctctatgtttgaaaattttcatataaaatgaaaaaagggtttttgcttcatgtagcatcatgttttctagctgtccagttcttttattgttattaatttttttttttttaagaaacaaggtctatgctatgtttcccaggtggactcaaactcctgggctcaaaagatccttccgtgtcagcctcctgagtagctgggatacaggcgtatgccactgcacacggcttgcagacccttttgaatgcctttgctgtatttgcaaatttccagcctcaatagtcacaccatccaaagccagaacacagaaaactcaaagccagcctccctggtaggtaggatgcaggcctgccacatgcactcatcagatcaaacccagcaagcaagactccagctcagaagtgtgcaattggatggcatggattacctgcaggaggcggtctgttggcatgaatggtggcagagaccagcttccatggggatcatggtttactagtgctgcaggatgagttcctgccccagaggagcattggcagaacaggggcaggagcgttggagcagcttctatttcctcgtcaagccggttctgaggttctggatcttattcctggaagcgagtgctcctgatgattctgcgggtcctcctttatccttttataaatgcatttttgcagcagaggagcttgagaggtaggcctgaaacaagcctcctgtccacggcaggcagggatccgaagttcccatatggtcaagggaggggaatgaagacgctgaaaggacttgttgaccagcgtagcctggagttgggacagaagccatggaaagtgaggacttctcagctggaggcacaggcagggaccacagcctccagtgctgggagccagcaccacatccagaaggccagttgtgacagacacacatcaactgtcaccaatcaaggaccaggcgaaagcagacaagtctgtaaacgagaacatgtgggtcccaacctccctcacagaagcccccattccaggctccctagatgcatcctggaggagaacagaaggaggaggagtctgagagattaagcacttacgcggcagggctggattataattacaagaccgcttggactggaagagtctaaggtatgattaacccaagttaaaaacgtgtttttttctggaacccagcaggaccagggctcataaagattagatcaggataaaaataaagtcatcttttcattacccattggagaactgcagtgctaccatttacttgcactttctgcgtgtcaggagctgctctaatttgcattttacctactactaagcaccatgttgttcccacttttctgaagggaaaactgaggctcagaaagaatatgcatacttctcagttcacaaagttgataatgaatggagtcaaaaattgaacccagagagtctgagtttagatctatagtcttaaccatggtgctagcgctacaatgggcagggatggacatggcagaaaacaaggaggttgccatgctctggctttgctgctccagttatcactttgttcaagattctcacttcatttggccaaccaccaagcctatgttagtgtctatgtgggtgaggcattgtggagagtgaggagttagacctgatcctgctaccaggcattaccttgctcagaatcttttcatcattcatttatttcagatgataatggtggggaagagggaaggattaaaaatgaataagcacagtttctagccttaaaggaactcattatctataagaaagaaaaacaaatacacaaagtggcagcccattgaagtggatgattcctaagaaatacattaacagagagttgtgttagtcagagctaggagaggacatttccagcaaaactttcccgggaaaaagaatgaaagtaattaattctgttgggagaatgatgttcttcttgtaaattctaagtgttttttaaggaaatcgttgaaaaaagtatgcttacaatcaaatccccagtctttcctgtgtttaaagaatgtttaaactctcaagggagatgaacaaggaaggaaaagatgaaatggttaggagtgataatctccagctctgactgtgtcctggccagtacagcctggctcatcctcaggccagtcactacaaaagccagacatgaatgccgccccctaaaacacaaaaatgccttactgagagctttgcaaacagaggagtaaaagggcttcccggcatagatattggcgtgaacacctgcagtcagttctgaagcctcaccagtacggcaagaaggacttcggaagaatcagagagaagttaacaacgcaaaaccttgaaagctcaaaagcagggggaagacaggcaaataatgagcagatctgaaaaaaaaaaaaaaaaaaaaaaaagctaattctcacctggcaacgagaaatccaggcagtgtgaaaaccaacccaatcttcctttgcagcaagctgaaaagctctggaatttgacagatactctgtagatggagcttgggatggaggggtttgtgtaagaaaataagaattggctgagacttatttatgaagtagtgggtcccaggtcccctccacattctgtgagctgaatcactgcccttccctggcccaacaaaagtctgtggctttgttcttcagtgagagtaaaagagagggctctgggctgaagcacaacaagctcagctgaggtctagggtctatgctgaaaatggggtttcaagggacatttgtctactggatgctgagacgctggcccacccacctccacctgccccgtgctccaccatgatgccgcagccaggaggaaacagtgctcacgattccgtcagctccaaggaaagacttaaagatactgacatgagagtttcctcagctccacagccctgtgtagtaccctacaaggacaccctcaagcacacactcagaacttccagttttttatttgtttgctgttgatgtttgagaaagggtctcactctgttgcccaggctggagtgcagtggcgccatccagctcactctcacctcgaccttcctgggctcaagtgatcctcccacctcagcctcctgagagctgggaccacagacatgcaccaccacacccggctaattttaaaattttttgtaaaatgggggtcccactatgttgccaggctggtcttaaatttagcctcaagcaatcctgcctagcttcccaaggcattggaattataggcgtgagccaccacacccagtcccaatcagttttttagcccctacttttaaatatcagcagaaaagatttgccagacatctaaagaaaattttaacatgaaagagaaaggaaaaaaaataaacatactaaaataagaagctcagaggaatcgcctatttgaggagaagaacattcaggaaaataaactattcttgatgttttcagagctggaaaaaatattgcaaccataaaacaagagcgggatatgatacaaaaaagaaacatccaaccataaaaagctctagaaatttacaaatatgatagtggaaacaaaaaaaatctcaaagttacagataagagaataaagttgaagctatggctcagcaagttgtttaaaaagaaaaccaggatgtccaagagagaaaaagacaatcagaaggccaatccacaaggtcagatattagagaacaggagttttagaaaaaatgagagacagagatagaataagagccagcaagggagggaggggtgggcagggtggggggaggggtagtgtgtcagccaaaagggaggaaattatcaataaatattttaagacaaattttcagaaacaaaggacatgacttttcaaattgaaaggagtactgaatgtcaagcataatgggtgatggatgaaaatgggcacttaccaagccctgtgaattacagcctactggagacacagagaagatcctatgggcttccagaggaaaacaacagataggtacaaacgattgggatttgaggtgactttggttttcccaacaataacactagagtgagaaaattccaagggaaaatcatttccattgtaggattctatacccagccaaactataaccaagtgtgaagataaaatgcattttagacatgcaaggtctcaaaagatctgcctttaaggccctttcttgagaagctgttggaggatatcctgcaacaaagaaggagtaagctaggtagaagaaaatatgtttgctacatgaaacaatagaaccaacttaggatacaagttccaggtgatgctgaagggagacccaggatgacagctgacaactggaggatatcctgcaacattaaggaataagccaggtaagaagaaaatatatttgctacatgaaacaatagatccagcttagagacagattccagggcgatgctgaagggaggccccagaacatcagctgggaatttggttaaaaaccaatcagtccagggcacaacagatcagaagactccaagcaaaacttcctcagatgtcaaatctgatagaatacctggtgtgtctaaaagtcttgagaggctatttaaaaaatagtgaatgtttgggattgaaatagtagtgggtgtatagaaaactaagccaatataaagctagactttgaatcattaactccagggaagggaaagcaaaatgttactgaggaaaggaaagtaaacatgattttactacatggatcaactgtgaatttacaaagcttaataaggtaagacctgatagtaaagtaaccaatgttatgacttaacagtactgggaggatgggagatgggaggctatacttggcatgatggtggtaggaatatgagaggggtaagctcttatttgccatgggacagttgtcactatttttctggcaaatcaagaagtagcaattattttcctcagagctgttatttagaggtatgaaggtaaatttaaaaataattaggtaaaaaagttgaatttatttgtaactttgtgtagcaaattcccacaaacttagcagcttaaaagaacatctatgaaaaagtcattgtttctcaaaagttcaacagaattatcaaaaaacccagaaattccacttgcagtatatactcaaaagaagtaaaatttccaataagcacatgtgcaggcatggttatggtgtagcatttacaatagctgaaaggcagaagcaacccaaatgcccatcctcagatgaatgataaacggtggaatatgcatggagcattactcagccgaaaagtgagacaaagtactgatacatcttacaacatagataagccttgaaaacaattgtactaaaccttgaaaacattatagaagtgaaagaagacagacaaaaagtcatatattgtctgattccttttatatgagatgccagaataggtaaaatgatacggaaagccgatggttgccaagggctgggttggaggtgagaatgaggaggagttgctttatgggtataaggtgcctgtttagggtgatgaaaatgttttgaactgtatggaagtcaccatttgcacaaatgccactgaattgtcctaaatcccactgattgttcactttaaagtggttaattttatgttatgtgaatttcacctcaattaataaaactgtaatctaattgcccagtattattctgggttagtgtgtgcagcactccactaatgaggagaattataccatgaggtagaattataaccttatttacttttttaaatttatttaggcattctattctttctcttcaatttataccattccaaaaaatggagtaatacgcgccttttttttttttgagatggagtttcgctcttgttgcccaggctggagtgcaatggcgcaatcttgctcactgcacccttcgcctcctgggttcaagcgattctcctgactcagcctcccgagtgctgggattacaggcacccaccaccacgcccagccaattttttgtatttttagtacagaggggtttcactatgttggccaggctagtcttgaactcctgacctcaggcgatccacccagtcagcctcccaaaatgctgagcgtgagctatcatgcccggccgttcttctttaaaaacaaacaaataaacaaacaaaaaaaccctaagagtggaggaaggggtgtgcttattagtgggtcttttgaaaatgtcctgggtccttttaacttgagttatcaactaaataggacaagtcgtattctgcagcatgaggaagaatatccagaaatcatgaccttgtctatgtgaaataagctctttctgaaaaacaaaacaaaaacaccccatgcatttactattccacagttttggaagtctaagctatttaattggattctctgctgatgttctcacatggctgaaaccaggctgcacccagggccgcttctcatctgaggcttggggtcctcttccacgctcatgcagattgttggagaaaccggaagttctaggactgaggtctttgtttttttgctagctgtcagctaaggctgctctcaggtcctagaagctacccatagtcacttgccaagtggctcatacaggctttttccaggccagctgaagcaggtctctctgatttcctcttctgcaaccagacagagaaaatctttgctttcaaagggctcacctgattatatgtggcctacctagaatacttttcctttgccataaatgtgacatagtcatgggagtgatatcatactcatagtttctatccacactcaaagggagggcattttataaggacaagggtcattggtggttatattagtcagggttctcagaaaaacagagccaattgattttatttatttatttatttatttattataaggaattggtcatgtgatgatggaggctgacaggtgctaagatatgcggggtgagtcagcaagctggaacccaggacagccaacggtatagttctactctgaagcccagcaggctcaagaatcaggagagctgatgtttcagtttgagtctgaaagaagggaaaagctgatgtccaaattcgaagtaggcaggcaggaggaattccctcttgttcaggggagagtcagcctttttgtcctattctgacttcacctgattggataagggccacccacattagagagggccatctgctttactcagctaccaatttaaatattaatctcacccaaaacaccctcacagaaacacctagaacaatattgaccaaatatctgagaactccatggtccagtcaagttgccacatgatattaaccctctggtgagcatcttagaattctgcctcccgtagaaagggaaagaagtagctactggagaggggcaactggaggaaaaaaaagtggatgggtgatgttttccatgccaaccttgtagagaatttgacttgtacttagacctgggccatacaccatatccttccctatagggtcaggagctgtggggacaatgggccatgtccacatggagcctgtgaccccatcttctgtctagaccagtcagggaccactgaataccctgatcaaacagctctgcgcctgcatgtaaattgtgaacggtctctttcccaggctagtcctcttgttggtggactgaacactgctgtgtgtacctccgatctgagaaatggaccagggcagctatttgtgatggtaccgatagcacttgaacatgtggctgaggtgtctttttaaagttaaactttcagttttggggtaattgtagattcacatgagttgtgagaaataacacagaaaaatcccaggttactgtttacccagtttctcccaatgtgacaccttgtaaaacgacagtacagtatcacgttgaaattaacattgatacaacccgtaaccttatgcacatttccctagtttttactcctactgatgtgtgtgtgtttatttgtatcaaatattatcacatgtgtaggtttgtgtatccaccaccacagccaatgtataaaacaacccatcactaaaaggatctcttatgttcttttttttttttttgagacagagtctcactcgttgcccaggctggaaagcagtggtgtgatctcagctcactgcaagctctgcctcctggttcacaccattctcctgcctcagcctccctagtagctgggactacaggtgcttgccacccaccaggctaattttttctatttttagtagagatggggtttcaccgtgttagccaggatgtctcgatctcctgacctcatgatccgtccacctcagcctcccaaagtgctgggattacggcgtgagccaccgcgcccggcctcttgtgttcttttataaccacatcaacttcatcaattctgtcctacactccctctgtcctactggcaaccactacgctgttcttcatttctatatttttgtcatttcaagaatgttatataaatagaaacatatagtatgtaacattttagggtaactttttttcctacacagtgtaactcccatgagattcttccaattgttgtatgtattatagtttgttccaaatgttggccaggatgcagagaaccaggatcagtcatacatttccatgagaatataaaataatacagcgtctctggaaacaggttggcagcttcttacaaaactaacatgcaatttccgtgtgactcagcaattgtcctcattggcatttaacctagagagatgaaacttatgttcacactaaaatctgtatatgaatgtctatagcaactttattcttaatatccaatgctgaaaacagccagtccttcggcggatgaattgttaaaccatggtacatctaactgtgtttctctatggagctacaaagaggaacaaactattgatatgcatgacaagtcaaggctagtattatcctaagagaaaaaccagagaaaagcagtaaaaaacaaacaaacaaaaaacaaaactggggtagtgctttcttttttacttcctgcagaaacccgagccaccttcattgctatactggggctggggctgggtaaccttcctctgttgggtgtgagctgtaagatgttggctgctgtgttgttcctccagtcctgggatctctaaccagttcatcttcttcttacacctctcagagttctccttttgttgcctcttgagttatttctggggcttattgttgtaccagtggggacaagtggggtgatcaagtctatgatatgttgtttaaactgggagtcccaagtgtcattttatactctgaagggtggcacagagccacaggtggggaggaagatagagatatctagggccaggggtagggagctttttctacactattatttatgaaacaaaattggagtgtctaaaatttacactgagtcttctaggtcattttgaatatacatatttgtcaaggctgagtagacaatgcatattttttagcagcttattaacatgacttatgacttttaaatattgcataccaaattcataagcctccgtttctactcctgccccagcctggcaattgctaaggcaggcctagtaagtgtgtaagtcattaataaaaagtaaaaataaaaatactttctttaaagggggaaaaacattttctcgtttcaccttttagtaagctgattagaaaaagtgaacttggggccaggcatggtggctcacacctataatcccagcgctttgggaggctgaggtgggagatcacttgagaccaggaggtcaagcaatgtgcagcatagtgaggccctgtctctaaaaaattttttttttttaaattagacaggtgcggtggtgagtgcctgtagtcccaactacttggaggctgaggcgagaggactgcttgagcccaggagttcaaggttacaatgagctatgaggtgctactgcactccagcctgggcaacagagtgagaccctgtttctaaagaaagaaaaagtgaactttatttttatttcattttttctttgcatgtttttgaaagactcatgaggaaatgacgggtggtccacttggagaatgaggcctggtgtcagttcagagctgggtctggctctcataaaagatagatattattgcttagtatgatgctaagaaaaagtgggcagttgcctaaagaaatatattaagtaacaaaattaagtaaatagaatattctagggccatggaagaaaagaagcacaaggaatctgcctcctcacctaggcaacaattgaactgccagactctgtcgatataactattttgaaactctggagtctacctaaggcttgtaaatgccaagagaaggttggatggtaaattgcaattaattttactaaattttagcttttagtgcagtagcaactaccattctccatggtaggaaactttgcacgcattctgggagcagcttaaaagagccagagtggcaaaagggaccctgtcctccaaatatcaggaatctgtgctctgattgctgattgctgttctaatcacagagatgcagccaaaaaggtggcaatcattgttgttacacctcccctcatgctgcaagcccctctccctccagctgaagcaaattccagggtacttaaaggggtgggaatctgactttcccttcatttttctgtttttgtgcttttggggaccagatattagacactggacattcaaaagcaactgtattcatggaggaaattaaaaaacgactgcacatgctcccaaaggggcaggctcagcaaagacccgatacaaccttaaatttatgccttaggctgatttcagcacagagacggtctataagaaaaaaaatcaaaagccataaacaaaacaaaaaaactcaaactctgggtaagggggaattggatttccagagttaccacattgttagattcaaatgccagttttcaacaaaaaattacaacgcacacaaagaaacatgaaagtatggcccacttaaggaaaaaataaattagcagaaactgtttctggaaaaggcttgatctactggacaaagatttggaataactgtcttaaagatactcaaagaactaaagaaaaatgtagtgaaaataaaaacaaatgtataaataaaatggaaatattaataaaggagataaaaaccaaaagagaatcgaaactctggaactgaaaagtacaagcaagaaaataaaaaacatttgatagagggattgaaagcaaatttgaacaggcagaagaaagaatcagcaaacttgaagacaggacaatggaattattgaatatgggaaatagaaaaaaaaaaagattgaagaaaagtaaacataacctaacaacctgtggtggacaccattaagtgggcaaaaataagcattgtgggaatcccaaaaggaaagaatgagagaaaggggcagagaaaatattttaagaaataattgctgaaaactccccaatttgatgaagatatgaatataaacatccaagaagctcaatgaactccaagtagaatgactcaaagagacctacaccaagacacattaaaatcaaactcttaaaaatcaaaaacagaaatcttaagagcagcaaaaaccaagcaacttctcacatacaagggaatctcaataagattaaagtaaatttctcattaaaaactttagaggcccaaaggcagtgagctgatatactaaaaggctaaaagaaaaaaactatcaactaagaatcttgtatccagcaaaactgtcctttgaagtgagggagaaattaagacatccccagataaacaaaagctgaaggactgtgtcactgcgaacctgttctaggtgaaataaaaggacactatatagtaactcaaagctgtttgaagaataacaatctcggtaaaggtaaacacatgggcaagtataaaagctagtattatcgtaacatggtttataattccttttttgttttatacatgatttaagagactacttttgtgacatttcaactgaatgggtggggatggaactgtaaagatgcagagtttttgtgtattaattaagtaaggtggtatacattcaaattagagtgcagtgactttaggatgttaaatgtaacccccaggtcacaccaagaaaatagccatggggtgatttcagttatatgaggtacttagaatagtaaatttatagagacagaaagtaaaatggtaaattccaggggttcagggaaaaggggaatgagaattattgtttaatgagtatagaattttatttttgcatgatgaaaagagtttttgaatgaatgatggtgatggttgcacaacaacatgaatatatttagtatcactaaactgtactttaaaaatggttaaaataggcaattttatgctatgcatattttaccacaataaaaaatgaaaaaaatttaaaaaaattctattttagggaggagatggaaatgttctacatcttgattgggtggtatttacatggtgggtacaatgatcaaaactcatcaaatgtaggaagaatcatattgttaaagtggccatactgctcaaagcaatgtacagattcaatgctatttctatcaacttctgataatatttttttacagaattagaaaaactattctaaaattcatatggagccaaacagcctgaatagccaaagcaatcctaagcaaaaagaacaaagccagaggcatcacatactcaacatcaatctatactacaaggctatcagtaaccaaaacagcatggtacaggtaaaaaacagacacatagaccaatgtaacagaatagagaacccagaaataaagccacacactacaaccatctgatcttcgacaaagtcaacaaaaacaagcaatgggggaaggactccttttcaataaacagtgctgagataacaggctagccatgtgcagaagattgaaactggacccttccttacaccatatacaaaaaccaactcaagatggattaaagacttaaatgtaaaaccaaaactacaaaaaccctagaagaaaatctaggaagggccctggcaaagatcttatgacaagaagacaaaagtaactgcaacaaaaacaaaaactgacaaatgggacctaattaaattaagagcttctgcacagcaaaagaaactatcaacagagtaaacagacaacctacaggatggagaaaatatttgcaaaccatgcatctgacaaaggtctaatatccagaatctataaggaattaaacaaattaacaagcaaaaacaaacaaccccattaaaaattgggcaaaggacataacagacacatttcaaaagaggacatatatggggccaacaaacctatgaaaaacttctcaaatcattaattattggagaaatgcaaatcaaaaccacaatgagataccatctcataccagcagaatggctattagtaaaaagtcaaaaaaataacagatgctggtgagtttgtagagaaggggacacttgtatactgctggtgggaatgtaaattagctcagccattctggaaagcagttgatgatttctcaaagaacttaaaatagaattaccattcgaaccagcaatcccattttgtatatatacccaaaggaatataaatctaccataaagacacatgcacgtgtatgtttatgcagcactattcacaatagcaaagacatgcaaccaaccttaatgcccatcaacagtagacggataaagaaaatgtggtacatatacaccatgggatactatacagccataaaaaagaagagattatgtcctttgcagcaacatggatggagctgggaaccattattttaatttagctacacagaaacagaaaaccaaataccacatgttctcacttataagtgggagctaaactttagtatacatggacacaaagaagggaacaatagacaccagggcctacttgggggtggaggtgggaggagggttaggattgaaaaactacctattgggtactgtgcttattacttgagggatggaataatctgaacatcaatcccccatgacacacaatttttctgtgtaacaaacctgatgtgtacccctgaacctaaagtaaaagttaaaaataacaaaaactcatcaaatggaaccttaagatttatattctattgtatgttaattatatctcaataaaagtataaaaacattaaaagttaagtaaagacagaatcaatagttctcagagaaaggtgaaaattgtgaggacgtcacaactcacagaagtttgggattcatagatcaccttgaggccatcctctctgagagttatgaagccttatgcttgtgaagaagccattgctggtgacaacagttgggtaataataacacccccttgttagtgctttcagcacattataatttacaccaaaatttcagatatataatctatatgactttgctcaaagaggctgaaaaatatgtgtaattattgatgcctatcttggaaactgccctccaaaacattccaaaggggcttggcaactgttgggtggtgactctgtagacaaataaagcttttacctcccttgagcaaaccccatggaatgcaatgtctgggcaccggctggccagacctggcgtagctaatgtcaagaggctagaacaaacctgcccactgagttggtcatgggttaggaagctggcccccctcctacaggtgccgagaggatgtgaggagaaggtgcagcaggtacaacatgggagggtctttgtcaccatgtctttcactcttttctctcatctcaactcctacagatacgtatatattaaacaacaaatcaaaagtgtataaagtgaaataaaagtttcttcattccaataccactaaaatccagccttcagaattcaccatggttaaagacagtgattcttaaattctttttctgctctaagcatttattttgagtgatctcatcctgcccatgactttgaatatcacctgtagtttaatgtgtttcatatctcttatcttctgattccagaaaacaataaccaatgtctactggagaaactccaccaggatatccctcaagcacaaaaacacatgtcccaagctgtctttttgtcttcccttaacctgctttgatggtgtcattcctgtcttccaactccagctggaagcctgtggtcctcttctactcctcctgcccctcactcccacatctaatcaccatggcctgtttatcttatttttctcatacataaagaatttaaatattgtatgaagtcaacttttccctgagtccagatggctttcagaggtgaggagcaaaggttaagatcattgagaagcacagggaaggagagcttagggtagggactgccacacaattccacagaggagacttcaagtgtcttgggagacatgttggggcagggtgaggggtgtttagtttgggtttccttggaagcaaaaccctaagataatcatgggtacatatagtcgattgggaggtgagtcaaagaagcagaagtgaaggagcattaggagtgatactgggaagggagaatgtcagtcaagtgtttgtgaatgagtagttcactgtgggtaactggggctcagtctactggggactgtctgagaagctgtatggaatacatcctagaactgtccctctagaactgagggctgataccagtctccattggttgtgggtcacctccagaggttaacacccccacactctggaatgcacaacacatggctgagcagtcttctcaagctcctctgaaagcaaagcaggagatgccatggcatgcacttgatatgggatgttaacagtggtatacggaggaagacatgtacatcacaaatgtttactacgaggggaggtagagtgagcccagctcctggccccaaccccactaaatcatagaacttccctgactattttatgtacatcaaagtttcattagttgttgatttgaagaaagcattttgcagctggaatcgtttgaaagacactgttctttacagtcgatttcggcctaattagtagcttcactctgtgtgcccctacttgacatatatgactgtaatccccaattccctggcagatactgaaattccagcattaaaatctcaagctctcattctttcacatgaaatctctgttaagatgcatgtacccctgacaggaccctctctgagctgcctttacatttaatgtaattaatgataaaataggatttacatctgccattttgccatttgtttctgtcccgagtctttgttcttttattcctctgtcactgacttattttatgttgaatatttctagtgtaccattttaatttccttgttatttatttcactataattcttaagtcatttcttagtggttgccctggggtgaaaattagcatctcaactttaaaaataatctagtttaattaatactaacttaatgtcaattgcatacacaaattttgcttcaataacactcaatttcttgcccttccattgtgaaattattgtcatacaaattacgtttttatacattataaacaataaacatagttttataattattgcttcatgctgttgtctttttaaaataattgatttttaaaaaatttgtggcaaaatatacgtaacataaaatttagcattttgacaattttaagtaacactgttcggtggcattaagcacattcacatcgttgttcaaccgtcaccaccatccactccagaactcttttcatcctgcaaaactgaaactctgtactcattaaacaataactccaatttcccccaccccaagcccctgacaaccactatcatagttttatcttgatgaatttgctactttaataacttacatgagtgaaattatacaggatcctgtgaggaattgtcatacatttttcatagtggctgtcctgtccaaagtgccatttttgccaacactaattattttctgggttttttttttatagcagccatccaaatgagtgttattttcttaattgttagtcatgtgagcatctttttatgtgcttattggccatttgcatatcttctttggataaatctctcttaagtcttttgctcattttaaaattttggattgttttttgttcttgagttttaaggattcccatacattctgtatattaatcccttatcagaaatgtgatttgcaaatattttctcccatctttgagttgcctttttactctattgatagtgtttacaaagtttttaattttgatgaatccaatttgtctattttttcttttattgcttgtgcttttggtggcattaccaaatccaagtcatgaaatatttgccctctgttttcgtctaaggattttatagttttagctcttagattagttctttggtccattttgaatttgttttgtatatgttattaggtaagagtccaacttattcttttgcatttggatatagttttctcagcaccaattgttgaaaagactgtcttttcccctacagaatggtttgggcacccttgcaaaaaatcatttggctatatatgtgaagattatttctgggctctctattctattcctttgagtccatatgtctgtctttaatgccagtacacactattatgattactgttgctttgtagtaagtttcaaaaaatcaaataggaaaaaaggagttacaaaaaataatacacgtgtactatgttttatatttatctaagcagttaactttccaagaatctttatttatgtggattcatgttactttctagtgtcctttcatttcagcctcagattctttttagtatttcttgtggggcaggttggttagtgataaattctgtttttattatttgggaatgtcttaatttctcttaattcttggttgacagccttgctctttcaacatttgaatatgtcatcccactaatctctggcctctgtggtttctgatgagaggtcacctttaaccttattaaagatccattatatataatgagttcattttttaattttcagattctttcgcctttgaactatttgataataatatgtttaagtgtgaatttccttgattttctcctattggagttcattaagtttcagaaaaattttatccattatttcttcaaatattatttccattctttctctctctcatctcctctgagactcccattatatgtacattggtgtgcttgatgtgacatacagattcatttttctttattctttttttttctgtttcttagattggataatccaattaacttgtcttcaagataatagattctttcttctgccatctgaaatctgttgttggcctctctagtcaaaatttcattttacttattttatgaaaagtcactgtgcttttcaatctgggatttccatttggttcttgtttgtaatttgtatctctttattaatatcctctattggttagacatcacccctatactttcctttaattgtttagacatgctttctcttagttcttgaacatatttataaatctgattttaaagtctttgcctagtaggtacaatatctgtttcctttggggacagtttttattaatacttaatttctcagtatggacatattttcctgtttctgtgtgtctcataatttgtgttgaaaactggacattctacatagaacctgggaactctgaaatcagatttccacacttttttgctgtgctgctattgttgtctctgttcagttggcttgtggtcagctaacgattggccggagattctcttaaattccttgatcaataagtgtttgttcctttgctaaggggctctctgtgtgtgttggggcacatctgcatcacttggcagttctcgatttctgctttagcctttacttcctgctggcataagacctcaaggccaaatatatgtaaatattgaggctttctcgaggcctcacacaagcctgctcacaaaacagccttctagatctcaggaataagccagatcttttcaatgtggatatttcacttctcacatctttctctactttttggctaggctcttgtttgactaaattggtatcactgctccaggcagctgtgatgtaaacaggtgctgctgattgtttttgaaaaacactttgggactaggacttctcctccaggcaaaatttaagttagatcatgtaaaaacaacacctttccagggagctgcaagatgaatcaatagtgacaatgttctggggatgaggctacataaggagcttcaaactggtctgccccactggtggctgcgttactggtttttaaagatatgggtgattgtgaggcttccgggttataggctacagagaagaggaagggggagggaaacaggtcaaattacaaagtcacagatcttgtgtttttattgagattttgcaattttctggaatgaatgctcctcagattattgtaaattggttaattttgagttctataaaattgattttgacaatttttgtcagcattttcattgctttacagaggtccttattcctgaatttccatctccagaatatgcattgtatgtatgtatgattttctgttacggaaaatttcaaatacatacacaaatagagagaataggataataaagcccatgtacccatcaagacaggttcaacaaattttaacatatggctggttttgtttcatttgttgtagtctgcatcccaagaaagcagaggctcaagtgaagatgtagacactttattaggagggctttcctagagaaagagccaatactagggtgttattgagctagccactgctagtgcaactgattgccttttttttttttttttttttttttttgagatggagtctcgctattcacccaggctggagtgcagtggtgtgatctcagctcactgcaacctctgcctcccaggtcaagtgatgctcctgcctcagcctcctgagtatctgggattacaggcatgcatcaccaacctggctatttttttttttttattatttctagtagagatggggtttcaccatgttggcaggctggtctcgaactcctgacctcaagtgatccacctgtcttgacctcccaaaatgtggattacaggtgtgagccagtgcgcccaaactcccaaatgattgccttcgataagtcatttaagctgcttttcagggctgtgcgcctctgtgagaaaggtggaagaatgtatccattgaccctatctctttgatgaaaggatcatcatgcagggtattaactcctctgtacttccagttgaagtgtgtggctgcttacgggtgcaaagggagatgcagtcaggtgacaacaccagttctgcagcagcgactggcacaagtgacaggtgaggccaagagattggaaggcctgatacaatctgtatgttaccccagctccttgtccccgcctcccatgttggattaggatctgcattataacaagcttcccagctgctctcaatgtactctggagggcgcttatctcactcctttttttttttttttttttttttttttgagacggagtctcgctctgtcgcccaggctggagtgagtggcgcgatctcggctcactgcaagctccgcctcccgggttgcacgttgaaatcactggttcctgagtctggcgttgactagttgttaaattctggaggctggctgtagtaactaggctccctctgctggtcataattaagatttcagcaggctgtccccagccctcagcatcctgagtcttaacattccagccacagctatccaagcctacccctgtgattctccagaaaaggggcctctgctgtgctctaggcagatcctcagatccctcaatgtaggcatctccctgatgcacagactcagccctgattagaccacttctgactaaagagaaatccaaatctcacctcttcaaaagtcctctcaattacctccagtcagaatgaattgtactctcaaatcctggtgcttggggcggcagtaaggaaccactttgacagagatgatgctttagccaatgcctggccctgctgtaataattcaatctgatctttactgagcacttactatctgccaggtgctattctagtgttcaacatatagtaactcacccatcatcatgagtctatgaggtgagcaccattatttctgtgttgtacaaatgaggaaactgaggtgcagagagtttaagtaatttccccaaagtacacagccagttaaggggcagagccaggatccctaggccttctggtacaataaatattattgtattatgactgtgcccaccgaggcactgttaaggccttgacatccatgatcacattagctttgcagatgagaagctgggacttggagaggaagaggaagacattgcagctgacccggtccccctgtgcctctgctcaccaagtctgcccagtgggcctcctgcatcagacacattgtatgccataaaaatgcttattcctcgttgagtctcagccagtgagcttggggatggatgtgagaatctgcattttaataagcagccccagttgatcctgattcacacagaaatttggaaaccttaccaccctgcccatcctcatccattagagcacattctaccagtcacgttagtaaaaactcctcgagtgtggatctgtttttcttcgtaatgattaaaaatgccttctctgaagtaacagcatcttcgacaatggtggcttaaaatcctaaagatctttatttgtttagtcatacagtgtccagaatttgacagtctcaagactggtgtagcagctcagcagtggcgccaagggcctcgttccttcaacgtctgtgtttcactatccttgactcttggctgttttctggcctgttgcttcattgccaccaggtggttgctgcagatccaggcatcttgtctaaatagtactttcccagattttgctgcagcgagggcatggtcacatgacaggcttagcctagcggtgttctcacctggaatttttacttgggagctggtgtcaagaagagggcatggtgaggacccattctgggggcaatggtgatggccctggtggccagaatggattctcctgccatcttatcttaggtcaagcaatgatgtccttacctgatgggctttgtggtgcagttttggctgtatgctgggcttcatggtcactctttgcgcctgcgtgttttctaagcctgattccctaatattccagctggtctgtgagtttcctgatatccgttcaacattttctcctctcctcgattcgccagtgaatgtccattgctacagatggacttaccaggcttggatccttcaggtctcagtgaaacacaattccacagaaacgtccccggggctcagagaaaagttgcctattattcctgaacaaaacctgtgtctttccttcatcacacttatcacagcctgtcagcactttgttcgttacttgcattctggctccccactaggatagaagctccatggagagatggaccactgtcccttgtgtggataacatagagcctgacacacaatagctgttcaaaattgttgttgttgatagatgaatggatacatgaatggttgaagcgggcttgttttgagatggggctgacctggagtcaccagatgggcagataagccccttgcttcaggtcacattccttcctgcagagtcaatggagactccagttttgttcttttgccatcgttgaccacaagaaggcatcatgaagagaaaccctattcttaagcggggtcacaagggttgtccctgccctggctggggagggtgccgccaccccaacaaacacccactagccaagcataacagggaataataataaaatagtaatagatatagactgtaatttggctctgatgcttgtgcataatgcctagttagacactaataccctggagataataggggggacattaatgataccagggagtttttcaccaggctgaccttgttggggcttattccagttgctgttgttgcataacaaactatccctaaacgtagtggtaagaatattcatttattattcttatgggtgagcatttccgacagggcacagtggggatgcttgcctcttctccacactgtctgggtcgcagcttgaagacttgagggctgaggataaccagtgtctggtgctgacgttacctaaaggcttatttactcacatgattggtggttgattgctgatttgttggctgaatgcccacataaggcatttccatgtgatctggacttcctcatacatggtggctaggttccaagggtgagcgccggtggaggtcggggcgggtggggagagaagagagagagagagagagagagagagagagagagagagagagagagagagaggcagaagcatatggcctttataattgatcagaagtcacataggatcactgccactgaactctagcatcaaggcagtctcaaaggacaacccatattccaagggagaaattagactccaccttttgctgagacaggagagcatatagaattagaaatactactgtggccattttgggaaaatatgcctgttacagcccccctccccacccacccggcactgctgtaacccactaaattgggattattccagccagtcgaggtcaggctcttcccggtcctttctatctgcctctcagcctcattcactctggttcattaacacatctttccttctcatgtttctccccctgcctgaatttgagaaatcataacgttcttcaaggccagctcttatgagaagtcctccctgattgctccagctcccagctgggccttagggcttcttttccctctgaaacctgcttttccttccaggactgtgtggagctctgagcaccagggaatgttatcaaagaagatgcagctttggcattctggatgaagccaggatcgcagcacagtgattagggagtcagacacagagaagtggccgaagagggccagagtgagactggagaggaaggaaggagcttcccacatcacagctccctagggccacctcatggaggaagagcaatagagctgtgccctgtgacacctggagtccctgaattgccaggtggaaaagcactggtgttagttgcatgcttccttccctcacagcccatagccagtcctcatcacgtcttgtgggctctgccttctccacttcccacctacccatcgctaccaaatggaccacgccaccctcatctcttacctgggtggttacaacaacctcctccatggactcccgcagcagccagagggttttctttagaacacaagtcatatcctgtcacttctttgctcaaaccttcctgggcttcccatctcaatcacaatagaagcccaagtccttataacagcttcagggctctacaggatctgtgttcccctccagttaaccctaccctcacttttccactgcggaccattgcctcctttatcttcctcacacacaccaggggtactcccaaatggctttgccccctgctccagaacctgctccttcagatgttcacatggctctccctcatcattcatgcaaatttctacccaaataccaccgtcagagagcctgccctgcccatcccacccccgacatcccccatcctgacttttattcatcagtgtaccaatcattacttgaatttatattttttattgattatccatcttatcatctatctccccctaccttcccccacttccatcccactgccaccttcccacccccttgatgataaaccttcagaaagcactaatcatctgtgctgaatcccagaacctggtcacaggagggactcgttaatcacctgtgattcagtgagatcttgaccaataatttaatggcctggtgcccttgggaggtcacatattgcagaatcagatgagggggatgccagtgtcaaacataagataccaaaacctttttatagagttatcctccctacccctaatgcatttcatgattaaacagaaggctggtcaattagccgggcgcagtggtgagcacctcagtcccagctactcgggaggctgaggcaggagaatggcgtgaacctgggaagtggagccgtagtgagcagagatcgcgccactgcactccagcctgggcgacagagcgagactcccttcaaaaacaaacaaacaaacagaaggctggtccttcagtctgaagcactggccatcagagattttacaaatacctgtaattcccccatctaccagtagaaggtgccctactctcattctaagggttaagaaataccggaaggggcatgcttcatactgacaacaggcatgtcctctggggaaggagtggaagaggagtggggaagggggaactgcctattttttcactctcttaccgcttacatatttaaggaatttttataatgtgaatatatttgtataaaaatagtttaatgatctatatacttttaatttttttaatagagaaagcacatttacgacagaatggccagaagtctgactatataagtaatattacttaattttgttccagattgaaccgccttgattacacttctgaggcatactaaaactgcaggtttattccatgaaactcagaggcacagatcatcaaggcagtctgtgagaatgatggagttgctgcgtatcactccacttccattgcagttttcacagcacaaccaattatgccctgaggagggacaacacattgaacgtatcatgttaaggcactgaacatataatctattgtaatgtgacatcaatacatcattttatatatatttaccgtgtttccacctgcagattggcaaccgttgacacataaacaaatgattgcaataaagtaggtaagtgattataaaggtatgtgaagactagtatgagagcaaggaatgtagagaatttctctaagcctcagcttccccaccagtaccagtgtgtaataattccacctttgaaggttgtgggaggagaaatgacataatgtcagggggagtccctggtactaacattcattgtaatggatatgttgaattcagctctttgaggctggcttccccaggcaagtgtgatcaaggttggaggaggagtggtttagagccagacataggacgggtgaagaggctgcttctgggaataggatgctcatcagcataggaatgagagagccaataaactaagcagttgcaggaaaggagatgggaggaggcgtccaagaatgcctccctagggctgggtaccacagcacagacacacttcttgtttctgcttcatttttcctctgtatctctttgtaagcctgtgatgggatttatcacggatacctctttagaatttgtgtaggtagtactgcataacatacagattaggcactagaccagtctacctgggtatgagtcccagctctgtcatttactattttgtgatctaagtaacctcgaaatctctgcttcctcatttgtaaaatgggaataatattagtactttcctcaaagattgttggaaggattaaataaatacttatgataaccttagaaaagtgactagcatatttatactctcaatgaatattacatattaaaattcaatcagtcacttcattcattcattcataccaatttcatttactttttggctcttttatgaattcttatgggtgcttatctacaccagtattatgctaagtgtggagaatgtagggctaaagaagacatggtttttgcccatgacagcacaaagtctaggacaggggaggagagacgtaggccagacgactttaagccaagtggtcaaaaagacaatgaagggaaagcatagagagaaaaaaagagacctcgtgtgtttggatgagtgatgtgggaggaagatggggaaggttttgcaggagaggaaacatttgaactgagcatggagagtgaataaatattttcgtggtgataattaatataatacaacaataaataatatctatgctgtataacaaaccacatgaaaatgtggtgacaagacgacaaccagttctatggcagcaatttgtgttaggctcggctggagagttttctactgaacttcactccaaactcaattttaaaatagatatagggatactttggatatctatttcttcctcaatgggttttgatatttgtgtctttcaaggaatttattcattttatctaagttgtcaacctttttttttttttttttttttttttgagacagggtctggctctattacccaggttagagtgcaatggcccaacttggctcactgcaacttctgcctcctgggctcaaaccatcctctcacctcagccttctaatagctgggactacaggtgtgtgccaccgtgcctggctattttttttgatacagacaagtcttgccatgttgcccaggctggtcttgaactcctgagctcaagtgatcctccagcctggcctcccaagactacaggcatgagccaccatgcccagctaagttgtcaagctttttatcataagtttgtccataatatttctaaattattcttcaaatagctatagggtctcttattctgatattagtaatttgtgtctttcttattttttgctgatcagtctggctagagacttacaatgttattcatgttccgaaagaacccacttttagttacattgaattactattttgttttctattttctgttttattgatttatgctgtttggtatttccttttccatttattttagttttaggtttaatttcttcatttctttctttttttatgagacggagttttgctcttgttcccaggctggagtgcaatggcgcaatctttgctcaccacaacctctgcctcccaggttcagagattctcctgcttcagcctcctgagtagctggtattacaggtgcctgccaccacgccagctaattttttagttttaatagagacggggtttctccatgttgctcaggctggtctcatctcccgacctcaggtaatccacgggccttggcctttcaaagtgctgggattacaggctgagccgccgcgcccggcctggtttaatttcttcactttttggctgcctaaggtggaagtgagttcattgatttttttcgtttctaatatagacattttagtgctataaatattcctcgctgcatcctatgca

SEQ ID NO: 2922 - DNA, 100000 bp, Homo sapiens
gttggtctcctgaaaccacatcatgaaaccagatgttaaaaatggcccaactcaacagcagaatggctttgtaggtgtaagtattttgtaatagtacctggaaattgcagtttcatttgacacattgttctttcttttgttcatgtatgaaactcttgctaagacaagatttaggttctgtgggtctatcttgataaaaaacaaaaacaaagtaaaatatgaaataccccagaattgttccaaatttgtagagagatgaattctgaggattttcctcaggctagagaaaccagatgtcctcgcaaaggcaaatctagtaagataaaagtacaggctgcttttatacaggacaattctacacgtctgtgcattataccaagatgttaggtttctggagggactttacccatggacacaagcaatggggataacttcgttggtttttgggtaatcatagtggggtcccaacagttgtcgaggacccctcacttaattcattggctttatcagattcagtcttggaattggtatccccttcatctcccacacttagttaactcgtctgaataatcaaataattacaggccaatggaagcaaccaaacttataaaagagctatgaagaataagtgtgccacatgctatcctacaagcatgacaggaatacatgtaagggatttttttccctgcccctaccctggcctttcttgattctatttaaagcagtattgagtatttttgggattaaaggttgaagctgtagtcttgaatttgattagcaacaatgtgctttaaatccagtgatagaactcttgctttgctgtaagtctgaggtacctttggagcaagtaagagggtgtatttctgtacaaactggcacttggccaatttctcagtgtgatcaggcctctgcagagagagttcttgccctagaaaatgaccacatgcccttaagcccagagctattttagaacttagaacactcaatgacttatggtcacagataatttttaagtaaattctgtcctcttgatttttctttgccccagactgggcttcagagcagactcagtggggctgaggcaaacgcacacctttcttgtgttctcaatgtctatagtcctttatttctctgattgtaagtgctgaattagtgttatttctcatcccactaccacccccattgtgatatgtggaaaggaccagagagacagctttagggtgttcatggtggaaagtgcatattcagggatgagcggatggctcatttgtctgtaccttggaatctggctggatttgtcctgattcaaatgtcaagcatcagagtgcatcaacagcagagacaccaaaatgaagtttttaaaagttaaacgttggtaaacacctgcttgaaatgtccttgtagacagcttagctttaagccacctccctccttcccccaaccccatgccttagagtgtaatggaaagtgccggcgagaaagggttaagagatgacaatgtccttttgcatctgctctgacaacttagtcctgctgatgcaatgcaaaaaggctgatattaatccccccaaaagcagtcatattggaaaggctatgtgactttcaccacaacactgggccctttgtagtctgatgtttaattccattggaatttattctttccattgcttttctgactatacttggatttgaaactaccaggtcttactccgtacaaaactcaatctgccttgtgtttgacagacttcaaaacatccaaatctgttttatctacgggtttccactgaatcaaaaagcaaggtgcatgctttaccaagtaagtggcttgtctccttcagagttcttgggagaaatcccagttccagcgctaaagatgaatggccactacgaacttctcagcatcccactgtggggtcttttcctagctatatggcagatatggcatgtcctggcctgaagaaacaaaacattaattttggaattctgatggctttaaacctttgatctcactttctaactgtctttaaaacattttgcctacaacagttgcaagctgtggttttttgtctgtgtgaggtgactaacagtgctaccgctaccgctctctatgtggggaatgtattctctagcacccaaaaccacctactggcttccggcacctcttatcagctaagccatcagcctgagctgacatttcagcattcagaagctccctacccccaccagaagtaagtgacaggagagaaaaaagctcatttggcaatagtttgcttttgctgtttggcctggagaaagacattcgagtggtagaagattgtttaggaacagctggcgagcaccagggtgtgaggctgattttcgatatgacagccacttacaggaatgctgccagatacagctgtttaaaagccttaataaaagcaagtcaatactaatctttgccaaattaatcttttccctgacagcctatcagagcaatatgtttgggcttattgtaaacatacaattgtcaaacagggacgctccagactttaaaaactgtagtttggttcatactctttctttagaatgggatttttgttttctctgtagtatctaagtctttccattttattttctagtcactgttcttttcttctggcctcatgtcagtgtaataaaatttcactttcaaatgtctttgctagcaagctgttaataaaatgtgaaatgatcctgctggtgggcttcattaattaggcgcaactctgaccgtgctgaactataacaggtcttgttctcagttgtctctcatccgggaacaagaacttcatcttcacttcttctcatctatacattgcaggctgatgctggatacaaatgacaagatgtttggctaagtatgaaatgagaggcaaagtctaatctctctgtgtacacgtagattgccaagtgtgtctaacttgggtttaagttacctcttcctcccgcggctcccagccttcctcctccgtggttggtgaggttaggggctccccatcccctttctccaagcaatggtcttgtgtacagatttggagacttttttttgttaggaaaggttttccacactgggaaatcgttccaaataaaagtagagaaatcgccttgaaaatcctaaaaaatagaaccaggaaatacagtcttttccttgcttcaccaagtcatctaacacttggtaattagaaaaaaaaaattcagtatcctgttcatcaatagtttaatttgaatccatgaaacttgtctcctgaatgttctctcttgtgtttgacaccctacatgtctacacctcttttctcccttcttattttcttggtgagactagtgtgtattagatcttttactttgtcacaaatagaaaagctcttgttcaactatgtaggccaaaaaaatatggcataactattttgaaattctttcaatctttttgtaaccctaggtttttaatgaaacatttgcatctcactcctaatgcttgcctgtaatattcaattcccatctatatttaaagagcctttaaatatcaagaaaacaccatacaattcctgttgaggataattgatgatgttttattgatcttttttgtatcattgcattttttgtgcatctactgtgtgctatgacattccaaattgttttgagataaggaaattgttgaatttcaggcagacaaagagatttttaccatggggtgactcaatgaattcaaccattaagtggaagggtgacttagatttagaggttaaactcatgatacgatttttaaccttgccttgccactattttaatatttaataatcagcaaaagagatgaatttctgtttctatccttccttgaaaataacaattatggctggacacggtggctcatgcttgaatcccagcacttttgggaggctgaggcacgtggatcgcttgagcccaggagttcaagacagcctgggcaacatggcaaaaccctgtcactgcaaaatatagaaaaaaattagccagggtgttggcatgcacctgtggtcccagctacttgggaggctgaggtgggaggattggttggcccgggaggtagaggttgtggtgagccaagattgtgccactgcactccagcctgggtgcacagtgaggccctgtctccagaaaaaaaaaaaaaaaagaaataaaagaaaaaaaaagaaatgacaattatgagtggaataagaaaatgtaggtcaaatctctatttaacggataaactgaggacgtctatgtttaacaaaaactttctgttccagcagataacctatttattacaatgttcatatgaattttttactataacaaagaaatatgaatggctattgggatttactggaatttaaaatattccttgtttaatataacatacctgtctaggactcattctaagtggggaccttgtaaacaaacataattgattattcctttgagcattttctcccaggactttgtaagtacttctaattccatttgaaattacatatcaagttatggtcaaaaccccattgtctctattcccacaccttttggttgaatcatatgaaattaccatttcatagataaaacaggtcaatattagcaatttcatatggttcagtctaatcacttttccaatgagtgggacaactctttgcaaagggcaagagatccatagaaaagggattggttgttgatgtgctaattttaagtctgcattcataagtttaagaaatatcttagtaatgaatctgagccagagtatacattgaccttgattaacaagggtttgaagcaagcaagtccacttatgtgcaaattttctttcatcttgccacatctgagacagcgagactaacccccttcttcctcctcctcctcagcctatacatatgaagaagaggatgaagacctttatgataatccacttccacttattgacactagttataacttatttctcttctttatgattttcttaataacattttcttttctccagcttacttaagaatacagtatataatacataaaacatagaaaatatgtgtcactcaactgattatgtatcagtaaggcttctcctcaacaataggctattagtagttaagttttgcgggggtcaaattgcataggcattttcaactgcgtgggtgtggggaggagttggtgccccgacccctgcatgttcgagggttgactgtattgctttggtggccacggcttcccatggactgcttgtggtcatgcagacaggcctctttgcgtttaacacaaataataaaaataatcacagagaccaactcatccttggctataatttgactaactggaagtcattatttgactcattttgccttatcactcggtcacatttgaatgggaatcaggatttttgaattattctttcttaatcatttctgattatgttagagacacaactcaacccactcctacacactctcgcaattttttcttttttaatcagctataattttggttttggtgtgttggtgaagaaatctgtcgttccacagtgtgctgttatctctcagaatgactttactgatggtgctggaaatcttcggagtgcttcagcgagaactcggcgtgcacccccactgttcctctcagctacaagctccaagccgctgggctctgtgcccagggtggattctggctttctgaaagatggggatttcctaggcaacagctcatatactagagcctcaggttagtgagagggcattctcagagtttcaggaaagaacatttgggccatggcggccattaacccccactctgcccgatcacttccaccataaaatttatttggatttctcatctgactaggcttgctttttagagactgatggatcaccaaatagaatacgtcacgcataataacagttttattgatgatgtgttttcttttatttacatttgtttttacgtatttggtattgaatttcaacactctctaccctggtcgcacagctgctctagaaaagcgtaaacaacacggcactgtgctttcctgcacaaaccgcctgtcaaagtcaaagctgctcttctcctcccagtaattaccttctcagtttagacttaatgcaagtgaaatttttacttttcataatataataaataaaagacattagttaattagtagtgctggtatatttctaaaatctaaacagacaaacaataaactgtgaacttaatcacatgagttcttatacagtttcaagcaggaaaattagagctctcagctacagtcattttaataatcacatggatctgcattattattagttattacatgctcaagtgattcaaggttgtacaatgcctaaaatcattccaaagaagcataccttttgtctgtttaattctgagtggattacacaatgcatatatttgtatttgttaaactgctaaatttatttcacatattccaagaaagagacatcagccattctcttggttccaaccagactaactttcttgatatgatcccctaaaaaggagtaaatctgctagcttttctttttttaatgtgaaagctatgcaagccctcaggcagattctcaagcacttttggtccctagcaaatctctggtaccttaagaatcctcttggaagacccaggaattctggaatggtagtagcttgtagaggcacaaaagacagcaagaatctcaatttctatcaacagctttcaatttggatggctttcccttttcttttgctatctggttactcacctttcatttttagatcttccctttcacttcttccagcccctagttcaattcttaaatgctttctggattttgtgaaagcatgcagcttgaggaagtttggtttgacttttacttttttgcggggggcggggggggtggttcagaattgactagaaccagctgagaaccaagaagtaacctttttaagacagagacctgtctgtttgtttagtcttggagcttgtgtgacttggagggcaattctgttatgtgtatgaagaaataaagttcttaaatataatagttttttgtttgcatcaaccaaagaaatcagaaataaggactggttactttaatttgctgctaaatgaaaagcaggtttggctttatcatgttactgtaaaaactaaataataaagtattcacaccaagcgtgaatttttttttgcagcaaaagttaaaacatcaaagaaacctctttcaaatactaacaaatttacttacaaaccctatatttattatttcataaataggcgcaacaggttccataaaaaaagattaaatacaacacagtatgaagaaacaataagacagagccatatgtaaaagttgtaatttagctgtttcaatctgtttctgcatctaataaaataccaggtaagcatttggcagttttatacataaaggacttaaatgacatttactaaccattacacaaaaagtgatacaaaaaagcaatttttcgcagtacaaaataaatgtgtttgcgcttcccttaatactagtttctttttgtctgatcatgagacaaagccaatttgtttttaaattaaaatcacttgggaatactttttattttcaatattttgaaaatatagaactatcagtcagttgttttaaaaatgaagtaaaaatatgaattttgccaatttaacccctattgtgaaatcaataaactggaatgagccagtttcaattacatttagctacaaaaacattcacattttatactctaggagagtgtaacatagatgctattacaaacttgctatgactgctacatcaagccatttaaaaagtctttagtagtttcatataacacccattatgaaaaccaatggaaaatccaggacttttatccgagacatctacagttgtaaggcagttactagagcgcagcacttcacagcaaaaaaccaacataaaatctgaatggccaaatttccttcagggaagaagaaaaacaatgtccataaaggattaaaaaaataataagaagcatgactatttcttccagagtgggtgacccacaagctcaaatggtcctaagtgctagcaacttgtattttctaataaaatggagaactgccttgactgtacaaagcaatccatgtgaaaacacttccctgaattcctcagtggaaagaagaggtgttcagattctcaagtaagtacagtgctttgtccctctgcatgcccctgtaggaagagaaaaaagacagttccttgttcaggacaacctgtgctacaggtgacaatggggggatggatgtctttgaattatttgctcagcttgagctgttcactgggaaactgcaattagttaacctacatctgaagtgagaagtggctaaaggcatttattcttggaagagctagaagactgcttaacaatttctggtgtcttcgccttcatgaacgtgaaactatcccggatcatgtttttggaaacaagagaacgatcaacagggacgatatgcatgctatgagcgctgtccaccaccaggtggcgatgaccggccgcttcccactactgcagtagtcgttattccagtccaccggttgtgggggaggatttctgcacccgaacgcacatactccattgcctgggtgacaacttgtgcagctgtagatgtaggattgaaatagtctgatagtcgggttgaagagtaaatccctgaaagggaaagcaagtccgcaaataggatcaaaatgcattttaagaagaaaagcacctaaatatttattcattctttgcagaccactaggcctcttgcttctgtctctgcaagggcaagcctgtcggaagagcccagaaaattaaaacaaaggtagaaaagaaatgcccacaagtccattcttcttacctttccttcatttgccatgagtcagaaaacctttaattatacccttgagcagataaattgaattgagaaacatttcaaatatagaggagccaactcaatcaaaacaaagggagaagagggcctaaacccctaaagtttatgttttctatcaaacctaaggatacattaatagttaatccccagaatatgcacagaatcttttttgaaggattcaggcagcaggtggctgagtgttttattagactacactattcacatattgttctcaaacctctttttcttcattcagtcacaaagggaccatctgctcttcttttatttgtatttctctctcagctaaaaaatttcaaccaaagctttttaacagtgttggactaatacagggaaaagagattcaaaacgacttgccattggaaaacacggggaggaaaagtgtacgacagagcaaatattttttaattgaaaagtctattaactggcaaacataatcagacttcaggaagattcttctaatacactggcatggtgaagtgttgacttttaacctagcgaagctattaaaaattcaaggacagaatctctgaagtgtatagctatatctggaaacaaaaagcattctatactaagatttatttttagcttctctggtgaattcaagatcacataagcaagtttttctggaaatgaccaaaaaggcaacttaattaatctcatggttgtcccaaagcagattccatccatgatttttaaccactaagaaatcaagagattaaaaaacaaccattctctatttacttggagaaagcttttgaagccataatattgttgaattttcactttaaagaactcagcaggatgacaggaggattgatttttaactagggatacctccttagactttattcatgtttgagtgtccctcgtgtaaagactcgaaggcacctattaccaaatatttcatttctcattattcagttttagatattaagtttatttcctattcaaatgataaagactcaagccaacatcaccactgattcccacacaagctgtggacaaagacaaaactctgaatactggagacaaatcactgaaaaatggacaattcaaccagattggttacttgatctcacaagactaaaagaaattcacagcttgtttacggaaaataagtttgtctgtgtagatatgactgttcctcaagctgtaaatatcttccaaaatatttccctagtgtctagttcgatgctggcgaaggacaggagaaaactcttgagaggagccttgtcttggcttcctttattcagcctctcacaaggctgctgtaagcatcttgagatcagagagtgtttcaaatacttactgggtatctcagggcctagcccataatagtggctcaataaatcatgtttttcataagtaaagtttatgcagactgtttgatgctactgttggaaaggtgcagggtatataaatgattaaatgtcaggatttcctatctttttgttgttgttagagaccgggtcttgctctgtcacccagaatgggtgcagtggcatgatcatagctcactgcagcctcaaactcctagactaatgcaaccctttgccttggccttccaggtagctagaactacaggtgtgtgccactatgcctggctaatttaatttatttatttatttatttatttattgtagagatggagacttgcaatgttgcccaggtgatcttgaactctggggctcaagggatcctcttaccttggtctcccaaagtgctgggatatgggcatgagccattgtagccagctgctatctttttagtgtaaagttctccatattgatttttgttttgttttgtttttgagacaggctcttgctctgtcacccaggctggagtgcatggcaccatctcggctcactgcagtctcgacctcctgggctcaagcgatccttccacccaacctcccaagtagctgggactacaggtgctgccattatgccttgctaaattttttttgtgtgcgtgtatgtgttgtagagacatagtttcgccatatttcccaggctcatttccaatcctgggttaaagcgatcctcccaccgtggcctcccaaagtgctgggattacacgagtggctaccatgcttggtctccatattggagttttacacagttgacaaaatgtaacctaaaagaaaaaagtctcaaaaaagaagtagtcgagaatatattgacttagttgacagcgtggaacatatgaaaaagcaaaacacaagcacaaacaaataaacccagcaaccacacgagaccaaccaccccctttcgctgcccttccccacacaaagaccacagaaaccgccattttttcccccatccaatgaaaatagttctcaggttgtaagaaaacattattagtttaagattaaatgatgacttcagtttacaaaaccaaaattatgtgttagctacaaagttcaaagatttaaactcagctaacttcaatgtctattttaagatcactaatatcaaaacaaggaccgagaaacatcaagcaaagcctgaagtaatattatttcacattattttactttctttcaatttagcaaagacacattcctctgaacactataaaaagagatgctgaggtcaaatgtagcactcagtaatattgattattggtgtaaatatgaaacaacatgatgacacacactttttgaaaaaatgttgcttagtagtctaattaaacaagactgaatattttgcattttaatactcaggagaaaatcaccaactgttttgtagcatgcctggaattttaaatttcattttctggtgccagattgaataaaaataggaaacatgataaagattaatttgatgtcagaagggacatttgctctttattagatttctgcagccctcgcagttttgttgtgccaccagagcaagtccgaaaaagccgcagcacaaccaaacagtgatcctcatatccacactttactgggaactaatttcatttctgcctgtctggagaggtattttcaacaggcatcaatgtttttgtcttcacaactgatttttcatcaatctcaatgtgattttttttaaacctttaaattacacccaaatcctaaagcactgtttattacacaaggaaattgaaaatctgtctgtgtgatatcatacaaagattttttttaaggttataaaggaagttgacagatattaatgatttttttctcttgacctcattcgaaatctcatgagcagaagaaaagaaagaaaactggacaaaaaaagcaggtccacggtttcgtgtataaaacattattctagaaaaaaatgaaactattattcctggtggactacacaatatttttgtaggatacattcattttcaaaaggataataaaatagctaaagtaatattggatatgagacactattttaaaaatacagttgctgttaacgttcttctctctctgtctctcttctctctctctgtctggtgtttggatatgtccacatggctcccacatgaggaagcaaactcttcagcataaaggtgttttgaatgatgaatcaggtcagattttatccacaactcaggctgcatctacaggctgaagactaactgatgactcggatgtgggccccaacagactgtggggtggcaataaatgaagtgataatgtggaggggtggtggactccctttttgatcctgatttaggattatcagttctctggggataccagtccccttcacctgcaggatcccactccaatccctgcccttgactctgaccttgcccctacctctctctttattcccctcctttccactgcctccttccgatctcctggacaggccatgctcatccccagattggctctcccagctaggtcccctttcctggctgctgctgtctgtgggaacgtcctccacacccttcccactttccgtatttaaagcgtgcttcctcttctcatccttcaggtcactgtgccagcccttgagaaggccttccttgtccatcctagctaaaggctctgtccttcctgcatgcaccctgaaagtctgaattctgtcttccagttttatttttttcaggggaccttcgttatttgtttatcatatcccactgccatccctcccctgccaactccacggggcaggggtctcatgacttgttctcaccatcactcaatttccagagcctagatagtgcctaccacatgttaggggttcaattaaaattttcgaatcaattacatttttaaaaacttccaaggaattgaaattgaaattctactactgatctttaaatccttctaacagtgaaacacttttactgctcatttgtttgtttatttgtcactactcaacaattattttgactacttaccatgatcaaggcattgttaaaagagttctagtcaatgtagtctttggagcgatttaatctccattttgggcttatgccatttgggtaattgtaatcaggtcttcccatctcagcaagcatactttttgggatacactaacagaactacttaaaggatgatgaataacttgtccaatgtaatctgttctattttttcttatacagtaagattctatatggaaagacaaatctcttggatttttacatgtggtcttatgtaaatctaaatatttgaaaactattcaggatcatggccacatcatccaaggtgtttgtgttagcataatagaaaaagtaatcatctctgattgataaatcagaaaaaaagatctctgcacacagcccagcccgcagcatggtgaggaaactgaacttttggtttttttccttcaggaagaaacacccccaactatagcactgtaagcaaaacatgggtccttagctaggcagcaccctcaaacggggccaattacccaaccaagggtggcatcctccaaaccattaattcttcatacaaacatactggttcattaagatgcatggatacccaagtatgtccctttaattgaagttgatgtcgatgggaagagtgggaatttgaccctcagaatataacttggtcatatgcctcttaagacaggcagggtggtgggaagtggctttctacgtactcttcttccccagtgaatcaacaacttctgttggatgcagataagaaaatcatcatagctttaacagtatctttggcttagggacaagaaagacttcagtaagaagataaatccctttgttcttcataacgactttgatttgagagtaaccagaatttaaagatcctttgaattcttaggagatacaggttttctcatatgaagagttaagagtctacaagaacgactgtgaatgagatgcagcaagcctagcattttagaaccagcctctgagttttgaacagacctgggtttgaattccagctctgaccttatgagcactgacttaactctgccaagcctcagtgtcttcctctaaatgaagataatgctcatacccaactataagttttctgagaattaaagaagaggtggtgtattaaaagcattgggcttgttatgtgagctctcaaaaattctgtcaataataatagtagtaataataataatgaattggggctatgtatatttgatttctttttctgcctctccttccgcttcatctcgatcccagtccactaaagattcaaattccacagagaggtagacatcaattctataggaaatctgtgtttgcttatatccttatagcttggagaacaatagagtaattggagtatataagtgatacctgcattaatgtgatttgtagtttttacttttatttatttttttaaaaaattatattcagtctcatagagactataaaagattgccagtgtcaattatactgcaagttgtcatggcagggtaggggagaagctttcaactggcaataatcacatctcagataaactttattggctatgatacgccactgcgcaaagctgcttttattttttaaaataaaatttaaaaaatagttttaggattcaggatgccttctgttcagtttagtttatattgtttgagcctaattttcaaattttaaataacaccaaaatccaaaagcaatatttgatttcaaagaaaagttaagctaaaattgcaacaaatggtttcaataatcagggagtgggtagggaggcttccaaacagcctgtgtttttaatttatgcagaagccagatatccatttttaaataaaactctggttaaaatgttcagttttaggactttcagggttctaccagatttggtgttggacctgatttcatttttcagcattattggactcaagaggcataccagtcaagactttctcatctccaaacaatattttttaaaagttgtagaattctctattccaaagagattcggcagcacttggtatcttaaaataacaatgtactttactcaagaaacagaaaacaagaagaatgattagaaacatgaagcaaaatggtatcatgggaaagaaaccagtgattatgaaaagaagtgactgtcaattgtgatggcatatgccacacgaactcaccacttgtaaattacattttacagaaagcagatatttgttgaattctttagtgctctcttgacttaaatagaaggatagaaaacacatatccccaatcctgtctggataaacagctccccccacctccaccaccacacttcagaataggggtgcacactctagtccagagccattgcacttacttgctgcatggtgggtgagtgtaaggcagactggacctcatggggagctggttcccaaggggctgctgcatggtgagcggctggtgctgctgcatgtgagatgctggtgaagaggcgggctgatctggaggggaggaggaggggacacagccatgttgctatagagacagtcactggcatttggttattcggcttgggggctatgttcctggggaactaggatgcatggcagttaggtgaggattcattcccggttgttggtgatagtgggaactaggtacagggccgagtgggcctggctgggcccatggaacaccgacggcttcgaattgacagctgaggaggttgagatgtcttcacgtcaacaggttcactgtagctctgttgaggaataaatgagcagagttgggaggctgatacatgagtgttgattcaaggtatgacgctttgtagtttattaaagcaccttccctggaatccatacccatgactatcccggactctctgatcaagaatttcttcaccattatttgtaatgtgatttatagaagacagcttctatcccttttggaaattgaaaacaatctgcaatgacattttgttcctttgcctaaatgtttttaactcgtgacttttctcattatccaaatgagggtgacaagatgggtttgtggagggtgggggacggagaaggcagatgccgtgaatgcccaaatgggaaacacacgtgaagattactttcaaagaaatcagttctggagttcttctatagattataggtttagtttttaatttttcctttttttattctcaaagagacttggcctagatatttgcacaaagaaaacaaagctggttgatggaatggatatgggagaacagagttctaaaatacctttctgaagtcatataaaactacattatatactcttcaaagtaactgcagaacttatcctgagttttaaaatgaagttggtgatgattgtcctccataatgaagtagataaaaataatctctcttagaaattttagactccatcaaaattaatataattttgccctaattttttccgcaccttcatatgatcatttcctaataaattttaattgattttaaaactgaacatttcagtaaaggctgaaaagaatcaagaattaacctgtggcaattcctcatgggcctgaacctacctcctacatttcctgagaggaagagacgataaaacaaccaaaggtagcaggtagaaccaactggaaggaaaaaagtgataaaatggttggagaaaaaaaatcactttgtcaaaacaaggtcttgaggacgcatatatgcttttacctgcaatctcaatgtcatgcttattcagctttcaagtcaaagtgagtttcttactacttccacactgcagggagaactgtgccatgagggctctcggggtccttctgctcaatgcaccccgggcaacccactgacaggcccttagagaaacgggttcatcatgcacgacagcgtgaactcaggccgggtagcttcattatcaccaggcagcttacattacggttagcaacacaactatttgtcttcaataatgcagtcaagtttcatgaaaaccacagtaagaatgatgctgtgttgtctgctgactcctggggtgacggggacaggctggggtgggtggacgatcagccccacttctgtcattatagaaaggacacatctgacacctgtaaaagtatgccaaaccatggaaactggggtcctgtgagactctgaatactccacgcacagtataaagtaaggtgtactgaaaaattccagcccctttggagagtcctctcattctgacattttcccctgtgtcacactgttatgcagctttctgaaataggaacaaacatatagactccctgtcttcagtattaacattaaaacatcaaaaactgttcatgcaaaaattttaaggggaggttttagatcaaagaagcttattaaatgtagctcctaagaggtgcttttcattaaaaaaaaaaaacaagttttaagtagttttttttggcttccatttaaaaattcttattgttgatgtgcaaaatagttaacaattcaggaaaaggtcaaatgggttaatcgagcctgtgtaaacagtgactacttccacatcagataacatgtactgcaattcatatgcctcaaaaattattccgtatatgccagaaagattattgttaagtctgtgtgtttaagtaatctggaaaagtgttcggtatgtttgaattccctcttttagcctattgcagaagggctagtttcatatttagtcacagactgtgttgacttcatacagaaagaaatcatatttataaaaatggatacatattggtgcatctttattttttgcttataggtgttgtttttaatttaaaaataatacaagtcactcacattcttgtatgatcaaagtagaaaatatgtgtaactgtaaaaatgttttcatttttaatttctatatataacatatactagataatgaggtaagttttggctaaagaaataaaaatatcgaattcaaaataaacatgaatttaattttcctgaattctactatttaaataattgtatgtggtccatcatatagaagatgatagataagcagaggtagagatggaatagatgtacagatttacagaagtgaacaatagcaacctaatttgagatactttattaccaaccttgtaaagctctcttttttcatggtaattaaacacaaaacattttctctatctagccacttatttgtcatttatgtcctccattcaaagcacacaaagaccagtccccctcaacctactttgaaagagtagtaacttttaatactagaataactattggcaaactcaaagtaaatagagttccaaagataatgattcagacacacttgaaacataatttttaacatagagggagggagaatttggggaagttatatatatttccctttattttctaatcattgactgtgacaacagaaataacgtatccagccttgtgctgaacgtggcaggtgctccaatataagttattttcctgtagtctcttttcacaaagatgcctgattcctccaaaagggcatctttttttgatggtagggacttgaatttctgtagccccgcatctaccatagtgcaaaatacataaaaacacaattatgttttctaaggagtgaatgctattcttgagcaatcctccaggcagccaccattgcccttgctgacttgccctcttgacagacacaccgttcctcttcccatggagtgaggaaggatctgaaggcttggaaaagccacgagtattagattgaccttcctcatgctcttctctgctctcggcaggacccaaacccttctgaagtgatgagaaattacagctttccgctctgtcctttggttagatacactgcccttttgcctcactggtcttgggggaatggcagtagcagggcagctagttcagtctcacccatatttgggaatttgtatgtttatgtaatggtccactcatttagatgaggaaaaacctgctttggcttcgcttttcattaattattaagcagtctagtacaatagaccatctattaattacgagttattttattgttctggaagataggtagaataagttcattttcagtggcaaactgcataaattcataatgtgattaaatgaaaatacatagaaatcataatgtactcttactgtcttttttcccaatttaactgtgaaagcaaggctacaattttgctgatcaattatattgcaatgaagacttctatacctatcattcagaaattagaactattttctcatacatactaagtatttgcatttgtttccacttttaaacacattaaccacttttatttagcaatgagtgtcagttggtcacctgacaaatgtgtttcctagcttgtagacaactgaaaatcaacctttgaacccacactttcacagaaggaatgtgttcttgctgttagtttctgagtatgttctctttctatttgcatttagacgacagattctggaagatattttctacaagccataaagtgggggtgtggccatagagacattttgagtattatctgtagggagttcctttgacatatgcaaaattataaaggatacaactctataagcctgaagataccttttactaaccaaattgttgattatgaaggtagcttcaatcccatttactttgtataatgaagataatactgcatagtgtataatttccccattctgggatgatatgtgctataaaaatgaaagattgacaaagctattgtttttaaaatagcaaagtataaatacaatgcataaaaatcagtggaaggaacaatataagattgctgaaccaaatcaaattaatagtccatctaatttgattcttgttttcagcactgacgatacttaatgcattgaaaattaaacaaaatttatgcacctactcaattgtgcattgctcttctggaaggaaaattctttctgctccatgcaggtgattaacttataccctgaagcatagattttattatctttaaatcacgatctgggtttacagagctgcaaattttacgttaacgtcatacaatgatccatcccatttgcaaattcagactcaatatttgtctccatagctcacatggcatggtatctgtaagtttgcctcattctataaaaagaaactgtttttttcaaatcactttcctttaattgaactaagcattgtgcttctttactactgactatggaaacagagactttcttgacttaattcaatattgtcctgttctgtacgttaaaaaaaaaaaaggtttcatttgtcctttataaattttagcacttcatgaactattccttaaggtagaaacaaaatctatatttgatgttatgaccttaaaatcatgaatctgattgcctttatttaataaaccagacatagttatccaaatgccatatccttccaggttggcaatcctgagaagttgtacactttttcaataatgctgcctttatttgggatatttgggagcttccctactggaattctcttcgagcctgtgagacactgttttacatatcctcagacaactctttgtcttttgatggtgaattgatttttggaaacagctaatagtcacttgaagccaagtctgcgggttatatctgggtatgtttggggaaaagaatgaggtgtgaaaacaatgtaacaagattgattttctaatgtgctcataaacttttcctgactacagttctaaaagaggagtttcaaaaattttttgaactcgggagcaataataaaatgagtttgcagcctcccaaggtgactactttgaatgcaacactattttgggaatataaattctggtctatgtggtaaaatgaaactagttccattgctctatgttatacattgttttcagcataataatttagatccatgtctaggaattcccgagtctatgaaaaactatatttccttaagctttatttgacagtccaaccccatatgaccttcaataggtgtaaaattgcttaagatgggaaggccaagcctccataatagcatatatccttggaccctttgcagggttcataaagatcatttcaattaagaaaactatagatgaatgcatttttgttatatctagatcatatctttataaagaaatgcatctatgatgcaaaattttcctttttatgtcacttttaaaatttccttatatcaaagtagcctttgatataaagacaaattgaaatatcatccagctaaattttcaatgatatgcaaatctttcccccctcctttctatacctataatactaaaaataaaattaataataatactcatagcttatatttattaagtgcttccttgttcaggatgctgagtcatgctgtttattttttaaatttttgaattttaaaaattttattgtattgtgataagaacacttaacatgagatctaccatcttcacaaattttcaagtgtcaatccagtattgttgactctaggtccaatgttgtacagcagatctccagagctaattctctggtttgaggaatgctttctgcctgttgattattgactccctatttccccctctcccgccctggcaaccaccgtgccactctttgagtctatgaaattgactattctagatacctctataagtggaatcatgcagtacatgtctttctgtgactgacttatttaatttagcataagtcctcaagtgaaccatgtaatttatatagatttgcttattttatcctcatggaaacccaagatgtaggtcctattatcttctctgtttaacatttgagtaaatggagacttagaacaacaaggaactgcatgaagatatgcagttaggaagtgggaaacctgggattcgaatccagtccacccgccccagagactacagactcctcagtctgaggactctcccagtatgatagagtggcactttttagatgtcctagaacaggcttcctgtgattccatatgaaagtgcagaggtgaagttgccttagaggcctccaatccttatttataacatttgcttctgcttttaagttctctatggaaagaagttgtttaacaattcaagagtttagcaatgtcccctgttcagattaattaatctaatttgaaatggaacctattttcttattctgtagtcagagaaaattaagctgaataatcaccaccctatgtctaatgccaatgtggacttaaacacctttgagtctttgtttctgggtttcataatcttgaatcctctctttttctgctactaccttctaactttcggcttccagccaattttatgaccttttccaacttccccctttaaatgacagagcctaaaatgaacaaggtattttggagtctgaccagcactgtgtttgcagcatcctatgtcctatagagtatcctgcaattctgatatgcttgtacagcaggagtgaccagagccgggcagttttgtcctggctccacacaaccagctgaggtacccacccagctggaatagcatggcagaaagcatgctttccaaacattctgcaggcccagattcctctgaaggtctcagcctctgttggtaggggggtagcagagtgggcagtcggctggactccaccctcaattaagtgagggcagctttctcttagctgtttcctatgtaagagctggcatggaattttatgggaggttgttacctcgtaaaatgaggtgccagtttgaaagattaaaaacatttgagaatcactgagggtagagaaagcctaaagctctgcaacaagacagtgggcagtttgagtcctactctgccacagccacttgggcaagccatttactctctctgcctagagactgtctagaaaatggggctaattcctatgtgcaggtttgctgtgatgggaaataggaacacgtgtaaaatgcctaccacagtgtaagcacacagaagctactctgtagacggatgccatgtatatttttgttactattggaaacattcaatatcctggtaagaatgggccaggatttccattggaagttacaaaagcgagaatattgtttcctaggattaagcgttttatttttggcagagttcaacgttattctagcttggatcatgttaattaatctgctggattagatggtatatagcacttttttattttttattattttctgagatggagtattactctgtcgcccaggatggagggcaggtggtacaatcttggccactgcaacctctacctcacgggttcaagtgattctcctgcttcagcctcctgaacatcgggattacaggcactcactactatgctcagctaatttttgtaattttagtggagacaggtttcaccatattggccaggctggtcttgaactcctgacctcaagtgatctgcctgcctcgcctcccaaagtgctgggattacatgcatgagccaccgtgcctggctggtatatagtattttaaatggaagaagtaatcactgaagcattgtcaatcctgtgactcaatttcacaggtgagtcaaaggtcattgattgctcttatttttgatcatgttctgtaagaagcagctaatttaaaggatcacttcaggcctttcaagtatcatgaaacagtccacttggatctgctatatcatgtttgtctctcagcacccagcccagtgtccgacatagaacaagtgtcctgcagcccgctctggatgcagagtatggcctaggggcgaagagggaagaaggagcagactgtgactagacatggccacaaattagtgaaaggatctattggcctagaaatgcaaagtcatatttgggaaatgaatgccttgcctagaaaataggtactaaaatatatagctctggatgagtaagtaaagtagctaggaagaatttaggaaaatggacgaggtgctctggctaacacagcttttctgaacaaaaatgaccttatcagagagaatgtcaatgctgaatgtcaatgctgtgccatgctctgaggcactgggtattttaggagtgcgggagagcacattgagaggactcatgagcacatggcccagcagaagactgagggcagtgcaggtcaatgtcagccttggccagtggctactgcaggtgtctttcctcttcagtgaaatgttgataatcaagcctacttcaagggataagcctgaggattaagggaacttatgcacgtaagatgatcctttaaaaacgtaagtcccatagggtatctgtcccttaccagaacccattctgtggcttccctttgtactgagaatgaaccagtgcctttcaaatgtcctgcaagtccttcaggattgggctcctgcccatctttccaattcagctcaaaccacactctctccattcactcagctctggccacacagaccttttcaatcaaggaaacattttgccaccctgagtctctacacttattgtagcactgcctggccagcttttcctctggctctctggttctacaagctcctgtcttccttcaacccccagatccaatgcacctctttaaagaggtctttgcagatcacctaagcagatctcttgctttatctcctccgaatacttggattctcaaatctcaatcatttattagtttatgttttcactaacgatttccttgacgaaagagaaagttcttcaagtctaaggaaaggatttccctgttctccacagcatctctgagcctggcatagtgcttggcacagagcacaagcccaggaagattggtcaaatgatatacaaatggggggtggggaaaaaatagagcttggttggcacatggtggttcctggggttgcaattatggaatatatcatgtagcattttctgtttgcccctttaaatcttttagatagggaaataatttataacatagtaaaaaaattataatgtagaaaaaatatgtttaaattgactggttattatttgccttgtcctaattaaaatggaaaagaattagatttttatatagtgattacatcttatggcaggataggctggaaaattttctgatgatgtctagaaagttaaatgcaaatatccactcacatacaacattggagggtcattttttttaacctggagaggagtttgtaactttccttcaatttgtatacacacaatagatggttgtacataaatagatatcaacagctccagcaaaatttctactgccaaagagaagaaaaatgtcagagtaagctgtaaaaaagtgcttggttttttaaatgtagaaatggcaattcgcagcatttatacaaattgcgtacactgcgggttgcaactctgaaactgaatagtaagaaaagttgcagctaagagcaatctgaggacacttgttttgaaagtaaaggcttagtcagtatcacagcattctggcaatcgcatatcattaactagtgtgctttgtattgggattgagacttcatgtattgatttgctctgtgtaaagtgctctgactaaaactctatttaaaatcttcaaaaagaatctgatcttggtgaaataaggagaattaactttttaaaagccccgctatgtttttggcataattatctgtaacaatatccacatgactatttaatccaatggctatattgatctaatattttacacttttaggttataattttatacacattctatgtaatacatgcagaaatgtgagttggtatcaaagaaaatataaatagtttcagaaggaattagataaattagaaagtgtgagataatacaaaaagctagaaattttaaggtaaattatatctaactaaagttttctcacagtgccatacctagaagtagaacataagactggattagacaaatagtttactgaaatttcttatgcattttactttgggctctcttttcttctctgcatcagtatattcagtatgtattttcctcaataaacataatttatataattactttagagttacaatgagtctggatatttgtgaatgagaaaaaagtctttcctaaggggaaatgggatgaagtccagagccccagaccacagtgaacgcgtaacagccaatttgcgacatgagataacagtgtctaatgcttatagactcagtccattctctgaagttaccttctgaagaattccataacgggaattgtatctttaataacatgaaacaatcagtcaactcttgggtatttataacaggaagaactagtgtttaagatattctaaacactaaatatttttaagcggtgtttttattttcaaacaaaatgatgtgatttataaacattttgggtcctgcttacctcctaatgctgctgtaatgagtctagaacttagagttggcagtcctcagtaaaggccaatggcatgggggcctggaggcaatttaagaaagggatatggaaagtagaaagttggctcaggttgaagaatgtactgtgactaatccacaaaaccaatcatcacaggtggacaatattttagaaatggcccaggggatgctgctctggtcttttggagctaacgaatatttccatatcgtatagctttgtttgtaatttacttttttttccaacaaagagattgtgcagaatcgttaaagtgatcttttatgcctttaagtgactatcaaagtctgcgcgagatggccacaatccttcacaatatcacacaactgcacgttaccttggatacaaggcggctctgtatgctgcgagttgcttcaggtactccttcttcgcagcctcggttttcttttatagacctgcaacaacagcaaagagtcttaaattagaaagtgcatttgcttttgttttcgagaagtacaatatagaatgataactgcacacacaaacacacttatagttatataatatataatatatatctccccaaagattgtgttttcttactgaaacagatttttaagaagtatgcaatagactagaaaagaaaaaaaaagttagcaacagtaaaactttacacttttacataaacatatgaaaggttttatctgggtagatatgagtgtagaggtagttggcttacaaagaactattgatgaaggttcccagggaaaccacatgtgagtaaacaaggcattcatatttattaatgggcagataactccacagcacattcacatcctgatatatatgttccacgctaaatcaaaaacaaagacagaatttagagatgacaaatcatgttcaataagcaaatcaaaggaacagaagggagagtgcaggttcatcactgagttaagatttggagccttgaagttctatttcaaagactcaggaaacagtgatggtgattaaggacacgtttgggagaggaatgggaagccaagtggctgtggattgcatgcatgccctgccctgcagtccactctggtcacgtcctttcaagaaaaacactggatgtcatgggtctgtggacacctcattttgaaaaggtaaaagtgtctgaaatgaatttcagtttacagaagctttccatttctgagagggaatcatcttgaaataaaagcaaaatcatcctaaattgagcaaaagtactgaaaaatgacttgcttgtatgctaaggtcacattgctaagttaaacagtgagcagtcattagagttgaaaatgaaagattagaaagtgaacacacatggctctctgctaccattaagttgattctttcaaggctttagagttattttttggcaatcttttgaaatcagcctgaaagatcaaaatatttttcatccttcacgtgtaaatggaaatgtattttcattgatacagctattttaaatttcccacattttggatttacagcagggcataaggcttggctaatattttgtaatgctgaactcaaaaacagacaccagatcagtattgaaaagtggcttcagaattagtcagagtagttaaatataaattatgttaaagaccaaatatctgccatttggcagcaggggtcaatttatggtttcaaatgctgacgtggtttgctgagcccaacgccagctatgaaattcgagatgtgagaaatattgtttattatgaatattttaattaaagcagaacattttgcttaaggtaaacaaatgactaaccttgtaacagaattataacaggactgtatgaaatgaatgtgctaatttttctcctaaagtgggggcttcagccttgacttctgtatttggcattttggtctaataaaagccaagtaaaataagaattaagaattagtacaatattatcatataatcaatgtgccatcatcctaagtatgaaataaagaaactttaaaaactatatttcagagttttttttttttaagcacaaagccaagaatcctttggttcaagcacaggagtattctaaatttactgagttaattattggaagtcaaatcaaattcttttttggaaattcacacgtgaaaacaaataaatgctaaagtcgagtaagtcctttgaacagtgtgatctgtgtatatcgtaagccttggtgcagccatgaaacagctctctgcttttcattgatttatttttttttgagagacagatttctgtttatagtttttccttaagctcttctcaaagacataatttataattaatgaccttaaactgacaatgtttacattgcttttaatacctcaaaactttcaagagggtttttctcccatacagatagaaatcctatcaggactttgaagcaaacatttagtcaatacgtcttttatggtaatgcatttttgtatacctaagcatttctatcatgcttttattaatatgctactccaagtgactcccattcagctactaggatgcgttttgctttcaaaggcaaatagaatgcactttggttcatagcattgccacagtggcattttctaagttgtggcagataagacagtattgccagatggtctgactacgcatctatcatttttctttcattggtttctactgaaacagcaacagtgtgactacgatgcatccctttgttgagctcctggcagttaacatcacacaaagtgttaactttcctgaaattgttgcttaacaaccagggaagaaaggtggctaactccacatgtttcaggctgcatagatcccctggtttccctccagaatcgatgttgttacgggatacctgactagcatgcagagtccctgttttctacaaatggctccctattggctattgatgattggctatgtgggatcatcgataagtgcctaaataccactttagaaaagagtaaactcatcacgtcacattacatggatgatggatacactctttcctgaatagctgcagatgttcagagggagaattcaaaggggggcatttcagaaggtagattcctgtaattgtgttgaaaggggagtagcctggaccagaattaaatctgaggtagtctcctcaacagtaattagcacctcaatctttgagaactacctgatgctcccattttgtacactctgtatgtctttctgatgttaccttctaaaattggacaaggtgttgcttgaattctatatttaatggaaatgtctgaagaaaggcctcaactatgaatgatgataatgatatataaaaattccacatgcaggtgaagtaggggaaatcctttaaaaaaaatgtttaaaaattatcaaaaaaaaatctctcaaaaacatttcaaagcctctaatgatagtaaagaaagtcctctgcttgcagagagcaaagatgtcccagcacggcatttggcaatgacaaccactgccatgagcaagtgcacagaccttctaactgacaaggatgggtctgatttagtcaaagttcagtttaggaaagaaatggtctctcactcttagggaaagacaaatattttaaggtatgtgattcatacagtaaatattagtatttagttgagttacaaaatggcttccaatggtccacagctgtttgaaataaagtacaaagttggccagatgaggatttaaaaatcaaatacatcatttatcattttcccccactcatctaaacacgtttgagttcatcctgtcctactaagttatatgctgtggtttttattccaagaaagctaccatatcccatctaaggattcatctcagtggctaaactaaaacatatataatggctaaactaaaacatacgtagatagtatcaaatagcaattctagagaacccaaatcctgtcacatgatctagtgattcactgaggatttttgaaatgctctaaataccagcatatacacgttttcatacgcttataatccctaatgaaatcagcagttcaatatcaacgatatgacaaactcaaacagaaaaaatttcccataaatctgtcattttccttttactttctgcttcttccctaaacaaacaatccatccagctctatagaaaagcaaaatcttataaataccatttaattccttcttccttccttcttttctgtctggcccttagttaatctctagtcatagtttattttaacagtctttacaataataagagaaaaaatgtaaaattcttccaattctggattctatccaaaaactaaaggcattcttcatctgggtaagttcaaatgtagtttttcccactactatttcatatttatagaaaatccttgaaatgcataaggatttagaatttaaccacaattccctgcaatattttttagaaatttaaattttcagcttctttcaaggctgttgttatttaggtcagttagagcaagtgcatctatttttatatagaacttagtccatttaacttaatggttaaatgtccatcttgtataactcgtcagcattttcttaggctccaaggccttcacaaagtggtattcagaggattgaaaacatatacaatgtgacaaacatcttgctatggattccttttgaggactgtctgacccacgtaatggtctcagcaacaccggtttgacctgtttctggaatggtaagaatccgaaccgaggtcttgcctgaaaaaatggctacaaaatacatatctgttgatttattaaatgaaggtcactaggaaagtatgatgctgttcagttatgcttaccaatctattgagtgcccagtatgtgcctctgtggtgtgaggcaccgatgttataaaattaaaatcaaaaagtcattaaaaattacgctccattgtgtgcattttgcggatcatgcactctatatattacctctaattctttcaataaaatgttgcattggcataatgaatatgggataatccccgttttgcagataagaaaacagctagaatgggtaattattttacctaatatattagaacaggtatatggtaaaaccatggttgaataaaatgagtctggtgtcaaatgttccatctttctttgctcaatggtttgtcctaccatgagaactccttttgattcttctctcaagacatacaactgcaaggcctggtctctttgttcactgctgaagccccagcatgcttggaacatagtaggtgctcatgaaatatttatgagcatctaatccatggtctcaggtttctccttctatgaatcagcattagcatgtgtgcaaggatgaaactgaactgcatgttctaaattacaatgtacatcaatggaaacagtggacgatatacaggtatacaatccacccaaacatgtttttcaattatagataaagcacaacagcttgaaggagtattatgtttaaattattttcctgccaacatcatggaaaatttcaaatgaacgtctgcttccatggtctctgagcgtatgaatatttgtatatgtgtaaaacaaatgctatgcccataaaggcatgtaagaatcacatttatataccaataattgtatatgtggataatataatatatgtaatatatataatatatgtaatatataatatatgtaatatatgtaattatatataatatatgtaatatgtatataatatatgtaatatatatataaatacctgaatttacaagtatgctcaccatttcatataataattttcattgctcagtttcaaatttgtgtaatatggacggactttgcttacattctacagtttttaagtgagcaactgttttacatatcttcactcctagtttttaaaaaattgggaaaatgcttaatgtttataagaaaatggccagataaacacatgtgtgaatgttacagtgcgacaggattttagttaaccttaagtattgtgacataaaaatccaaattttatcagaagataaaggggaaaaagaaaccccaacagcatttgtagtgggtgtctgagcaccaatgaggaggaaatgatttgattctgtgggctcagaggtttgtcagctgcctcataagtataattctggctcttcatatccctgctgcttctaatttgcaggacaggctcataattgaagcaaattaactatttacacttgccacttctaccagggagaggacacagcagcaggaaagaatgagtaggaaattacattcttcccacttgtgtcagtctgcccttatataaacacattaacagtaatttcacgaggcgtcaaacataggaataaaactgaggaataaaataatgaggtgttgctattgagctgaactgctatggctaatatcctggatatgaattatgcatcctgaaagaaggcatatgttaacagtattcaaacagtttcccgcaagtgagatctgctcattaggttctggatctctaggtaaatccactctcctcttccagacagggctagcatttacaaaaatacactctgggtaccgtgggctgtggtttctcctgatacactaaactctgaataggctttccactccatttttagcaaaacagcatgtttatttactctttggctgcagctttaaagccatttaatgtaatgtaaacaagaacattttgtttgtatttgctaaatgtcttacagcccgactgtgtctccaattaggaacttaaggttcatttataatttacatctggttctgatttaaggtgactttcctttttcacttaagagccggcttgcgtggctaaaaaggacccaagaacactttatagctctttggaccaaccctttctgcttcaagcgggacgagctcttttattttgtagggttttatttgttctatattgtcactgtgaaccaggtcctccactacaatgaccagaatcagagagttcagaaataatggaggtaaacagaaatttagctggaacctcataaaaaagatgctgagggttgctcaaactcctaggatcctatacaaagggtgtgatattgttaacttatttttctttctctgcaggttccagtccgtgaagataagtagcagagaccaacatcacagcaatacttatgttttatttccttctccatctgtgcattttaaacaacttagtatgcttctgaaatgggctctccattgtcttacgagtcatagcatttaaaacccccggttggaatcccaaacacaattctgctcccattccagattcataccatcttccaaagtattaaaatggggagatctctgatatgtggagtttgttcagtggtttggtaggaatgattcataagggaggttttgtgttccttgaggatttttatcgcttcttcagcttccttttgatttctcttctttgaaagattcttcacagaaaccaaagtacatatgtttctcactcaccatggattctgaaaataaagatctgcccttctgcagtggcttcttatcccgcctatactccacaatgaggaagcatgtgatataaacacacagcagctctattagcatgttccctctggctgtcaagaaaacatgcaattgtaatctcactaatagccgtttttcttaaatattgtaattttctgaggcccccaataagtcatcaataattttgaccatttttccagtttgtgtttatatttgtagctgttcataattgtgggctatgatgacaacaggatttggaacaattgtggcacatgaaatcttagccttccaccggaaccagctgcctacacaatccaacagcatcacatggttggttctgtaacatgcatatttgtccaaaattttgaattttatagtctgcctcgaatctgctccaggaacgttcttttaaaaatacatagcagtatgtgtttccccaacttgaatattaaatgagaacaaaacacaattaatttaagcttgaaacggagtattatagtatgttggcacaatgagttaacataaagggagagaacaggtggtaatctacgttataacactttgggatattttgctgaaattttctggatgcccaaatgtgcatttcagcaggcacgtttgctctgccgatgactctagcaaactgctagagaagggctgctgtggagagcagagcggtggcccagccggtgcaatgtgctcccttttgtaagcagcgtctgatttcttaatttgaccctctccctgcttggttctggcacaggcctgcatccaacgtgtgtcctaaccatacctttaggcataatctgcagcctcactctcttggttaagcaagatcatcttttggttcacatgataggttatgttgaacttctgtgaagtcaaaggagcatacagcatggggcaaatcattttagagtgaccaaaactgttttagtcatcccaaggccttgttttggtaaccttaaacaagtgttcaaattttaaaacatttacttttgtaagataaaaaaatttatttcctcaatcttggcataattgttttggcaactggattttgattgagaaactgctttatgatccaaatgatttatataagtcaactattatataattttatcctttataaaatgaatttgccccccaaaccctattttcattgagagacaacccaaaggtagactcattacaagttacttctaaactaggcaacatatgaaacctacaaaagagaaacatacaaaagagaaagagaaaatatttgccatcatatatatacaattaaaaagccttgcacataattgtaattatatccacttagggagaccagcctcgattctgaatgccagaatgggaaaatgggagtgatttcccttttaacatgacagttgagagtagtgaatctcatatttttggggtctgtaaataactttgaggttagacaaaatgaatgcaaaatgctatcttaatattctcctcttgctatattaaaaaaaaaagccttagtgttatagaattagcgggaagaaatctgctgcctgatatttactgcctgaggaactatctgattttcatcataagaacattattcttttccatcagaaacatgagacagggatttattttttaatattgacaatgtaaagaaccaatcgtgggctagggagtgccttgcagacctccctctttagaaatcactgctcttgaatatggaaaatgattaggaaaattaactggggtcagaggacagataagagaagtaaggtgagtggcagagcaggcgattgattttccagaaatgaagagtttggcaaagtagacactaaagaggcacaaacgagccttgaacaatactcctagttcagtcactaagtcttaggtagggaagaggggctgagccttcacggggaatcatgtgtcttcagatgaacaagaattgctgtacccaatccctagggaagggaatgcttttgggatgctttcttcaggaaattttgtctcacaaagcaacaaagtttatggtacgaagccaggtgcatattcaagaacacacagagggcttactggaggagacagcgagctattcttcatatgtggcgtcatgggtggagcagggaggcattaaggtgacattaagggaacaggagggggttgggattgctggttggaatacacttagtttctcattcagtgaggctctgcgagtggagaagtcaagtcactgtagaattcaccctgattgtccaacatcagttgggaacacacctcaggtttggcagggtgagagcaaactgacccaagttagaatagaaactagcttaaaattctgcaacaatatgttaggtttcgattagaatcccataatacaatgtcaactacctcttatggtgagtgggtattttaattgagtgtacagagaacgttttggtggtgtgtttctgttcttaaagaaaactcttgcaacacagagctccatatggcaggcctgtgctttcctggacagcactccttcaggctggcaatcttgaaaaggacgtagggaaatacgtagagattcagattctagaagacagctttgacttacagaaaagagagaatggagggacctggaagagaagttctatgtttccttagcaactggttttgtcattatccccatcattaatttcataggtttgttaggaaaagcattgtaagttgagtgacaagttttattcatggtaattctaggtacaggcatgtaactgtagataaattattcaacacaatgggggtctgtttgtcttattctcgttctatcctcagtgcccagaacagtgcctggcacataagtgctcaacaaatatttgttaataaatgaatgaatttaatttatatggccccattttgtaatctgcaaaatttgggtaaaatttccctgtatatctatgagtattgagtagaacaaatcaaataaataatgcaaaagtcttttaaaactataagacactatatactttatagatgttaatatataatataaacacaaatatagatccttctagatgcataaataagtgtgggcttttctgtatttatataattcctgacataatgaggaaagattggtgtctctaattaagaataaaatatgagactagttcatcttaatgcaattcagtattctgcaatggctaaaactgcacctacacagttatttcaatcattattttaatgaaaatgcttttaaatttttctttgtgatgctgagatttttagatggtgccatggccatctagttcctggtttagaaatgtgggatcaacattgcttctttgcttaggtggctccatcctctcactgaaccctcactctgtgactccaatcctctttaagaccttctagctatttatgctgtgtccgtggtatctcacgtggccttccctgagcatggtcctcagtacaccagggcaatacatgagagaaggaaaaaaccaggcatctggtcccatttaacacagctaaaaatatggtgtaaatacatttgggggattgaataacagcccctggcggtctttaagaatggctaggggcggaaacccttgaatttgaggttcatttagcaaagagcaaagagggtttgatgacaaaatggtaaatagtaagtgctgaaaagaggtgtggacagttttcaaaatcttttaggacttttttttcagtctttatgttcacattggcaacattaaggaataaggcatcctgtctgagatatgtaaaagtgcttccaaaagtaactaaactatataaactttgaaaaaaggaatcaacatgctatttatggaggagtaataaaggagcataacattatgtgaacgctcagaaagtctggttcggatggggacaccttctcagcgtctgttctgggatctaaagatttaccccaagccctgggaggccatttcttcagactgcacaatctcagcttatgtagatcccattccactgggaatcccttacctgtttttgctcttctcctaaaccgtcccacattgagccacaattttagagacttcgccaaaggtagcgtttggattttggcccttgatggcggctgagtatcacgaaagaataacgcataggcagacacaggcttctggggctcattgggatcttcttcttcttctttttgggagtttttggttttttccccatatcagaggcaggccgctctctccaccattgatctgaaagagaaatcaaaatagaattatagggggactgagacaattggggacaagacatatcgttgttttcctttgagacttagacacatacccattcacatcatcaaacacaggcttttctaagggacacattgttttgttatttttttttcccagatgaaatgcatatttcaagtagtcttcatattcatcctactcccaactttactcacctagctttgaaaaagttggctctttttatattattacactattaaatacaaccccttaacattcctaatttttctcttacactgtaactgtgtcaacagcagatttctctggtagtaacactattggtgaacaatctaacttgttttcttctaaggaagttatccttgtcttttttttttttttttttttgagatggagtcttgctctgtcgccaggctggagtgcagtggcgtgatctcagctcctgcaacctctgcctcccgagttcaagcaattcccctgcctcagcctccccgacagctggactacagacgcgcgccaccacacctggctaattttttgtattttagtagagatgggtttcaccatgttggccaggatggtctcgatctccagacctggtgatccacctgccttggcccccaaagtgctgggattacaggtgttagccaccgtgcccagccatccttgtctttctaatatggctttaaaacctcgggggcagcatgcccaataaataaagtcaaatggcttttgacttgtccctagatctacggaatgctgccaggaaaacccagcaatgctcatggtttaaagatggtatggtctagaccctagatcagtgctgtccaatggaactttctccaatgatggaaagttctacgatttgcactattctatatggcagccactaaccatataaagctagtgagcattgaaatgtggctagagttaatcaggagctaaatttttaactttgttcaaatttaaatagtacatatgactaatggctaccatatcggagagtgcacctccagaaattagattctagaggttctagaaaaggtttttactcaatttaagagtagattctattttctcccatgttcctaagtatgaatattttgataattttaattgttattctgatacaactgggaaaaaacacattaacatatttaagatggctgcatttgaatattatctttgttactaactagatgtgatatcattcatccacctctaaaataaagcattttggataggatttctttccggctctaaaattaatgagtctacatgaatacaaaatagggctgcatctgaaggattcaatttccacatgcctgccccctaacgaagtgtcaatgcagcttctgtaccctcaccttctattgtggtggttgtgttgccttctctctgcagatataatgtaatatgtatcttatttagacaaattcctagatggatatttgtgtaaaataactgccaccattggagatgaagcatgatgtacagagaggtcgtggatatgatttcagaggaactcgcttcatgccttctttttattatttttagctgttacttggttaaattaatttctccgggcctctgtttcctctagtgaaaaccaggtatggtgcattttataatgactaagatggtatatatttatatatgtgtagaagtttaaaagcgtattaaatatcaattatgacaaggtataaactttcaaaataattcactgaatgggtggatggaaatactttaatattaatatgtgataccttataatcagtatgaaagatatacccaagcacgaaaagagataagcaaaagctaagtgatttctttgtctttgtctttattgagaaacctataaaaagaatatcattctgaaattgtctactgaagcagatcaaagaaccccagggggacggatgctgtgaaccaagttgacaagctaatgtagattaacactagatgataacttccctagatggatcagagaggtgatcctgtgaagtcactggccaccatgtaaatctgtcagagatcagcatgtctggtgcttgatattcgacaaactggcataacaatgctatattaaaacactaggcatatatatgacctagaatggtgctcctcaaacatggctgcacattagagtcaccggtcagcttttaataccctgatgtccaagtcttaccctacacagattaaagcagatgccatgggtgggagactggcctcagtcacaccctctgaactcttccaactggcattttgatacttgagagacaaaacaaacaagcaaaatttttctgtgccccaaggctacctatggccattttttctccttttcacaaccaaactcctccaagtggttggctgtgctggcctgatgcagctctgcaacctacttccgtgtgctttcctgtcgattagctctcaattagatctccactgccacactgctgaatccagtggatgcttgatgcttgagtctcccccttacctgattctcatgtgagggccctctctcccactggttccctgacaccaccctctctgagttttactcctactcactggcccttgatgtttccagaatcattttagggtcatccttttccacctggccataattggtagcgattcctgatttgttttgcagtaaactcccttctcttgtgagtgtacttggtaatctcacatgtaagcagggtttccattactatttgtgggtggatggtggtcaagtcatgtttcccttgagttttgcacacacagaaacaactgttatttgacatctctatttgcagtctcaaagatatttcaaacttaagtcaagcttatttagctctgtatatttccattcaagcacgtatcaagcttgtaattacacaataatgtatgtggttgttagatctactcctgtcgtgtgtaggcactatgaaggcaggggttgggcctggttttgcccactagcacgtatcaggtccctgatacgtagtaaatgcttaacgtttgttatagtagtaataaaaatattaatgaaaatgataatattttgtaaacatggccactcttacattcacaatcataaaatatttattaaaaggagacaaaaggagtcaacaaggtccacaatgaagaatattaaagatagagtggcaagggtacagactttcagttataagatgaataagttctggggatctaacatacagcacatgactatagttagtactgtgttgtacacttgaaatttgttaagagagtaggttttaaggttctcattttaaaaaaagtgactaggtgaggtgacagataggttaattagtttattgtgtaatcatttcatgacgtacacatatatcaaaacatcacattgtacactttaaatacatcaattttatttgtcaattatacctcaataaagctgcaaaaagagtaatcctcatatttctcaacgattgagagaaattgggaacaaagtacagaaataaatgaatgcttattcatatgaatattacctagactcattttaaattttaattaaaaaattaatgatctgacacattgaatctccatgattacagattatatcaatctttctggaaaataatcaaatgtcaatcatagaataaatttcctatcatgcaatttaaatgctcttattaaaagatttccccacattatttaatagtttttgtgatggttaattttaggtgtcaagttgattggattaaggaattcctagaaactggtgaaatattacttctgggtgtgtctgtgagggtggtttccagaggagactgggtgagtcaggagactggggtgagtcagcagactggggtgagtcagcagactgcgtggggagacagaccctcagtgtggccagccatccttcaataggctggggtcctggatagaacaaaaagacagaaaaaagacaactttttctctctctctctttctctgtcatacatgtgctcttgtccttctgctttctaccatgggatgacacagcaagaaggctctcgccaagggcctcttagcctctagaattgtaagaaatatatctctgttctttataaattacccactttcaggtatctgttacagcggcacaaaatggactaagacaatttccctcctctattgtccaaaattggtttgaaacactgatcatcatgcttatctcctttttaagttggtatttggacagtatggacgggctttagatctactggaagtgtgattccttgccataacaggtaggaggacagtcacctcttgcatttgacaacaggccctacttttagggatgtcctgaagaaacaggagaactgttactgccagtaagaggctcaatcatatgaaaaccaccagttatcattttgaggcaatgatagcaaccctatagaaaagcctaaataattccacgcagccaatccattttgttagttcctgaaggctttacctattttcctggtttgtcctggagggctagctggatgcaatgttgtcaaagttttgtttaatagaagcaagtatttcatgacttctgcctccacattttcaaggtcaggagacatcatttatgcattatagagtgtaactctggggcttccattgtatatctgttgagtacctgagaggcactagactataaagctatggtgttgcccccattaaagcagacaccagccagtcttataagattatatcatctttgtctttgttgtgcctaaaaacaagagctattgatctgctttcagtcaacatcacactatgccttccctttaaatactcatgttaacttggtttgaattttctgccatgcaagaaaactggcatctgagaagaccaatctaaaggaacacataaaatattcattactcaagattcactgcctctccttcaataactaaactagataccaaagctagattcttggaacataatattctgaacatttataaaattgcccttgtagactgaactataatctaagacaatgccctgacttccactgaagacttacatatgggggaaaactatgaatgaaagatctccattttttatgagataaaatgtactttggagggaattgttattatattgctcaatgttcctgcataaaggactagtgaatattcataatatctttgctcttataaatgcaatagaatggaatggaaactccttgttgtagtttgatctctcatgtaccaagtacttgggctttgctctatgaaatataaagctgtttgtcttatgaacactgggcatgtcccctgatctgtggggatcttattttttatttttcatttttcttgtgtggaaaggatcagaaatgagctgccattttagattctgtgtaatgaactgggaatttgtaaggcctactttggaagtagcttcatcacatgtgtgaaaaacacatgatcattgttgtgtccaaagcctcttgaagacagaaatgctgctgtaatttggatccattttcatgtcagtaacggatgcacttgaaagatacttggctcttatgaccacaaactatttgggataaacacaatgatgatagtatgactgtggtagaaaaattagctaaatggatttataatctgtccctggaccttaatttggatattgtctggatccggacttcttgcatagatggatggaagcttataattttaaatctaactttctgagagtacttgacttttaaagtctagagcagcactgtctcgtaaaatttctagaacgatagatatgctctctgccgtgtctaaaagggtagctgctaaccacatatggtataggccacttgtaatgtggctagtacaactgagcaattgaatttctaaatttaatttaattggttaaatttaaatggaagcagtcacacatgactagaagtcactggattagacagacagtattttgtactggacactgctctagagtacatacagtatttgtaaagttaccaggtgctaagactggagagttaaattttattccatcataatctttagaatatggaagaaacctataatgcacaaatgtgaattccttatgatgacaagcacattgaaagtaaggagcaggtccattaatcttcacgtccttcatagcatcggtacagtgttttacatgcaatggatcatttacatttctgctctggtattctacagcagtgggcagaggcttagacttatgaggcaaagaaatttgaaacaaacatagaaattgtatgaaaatcatagcaactaaaacatggctgagcgaggccctaaatgtcgccctgattacccacgcactgatttcaccatcagttaaagcactacgaatacataagtgcacaaatacctaaataaatattatttataaataaatattacacaaagctttacacagatacacgtgcttcatgtaacttactcgtaagacatagatttatttccaaatccctagaggtgcctgaaggcttctggtaattcacccctgtcatgtcttattggtaattatagagatgtatttaacttatttatcacaagaaaacaataatctttcactttaaaaagcatgtgctaatggtgttgcttagataacagtatttcttaagaagccagagcacagggttaagactatcaaagaaagagaatcactgatattgaaatgtccctggagaagttagaacgtctataagcatatttaaaataaactgccgcggtcccaaagcctttaatggagctggggagctgtttaatgcacactatcttgcagtaatcgctgtagtttaaaatagattttaatcagcaccatctgcataataggctgaacaaacaacatagaactccacttataactcttatctataaagtaaatattataaactcctctccatagaaacagggcatataacagcacttttttgatgtttcagtgagtgaaaattttgctacttaaattcattctctcttttctaaactatccatctaaaatccccttatgagaataaattcaaataagcatggaaagtaagtcatctagtactgtgaaatcagcaaggctgtaatacttctttcattttacaattgggtttattattactttaataacgatacactctatgactcaaaacatcaattatagaaaaatgcatatgaaggctatacttttgaaatgattcacaagtgtggggcattgtatcagtgtcatagtttgtaagcaatttcatttttaaggatctttgattctgccaaacatagctgagtatgatttttgaagagtttagcaaaggcactcagcggccttatgtgaaataggaagtctgggctaatgtccaaaaaatcactttaaagtgattttttaaagagaaaaaaggttggttgttattttatacactactggttaaatttatcaattttaggagatccacttgatcttttctaaattcactgatgagggaaatatgtttacttcttattcttttggattgagggcttttacaggcttacaaagaggcaagctgttgaggtggggacccgctgaataaaatgctaggcggctatgttaagtctcttctgtttttattccatgaattaattaagtatgctcagtcatctagggtatgtctatatctggcataattatttacttgaataaattttaggaaagatgatttggaaccaggtactaatggctgactaaattttatcattttctcctgaactagtttattaggctcagccttaacgatagaatactttttttttaaaataaataagggtcatacattagtttaattgctgtgatctatacatactttaaaagtatcatacacattatactatataaagtgaacagttacaatatagtacagttcaatgatgacaataccagacttccaagtcccagttttaagtattctgtcccttgctagttagataaagtaacctgacatttggttctaacactgtttgatttcacttaattttgtagaaacctgtctgtttctcatttctactttattccaggagtcttcttgtcttcaagcagtggtaaataaaaactcctactctaaaggcttatttaattgctgctctagtgattatcctatttgctttgagaaaaaaacctcctgcttctgtctagtgtggcagagcacatgcttgatgaactagcaaattagtaacaaactcttaaaggcaaaaacgaagtgaactcagagcgacgcgtgtattaaaggcagctttcatactgaagatattgttgaacctcgtgtgaattgagttaagagtgcaatagacagaagacaaaccccatgccttaccaaaagcaagatgtgtatgggagtggtcctgttaaatcaagacgtaaaagattagactgtcagtgcaagggtgaataacattcccttgtatgtgacctcccagaacatgcaagaatggctgctctggaaccttgtacaaatgcagagtggaacaaaatctcttgtgttcattcacaaacaaaagccagcatttcaagatttgtagcctgaacatactctatgtgggtggtctgaaaaattcaggccaagtgtgttcttgattctaatggttcaaaatatgtggcagaaacaaatataaatcatccccagagaatccacctttaaacaagctctaaaagaattcttacaaagttttcataaatattaattccatttcaaaagtacaaaaagcaaaatgaaacaagctattaaaaccaacatattctgactcaaaatacttcatgtattgaaattagcaaaagagggtataaaacaaatatgttgaacatcttacaagaataaaagagattaaatacatgggtaaagagcaagcaactaaagaaagaagccaaactcatttgagaaggaaccaaatgaaaccaaaaatataaaatatttgagattaaattgcaatagaccatttcagattaggtatagctgaaaagagaattacgagctggaaaatagttaaatcagaatgtaatacataggggcaaggaagtagaaaatatgaaaaagagtcatgaaaggagaaagtctaatattcatcccctgagaataacagcatgagaagggagcaagaatggatagaggcagtatctgaaaaaaataaggaatgaaaatttccccaaaatgctgatagaagaaatgattacaatcggaatgcatgcaaagaaacccacacatatcaccatgaagctgcggacaccaaagacaagagaagatctcaaaagcagtcagagagtaaagtcaggttactttaaaggaaagacagtcaggcagtaaattctcaaaagcaatagtgaaaacaaggattcagtaaataatataatatcttcaaaacgctgaaagaaaataactgccaatctagaattctatactagcaaatgtgttttttaaggtaagcatgttccctgcagaccttcatgaaagaacatttaaaggcataaagaaaaagatgtcaggtgaaagaaatatatatgtgaataaatccaaagaaaaataacttcataaaataattaaaatagtgtttcatgaggtttattcagttacagaatcaattaaactataattagaatgaacaacaataacagctcccaatataaattgaacggaggtgtatgtagttaaagtaatctaagaaaaaaggtaaagatattggtaaattttagaccctatatagctgtattccagggacagctactgaaagaagagaaagaatataaaatctctatctcaaaatgggaaattatgtaatgagaaaaataagagcaatcttaaagaagatgaggaaaaaaagaaacataaaatatttgtggcataaacagaaagtaacatacttagaaaaacaacctattttcatatttatagtaaggtaaatgcagtaaagatttcattttaaagtaaaagccatttaactacacgaaatttataagagacactcagataaaacatggatattttcaacagaaagcagaaagtaaaaggatagaaaaatatataatgtgattcttacccacaatttccttaagagaaaactgtgccaaaaatgtgattgtaatgtcagatactttatgtgtcttaaagttctcttatattacaaatacgggattacaggcttagaaccacaagctgcctaagtttgtattctttgatgctttactgtgtctcattatgacttaaggctgtcaacacagtttcctagcatcaaaatcgcgggtagtgtttataaggtgataatttattttactgatgtatttacaatttcctgtctgtcaaaacagacttatttcatttaattgttcaattagatgagctggaatcatatataattgcttaaagacagcacaaagtgttaagaggaaagctttaaaagctttttcggtgtggaactaaatattcttgtttagttcacttgttagaaatgatttaaatgatcttttgacttaatgctatttcacatttaactggagctgttgcactacaacattccacataaatctactcacatataaaggaaaaaatccagtttaatccttaactgtaatgaagaatgctttacattttcatcagaggatttttctagcttaaataaatataataatataactcaaataaagagtaggaggatttgaattggagacaaggtgaaaaacagtgcatagaattggaatgaaggttacttttcttgagatggaaaatacacttaaacttaacatgaattcgtatgaatgttttgcagataaaaaagtcattttaatgggtgcagtcttagaaatcaatccctaaactttccgcattgataattcaataatctatcactatagaatatgagttttactatgcaatgcttaccagtccactaaaatgaagcgttataaattatttcaagatgtggatattgaatgattgaaaggatacccactggcaaagtttcatatcagcatggagacatgtaaattcatgctttagcaaattacaaaatatggacctaacaggttaatagcaaatggcagaacccatgaatgttaatctatgaatttcagatttctacctactcttctactcatataagtggaagactgtgaaaatgttattgtaattaggaataatccggtatacaatttactgtcagaggatgctactaatttgcatttaatttcctgaaatgtcaggaatgaatactgataaagacacaatccagatacaaaattgatctttactatgagcagaacattaatttttttcgccttacaatatagtacatacatctgtgtttagcaaattgacttgaattattcatgcataatcaaaatctaaatcactgccacaaacaaattattagtgttcacatttgggttcaggtactcattggccattaggtgtatctaacagccaatgagtacctggagccattggaataacctgtattttctgaagaaaatattgccctggaaatggtcagctaaaggcaaggctttcagcaacccagtcaattatttataatatcaattagtttcttcctgccttttcacctaactcatgagaggctgactcactgacacagggagagacagtaaggatggagggattggcttgggcagtgttagattctgcagctgtctaaaacgtacttgggatttgtttcagtcaggtatggtaagacagaaaacatggaaatatgattgtgaggaagaagtttccattcatagatccctggaaagagaaggcacagcagagccacagggccacctagggaagtacccaggttggccaggagacagaaagagggagaagacgagcatgcccagagcctttactggggattttgtgggcaggaataggcaaggcaggctggatgctgagtaagcctaggactggatagtttgaataactttggcaggctatgggctgtaagagtgatccctagttgtctgacacttagcctaggggcgatgtagggtagagggaatactgcttcatatgtgagagtttttaaaggagatgttttggggtgcagctgtgaattgttggctgtttatagaaagggggctagcagagtgtcgtctgcaatctctaaaaattagctagcccgaatttccaggattaaggctccaaatgccagaacatcaagaatacaaacaataggaaaaatagtcaatgcagcaatcttatctttgtcatcaggctaaataaatcgatgaatcactattggactgaaaaaatttagcgaagctactagaaagttaaccatgtatatcaggattgcacgcgctgcttttggtagcatgtttacagtttaattttccaaaaacaaaattctcacaatgtaaaaagaagaaaaggtggctgacataaaacccatcttcctattcagataacttaaaagatggctctgctggtgacagacacacaaataaacaactatattggtaaggcgttaacaaaggtatgcaatgaatcacccaggaaaggagtcatctaatatccctggcacttactttccagtcctcaatatgaaatggttgggtcaggtggccacaaaggtttcatgtaacatcatcacatacatctcctctctctctctgtctctctctctctctctctctctctctcacacacacaacacacacacacacacgaccttcattgtaccccagtatactgccttcttaaaatggtacttgaatatacaggcccaaccttctgtgggcacaaacaacttttacgcttaacacatctaatttaaaggatttctcaggggctttaaagtgtaattggacaagcaggtggtttaatccatatgtttgtaacctcatgcttcattaacaaagcaggtgtctccctccaatgtttctcgctggatgatataaacttgtacccagcacaggtcaaagaaggtgcctaagaatagtctccctaggtcctaaaaataacttattcataccttagaggtatcatcgccttcatcttcatgcatgaactggatggtgaaggagttgcagacttgcttccaggtggagatggtgagttgtgggaacattgcttcctcccatattcaaaccaagttgagcacttagctgtgactggttaatggagtcagctggccatgtggcatcattcctggctgctgcctgatgtctgcaggctggcccctggtctcatggctgccatctgaggatgggaactgtactgagttccttctgggtttcgtaatctggcatctacaataaataaataaataaataaataaataaataaataggaaaggagtattttaacaaatatgttttgggcaaaaaagtaataattctttagatttccagatgttctctgagttacatacacatttattttatctggggtaaaataatcctaaaagtatatatcacataaaggatagcataagactaccaaaagactggaatttgagaatccagttagcatcatattcattactcaagatgtgattaattatatttacagtctttctacactagtgaaatatagaatatattatttatatatgtatttgtatattacagcatgatcatatttatataacgtaatttcaagatgttgatgctcattagagtgtctgtcaaaattattcaattattagtgattaaatattcacaaaaattcattaaaccctgtttgttttatcttcatcatttaagaaaggcttgggagttaataagtatactcttgtactcagtttaaagctttacagggtattactagccaaatgatctcctaactaccagactcaaaacactgataggctggtattaaccaattattattgactattgaaatgactgcacagtcagacttgaaagtaaagctctaaaattgcaaggtaacatattaatccattatgctatctgagtcactggtttttagccttaatgagactcactttgtaattcaagcaatgaattttgtctctgcaaggattagaattaaaagcattggaggagaagcttttaaggtatctagaggtcaaatgtattgtataagaggagtatggagaatttccttaacatttctctggcattttcaaacttaaaataatggagaatatttcatggtgcttatggagcagctcagttttttcatcctgaggggagctgaggaattcaggcaggtagagggccacaaaacaagagagaaaaacaagaaaactgtgaggaaaaaagatatatggttaaagttcacgttggaagtgaaaaagtaataatgttaccttattctgtttcattagaaaagaaaatccacaaagtatcagatgtttagcaatgacctgtctgcaaatgttattgtgacgtgaaaaactgtgaaggcaaattaagtaacctagtcataggttcttgtttttgtttttatgatagtaaatcattttacaccattttccctgtagtcattttaccaatctagttagattcacctaagctaaaactgaggctgtccacagcccccatgtgtgccctgtgttcttctccggaacgcattactgcctccaccatgaggcctcttattagtcaatttcactcctttagctcctttccactttggttacttctcagtcttcacgcacagttcaaggtatcctagacctctggctggcccatgatttgtacctgccttttctaagtccgaatcaacgttttttccattatccaaactgattcctccaagccttcaaaagtagttcaggattctcctttctgtgatgtccctcataaacagcttttactattcaatggtgcatgcaagagctgcaaaggctcttggtgacactgtcatctatggaagaggaaaactgggagggggtgatgatagtgcaagcttgttgaatgtttgtgaataagtatataaataattataaatgaataaatgaaggagtgaaacccaaagagatcaatgacttgaccaaaaccaaagataaaacccacctctcctaattccagtctttgatacttccactgtgttaagcagctgattcaacattttacatattccataaaaaggattacagttattaaagatacttaaaaatgcattttcaaatgttgtctacccaaatcaacaatggttttactagcccattcatgttgccttcagtcacatttactaaaatggttgttgcctcttcttagtgtacatgtaacttctacaatctgatcttctttatgaaataatactaactttcactgattccttaaagttgtgccaaggacagagggtaccatgaaaattaggactgatttttaaaaaacacagaagagacagtgtatactaaatttcttttcaggcctactgtcaaatgtcctcaatcctgtatgtttttagacccttagcatgcagaaaagctcccattatgggcacagagtaaggctacctgtaagtggacactatcctacaggggggcagtcttctttcccaaccctgaacaaataaagcactaatgtgcatattccaacttatatgttttatagccttgtaaatgaaaacatttagtagcaaaatcatacttcaactaaatgatctttccaaaagtatgtaactaattctatctttatttctccttcacataaatcccaagttacaaaacacgtacagtctgtaacagtctgtattgagcccatttcttctcatcctttcagaaatcttgtggttttaatatatcaagaggatggtttctaaattaattttcatgtggagttccagatttatgactacaactaaagtgttccaaaagcttgaagcaatcttcactttatcgcactttctctcctcccctgtcttcaatcttctaagatgttttctcatgttaatttgtgtagtgtgtagatctctggacactaaatctgcattcccactcttgcaatggaaggagaagaaggtgggtgtggctatggaagagaaagtatcaatctgggtaaggatggtgaagtactcaagagggtacctctctttccacagctcatcattagttcaatgtatcctgtcaccagtggtgttaggtcaggcagacagcttgataccaaatcaaagcactcttttcctgtgtggagcatggcaagcacaaatgagggagcattctgtgtcttcagtcctcagatacacttacaaacagtgggatctacccatggcaacattctgaattaggaggagtatttccacttaccttgttttcctaagagacagttcagtattaacactgcctaatgtataatatggggaaaattaaactcgataaagtttgattactgaaaattgaataattagttagatcatgcaagtaagctaatgttttgactattggtttcctgctgtaagatattgattgactacagctctgtcatgtcaaatgcaaaacctgaagtagcagaatatatttcctgttaatcaccaatattttaaatttattttgaataattcacttaagtcatgctaattgcaatggttgttctttctgattcttctcaaccccttcactgacttctctttttttacaacgtcccacctctaagtgattccttaacatgttattctgagtcacatttcttccaccagataaaatttgccatggttttattaatgggaaatgttctcaactaaaatgtacaatctgacccaaattccaagcctaagtctgcaattgcttgtgagacattactacttggacatattcttgctagaaatgtgaacaaagttttctttctcaaatctattttttttctgtctgacaatatctgttgatgacaccttcatcttccttgtcacctctactcaaaatgttgcagtctttttgactctttccttttctaccaaactcttgtgagttctgttgggtctaccctgaaaatcaattatttccatctgcccttccacccgtttccacacccattcatctatccaggcctaattatcttttcacttgcaatagctgcttaactaaaattggtctctttacatctaccccaagagtggtacaaaattaatcttcatgagccatgggctcaaaaattctccaatgacatcgtcccccaaattaaatccaaactgttcagcatgacatgaaaccttccaaatgaaactcaacctataaccatccttcatctactctattgttcagtcaaatccaattgctccttttttactaaatctctctcccttaatcatgcgtctttgtttacgctgctctgtcattattcaattccattttccgagaatttgctgtctaaagttattaaaaagaggggaaaaaccccatacttgctcagtgatttgtggtttgcccagtacttttacttattgatccttgtaacttccctttagggagccatgtaggaatagctgctttgcaaaagcccacagagaggttaaatgatctcaatctttctatcaacaaagactgaagtaaaaatgaaatatactttttttacatacttgtatttccccacgattccatgctgcctttaccatcttcatatatccaaaccctaaatgtacttaaagtcaagttcaaaggtcaccttatctataaggctccaagaaccttcttattctgaatgccaaagcattttgtttatactttctttatgggacaccactttaaaatttatttctttacatgtatgtaccttctagataataatctccttgattagttcatgactaatgcatttttaatccctcttgagatatcttttagttaaatggtattccaaatattcaaaaaatatttgcgtgtcagtgtgtaactaaggaaatgaattcatcagtataaactgactttaactagtctgtgatttttcttttttcctgggaacttcttagtcacaagatgaaaagacttgattaatgtcatttccctttgtggcagaagcctcaagctaccctcctacactcattttccttttgtgcgaaaaatgggcccctctagctggctcaaggaggacatttgtagcttcctttgcagctatcatggccctgtgacaatgaaatgtaagcggaatcctcgtgtggtgcttccaagaagtctcatgaagggaggggctcaccttcctttgtttttttttttttcaagttcctgctggcaaaacgtggaggtgatggagagagctagggaaaatatcttggaccaagacatggcaccataagacgctgaaggcacaagaaaggaggctgagggtgtgattattctggagcctggacaaccacttacagtgggagtgaaagggaagtaaatgtctgtcattgcagaattactgacatttgggttttctgttataggcagcccaacataatcctaactgatacaccctaacagattataactttaaaaagctgggagagaatttattttgttcaccattatagccctagtatctagaacgatcttggcacgtagtaggaactcaatacatatttcttgagttaacactgaatagatgttaggtctggtacaattagaattgatgatgccagcttcacataaatagttgttataaatcttaatcttttgggaacttcatttgctaaattctagggctcaaatgtctcaaaggtaattctcatgtgtgtgttcctcattttgtttattttcaagcctaatgaacttcatattttcttgcaaaatgtcctgcatgtcattggcattttagtgttgcgtggctcttaatatttatctcccatttgcaaaactctgtccatttgaaaatgggtgctaggtttcacttttttggaagacgatctgtttcctaaaaatttacattgctattgatgaccattgtcaattaaaataatgaagggtattataatgatgaagaggagatttcaatttttccaattaatgcaaaacaaaagtccattaaaatcaattaggaagccaaagctgaagtcatgtattgtccctcatgacctgcctgatgctaaggccatgttcctttctccccttgtctggttacctagagctgaagagtgccagttgaggacagagctcaaggtgcaaacatgaggcacaatattagctacatatttcagcaatgttttcactttctttcctttgattttctttcttttttttttctttgagatggactctactctgtcgcacaggctacagtgcatttgcacgacattggctcactgcaacctccgcctccaggttcgagtgattctcctgcctcagcctcctgagtagttgggattacaggcatgtgcacaacacccagctacttgttgtatttttagtaaagacagggtttcaccatgttggtcagctggtcttgaactcctgacctcaggtgatccacccacctcggcctcccaaagtgttggattacaggcgtgagccactgtgactggctccttggattttctttgaaaagcaaaagaaaataaaaaccctgtgctcatctcaggttattatttttaaaaaatgagtaagattttggtgaactggaatggtgaaaaaaaaatccttggaataacattagtcatgttagtgatgaaatatgttaaaatcacatacttgaatggcaccagaacgatggagggcctgcctttcagtgtttaaactctgtgtgcttcacaatccttccagagtctgtattcctccttcaagtatctgcatcttccccgtccaacacaccagccttgaaagctatcattatctctgcctctagcagacaactatatcaaaacagttgtacacataaaactgcaccaccgcctcggctggctctgctctgtccagctgttagagtgaatagcagttggtgcacagagcgctggaacatgggtagccctgggccttatttgctaatgtggctcaccagctgctgctttctgtggtctttgcaggcaaggctggaaggctgccagttgcagcaggagcaggagaacgtgaggaatctctcaagcccgtcatttacccctgtctgtcagcatttgacaccctgagctgtggagtgctttccccagggcataaggagaccctgctggctttagctgtgacaagtgcttcctctcggtcccttttatacaactatcaaacacacaccgttcatagcaccttaagaaaaacttctgagccttgctcttggtgtccatgcaggcctgcatgattaattagggcaggaaggcaaagcggtttcatttttctaggaataatgcactctaagagtctatgagaagaatgtaaatgttgatattatttaagtcccaatttgattacatatttttgccagggattcaattaatatgtaaatgtatacaacagataaatgtgtggggaaatttaataatcaaaatttatttattattttcctaaatgcatttcgagagagcttaattatttgttgtccaaacacattaaataaatcgtttttacgtgaccttttgtgatctatttattatgtagaaatgtgtactttaaataaactttattttaagattttgctattagacttcaattagttgcactgaacactgataattaacaatgaaagagggaaaattggaaaaatacatatgcacagaacttgctatatttttaaagattgagacaagtgaggtcaaaagaaaggttggacatttttataaaaatgtatttttatcctcagtattttaatttaaataacttgatttcaactctgcatttccaaaaacaaaattgtttttgtatttaatatttgaatcttcgcttttctttcaaaagacaatagcaacaagtagggttcagctttctttacatacgctacaatagaatacctgtagtttagttagggtaattagtcattataaaacaattttcacaagaaagtaagaaccctggagcacaatttattagatatttgccaaatgaacagcctagtactctctagaaccaccatcttcagagaagattaaaactgcctcagaaaccagtgccacactgcctgacttctacattacctgaccatctcactcctttacactgtggtctctccttgtggcttcttccacgaatgggccccttattactcaaggaatttggtgtgttcagagcaaacatcactgaagagtcttaaaagtgatggctaaaaatcacactggctaaaaaccatgcaccagttttggtgtttgtttgtttgtacatcgtctcccagggatgaaccaaagatcagtattgaagagcagcaagcaacagagagaagggggaccctgaacctgttaacgcccttaggcccttgcctggcctcctctgcagaactccactgcaattgctgccacatccagcagatcagaaagaagtgtcttagttgctctagtgtatgcatctggatttatatctataaacaactaaaaagcaattttacgccattttattcgatttttttcctttctctaaaggagaggggggcgtgtgctattgtggaggcaaccctgttcatgacacctagctgccactgtttctaatgattgtcttactttcaacttctttaaccctcatttttcaactcataaaaagaggataattttcaccaacaaatatttattgagtgcctgctatgtgccaggcactgtcttaggtacctggccacagtggtgaccatgtagttggaattcgtgccctgatgcagctcacttcctagtggagagacagacaagacaataaatattttaggacagtgagatgttgtaaggagacaaatagggaggagtgtactgaccttaaatgcttccttaaaacatgactgtgaggattaactaagataggactacgaatgcattttgtcacaaatgaattcatttttgtggttgctgctcacgctgtggttctcttcggttattatccttgagttgctttccctgaccagttctggtccctggtggccactgacacaattatgaccaaacattctggcagccaaaagcttgtatctatggggacttccctgggataagcagggcagcttacagtcacagagcacagggtttcactgagagaaatcaacagcacagataaaggttgaacttataacctgggttttaatagctccctgatcaagctaataggctaactggtagatacaaagttcaaaaacattttaacgtataaaaaggtattcagttcataggacagcattcttttccatcaactatgtacatataatctctcttttggatacaacttcggccaggaggttatggcgtatagcgttgccctttaactgcacagttggaaaatgttttttactcagattgagccacctcgtttctgattgcttcatgccaatgccatttgttcctgctgtgaatcttaaactatcaacgtcaatattaccaagtttgacacaccgtgctcagtgagcccttgaaagggctttcctgcccagcgaaaataaaggaaatgtgcaaatgggaacaggcaaagtttacttttacttgacaaggtgcatctctcataactgcagataatggcggacatgagaggctcacggactaaagggtctgtcctgtctaaaagagctctggggatcagtggtccaccctctgattcccaaaacatctgaattagcagttcctacaaattacatctcggtaaggggagtttatgaatgtgctctgggtctacctatgattagaatcaacgaagcctttatttgtatttgtatagatcatgacttttgcatctgtgctacaaagtgtaggcagtgtttgttcacaaggggctatgattttatattaaaagtgtatcaaacatgctactgtttgctatatctcctttgttttgatgtgcccagagaagggactgaataatgtgctttatttctagatactttcaaaggattgtgtgcattgaaataaaaagaatggattggaagtgtaggttaataataagaaaattgggacgtactgggagacatgccgtctgggagtagcggatcacttacagaactacctctgtgtattcatagcagcatgagctagcaagaatgcttcttcacaccattttaaacttgggaatttaagttgctttctcatatttttccacggaatgttaatgggatgttgcaaaaatagagatgtcaagtgggatattgacttcctaacatcagttcagaacattgtatttgagttcatttagaggcacttaaatcattagatacacgtgacattcagcttaaaatacatcttaagaagcaaaattaaaaccttatattctgcttgagccagacagcttccctggcagaatacttgtatgccccaacttattggagacttgaagaaaagtacaatttttacatagtattttattatggaaatcatccaataatcctttcaaataatacattataaaacattaaatagcatgaaacgaagacaggaaaaggctggaaatcctctccttttgagcatggtattataacttggaacaatcattctaggaaaattacaatgtctttcagctattttaaagtgtcgactctgtaagtgaccttaagctcctttaaaacaattacaagattcaaatatttgtctgcaaaattttatagcatgttagataatgggatagatgtaattatatatagtctcaatattctaggtatacctaatttagttaatattaacatcactcactcatttatggttttataaacttgagtcacataaggtcaaggtctcaaaactaatcataaaaactagtgactgctattcagctaatataatgatcctttctttaaaacaacagccaataaatttcattataaaaagttataaaagggttaaaaacctattaaatgtcaaagaatttgcctgactcaaacttctaataagaaagagaataggctttctttctgaattatttaaatctttactgactgtgcaccgaacctgaaattagaaaagtgttattagaagtattctctggtttttataaaagttggagcccagatgtatcaagccatagtctttaactagactagctaaagcagtaggtctttaatcctaaaacatggcttctactgatataaagatcataattaaaactctatcctgtaacttggtgatataaagttattattacagaggcacacatgttcatttagaatatatgaactacatgttctattttaatttgaacaaatatcttccattttggggggatagttccatgtccactaacatagccctctcaactaataataaggttttaatagtgactgactttaaagcactaatgttaatatttgaattatctatcatttactggtttaacacctaccaaatatacattgaaattatgtcttatggtctaaagtgttaaaaaaaatcataatcctgcatgattatagccctgtgtgacagtggcataaataaatttaggtattattgaaaaataggaaatatatctttcacattttcatctctatttctccaagtgactatactcagcacaactgatttgaactggtctctctctcaaagcaggtaactgtcctcatatcagtttcctcaaatgcccattcttagcctttggtaatgtgattttaagttctcttattaaaaatatctaatactgacaggtcccacctaatatactagcacggtactaagaagtttccatgaattaccctatttaggactcacagcaaccaggtgaactgttacagtcgccactgccatggtactcacgagggacccaaaggaacagagagggcttctccagttattcagtaagtgggtcagctgcaatttgtcacagggcgcctgatctcaagcctatatcataaccatggaactgtactattgactcagtgtatgatctgatgatgttttagctgttctttaaacaaaagatagttggaaggacttataggggaggatgcagctagaactagaatgactgaatttaatgcactaatttcttttgcaggaaattcaattaatttttttttaactgaacacttactctgtgcctcgcactgtgagaggtcctaggggaaacaaagacagtgagactatccctgtactcaaataactcacagcctggaagacatactataatacaagtcaaggggattaattgctataaccaaaattgcactgctatagaattgcagagaataatgctcaacaaggagtctgtctgcattgcattaaaattgcagtgagcatcacttagaattaagattttttttttaacatcagaaggtacatgagtagaatttaactccggaggcaatataattacagcagacacaccatctaattgtttgacagtcagtacatctgctatattttcataaaataatgatatgtctaagatagtgtgaaagaaaattgaacaaaaataaaacaatcatgtggctttcatccaatgataaggatgagtttaaaacctcaaaaattcaacatacaatcaaatttactttaaaaaatgtggctaaaagctatctgacagtttgatttctgtttgggaattagcatgtgattcttaagtgtattgtcctgtaagtcttaggatgactagacttagtctgtagttcaagactatatgtcagaatatattctgaggtataaagttgttttaactgaaagaaatcaaaaacaaaaataaaaaatacactaccatttgatactatattagcagagagaccatttcccagtccccaaatatgggcctaacgtttcaaaaataacttgggttttttcattgggtccaaaaaacatttatgggtacagcaacagtagccatttttatctagagctttacaacgttctttcattagctaaaaatgttgccacataaattatgctttcacagagtgactgacaaacattccatcaaaacctttctttatattgtttcacttgtcaatcagtgcctttcacttgttataaagcatgttttctagaagggaagaatgaaagcaaaacactctgtaagagaaggtggaagtgcacaagtcttactgtgggcccagacggggatcatggcttaattatgtgaaagcttataactctctgagacaaaattgaaagggaaaaggaacttggaacaaattcattgtgaggataaacactgagtagacatcgttcgcttaaaaaatacagtttcctttcactttaacagtaaagactaaatggatgcttgatgggtttatgagagctggtatcagaaacttgtatcagaaagaagagctttccctacattcagttttagatgaagacaacttttcccacttaaccattagtggcatctctcccatgcaatctaactgaggaaggtggtggatgggtgagacactgagagatgttgaccttaaagacacagcaaagcctgtggaaccatttctaggccattgtaagctttaaaattgtgtacaaggggtttaaccacaggagagtaatgaatacatatgttgattaaatgactctggtgtggtccctgccattatatattggaaggctgtctcagaataagaattaattaagtttgcagttaactctgaatattcatgccaacaatcaggataacacaattttgtaaaatgtccaaatattctcagaaaacagtgtttttaaaaatttaatttggtatcctcgacttttttttttttagttttaattcttgttgaaaactgttctagaatgcctttgcctgctttctgtccctgttaaatacctgattctcaataaaatcttgaaaggatttcaagagaataattttcccctcaattataattgtgaagttttgtggttatggaatatggaacagactaagcaattgtatgctgctctgtggacatgcccttcttaaatatattttcggtctttatgtgtaaaaacaaaaagaaaagaaaaagaaaatatgagtcagctaattgagagtattgtttgggtcgttagtagagattttaatctgccaggggaattttttaaaattagaagtaatattcatttgtcatttcactatcttttttcttaattatggtaatgacagtggctttttttttttttttttttgtcctgagacagagtctcactctgtcgtccaggctggagtgcagtggcacgacttggctcactgcaacctccacctcccaggttcaagtgattctcctgcctcagcctctgaatagctgggattacaggcacctgacaccacacttggctaatttttgtacttttagtaggacagggttttaccatgttgcccaggctggtctcaaactcctgacttcaggtgatccaccgcctcagcctcccaaagtgctgggattataggcatgagccactgtgcctggctgacaggacatgtttttaacaacaacaaagtacgactgtggcctaagtctatatactaacagaacacttaaacaataaatttctgtattgtaaaagagttgacttgcacttagttatacagggatgctggatgagaaggtacactgactgacatactcatcaagcagtggttcaataacctccacagggtcagactgccagacactaaaaaggataaattattttaggatttacataattacagactgataagcctcacacattttaatgccacaggaataaaaaatagcagcattatttatacaaaaccttaattgcaacaaagtaactgatagaaacagctgctatgtaagtacttactttggacacaaatttatgctttctatccttttcttaaccaatgcccccaggcaatcttacttaggtaaattttttcaatatgatgcccagcctcctgaaaaaaatgttaattggcagatggccatttataatagaattataatcttactaactgcacatttataaattgatatttgcactctgttgtcccctaatttcctggtgatagaagaattcaaatactgatgtcaaattgatagcttttaaaagaatgttaagtatgtgtgctacggtgaggcaagatatttcttacaagtatgagaaatgcactttgcttatgggtaaaacgtggtttaatgatatggaaataagctcaagttcctctgtattgtatttacttacaatttttgtgtctaagacatatttaatatctcgcataattatatgaccacaacatgacaactccaataaataggaaaaatctcatttacatgatcaactgagggaaaagtgagaaacttgcaccattaaagtttagagcctattataggaaacaagaaggaatatctacccagcattttttaaatttaaaaccctctgatcattcttctcatctacatttacaaaagctaatagaattttccaggaacagtttattttttgaagacaaaaacactcttggcaaagacagaagtcagaatcttctggaatagtacattatattttattcccctttcataggccaggggtattttagttaaagactaaaatcacttatattttgatgtgttcttttttaataaaaaaaagggagatagcttttatttggcttatgttcctggccttcgccccaaacgctcattgtctgctcacaaggtatagcacataagcaggcgctgtccccatctgggggtgggggttgaagggactaaagggctgggtctagatgaataaggctctacgttcagtctccctcgagggcagcctcctctaagaggctttcccggacaagcctattaaacgtgatccatccttcctaacccaagcatctttttcacagcataaccacaatctaacattgtcagggtaagactctgcaaactctaacatgtacatgaatcttttaggaatcctcttaaagttaattgtgattcagaagttctgaggaggggcctgagactctgcatttctaacattccaagtggtgtcaatgtggctagtgtgtgaacccaagtttgagcagcagggcacgaatttgcaaaactaattggctctcctgaccagaatctaaattctgagggctggcttttttgcttgactgtttactgctctgttgtcagtgcccaattcaggcacattgaagaaccaggctcagaggaattaggatgtaggcactgaattgcagaaccatcagttaaagcttcttaatctcccaaggagttttgtcttgttttgtatttgatatggtttagctgtgtacccacccaaatctcatgtgaattgtagctcccataatccccacatgtcatgggaggggcctggtgggatataattgatcatgcaggcaggtcttttctgtgttcttgtgatagtgaataagtctcatgaggtctgtggttttataaagggcagttcctctgcatatgctcccttgactgccaccatgtaagacagcaattgctcctccttcactttccaccatgattgtgaggcctcccctcccatgtggaacgtgagttcattaaacctctcttttctttataaattacccagtctcaggtatgtctttatagcagcatgcaaacagactaatagaattttgttgtaaattcttttgctagtccacatgaagagaaccaataaaaaacaatgattggcttttctgcacggtggactaatgagaaagttactctttcaagtcctgggctattattaattaagagagaataagaaatagagggacttccaccaccaaacatggcagagtttatcagcaaatgtgggaatcaaaccatggctcttggtcttaaaagttttcaaaatctgggtcaaactttcctaaagtacttaaaaaatagttatttaaatttctcaacatatgaataacttaagaaagagctacatgaaaataaaggtacaacaataaatttgtgggatgcagccgaagcagtgcttagaggaaaatttataccattaaatatatagaaaagaagatccaaaaatcaataacttaagcttctaccatagtaaaccagagaaagagaatttaagcctaaaccaaacagaagaaaagaaataatcaaaattagaggaggattcaataaatcaataacaggaaaagaacaggaaaaaaaaaaaaatcaaccaagccaaaagctggtctttgagaaagcagtaaaattgatagacctctagacaggctagtcaacaaaaaagaagaacaaattaccaatatcagaaatgaaagaggagccattaatactgatctcaaggacattaaaagctaataatcctggccaacatggtgaaaccccgtctctactaaaatacaaaaaattgctgggcatggtggtgcgtgcctgtagtcccagctactcaggaaactaaggcaagggaacacttgaacccgggaggcagaggttgcagtgagctgagattgcaccactgcactccagttggcaacagagcgagactgcgtctcaaaaaaaaaaaaaaaaaagcgttaatagaagtatatatgaataagtctatatttacaaatttgagaagtcaaatgaagtggaacaattccttaaattcaacaactactaaaactcatacaaagagaaactgacatcccaaataatcctttactgctaaataaattgaatcaataattaacaatcttccaaaaaaaatcactagtcccagaagttaccaataaatatttaaggaaaaaattataccaattctccacaatattttccaggaatagaaacagacgaaagacttcataactcatgctatgagaacagtattactctaatattaaaccagaccaaaacacaagaaaagaaaattaaagactgttaactctcataaacacaaatcaaaactcctcaacaaaatatttacaaatcaaatctaaaactgcaccacaaccaggattatattagatatacaaggttaaagttcaacattagatatacaaggttaaagttcaacattgaaaatctaacaatgtattacaacacatcgacagtccaataatcaatgtattctaacactcaacaggctaatgaacaaaaactatatgatcatatctatagatgcagtaaaaacatgtacaaaatataacaccatgcatgaaaaaaaaaaccatagcaaaccaggggtggaaaagaattcctcaacttgatttttaaaaatctttaaatcctatggttgatatcatacttaatggtggaaagtgaaagctttcctgctaagatcagaaacaaatcaaggatgtcccctttcactatattattcaacgttgtactgaaagttctacctaatgcaataagacaatgcaagaaaataagggttgaacagatcggaaaggaagaaataagaccgactctattcataagtgacataatgtctatgtagaaaatcccaaagaattaaaaaaaatctcctggaaataataagtgaatatgcaagtatggaggatataaggctttcctgtataccaggagtgaaaatttggaatttgaaatttaaaaataccatttacaacagcactccaaaaatgaaagacataaatcgaacaaacagtacaggacttacacactgaaaaccacaaaatattgatggaaaaaaccaagataggctaatataaatagataccctgtgttcatggaataaaagggtcagtattgttaagatgtcagtcttaacttaatcgatagagtcaatgcaatctcaatggaacatcagcaaactatttcataatattgacaaaatggttttgaaatttatatggaaaggcaaacaacccagtatagccaaccagtaccaaagaacaaagttaaggaacacacactgatagacttcaagacttactataagcttgcaataatgtggacaccatggtattggcaaatgaatagacacatagatcaatggaaagaatagagggcccagaaatagatccacacaaatatagtcgcttatctctggaaaaggacaagggcaattcaatggaaaagacagtcttttcaaaaaattggtgctggaagattggaaccatatgctcctaccccaggccccaaaagaaaagaaagaaaaataaaaaagtagagtagatcttttattcaatattaaatagtcttcacatacaattagccatcatgctccagggaattactctactgatttgaaaatgtatgttcataccaaaacctgcacacaagtgtttatagcgatttattcataatcagtaaaaaaaagtccttcaatacgtaaatggatgaacagagtgtgtacatccatacagtaaaacattattcagtgataaaaagaaatgagccaccaagccatgaaagacatggttgaactttaaaatgcatactgctgattgaaagaagccagtcaaaaaaaaaaaaaaaaaagctacatcccatttgcttccaattatatgtggacagtaaacattggttccatgcatcaggaagggaagatggttgaatatagaaagcaaagggggcttttttagggtgtattattccgtatgatactgtaatagtgcatataggaaagtaggcatttatcaaaaccttagaacttaacctcatacaaagtaaaccataatatatacaaatttaaaaagctatttagacattgggggaatctcaggatgaaaagtataatgtgacaaaagaagcttaatgtattgaaacatatgaaacaacctcattgaaaggagcaggataataagatgctgacttaagtaatttggaaatgagagaagtccataagactaaaggcaaaagaattgtacataagcactgtacctagttcataaagttgcttcccaagtgggcatgggtttacttacaaattggataccactttccatggcagatggtggaatggaaccctgatttaaatggatagtggatgtgggtgccagtttctcactattgtggtgggttacagcaagagaaggaggctatgcagcaatggactgggttgaagacaatcagtatgaattcatatttagcttaatgtagatacatgtttacatatgaaatatttatagatatgtgttacatatacaggtcagtattcatacatatatctccctaactgccagttaagagatccaggaagcaataaaaccccagtagcaatgagcatacctagcctcttagtttctgataccattctccaataaaaagaaataaggctccttagaaaaatggctgctctaggacaggagcagaaaatatacaagataagtctggagcatttttttttcatggagatagaacatgtacaaaatacaaaaccaaacaatatacacacacatacagagtggtgaggtttgctagaaaaatacatacaagagccacctaaaatagcctcattggccaatgctagacaatttgagcaaaacactaagtaaaatagttctgaatcataacacaaagtataaaaataatacccatgagcacattctgattaaagtaaagggttgaataagtaaacacatatgaagggaacatacaagtctccaatgccaaagaatttcaaataatttatgtagttgtacaccttcgaaggggggagcacaactcctcattccttaaacatgggctgaatataataattttatttaaagagtatagtagggaaagggagggaaaaaaaagagtaatgttacatcagtgaaacctacaaataccacctcaagcaggtgatcaaggtcaacatcaacagtgataagtcatactgaaatgtggacccttgaaatgatgtgatgagaatggcactttacctctatcattttcccccaatagtacattacctaatgtatcatcatcagaaaaccatcggacacatgccaattgaggacaaatctgatggtctcaaaattgctgaggtcatcaaaaacaaggaaagtctgagaaacgcctcaactgagaagagtctactaagacatgaggactaaacgtaatgtggaaaccttggggaattctggaacagaaaagggatatcagggaaaagctgaggaaatacaaatgaagtatactttagacagtaagaagctaccaatattgattcattaattgtgacacatatatcatacaatgtaagatgttaaaaataggggaatcttagtctggggtatgtgacaactctctagtatttcacaatatttttttaaatctcaaacttctctaaaataaaaaacttatttttaaaaatgccccagttttactcccaatagtcaagctgtatgctaaccaagagtcaggtatattagtccccaaataatgttcttgctcattgtacttgttaatgcaattataacgtttattcaaaagtgtataaactgattaaacctgcatgcatacaaacagaatggtttctttataaattaacctaatgctttggaaagactgactaaagatatgctgcataaaaacttgctgctgaattaaacatgatgatactttaaaagattatgaaaaatattctaaaaatccataaagaatcctcttcacattgcctcataggagtctttgacttcttgcacccttttaaacacatctaaagggaaattttcatagacaaagtttcatatctgttgtccgtactacaaagactacaagagctgaaacatggacccaaacagtcagttggtgccttggtactactccaaaaagactggatgttatatgctcaactgtctttttaaccaaggaactactgcatcctgatgcttctactacatttaaaaatattaattgtaagtagaaagaagttgtctgtatactacaatctcatgtgtgtcatcaaagtgcagctaagaatgttaacgggatgtttttccctccctaagggcttattgtgtggcatctgatggaatctttcaaaaggaaggcactaaacttatactaaacatctttggagatggttagtagaatatctgactactttcaatctttgctcatgagggagactccatttactgtccagttgccagagattccatgaatattggatatttctcctccataatctatttaaggcagagaccagagatttcctgagtgacttgtcattgtcacttcttgaaaggaatacactcctgaatgccaggaagcttttttttttttttttttttttttttttggtaaaccatgatgatgagggtctattgttggccaagcatgacaaggagctgggtcctatcattaatcatacgaagaaaaagaaacttccagagtattcctttcacctagtgagtctactataagggacttaatccatctgtgcctggtatcctttctatcaggtttctaagtgctggaagtgtgctaacggcccatccatatttttactctctctgccccctgccctttggtagatttttttaaaaaaacttttggtattaaaatttcaggagggaaagttttttagtttagtaatacaggagtgccattcagaatgatggaatttttattttgttttagggaaggaaagagtgagagatgttttggtgtgtgtgggtagacagtggtaagaatatatgtgttcccagggacattttggcttcctagactttgtgagcgctaaggtaacgttggcttctggattcgcctacttgaagcatttcaagccaagattagaaaatcagagccaaggacaagaatcatgcactatttattcttgagaaggaaagtctacttgtattggagtcaattccaaaaaatctcaatagaggttgcaaacagcaaatgaaggcaaaattttaatccaccttaatttaaaacacagatatgaggtcatgaaaacttttaggagtagaaaacaacattgcaaaggatgcaaaaacatgtagggtgtctaacacaaaaggcggggaattcccattattgctgacaacttagtggactatgtctttatcttatcaccatgaaggctatatctaaaccagggtgtccaatcttttggcttccccaggccacattggagaagaactgtcttgggccacacataaaatacaatgacactaatgagcgctgatgagtaaaatactgccaaaaatctcaagttttaagaaagttcacaaatttgtgtggggccacatcaaagctgtcctgggccacatgtggcctgtgggccatggattggacaagctcgatctaacactcaggaggaagattcctgcatttcccttgttctaggagtcagcaaggacatagaaacctctgagtacagccgacagttcacggagtctttccttggtatgtttggacataagtaaagacctctctggtggtgacatttgtcactgcttctgcttcacatgtgggaggccaactaggagatttttattacagcttacttttattttatttttttataaaaataaaagtagtggttctaacatgattggcaagaattatgaaattctgctgagtcaaataacttatcttccttgaaactctttttaagtcactcaaagatctcgaagttaaaggtattacatgtattgtctataagggagaaatgtactagtatatagtaatttaatagttaactttttgcattttctctcgtcattaagtttttcaaagatgattttctgaattcagggatttttttcagggcaggctcatgacatcctagactcagaaaagtgactccctcttagaatagaaaaacaatctaaaaaggcataataagtttaaaaggctataatttacaatctcatggctatgcattagaataatttaaccaaagttctggttcagtatctttgaaattttggtgatattccttggcaattggtttatacgtagtggaagaaaaagaagtgagcagagggtatggctcatgttggcaaaagttctgaaaggttagatgagctggattcaattctctgttagccacaactggcaatcacaaatagctttaagcttcagtttttgctctttaaaatacgaggatgtgaccagatgattcctgaggctgaccattctgggactgtatcttcagggtatgtgtattgcatgaattatgaaagaaggataaacagcgtaagtcagtataatcaaggttgtaattgttgcttaagacagactgatctgtcctcaaatcctagattacttttctttgtatacttaacttagaatatttaataaagttccgagaatgccttacttttctaccaggtattaatatttgactaataaactaagtatagaatggatatttcagaaacataagcattgccacaaaatacatgttagtgtacaatcttgtttttttttaagagaagattctgacagatgatgtattaaggggaagctatgtattatcaaaggaaatacagatatttgctcagcaatatatgatagaaactgtatacacatttttttattccttgaattttatcatctgaattgggttaattcaggctgatattgggtcctggtagacaaataaaatgtgttatgatttgatgtgggctagatgagctccccaaactccaaatactttgatggaatgcactattttacgcattccttaatttgaatcaacatatccctcttttaaaagctggggtaggggggaaaggacaactgtaaatatataaagtcagcccaaatccttcacacttggtttgaattactttaatctgattgttttcctcagaaagtttatgtgatcagtttcctgagcgaatgtggctttgaaggagagtcaaagaggacatagggaattgtcctgcggagctgaaaagatacagatgcccagctacatgtagctagcgggtagcataaagggtctgggtttcaaggagcaaaaaaggacaacatttcaaaggctagaataaaaaacttctgtttgagactttcattccacagctattcgtggagtgcctattacatgccaagcactctgctggtggaggaaatagttacaattttgcctagccagtttcatttttctcctagaaatgcaaataaaccgaacaatatactttcagacattctgagaatgttctgaattccaattagtaaagtccctcagtatattatattttgaacttttaggaagaggcacgttaataatttagctttgaagtgactaaagtgaaatgatgtagaattaaaagcatcacaaaggctgctaaaatatttatggaactgtattttgactaaaggattgcatttacagaatgacttatgtcctagttcctgagattcagtttacaaagggaaccaatgctagaaccaaatttcacaattgtgtttttcattacgaaagattttccatgtgtcttccttttaattaattataacagtgatgtatctaggtggtcattgcagcattacgtatgatttttaagtgattttcctataaacatgaaagtcttcatttgtttttacatatttaaaatagctatggaacagtgacatgcactttaccataataaacgctcagacaagaaaataaaagcataaatgttgctagttatagtagcaccagagggaatgtgggtcccgcacaaaattgtgcttcctcaattctgaattggcacacttgacttagaataaagtattcactttctcgatcttgtgaaatagagactcaacaagacttcttaataaccctccaccttgcctgctgtttgcacacatggttagtggaatcacagaactgcacataatccaataagctcacaccaccaaagatatatgtaatcagggatctgaaagaacatcctctaggttaatgcagtctcttttaacttgtacttcacaaaacaaacagtctcttcaggcagaaagaaatacaagtctgtcatccaaagcaaatatgcagtcgtgcagtgtactaacatgtgcaggccttcaaacactttctaatcccagcaacaacctctgtttcattgcagaagtagatgaatattggagaaagcctacatatttaaaaaaaaaaaagcctcaggaaaactttccaattgatttgcttactcttaatcatttgttctgattgctcagggtaatgaggatgacagaggttgctcaggttaccctgactggggagcacagtgacagaatcaaacactgatatgccaggtatggaaggttcctggcaaccacggtgcatacaatctctctctgagatttcagaattctgatctgtactcatcactagcagtgccatcagctttttatccctgatgtttatcccatcttgactccaattcttttcccttttttataggagggtggaaagaggcaatgactcaaagttaggtggatttggaaaaaaaaaaaaagagagagaatctaaaaactcctttgctctccctagtttcaaccaacatcaaaagaacagggagtaggacagatggccaactccaagcaatgttctttagtaatatgcttctatagcatacttttttaaaattccaaacaaaattttttgcaggccaaaaaactttagaattttaggtctatcatctttcttctcaatcatctttaaaactagtgaggttactcattgttctttttaaatctgctttgaaataattcctcaatctttaggtgaatgtgagataaacaatgccatttgaaaatagagaaataatcagtcaagctctattttacagtacaacacttgagcaacgtattgttggtgtaacacactcagcttcatttgtctttgataagattctatttttctggaccttgttggtaatgttccccaggcttttctgtagtttctagcttcttatggataaaaaggaaagaaacctttgtaaaggcattttttgagaatatattatttccagcagacagatcatcacgtaagaattgtgtttgagtaggccaggcacagtggttgaccctgtaatcccagcactttgggaggctgaggcgggcggatcacctgaagtcaggagttcagaccagcccagccaacatggtgaaaccccatctctactaaaaatacaaaaattagccagtgtggtggcgcaaacctgtagtcccagctaccctggaggctgaggtaggaaaatcgctgaacccgggaggcagaggttgcagtgagccgagatcatgccactgcactccagcctagggacaaagcaagacttcatctcaaaaaaaaaaaaaacaaaaaaactcaacaacaacaacaaaattgtgtttgaataagggcaacagaaggaaaatgcataaaatctcatttccattaagcctacattcatgtgcaaaggcctccaattagaatcctatagaactgatgatgctttgattttggtacagaaaccatattagactactggcatgatagctaagaatttctgtgtttctaggcaatctattttagatagttttaccatgatggctaaaacggaatgtcaattagtgcattaatttagaaattacactcaagtcttgcagaattttaagtaaaagtcagatgttctcccacagaataaaaattaattttctccaaagaagcattaccacatttcaagaaaacctccttattcctacttaaggcccaaaagaaatcacctaatttgtgacttggagattgtgaagtaaaacatatttttagttatagttattacgtcaaacaaatatacttcattataaatgaaaaaaatatgccaagagcactgagccatgtaatctagccatctaataaattctttactgtggcgactagtcctttggggaatgccacagtacgttccctgcaaaaaatcgagagactggctttaccaaacaaagcattccttaaaaacaaatctaaatgaaacaaaaccaaaccctggtttgtagttgaccaaattccaaaacaaacaaggctctactggatggatctatgacaaacctcgaatacatattttaatcatttgatccccaagaattaaaaaaaatattttttatagtgcccccacatgtaatatgtccttgtactggtacaacccatttttaatactttgctttttccttcttccttgtaaaaaatggcactgaataaaggattattatgttttattatctttactgttttttaaaatggtcatatctattttgaaacattcaaaaataaagacttcctagatcccaaggaaatccacttctgaagaaacctagagcagcttccgtagctactaatctagaatgaggattattcctgggacaagggacaactgtaagggagatacaagaagccttgagggtggagaaagtcagtagtgtgcaagttggtcctatctgcctggatgtcagtgctctgggatgaggggcagtagacaatggcattgcagagtgaagcaatgactaaaggggaaaaggatggctggtatttaacatccttgagcttgagttcctaaaatgtaagatgggacatcataaaacccatccttcagagctgtgagagttaaataatacatgcaaaatatctggcgtatattaagatctaacaaatggtgaatactattattatagccattagctggaaagagttttaatgaacttaaactttatttctacatctggagggaataatcatgagagaccagagtggcgggcagctgagatcctcttaggggatactggatagtttattaaagaataggaaatgcaggcattctctcttttctgctagaataagaccctgaaagctaaacatgctaaagcaaaatgtgagagatagactctgcatgggcctgagatgatgaagttgctcacagaaaaatggtgagctgagaaaggattacgtatacctaagattgtctttgaagcttataaataatgtttctgtgctgtccagctagttatttatggcttaacatcgcattacttgagaagaagcaattggatttattgggcttttgaaaggagggttttaactttttatcaatttggttgcatatatggaagttatccttgatagctacatgaagatgtgaataatgtaccagctagcctctaaagaaaacacatcaccaataatttacttatttaacaaataatgactgcaggcctcctatataggaggcattgtcctgtatctggggttggggaagaggactcccacaggggcctcccctgtgtgggaggaggtgggggtgagcgggattgagctataaagattcagaatgtggatccacaaactttaggatttcacgaccacaaagtatttccaaagtaatgaaaatgacaaagatttaccaacttttaacttcttaaatgaggacactgcaaatctgattactatttcattatcaccatttcataaaagcaatacatttcaacactcatgaaattaggagattatcttcgaataaagtattatcctctaaaacaataaagtttgctttaaaaaagaatttcgtggatttttctcatttttgtgaggagcacaagaactttgggattaactagcccccatccttgcatggcacatgtgaaccattaagactagagagtaaggccaggtgctgtggctcatgcttgtaatcccagcacttcgtgaggctgggtgggtggatcatctgaggtcaggagttcaaagccagcctgggcaacatagcaaaactcatctctactaaaaataccaagttagtggggtgtggtggcacgtgcctgtagtcccagcactcaggaggctgaggcacgagaatcgctggaacttgggaggcggaggttgcagtgagcgagatcacaccactgcactccagtttgggagacagagtgagattccatctcaaaaaaaaaaaaaaaaaaaggcttagaggctaagagcttaaagtctagtttaggaaaggtgacatgccaccaagccgcagtatcaggagtatactaagggtattgtcattatcatgaaatgtgattcacatcatctcaaactaccctgtaagatggatagggaaggcataatattcactttttctagaggaggaaaccagtcctcaaaaaggtgcagtaacttgctgcatgtaattagcctttgggtaactttactactgcagttgcctttgcagtaacttgcctcatgtcagtaacttccctatgtaagtaacttgttcatgtaattgtgcaattgtgactaaaactaagctctcccacttagtagccatttcaggaaactgcagtgcatgtctggtgaaccatgactgttagggaaaataacactttcattttccagttgttatgtcaccctaatggcattgcctgacactattaggaggcataagaatgtaacaagaagatcatcctaacatcctaacatatactccttgtttgaatcttgttttttcttgagtgtgctaggacattctatgcctggcttcacgatgactttatcttcattggacaggcagctactgtcacaccaaacaacaataggaaaatagataatttcattgatgtttgagaagcatttcttagtggtccaaatttggtcatatctttcttagctgttttgcaatttcatagtagctctggtttacttaagagaacttgacaaaatgagttccactgagttagcccctgctttgctctgcaattgtctaagcttttaagggtatcttgtccttgaagcagatggatttcattagaaattgacccactttctttaagaacacagccaatgtcactatattttgaaaaaatgttaaaaaggtaagttcaagttcaacacaaagaagaccttttaacatagacaaactggaatggtttgctgtgcaaagaagtcaactaccatcactgaaagtatcaagcacaggcttgacaaatacatgagggagatgttgtaggacatatgagtgcattgggaaagagttaactggatgatgtcactatcaactctaagattcttcgaactgtctcatgcaagttcactgacagataggatctagaattcattagagacatatccaccctaattggaaattcactctttaaggtacagaagaacaatgtctcgcttgcaaacactcatttctgaataaaggaaaccatagatttctctgacacacacacgtacacgacccacctgctttctacttttgttttttaattctattttctcagtgatatgtgtcctaatcactttctcagcagtgtcattagcatctatgatgtggagcaaggcacacagagctagactctgggtttacaatgacagagttaagttcccatctgaagtccccacattctgctcaacacatgactctccattactgagctcctatcaccagcaggctgtgagcctcagacaggaggtcttgccttaaactctctggcctcgttttcttaccagtaaatggcctaaaggactttgattgaacaaccttatagatcaaacattttaaatgatctattttattattccattatgtggcctactaaaaccttagaaaattatcattcaaatcaactgatttcactatttttagtgtggccaataatccaaattcttagtttgggagttttatgctacaacgaaacttcatgttacttctgttcttaaaatcattttctacttgacaaataattaccctttcaaaaatttctccaaagctttgattaatagtgtgacagcttgtagaataaaactatgattttaaaatctaattttaatcacttaccaaaaacatcacatagggaactttatctgggtaagtggacaaagtatggaatgtaggatttctatgaacattttcattcgtatgttttttttttataaaagcactgctaattatatagaaattgtaataatacaaacagtccacaaattgaaacctcaaagaagacatatgattgacttgaaaaataattgtatctttccacttaatctacattaatgtaaacaataaatcttctcttaaataaagatttgtgaatcttcatttatcttttatgacaagagtgcaaaggttgtggtttaatgaatggaagaagcaacaaggtcagttttaaaagcctcacaggtcaaatgtctgacactgaacattaaaaagaaaaaagccctaacatggtaatttctattttcgtcaaaccaccagggtccagctaggcttcaagcagaaagaaagaaaacaccataattttgtaacatagagacaagcaattgaatgacaatatccttttaggatgtattcaccagcattttaataggtttgaattaggtagtttttaaacaattttgaagctttaagctttgaaagctgacaacaatccctggcattgataagggatgaagcacagcatatacttttattttacatatgcattgatttttccgccaaatgaagacctctgtcatctaagaaggttattcatagatccaaagagctgatcagggtcattataacaatagtaaactgatcatcattccaatgggacctgacaagtttcttttcaaagtgatactaatgtattgatgcctgtgaagttcattacagcagtaataaatcattagtctctgaaaatgatttataagttggttgaaatgcattacaatagactgtcaaagagctttgcaggataagaaggctctttctggtgcttctacccaaattgtgctggcttggagtaattaaacacagcaccaaaacagcaaaaccactacaactatggttgtctcttgcttaaaatccaagtttaattcaggacagacttaatccttccttgaattactactgtccttataaaggctttaaaattctttttaactttggttattccataaagattcatcatgacccttgcttaaatttctttagctttaccaaataatgctcagaacttttatagtcacaatcacttccttaatattattgcatgcataataatatgcactgtaaatacatttccaagcatttaccattctgagctaacctggaatgaagtgattcaaagctgaacatgggttgaaaagtttattttcaaacatgtgtacaatgtctttaatattcctagaatgttttcaaaagagttacctgtatttgcaggtacttttgtcttccagaaaaggaggaggaataagctaaaaggttaaaacagtattaaccttttcagaagatagcactttctgaaaataaggatagttcaacattacaatagattaatgggtttatgtgatgtatatttatttaatttgggtgtgggcaatgaaaaaatttatattctctatattcttctactgcaaaatacgacaaaagcagtaatctcataattactggtaccttatttaaataaatcaccttaatgtatagttttctttgatttctttggtagttttctttcattacgtagtcagattggaacctattgctacttctggctgaaaaactgagaggtgtgctcacttcaaacagtctcttttctggatagctttaaactatgtataaaatattacctcttgctatggtcaccttactctggtcacattggcttcttctcaccaaatgagctcgttctgatggtcaaataatttactgggtatctaaagagttttgctatgttagtaaaaaaagaaagccaatatccgtgccaataccaaatattaccaaaaaccagttttcaattgagattcacttatcgcctttcttggctaatgtttctctgtcttgtggcttcatgacaaagaccacataagtccatggggacaagggccatcctgcactgaagtgctacagattagtctggtgtgtttgctgtgttgttttcagaggttaattgctatacctcaatccctgatgtttgtgctgcagtgaagacttaaatattggctccataataatctggctattatttcactaatgtacacataatatatcctgaacttcaattaaagggattttctagagtagggaattcacaacaacaggggttttattggatattaaaccatgcctccatccacagtatactcttaacattggatccctgaagataattcaatgttgaagtttcagtgttttcacacacttgtacatctgccccaatttatccctaatactgtcccaaagcacattctatcagttgattgctattacagagtctaaaaggggacagctctgagaggtttcaggagagaacagtctttttacctggccatgtttctgtctagatgtgtcaaatggactcaaatagccttcactgagaagaatgctggaagccccagcctaccaccccatacatgctaaattcttgacattcttactcatgaaagtatcacatattaaggaaagctcaatagacatgagcagcataaagcttaatttcaaactgcaactaactctaattattttacaaattgtttcccaaattttctgaaagtgttgacatcacagctgcatcagaagggaaacggatgccttccttgctgagacacaaccagggctacatgtgaccatgtgtatgtgtctgagtggactgcttcctaaatgaaaaataggaaatcaagatcaatggcaaagagattacagatctacctgtggtcagataaaaatgcacatattttgcagttaaaataattattttgatgctaaatgacaaaaaaatataatcttcaagcaaatgttaggagtgataattacacatgaaagtttaatttctttatactaagtttctatttgaattaccctattgtttgcaggtttataaggatactcttaagttttccaagtacacaataaaatcatctgtaagtaaggacagctttatttgttttcttcccaaccacaatttaccttttatgtttacttttattttatgttttatatttattttatgtttatttttattttattttattggctagtactttcaatgtgttaaaggagttgttataggggcatccttatctcattattttactatgagaattatcaggaaacattggtttcctctgtaaacataagactaaattttatgctcagataaatacttttcattacataagaaagtatcctttgaatactattttattaaattttaaaaatagaaaatgagtgtggattttgtcagatacactgatatatatttatcatgtaatttatgtgaaatcaacacatttttaatattgagctactgttgcatgtttggaataaatctttcttattcaggatggattctttaatttttgttttttcatattttatttaagtttttgtgttggtatttattagtgagcctttctttagttttatttttgtgtgtaattcctgtcaatttttagtatcaatattatactccttcatacaagaaaggttgcagttttactttttcccctgatgttttgaaaaagtttttggagttttaaatatttgctgaaattctcctctaaagccatttatacatgctgctgtttttttggggagagggacaactttcacaactttttcattttctttctatcttttctcagttcattattttctaaattatatttttatagaattttcaaacttatttacaaggaattgagcaagtagtctcttatgagtccattaattctctatataattgtgtttattttatatagtctgtctttgctcttcttcaaccaacctatttcattgtattttcaaagaactagattttaatttatttctcagttctactgtttttctgttttgcttgctattttctgctctttaaggtctttttctgcctttcttaagtttattttgttgctcttttacctcttaaactttttaatttggttttatacgttttatatacttgatcaatgttaagtatttaaggctaggaatattcttacgatacagcattagttgcacacttaggtgttgtttgacaatgggaatacattctgagaatttgttcttaggtgattttgtcactgtgtaaacaccatataatgtacttacacaaagctagtggtatagcctactaaaggcccaggctatatagtgtagcctattgctccttgtctacaacctgtacagcatgtgactgaactgaatattgtaggcaactgttacaccatgggatttgttatctaaacatagaaaaggtacagtaaaaatgtggtattataatcttatgggtccaccacatatatgcggtccactgttgactgaaatgtcattgtgcagttcatgactgtatttcatcattctgaaaggccacatttcattttcctatttttttaaagtctccaaccagatagaactataatagaataccccatttataatagcaaaatgaaatacacctagtaataagtaactataataaatttaacaacaaatgtgtaagatatataagaaaacttacttaaaacactactgaggtcacaaaagaagacttgaagaaatggaaatacgtgacatgcacttgaagaaaagaatcaatatcattaagatgtcaattttctataggttagcttagaaatacaaagaaataccttagaatactaccaggatatttttgtttttatttgtttcatagggttgggcaagttgtccaaagtaaaaatacaaaattcaacagaaatatgcagaaagagcaatgaaaaacaattaacctaatagatgccaaaatttactaaaacacttgaaaaaaatcacaacagcagaatattagataggaataaaaagactacagaatagaaaatctggaaataggatcaactgtacatttgattttctacataatagaaataaatcatcatccactggatccaaatcaatgaattaaggaggattactcaatgcatgtcattgatttaataagtgaatcaagtaaaaaaaaatcaaattgatccatacctcctccctaacagctggataattttaagagacagttcattcaagcaaaagaaatatgaatggctcttaaatatataaaaaataatacctagatctttttcatctatcagttgggcaaaatccaagtttgataaggctaagagaaacaggcattcccatatctagagaaaaaaatgtaaatttgtataacacatgcagagtacaatttggcatatctattaaaattacaatgcatatacattttttatccagaagttccactgctgcacttacactcatataagatattatacagggctcttcattgcagcattgtttacaatagcaaaaaaaaaaaaaaacaaacaaaaaccctgaaaacaaaatacccttaaacaggatactagttaattgaattatgaagaaacacacaatggaacactaggcaatgattaaaaaaacaataaagcagctctcatgagaaaagctccaggagagaaaagaaaggagcggagtagtgtgtcatcttttgtaaaagaaaaagcagggttaggggaggatggaataagaatctgtaagctctggagggagagagaagaaaccagtctgtggctacctcttgtggtggtgggggtgaaaatgggaagctggaaggtaagaatggatactttgcagttttgaacaatgtgaatgttttactaactcaaataattaaatttagaaaaaacagaaattttaaaatgacatttatactataaaatatatctgtcagtaatagatgacctcccgtaagtgtcttcaaataagattttacttcctaggagggagcttatctaatgaagccatgatttaagaagtgaatttctatgtctaaaagatttgtcacaacaaaatttcatgctgagatatcttgtaatcaccttaatattgctaagtttttatttcaaaatcaacagaagtgcattattagttgccaagagttgaaaattcaaactatgactaaagtgatctcttaaattataaaaacaaagtttccaatttaaaaaccttagaggctatatatgttatgacatatactcacactttcccagatggatatgtattattcataaaggttgggtgtaaaaatagaaaatatttttaaaaaattattttggtgggaaatcagaaaagtgaggtgtaatcatttgcactttcacaaaatattttatgtccataattctgatcatcatattttttgctcttattaaccaatatatttgacaatacatcaattgttcagtaaatgggaattatgtacaaaatatggttgtagtctacactgggagaaattcaaagaggaatccaatgtagttatcatattcacaggattaagacatgcatcaacaattaaaagcagaatgtggtagagtcgtgggagggatacacgtacaagagcacactggcaggagataaactatgtccacttgagagcatcttcaactgaactgaagggtcagtagaatgttagaaagcagaagtcgggaaagtagaaaattccaagtcaattaatttcagatgggcaggaaagcataagaagcgttcatacaatggcaaagtatttaattattggatatatgaggaacaagttgagaaataatgacaataaaggctgaataaggtgggaataggtgatattggacggtagggaggaaagggcaacagtgtcatataactccagggggtatgagagaaaggtcttaggcattggtaggtagaagcgtggatgcatagataacgttagaggagatacttggtgtagtgaagaaattattaaattagaggtgctagcagaaaaccctgacgggatggatgttcaccaagcatttgaagtcatggaacttgaggttgaaaatgagagtgtgtgggtgacatagatgtgtcagtcccctaaatagggtgatggaaactctggggctggtgagatcctggggatgcagaaccttgggtggtgttcacacttaagactggcagatgaggggggccagtgagatgtcatagagccagaatcacagccaagtccaacaggatcttagagacggtatgttcattacttaagcacactgatctctgaggtgctcccttcctctctctcctcctgcattttttctatatgagcaaattgatggtatctagggattcaaagaaggaaaagggaggccacctttgaagtatggggtgataaagagaggaaagatggagcaaatacgtgagacctagcaatctttaggaacagcgctgagttgtcttttaagaaaataaaagacctaaacactttttaggtagaaggaattcaacccaaagcaagagacaaaatatttaaaatacagagactactagaaggtcaagtacacatttagacatgctaatctaaataggaaaaagaaaaaaggaataaaagaaaataaagagcaggggaggagttttcttccacagaagccaaagggaaggatagtcaaaggaccaagatgtcatcctgtgttgctttatgtgttcagccctatgtgatgttaattttaagacaatcaaggcaagcagatttgtagaaactccaaactcatctgactagccaaagggtgaacagtggtggtatggggagggaggtaccaccctccccttgtaatcacgcacccgactgcctatgtaggtaaggggaacaggtgaaaacagagacccttcaggatgggaaaaggaaagttgaaagagtttctgttagataactctgatttcttcatgaaatgaaagttagctcccttgttgaactgagaagctgagcgcttagagagactggagtgcttgaatctgacatgattttaaatttaggaagcaactctgctttctcatgtgagattcatcctagatgcatgtagctgtttctgctttagcactctttgccgtggcagagcctgggctctgtgtttctacaaacagtgtctcactgagaagtatgatattctaatgtttttatttacacattttggtcgctactcgcatcacccggtttctactacctagtacattttctaaagcattcgtattcatgcatgctacagatgaaattagacaatgagactgatattgtgtgagagggaaaaaaaaacctgccattcctgggtagaaaccatttctgaagagcttaatcatcaagctcttcagcaattcaacaattgactgttgttataattgctccactttctacatatcacagaaacatgcttaagccattgttgtataacattttggttctcagcatttctttattttatggcatgccttaagcaaaaacaatgatggattccattccaggatgtacaaagttttaaaggaggcagatgtgggagagaaagaaagagagagagagagagaagccaaatcattcatgtagggacattttttctccacttaaaataaaactgcctttcctggtggctttagtcagttgagtttttccagtggtactgtaacagttaaactgagcaaacataaacctgaactgccctgattttagattaaatccatttggattatagttgtatgaaggatgttaccaatattgtatccaaaacagataaagaagaatgcatgtggctttgggctccctcaaaagtgtcagatggccacaagaacactgccgtacaggatttcaagtactgagttaactgagagatatgtaaaatcacacataccgggtaagttgagtcacatgcagcctgtgcatgtcagtttctaggttaaatgtatggactgtatgcttgcacgaggtggcctttggagatgtactctattgggaatcagcacctcactatttcagcttcatttctgcattaattctgtacgaccttgggcaagtcacttcatctacctgctccccaatttacttaactggagctccctattacttaaaagagttggagaagcaattgtgagattacatattaaaataacaaagatgcaggcaacaatattataaaatgctacagaaccgttaattaccaagtcttagaagtaactagaagcagatgaatttgttggtccaacaccatattttcaggtcaaataaaagtgtaagagcaaataaattgtctttatattactctactatatggtttattttgctccaattgccatttaactcagcaatctgtaactgctttgtgtctacataattttgtaaagttataattttgcatgggaatcatgatttgccgttcaaattgctccaattacatccataatctcccccccacaaaacacagacaaacatactcctgtaattctgggaaaaatggagttctcaacaactttattcatatcttcaggtggcaagaagataatatttcttcttttctccgaagacattgtttatctttatataataatcttctgaaattattacccagtgaaatattacctatttccagatgatattcaccactgcagtggtccctgagtaacatgaccacattatctagtgatagtgttttcaaagtcttgtcaaaactgaaaatataattttgaatctacagcacataagtcctcagtgcatgtttatgtaaatcatgtcattaatttgttaaagttcagtgcaattattatatttttggcagagttaatttagtagctctctaacaaaaccatcagcacctcttctcgcatgtggagttcctaatggctttagctgcctttggtgggtttctttccctcacaaataccaaacaaagtgtttcctaagacctaagttgactttacatagagaaagttacaaaagctttcaaaacttcaccctcaagatacaactgagcattggactggctttaaaactgtttaaggtgaaacgtgaaagctaaaaagaagattgaagtgtaaatgcagaagaggcgaattcaaagtatgtttgcttcttagtgagcaggtgaaaatgagagcttcctcagtagtagacaggaaggcattcacttccatctatgaactagatgtattattgttaggaagttaaaaataaggatcactttttaactgaatataaaaaccgtttccaagtaaaatggttgccctttagcttattggaaacttgattcccaagaatgcctctgttgtttttaactgtttcaaaatcacatccaattgcactcgtgtgctttgaaataatagtgcaagggccttaatcaatgtttttctgaaagttgaaaagttgccatgccatgcgacaatgggtcagattgggatcaggaaatctttgctgattgcacaccctgctacggcaatctgtgcaggtaccgcacaacattgtggtgtttagttctcaaaacagctcagcgggaaaggttctattatcctccacttgtagatgaattaataaaagatctttgaaattaattgccatctatggttagtaagaagttagttgaactttaaacatagatgttctggcttcatgtgtggggcttgccctctatttattatattgatgttaaaagaataggagaaagagctaaattaataatagttttgatataatgagtattcttaaaaggctcattgatattagcttgtttgctattcagttgtctttcctaatagtgcattattaacaattctggttattctggagttctgggccaggtgcagtggctcaagctgtaatcccagcactttgggaggccgacgcgggtggatcacttgaggtcagcagttcgaaccagcctagccaatatggtaaaaccccatctctactaaaaatataaaaaaattagccagcctggtggctggcgcctgtaatcccaaatactcgggaggctgaggcagaagaatcgctgaacccaggaggtggaggttgcagtgagccgagatcgcgccactgcactccagcctggggacaaagtgagactctgtctcaaaaaatgaataggctgggggcggtgactcacgcctgtatcccagcactttgggaggcggaggcagggggatcatgaggtcaggagtttgagaccagctggccaatatggggaaaccgtgtctctactaaaaatacaaaaattagctgggcatggtgcaggtacccgtaatcccagctactcaggaggctgaggcaggggaatcgcttcaaccgggagggggaggttgcactgagtggagattgcaccactgcactccagcctgggggatataggagactctgtctccaaaataaatagatagatagatagatagagttttgattgcttggagcttactaaattctagttgagtaaacttttttctatttttaaagtagagttagtctttggaaagtttaaaaaagatttagagggtctatctgtataaataaaaagattatatagtagtttttatgaatacaattatatataagcaaacgtataaatatatgagataaaacatttattacctactcatttttgtataactattgtattaaaaggaatacaaaaatcaaacataaacaagctgtacagaagaagaggaaaaactttggaggtctaagttctatagtatgctagtgattagtgaattcactggatatgaagccttgcagttaaagcatttggttctttgtgtgtttacttaaaccaaaatctgataggactgaattttgtctgaccttcagaattatgtggatctgctcctctgtgttggcgtcataggcttctgttctgaaattatcctatgctggaagatgccaaactccatttttctctgcataacacagcaaattgttttgtttgggactgctctggaaagccaccagagaggcagactgggttttaatttttgttttatttaattcccttgaggctcagttctctgtctacaaaaatggaggttatagttcctacctcgggaggggatgctgtggattaatactgtactgcatctacaaagcttccagcgcagagcccagcccagagcagatgactttaagtaattaaagagggatttgtttcacatctagattctttcaaaaagagacttgaagggtagttaataaatatcagacttttagttctctcctttttattccttttttcagtattagaagattcaagtgttcacataactttgattcaccaaattgcattgcttcctacgtttggcatgtcaaaaagtgggataaaatcttccagtcctgacacagacagacgaatcaggccatgccagcccacatggaggttcaagcggaaaaccctggctgcataaggacgcagacaatacgcaagaggggaaaacacacccacacccaacataaaagggggatggctctgcctctgagccctggaaataggtaatgaatgtgtcattccttgagctggccatcagaatataccatattacacaacattaaaaaaaatcctggcccggtgcagtggctcacgcctgtaatcccagcacttggatggctgaagagggcagatcatgaggtcaggagactgagaccctcctggacaatatgtgaagccctgtctctactaaaatacaaaaattggctgggcatggtggcatgtgcctatatcccagccactggggaggctgaagcaggggaatcgcttgaaccagggagtcggaggttcagtgagccgagatcatgctactgcactccagtctggtgacagagcgagaatccatctcaaaataaaataaaataaaataaaataaaataaaataaaaacaaaaaatccttttcacctaagggaggaaatgccatttcagtactttagtctatccaaggtgctgggtttagtcctataccctgcatgggccacacaataggcaagatacccattatttagttactcactcttctgctcatacacaaagaaatgctgagatttattactgtaacatattcctacgttagggataagcataagcattctgtcttaagtagtataaaggcatataagacatttctttagtcttttattgtcaggttgttacatttttcttcctagactatagctctgagtgtaattcttaaaatataaccctggagataataataaaaatattcctaattttatttgccttctagtatcaccattacggtttgaaataaaagggcatttacaccttgcattataaaatatcttcctagcaatggaagttctataagcaaattcacctatataaaaatgccctgcctttcccagatgatgatcacattttctccaattaccactcacaccctactctataaacatttttatttcattttaaaggaaattcaatgtacctgtcctacaacttttctatctggatggcagaatttaataatttgatgtagaattcctggatactacaaaataaattaacgtgtcagaaaatcagaaacctgtgagatagtgtttttaggacacgtccaggagggcataatccatgtatcacaagttcatgtcaccacaggcatgacaggaactcattgtaaagagaaatttatcactcaaaatcaaactgcacatcaactaaaactcagtaatgtgttctctgcttctttttgaccttctgttgttgctttttgaagatcctggcaactgtcagtgatggaatattcatgaggctatagtcattccaagctaaaatgttagattctgccactttttcatagatggctgtagaagtgggatttcatttaatggaagtcttttttttttaacacatcctacatacatgagtcagtaacaattgttgttgaccgtgaatgtaattttcatgaatgataaatcctgtttgccctcttaccttggatattttacattttttttttaattctactagtgacttggcaatccatcaaaagattggctagttctgattgtgtctatggaaaaaaattttttaattaaagtttttcatgttaaaagaaaacattaccttgaatttaatactgattacctataatcacaagataaactaataattgggttctaactatagcaatatcataacattttaagaataaatttgatacaaacataaaaatattttcggaacctttctccattaaaaatcctttatctggtaagcacatggtaaacacatacaggaatatctcataattctatgcaaatatcagaaagagttttcaatttggctccctcaatagcacataggattattatgagtataacagttttatgttcaagtgggattctgcagcattaaatcattgttaatcaaatcagtcaagctctctctggaatttcaatttacaccttcgcaaaaattaacagtgattaatgtttgatttattcatatgtttgattattcatatacagctttatcagcttttatctctcgttgtgctcaaaaactacatattttagtcccaataggttataataactttagtaacgtaactgctaatgcattaaagatcaaagcaaaatttgttctacaaaaatccggtttagggaagcaactcatactgtttctcagtttgaggaagttgtgatctggtacagagcatcatgccaaaaagcttcaggaactataagcagtgggcccaagagcagggttttggcacaggggatacaggaagcatttgggcccaaaccagtgaatgacagagtatttgtgtcacacttttgcttgagtccaagttgtccgttttcttcccaacccagtttcttctcagagaagagagttgcatgcttcctttgcaatggaaactgtaggggtgaatcccacgaggacatgactaagattcagaggaggtcaaccccttctgtgtcttgaccttgggaaatcagttgttctccaaggctccacgttgcaaattgactatttctattcttatgtattaagcatctattaacggaggtgcttgtacaaatgtaatcttgtagtttactctctgaggtaggcaatatcatccctttaaaggaaatcaaggctctgagaggtccagtaccttggctgaggtggcataatagggtgcagccctgccctggtctcattactccagatccaggatgctttccaataaattcgccttctttaatggtagctcctaggcctacttataggacagagtggttgtaaaaatctacacgatcatgtacatgaaagttctttgtaagtggtaaagagctgtaaggtacaggctaaataatcatttctcagctatactttcccgctttctactaactggctagcaattgtataaattcttattctttagcagggaaaattagcccttgcagacaactattttaggaaaagtgctataatcaatacagatagacactctcatttttcaatttttggccaaaatctgtgctttagcaccagtctttttaaaagatataaattctctctcttttgataagtgctttgagacttgccaagcaaaactatattggagtctctcacacagttgtgatagagtgctcacatgagaactctccaccttgaaatgagaaagctgggtcaactatggaattaacaaagacagaaatacagtagattattcctggtccaaaatattggtgaccagaagtgtttcagatttctgacattttttttgaattttggaatatttgcattatacttaccaggttcggcaaccctagtcagaaaactggaatccaaaatgctctgaaatctgaaactttttgagtgctgaaacaacgctcaaagaaatgctcctggaacattttggattccggattttcagattagggatattcaacctgaacactattctaactgtagttaaaggaataatatgagaaaagctaaatatccatactgaagtaggatctgaggctatcagctggaaaattcacactccagggaaaacacatgagtgaatgtattagctgaaattacaaaactgtttgcctattttgatctgtttcaacaaatatattttcatgctttttttttttagttggactctaagatagtgccaagattatcatttcaggagatgtccttttgttgctatctagatgggtaattattctgtatgaagttcttctatttgcagtgtcaataacattcccatttgacccttcctctttgaactaacttgtcctggcccaggcttgaccaaatatttacttatgaacaaagaagtatctcccattcacccagtggaataaacagtgcccaacataactatttttttcaaccacagcatatgttattttgaaaatgaatcattcaaatcaaaatattatacaaaatggctttttaaaatgtatgcctggcatttatataatacacctctatacacacaagtagatgaatacatataataccttattttgtacagcaaggtaaaacatacatatgaaacattctagacatctatataataatatcgaagtgtagaagatgagtgccaaaaaaaatcataactgaatacatcaactagcattttaatcatttctactttaagcgtttttaactaatttttcaaggtttggttgtttagtttctatgaacctacacagaagattgatttactttaaattgaaaaaatgctcatacaatatgacaatttcaaaaatgtactttagtagctggtgacaccatctattcatgtcatgtgagtgtatttcttagggcaagggaccgcaaggcaagactatataggccataatttaatcactgcaaataaagaaagtctaggaatacagtgaaatatatgtatttctccaaatgggcagcatactaagatgaagatgtttagaaaataaaattaagataaaataaagatcatgtatagttggtagaggttttttttgtaaacatgagatcttcgttgaaatgaatttttacaaatagagtaagatttttaaaatccattctttcttgcatttcattgtcaacagaatgcttctacagttcatataactaaaaagaatccacattttaaccctataccttggacagcatcagtcaaattttgaattctatctaaggccattttaattagaaaccagtaacagagtagcttatcaaatattttatttcttccttca

SEQ ID NO: 2923 - DNA, 26727 bp, Homo sapiens
acctgtagtcccagctgctcaggaggctgaggctggacgatcacttaagcccaggagttgaggctgcagtgagcatgcatgaccatgccactgccctcaagcctgggtgacagagcgaaccctgtctcataacaaaatcataataaaataaataaataaaaagaatcctaaccaaagggagtgaagatgctaatgcctatgccaagaaagcccagcatctaggccaggcacggctgtcacgcctgtaatcccagctctttgggaggccaaggcaggtggatcacctgaggtcagtgtttgagaccagcctgaccaacatggagaaaccccatctctactaaaaagagctggatgggtggcacatgcctgtaatcccagctactcgggaggctgaggcaggagaatcgcttgaaccaggaggcggaggttgtggtaagccgagattgtgccattgcactccagcctgggcaacagagtgaaactacatctcaaaaaaaaaaaaaaaagccctcatctaagtagtgatcgccacctcccattcaatagtgttagggcagaaaaacgggctggggaccactactcagaggacctccttcttgctcccttccttccctccccgccaggagcctgtgtggcctacttccttactagaggcgtgagtaccgcaactccctgaacccctttaaaggcctgaaggaaaaagaggagagaaacttcgaagtcgccgatatcgggtaggtttctaggcctttctttcaagatactaactctaaaccctttcctaagtgggaagggccagaggacatggcatatgagaatagggttggagccaggaatgtaggaagatagagaagaacagtgagccaatgctaagatctgacttgggactgggttcacttaggcacagattttacacagccttccccaccaaaccttttccccaatctaatccatagaatgtttaccttcctaatctatctcctgggttcctgccttagcttttgccaaccgatccagtatcatgaggcattttggacctgaggaccaacgtctgtggaatgagtgacagaggaactgatgtcagatgaagaggacagtcttaacgagccaggtgtgtgggtgcccgccctccccgtttccgggcccagcgcctcacagagctctgctaccacctggatgcaactctaagcatggcaccaaagccaaccgtgtgtatgggcctccctcagacagactgcctctgctgaagcccagctccttccaccagaactttacaatcctaatttccaagaagaggagatgagggaggggatgagaatgcacctggctccccatcttttgaccaaccccacaaaactgctgtcctgacttgaactcattcattgaaatcaaggtggaaaaggatgaataaaatctcagccaagaataactctggcttccgccatgccccatgtctcagaaataggtggccatgggcttcacaaaataatgagatgctctgtgcagtctgagaaagcaaatttgcctcttttctaacacagtctctactggggaagcagaacactggtgggataaaaacttatctagaagggggaaactccctccactgtgaacagtaagccagaatatgcttattcctcagcataaacagttctcggagaagcctgggatgagaaaatgaggaggatgggtccaagaaacatgaggccttttgacatatgccctgtctctgagttgtttctgcccctgcccagttccacccaaagctctaggaagcagcccaggttgtaccttttgcttccctgtgactacttgtcttgctctgcagtgaaaccgaacatgaccagtgcaggttaataccgccacctggtgggcagtttcagtcatggcttgagtcttctgaccaagggaacacaagttctatcactattggggaattgggttcctatataatagctattgtttattgaattacatgaggaaaattttactattcctatcttacaatgaggaaattaaggcttaaagagttcccgtgtctcaccggcagcctctctctcactattgaccaagcaaaatacacagctttgtagctgtttcttggtcctgtcagccaagctgtatttgaggaaggggtgtgcattttggatggattgaaaagcaaaaatggctttacatttattagtcttataacaaacattgatcgctttactaggtgtcaggtactgtgctatggatacatgttgataaggttggatgctgttcagagatttttttagtttagtcaggaagccaggcagtgagtaggcaatgaaatgaactgtgataagggtgaccatggtggagtgtagtgcactatgcaatatacagcaggggtagctaacctactcttgcagtctggaaaggcttcttctgagaggtgtaatgtctaaactggggaagagttaaccagaaggaaaggggaggctaagagagtgtccaaacagggaactgcaggtacaaaagtccaggggcaagagagagtacagacaaggtccgttctactgcagacttttggggaagggataatgctagaggagaggctggagagtgagacgacctcataatacagagtacagacttcaacccaagggcagtgagaaatcattgaaagttgttttagcagggaaataaaacgacaggttttgcctacaggcagtccccaactcaacgatgttcgacttaggatttttcaactttacgatggtgcgaaatgattcagtatgctcctcacttatgatgcagttatatcagataaacccattttaagctgaaaatatggtgaagttgaagagcacttctgccttacgatattttcaatttataatggatgggtttattcagacataactcattgtaagtcgtaaagcttctgtactgaaaaaaatcacttgacctcagggtataagatgattgcagggagcaagccttggccaggagacttttgcattggtttcggagaggaaagacgtgacttgacatatatagtggtgatgaggggaggacagatttggaagatgtttaggaagagaattaatagaacttggtgattgataggacttggttggatttgaggttaagggagaagaggacatagggttgacgctcagatttctagtttaagcagctaacaggattgtgccatttctcagagaatgttagaggagccagtttcatgaggcagagaagatgagatcagtttaggaattgggtgcttctgagacagccattggagatgctagtagttagttgagtttttaattccagaaagactgggctggaaatatggattagggagtcacctgcatatacagattataattaagtcttgggaacgaagagggcctttggagatcccagctccagtttagactgtggagaggcacctgaggtcatgagcactattggagcatgccctattagcatatgcgtcttctacttctccccttcactcatctctgcttccagttatcccttgaaaacacaggctgttcatcccagtgtgcccattgctaccaccaactcttgcatgggcctcctttaatggcctcccaacatttataagatttcctctcgcatcctcaccccaaaggatcaaagcttccaaatattagtagtttgtggatattttggatgtaattggaaggaagaatcaaagttctccttcctcatctggaccaggaaaggagggaacacattatggttaattctgaagatgttgctcacagcaggttctaatgcaatccgatagctcccctctgttcctagtgctttcagtcctccctgcttccactctgtaggaaactctcctcaggatcagagaaaagccgtggccttgaccagggaaacagaggcgattctcaggggagatgaggtcagggagacaatgcaactaggacgaagaagccaaatagttggcacaaattaatttcccaaaagatattaacctcgtttctttccacattccctaaggtacactaagattataaaaggtgttcaaaatgttgagatgaaaataatatgcatgacttgttgcatataattttcatactcatttactatctaaatacaaaggagtcattttccttctcattctacttcctccaccccttgcccctgatgttttagtctgggcaaaagtagttggctgtttttaaaaaatttttttgagacggaatctccctctatcgcccaggcctgagtgcaatgcacaatctcggctctctgcaacctccgcctcctgggttcacgcgattcttctgcctcagctcccaagtagctgggactacaggtgcacgccaccacaccggctaatttttgtattcttgtagagacggggtttcaccatactggccaggctggttgcaaactcctgacctcgtgatccgccgcctctgccttccaaagtgctgggattacaggcgtgagccaccgctcccggccgtggctggtatttaattaggtatgtttagcttcatctagggtttctttaaaaaaaattatttttatttttgagaatttttttgagacggagtcttgctctgtcgcccaggctggagtgcatggccgtgatattggctcactgcaacctctgtctcccgggttcaagcgattctcccgcccagcctctcgagtggctgggactataggcgtgcgccaccacgcctggctaatttttgtattttagtagagatagggcttcaccatgttggccaggctggtctgaactcttgacttcaatgatccgcccgcctcagcctcccaaagtggtgggattacaggcgtgagccaccgcgcccgctgcttcagccagggtttcttttccttattcttgatccttttaaaatagtcaatatcacctcttttccatcctgatcattttcatttgcaatttcctctacacggcatttcttttctcctcttaatacttactctgtatcaccagtcttctgtggaccaaaaccaaagggagaagggttcgctagccctaaaaccaggccttcgatctccacagtcacctgaaatgagaaaaatccatttcccaacaccagggggtgtctatccctctaactgtcctacccttaaggtagagatagtcccaaaccttttcctcactccttttcactgcttctacatacacactatatctctttcctccctctcaaagtagagattagtcccattttcctgactccttttcactgcttttacaatcacaaaacttttgggtccagaaggtggtgcctttttattgcagtttatctgtttgtcctcattctctctggacaagcttgtcctttcctttgtctgcgcacccttcggtctctgcacgtccacactcctctttgctcctcagctctccctttctttcgctacctcttccctcttcacctctctctgtgggcttcgtcgcctttcagggctatctttacgtacacgtctctgaactctttatgcatttgtcttctttctctctgtcttcctctttatggctctctccttgtctcccatttctgtaccagtctctctccatctctcccacagtccccacgctgggaacaaagtccggtgctagcgcagaacatgcctcctgtcgtccggtcccgggacgcgacacattccacctgcccctccgcgcattccaactgcagacaaagagtccccgtcccctacccccacactcttcctattccaattcttcagtgttgtaggggcagctgccccaactgcccctgcccgcctccacgtccagtccgcgggtctccacatccagggcagttagcgccttccgctgcacgcacacagctatccctgcgcggacacccccggcgctctcgcacacaccgcgctccgcccccctagaaagtagatccggccaggcagacaaaagtttgggagagaagttcggtctgtggctagctgagagctaggggggcgggggccggggagagtggggcagtcgggcgagtcgacgcgtgacagatagacctgcggactggacagccgcggccagagaccctgctagccccgctcagcccagatgcgcggggggacgcagcccctcccgctgggggatgctgtgggattcctggcgcaggcatccaggccgcccgctaagcccctgtgcctcccctgtgcccctggggaaccagagtcggctgcagggaaagagaaccggccgccgagacgccgcagggtgccaggcggggaggggggagaggccccaggcccgagggcatggagcggttaggagagaaagccagtcgcctgctgggaagttcggccgcagaaagggtgaatctagccggtctgggtctgacgggacccccgggcgggcaaggggcgcctaagtgggttggggggacctaggaagtcagggccccgaggagctatgggggacctggggatgagccgttggagccggcccgggagcaaggttccctggacgctggcgaaatcagcgcggctcctttgaggcgccgcgctacgaaggctcttttcccgcggggcgccgcccacccgggccttgcctctacctcagtcgttgccccccgattttcggctggagccacggccccggccctcagcccccgctctagcttcgccagtagctcggccagcgacgcgacaagccgtccagcccccggggcagcctgctgctggacggggcgggggctggcggagctgaggtagccggccctgcagcaatcgcaccagcggcatcagcatgggctacgaccagcgcccgggagccccttgccagcggggccgtgcctgtttggcccacccctggccggagcaccggaggctattctcccggaggggtcccgtccgcctacccggagctccacgccgccctggaccattgtacgctcagcggcccgcggggttcggctgccaggaaagccgccactcgtatccccggccctgggcagccctggagctctagccggggccggagtgggagcggcggggcccttgggagacggggggcgcaacccggacgacactctgtgaccggctacggggactgcgccgtggcgcccggtaccaggacgagctaacagctttgcttcgcctgacggtgggcaccggtgggcagaagccggagcccgcggagaaccctcggggattgagccgtcgggtctggaggagccacaggtcctttcgttccggaggccgcccgggcccggatgcgggagccagaggccagggaggctacttcggtgagtgagagaagtggttagggacgggaagggacccgtcacggtattcggtctccactgccccgacggcccaaagtgccggtgccccggggtccgaggtgaagacgcggactaggaaagaagcaagagggatggatgggggcggccccagagcactgtccccttcctgtagttttcagatgaaccagggctccttatttctgctaaattcaacccccctggtatctctgagtccgtttctcaagcatttgaacctcggttttttgcggcaggaggcctcgtagggagggaccaagtggggcagtgaaggcgcatcccccccaacttgctcccccctttcacggcgtgcccctggaggtttgtgcgcgccgcgcccccacccgggcccaggctccgcccgcaggattcggagaatgcgcgggtgggggggcggggcaggctggccgcgtgcgtgccgactcctgccgggcgctccaggtgcccgcgggcggggcggctgccgccgcgcggcggaggggtggggtcggggatcgggggacgctccctagcatacgcggagtagtggcggctgtcggggaaatgagcctgggagacaggatggagcgccctgggacccaactgctgtccctccccagtcctgtggctaggtgcgtgcgtgggcatttaatcagagacccagtagtaccagcttctattttcccatcctccggaagtcagggtaaaagtcatgactactgggacaccattacctctggatggtaacgaccctgtgttattgccagaaataacttggccttgaattctgcttataacctctcgaattcaggccagaagtagcgccttacttcctgacactgttaaggaaacctggtcgctgctccctcccctactctgttcaggaagtattgattgattatatgtctcagctatgaggaaattagggtcttgaaagatcttttagtcaaaattcacaggcactgctacacacataaaaacttcgaatctgattgtgattggaaagaagtggcaggcttaccgcctaagggctgtgggctctttcacttttctaagcatctcttcttaccactcatgccccactcctggaccccatgcgtagaactctatggctagaaaagtgaataggaagaggaacgcggccagggagggatggtgggtaggaggttcagaggtagcagggcggcaggctataagggcataactcaacccccagctccacccccattcttttccccacctccaaatccaccgagaggaaagcccagaggagatatgccaaaccgctttgatcaaggaagactgaatgacagggcccatttagcagtttcatttgaggcccaggagaggtggctagtaaagaagtctttttggctgaaccatcagagccaaaggaagaaaggaactcagagaaactgcaataaaatggcaggaagaacataggtatagatagctgggttagaggaggtgaggccaacgtgcctgagcagtttcgtttgcttttcccataagtccaaggtttcctaaagaatggctccgacaggaccccctggcatggcaatcttggggcgatcttcacttccatgaggaagccacattttgaattcagagatgggggccccttctcctgggagtcaggttgcctcctttgacagaacccctacataccccttgtgccgctagccccacttgactgtaccctcctcctgcccctagtaggggccctcttccttggcttcagccttgccagctgccagagggtgggagcaggacaggcctgggcccatcagttgctgcagctgctgccaggctcccaagcccctgggcaaagactgggatgggccccaacaggcagggagtgtggcgcgtgccgagggggagaggtggggcaggcccgttgggatctgctccccaaagacaggcctagccctcactcatgggcctggaattggggagtggagggagggaagaacacacccaggaaggcaagtcccagagccaggtgtatatatcttagtgggggattttggggaatagcaagcgttcagttctgtattcttcccatgatagaaggtgactaggaggcatcaggggctctgctctctccctgctttcctgttcaaccctggttcctggaacacaccctgcattctcagcagcacctccccacaggaatcatgctcacatggtcccctctgcacggagccctctgccaagccgatccttttctccatccttggaagtctgcagtggagagaaatcattctataactgaacactcgtttgactgatgggaaactgaagtcccagagacgatttctgggcctagcctgcttttctagaaagtattttcaagtctgctgctgagcacctgtggactggcatctttgaccgttatcctacacactgcaacagagatcataccttgcctgtgtagtcttttctccccaacagaactaagcatctgaatgccagggaccatatcttcgactttctccaggtttccttaggtagggtgctgtgttaagcacaaaacagatgctcagaaaatatctgttgagtaattaaataaaaagaatggatctgctcagccaagatcttgctgcatctcattactcgttatcttctctaccagaagggagcccatcaaagggagactgtgacccctggcacatcaggaaagggcagtcagaaagcttgggaatccctggttttgacctgggggagtagagtgtgacacttttctcttccaggcacctgtatcaagtgcaacaaaggcatctatgggcagagcaatgcctgccaggcctggacagcctctaccacacccagtgctttgtttgctgctcttgtggtgagtgtagccccatactcaagcactcccctcccctgcccacatacacacttacaagtgctatggggaacagaggagagcttgtgcctcttcatttgctcacagagcagctgttggatccccaccaagtgttggaggtccgcagctgctctgcctctcttgcttccctgtctgtcctctacttggctctcctccgcctggtgggtcccctttctggagtccctccttccttcctcacctctgtttctcctctcgtgcttccctgcttgcccatcctggacttgcctggccctccagcttcttggtgggcttggtcttgggcagccaagttgcctggggcgacagtgaaagactggaatgtggggaggtgggggcaggctgggggagtggggagctgtttggggcggagaggggggttttctcttggtggtcagagttcagccacctcactggagtgcaggccaccgggccatgccaagctgatgaatcacgctccaggaatgcctgccactgttagctcaggaggcccacttggaaaggggggagctcccagcggccttaactgcccccctcccctccctcattaccccctccttactgcttaccattctgattcctttgctaaacctttaatctcctatctctgcctgtctgacttcagcatcagcttttctcactcccccagtttctgcctggttctctttaggctcatctgtctgtcttccttctgtttacagggcctcttctggctatatctctttccctatctttcctcccctgttctcatgagcttctaagtcagctttcctaacccactggacagagttggaagtagggatttgaggggaagaaggcaaaggtgggaaaattgctcatgctccacctgttctcactccttcctatccctgataatgtagacacctgggagcagttcctgggggttggtcacatggggaatgtcctgccttgtctgctggaagaagatcctgggttgtctcttaccccagtgactctgggccctctaagcttagggaagcagccttatacaaacaggagaggggacctgctttgcttccaacaaagcactttgtccttctgcagtaactccagtcctgacctccatggagtctgtcccggaaggagacaggcatttgagagcaggatagatatgctcaggcaaagaggcttctaggtgaagggtcccagagggaaaggcctgttaacaatgtggttctctctatgcaaatcatatacaccttattaagagctcacgtattccagcacgtagttggctttactctcccaggtggctcctatgcactggagaggaaggcagtttgtttaggggaggggccctagaaaactgttaagaggcaggagctggaggagcagcaagcagaggagaggggaagttggctggaatgaagccaagcaaattggaattgcatcagatggaatttttgtgcggggaaggacagacagcagttagaggaaaagcacaaagtccaggtttaaatatattatgcagcagcggggagcagtgaccccgaagtcttgcacctgggctgtgggataggttccagccccttctctattgtttctagggcaactttgcgttgcaaggctttctacagtgtcaatggctctgtgtactgtgaggaagatttctggtgagtaagggtcacctggacctggaattggtttccatactgacccccttcttggggcccattggagtaccacccatcattctcagtttgataacagcctccgttcgtcttgtctttactttagttttcagggtttcaggaggcagctgagaaatgctgtgtctgtggtcactgattttggagaaggtaagtaaagtgctttcagctgagaagtctcactgtgaggctgagggcgggatcagggactaaatggatattgagagaaggttggggaaagaagcctgtcaccagtgaatcactttcatcccattcctccccagagcaactgtttacagtggcttccctctgccatgggatcaagtctgggctcaaaagcctgtcaacccaggcttctatgacctagcccctcctaactctgcaggcacagccaggccttccagcctgagctaggagtgtggggtcctgagtttttttttttttttttttttgagacagagtctcgctctgacaaagtggaatgatctcggtcactgcaacctccgcctcccaggttcaagtgattctagtgcctcagcctcccaagtagtaggactacaggcatgcgccaccatgcctggctaatttttgtatgtttagtagataaaagttttgccatgttggccaggctggtctcgaattcctggcctcaagtgatcctcctgcctagcctcccaaagtgctagattataggcgtgagccaccatgcccagcctggggtcctgagcgtcttcttttttttttttttgagatggagtctcactctgttgcccaggctggagtccatggtgcgatctcggcttactgcaagctccgcctcctggttcacgccattctcctgcctactgggactacaggcgcccgccacatgcccggctaattttttggtgtgtttttagtagagcggggtttcactgtgttagccagtatggtctcgatctcctgaccttgtgatccgcccactcggcctcccaaagtgctgggattacaggcgtaagccgccgcgcccggccagtcctgagcttaatcccctttctgctactggttagaatcacttgggactcagttttcttttctgtaaaacaaaagataggattaaatcagtgattctcaatcatggtagcctagcagatcagctggaagaactaaaaaacaaaacaaaacaaaaaacagtgtttggatcccatcaccacagattggataataggcctggaggagggccaaagcattgatgttttttaaaagctgcctaggtgatctgatatgcagccagagtgaaacactgctggcctgaatgctctctcaggcacttttcaggtctccgcctccattttacgacttcttcaccgacattacatagcattgttctgggagtaagcagcgggttggatgaggttaatgggagtaataaggagcataatgggcagctggagagtgggactggagggagactgattctcttgctaccccatgagccagatcctacaagcaatgggaagtcctatcatccaggctgtttccgatgcattgtttgcaacaagtgcctggatggctccccttcacagtggacttctccaaccaagtatactgtgtcaccgactaccacaagtgatctgccccttgggatgcagtgtggaactgggtccagggattccccagcctcagctcatccttccctctctctttcagaaattatgctcctaagtgtgcagcctgtggccaacccatcccccctctgaggtcagtatgtctgggttctccttcagggcagccagtgccactgcctttgggaggggatagggacatgctgcctggcctcctgccggaagtggtagtgccaaggaatgtctctgtgaagattcccgtgtgactctgcctcttggggtcaccaccctgaccctaacatcgggcctggacatgtctgaaagcctaactgggcccaggctccatctcttctatcccagtcagaggaggagactttctttgaggtcgaggtcaccagactgcagatgtaggggctggaaaaggtgggaagaatcctcagcactggtaggaaggggtcagaaatgatttaagctgagtgtggggatgtgcctatggagagaaaccaaaagccagtgaggaccagatcttattggatcccttgttcccagcctagcctactttatttaggcctcctgtccccttcccttccctttgcttctgcacaactgagagacgcaggtaaggccagggctgttgtacagagggagtgtgctccagggtgcagcccagtgaaggagatgagagttctggtaggatttgcagaagcatcttaaaatacaggtgattgcagagagactctgggggcatttgtatgatcttcccatggggtgggaaggttgtatatgagggaaaggtggaggtgaggcaacatgctgctctcatctccatgggggctgcatgtttcagggctgtgaggacatcgtgagggtgatatccatggaccgggattatcctttgagtgctaccactgtgaggtgagtgttggggttcagcggtgctggagaagaagtgaaatggggagaggggaggagtcaagtcctgcaacaaccagacatctatgggagaggtgtgggcatgggaaaccagaaagatattgtgacctatcttcagtctcttttttgtcctccagcactctctctggtccaagtagcttagtcctttctgaatctgactctcccagagtcaggatttctaagactagggactctggtcaaacttcttgaaagacaggcttgtgtcattatttcgctgcagcagtgacacctggtgtccagctgaggtattagtattttctcagattgctcttcatcccttccatccttcccttcccaccccatccctttcttccagttattaggagtcagggttgagcagggcagactcctaagataccctcagtgtccaaggtgcctaggctgaggtgactaggtgccttcttccctaggactgccggatgcagctgagtgatgaggaaggctgctgcgtttccctctggatgggcacttgctctgccatggttgccacatgcagcggctcaatgccgacaaccccctgccaactatatctgagctgcaatcactgctgctgctgtcaccctgcagcaaactgctgtggccagtgggcccctctgaggccagccaaggcaaagaatgcactctgcggcctggcagaagagtcctctggggaggaccccaagggccggagacccaaagatcatgaattccaaatggattgtggaagagaaaccttatatttaccagggtgggggcgactggccttttcccatgtgtgcagtctgagcttaggcacacacaggagggttccaggactttctgaaatctgattctgtatcttcagtatatatattttgtttgttttagagatgggatctcaccagttgcccaggctagtcttgaactcctgggctcgaatgatcctcccaccttggcctcccaagtgctgggattataggcgtaagccactgtgtctggcctagtgtatgattatgcatgagcacgcaatgttctggtcctggattccaggagtagaggacctagctttaaatcaattagttcagctaaactgactagaaccaaatcaaagtgtaattctccctccagctcccccaaacccagagttttggggttgtggttgatgcagtgtgggatgtccctgagaggtagcaagtctaggtggtgagttcctgctaggcaaccaaatttaagctcctcactttttgtgacacatggttcagatatggggtcccgcacctatatctggatgaagaggtagaaactctggacctcattatgagttatttcttggccttcttctaaggactaggagagctccttatctgtctgagaatgggaccagctctgagtggggttgctgcctgtattccctgtttctcaggaacttacatggtctggggaggctaggtaggtgattgtacgtggttgctcttctccttggctgggggaggtatgagcagatctctgtgggtgtggagcttgttggggggatgtctaggaagcttcagcttgccacattcccaagtttaggtgcactgagccatatagcccagtgtatgcatgtgtgggttgttcatgcacacacacactctctctcttgtctctctgtctctctctcactctttcttatctcttctcaggtcacttgtacacttggtttcctagtagaagctcacttgccacctctcgaggggtcccggattgcatccatcacaatcccaaaactagagttggggggaactggaggagcaaaacactgatttgatactagtcagtttgcttgaaactagttcacctaaagctagactcttaaaaccaatttactgaaaacttgtttgcttaaagttaatgacttaatgactaattgccaaaagctcaattcctattttggtgtgtttatatccatttaggtgtcctattctttttgtcatgctttggatatttcaaggatttatatctattcatccaagagtacttctgagcattatcagcaacataaatttatcaaatttgcagcactttgtaaatgatgagattgcttctacctttatggatgtctttttctatgttatctaccattcaaaaacttttttaaaaagttaaagtttctagcaataaatacaattggtacagacattttgtgtatcatttttttgtttctaatccaatattcctttacaaattaaatgccttgaaaaatataatggagttcaatgtgatttgatgctttggtctaacttctacattcctactgttaaaaaggccagtatatcttaaaaaatgaataggcatgaggcatattcagttgacttacaatgaaaagttatacagacaacataataactaaaagggtgaatctgctaaatccttttgaaatgctgcagatttgataaatattattttagactaattggttttaggtgaattggttttaggcaaattaatttagtaatcttgatctttagtcttcattttctgtcactcagtgagtttcttactggaaatgatgactccgacaacagaatttccacatttgggggctattctaaggtgactatgccagccaacctgggaatacataaaagagatctctgagtgagagggaaagaggtcagatttatacaactgagcgcagaggggaaaatgcaccttgttggagtgagaaatgttctgaaactgaattacttcttgacagctgagatagcttcttctgaactattattaaataagtgaatacaaaggccctatgagggaaatccagacaagcttgtgtaactttacatccatcccctcagggatattttttttttttttttttttttgagacagagtctcactctgtcgcccaggctggagtgcagtggcgcttctcggctcactgcaagctccgcctcccggattcacaccattctcctgcctcagcctccaagtagctgggactacaggcgcccgccaccacacccggctaatttttgtatttttagtaagacggggtttcactgtgttagccaggctggtctcgatctcctgaccttgtgatctgccgtctcggcctcccaaagtgctgggattacaggcatgagccactgtgcccggctctcaggtttttttttttgacagaatctcgctctcttgcccaggctgaagtgcaatggtgcaatctagctcactgcaacctccgtctcctgggttcaagtgattctcctgcctcagcctcctgagagctgggattataggccggcgccaccacacctggctaatttttgtatttttagtagagaagggttttgccatgttggccagggtgatctcaaactcctgacctcaggtaatccgcctgcttggcctcccaaagtgctgggattacagttgtcagccactgagccctgcctctttttttttttttttttttaagagttgggagtcttgcccaggcacagtggctcacccctgtaatccagcactttgggaggctgaggtgggaggatcatgaggtcaggagatcaagaccatcctgccaacatgatgaaacctcgtctctactaacaataaaaaaattagccaggcatggtgggggcacctgtagtcccagctacttgggaggctgaggcaggagaatcgcttgaacccgggagcggagattgcagttagccatcgcgccactgcactccagcctgggcaacagagcaagactcatctcaaaaagaaaaaaaaaggccaggtgcggtggctcacacctgtaatcccagtacttgggaggccgtggcaggcagatcacgaggtcaggagattgagaccatcctggctaacacgtgaaaccccgtctctactaaaagtacaaaaaattagccaggcgtggtggtgggctccttagtcccagctactcgggaggctgaggcaggagaatggcgtgaacccgagaggcagaggtgcagtgagctgagatcatgccagtgcactccagcctcggcaacagagcaagcctccattcaaaaaaaaaaaaaaaaaaaaagagttgggagtctcactctgtcacccaggctggagtcagtggcacaattatggctcactgcaatctctgcctcccgggttcaagcgattctcccgctcagcctcccaagtagctgggactacaggtgtgcacaaccatgactggctaagtttaaaaatttttttttagagacagcatctcactatgttgcccaggctggtcttgaatttctggctcaagtgatctcccactttggcctcctaagtcactgggattacaagcatgagcttctggcccagctcctgaccctttgtttcttactctgattttggcctcttctgttcctgatccgctcattcctttctaggtctgtgctgattgtcctagccttggggctccccaagactctgtcttgccactgaggctacttcttcctgaggaaaaataaatgataacagctgataagggcagccatgaaaaaagagcagtcctagccaccccagcaccatcactggcaggctcccaggtgaccctgcatcacaagagcttcccttcttcctatttgctgggagactaatcctcctcaattttctgtttagtatttacagttttttagtatttacagttgatgatgaaagattcgtgagtgctgccaaatatacatcaaaaggtggagcttgtttggccaacttgccacctgatttaacaacaactactagtgctgagatgcagaaagggggaaaatggaggaattatggaccaagttgtctttatagatgacagtcacaggacaagggttaggctttgactgcagacttcagtcttgctctggccagccctgttcaccacaggcctgaatgggttatcaaaaataaagctggtgccgggcgcggtggctcacatctgtaatcccagcactttgggaggctgaggcaggtagaaacctgaggtcaggagtttgagaccagcctggccaacatggtgaaacgctatctctactaaaacacaaaaaattagtcaggcgtggtagtgggagcctgtaatcccagctactcgggagctgaggcaggagaatggcgtgaacctgggaggtgaagcttgcggtgagccgagatcatgcactgcactccagcctgggcgacagagcgagactccgtctcaaagaaaaaaaaaaaaaaagccgggcgcagtggctcacacctgtaatcccagcactttgggagaccgaggtgggtggtcatgaggtcagaagatcaagaccatcctggctaacacggtgaaaccctgtctctactaaaaatacaaaaaaattagccgggcgtggtggtgagtgcctgtggtcccagctactcgggggcagaggctggagaatggcatgaacccgggaggcggagcttgcagtgagccaagatcggccactgcactccagcctgggcaacagagcaagactccatctcaaaaaataaaaaaaataaaaaaataaataaatctggtgatggttttctctctgccttactccttagagagtatctcccctccaccacttggagctctctcaggaccagggaaatggtaagatgccatttataataggctggagactgtcctcagtcaaggaggatgtagagaaagacctacttccaagcacataagccagctggatgagaaccttcagactgtacctataaagaagggaataaaaagaggaaaggggccgggtgcagtggctcacgcctgtaatcccagcactttgggaggccgaggccagagatcacctgaggtcaggagttcgagaccagcctggccaacatggtgaaatgccatctcactaaaaatacaacaattagctgggcgtggtggcgggcacctgtagtcccagttactcggaggctgaggcaggtgaatcgcttgaacccgggaggtagagcttgcagtgagccaagataggccactgcactccagcctgggcgacagagcaagactctgtctcaaaaaaaagggggacacgtgcggtggctcaggcctgtaatcccagcactttgggaggctgaggcgggcagatccgaggtcaggagatcgagaccatcctggctaacacggtgaaaaccccatctctactaaaatacaaaaaattagttgggtgtggtggcgggtgcctgtagtcccagctactctggaggcgaggcaggagaatggcgtgaacccaggaggcggagcttgcagtgatccgagatcacaccctgcattccagcctgggtgacagagtgagactccatctcaaaaaaaaggaaaaggatggcaggcacagtggctcatgcctgtaatcccagcactttggaaggctgaggtgggaggatccttgagtccaggagttcaacaccagcctgggccacatagtgggaccctgactctacaaaataaaaaagttagccaggagtggtgtcgtatgtctgtagttccagctgctctggaggctaggtgggagggtcacttgagcctgggaggttgaggctgtactgagccatgatggtgccttgcactccagcctgggcaacagagtgagacccctgtgtcaaaaaacaaacaaacaaaaaaaacagaaaagaaccaaaggactgaaataagattagaagaaacaggtaagctaaggcgtatttagttttgtgatgtagaagttcccatgcccccagagttggtctggggtcattcagacccttatggtaaagttccatgaaaagagtctaaccaatctcagttctctctgccctctctaccttacagtgaggaatacctaagaatgggtttcttgcttctataggggcctctggaaatccacacttggcactggttgtgaaggactgaagttttaccttgaaaacatgagcaaattttactgggacatatagattagaccagaataactgtgatgataggagagtcatcagagaaaattctgtttactgtgggtgtcatttcacctacaattgaccttacttggaaagcataggctaatccacgggaagggaaccaggttaccatccaagcagggagcgatggttaataaaaataccagtcaggcttagacggttcaaaccaagtgggatgtgattttcgagataacccagcacctcattttactgaatgaagaatagaaactgagtgatgatgtcactttcccaaggtccacagctggataatgactttccaacttttgaagaccaataaagggccgtttgccttcctccttcttccaccccctttcatagggattcccacagcacaagtaaactgtaaaggtttactattgtaaatgagataagcacttcattatgatagagaattagggaaacttttagtgggaagccggggaacacaagcagcaataatgaaaacgtctggttcttaccgatgtttttttttttcattaggactagcagtagccaaagtacctttaaaagcacactaggagaaacagggtggtgcagtagctcacgcctgtaatctcagcactttgggaggccgaggtgactggatcattgaggtcaggagtttgagactggcctggccaacatggtgaaacccctgtctctaataaaatacaaaaattagctgggtgtggtggctcattcgtgtagtcccagctactctggaggctgggcacgagaatcacttgagtccaggagacagaggttgcagtgagctgagattgcgccacacactccagccttggtgacagagtgagactctgtctaaaaaaaaaaaaaaaaaaaaggagcagggcatggtggctcacgcctgtaatcccagcactttggactttgggaggccaaggcggtggatcacctgaggtcaggagtttgagaccagcctggtcaacatggtgaaatcccattctactaaaaatataaaaaattagccgggtgtggtagtgggcgcctgtaatcccagctatcaggaggctgaggcaggagaattgcttgaacccaggagacggaggttgccgtgagccacatggtcccactgcactccagcctgggtgacaaagtgagactccgtctcaaaaaaaaaaaaaaaaaaaaaacacattaggagaagcaaaggaaatatactgagagtccctgtccttgagaggtcacagtctagccagggagacaaatgaatgcataaaatgacttgaaaagattacagcaacatgtcaacaattgcaaagtaattattagaaacaaaaggccaggcatggtgcctccgcttgtaatcccagcactttgggaggtggagatgggaggattgcttgaggccagcctgtcaacatagcaagaccccatctctattcaaaaattttaaaaaggctgggcgtgggccagcatggtggctcacgcctgtaatcccagcactttgggaggccgaggcaggtggatcacctaggttgagagttcgagaccagcctgaccaacatggagaaaccgtgtctccactaaaaatcaaaattagccgggcgtggtggcgcatgcctgtaatcccagctactcgggaggctgaggaggagaatcacttgaacctgggaggtggaggttgtggtgagctgagatcatgccattgcctccagcctgggcaacaagagcgaaactcggtcttaaaaaaaaaaaaggactggccgtgtggctcacgcctgtaatcccagccctttgggaggctgaggcaggtagatcacttgaagtaggagttcgaaaccagcctggccaacatggtgaaaccccgtctctactaaaaaacaaaattagctgggcatggtggtataagcttgtaaccccagctacttgggaggctgaggcaggaaattacttgaaccccggaagctgaggttgcagtgagccgagattgcgccactgcactccgcctgggcgacagagcgaaactctgtctcaaaataaataaataaataaataaataaaataaaaaaaaaaaaactggttgccaacatttataacagaaatttcacataaaaatctggatttttatatgaagagctggatttctaaggttttgtttgtttgtttgtttttttaataatcgaagatctgtcatccctgagcttccattcccacatggcagcaatcattctgtcatgacttggacccatcatcactctgtaccctacggcattaggtccagttgtccactgggactgaagatggctgctcctttgtttggtgtagtctcttctttgtcagtctccaccactctgaagttgcacccttcacacattatttaccctcctggctcctgtagacttttgggtcagtatccctgatttgtatgattctgatgggctccctccccatcaaaccttccattattaatcatttgagaaagcaataaattagttttgaaatgctgcccaagaaatgcatccatttcagaattattgtgcctgggtttttttataaggcaattcagtcatgggaaaccctgctggaataatctattggctactatggctgcatactgcaaattaactgagcaaaatttcccttcgataagtggatatagaaagtctactaagttgctaactttctcaaggttttgctttttttgccataatacttaatcataggaggcgtttcaaaattcacaatgtgtgttcttcccaagcatgaaactcaaatgtcctttagttgttctatttctcccactggttctgatataatttttaaaggagaaatctctttcatgtgcaacttggtataaaacagtgtcaccaccagcttaaaatccaaggagccaggcatggtggctcacacctgtaatcccagcactttgagaggccaaggagggcggacacgaggtcaggagattgataccatcctggctaacacggtgaaaccccgtatctactaaaaatacaaaaaattagccgggtgtggtggcgggtgcctgtagtcccagctactcaggagctgaggcaggagaatggtgtgaacctgggaggcggagcttgcagtgagccgaaatcgcacactgcactccagcctgggcgacagagcgagactctgtctcaaaaaacaaacaaacaaaaaaaatccaaggaaagctggatgcagtggctcatgtctgtagtgccaggacttcgggagctgaggctcaagaagatggcttgaggccagaagttcgagaccagcccagcaacatagtggaccctgtctctacaaaaaatttaaaaaactactggggcatggtggtgcatgcctgtagcccagctacttgggaggctgagaagggaggatcccttgagctaaggagtttgaggctgcgtgacccatgcactgcagcctgggtgactgaaaccggtgccactgcacttcagcctggggacagtgagaccctgtctctaaattaattaattaaaatccagggaaatacttttatcacctggcacacgctttcaagttatagcagcatactcaatcattataacaagaattgcccacttgtgcttcatgtctagcttttcaaaatgatactggtcttcccctcctgaatcagtttctttatagtctcatattcctttaaaaatggtttcaatctgtcccatttttgagccaaattcttagcttttctttgagctctaaaattttctatcaggcctacttcatatactagttcacatagtgtctcaaagtaaaaccaggctcattctagtttgtataacagaaatttctgtgaaagacaggcaacccttgaagcctcaagggcctagctttgaaatccccttggaggtgttaacaattgaaaaaatggcacattatgaacatttgttctaaaattttcatttgatgtcatagttgattacatatttttttatccacttgttttcttcttaaattatgtgcttacagtaggctgaaattttctagcttaatcatcaatagttgtagctctgaataccttcattttccagtgacaatcttgaaaataaatctaaaatctcttgactgcatgtaaaattttttatttctgaactagtttctcagtccatataatatcagaatgtattcaaatactttcaaagtgatatggctatttttcaagtttttctaaattattgatcagttaaatatgattccagccagtcacggtgctcatacgcgtaatcccaacactttaggaggccaaggcaagtagatcacttgagcccagagttcaagaccagcctggaaaacatagcaagatactgtctctactaaagacaaaaaagaactggtcttggtggcatgtgcctggaattccagctacttaggaggctgaggtgggaggtcacccgagcctgggaggtcaaggctgcagtgagctgtgatcatacctctgcgagacaggagacaccctgtctccaaaaaaaaacaacaacagtgattccaagttccaatgctattttatgtcttagctttgcaactggttattgaagcccatatttttagtgagaacatattctaccaaagatttctattggtatcataaatactcacagtactcacagtactaaatactaaatatagtactaaaatactcagtactagtactcacagtactaaatactcacctggaatttctcctggaatttttgtttcccggccttagtgtgggaggcaaagtgcctgcaatgttcttacaatctccattctctgcaattctaaacaatgcagcaaaagaatgtccaagtctgaaaggtttgtagactttttctcagactctcatttacatttatcactaaattaaaaacatacatgaaagtttttagaagaccaggtcaacagcaatgtctgaaacggtagagttggattgagggcagagttatgtctaatttatcttcctacaccctgacctcccacccttacaggagtctagctaggaatacttgagtatgttcttggctttatcattaaagagcatttaagaagtgaatgatgtattttgcatatggcataacagaaggtgagatgaacaacactaatgaaaggacaggccataaaagccaagcattccatggaataaacaaagcgatgtaaggtatttgtagtgtggtttggccgaaaattcgtttttcaacaaataagtgcctcactggaactcggaaccaacaattagtatggagataggtaccctggggctgttagaagcacctccttaaatataaacccaaacaattaaggttttgtttttgttttttgtttttgtttttttgagacagagtcttgctctgtgcccaggctggagtgcaatggcacgatctcggctcactgcaacctctgcctcccaggtc

SEQ ID NO: 2924 - DNA, 79134 bp, Homo sapiens
aaattcactgaagtcctaacccccaatgcgatggtattaggagatggggtctttgggagtaattagatctagattaggtcaggagggtggggacctcatgatgagattattaaattttagaagaggaaaagatgagagagctttccctctccccacatgcatacttggagataaggcgtatgtgagcctacattaagaaggctgctgtctacaagccaagaaaagagccctcaccagaactgaatttgctagccccttgatgttagaattcccagcctccagaactgtgggaaataatacctgtcatttaagccatcaatctgtggcaatttgtgaaagcagctcaggctaaaagcacaaagtaaggtctatgggcttgctcttgctgttttgatgacctgccctctttactgtaagcctgagggagaggctcctaggcagcacttcaccctgtcaaaagccctacctcccagaaggttctagtgcaggagtgtccaatcttttcacttccctgggccacattgggccacaataaaatacaccaatgatagctgatgagctaaaataaaagtcccccccaaaatctttttttattattattattattattattattattattattattatactttaagttttagggtactgtgcacaatgtgcaggttagttacataagtatacatgtgccatgctagtgcactgccccactaactcgtcatctagcattaggtatatctcccaatgctatccctcccccttcccccaccccacaacagtccccagagtgtgatgttccccttcctgtgtccatgtgttctcattgtcaattcccacctatgagtgagaatatgtggtgtttggttttttgttcttgccatagttactgagaatgatgatttccaatttcatccatgtccctacaaaggacatgaactcatcatttttatggctgcatagtattccatggtgtatatgtgccacattttcttaatccagtctacattgttggacatttgggttggttccaagtctttgctattgtgaatagtgccgcaataacatatgtctgcatgtgtctttatagcagcatgatttatagtcctttgggtatatacccataatgggatggctgggtcaaatggtatttctagttctagatccctgaggaatcgccacatgacttccacaatggttgaactagttgacagtcccaccaacagtgtaaaagtgttcctattctccacatcctctccagcacctgttgtttcctgactttttaatgattgccattctaatggtgtgagatgatatctcattgtggttttgatttgcatttctctgatgaccagtgatgtaaccattttttcatgtgtcttttggctgcataaatgtcttcttttgagaagtgtctgtcatgtccttcgcccactttttgatggggttgtttgtttttttcttgtcaatttgtttgattcattgtagattctggatattagccctttgtcagatgagtaggttgcgaaaattttctccattttgtaggttgcccgttcactctgatggtagtttcttttgctgtgcagaagctcttagtttaattagatcccaaatgtctattttgtcttttgttgccattgcttttggtgtttagacatgaagtccttgcccatgcctatgtcctgaatggtaatgcctaggttttctcctaggtttttatggttttaggtctaacgtttaagtctttaatccatcttgaattaatttttgataaggtataaggaaaggatccagtttcagctttctacatatggctagccaattttcccgcaccatttattaaatagggaatcctttccccattgcttgtttttctcaggtttgtcaagatcagatagttgtagatatgcggcgttatttctgagcgctctgttctgttccattgattatatctctgttttggtaccagcaccatgctgttttggttactgtagccttgtagtatatttgaagtcaggtagtgtgatgcctccagctttgttcttttggcttaggattgacttgggatgcaggctcttttttggttccatatgaactttaaagtagtattttccaattctgtgagaaagtcattggtagcttgatggggatggcattgaatctataaattaccttggacagtaggccattttcacaatattgattcttcctacccatgagcatggaatgttcttccatttgttgtatcctcttttatttccttgagcagtggtttgtagttctccttgaagaggtccttcaatcccttgtaagttggattcctaggtattttattctctttgaagcaattgtgaatgggattcactcatgatttggctctctgtttgtctgttgttggtgtataagaatgcttgtgattttgtacattgattttgtatcctgagactttgctgaagttgcttatcagcttaaggagatttgggctgagacaatactggcaaaccgaatccagcagcacatcaaaaaccttatccacctgatcaagtgggcttcatccctgggatgcaaggctggttcaatatatgcaaatcaattatgtaatccagtatataaacagaaccaaagacaaaaaccacgtgattatctcaatagatgagaaaaggcctttgacaaaattcaacaacccttcatgctaaaaactctcaataaattagtattgatgggacgtatttcaaaataataagagctatctatgacaaacccacagccaatacatactgaatgggcaaaaactggaagcattccctttgaacactggcacaagacagggatccctctctcaccactcctattcaacatagtgttggaagttctggccagggcaattaggcggagaagggtattcaattaggaaaagaggaagtcaaattgtccctgtttgcagacgacagattgtatatctagaaaaccccaaaatcttataatattttaagaaagtttactgatttggttgagctgcattcaaagccatcctgggccacatgcagcccatgcgctgcaggctggacagctcggtctagtgaattccaccattacacctctctcatgatctctttctgtgtctttgtagccttcacagctccctatgtgggttcatctgtccactctgagccctttctgtgcaaataacccactcttattgggagctgacatctgctgtcaaaagacaaaattacaacaaatttaagatcctaaatggattttatctgtgattctagaattggacaacaccttattctgtacaaagaaggagtgttccaatgatctgagcaaaggatgtataaccacccgacaggttcacctgcccactgcctagacagagccaatttatcaagacagggggactgcaatagagaatgagtattcacacagagccagctgtgtaggagaccagagttttattattactcaaatcagtctccagagcatttgggaatcagagtttttaagaataatttggtgggtgggtggaggccagtggttgggagtgctgattggttgggtcggaaatgaactcataggaatttgaagctatcttctgtgctgagtcagttcctgggtgggggccacaagatcagatgagccagtttatggagctggtggtaccagctgatccatcaagtgcagggtctctaaaatatctcaagcactgatcttggttttacaatagtgatgttatccccaggagcaatttggtgatggtcagaatcttgtagctccagctgcatgactcctaaaccttaatttctaatcttgtggctaatttgttagtcctcaaaggcagtctagtcacaggcaagaaggagatttgttttgggaaagagctgttatcattttgttttaaactatgaagtaagttcctcccaaagttagttctgcctatgcccatgaatagcaatgacagcttggaggctagaagcaagatggaattggttaagtcagatctctttcatgtctcagttataattttgcaatggcagtttcattaggccacgttaactaacttctctaacctcagtttctcactctgtaaaatgaagatggtaagttatacgaagttcaaagtgagttatactggtagacatcagaatagtgattgccttgggagtttaggaagggtcatgaaggaacttctggagtggtggaaatattctgttttgatctcagtgtttatatgggtatatacatcattttaaaaaagtcattggccaggcacggtgactcacgcctgtaatcccagcactttggaggctgaggcaggtggatcacatgaggtcggagttcgagaccagcctgaccaacatgggaaaccccatctctactaaaaatacaaaattagagccatacgcagtggctcacgcttgtatcccagcactttgagaggacgaggcaggcggaacacctgaggtcgggagttcaagaccgcctaacaaacatggagaaacctcgtctctactaaaaatacaaaattagctgggcgtggggcggatgcctgtaatctcagctactcgggaggctgaggcaggagaatcacttgaacccgaaggcagaggtttcaatgagctgagatcacgccattgcactccagcctgggcaacaaggtgaaactccgtttcaaaaaaaaaaaaaattagctgggtgcggtggtgtgcgcctgtaacccagctacatgggaggctgaggcagaagaatcagttgaaccagggaggtggaggttgcgtgaccggagatcacgccactgcactccagcctgggtgacaggagtgaaactctgtcaaaaaaaaaaaaagtcatcaagcagttaagattagattaaaatgcagtaatctaatcttaatagattagatacttagatacctttatttaaaattttttaaaagtggagataatagtaccacttcccagcatcattgtgacgattaaatgtgctcagcaggttgcataattgtttctgactagctagtatccagtatttgtctattgtcacaggtggtgactgctggaggggctgagtcccaataagctgtgaatgtcttggaggacaagtatgttggccccttcttgttctagcaggaagaggatcccatgtagactccaagcagctcaagttcagcaagggagacagaccattgaagtgcatgaaaagggcactggtgggctgggaagttcgtaggaggagcctctcacatgcgggtttggggaggaattctggaaagcagttagtcttagggacgggaaggatgtagctgggggacgggcgccctcagctccatgaataaaaggagtgggtctgactctggttctcattccctttaccatgcctggcacacattagaccatcaataccaattgactccaggaaggagtgctccccgtgggggcatcaggagccgctgagtttaaatacacaggtgggatgtgacacacgggaaccattcagatttgctggatctggatagggcttgtcaggactcagtgcttccaacccagggcccatttccctgtggcccctgagtcaccaccatgggtggacagctgctccagtccaagatacagccacagaggactgcaggcccagggcctccagaaggacaggcaggctcctctgaaagacaagcctgcttatagctgaaacctctggcccaggcgtcctctaagggaagcaggctgtgtcagggcacggcccatgaagacataagatgaagatggggagaaccagaggggtgcgcttcgaaggaaagcgggctgcgtgggggcaccgtcgattgcacaggacgcggtccggctcgcgtagccccgcaggcggcgccagagcgcaagcccgcctcgtgactccggtcacagtccggccgggcggagctaggggcgggcccctgcgtctctgggcgctggagcgcgggactatcacgccgcgtggcggacggacggactgacggacgcgcagccttacccgaaaggcatggcggagcacgcccctcgccgctgctgcctgggctgggacttcagcacgcagcaggacagtcgcctggccgcagggccacggggccgcctcctccgcttcggtgggggtaggggggggctgtcacccggacgcgggaaaacatgggcccggccgcgggcgcgcctacctctcggcttcccggggcccccgcgcccctgccctgcgcgcggccgtggggcgccggtgccctcgccggagatgccctgccaatgccacccgctcgcaagatgcggcctcgaccccgcctggaccagctaccccaggaaactgcaggcgctcctcggcaggacccccggtgcccagaggggccgaggactcggcgggttcctgcgctgttctgggcacccagtgacggggatccgaaggaagtagctactgtaaggcaggggaacagacaggcgggtagccctgcgcacatgcacaaccagtacctggaagcagattatagcccaaaaccttttttaaaaaattgaaatggcccaggcctgtggctcttgccggtaatcccagcactttgggaggccgaggcgagtggatcgcttgagccaggagttcgagaccagcctgggcaatatggagaaaccccggtctctaccagaaaatacaaaattagccgggcatggtggagcacacctgtagtcccagtttttctggaggctgaagcgatcgcttgagcccaggaggtggagattgcagtgagctaagatggcgtcaccgctctccacctgggcgacagaacgggaccctgtctcaaaaaaaaaaaaagaaaaaagtgaaatgcatgtgtacaagtggactttaccctgtgaccgcccttcgttgacaccagcttgcctggtctggcacccaggactgctggccagaggagcagtgtgctgctgccaacgccccgcagacaggcagcaaatcaaaatttgccttcaaagagggcatggggtgaccgggggcaccttttcctttaagtacttgggaaatatacacagttgcagtcaaacccctcttctcgaatgggtcaagggggcaggcctctggccagtccttgggggaacgtcctgtgggactctggatgactcgagttccttgctggacctcagttttcccatctgtccaagaaaggagttatactcccaagcttgggattgcttcagtgggacattaatgtctctggaccacaatcatggcctgtgagaatagccatggccttgcctggtctcaggcctctgcagacatggatccccagagatgcctccaaacctgcttcccattccttcctctctggcactttctcccgcctccttgtcaggtgcacgaaccactcatctgtgaacatcttcctctagagggtcttggctttggctatttggggaacaaagttccttgagacatgtgggtgttcctacttagcctcagtttcttcattttactaaatcttgagtgttaccccagatgagtcctctgttaccacgattacggtgaggcagccctgccttcaggaggtctctaggttgaactgctcctagggtgtggggcctcatctggtgacgttagtacccctggaccagtgtagaagctgaggaaaattctacacttcattttttaaaatgcctttaggtaaaggttgttgctgttgatgcagagttgaatgtcttctatgaggaaagtgtgcatttgacagagatcttccagaatttgggtatgtacttgatgtgcatgtgtgtgtgatggggtgttggttttggggtcctcccgcaaacttttgtattcgcagaccgcactgttgaggcttgccaaatacaggagtggtggtctcggcagacctttcaagcatctttttttcctatacctgagtgccatctcccccatttcttcctaattccattcatccattcatgaagtaagcatcattgagacctactttgtgccaggtgctaggacctgatggcgaaacaaaaagagaaagctccccagagcttcccactgagtagtggagactggtatcaaacaaagaatctcacaaaagaggtttcattataaactctgagaaggcctctgaaggaaaggaactcacttctccaagtgctattataaaggaatgtgactcagacttgggaggggaagtcccagagcgtctctagggaagggtgcttaagctagagatcagagtgagtgaagttagccaagcgatggaagggaagttggcaggtgatggaagagcattccaggcagaaggaacaacatgtgcgagggccctgtggcaaaaagagcatggttcattccttcatgcaattgaagaaagccaatgatgctggggagcagaagaggcggaggctggtcagagctccataggccatggtatagagtttgtctttattctaaagctatggtcagccactaagggccataaggggtaggggtatgggtgaggtatgaatgacggttgcatttttgttttgaaaatatctctctgggggcattgggagaacagattcggagcttgctggaatggacgtggggaactattaaagaggtttttgctggtcattcaggtatgaatgatggataggagagagctgagtagtaaaatggacaggtcctgttacaaaattgaatgtagatgtaagggtgggatttctggctgtccttcagagtggatgttggactgtgggaaagatgagttttggagagaaagatcatgagttcagcttgggctgccataacaaggtaccatagctgggtgggttaaagagcggaaatttatattctcacacatctggccgttaggagtctaaatcaaagtgctgggaagattggtctcctctgggacctctctccttggcttgcaggtgacactctcttgctgtgtcttcacatggtggtcactcggtgcaggagtgcttggtgtctgtgcatctgtatcctaatcttcttataaggacatgagtcatactggattaaggcccattctatgacttcattttaacttaattgcctttttaaaggccctgtctccaaataatcacaatccaggacctcggggttaggatttcagcatatgagttttaggggcagagggggcacaattcatccgtaacactgtggacttgctggttttgaggcaccctcgtgagggcctggtaaaagtgccttccctgtctgttttagacacacttcctctttgaagccttcccagctgaccctttgtcacctctcattacccatcacattgtgttgccaactctttgcccccagctaatgcggcccatggagccgaggttagaagccatcttgctttctcacattttttattattgcaggccttgatgtttgcctttgggtagttggtatgtttcaaggaattggtcttttcaactaagccatcaatgtgtggccatagtgttgttcataatattcctttatcctccttatgacatctgtgggccagtaatgatgatctcttgctgttggtcatttctgatattggtaatttgtcttctctcttttttctttggttatcctggctagaggtttatcaattgtattgatcttttcaaagttcacttttggttttgttgattttcccctgttgttttcttcaagttgtgctctaatttttatacttagtttcttctgcttgctttaggtttaaattgctcttttttccctagtttcctcaatggaaacttagaggattgatttaagaccttcttttctaatatatgcatttaatgctataatttctctgtaagcacaaatgctttttatgggatgccttagcagcatcccatacattttataagttatagtttcatttttttcgttcaaaatattttttagttctcttgagacttcttgactcatgggttatttagaagaatgtttttaggctgggtacagtggctcacacctgtaacccagcactttgggaggctgaagcaggcagaacacttaaggtctggagtttgagaccagctggccaacatggtgaaaccctgtttctactaaaaatacaaaaaaattagctggacgtgtggcaggcatggtgacaggcaccgtgtatgctgcacgcctgtaatcctagctagctgggggctgaggcaggagaattgcttgaactgtggagagggaggtttcggtgagccaagatcggccactgcactccagcctggacaacagagggagagcctgtctcaaaaaaaaaaaaaaaaaaaaaaaaaaaggaagtctggaagtgtgttgtttaatctccagattttccagttttctgtattgatttctagtttaatttcattgtggtctgagaacataccctatatgacttctagttttcaaaattttaaaatttcctctccctcactctctcttccatttaataagtcagtccttccactggacatttaaaaaaaggtgtccataaccaaaatatggtattgcttttttccatatattttcaagatattttaaaccagatgcctatagatttagttcattccttccccatcactcaattgcattgtgggttttctttttacaactttattaaggtataactgatgtacaatctgtgcatatttggagtatacagttaaaagctttaatatctgtattctttcatgaaacttcaccaaaataagacaatgagtatttccatgtcctaaaaatttcctcctgcctctttgcagcgatgcctccttccccatacccctacccactggcaaccgctgatgtgttttctatcatagtttgtattttctagaattttgtatagatggaatcataattatgtatgcttttttaaacctttaaaattttacatcacagttttgagattcatccatgttgctacatgtggcaatattggttcctattattgccgagtagtatttcattgtatgatgttgtatggatggactacattggtttcacctgatgagggatattggggttgtttctcttttctgttgttataagcaaaggctatgagagtcacatacaagtcttttcgtggacatatgatttcatttttcttggaaagacataccaggagtacagtggctgagttatacggcaggtatatgtttaacttcttaaggattctcttccaaagtggtgattttaagaaaaaaaattttatattgttaacaggcattacttgcacttaatatgtaactcaaatgaaaagtatacagtgaaaagtctttttttttcttttttctttctttttttgagacagagtctggctctgtcgcgcaggctggagtgcagtggcagatctcggctcactgcaagttccgcctcccgggttgtcctccattaggaaatggtacattacacaatggaatactacacatctataaaaaagaacacagaagtttttatgtattgacagtaaacacagccacgttactgtgaagtgagtaaagcaaagtacagatcagtgagtatagatgctttctcttgtatgaaaggaggaaaatcagaatattcataccttcctatatttccagtaaaaacactggaaggagcctggcacagtggctcaagcctgtaatcctagcactttggaggctgaagcgggtggattgcttgagtccaggagttcaagaccagcctaggcaatatgggataccctgtctctaccacaaaagtgcaaaaattagtcatgtgtggtggcgtgcacctcagtcccagctacacaggaggctgaggtgggaggatcacttgagtccagaaggtggaggaacaatgagccaagatcataccactgtactccagtttgagggacagagccataccttgtcaaaaagtaaaaaaaaaaactagaaggatacacaacaaattaaagtcatctgtagagaaggacggagaggagagatgagctcacaggtgggattaagacttttcactgttatatggggttcaccatgttagccaggatggtctccatctcccaacctcgtgatctgcctgcctcagcccccaaagtgctgagattacaggcgtgagccaccacacctggccaagttgtcgctattatgccacacacagatatttatgtcattgaatttcccagtctcttttattgcttctagatttgagtcatagttcaaaaggccttcctcactccaaaattatgaaggaactcacctatgttttatctagttcttgtaagatttcagctttcttacataaaaatatttggagtttatccaggacgtagtatgacatttgtatccaactttaatttttcccagatgattcttcagttgttgtacaccaaccatgtttttatttaatttattttttttatttgagacaggagctggctgtcaccaagctggagtgcagtggtgtgattcagctcactgctatctatgcctcccgggctcaacaatcctccctccttagcctcccaagtagctggaaccacaggtgcgcccctaccatgacagctaatttttttgtattttttttgtagagatggggtctcactctgttgcccaggctggctcgaactcctgggctcaagcagtccacccacctctgcctcctaaagtgctgagattacggcgtgaaccaccacacccagcctcaaccgggtttttagaagtccatctttacctttaaaggctgaggtgggcggattacctgaggtcaggagttcaagaccagcctggctaacatgggaaaccctgtctgtactgaaaatacaaaaattagctgagcatggtggtgggtgcctgtatctcagctacttgggaggctgaggcaggagaatcacctgaacctgggaggcagaggttgagtgagctgagattgtgccactgcattccagcctgggtgacaaagtgagactccatataaaaaaaaaaaaaaaaaagaagtccatctttacctccatgatttgagatgtgagccttatatgtgctactttctgtgttcacttaggtccatttttgggcttttgtttttgttccatggttggtagatctgttcataagccagtaacacattgtttcaattatcccagctctgtaatagtttgtttgtttgtttatttacttttgagttggagtctcgctctgtcgcccaggctggatgcagtggcatgatctcggctcactgcaacctctgcctcctgggttcaagtgattcttcgcctcagcctcctgagtaattgggattacaggcgcccgccactggctaatttttgtattttagtagagatgggtttttgccatgttggccaggttggtctctaactcctgacctcagggatccgcctgccttggcctcctgaagtgctgggattacaggtgtgagccattgcacccgcctgtaatatgttttaatatctagaattgttggtcccctctgtttgtttttttttccaggtttccatggctattcttgttctttttcaatatgtacttcagaatcagcttttcaggttcagaaagccaaattgttaatttttttttttttttggacatggagtctagctctggagccaggttgaagtgcagtggtgtgttctctgctcactgcaacctccacctcctgggttcaagaattctcctgtctcagcctcccaagtagctgggactacaggcacataccactacacttgctaatttttgagtttttagtggagacagggtttcaccataattggtcaggctggtctggactcctgacctcaggtgatccacccacctcggcctcccagggtgctgggattacaggcggagccaccacacccagcctgttgttaatatttttattgagatcatattatctttataaataacttggcagaattgacaactttatgagattaagtcttcctgtctaagcacacgttatactttccatttgttcaagtcttcttttgaatacttcacatgtgttttaatatgtttaactacagcttttgctcactttggtagattgcacaaatgaccacaatactccacccatcccttacccacaccctttgcaatgtgactgcaattcctcccatcaaggagtcgtttccctaccgttgatttgctttatccagtagaacaggggaagtggcattgtgccagttctaagcctaacctcaagcagccttatgtgcttctgctgtcattcttggaactctgcctagccaccaaataacaagctcaggctatactgctggagagttggacatatgtggcctagttgccccaacttttcccctaagagccagccagcccctagctactgttagctacctatgaagcagagccttcagctaccgttaactgactgcagatgtatgagtgagcccagctgagccccatccaatgatgcaagtagaattgtgagcttaatggtttttagccactaagttttgaagtggtttgtgacatgcagaaattacccaatgtagataattatttttaagtttatttctaacttttttatcctttactactgtaagtggggaagggaggtttctagcagaaacttatcagctgtcttccaactcatttccctttcttcctaggcactctcctgccttccttgtagttatgttcagccatggactgagttctagccagtggaatataagaaaatgtgatcaggcctctaaaagacctagtcatcaaaacctccttctctgacttttctcccatttttggctgatgtgggtgtccagagcaccttggaagcacatgtggaacatgacagagccaccatcaacctggttcctgaatgactcatggagcagaactccccactccccactcatgttcctaaccacctactgattgtgctttcatgaggagaaagaaacttcagctgtatcaagccatagaaatgtgtttttccttaactatataattttttccctcatatcctttttttaaagaaaatactggggccaggtgtggtcgccacgcctgtaatcccagcactttgggattacagaggcgggcacatcacgaggtcaggagtcgagaccatcctggctaatgcagtgaaaccccgtctctactaaaaatacaaaaatttaccaggcttggtgccgggcgcctgtagtcccagctgctcgggaggctgaggcaggagaatgggtgaacctgggaggcagagtttgtagtgagccgagataatgccactgcactccagccgggtgacagagcaagactctgtctcaaaaaaaaaaaaagaaagagaaaatactgtttctttgaaatgtaattcacataccataaaattcaccttttaaaatgtacaatttgatggtttagtatattcaaagaacaatatcactatcaccactatgtaatcttagaacattttcaccactggaaaggaaaccctgtattaattagcatccactgtatagtccccctcctgccagtagggcaaccacaatcaactctctatctctggatttgctgattctggacatttcgtagacataatatatataatatgtgacagccttcttttacttagcataatgttttctttttaaaaattttcatagctttttgcttgtttcaaataccaacttgaaccagatacctggcataatgtttcaaagttcatccatgtcatagcgtgtgtcagtacttcattcctttttgtggttcagtatattccattgcattgatatatcagagtttgtttttccattcaacttttagacatttgagtgttctgcttttttgctattgtgagttattctgctatgaacatccacatatgttatggatgaattgtggccccccagaattcatatgttggaagcctaccctcatcatgacagtatattggaggtgaggcctttaggtagataattaaggttaaatgaggttgtaagggtggggctcaatttgataggacctgtttccttataagaaggagagacaccagtgctatcccacttcatcgcagatgcacagaggaaaggccttgtgagaaggcggctgtctgcaagctggaaagagaccctaaccagaaactgaatttgctggcaccttaattgtggacttctagcctccagaacttgagaaaataaatgcctgttgtttaaaccatctagtttatggtattttgttatagcaactgagcaaactaatacaacgtatacgtttttgtgtggacatatattttcatttctattggtatattacctaaaagtggaattgcggggtcacatggtaactctgtgttcaacattttgagaattgccaaactgttttccaaagtggctgtactattttccattcccaccagtggtagaggtgcctctagtttctctacatcctttttttttttttgagatggagtcttgctctgtcaccaggctggagtgcagtggcgtgatctcggctcactgcaagctccacctcctgggttcagccattctcctgtctcagcctccctagtagctggaactacaggcacccgccaccacgccggctaattttttgtatttttagtagagatggggtttcaccgtgttagccaggatggtctgatctcctgaccttgtgatccgcccgcctcggcctcccaaagtgctgggattacaggcggagccaccgcatccttgcttaacatttattattgactgtctttttaattacagacggcaccatcctagtggatgtgaaatgcaatctcactgtgcttttgatttgcatttatctaatgtaatgatgttgagtatctttgccatttgtgtatcttctttagagaaatgtctattaagacttttgcccttttttaaaaaaaactgtgttatttctcttttattattgagttgtaaaagttttttttaatgtatattctggaaacaagtcccttgttagatatgtgatctcaaaattttgtcccattctgtgggttgtcttttcactttcttgatgatcctttgaagcaatgtttttgttttgataaagtctaatcttcctacttttttccttttgctatttgtgctttggtgcagattggttaggttttggtatcaattttatatttacttcactaaaataattggaaaaatttccttcttttcaggtgctctagaacaatttaaatagtattagaaatatttgctatttaaagtttggtcccagcactttgggaggccgaggcgggtggatcatgaggttaggagatcgagccatcctggctaacaaggtgaaaccccgtctctactaaaaatacaaaaaattagctggggcggtggcgggcgcctgtagtcccagctactcgggaggctgaggcaggagaatggcgtgacccgggaagcggagcttgcagtgagccgagattgcgccactgcagtccgcagaccgactgggcgacagagcaagactccgtctcaaaaaaaaaaaaaaaaaaaaaaaaaggtttggttaatttttctgtcaaaccatttgggcctggtgcttttggggcatggggtggctctggtctccttcttagctggaaatgccagttttgttttgtgtgtgtgtgtgtgtgtgtgtgtgtggtgtgtgtgtgtgtgtgtgtgtgtttttgagacagagccttgctctgttgcgcccaggcggagtgcagtggcaagatctcagctcattgcatcctccgcctcctgggttcaaacaatttcccaccttagtctcccaagtagctgggattacaggtgccctccaccatgcctggctaattttgtatttttgtagagatggggtttcaccatattggccaggttggtctttaactcccacttcaggtgatctgcctgccttggcctcccaaagcactgggattataggtatgagccacgtgcccagctgaaatgccagttttaagttgttaaatacatggcagaatgtctggttacgtttttatctgttttgtgaaggcaacattttttggtgagcttttattgtctgtagtaaattttgttgctctcttcctctttttccctagtagtatctttttaaaaaatccatattattagtataatttatgtacaaaaaatgccatccattaaaaatgtataattaaaggtactttgcagatatagacctatagctgtgaaactaccaccacaatcaagatacagaatgtttatataccctccaaaagatcgcttttttccctgcttaccgagacaagctcggttgtggagactcaacgcaccagcactagaggaatgaagacaaagacccagaaataaagtgcagtgtgggaacggctaaaagcctttagagctgagagccacaaacagagttttgcccacatatttattgaagtaagcctgtgataaacattgtttctaaagattatagattagctgaaagcattccttagggaaacaaagcattcttttcaagaagcagagaaacaggctgtggctgattatctgcagaggaacatgtccgtaaggcacagatcgcttatgccattgtttttggttttggaatgcctgagtggttttccgccctggatgggccaggtgttccttgccctcattccggtaaaccagcacctccagtgtgagtgtcatagccatcgggaacatgtcacattgctgcagaaatcctgttatggccagtttctttaaggcctgtttgtgacaggcttagggcctgttcccagcacccatagacttagacaaccactgatctccttttctcagtatagatgaatttgcgtcttctagttgttcctatataagttataattgtgtacatatgaatagttcatattttttcttgctctgagtatgatatcacaaatatacaccacgatttatctgttcacttgtttagggacactgggtgactccagttaattattacaaataagtctgctatgaatatttgtgtacaaatctttcttgggcttagactttcatttctcttggctggatacttaggaattgaatggctagatcacaggttatctaatagcatcttggtgtggattctgagactggttttctctttcctaacacatgttaaaagggttggattttatcagatcagctctttgcactagagtcttctaggggtgagtgggtggggagagggttccagtcaaacttccaaagcctgtagtccaaggacttgttggttgttgtgatagtagagacactcttccctccgacgcagcatctctgtgtggctgcccctctctacctctccaaacctatggggcttgagagggattttataatccaacactgcactccctagggtgagcctttcttatctagaaggcttctttagaagatgcttctgagaattgccactctgggccactctgggcaatttgcctgtcttctctttccatctttgcagcccttgtgccgttcaatcaacagttcccacttggggttggggaaggttctccttcatctggacatttccgagtcatccaccatagggtttctcctggctttgcaatggtctgcctgccctgaggctctgtctacattctctgttgttcttgcaggactcagggcggtgttcatgtgcacaaggatggctgacggtcacttctccagtactaatgtgggtccaggtaagcgcagggattcctgttctcttctatccccaggctgtctcactggcagactcggtgatttgctaggaagtccaaaggtgcagccaatgagagcatctgttgacaccaggtcctcatgggaaagtggagttggcatgatcctgggatcaggctcagcctcagctggtgtcaacactcccaggctcagaggacttacaaaaacttccaggtactggagctacagcagatggcaagtcctgccattaaccacctttaaataacacagagcaaatcttttccaaacatctgcagtcaggccctgtggcctcccttgtacatgaaatatacaaacatagactgggcatggtggctcatgcctgtaatcccagcactttggagaccgaggcaggtggatcacctgaggtcaggagttcaagaccagcctggccaacatgtgaaaccttgtctctactaaaaatacaaaaaattagccgggcgtggtggcccatgctttaatcccagctactcaggaggctgaggtaggagaatcacttgaacctgggaggtggaggtgcagtgagctgagaccgcaccattgcactccagcctggataacaagagtgaaactccactcaaaaaaaaagaaaaaaaagaaatacaaacatagcccttagggtcttagtgctcagctctaagatcccttagctccctaatcacctagaatggcaagttatggcctggccagtcagctcatatcaatgccaagccaggcctgcctgctgaggatcaacaggaaaggagaatgccttagcaggatctggtgacctagggggccacaggagcagggatgtggacagcatagacagggtggtagctccaggggctacctcatcatatgctgcagggtccccgagtccctgaaactgaggccagctaagtgtgtgtcttccaaaagcttttttcagtcctccaatacctatctaacaattccctatattacattctttttgttaaaaataactggtatgatttcttttttattgggtaaccctgattcatacactggagaattggggtaaaggatggattttatccagataaacggctagaatgtacttcagagggggctgagccagaccaaggggcagagtgggagggtcggggttagagacaatggtcagtgtcaggaggtcccagtgatgatgtcgagggcatctcatagccaaggccttcacctggggaggtgagcagtgggtgagaaccaggcttgggggccgggcaaggtgatttctgatctgatgcagcctccaggaccaaacttgatcctagctctgccagccctgctccggctgcaccccactgcctgcccaaggtttgatggacacagatagagatggcgccacagccagggctgaaagaagccctcccagcaaaggctgggggtggtggagtcaggcaaagtgagagagtcttctctgccctcaggaaaacacaggtcagagtgaatctctaattctgccatgaaatcttaggagggtggtgccaagctctgctgggcaccaccatccatcccaccactgggttttgctagaaaggagggtccaaccagacagtggaggctggaataggggcctgaacaggtggccatcatctctatccactccctccagcctctggctcctggacacagggatctgggcctgatgctttgctctcatgggagctctctcctttgctcttcacttccctgtgcagtgaagtcagatcactaatatagagggttgaaaatgcaaataaaagaaggcaaaagtggctgccttactttgttagtttttgagacaaggtctcactgtgttgcccaggctggagtcagtggtgtgatcatggctcactatagcctcaatctcctgggctcaggtatcctccctctcagcctcctgagtagctgggattacaggctcatgccaccacacccagctaaatttttcttttttgtagagatgggatctcattatgttgcccacactggtcttgaactcctgagctcagtgatcctcctgccttggcctccaaaagtgctgggattacaggtgtgaggtgatggcagcacccgtagttccagccactcgggaggctgagatggaaggatcacttgggcctgggagttgaggctgcagtgagctgagattgcaccactccatttcagtctgggaaccagagcgagccctgtctcgaagaaaaaaaaatggagaagtaaaatttgaggattggtggtttatgattcatttatttaaaatatttttagcatagttgacctttttatttgattgatgcctacttgttaattaatgtactctagtgcttacaaatcccaagtcatgagtttcttcatcatctgcccgagtactctgctgtaatggcaggcacttgcgtttcaattctgaggcttgcgtgtctgatcagtggttctgtacagtcatggtgggttctgtttttcttcttaggcactggatatcatctggagaagatgaaggcttcgggcttcgaattctctcaagtcctagccttgtccggggcggccaggttcgtttgcagcagactctgtctgccatgtgagggtgactgtcctgggcaatgtgtgggtgttgaagagatggcaacccttggatggggagcggctcattcttgacagccacgcacaaatttcactgtgaataaaaatccctacaactattttactttggagactgtataattgtctcgttgcaaaaggatctgagacagttcttaggagtaagtattatataaaataggcgcttggtgagagaactgagttcctctgaaggggatggaggaagcaattgacatgaattattatgactgcttgggggcaccacaattgcttttctatttcctgaaagtaaaagcaaagcaaaaatgatcctaataatgatagtagtttcagtagaaggaagagtattaataatgatacagaggacattgacttagtgcatgcgcttagtgcatgccagatacaactctgaggccttccagatgtcatccaacttaatccttatgattctacagggtggtgctgtggagtgcttggacacactcagggcatactgtctgggtttgatccctggctctgccatttacaggcagtgactgggatacgtcatctggctttctggtgcccccgtattctcatctgtcatagggtcatttgagtgtaagtacatagcacagtgcctcctattaatacgcagtaaacattattaaagctgggcttctgttattatcgttgatatttacatgaggcacggagaggtgatgtcacttaccaagatcacacagtgctgggagtgggagtcaggacctgagtctatctcatccagtcccttgctgtgctgggatcacttttctccatgctggattactatattttcaaatcctcactaggtgtaactaatttttctgaagatgcttcttcctccatgacctaacaggaatttattgtttggttcttgttaaacacaacagagattccctgggtgatcttgtccacttctctctcccgatcccaggcctggacacccatctccctcctagctaatccccgacccccatggctggatatccacagatgcctcaggcttagcatgtcccagactgagttctgtctcccttcagacctcccctttctgggttctctttctcagggaattctccccatccacccagggcacaactcaagttcatccctgcctcctccaccttcccaccccacatccaagggtcctcacgtcccactgattgtctgtgactcttgactctaccatcttttctccagcgctatctgcttgtcattcttctcaggtctctaccgcagcctccttgcctccagcctaccttccccgtgactcccacaagccttaatacattcagctctgtgcacgctgctccccctggtaatccagggttcctaccacctcaagataaaccccagcctcctgagcatggtttcaggctcagtgctcaggctgtcccctcctcttcagcccatcacccacccccgacccagcctcaggcccactgcttagaatgccactatcccgggacttgcctggcgcccctcacctgcagattctctgcatgcaacacacactagaccatttcctgatactcatgaccacttcctctcatctgtacccgagttggttaggtgccctgttcccacgaccctgtcactgcagctccatagttgtacatttgtgtccttttccctgctcaactccagtagcctgaagaatagggacgaaagtatcctattcatctgtcgcaagccggcatgatctatgtgcttaataaatgttcattgaatgaatgaatgaatgaatgaatgggtgagtgaataaataaatgaatttcaggtaatattacaagcaatgtctttaaatgcagtttacaaaaggcatcaaaatccagaccaataattagttcttggaccttttctgtaagttgtgggtagacagggcagagttcctccccattttcttgaagtggaaaccaagtcccaggaggtgatgagctctgtgactaagaagtggcaggggcaggtgtggagcccagttctttggcattggtctggggtctttctgtgtcttcaggaggctgtgacaccggtgtgtggtcatgtgacatgtgcttgggtttcccaacagcaacacggaagtatatactggaaggctggagcccagcggcactgacaagcttatcaccagacctccggctacaccagcagcttcaggtaactgtggtacgtggtgtgagtgtgagaaacttctgcagagtcccaagtcctgtgggtcctgaagccgctcatctcagtgttgcagctgtgctcacgcgccctcaccagaagagctttcaacctcagcttttggggagagaccccactgggccagttctaagttacagcacaaagggctggcccagtgtctccaaccaaggtcacctgggaagaagcgtcatgactgccgtgatgggcagtgtgccgccagccctggggcagatctccaagtcagcggatggagcttaagcctgtgcctttgcctccttcccaggactgtttctccatcagcgactgcccggtgtggatggactccagcacccagcccagtgccgccagctggaggctgctgtgggtggtgctcaggctctcagctgcctccggggtcccgtgcctatgaggtaggctgaggatgcggggggtgcagggggtggtctggtgcaagctccggaggcatagtgggtgacctgcctctggggggatcacatgaggtcatggagtgttgtggagccagcaacaggcactctggcccctgggtcctgatccaggccacctgctccctgtgtgttcccaggccaggctgggtgtgcacatggctgtgctcctgacatggaggtctgtgcatgggggtgagggtaccccctcaatgagaaggcacctcctgtcattatttgtacccggggattacaacaggacttacgttttgggtaggtttgaagctgaaagaagtcagtgatgtaaggcacttagtgtagtgcctggcaatattaaaaaaaaaaaaaaaaggaaaaaaataatagtgtctctgttccacaggttcaaccttgtccccaggggtgattgtgattaggccgcttgggttacatgacctcgctggagtagaagttttggggatagggccaactctacttggccacctgaaataacaatatgtggatggggaaaataccccgatccctcacctggtgcctggtcagaacagtcaccgtgctgtgtgaagagcaagggttattcactcagggttgtccagcctgatgtgggagaggccctccaggaaggcccagaagttactcacttctctatcctgtggtgcagagccattgtttactgcctgagtatttgattactaaggacattttaaggattcaaggccaagatcacattgttcagtagatatcaaacagatttaatgcttatttttaaaatattaattattagaaacgaggtctcactgtgttgcccaggctggactcctgggctccagagtcctctcgcttcagcctcctgagtagctgggattacaagcgcacactactgtgcctggtggggcttacttttaaaagcttttatggtacctactcctatccagagcatgctacattaactcactttgtggaggtaattattcattctgtgtaggatttgggttcctaagaatttatatccttttccagcgttttacagggaaccaaattgcaaaaatttaccagcagaaccccgagcctactcacatacagaggttggttaaatgttcctgtttgattgaaagtcacagttgaatcttttcataatatgttagaatagatacatcttacgtgcagtgactgaaaacgttgataacagacattaacaaatgatatatttgatttgcttttttctcattgtcaggacatttccaagaggagggaaagaatggaatgtgggaaagagatgtcaggggttctcctgaccagaaggggagggtgagggtccaggtgggagcactggggactgacgtgttcctgaggccacctgaatgaagatctgagtgtctgagcaggctgtgtctgctcactttcctatgtggttaacgcagggggctaccaggcacatgattggcatagagtcagtattttctttggaaatgtataggactggcatttgtgtccccagctgtggcccttcagccagagcctctgtcacaggaacccaggtcattcctggctccacagttgctgaagccagcacttgttgctgcctgagaaacagccccagccctggctagtgattttcatcttgtgataaggaaacgatcagctcacattaaaccaaacacctttttaatcttagaaattaacatgtggtttattatttaatgatttgaggttccagttattctgcagcattagccattaatgtaggctttgggtagaggggtgaaaaccctccctaattctgtgtgtggaacgaagtttgcctgacagaggacaggaggtgataacattctctcacagttccaaaggcccatgattctcatgtggaagtacagacccttagggtggcattgaaatccatcatctatttctctggctagtgctcagggtctgtggcttctgaggagccagcttcctgacgccctgagagtgtcctggttggttctgaggccacacatccacttcccttgtaacagaaggaaatgccaaggagatagaggaaggaaatcagggcacacattccccagcatgtgattccggatggaaatgcagcttccctaagccctttctcatagggcttttggtttttgttcttttgaacttggcagttttatggcccatcagaaactgtagagaatgaatgctctcccaggagtctgctcatggtattccagctgctcctatctgagatgcacagtctccaccattattgggccttttgttcaaagtttccacttccctctccaattttttttcatgctgtgtgtggtcagaagcattcagtagcgtagggtatgtggaagtgaggcacctctcactgtttctttctttacagagaatttctttggtcagtagctttgctgcttccctgttccttggctcttaccccctattgactacagtgatggtgagcctcggggtatggggtgggtgcctgggcagtgtcatgtggcatgtgggtgtgcaagcagtgggagccccacctaccccgagtgggtgccaatttgtagccctgtcatctgttgccaggaaggaagtgtattcattatcttttaccacataaaaatgaccccaacacttagcagctgaagaccaccgtgtttattttctcacctagtgtctagagtcaggaatgtgggggcagcttagcttggaggtactggttcgggatctcccacaagtggcagtcaagctggcagccggggctgcagtcatctgaagggttgactggggctggaggtccatttccagcatcatgcacatgactacaggcaagaggcctcagttcctcacatgtggtgttagtgacactgcagagagggagggaggagacagaggccaagcagaagctgaggagtttttataccctaatcttgaagtgatgtgccatcacttttgtctcatcttactggtcacaactaggtacggttgacccagtataatgttggggagaacctcacaaggggtgaacaccagaggtggggatcagtaggggcgatcatggagcctggctcctgcaaggagctattaaagttttgtttcacatttggtgaactcatgagatttgtgagcttctagaatcaaaaccccgaaaaaataaattgcagttgatgccagtgaggagggaaagctgggaggaggttgctgcaggaaccttggatgagcctaagtgtgagaagagtgtggacagaacgggggtagagaatgcagggaggagcccagagccatggatatggcttcagaatggagcctgggatgctctgagcctcgtggagttcatgggaagttttcgagggctgttgtatgccaggctttattctggtttcaggaagagagtgactaaggagtgctgttaagcttccctcacaatctggaggaggcaacagggtccctacagctagttctgtagaactcagacaggcagaacagtcaacttggagtagcctgctgtccacccgttctgcacacctgccacagagctgataaccgcagcagctgttccgggggcattccagaggtttatgttccttagccacagctgggccctccactctgccccccttcaccacctgagatgtcacctcctcatttcacctgggcaggtgacaccatcagcatcccagccacctctgtctgcctccaccttggcccagtggaggaggagttctctccacccatgctctggttccctgtcctttcccatcctcagggaagccttgggagaaggaggatgttttaggaaaagctagtaggttgatctcagtgaccagaaggaagtttagaggactctgagacctttcctgaaaagttagatgagattgagaaatccctgggggctgacctggaaacctaagggacatgagagtggttcctggtcagtgtgttgctgctagttccaggccccctgggaggtctttgagagcagatttccaagctaactgtagtgtttgagttgatgaggaatatttggaggaggtgtgtgccgtgtgtttccaagggcccctcttatctctggttctctggttctagaacaacacagcatatataccttccatgaagaaagagctccaggtacaagttgtggcaagagaattatcgctctgtgccagatttgtgcattttcacaaaaggtccattttcaagattgtctgttgttgtttccttccttcctcaggttctggaatgaatttgttgcagatacaggataaagtctggcccaggcttgccttggtgcctgtgcacctcatttagaggagaagcttagcccaccagtacatcatgctcagttgtggtaggtctcctttctggtgatgtggctcatttaagagctggcgctaccagggaagcactgtagcgcacacacacacacacacacacacacacacacacacaacactctgcacacacccttatttgttcactcacccacaggcatacacatgcagggtcttagtttagcctaagatgtaagtcagtgtctggatcagtgccttgcacacagtaggtgctcggtacatgccttatggtcagcgggactttggaaaattccactagaaatttattagaataggataaaaatggcaggtgattgcatagctaaagaaaaagtgcacagagtgctgaaattcagggactactgatgaagcttgaaggaggcagccttggggaaaatagaaataccagcgggctggcacagcacaggccctggcactggacagcatgggactgaattctggttctatcagcttgtgactttgtgtctcggtttcctcatctggaacaaggggaatgatgctattcatcttcagggctgttgtgcaaattagatgagttaatacttttaaagcacttaaaaaatagtgccggtcccacaggtaatgggaaaaacatttacccatcacagcggccccacccatttgcagtgacactggctgtgaatgccctggggtgttctacttggccagccctgttctccattgtccgtggggacagtggagtagagagagagagaaaaagatctgggtgctgcccctggggcccttggtgggaaatgcttaccacagagccagaacaaccagaaggaactctgggtgggacagatgctggtgtgaagaagggacaagggcaccctgaggcctggagggagtcgtgtaactgggatcttgggccatgtggaggaggggctgctgtgaggacttcgcgttgggagtctcagccaagaagcacttttgttttcttttcagagacagagtctcaccttgtcacccaagttggagtcagtggcatgatcatagctactgcagccaccaactcctgggctcaagtgatcctcctgctcagcttcctgagtagctgggaccataggcttgctccaccatgcacagctaatttttttttttttgagacagagtctcgcttttgtcacccaggctggagtgcagtggcgcaatctcgctcactgcaagctccgcctcctgggttcacgccattctcctgcctcagcctcccgagtactgggactataggtgcccgccaccacgcctggctaatttttttatatttttagtagagaggggtttcaccgtgttagccaggatggtctcgatctcctgacctcgtgatctgcccgcccggccttccaaagtgctgggattacaggcgtgagccaccgcacccggcctaattttttttattttggtagtgacagggtctcactatgttgcttagattgggcaattctgcctcagtccccaaagtgctggaattacaggtgtgaaccaccgtgctcggccgtttttcttgtatgatcacactgacatgctgaaaacagcctctgccaccatgaggcagaatgtcaaagccaaacctcagcatccaaagtatgccatgaggccagtgcatggagctgaaggaacagccatgtggcctgtggaagctgacagcacagctttctgacccgctttctgacgcaggtcagaaaggcaggaaagggcagacagaaaacagccaagccaccgggactggtaatccacacacggcttttattggatgtgaaattcagagcaggctttgtttgccttatgcgagaacacatgcctccaagaggagcctgtgcagacaagcagcttgaggattgggaaagaactgactctgaaaaggcatttcatttgtcacgtaggtgtcacatgtgggggaaccactcaagacccatgtttttcgtctccctctttttgcaggtagtgctcagatagccctccctgcactctgtcttttttggattctttccttagaacattgctctctgcacgttcacgtccaattattgttaatccagtcactgggtgatagagtgagtgtgtgaggcattatctgctcccatgagtttgcttactggtgtctgttacctttttttttttaatgctatatccagaatttggagcttataaagcaagcacaattaggggttggtttgttctctctaccttaaatctcaagatcagcagtttttgaaatgactcatgctcgtggtttccaaacctgcactggacttctctggcgatttgtgaacaggagggcatgcccagtttgtgacaggaagtgatgtgactccaggctctgcaaaagattccttcagtctggtgacctggagactgtagcgttttcgtggcctgaagggtgggtggctgtgctgggaggcgggatttacctcaacagagcacctttgctttgtccccgtccctcagggagccattcttcctactacgtccagcgctacggatttcctccaggatgcaaagtggtggccttcactgggacaacccaggtgagtatctcggggagtttcactctccagtgagcctgactgggtcctgctggatgtttgagaattccagtccagcctcttggtgaaaccttctgtggtcattcctaccacccccacccatgctggatgtttgagaattccagtccagcctcttggtgaagcctttgtggtcattcctcaccactcccaccctgcgatctgactccttgtacctgccccatcttgctccgactctgccctcaggagctggtcagtctgctctctctggatgaaaactgcccaagattatggaaggcagtcgtgcccaccccatccctaacctgtcttttctgtttcaagatgatagctcaattcctccaacccttcctctaggacatggttttaagtctctgccctgtcattgatctgcagcaatgacttgtttctcgtccagacacctcatctccttccctagcctctttcttcctcctcctctcctctgggtagccctgaagccactcctggaggggcccttggatcctgaaggaaggccaggtgggctacactgaataacaacctaactactacccctcaacctccccccaccccaggaaaagtaagtctttttctaacgatccaccagattagggttacatttacagtaactagaaaggttaattttaaccttaatcagaaagattaatttctgtcctttcatcttctttctgtgctcataaataagcattgtttcttttaatcaacctgggcagtatcttctcattttaacagttgtctagagctcagttgtcccagcatttatttcactggtccctgaggatggagggtggtgttgcttcagtgtttgggcagtgcagacgatgttgagattcacatcggtctcgtctctttgttgttataggataagttctcaaaggtgggattcctagatccaagcttctgacacacacactgctgattgaacctcagtggcagtgtttgagtgcacctgttctcactcccatttcacctttattcacatgttgattcactcagcatttagtgagtgcctatatgtgccaggccttccttcagtgctggggcccttcagcaatcaaggcagataaagattgtgttgtgagccatgtgtggtagtgtgcacctgtagtcttagctacttgggaggctgagggggaggattgcgtgatcccggagttctaggctgccgtgagctatgatcatgccactgcatccagcctgggtgacagagtgagaccccacctatatatctcttaaaaaaaaaaaagattctgttgtgggctttgtgtctaaggcagggcacagagagtgaacataacctcacccccttttttccattactgcctttgtctttctttgctgtatatccttggtgtcttgtcttggcctcttgattctctgcactctcggaagtgcctgacagtggagggatgtttggaccccttcaggaagagacttcacagctcaaatcagcggccctgctaacagagacttcaccccgtgaccctatgaccttctcctcttagggcctcctgagcgctcagctcccctgctcctgcctccacctagggtgtgggtgggggttggaggtgggggctctgcgcctgcctggagagccctgtggttgctttgtggttcccatgtggccgccagctaaccagaagctcccctcccattctcagcgcgctggcaggcatgagactggaggaaggtgacattgcggtaaggcgacttcccacaccctaggctctttctgtttccacactcacacccacactctgataagtagcagaggtgctgctagacccagatcccagggtcccagggtctgggtcccagcaggatctctgctacttatcaggtgtctgccggttccaaaagacagtggagggaggggatgggggcgcacatctttctcagaagtcattgttctttgctagatgggcaggacccctgcctgcttcacagtggccagtcttgtgcatgcagtggcagagggtcagatgtggggccaaagggctgtgagcagcgcagatgataaggaagacataacccagacattcctacttctagtgggaaagtcatatggggaaccagcatcacccaaaccattatttagatgcagttgtgggaaatcagcacagaagatccatgagtctgcatctggggagctaactcctggctcatctggtatgggagggtcagaagtggctctagaaagtggccttgcatctgaggtctgcagcatgagtgaagtgacagggttaaggtgggggagtacagcgcgtcgctggcagagggcagcgtgtgtgggcaaagcccaaggtgcccactctgcctatctctcctcaggtcagcctgggcaccagtgacaccctgtttctctggctccagagcccatgcctgccctggaaggccacatcttctgcaacccggttgactcccagcactcatggcactcctgtggtgagcttgggtgttggttggcaccattccctgggtgaggaggttgggcaggtctggcaccatcttgaggaccccaagtcattccactaagctctggaatgacccctccactttcccgggctctgctgggcaactgagacccccaaggactcaccagctcttctgacagcagagctgggtggggaataacccaagaccctgtgtccttcaagcccaggttcaattctatcctcaccagctatatcctgtgtgaccttgggcaaactctgtagtgtggcattctgagccacactttcctcatgagatggggagggtaagagcatttacctcacattgttatgtgacccgtctggcatgtggtggaccctcagcaaatggcgggaaggacatcctgcctccgacggctctcatggaagggacatgctctgtgctctgaccacaggcctttggagacctgccaaagctcctgagggaaatggtttctgagctcctaagccctaagaaccattggagaattggctagttaatctagccctccctgcctcattgtgcccatggtagaatgtgcagaaaccaagctccctctctctacctggggctcctctgcgtcagcctcctgtgtaaacagcccaagcaagggcgtttccggcacctcccagggacattcaggggcctgaatctgaggaagagcctcgatacctaagtttcaaagcctgctgtgcactgactaggggtcgtggtccagcctgaccgcagttcctctgcctgagtctcttcactgaaactcatgggtccagtcagcaagcaccagtccctccctcagagctatgccctcttctgcagctttaaaaatggctccctcatgagagaaagatccgcaacgagtctgtatcccgttcctggagcgatttctctaaggcactgcagtcacagagatgggcaacggtggaaacctgggtaggccagttggtggtgcccaggcctgtgagggtcagcagctgccgactggaggggcagagcctggggccccatgagctgggggagagggggccgtggagaagtccaggggagtcctgtctgtctgcacttatattccacacatcctaaagctggtgtggaaccctgtgttctgagcaagggtggggctgtaaggctgtccttggctctgctctgagcagaacatcaggccatagctatgtcttctgtccccaccaagcccctggtacagcatcagagagggcagcctctaccctggtgcatccccgttcacagcctctgccccagcacaaggaaaagtccccagtgtctgggcaggcctgagcagggagggtctgtgcctccctggtcaaacctgttttgatattttaggattggctgggcagctgcttcctattccaggctccaagtgagagcaggaagagttgtctttgagaaaagctagctcagggctccctggttccttctatcctgttggagagaaggaactgagaatattcacaggtctcatctgggggatgaagagccaggggacccagggatatggggtcattttgtcctgttctaagtctgttaagaagcgatcttttgttttttgactaatgacggctgatctcttcctggttttatttcaggtttttttttgatgtaatggagatcacccctgaaattattggacgtcataggtttaacacagaaaccacaaggtacatgtgctgttggtgttggagttacattggctccatttgtgagtgtaaatttaacaattgcctatcaaattatgttacttttagggacttcattcattcactcatccataatatcatacacacttgtggtgtgccagggtgcattctagatcctggggaatctgcagacctaagacagacacggtcctttccctcagggaggaatgcagaaaacctgagagttctctcctatttaacaaatgctaacactatcattgtgtatcacagaacttatttccttggcgattttatcctatacccatcaagaacccatggatcttgagatcatgaatttcctcctggttaaagagctgctgagcccaggaggtactaacgtttattgagcccatttggtgccaggcatgtgctcatggttttctataccttcctcatttacttttcttttttttttttttttaatttttgagatggagtctcactctgttgcccaggcttgagtgcagcgggacgatctcggctcatgcaacccccacctcgtgggttcaaacgatcctcctgcctcagcctcctgagtagctggattatagatgcaagccaccacacctggctaatttttgtatttttagtagataggggttttccatgttggccaggctggtctcgaactcctaacctcaagtgatacgccccctcccaaatgctgggattacaggtttgagccaccatgcccggctatcatttacttttcaaagcaatagcactattgttcctctttctagatggagaggttgagactcagaggctcaggctaaataactgcccagagtcaagcaaggtcatagatggtggagggggctcaaacccattcctctctgctctgaagctgctgttttctttctcctccacaatgtgacctttctcgggaaggatttagtggttcttgctcctcaaaattgacattgctgctggagagtcactggagagtcatcaccaattttgggttgtacctgagagatgtttctgaccccagtaaatggggggtttatgtaagaactctgtctggaaactgtaactgtcagagttggcgttggattcagtggcagatgatggcctacatgttggattatgaatggaaagctttgtataaagtaggaagttcatctcaatctttgatggaggatcagtttggtttcttttgttagagtgagaagctatgcctgttctctttctgcatatcaatcctagatttgtcaaggagaaagtagtgttcttcattcattcattcaacagcagatatgtatgattggtgccaggcaccggggacacaaaggagaacaaaacattggtgcccttgctccccagagcctgctgtctaggagggagagggacagtagacgactgaatgacacgtacatgaatgcagcaggtgctaaggctaggtggcagaagaacagagtgccgcaaagaaagcagctggtgggcgggttggagacttaccctgggtggggtgatcaagcctgggcgctctgagaaggtggcctttaggttgagacctgaaagtactcaggatctcaccatggaaaagtaggatagactttcaggcagagggagcagcttgggaactagaagaaggtcagtaaggtagagtgtagctgtttatgagggggatggcggcaggttctagcattggtctcaggtgccgagaagcaggagtgagcctggggttgatgcccatcagtgctagcttgaaggacatgccaaggggtgggatctcagcgtaagctcgtggctctcacttatctagtatgtactgcattttcaggctctgttgtctaatctgatcattgcaacaaccctaaaaaacaggcgccactattactctgttttgttaagaaaaagaatgatagcaagactaatgtaacttattgaagattgcaagctgaatggtagacagaacttgaactctcagctgcctgagactaagttctgtaatgtccttgactctcttcaaagtgacatgcatgtgaggctgtgagcttgtgtgcttgagtagtggtttgtgtgagtgtgtgtgacaggcaaagatagtggttaaagagcccagctatgagtttaaatctgggctgttgtttaaaaagatcacacacagacacacacatacacacacgaatggcaatgagagttccttactctgtgcccaccttttcctggagacaggttgcagcattccctgggatgtggaggttcgagcactaattgaaggacaattcatggccaagaggattcacgcaaaggcctgggctatcgagtcagtaagtgagccactggcagcatgtgtcccggggtggggctcagggccagctcactcgcaggggccagggctagtggggcaatatctactaaagttttttacagggggacttgtgcaggagggaggtggagcctgacctcagggatggggtgagaaatgtcaattggcacttgtaggcaagcatagaatagcagacaggttgttcccgcttctcagtgtgtccacaatagcctgaccttttggccaggacctgtaagacttgggaatggtctttcgaaaccctaagctccaagctgcagatgagctgtcctgagctctggactgcaaagacatagcagtgcaaggtctggggacatgaatggatcttggccttctagcctggccaggtcccatgcctgtgggacacagtctgggtctttcagcttggacagggaagagggggatgtagtaccctgtcaaaactcggaagactgatgtcttagttcattttctgttgcctataacagaatactgttcctgggtaatttataaggaaaagaaatttatttcttacagttatggaggctgagagtccaaggttgaggggccatatctgaagagggcctgcttgctagtagggctctctgcaggtcctgaggaggtagagggcatcacatggtgagggagctgagtgtgctggctcaggtctccttcctcttctcagaaagccaccagtcccgttcccacgataacccgttaatccattaactgttactttgttaacccatgaatggattaatccactcataaagccctcatgacccaattccttaaaggtcccatctttcaatatgtcatgttggagataaagcttcaacatgagtttggaggggacacatattcaaaccatagcaactggcatggagagggcagacccagggccggggaggcaaaaggaggagaaggggatttctgacaacttgagctgtagaataatcagcattggatgtcagtgagttccccttacaggtggcgttggaatggtctaagggtctgtaaggagttggactggccgcctatagagtccaggtttctaagatgtatttgtctctctgggctatactgttgtcattagagaagatagtgaagctgctttgcttgagggccttcctatgatactcatggacaatccaagttctatgtaatatatattttatacctttgaatcaactgagtaaaagatactataaaaatacctattagggaaacctcttagaaaacctgttagacagcatctgcaaagctgaatatacgcctacccagcaatctcatttctaagtaaaggcacaacaggaattttgcatgtgtttactaaagatgtacaggagaacattcattgcagtactatgctgaatagcccacagtggaagtggcccagtgcccattaatagtagacagaaaaaatgcattgtggtgatttgtacaacaggatactacacacaaatgaaaatgaaccagcctcagtgatacacaataaatgggtgaatctcaccaaatgtaacactgagcaaaagaggccaaacatggacatacaatggcaggggtctctgtacatcaaattcaaaagcagatggcactacaggccaggcacagggctcacacctgtaatctccacattttgggaggccgaggcaggtggattgcttgagtccggagttcgagaccagactgggcaacatggtgtgttgcgggaagtcagggaccccaaacgagggactggctgaagccatggcagaagaatgtggattgtgaagatttcatggacatttatagttccccaaattaatacttttataatttcttacacctgtctttactgcaatctctaacataaattgtaaagatttcatggacacttatcacttccccaatcaatacccttgtgattcctatgcctgtctttactttaatctcttgatcctgtcagctgaggaggatatatcgcctaggaccctgtaataattgcattaactgcacaaattgtacagcatgtgtgtttgagcaattgaagtatgggcaccttgaaaaaagaacaggataacagcaattgttcagggaataagaggataaccttaaactctgactgctggtgagctgggcagaacagaaccatgtttctcttcctcaaaagcaaatgggaaaaatatcgctgaattctttttctcagcatggaacatccctgaaaagagaatgtgcgcctgcgggtaggtctctgaactggcccccctgggcgtagcctgtccttatggttgaggctgcagagatgaaataaactccagtctcccatagtgctcccaggctattaggaagaggaaattcccacctaatacattttggtcagactggttgatcccaaaacctgtctcctgataagatgttaccaatgacaatggtgcccgaaacttcattagcaattttatttcacctcggtcctgtggtcctgtgatctcaccctgcctccacttgccttgtgatatttattatcctgttaagtacttgatgtctgtcacccacacctattcgcacactccctcccctttgaaaatccctaataaaaacttgctggtttttgtggcttgtggggcatcacggatccaccaacgtgggatgtctcccccagacacccagctttaaaatttctctcttttgtactcttccctttgtttctcaagccagccgatgcttaggaaaaatggaaaagaacctacgtgatttcggggcaggttccccgataatggtgaaaccccttctctacaaaaaatacgaaaattagcaggcgtggtggcacatgcctgtagtcccagctactcaggagactgaggtgggaggatccttaagcctaggaggttgaggctgcagtgagccatgagaccctgtctcaaaaaaaataaaaaagcagatgaaactatttactattgttggaagtcgggataattagtagttacctttcgaaggggcctgtggggtgctgtcaatgttctgtttcatgttccatgggtgtgtttagttttaaaaatttatgaacattataggcttatgatgtgtgcatttttcaggatgtgtgttctggtcaatacaagattttaacatgtgtaaaatgaccaccatgagcattctgattgccctctcccaccaccctaagtgtaaaaagacgtttcctaaaggtctgcaaagacttccaagttcctgaaaatgagactgggtgagcagggcagggttggtgctggagttggtggagtgcctggaggggtcctccgactgtcagaagagaaccccagggaacggaacagcccagcatacaggggaagcagttagggcaaaaggcccccatgggctcaggaggagctgatgggattgtggcatattcccagcctctaaggcatttcttgtgcaaaacagcatagagttacttatcctcttagaagcttaaatgcagaatcagacctgtcttgccgctctgctgagtgatcacttaaatagaatacttggaaccaacagaggttgcacgcacgtgaggactcattctccaggctgctgtgtgactggccagctctttcgttcttgcccagacatcatctcatttggctttaatagtgtctagggcaataaagaggcactttgaataaaaatgattattgtgatactaacagctgccagctttgttgggcactgagtgtgtgcccggcccagttccttagcaattaatctttattaacacagtaccgctgaagtaggtactgatatgattcccacttcacaaccgaggaaaccaaatctgcagtggttaaataacttggtcagggctggcagagctgggatctgaaccaagccagtcggctccagatgctggattctcaaccactggctgaacctgctttttttaaggaacaatcgcctcttgatgtttatagacaccatcagacatgatagaaaccagctgggcagggctaatagccatagttttcagtttatatttcagtgtgtttcatgttgtttaggttgattgtaaaaaagtcaaatcttgtaataacaagtttgaaaaataaagaaaatgggcctggtgctcacaccgtaatcccagcactttgggaggtggaggcgggaggatcacttgagcccaggagtttgagctggcaacagagagaccatatcttcacaaataataataattataaatatcccagtatagggcatgtgcttgtggtcccagctactgggggtggggtggcaggggtggcaggaggccgggggatcgctggagcctgggaggtcaaggctgcaatgagctgtgattgcaccacttcacttagcctgggcgacagagcgagaccatgtctcaaaaaaataaaggaaaatgactcataatccatcccctctctccaaccactggtatcatttagggacattttctcccagtctcctttagagcttatttccatacagccatagttttgttcctttgtaccttatatgcaaagggtgtaacaagaaccaaagtttgtcagaagtcatctttgtggtgctgcgtatgatggccaggttattttcctgcatttgggcactgagggtgttcttgttttttttgtttgtttgttttctttgtttgttttgttttgtttttctggagacagggtttcactcctgttgcccagactggagtgagtggtgtgatcttggctcactacaacctccgcctcccgggttcaagtgatcctcctgctcagtctcctaagtaactgggactacaggtgcacaccaccacgcccagctagttttgtattttagtagagacggggtttcaccgtgttggccaagctggtctcgaacttctgacctcaatgatccacctgcctcggcctcccaaagtgctgggattgcaagtgtgagccaccgtgccggccattgttcttggttttccaacgtggaatcacactagagcatcttccatagcttgaatatttccccaggaggatggcagtccttctctcttcccagacactgtcttcacggccagcatgaagatgggagaagctgagaggtgggggctgaatgtcttcttctggacagagccaagggctggatggaaagcagcaggtcttaaaaacaactatttgttttaaaatacataacgaaggatgtctttttatcacaaaagattcatgcaaaacagaaatatggaataagaagcaaatcccccttcatatgcctcccagactcctttccagactgtgacttccttcctgtgagtttcgtgttagattgaatcatacggaattgccaatattgaagaagttttgatttacaaaaatgcaatttcatatggttcgacctgacacgtgtgtgtgtgtatatatttaacagaaatgctatacattctatgtgttattctgagacttgctttccataacagtatgtacaggtctaccttttgttttctaatgactggcatgaggtctgataaattattttatagccctagttgaaggaattaagattatttcttgttttgttttgtttttgtttttgttcttgttttgagacagagttcactctgtcacccaggctggagtgcagtggtacaatctcagctcactgcaaccttcgctcccgggttcaagcgattcttgcacctcagccacctgagtagctgggattacaggtgcggccataccacctggctaatttttgtatttttgtagagacggggtttcgccatgttgcctggctggtctcaaactcttgacctcacgtgatccactcatcttggcctccaaagtgctggattgtaacctccactttcaccatctcattctatgccctatacccttgtccctagttcatcttgtttgtgtattttttttcccttgagcatgttagctaaaggttggtatattttattagcaatgttaatattttgttttgtgctcccttttattaatttctaattttatctttttaatgctttccttctactttatgaattttttctttttctgtatttttaagttgaaattttagtcatttattcctatcctgtattaacttctaatttatgcatttcagaatgctacatgttactttatttacataacatatctttcatttctaaaaagatagtaattttcatctttttctgatcagtgagtggtccttcaaactggcccctcgtccttttgacatatcttccatcattcctgagcatttccatagcttctagtataaaaaaagtttcaggctcatcttgttttttccttgatcagccttgtaatcttccatttatccaaggggccctgacttctctgagtgggagagagtttggatgctctctctggatgctcattgctactgggatgatgctgttcccagccccttcagtgggctgagctgggaatatgtaaggatatataacaacccctttcagtgggctgagcgggaaatattaggatatatatatacatatccaaatatatatatgtctgtatcaatacaccgttacctttctatttgtctgtctgtctacttctccatgtgttgaaaaacatgagttcaccctatacactctacttccagtccaacaccatggggttcattctggctttcttccttccatatttgtatcttatcctaacagtgacaaagttgattcttctgacccctccagattgctcctccttgacatgcaagccccattttggcttctctgcttacccttacctgtgttgtctcgtgtcgtctctccagcagcctcttgaatctgccccactctggttatgtacttacatgtgcccttgagccacttctgtttgcctatttaatggctttttagagaaggaagaagaaaaaaaaaggtaggaaggtagacaggcaataaatatttttaaagggaagggtccatttacatttatgtaattattgaaatgattggatttaattgaatctatccatttattttttatttttttatccatccatttacaaaatggattacatatcaatttttctttttcttttcttttgttcttatgttcttttttctttcttattcttttcctgtcttatttttggattaactgagcaatgctagtattccattttatctcctctgttggctttttaaggtatacactttttaattgattttaaattgaaatccttaatttgaaaagtctggtttgcactaatattatacacttgaatttttacgaacatgcttgcactacaagaatgactaaaggatgtcttccgggctaaagggaaatcataccagatggaaagtcagagcttcaggaaggaatgtagaacatctataaaaagtgattctcttaagttttactttgtctgaaaatgtatttattttacttcatattaaaataatttttctgctgtggaattctaggttggcactttttactttcagcactctgaaaatgtcattcattgttttcttgacttctaatgtttcagataagaaattaactgtcattcttaatgttttctcctgaatgtaatggggttttcttctctggctgatttaagatttttctattaatcttgattttcagcagtttgattatgatatacctaagtaagggttttttaattattattttgatgtatcccctttgtgattcactgagcttcttggatctgtgggttaatgtcttccatcattttggaaaattcttagccattatttcttcaaatatttatttttccctattccctctttctttcctctggacttcagttacacatctgctgttgtcccataggactttgattttctatcttttttttttttctctctctccctgcttcagttggacaagttcattttttgttttgtttgttatgttttgtttttttgagacagagtcttgctctgttgcccaggctggagtgcagtgcatgatctcggctcactccaacctccacctgctgggctcaagcgcttctcctgcctcacctcctgagttgctgggactacaggcaagcgccaccacatctggctaattttttgtgttttagtagagatggggtttcaccatgttaggcaggctggtcttgaactcctgacctcagggatccgcctgcctcagcctcccaaagtgctgggattacaggcatgagtcactgtgcccgacttcagatggacaatttctatcacacctctttttattcatgtttctgctgtagacagttgctattaagtccatctaacaaattcattttggatattatattttttctatttctagaattccatttcattctcttatactttcttatgtctctgctgaaatttttcatattttaaccttttgtccatctcttcctctgactttatatcatctttataattattataaagctcctattgctaattcatctcagagtctgcttttatttactattttactgccatttcctgcttcttaaatgctatttaattttgtttgaatgctgtacgttgtgtttaaaagtacggtgttgactaagtggctaatttttaaaccttttacttttgagataattgtagattcacatgcagttgtaaataaatagctaatgtttacctgcagaaaaggcttgcccttctatcaggaagtgcggggaggtggtggtttttttttgttttgttttttttttttttttacttttatcatttaattttatttttaaaaatgtatatagtaaaaaagctgggttgcggagatgtcggtcagtggattaaaattttggttagggtacaggaacatattcaagagatttattgtacaacatggtgatgtagtttataacagtgtattgtattcgtcaaaattgccaagagattttaggtgttctcacacaaaagataagtatgtgaagtaatgcataagttaattagctcaatttagtcattccacatatatacatatttcaaaacatgttgtataggataaatatgtgcaatttttattgtcaattaaataagtaacaaaataagtaaaaaaaagtctagaagcctatataacagcatactaaagtgtaactctggtgtaactagggttggtttttactttcttcattttgtcttttctaatttttgtatagtaacttttatcactgggcttaacaggaatctaaaaaatgtatttttagcattgttatgttatatccacaacatgatctatatattttgtcagggaggtttattttttgctcagaactagtttgttcttgaaatatgtactttattcttttaattagggcttaaaatgtaaaatatttctaaagaggactattttgggactctacagtgtacctctttaatgagaaccccacagtttaggcctattaaggcataattcctttattttactaaagaattaaaataataagatttgataattttctttcttttttttttttattgatcattcttgggtgtttctcgcgagggggatttggcagggtcataggacaatagtggagggaaggtcagcagataaacaaggaacaaaggtctctggttttcctaggcagaggaccctgcggccttccgcagtgtttgtgccctgggtacttgagattagggagtggtgatgactcttaacgagcatgctgccttcaagatctgtttaacaaagcacatcttgcaccgcccttaatccatttaaccctgagtggacacgcacatgtttcagagagcacagggttgggggtaaggtcatagatcaacaggatcccaagcagaagaatttttcttagtacagaacaaaatgaaaagtctcccatgtctacttctttctcacagacacagcaaccatccgatttctcaatcttttccccacctttcccccttttctatccacaaaaccgccatcgtcatcatggcccgttctcaatgagctgttgggtacacctcccgatggggtggtggccgggcagaggggctcctcacttcccagaaggggcggccgggcagagcaccccccacctccctcccagacggggcggctggccgggtttttttttgtttaatcagggttggatcagtactagttagttttagttcaccagtagttgcagtgtcttgggatcaggtcagcaggatcaggcccctccctccatcaagtctttgggacctaaccactgagattacaagctctttctctgttttccagctcttcccccacttccacatcactgcttccatagtagtcactggagacatttggtgggtagggaggactagctctatattggagactcttccagattcagtcctccataccagcccaaatgtagttgtttttcttttctagcaaattttatctgccgtagagtcttacttcttcatgtctcccatgctgcaggtatgaatcagcacttaagggctatctcattctggaatttattttatttagacttcttgaatttacaattttttgatagcttaagcaaaaatatgatgctctggttgttgttgtttattccattctgtcattgttacagcaaaatgtgttctttcttgaccatcatcatcttagctggaagtggaactatatgtcttttatagattaaggtttattattattttactatttatttttatttatttattctaaaatggagttcacttgctctgtggcccaggctggagtgcaatggtgcattctcggctcactgcaaccctgcctcctgggtttaagcaattctcctacctcagcctcctgagtagctgggattacagtgcccaccaccacacctggctaagttttgtatttttagtagagacggggtttcaccatatggccaggctggtctcgaactcctgacctcaggtggtcttcctgcctcggcctcccaaatgttgggattacaggtatgagccactgtgcccagcctattatatttttttggagacaaatctggctttgtcaggcaggaatacacccaggctggagtacagtggtgtgatcacggctcttgcagccttgaattcctgggctcaagcaatcctcccacttcaacctcccgagtagctggaccacaggcatgcatcaccgtttccagctaatttttgtattttttgtagggacagaattttgttgtccaggttggtctcaaattcctgagctcaagcaatcctcctcctgccttggctactgaagtgctaggattagtaggcataagccactatgctcagtcagtttattgtgaaaatatcatgtatacagtagagtatatgtatcttacagcaagttataaaacatattaatcaacatctgatgatcagcactcgggttaagaaatagaacatcagccaggcacagtcacttaacctgtaatcccagcactttgggaggccgatacaggcggatcgcttgaggtcaggagttaagaccagcttggccaacatggtgaaaccccgtctctactgaaaacacaaaattagccagcatggtggcggacgcttatagcctactcaggaggctgaggcgggagaatcacttgaaccaggaggcggaggttgcagtgagccaagatcaccccattgcactccagcctgggagacaagcgagacttcatctcaaaaacaacaacaacaacaacaacaacaaaaagaagaaatagacactagaaccttggagtcttgctgtgctcctcttccactgtatcctcatcttcccctcaccctgcagagatcatttctatccagatttttgtattataatttccctggaattctttatgttttgccagctgtgtatgcattcctttaaatacattgtggctttttgccctttctgaattcatgatacatggaattatactacatgcggtgtgatttgctgctttagatcaacgtcagtttatgaattcatccatgttaatgtgcatagatagctattagctgttaattttcattgactgtgatattccatcacatgattatacaaccatttatccatttgctatggcctgactggtctccccaaattcacatgttaaaaacttaatccccaatgtgacagtgttgggagatggcctgatggaaggtgtttaggtcatgagggctcttgtgtattaatgccactataaaagtgtttcaggagtgagttcaccattttctgcttttcagccatgtgaggacatagcattctgggattctgctaaacattctacaatatacgggacgatccctcacaaaaagaattatccaaccaaaataagcagggttttattctggttggaagaggaatcaagcttttttctgtgatgagagagctactttccatgtttgtctccatgcctgctgtgggagctcagtgtcatttcaagtcctcttcactcagtccccccatgcaccctccccagctagtagcccactttcactaatgacacttctttactttagcttggggacaaacactgctgctgcttctgctgctgagtgtaaggagtggagggaagggtcttgagacccctgctgtcatgaagtcagttgtgtactctcagcgcagtttatgagggttcttattttcccatatccccaccaacacttaacagcaacaaccttaaatctgttgccagtctgatgggtgcaaactggtatctcagtgttagtttaatttgtgtttcttaattaacgatgattttgttttgttttgttttgagatggagtttcgctctttttcccaggctggagtgcaatggcgcgatctcggctcactgcaacctccacctcccggttcagtgattctcctgcctcagcctcctgaataactgggattacaggcgcacaccaccatgccagctaattttgtatttttagtagagatgggatttcaccatgttggccaggctgatctcaactcctgacctcaggtgatacacccgtctcggtctcccaaagtgctgggattacaggcggagccaccgtgcctggccaattaataatgattttgaacagctctttgtaactctggttttttctctgaattggctatgtacattctttcccatttttctatttgatttcctatctttccttattgatttgtaggattttattgtatactttgaatattaggtttttgacagtttttttgttgcagatatctctcatttatctgttgcttatttatagtgtcagcaatttaacagaatttgatgaaattcatcaatttttcatcttccattttatgcttttgagatattgtttaaggatttccccccactccagtatcacagaagtactgttttatgtttctcctgttgatgttaaattttaccttccacatttaggactttgatccatctgaagtctttgcgaatgatgtaactgggatccaatttgattttttccacatgttgatccagttttccaaacactatttactaatggtctgttttaccccattacttgtagtgccccctttatcatttatccagtccctatattacatgggtctttctctgtactccctttcattttttttttcctttttttggagacagggctcactttgccgcacaggctggagtgcagcggcgcgatctcagctcactgcaacctccactcctgggttcctcccacctcagcatcccgagtagctaggactacagacaacgtgctacatgcctggctaatttttaaatagtttttatagaaacagggtcttgccatttttcccaggtggtctcaaagtcctgggctcaagcaatctacctgccttggcctcccaaagtgctgggatacaggcatgaaccatggcacctgacctgcactcctgtttctacttcatgggtttattgtcttgttcttggggcagaaaaactgttgtattattgtggctttgtagtatgtctgtattgttggctagggctgccataagaatgtgccacagaatgggtggcttaagcaacagaaattattttctcacagttctggaggctaaaagtctgcgatcaaggtgtcggcagggttaatttttcttaggcctctttccttagcttgtagatggtcaccttcttcctgtgtctccacatggctcctcctgtgtgtccctgtgtcttcattttctcttctcataaggacatcagtcatactgattagggcccacccctaatgactttatttttaacttaattacctctttaaagaggtaaatctgtctttatcttcaaatacactcacattctgagatactggggtttaggacttccactataaatttagggtagacacacttcagcccataataatgttttaatatgtagtatagcattatcccctccttgcttttctttttaaaatattgtctgagctgtttataggtcttcattttccacaaatattttataagaaattggtctagttccttaaaagagtccagctggaattttatttaggttgaataggatgtatacattaattggaaaagattgacatatttataatgttattcatattcattcaagaccatggaatatcttttaatttatttagatattcttttttgtctttaacaacaatttcaactttttcttaatagagacttttgaattctttgttaaggtatcccttacatgtaagtctaccttacatttctggttgctgttgtgaaagttaatttatatatttctattgtatttgatagttgattattattagaaatgccattgattattataagttgatttgtatctggcaaacttattaaactcttgttagttttattagtttgtttattctttatttttccaaatagatggactattgtctgcaaatgacagttttcttttcctttatttcaatcttatatattttagttgtttttgttatcttatggcattgactggtagatctaatactgtttaaacagtggactggatactgtgaatctttgttttgtttgtagttgtattagttatctttgccatgtaacaaattatctcaaaatttagcagcttaaaacagtaataaatgtttatttcttatacagtttctttgggtcaagaatttggtttcagcatggttgggtgattctgattaggatatctcctgaggttgcagtcacaatgtcatctggggctgcagtcatctgaaggctgactgacgctggaggatctgcctccaggctggctcactcatgtggctgttggcaagaggctcagtctcctgccatgtagacctctccctagggctgcttgagtgtcttcaggatgtggacttagctttccccaaagtgagtgatccaagagagcatgatctgtgtcagagcgagatgaagcctcaatgtcttttatcatctagtcttggacttcatacttcatcatttacacaaggtctattgggtatacaagtcggccctattgaatgtgaggggggactacttgaaggtgtgatatcaggagggagggattatgtggaggccattttggaatctggctgacacaccagtctgaagaaagtgcttctaaatctctgttaagaatgacatttgttataagttgtggatatatgcttttatcatttaaggaagttcccttctcctgttttgttgagatatttaaaacaaaaaagtattaaagacagttaaggtgggtggggcagcaaccttacaagcaaatgaatgtgacagcctgcacacacagagccagctttggatctctcccgtagtcctgtgtgataagtgggaggattggcccatcatgagccctctgtagctgaagaactctgcaaaaacagccctttctgcctgggagaactggcatagctattttacttttttcttttcccttgcagtgtccaagacaaaattttggccacaggaggagcatctcacaatagagaaatcttacaggtaagcgttagtaggggccttacaccatggcctctcccatatctgttatgtctaagagccagagactggatagaaggacagcctccattcccactcctgcaggaatggggagctcttagctcacactccaggagcagctctgttgccttacagctcacactgtgagtgggatctgtctcacatgcaggtgattctatggctgtgtacaatccactctctgataccagcactgtcctctggagtcacatggaagtgcctgttcttccacatggcaaaccttctcacatctagtgccagtgttcttgtcttctcaaggcctctgccttccaatgtaaccatcgctgattctccaaccagtcctcttataaacagttgccagactgttactgtccttctggtccttcattatgccagaaacatatgaccaaagtagaatcaacctgcagatgtctgacactcagactgtcacctgtggggctgtcagagctgttatggagacattgtgcatttttgggtgtagcctggggctgccttaactgttagagaactgtattagctgtttgcttgtgactacctatcttaggtaagatttttctagaaacaggcctgaaatgggaattcttctataagcagtttgttgagagagtactcccaggaagaaggagtgagggactcagggcagtgcagaggaagaaggataagtgaggatatggtcttgtctgagtctacttcagctccatcctggtggggaggtggggctctggaacatgaattataccacgagctgattttaccttgggacaagggggccaacaggccaccctggggaggttaaatctctgtgagcggtggcctatgctcagccaaggtcagctttcttgaggaggtagtgctgcaagcattagtagccagtactcacagcagctggggcaggatgcacaatggtccagtgagggggtctgggtcggcatcagtggcatctactacaatatctctggtcaactaagacctcccccagttctttccatgtgaactcctcttagtacaggtcctccatttgaaatgtatgcaatttattgtgaacctaaatgggaaacttcaccattatccccatgaaacatgctcttgttagcttggtttgtttgggcttgttaatgttagtctaatacccagctgtctccagccctaggtcaggccatttgctaaacatacttcctaaatcttctgccttgtctttggtgaaatggctaaaagtacagggacagcctggggagctgtggctctccactacggacctcccccagctcatcctactctattatcaccagggtagcatgaccaagcatactcctcttaaggcagtcgaggtggatggaaggggtcagaagacatatgagggagagagcctggaaagtgcatcccacaatgtcgtgttccctctgaggaatggctcaccacagtagaacctctgtgtccttttcaggtgcttcagatgtgtttgatgccccggtgtatgttatagacactgccaactcggcctgtgtgggtctgcataccgagcttttcatggtaggttgatggagggagacagctatctctggaagtggcaggacatggggtgggctgaggagggtggaaaggggagagtgaggtgtacccagtctttgggacattggagtcttggggacttcagcttcatttttctagctcccagcaggtgagaacaacccatactctctgttcctttattctttgcttaaagtggagaaaaagaggctgggtccaactgaatgaggtctggtcagagttaaggtcagcacagggacatgggaaaagaacacaggcatggttgagagcacgtgggcatgagtctggacagctagagggcaggagaggtggacaagtccagagccgtcttttcagcaagaacagaagttgaaacaaaggggaaggcttcaggccaagcagtccaggaccctggacagcaccatggagccctgttgccctgttggaggcctcgtaaaactctgggtattaagggaagctccccgatctaggcgagttctggcaggagcagcactacctgcaagggcagtccttcaagttggatcaatttgctctgtctcctgcttgctcaggagctcctgtagcagcccaggtggttctattcttttcatattcttaacatttaacatactatttcagcttatatttttcttttctttttttttttttttgagacggagtcttgctctgcaccaggttggagtgcagtggtgcaatcttggttcaatgcaagctctgcctcccgggttacaccattctcctgcctcagcctcccgagtaggtgggactacaggtgcctgccaccatgccagctaattttttgtatttttagtagaggaggggtttcactgtgttagccaggatggttcgatctcctgactttgtgatctgcccaccttggcctcccaaagtactgggattacagggtgagccaccgcgcccggcctaagcttatgttttctatcaacgttgagaattaatcaggaacatatccttctctcaataattaaccttggccgggtgtggtgctcatgcctgtaattcagcattttgggaggccgaggcgggtggatcacaaggtcaggagttcgagaccagcctggcaatatggtgaaaccccatctctactaaaaatacaaaaattagctgggcatagtggcaccacctgtagtcccagctactcgggaggctgaggcaggagaatcgcttgaacccgggaggagaggttgcagtgagccgagattgcgccattgcactccagcctgggtgacaaagtgagatccatctcaaaaaacaaaaaaaaataattaacctcttactcatttattctctccccacccatctacctcaccctgcctcatgccatatcctatatcaagatcacttgggaatttatttcagattcttatattaagtacatttaatattatattggcttttattcacacttacctatggtctgcctgcctgcctgcctgcctgcctgcctgcctgccttccttccttccttcctctgttgttactttgtctttttttttttttaacttcctgacatttcggtcgggtgcagtagctacgcctgtaatcccagcactttgggaggccaaggtaggcggattatgaggtcaggagatgagatcatcctggcctagagggtgaaaccccgtctctactaaaatacaaaaaaaaaaagaaatagctgggcatggtggcgcgcgcctgtagtcccagctactcgggaggctgaggcagggaatagcttgaacttgggaggcggaggttgcagtgagctgttgcagtgagccgagatccaccactgcactccagcctggcaacagagcaagactccatctcaaaacaaaaaacaaaaaaaacaaacttcttcttctttctcctttatttctatgctgaggttttgttttgttttgttaagacaaggtctctgttgtccagcctggagtgcagtggcgtagtcatggctcactgcacctcgacctcctagactcaggtgatcttcccacccccacctcagcctcccggatagctggactacaggcacacaccaccacacctggctaatttttgtagatatagggtttcgccatgtgcccaggctgaactcgaactcctgggctcaagtgatcccacccacttcaccctcccaagtactaggattacaggcatgaatcctagtgctaggattaccgcacccaggctgtatggtgttttgttggaatatacaacctaaataaatattttaagagagaaattcaataggtgatgttttgaggcctgacatgtccaacaaggcctttgtttcatcctcccaaatactggctgggaaaagactctatgttcaaaatacttttcctgagaactgtgaagatactcttccataatctctggccttcagggttgctgatgagaagtatggggtctgcttcataattcttttgtggagtgggaaaggagtttccctttagggacttcactgccatcctgcactgtgttttgttttatctttttccctttctgtgcttgccaaagggtacctgggccactgccctgctctgccctcaaaaccaaagcccgagccaaatcttagctcaccagtccctacccagagggatactaacccttcatttggagatatcttctccccatctgggtctggggatgactgtcttgtgtagccatctgcgagtatgagtggagatggaaccagagtcttttgattagtttctttgctgtccacccaccaccattccagtccctcatccattctgctctgagctgggattttctagcatttggtaggaaaactggtcctcacatcttcagagggcccttcttcactcctggtggtggtggtgttgtatatctgacgctactacctaccttccctagaaattgctcattgtttcttgcccacaatggcaaccttccccctgctactcatttgcttggtgagtaattattgagtgccccctgatgccagatggtgtgctaggcaccatggttatagtggtgacccggagagacacagtatcggcctcgtggactttacagctcagcaaaagagggatcttaaaccaataatcactgaaattatgggcacaagttgggaaaagtgctctgaggaaaagcagatggtgctgagcgctaagggggcctcctgagcaagtgatggtcttaggtgcatcttagctgaggagaagggaacaggctgtgaagagtggaaagaacattccatacagtgaaaaggctctgaggcagaatgagtggaagaagaccaggctgtccagaatgtggtgaacgaggggagagaggaggggcaggcagaccttccccatcatatgtcgaggttacccgacctattccatgaaaggcacaaccacaaagagaagacaagctgggtcctgctggagacaagcctgcacttgccatttttttgttttgtttttaattttattgaggtacaatctatatgacataaaaatcatccattttaagtgtccaattattgatttttcataaatgtactgaattgtgcaaccatcactataatccagttttagaacgtttgccaccccagtgagatccttcgtggtgtttttggttaacgtcttcacttgcaacagcactaatgtgaagtgacctttcccttctaggtcttgcaggtggaacagatgtgccctttcagaggttgtgaagttagctccaaatcccagactagctgctaccccaagcccgggagctctcaggtgagagaccatcagaatttgtttgtagcatttgcattatgaaagcccgctaggttttttcccccaccaaaaggtcacctacattgaacgtgatgtgctcaactaaaggagaattctgctttattgaaattatcaagaaaatggagctaaagggccatgttgtcagctgcagtcacagatactgctgattttacagccagggtcagatggattgctgggcatatttgtatgcttcttatgcctcacggtgggcccttccatgtcactgggctataaaagctactgaaagatccatcactgaaattcaagacatgctgggtttctagcactgaaatctcaagtctagaccaagatagctgtgcagtcacccaggccaggaaatccctgtgaaggcagacctcacttgtgcaggttgggtccctcagaaagcagagtctgagatgtcaactaagatatatgaggtttagggagtcgggggagttgctcttggaatccacaactgcagaaaggaaagggagtagacagattggacagagggagaaggtgagcagcaatgcaatttctggagcctaagctattcctacgaaagctccgaagctgagatgacctttagagttttacccagttggtctaaggggctgggctttataccccatgtcaatcagtcatcacatgtgggccaccccaggatgcggtgaggcactctttatagctaaagcagtctccaaagtgggctgtcagctgagggctctctgccaacacactcccatcagttgggagaataagttcttcattcccgaggtgaatctggatggcacacacagcatccgccacaccactgcacctatttacagaagggtctggcagcccagcagcagggtgggtgcatcttgtaaggaactgtgaagggtctgagatttacctgacttgcaagctaaaagtgagcctgccaccattttgtagcggcaggcagaagacacgggactcctggatcagaacaaagggctttattatgatgaaccatgatgaactcatggttcatcaggaagcatgagctcatgcttgcctcattttcccttggcccccaaattccacagggtgatgcaaagtgggccaggtggatactggcacataatagtctgtgatacaactaaatgatcccgagcatagaaaatcccaaccttgtaaagaaactgcgagcaaacctgtctaaactttgccaccaaaggagacttatcctttttattcttgtcagcaaacagataaacattctctccagtgtctctgccctgagagagacactatctttatgtctctatactttacaaacatccttgaaaagatggtctgaacgaaagctgtcataagacatgtagaaacactatggagaattgtctcccagcatatcttgaagcaagagctcatgctgtctagagcagacaaaccacacacataggtgtgcccaagcactgtaatttttctgtttgtgagaggctatttttctctcatgttcgagaggccactcgatcactggaaagattcaatgtcgagataaaggacatttaagttctgattcttattctgctttccttcaccatgagaccttaagcagcactccttgtctccagacctctgtttgtttatcttgaagtgggcacaccatctgtcctgcctccctttaacttgctaattgtgaggcttaaaagaatccttgaccaaaatggctttataatctaataggaaatctgggggtagaattggttcgtagttcaacatgagaactctggtcatgttccctgcaattccttaggtcagcagtggacatgggaacataatgtgagccacatatgtcatttaaaatattcggttgcctcattttttaagtaaaagtaaaaataaaaataaatgattaaaattaattttaatacattttatttaatcactatatctgaaatattgtcatgtcaacgtgataaattagaagttactaatgtggggccgatgcagtggctcacacctgtaatcccagcactttgggaagccaaggtgggcagattgctgagcccaggagttcgagaccagcctgggcagcatggcaaaaaccgtgtctctacaaaaattaaaaaattagctgggtgggtatgtgcctgtaatcccagctactcgggaggctgagggggaggattacttgagcccagaaggtggaggttgcagtaagccaagatcacaccactgcctccagcctgggcgacagagaccctgtctcaaaaaaaaaaaaaaaaaagttactaatatatattttacatttccttttttgcatgaagcttttgaaatttggtgtgcatttaacactttagttctgggcatgcttcaagtatgcaaaggtatacatggcttgcagctactgtattggtattgcagctctggatgtgctccacatggtgacaggacagctatagctgccccaaacatatgtcttcacagctgtattcgaaggcagggatcagaaggtgacattgggcagagagtcttcctcacacacctcttgctcatcagggagaaaaatactggcctatccctcccctatccccacacgcccaacaggctaccacttggtcatatggtcaattctggttgtaggaaaggctaggtagggtctggctctttcattctatctagaaggaggccagcaaggaggaagataattgggaaagttttagggcagcacagcagcgtctgcctcatctagagtacggagtggccaatctctgagctgtatgtgcctcatcactctccctggcctgcccatggccgaaatcactgacactcatggaaccctttaccattggatccaaatgtaacctcaaaagcccacccaacagcagttgcaagcagtgacagtctatatgattgtcagcgtatgtgacttatatgcagactgaattgtggactagagttaaacttcttgagagcagggccacatccttcattctctctgtggcactacagcactgcttgtgctcaaggggaaactcaaagcagtaagaatgttttctcccttactcagctgaacgttgcagtttctccatgaggagaaatcaaagccccttagctttgttcttgactccttaatgtccaatacaggctaggacaaccttaggcccctcgcctgtgggcctcttataaagggtcacctgttatcttttgctttattttactcatggggtctattcccaagtcttcacaaacacataattcacagggtagaaccagaacatcagctgtgtcaccctcatttgaagagcaaaggaatttatctccctaagcccttctaggcagcacagacttatcgtggaccagaagccagcaggctccttctctctggctctgacaccctgtgtaactgtccctgagcctctcagacagagctgctccagctgcaccaagagtaggccccagttgcataatcagttgtaaaatacttggcttccagctgggcgtggtgactcactcctgtaatcccagcactttcggggctgaggcggatggatcacatgaggtcaggagttagagaccagcctggccaacatggtaaaccccatctctactaaaaaagaaaaaaacacaaaaattagctgggtgtggtggtgcaacctgtagtcccagctacttgagaggttcaggcacgagaatcacttgaaaccaggaggtgaagcttcagttaatcaagattgcaccactgcacctccagcctgggtaacagagtgagacctgtctcaaaaaataaaaaaacaaaacttaactttggagcaaattaaaccaaattaagaggaatggggttggcatgagctcctacttgtgtttacttgcgagtcgcaggaaaatccggtccttggtcttgttgtttgtctgtaagacagcgtgtgcttgcctgaagtgcatctgcattctcaggtaagatggacagccacagggaaaactgcttagggggataaaagaagagtaaaatgtggggttgtgtttctttttggtcttttttctctgttgggctttttgtttatttatttggcttataatgcagcacattgtatatataattttgtagcttctttaaaatttctacatacaaaataaatatttcattcttaaaaatgtatgtgcataccatttttaatgactgtatatattctatctgagtagaccaggcacggtggctcatacctataatcccagcactttgggggctgaggcgggaggatcacttgaggccaggagctggagaccagcctgggcaaacatgaacctcatctctttaaaaaaaaaaaaaaaaaaaaaaagctggcagccaagatggccaaatggaacagctccggtctacagctcccagcatgagcaacgcagaagatgggtgatttctgcttttccatctgaggtactgggttcatctcactagggagtgccagacagtgggcacaggaagtgggtgcagcgcaccgtgcgcaagccgaagcagggcgaggcattgcctcactcgagagtgcaaggggtcagggagttccctttcctagtcaaagaaaggggtgacagatggcacctgaaaatcgggtcactctcaccctaatactgcgcttttccgacaggcttaaaaaacggcgaccaggagattatatcccgcacatggctcagagggtcctacgcccacggagtcttgctgttgctagcacagcagtctgagatcaaactgcaaggcggcagccaggctgggggaggggccctgccattgcccaggcttgcttaggtaaacaaagcagccaggaggctcgaactgggtgagcccaccacagctcaaggaggcctgcctgcctctgtaggctccacctctgggggcaggcacagacaaacaaaaagacagcagtaacctctgcagtgttaaatatccctgtctgacagtttgaagagagcagtggttctcccagcacacctctggagatctgagaatgggcagactgctcctcaagtgggtccctgacccctgacccccgagcagcctacctgggaggcaccccccgtaggggcagattgacagcccacacggccgggtactcctctgagacaaaacttccagagaatgatcagacagcagcattcgtggttcacgaaaatctgctgttctgcagccaccactgtgatacccaggcaaacagggtctggagtggaccgctagcaaactccaacagacctgcagtgagggtcctgtctgttagaaggaaaactaacaaacagaaagacatccgcaccaaaaaccatctgtacatcaccatcatcagagaccaaaagtagataaaaccacaaagatggggaaaaacagagcagaaaaactggaaactctaaaaagcagagcgcctctcctcctccaaaggaagcagttcctcaccagcaacggaacaaagctggatggagaatgactttgacgagttgagaaaggcttcagatgatcaaactactctgagctacaggaggaaattcaaaccaaaggcaaaaagttaaaaactttgaaaaaaatttagatgaatgtataactagaataaccaatacagagagtgcttaaaggagctgatggagctgaaagccaaggctcgagaactatgtgaagaatgcgaagcctcaggagccgatgcgatcagctggaagaaagggtatcagtgatggaagatgaatgaatgaaatgaagtgagaagggaagtttagagaaaaaagaataaaaagaaacaagcaagcctccaggaaatatgggactatgtgaaaagaccaaatctacgtctgattggtgtacctaaagtgacggggagaatggaaccaagttggaaaacactctgcaggatattatccaggagacttccccaatctagcaaggcaggccaacattcagattcaggaaatacagagaacgccaaaagatactcctcgagaagagcaactccaagacacataattgtcagattcaccaaagttaaatgaaggaaaaaatgttaagggcagccagagagaaaggtcgggttacccacaaagggagcccatcagactaacagcggatctctcggcagaaactctacaagccagaagagagtggggccaatattcaacattcttaaagaaaagaattttcaacccagaatttcatatccagccaactaagcttcataagtgaagaagaaataaaatactttacagacaagcaaatgctgagaattttgtcaccaccaggcctgccctaaaagagctcctgaaggaagcactaaacatggaaggaacaacctgtaccagccactgcaaaatcatgccaaattgtaaagaccatcgaggctagaagaaactgcatcaactaacaagcaaaataaccagctaacatcataatgacaggatcaattcacacataacaatatcaactttaaatgtaaatggactaaatgctccaattaaaagaacagactggcaaattggataaagagtcaagactcatcagtgtgctgtattcaggaaaccatctcatgtgcagagacacacataggctcaaaataaaaggatggaggaagatctaccaacaaatggaaaacaaaaaaaggcaggggttgcaatcctagtctctgataaaacagactttaaccaacaaagatcaaaagagacaaagaaggccattacataatggtaaagggatcagttaacaagaagagctaactatcctaaatatatatgcacccaatacaggagcacccagattctaaagcaagtcctgagtgacctacaaagagacttagactcccacacaataataatgggaactttaacaccccactgtcaacattagacagaacaacgagacagaaagttaacaaggatcccagaaattgaactcagctctgcaccaagcggacctaatagacatctacagaactctcaccccaaatcaacagaatatacatttttttcagcaccacaccacacctattccaaaattaccacatacttggaagtaaagctctcctcagcaaacgtaaaagaacggaaattataacaactgtctctcagaccacagtgcaatcaaactagaactcaggattaagaaactcactcaaaccgctcagctgcatggaaactgaacaacctgctcctgaatgactactgggtacataacaaatgaaggcagaaataaagatgttctttgaaaccaacaagaacaaagacacaacatacagaatctctgggacacattcaaagcagtgtgtagagggaaatttatagcactaaatgccacaagagaaagcaggaaagatccaaaattgacaccctaacatcacaattaaaagaactaaaaagcaagagcaaacacattcaaaagctagcagaaggcaagaaataactaaaatcagacagaactgaaggaaatacagacacaaaaaaacccttcaaaaaattaatgaattcaggagtggttttttgaaaggatcaacaaaattgatagaccactagcaagactaataaagaagaaagagagaagaatcaaatagacgcaataaaaaaaataaaggggatatcaccaccgagccccagaaatacaaactaccatcagagaatactgcaaacacctctacgcaaataaactagaaatctagaagaaatggataaattcctcgacacatacaccctcccaagactaaaccaggaaaagttgaatctctgaatagaccaataacaggctctgaaattgtggcaataaccaatagctaccaaccaaaaagagtccaggaccagatggattcacagccgaattctaccagaggtacaggaggaactggtaccattccttctgaaactattccaatcaatagaaaaagagggaatctccctaactcattttataaggccagcagcatcctgataccaaagccgggcagagacagaacaaaaaagagaattttagaccaatatccttgatgagcattgatgcaaaaaccctcaataaatactggcaaaccaaatccagcagcacatccaaaagcttatccaccatgatcaagtggcctcatccctgagatgcaaggctggttcaatatatgcaaatcaataaatgtaatccaaatataaacagaaccaaagacaaaaaccacatgattatctcaatagatgcagaaaaggccttgacaaaattcaacaatgcttcatgctaaaaactctcaataaattaggtattgatgggcatatctcaaaataataagagctatctatgacaaacccacagccaatatcatactgaatggcaaaaactagaagcattccccttgaaaactggcacaagacagggatgccctctctcacactcctattcaacatagtgttggaagttctggccagggcaattaggcaggagaaggaataaagggtactcagttaggaaaagaggaagtcaaattgtccctgtttgcagatgacatgttgtatatctagaaaaccccattttctcagcacaaaatctcctaaagctgataagcaactcagcaaagtctcaggatacaaaatcaatgtacaaaaatcacaagcattcttatacaccagaagagacagagagccaaatcatgagtgaactcccattcacaattgcttcaaagagaaaaaatacttaggaatccaacttacaagggacatgaaggacctcttcaaggagaactacaaccactgctcaatgaaataaaagaggttacaaacaaatggaagaacattccatgctcatgataggaggaatcaatatcacgaaaatggccatactgcccaaggtaatttatagattcatgccatccccatcaagctaccaatgactttcttcacagaattggaaaatgctactttaagttcatatggaaccaaaaaagagcccgcatcgccaagtcaatcctaagccaaaagaacaagctggaggcatcatgctacctgacttcaaactatactacaaggctacagtaatcaaaaagcatggtactggtaccaaaacagagatatagatcaatggaacagaacagagccctcagaataatgctgcatatctacaactatctgatctttgacaaacctgagaaaaacaagaaatgggaaaggattccctatttaataaatggtgctgggaaaactggctagccatgtgtagaagctgaaactggatcccttccttacaccttatacaaaaatcaattcaagatggattaaagcttaaatgttagacctaaaaccataaaaaccctagaggaaaacctaggcattaccattcggacataggcatgggcaaggacttcatgtctaaaacaccaaaagcaatggcaacagaagcaaaattgacaaatgggatctaattaaactaaagagcttctgcacagcaaacgaaactacatcagagcgaacaggtaacctacaaaatgggagaaaatttttgcaatctactcatctgcaaagggctaatatccagaatctacaatgaactcaaacaaatttacaagaaaaaaacaacccatcaaaaagtgggtgaaggacatgaacagacacttctcaaaagaagacatttatgcgccaaaagacatatgaaaaaatgctcatcatcactggccatcagagaaatgcaaatcaaaccacaatgagataccatctcacaccagttagaatggcaatcattaaaaagtcaggaaaaacaggtgctggagaggatgtggagaaataggaacacttttacacggttggtgggactgaaactagttcaaccattgtggaagtcagtgtggtgattcctcaaggatctagaactagaataccatttgacccagccatcccattactaggtatatacccaaaggactataaatcatgtgctataaagacacatgcagacatatgtttattgcggcactattcacaatagcaaagactggaaccaacccaaatgtctacaatgatagactagattaagaaaatgtggcacatatacccatggaatactatgcagccataaaaaaggatgatttcatgtcctttgtagggacatggtgaaattggaaatcatcattctctgtaaactatcgcaaggacaaaaaaccaaacaccactgttctcactcataggtgggaattgaacaatgagaacacatggacacaggaaggggaactcacactctggggactgttgtggggttgggggagaggggagggatagcattaggagataacctgatgctaaatgacgagttaatgagtgcagcacaccagcatggcacatgtatacattgtaactaacctgcacattgtgcacatgtaccctaaaacttaaagtataaaaaaaaaaactggcaaattttttgccagaactgcaatttactcgaacattttccttgccttagtacagtgcttttagtttttcaattataattaagtcttcttagataaaggatttaaaaaaaaaaaaaccctttcctattctacatgagaatttgacctttggttaactttctagctctgttttcttgagatctcataaaagtggactatcaacggttttactaggcaacattgcttatgtaaaatggcctttgcttgggaaactgcatctgaactgagaaaaccataactacctggtgagaatcttcctcagggcctccttgagtgcagtgactcctcctggtcctgcctcctacctactagttgttacaggagatacttttgtagggcatatgaggttttgaagccagggtcattctttgtctgtatgatgtggatctcaactcttttttttttttttcttttttttgagacagagtctgctctgtcacccaggctggagtgcagtggtgcaatcttggctcactgcaacccccggccccaggttcaagtgattctcctacctcagcctctcgagtagttgggattacaggcacctccaccacacccagctaatttttgtatttttagtagagacggggtttcaccaggttggtcggctggtctcaaactcctggcctcaggtgatccacccgccttggcctcccaaagtgctggattgcaggcatgagctaccatgcccggccagatctcaactgtttgtgcctgggctgtacctggttgggaggcaaagagaccctctcctggacagctgtgtgaactgctgtatggactctacatggtcttccattgagaggagcacctcctgccactgtgtttctccaggctgtcttccttggctcatggtggtcttataagtctgaatgtttagtggtatcaaagaagacccttgtggacttggcatcctacatttaggattatttccttaggagagcttcaccaaagtagaatactgggtcccatactatgggctccttaatacagatataaagtcaagtctatttcccaaaagttgtatcaccagctttcaccagctgtgcaatgaggcagccatttctaggtactctcacagaatttttttgaaattttgtagatttgatcataaaaattggtttcttgtcataatttcagttttaaaaaatcttaaactgtaggtttgagaactgctagcatttcctcttttgtgattgatgctttctttcgcccagaaaaaaagttaaattgcaagtaaacgggatttaaaaatttaaattgcaaagtgcaaccagatgtaagaggcattttccccctctgttctaaactgcttttctgcccttctaggtctacgaggcccttctcccccagtatgccaaactcgagcagagatcttgtctcagacccgggggcctccggagtgaacaggcatccctgttgcccctgcctgccagatttactgaccccatttgtcgacatggccccagacaggagggatccacttctctgtctgaacagctcttcctgcccctactgactccttggagtgtccaggaccatcttaaagcgccctcagcacatctgcatgaagatagataggcactcctgtccctgtgcccgtgtgcccagggcaggaaagcatctctcttttcctgtcttttatcccaggaggcaggacaacactgaactgggatatgtccaataaaaactatgacttttccccttgcagaggcagaattaaagctatctagggactcaaatcagcagaatgggggagacaaagcccggtctcaccccctaacctatcctatctctttctccaaccctgactgcccactcctccgcaaaccgtgacccatagcccccccaccccataccttgatctaccatccatcctcttccccaatccaaaccccacagtccttctctcccacaccctgccctccttgtttcagctgtctgaggtgcctcgcagggcctccttacttgccccatgctcaccctttccatgctgtccccattctctcctttcaccatctccctctccccctccttcatctctcctccctccccaaactcacttggcataattcacaacccccacccaaacaatgggcctggtggacgtgcttcctgtgccctccctttagctatgccccagatcactgagagggaccatctcccaagtggtgcagtttagaacttctctcccttttttccctcattccctctctcttcttgcagtccacttgctgaagaagttgtgtcatttctctgaagaatttccaaaattctggatttcttttttattttggagtatttcatcagctgaaaatgattcttactttgagttttcttcctatatttgtatagtgagttcctttttccttcctcttatccctcctgttttactttatacctctctattccttgctcaaattattgcaaaagccctatagaaagtcctctgtgatctgactcctgcagactcttccagatttttctgcccaagcctttactgagctcaggactccagctaaatcaaaatactcatgttctcacccagagtgaaaaatcctgcagataggtttaagacctagtggatcagagcagtagctactgggaagttaaaggaaggggcttagaaaatgaatgggaccaaaggcatcacttctgatggagatgaagcatcttgaaagtgagtggtgtcctttggaggcatggtggatgaaaggcgcaaaggaagcagaggttaaagataatggcccattagatacaacagcaagcccaagattccgaagaagacaacaactccccctagtaccacctagacattactttttaaagacattttacattattgtccgcagaaaaaggctgtcttggaccatgaaacagtaaactgtaactaaacacttcaacatgatttgaaaataaataattgtggatataaaagaacaccagagatcagaaattcaaaaactagaataaaaatgaaaaagctacaagcatatatgagaagagaactgactgaacttgggaataatttgaacaaaaagataaatcttcacagatatgaatactaaattatatcttaatgaaatagatatggtcacaagtacattaaggcacgtagaaggtaggagtaagaaaagctaagaaagcaaaacaaacaaagcaatattaaaggaagagccaaaaagacccagaaataaaatgaagataaagaagattgtcaaagaaaagatgatacaggtaagattggaactcatgaagacaaagataagacagtggcatagagttaatatttaaaattcaaatattaaaactcaaataaacccaaagaacttttggaaaacaaaagaaaaccttaaactttatcttgaaagggtctatctgttacttagaatattgaatcagaatgattagctctgagacatagcctaccaactatacttgaagccaaagaaaaagaactatgtaagcctctaggccaaaagacctagtctcttacaaggaaagacctggttggcctcaaacttctcaataaagcaagatagcaatggggcaacctttcaagaaactcaaagtatgaactgaggatttcatatttcaccaagctgtcctttaagttcaaggatataggaagaagttttaattacacaagagcccagggactattatactcacaattcttccttagaattctactaaaagacaagcttcatccaactagatgattggggaaactgagcaaaaggactggacatgaccattgaatatctttgtagatctgaggccaaatggaagggggataagggtggaagaaccgtattagtcccttctcacactggtataaagatagtaccagctgggaatggtggctcatgtctgtaatcccagcactttgggaggctgaggcaggaagtcacctgaggtcaggagctcgagaccagactggccaacatggtgaaaccccgtctttacaaaaatacaaaaattagctgggtatggtggtgcacgcctgtaatcccagctacttgggagctgaggcacgagaattgcttgaacccgggggcagagattgcagtgagccgagattgtgcacttcactccagcctgggcaacagtgagactctgtctcaaaaaaataataaagatagtcccaagactgggtaatttataaagaaaagaggtttaattgactcacagttccacatggcggggaggcctcaggaaacctacaatcgtggcaggaggtgaaggggaagaaaggaccttctcacatggtggcaagaaagagagagcatggacgcacaagagagcaagcagggaaaactgcttataaaaccatcagatctcgtgagaactctctatcatgagaacagcttgggggaaacacccccatgatccagtcacctctcaccaggtctcgccctcaacacctggggattacaatcaagatgagatttgggtggggacagaaagcctaatcacatgaaatagtatcaaactataatgctttgacaagacagaagtaacaaaacaaaaaagaagggagagaggaagaggaaaatcaaagaactccttgttgcttaggcaatatgtagaagtcaaatagtattatttaaagttgcaaaccaagtatatgaagtgtaagtaaggaaaaagggagatttagagcattaaaggtgtctatactattaatagtatagaatacatagtataattactagaataaaaatgtaaatcataatgctcaaagaagcaataataaagattacagtgaaaaacatgcagtaaatgtaccatctacagtaaatatattaagtccaagcatataagttaaatcagtacatgtgaaaggacttactattaaaaggaatatcagattggcttacaaaccaatgtcttattgtctgttatttatagagacacatctaaagtaagtgattcaggagaggctaaaaaaaaagagatgggcaaaaatgaccagacaagtaggaccacaaaaggcaaagattacagtatccatatctgaaaaggtagattcaggaaaaaatagacaagacaatgaaggatacattaaaatgctaaaagccacaattacaaggaggatatactatttatgagtgttagagcttcagttatctggtttgtcaactttagtgatattctttggctcctgcctatcccctgtacaacaaagagctctttctactttccctttctctctccctcctttttcattgtttccgttgtgttacttctgccttgtcaaagcaataacatttgcataacaaattatgcaaggaaaaatgaatagaaacctagaaataacagaaaatttaaaacacctctctctcatccaagactgaagttaagaagacaaaaaatacatatacgatataagtgatctgagtaacagtatctataaagtagatctaatgaatatatgttgactttctaccttgataatagagaatattactctagggcaagcgtgatggcccacacctgtatcccagcactttgggaggctgaggcaggtggatcgcttgagctcagaagttcaagaccgcttgggcaacatggtgaaaccccatctctacaaaaattagccaggcatggtggcaggacctgtagtccctagaaatttatgactcttctaggaatcaagattgttgtcccacagcagctcacacacctggcatagcagtgattaaactcattgggagctatctcaaaaataattgtagtgaggcttttggtacatagagtagactccaatcagacacataaagcccacagtacatttaggaagctatactaatggcattaacctggattaaaagggactaaatgttaaaagacctggacccccaactttctatgggcaacaagcaggcatagttgctcaaaagacagtttctacccaggcatagtagctcatgcctgtaatcgcagcactttgagaggccaaggcgggcggacatgaagtcaggagttcaagaccagcctggtcaaaatagtgaaaccccatctctactaaaatacaaaaattagctgggcatggtggtgcatgcctgtagtcccagctacttgggaggcgaggcaggagaatcgcttgaacccgggaggttgaggttgcagcgagctgagatctcgccctgcactccagcttgggcaacagagtgagacttcatctcaaaaaaaaaaaaaaaaaagttatatatcaggccgggcgtggtgtctcatgtctgtaatcctagaactttaggaaaccgagtgggtggatcacctgaggtcaggagttcaagatcagcctggccaacatggtgaaacccgtctctactaataatacaaaaaaaattaggcaggcgtggtagcagacgcctgtaatcccgctactcaggaggctgagacaggagaatcacttgaacctgggaggtggaagttgcagtagctgagatggcagcactgtactccagcctgggtgacagagcaagactctgtctcaaaaaaaaaaaaaagatatatatatatgtatgtatgtatctatgtatcagaaaaaaacgcaagtcactttaagcatattttaaaatgcttactgacaaaaatcaaagagtttgataaaattcttgttaccatggctgtggagaaataggcattcgtatacatttctggtaggagtgcaatttgtgaaactcctaaagggggaaattgggcaacatcaacaaaactaaatatgagtatgactaaccattccaataggaatctgcacaaagacacaattccaacatacaagacaacatatgttaaggttattgtgaaattattgataacagcgaagtacttgggaaaaggcacatatacataatataggacagattgaatagattataatgcatccacacaataaaaaagaatgaggaagtctctatgtaccaatgatgggtaaattccataaacaaaggacagttctctacttagttcttttattccacttaacaaagttttatagtttttagtgtatgtcttacacatattttgttaattatttgatatttcaaaaatgttttgtgataaaatgtgtgacatttatcactttaacatgttttgtgataaaatgtatgacatttatcattttaaccatggaaaagtgttcatttttcaattgtttttgctagcatttaggaatattccatggtatgttgaattattcattgtgacatattaagatcaaattcagtagcattaggtatattaccaatattatgctaccatcaccccacacatttccaaaacctttttatcattctagactgaaactctactcactaaacaatactcctatttttctctccccagcccttgataaccgctatcctttctgtctctatggatttcctattctaggtttttcatataagtggtatcatacatgtttcctcttgtttctggcttatccacttcgtgtgatattttattaaattttgcatgtgtaaaatagttaatattttaatgtttaaatttaaaggttcattcacattgtagcaaggctgaataatattccgctgtgtttaataccacatcctgtttatccattcatccatcagtggacatttaagttgttttcacctttggtgattgtaaataatgctgctatgaacattgatgtacaaatatctgagtccgtgctttaattttttgggtatatacctagaagtggaattgctgaatcatatagtaattctgtttaatttttgaggacccaccacagttttccacagtagctgcaccattttacattccccagcagaatgcacagggatctagtttctctacatccttgtcaacacttgttatttttctttatattatatatatatatatatatatatatatatatatatatatatatatatatatataaaataccatcgttatggatgtgaagtgaaatttcattgtggtttttatttgtgttttcctaatgctagtgatgttaagcacttttcatgttcttatttgccgtttgtacacatttaattgtttgatgctgttggaaaagtgtttcattttttcaattgtttttgctagcatgtagagatagttatggtatatggaattatttgttgctaacatataaaaatcattttttttttagatggagcttgctctgtcgccaggctggaatgcagtggcaccatctcggctcactgcaatctctgctcctgggttcaagcaattctcctgccttagcctcccgagtaactgggattacaggcaccccaaccatgcccagctaatttttgtatttttagtagagacgggatttcaccatgttggcaggatggtctcaatcccccaaccttgtgatccacccgcctcagcctcccaaagtgctggattaacaggcgtgagccaccacgcccagccataagaatcaatttttgtttgattttgtgcttgcaactttattaaattcacttactagttatggtagtattttgtattagtaggatattagggtttctatccatcatgtcatgtcatctataaaaacaaagacagttttcttctcttaatctgtaagcattttatttcattttcttgcctttctgcaatggctagaatgtctagtaagtgttgaatagaagcagggagagcaataatccttgccttgttcctgatcttagcggacgcattttatcactaagagtgtgtgtgtgaatacgccctccatcgggctaagaaatttcctttcatttcttgctggaggtggggaggaatatttaaaaagaatgtgtaggtttgtcttgattttgttaaatgttttgcatgtatgtgttatggttttggtattatgtgttccttaaattttgattgaattcaccagtgaaaccatcttagttagatgttttctttgtggaacttttagtgaaaactcaatttacataaaaatatatggcccttcagattttgtacttctttttgtgcagtgttaataatacgtatctttcaaagaatatcccccttttttttttggtagagataggttttgccatgttgttggtagcaagccctaaccctgtcataaacaggccttaaataaacggccataaacaggatttctgcagcaatgggacatgctcatgatggctgtcatgcacactcgaaaagttgttggtttactggagcagggcaaggaacacctggccccgcccggagcaaaaactgctcaaaccac

SEQ ID NO: 2925 - DNA, 23046 bp, Homo sapiens
  misc_feature 20863, 20864, 20865, 20866, 20867, 20868, 20869, 20870, 20871,20872, 20873, 20874, 20875, 20876, 20877, 20878, 20879,20880, 20881, 20882, 20883, 20884, 20885, 20886, 20887,20888, 20889, 20890, 20891, 20892, 20893, 20894, 20895: n = A,T,C or G
  misc_feature 20896, 20897, 20898, 20899, 20900, 20901, 20902, 20903, 20904,20905, 20906, 20907, 20908, 20909, 20910, 20911, 20912,20913, 20914, 20915, 20916, 20917, 20918, 20919, 20920,20921, 20922, 20923, 20924, 20925, 20926, 20927, 20928: n = A,T,C or G
  misc_feature 20929, 20930, 20931, 20932, 20933, 20934, 20935, 20936, 20937,20938, 20939, 20940, 20941, 20942, 20943, 20944, 20945,20946, 20947, 20948, 20949, 20950, 20951, 20952, 20953,20954, 20955, 20956, 20957, 20958, 20959, 20960, 20961: n = A,T,C or G
  misc_feature 20962, 20963, 20964, 20965, 20966, 20967, 20968, 20969, 20970,20971, 20972, 20973, 20974, 20975, 20976, 20977, 20978,20979, 20980, 20981, 20982, 20983, 20984, 20985, 20986,20987, 20988, 20989, 20990, 20991, 20992, 20993, 20994: n = A,T,C or G
  misc_feature 20995, 20996, 20997, 20998, 20999, 21000, 21001, 21002, 21003,21004, 21005, 21006, 21007, 21008, 21009, 21010, 21011,21012, 21013, 21014, 21015, 21016, 21017, 21018, 21019,21020, 21021, 21022, 21023, 21024, 21025, 21026, 21027: n = A,T,C or G
  misc_feature 21028, 21029, 21030, 21031, 21032, 21033, 21034, 21035, 21036,21037, 21038, 21039, 21040, 21041, 21042, 21043, 21044,21045, 21046, 21047, 21048, 21049, 21050, 21051, 21052,21053, 21054, 21055, 21056, 21057, 21058, 21059, 21060: n = A,T,C or G
ctcatgatccacccacctcggcctcccaaagtgctgggattacaggcgtgagccactgccgcagcctggcgcacacttcttaccagaacctagtcacgaattcctcgtcgaactagaataggtatgtttgttactgtaaacgcagcttggtggcttacagtgattggcactctaacatcaggtcaggctagagagccagccaccgcagacagaggagtggacgcgtgaacgttgagtgagaccaaaggggccacctggtgggataactgtcctcacccgtgaggaggaggaatgtccctgtccccgggggagagtgctcctacaccagcgccgaggcggcagaatggtgtcttcggggaagagagtgcccagtttgagcttctccccccatttcgtttctttttgtgttaacactgcgcatctggcagcgttgagaattcctagtgactgtcattacaggcggcagctttaagatgtgattgccggtgacccttggccggtcccctgtctcctggctcctcagcaggaggcccctgtgtcacggtgtccttgggcagttctcggtggcctttgccgccaagcttccaggggctgctgggcgaaggctgagacccagcggccctgcctcacagtcacagagagaagagctcccacttggccctaactcataacctgccccaatcccggaacactcggtgaggtttgagaatgcacaccacgtaacatctcgtgggcgaatcaaggcacagcaacgcagtggagcctgagggagccgggcactggtgcaggggaccatgcacagggcaccctcggagctccgttcctgccacaggagccaaggcaggctggaatgtccagcacctgcatgctgggggcctctgctgcccactggcagtgggaatggaagcccccacctcttagccgactgcagatgggggtgtcgtttctgctcatcgtcatttcgttttaggggtttttctgtaagactgaagatgacttcaatattggtgccagcaagtcaaaaaggtttgtagccgccccacacccacagccgagctgagcacccagggagacaggcagtggggcgtgcaggggtcgaaggcctgcgtccaggtctcaggagcctcactgggccgtggggagctttgtcccgcctggcacagctatgtagctgagcaggtggggcgtcctggattgcccatctggcaacacagttaacaaccctggggacggatgttggtgttgactttagaatgggatttccagtgtcctcatccgtctcctgttgagatgggggtgtgatggggtgctgagctacgccggccgagtgcgtgtggcccacccccctctgccgtggggtcagactgtgctgtgtgttgatcaccacactgggttctcgtgtagcctttagtgtgggctgcctctgttttctcatcagtgagatgggatgacaggtttgtccgctggctgtggccgctggcccctttctcttggccgcagcaagcactggggtgaggctgcacctaacggccattctcactaacagctgtctctgcttggaggtgccctgcccatgtttgagctggtggagcacagccttcacatctggcctgccccgacgtcctgaacctgtccctaggtgagagctgccagtccaggtggggtccctcggaggtacgatctgtgcccttgcttccccagtcctggccccttggttttgaccattaaggtgtgtgtgagcctgagccgtgagcacttggcagtggttcgctgtgagaccaggtatggagtggagcgtcccctcctccaagcttgcgcccagcagcccagacccacctcgtcttccccaccagcgctgcctgcccgggcgctgtggagctgggcgtgcaccatggagtcctcaggggtctggagcagacagaacatgcaggctctgtggtgacgcagcctgggtgggggactggttcacttgggcaccactggccatgggtggcgtagacccctcgaccatggccagcgtgccgcaggagccggcctgggctcgtgcagtgaagtgagtggccgtagcgcgtcctcctcatctctgtctccctgtgggaaactctacaaacaaggcaatggcaaggaaccactcctgatgaccacgagggtcagacgcgggacagaggcccctcaggcctgagttgtgccggccgccccctgccctcctcaccctgccctgctcctcttctctgctccctcccccatattcgcaggtctgcacaacccccggacctgttcacacccgcatggggacagctgctgtgggctgcagagcaggcactgctcagtctgccccacgccaagggcccttgactcaccccaggtggcccacccaagatgcctgatgcgctatgtcctgttccttctagattcttctatgtagagcgactggaaagattcttcgactcagaagatgaagactttgaaatcctgtcctttgaaaatcctggggtcgggggtggcacctgtgagagcctggggctcctggtgccgctcgtttcatccatcccgcccgctcgcctgccgagggctgcgccccgtgctgcctccccccgagggccacccgctgtgctcgtggactgaggctgcgctgcccgggaggccttactgcttgtgtcagactgcccagctcagagtgcccgtcagggcctgtgcatccgcacgcggagccgctgttaggagcttccagagcgttctctcgacactgccagccccgtgttagcacctgggctcagtcccacttgctcccaggcgccggttctgtggttggtttggaattaaagtcctgttgaagttgtcagacacagacatgaatttctggggcgctccctgagtcagagtctcagaagcctgtgcaggctggcgtgagaggagcggcagccacactgcggccccacgcccaaggactggctgctctcgaggggggcgcgcccaccgctgtgtcctctctgcccagcctggcttaccagggctacctcagtgggagatgaggttggaggaacgaaggcgaggttcctccttgctttgggagaaaagtattcaggaagtgggtgtgtgggaaacctgaagatggcgtgcacaggaccagcgtgggcggcctgggcagaagggcggctggctgtcctggagctgctgctggagcctccctcagagtgtccctttccagtgctgtggcattctgtggcagcttccccaggtgtggtacggggggggcggggcctccacctgtgacagtcaggcttgagggtggacggcgtgcctccccaggagccttccccatgtccttgccttgctgagaattgccctcccatgccgctgagggttaggtggtttagggccaaaaggggaaaaccacttgagtcttgtggtgtgtggtgggcgacaccacagggtggcatcacctggtggcatttccagaacctcagccccgattccagcaccaccaccgcctgaccctgtgtaacctgctgtcccgggtcccagagtgcactctgccccctgctctgctgcctgtcctgggaaagtagctttgccccactaggaaatgtaaacaggaggcttggggagcgtgggcacttttctcatgagcagctactgcggcgttggcaggactcgcgctgctgctgctgcttgtgtaggtcggggagccggagatccccgaggacgcgcgccggaagtcggcactgaccggcccacctggtagcagaggacacccccagccccccaagcattgagacatagtgtatttcctcgtatcctttctcccttgggtgtagttggggtggggaagcaggaaggctggtgcgatctccattccttgggctccgcgtccgagttcatggtgcgccgctggctgggagctgcagtgggaatgtgtgggacaccttgaccaaaggggagctttgtctcgttgttttgaaaaaggcttaatgaagagaatgttgttcattcttagtagtatagtttgcaatcttaatggcaaataataagtttcagtagaaaacaaaccttgtgtctattttttccttagttctaattgaatgtgagttccagaaaaaaaataagtgaatgtttcagcccgttcacactaaaggatgtggctgcctgcgtggcgggctgtggggccctgagcaggtgtgtccccagcctggcagggggcctgtcctgcctgcagcctggctctctaccagccgtggcatcagccactcatacaaccctagaaggaaaaagtgcaaggaaaataggattttaggaaagtaaaatggggttcccatcttcagcaggaggaagtcacaggaagtgcctggagttgcagggtttgcctgatttgaatcatagcaaagccttccccaagtgcgcagtgactgtcctggcctgtgggagccatgcctggggcacagcagggggcttggtgaggacattgctcactctggccagtgcatcctgtgggcagccctggtataggtgtgaagggcccaaagccagaccggagggggccctgtgggtccccggtgaggtggctgaggacttgtggcctctccgatgctcgtattcgcttctgtggctgctctaaaagatgatcacattcagtgcctggaacagcacagcctcttccagaccggagggcagacagccatgtcgtgctgtgggctctaggggagaacgttgctgtgccttttagcttctggatgccagaaactgcttggctcatggctctttcctccaaccacacagccacaacatggcatctctccagcttttgctgttggcatctcatttcctgactcggaccgcctcctccctgttatgcggacccgtgatgggccaggcatggtggcgccagcctgtaatcccacactttgggaggctaaggtggatcacttgagcccaggaaagagaggctgcagtgagtcagattgcaccactgcactccagcctggatgacagagtgagacccagtcttaagacaacaaaaaaggcccctgtgatgacactgggcccacctggatagtccaggaaagtctcatctgaagttcctcacccaggcccatcccacagcccctggcaatgcttacccaagagtgaaatcctttgttttgcctgggtttgtctcttggccacagaagggtgctgagacccacagctgctgccccacagatgggggaccctgcctgccttctactccagcacactgtatgctgctgtctatcggagtgtgctctgtgggacagattctgccaggagtgtcaaatcattccttctaagtgtacttaaaaggggatgcaatgggctcggcatggtggctcatgcctgtactcccagcacttggggaggccaaggcaggtagatcacttgagcccaggagtttaagacaagcctggctggcacatagcgaaatcctgtctccacaaaaaaattacccaggcacagtgaaggcctgtaggctagctactcaggaggctgaagtaggaggatcacctgagcccaggaggtcaaggctgcaggagccacgatcgtgccactgcactccagcctgggcgacagtgagaccctgtttccaaaaaataaaaaataaaggataggatgagaagttaagctccagggttgcaatgaaaatagcaggttaacttaggtgagttcaggacgtaagctgtgatgacactcggatatagcctggctggcccagcgagcccagggcatggctgcaactgttcagacccacagtgggactccctcaactggcaggaaccagggtccaggaaggccctactgggcccaatgaaggctcttctctcctggatggaggttcccattcaaagccagctccgtcctcagtctaagaaaagtgaagcgttccaaaacaattttcaggtctttttttactagtgtctggaagacatttaggagaattccaactattaccatttacagtgatcacaatgaaactgctcagagttatcactgaacttcagtaagaaatacaacagagtgccatcaggacaggggagagggcaggagactgctccatcgctctgtcatgtccacactgccaaggtccccaccacgggggtccccagtgcaccccagctccgggcagaagaggcagcctgcagatctctgctgccgggaaagagctcctgaagttgtggggtcggactccgctggggacggggccttccgcgagtctcccacctctcgggggactgcagggaaggcgtctccagtgggcagccttgggtcacttccatagctcccccagcggcttctctgtgcagtgcggatggcgtcctcagagagcacgcggatgtcctcatggacagcttcgatgctttggaagcatccaccatctgttcccaccggggtttcaggagaaaaagaggctcatcagccgttccaggctggtcacgggagcccacgcctgtaatcccagcactttgggaggcccacggggaggactgcttgtacccaggagttcaagaccagcctgggctacacagggacaccccgctctacaaaaaatgtggcaccactctactccagcctgggtgacacagtaacaccctgttcaaaacaacaccatgtttcgttctgtcctctgtgctcgtggggatttcacacaggccggctctggaaggccaacctgaacctcctggcacactgtggtgacctccgggataccccacactttctctgaacctcaaccttgacaagtgtctacggtagtcacccggcattcctgccacgccctgatgcaggagaaacatgatgtgccaactgcccactcctgctttaagccgacctcgcctcgtgaccccaaccccgctgagtgcccacttgcaggagtgaggcacagcccacagccagccaggcccacccagcccaccaggtcgaggtgactgtccctccagctcgcaagcggcagtcggaagcacagagggcagaccctgccctgcccacgctcctgtggctcctgggccctcctggaaggtgaggaagttccgcagcagaagccagacagcaggaccagtgcaacactggcctgactcgtccttgcggggaagatgaatttggtcctaacagctgtgctgcacaatggctgaacggtgcgaggagcgtggggagggcataagcccgcaggacagccttctctccaccaaaggcaggcagtgagagggactcagaagcgctggcatctcagcggcatcccggcttctgtgtcgggtggcaccggacccttctcaagcttctgggacagcaaattctagaaaatctgcaggggcgtagaaggcacttggaagaatctaaccatttcatgaggtgtgaccgtgacggaggagagtgactccctacacaagggccaccttcccagatgcctctcactggccactgtgcgccacacagctgtcgcccagaaccgcccaagatgagcctctccgggcggaatgactgccgagagaatgccgcactgccagaaaagggcactgctatcccacctgcgttccgggaaacgaaagctgcgtgaccagcatcatctgcaggcacagccagtcgggctggggcgagaccctcgccctgctctggaggaggagctcaagggactgaagctccgcgggccgtggccacaagcgcagtgctggcgcccgacgtgccagaagccctggctgccgcctggaaagaggccacgtggcagcggtgggcacgggcgactggagtctgggagagaggtaggggctgcggtcgggaggacagaggcggccagcctgcgagtccactgggaggggagagtccagcgtcctgggagcagaccagacctgggactgctgagactgaaggaggcaggactgaagggagaggcagcacacagaccctcctgaacttagatggccaggtgctgctgcagggcccatgcccagcgagaggccgaccagaggacacagtggcaggaacaggctggcgctcgtgtctgaagaggggctgaggattggaggattgcgcagactctcacctgacccaccagacaaagcgccaaatgtcaacatttgcaaaactcatcgggttagaatttgctggcactggccgggcgcgatggctcatgcctatatcccagcactttgggaggccgaggtgggcagatcacctgaggtcaggagttggagaccgcctgaccaacgtggagaaaccccatctctacaaaaaaaattagccaggcatgatggcagtgcctgtaatcccagctactcgggaggctgaggcaggagaatcacttgaacccaagaacggaggttgcagtgagctgagatcgtgccattgcactccagcctgggttggcacccagacaagattctgtctcaaaaaaaaaagaatttgctggcaccgagaacccctgaacgactaccccggggctccacatctgggaggaccagacggaaacggcagcagctttgctgacacgacgtgccagccaccacggtgtcatcctgagccacttctccacgcttcctagtgtgcaattcgggattctcaccttccagttcaaagtcgtgtctttcatgagctggtggaaacaccggaggcccgctcctggaaagccccgttctcatagcgctcatggccaaacgctccccgcttggcgcatccgccagctgtaactggaggaacaggaccaggtcgggtttgggaaggcccacgtcggctgtttacaccagtctagggaaaaattctgccaagaaagaacccaacagttaaagctagtgtagtctaggtttttgtttcgaaagtcgtaaaaacaggaaaaaatgaggggacattggtgaggtaccaagatgtgagactgtttatattgtggctcgtttaatttttagaacctcaacgtgtcggtttctccagtgtcacctttgtttttcctttgtaaacagacaagtggacaaaaagtaggtagatagaacggctgccagtccccgccacccacagcccaggccccatggagccctcccagcgcagctacaggcctgctggccaggagcaaacagtctatgtacagaaccctggagacccccggcctagaacgcctgcagcacagagcagctgggtccggacacaggcagaggtccttggcagtgtcttttctgccacacacacgccagggtctcctctcccgtggaaagcaggaagaagacaggcactcctagagcctgttatgtgccagcctagtctcatccactgcccttcttgccagggctgtgccagcaccctctctccctcccttactcatcccatctcctccaaatgctgtcctgtttccggaggaaaggtaggaccagaaaggctgtgactgcaggcacacatcacacaacagcacaatgagctgagggaaggcgtccacgagaacctcccacagacctgcggctctgtcagctgatccgcacagcaggaagaagcaaaggaatcatgagtcttgcctccttattatacaacgtaatacttcagaggggaaggactcaagctaacacatgaagaatggcagaattaaaaagtgagggcgtggccgggcacggtggctcgcgcctgtaatcccacactttgggaggctgaagcgggaggatcacttgggcccaagagttgttatagcgagcttgcttgttccactgtactccagcctgggcaacagagggagacgccctctttcaaaaaacggggaaaaaagtactacaaatgaaccatctttgaaaatgcatctggaggctgggtgcagtgctcatgcctgtaatcctagcactttgggaggctgagatgagtggatcacttgaggtcagagtttgagaccagcctggccaacatggtaaaaccccgtctctactaaaagtatgaaaatagctgggcacggtggtgcatgcctataatcccagatactcgggagactgaggcaggatatcgcttgaactcaggaggcagaggttgcaatgagctgagatcgtgccactgcactccacctgggtgacagaatgagagactgtctccccaaaaaaaaaaaaaaaagcgtgtggaaaaataatccaaataccaactatggttctatctgtgaaacaatctctagctacataaatgttgctcttcttattgataaaaccaaattaatctagcaaagagataaaaggaatataagaatacgaaactctgcagagtaatctgaggcatgtcactcgtactcgcattcaagggcagtccgggtccacacatctgtgctcgcctgacaggaggccaagtggcactcacctccttggcacggtgaaggccacaccagaaaatgcgtatctgtccacgacgagggtcacgccctggctcacttttccttaattaacggcctgaaaaagaggatgctcctgagccctggtcctgtttcatggccttgaactgtcaagcttaaattatcccaacaggctgtgcgcagtggctcacccctaaatcccagcgctttgggaggctgaggcgggcggatcacaaggtcaggagatcgagaccacctggctaacatggtgaaaccctgtctctactaatacaaaatattagctggacatggtgcaggcacctgtaatcccagctactcgggaggctgaggcaggagaattgcttgaacccagaggtggaggttgcagtgagccgagatcacaccactgcattccagcctgggtgacacagcagactccatctcaaaaaaagaaaaagaaaattatcccaacaatacaactcagaaatctctatgacaacaagtacagcacagtgatttgtaaccttacttttaatccaaaaaggtctggtcttctctagaagatgccatacccacacctccagcaaaacccaacatggagaagataacttactaaatagtaacaaacacaactggtaaagttcaatgttccagaaacacggcaggggaaggagatgcactgtcagctgtcttggtcagagaggccagctctaccctgtcgaggaagagaaagcacaggcaaagaagagagcagaggatggtggcgggggaagcgtgggcacagccgcaggtgactcatccatgctcatgacccctagcctggactgcaaggatgttctcagccaataccacaagtccaccatcatccctacagctgccaagatcacagatgtacaaagacacgggcctgacactagtgagaagcactgctcaagacagagaaagaaaagtccgattcattcgctcagccagtctcactggggccttcaaatcacaggggcacccacataaggagtcaactgcctctgacaaagcagcagagggatgcaatggtgcaaaggcattttcctcaataaacgctctggaacaactggacatcctcatgaaagagaataaatctagaccagaccgtataccctcacgaacataaattcaaaatgaatcacaggcctggcacggtggctcacgcctgtaatcccgctttcaaggaggcagaggcaggaggattgcttgagcccaggagctcgagacctgcctggcaatatagtgagaccccgttctccacaaaaagtgggggaaaaaaaagacaaaatgaatacagacccaaatgtaaaatgcaaaactatgcaactcctagacagtaacacaggagaaaattagatcacctggggtttggcagactgtttagatacaaaaccaaaggcacagcccatgaagaattgattaagatggacttcacgaaaataataactttgtgctttgtgagagacactgcaagagaaggaaaggacagccggacgtggtggctcatgcctgtgagcccagcacttttgaagccatttggcgggatggatcccttgaggccaggtgtttgagaccagcctgagtaacatagtgagaccccatctctacaaaaaatgtaaaaattagccagggatagtggcacgcaccgtagtcctagctactccagaggctgaggcaggaggatcacttgaacccaggagtttaagctgcagtaagctgtgatcatgccacaacattccagcctgggcaacagagcaagacattttcctaaaaaaaaataaggccaggcagggtggctcatgcctctaatcacagcactttgggaaccaaggcaggaggactgcttgggtccaggagttcaagaccagcctgggcaacaataggagactccatcgctacaaaaaattttacaaaaattagccaggtgtgttaacgtgcctatgttgcagctacttgggaggctgaggtgggaagatcacttgaacccgggaggtcgaggctcagtaagctgtgattgcgcactgcactcagcctgcatgacacagagaccctgtctaaaaaagaaaagagagaaagagagtgagaaaacagaaaaggcaaaccacagcctaggagaaaaatgtataaaagacacattttataaaggactgttatctaaagcatacaaagaattcttaaactcaaaaataagaaatcaaccaacccccttaaaaagtgggccaaggctgggcgtaatgctcatgcctatattcccaacactttgggaggcggaggcaggctcatcacttgagcccagaatttgagtccaacctgggaaacatggtgaaaccacatttcctcaaaaaatacaaaattgccgggcatggtggctcgtgcctgtaatcccagcactttgggaggctaaagcaggtggacacctgaggtcaggagttcaagaccagcctggccaacatgacgaaaccccatcactaacaaaaaatagaaaaattagccgggcgtggtggtgggcacctgtgatcacagctacttgagggctgaggcaggagaatcgcttgaacctgcgaggcgtaggttgcagtgagccaagatcgcccattgcactccagtctgggcgacaagaatgaaactgtctcgaggaaaacaaaaaagaatacaaaacttagcatggtggcatgcacctgtagtcccagctacttgggaggctaaggcggaggatcgcttgagcctgggaagtagaggctgcagtgagccaagaccgtgccactgtatctagcctggttgagaccctgtcccaaaaaaaagagtgggccaaagcactcaacagatccttacgaaaccagatacacagatggcaaacaagcatatgaaaagatactccacatcatagtcagcagggaaatgcaaactagaacaatgagatgccacacacacctatcagaatggcaacatccaaacactgacaacaccaaatgctggtgagggtctggagcaatagcaacccttgtcactgctggtgagaatgcaagatgctgcagccactttggaagacagttcaccacaagctgtccaacccaaggcccgcaggctgcatgcagcccaacacaaatttgttaagctttctcaaacgttacgagatttttttttttaagctcatcagcaattgttagtgtattttatgcgtgcccaagacatttcttccaatgtggcccagggaagccaaaagactggatacccatggttagcagttcttcacaaaaattaatagtcttaccacatattaaagcagtggtgctccctggatttacccaaaagaagtgaaagcttatgaccacacaaaatcctgcaccaggatgtttatacagatttataactgccaaaacttggaagcaacaaagatgtcctttagtaggtaatgaatatggtacatccaaacaagggactattaattagggcaaaaaagacatgaactattggtcggcatggtggctcatgcctgtaatcccagcactgtgggaggccgacgtgggaggatcactgaggtcaggagttcaagaccaccctggccaacatggtgaaaccctgtctctactaaaaataaaaattagctgtgcatggtcgtacgcgcctgtaatcccagctactcaggaggctgagcaggagaaatgcttgaacccgggaggcggcggttgcagtgagccgagactgagccactcactccaacctgagcaacacaacgagactcttgtctcaaaaaaaaccaaaacaaaacaaaaaaaaaaactatcaagccacagttagacatagaggaaacttaaatatctattagggaacaagtaacctgtaggagaatagatggacacaagagacgtagccctgggtacctgggatagattattatctaaaaagtaaaatcaggattattcttcattttaaattgggcatatacgttttcatcacttttctacaaagccacaaaaagcaaaatcagaagaacaattgcctccataattctagatgtgttaaaaagattattaaaaatggtctcattttcatttaagacttggagggggacagcctttccaagcaagacacaaagctaagccggaggagagtaatgcagtgtttatgtaacacggatgatgaggaaccactgaagattcaccagcagggaactggctacacgtccgtggttctagagacaatgcgacgacaattaaagagaatgagaagggcagagttagggatctgtaagtgcagaaatctgtaaggcagagttagaaagaaagctgccaaataatttgttggtatgacctcatttatgttaaaaaacaaaattctaactatagtagtttctacatatgatataaatgtaaataaaaacattgaaagaacacacatcaacattaagtgttgaatgaagggaaacctactacaatgatgtaaaacaaaaaaaggtggtaggagagttcatataaactcgttactaatgtatcaatattggttatcaattttaacaaatgtaacataacacagcacataataatggggaaggggggaaggcaggggtagtatgtagggagcgctctacatactctacttttgatcagtttttctatatacctaaagctatctttaaaacattaagtctatgaggccggggtttgagaccagcctgggcgtgatatggtgagaccttgactctacattaaaaaaaaaaaaaaaattagccgggcttggtagcatgcccctatggccctaagctactcaggatgctaggtgggaggactgcttgagcctaggaagttgaggctgcagtgagccatgatcgggtgcactgcactccagcctgggccacagagcaataccttgtcttaaaaataaaaaaaaaagggcaggtacggtggctcacacctgcgtaatcccagaactttgggaggccgaggcgagtggacacaaggtcaagagagaccatcctggccaacatggtgaaaccctgtctctactaaaaatcaaaaattaaatttaaaaataaagtaaattaaaattgcaaaaattagctgagcatgctgggcgcgcctgtagtcccagctactcgggaggctgacgcaggagaatcgcttgaacctggaggcggaggttgcagtgagccgagatcacacctctgcctggcgacagagcggaactccgctaaaaaaacccgaaaaactgaagtctattagttatggggtgtggggagcaggaggacgaacagcattcattagcgccctttgggaactagggcgcttcaccacctctgcccacaggatgctaaacagaagaacatcaggcccagcactactgtcactgtcattcagaatcgagtgcgcgttcactgaatctcaggaggaaggaaagtggcaagggcagagggagcagtgtgcaatgtttttacacttgttcccagcgatttgcagaaaaaagcaggtgcaccgagtgatcctcccgtcacttttcttttgcaagtaggaactcagaagtttgccgatttcagttgatctttctgaaaaaaagagaaacacacaaaatgcaagtgagatcaggctttccctctatattacaattagtttggactgaatttctcccggactcaagtctcacgttgaattttactttactaaattctagacaggcttggatcttctgcggaagccaaaggaatttctctgagcaataacagcatctgcaaacaagctgggatgaaaaatgctttaggaaaaaagaactcgggtagaaagtaggacttcaaagaaagcatttataaaatttgtggactgggtggccaaagattaaggtcaatcttcacttgaaaacttttaaatatatgctataaaacccctgaaagcgcgaacagccatcaacaaaacacaacaccagaaaaacccacaaaaacgagacatggattacaaaagagctggggagacttttgggggagacaccacggtttcgcgcgggtttacacgtcagtcatcaccatccccgcacttaaagacacgcagcgtggaccgggcgcggtggcgcgcgcctatgttcccgctacccgggaggtccaggctgccgtgggccgagatggcgccactgcactccagcctggggacacagcgaaagcccgtctttcaaaataaaaatcgcacagttcacagcacgccagccgagacaacgaagcggagcaaagagcccctgggaaggcagaggcaccgaaggccgcggcgcccccccgccgcgcgcacccacccgggaaccggagcagttcggcgcggtggcccgcggcgacagcgcttccaccagcttgcggctctgcgtgctcttcccggcgcggtccacgccctccgcactatgagagccccgcgccgggccgccatgactgtccaccgcccgccgctggcgtctcacgcagccttccggagctcccattggccggcgtcaacagcgcgcgccgtgattagctatatttcccggcctcggccaaattcgaagggattggccggggccggggcgaggacgacgccggtgggaccgacacccgcgcctgcgccctgggccgcgccgccactggagccgtgtcctggcttccggggcggaaactggggccccgtgtcccgtgcgggcctccgtcctcgggcgagagggcccttcgctccgggaggggaggtgacgcggcgcgggctggacggccggagacgcgggtcagggcgcggacgaggggagcgcagggtcggaggggctcccggacgctgcccgcccgcgtcggctctcgttggcccctggctgcgcgcagcgggcccgactctcagggccctgcgtgcccgctgccagcgtgagggctccggtcacgcggcgcgcgagacgaacgagcgagatgttcccgaagcgcggggcccagtgcaggggctcagccggggctcctcccaaagctcacctgagcccagcacgactgcgttctggaaacgctgtgtttgacagcaggggcaggataggggctgtgtagacgctggccacgtggcaattgtaggagaaccatgggatcgataaatgttcatgttgtccctgaagcgcaaaactgcagggctctggaaagtccgtgtgtgtgtttttgtttttttgtttgtttgagacagagtctcgctctgtcacccaggctggagtgcggtggcgcgtctctgctcactgcaacctccgcctcccgggttcaagcgattctcctgcctcagcctccgagtagctgggactgcaggcggccgccacgacgcccggctaattttttgtatttttagtgagacggggtttcaccgtgttagccaggatggtcttgatctgacctcgtgatctgcccgctcggcctcccagagtgctgggattacaggcgtgagccaccgcgcctggccgaaaagtcgttttaaaagatgatgtatacaaattatagcacggagagggaacgggcaagttgtttccctttccatgcctccaactcctctgaaatgtgggtcatgatgataataggaaaaactgtcctgccatagagaggtggaaaaagtcccgcgaagtgtccccggtatctagaaagcgctcatagtgtttgctgttatcttagggatatcaggctgcctggacatttctcaggtgagacttttgttattttagatatctaaaatactactatctatatgtgccatattgtcagttgtcagtagacatcactttctctgcttagcagaagaaatggtaggaactgcatttcccagaatcactgtgtagccctggattacagtctaccagacgaggcactcttacctttcgaggcgattatcttgggaggcaccctcagccagaaatatagatgaaattcaaagctgttctctgttttcgaaccacctgcctctgatgtagaccaagaaattgctggtagctttctaagtgttgagttgcattggttttttccccatgagctcttgagaccaccacccacttcagtgctttgggctgggtcattggcaacaatttcccggactttactcccagcatttgtgtaagctcgcgattatttatcattgcatacctagagtagctttatgttttccagactgaagcctccccaattcagttggggttctggaaggatatgggttatattgttattaccagttatgccctttcttccttttaatttacttttattgcttttattttatttgagacggagtcctgctctgtcccccaggtggagtgcagtggcgcgatctcagctcactgcaccctccacctcccgggttcaagctatctcctgcctcagcctcctgagtagctgggattacaggcgcccaccaccacgcccggctatttttgtatttttattttatttttttgagatggagtcttgctctgttgcccaggctggatgcagtggcgcaatcttggctcactgcaagctccacctcccgagttcatcccattctccgcctcagcctccccactagctgggactacaggtgcccaccatcatgcccggctaatttttttgtattttttagtagagacggggtttcaccgtgttagccaggatggtctcgatctccgacctcatgatccgcccatctcagcctcccaaagtgctgagattacaggcgtgagccacgcgcccggccaatttattttttaatttaattttttttttgagacggagtttctgtcttgggcccagagtggagtgcaatggcatgatcttggctcactgcaacctccacttcccgggtcaacctattctcctgcatcaacctcccaagtagctgagattacaggcacctgccaccaccccagctaatttttgtattagtagagatgggttttcaccatgtttgccaggccggtctcaattcctgacctcgggtgatccgcccacgtcagcctccctaagtgctgggattacagactgaaccactgcacctggcctaccctttcttcctttacgtcaagcttagtggtgagacttcaaatggtaatgtaaagtagtctgctgtcatgtgccctgttcaggcagaagctttaaaggtgttttgtggtttggtccctccccttctgcccccagcatgaacacagcatgtgcacaggagggctggtttttcaccccagatcctgtaacaaaggcccatgaagtacagccgttgtactgatgggcagcaccagcaagaagtaaaccatcgtgatttcgagtcactgagacttcggatcctttgttaccacagcacaacctagcgaacgcttacaagtactaagaatagtacttatattcccttacatagataagtaataaaagtaatatccttttttctgattgatgtctcctataaaattccatcttgttgccttccagaggatgaaggggattgtagtaaggaagaccacttccagaggatgaaggggattgtaggaaggaagaccaccttcccggggctgggcaaggcgcggtactgtctctcatcaggtccaggaggactcagcaggctgatgcagagggacacaggcatccgccttggtggatgcatggctttcctggctcccctgggacgggggaggagggtgagatggagggaatctggctggctgggccttgtgtactggggggtggagggcccatttgatgcaggaattgctcaagcacataagcaccttgaagtgtgttactaagatacaagaaacagtttgcttttgcctattccagcatggtgtacctctcttaggataccttttagcacaggtgcagaataccagccagcctcctgtggctcacagcattaagatatttaatcatctgacatacatgaagtccagtgttaggcaggcaggagctgctcccgtgactcagtgacatcaggttgtccacatcctagcagttctcttggtgttcctgcgtgatcaaaggatgactgccacacccagcctgctgacctcagccctggcgtgggcataggagggtctgcgtggctgagcatccatgtccttcgtactgccactgacagcctcaggcctgatttccagcactgtctgtccaggacaatgggagcaagagtcactccacaagactctggaggcctgataggtgagtacatccacttataggggaaatggtgggatgctgggtctgtgtggtcagagatacaggtgaaatggagtggccacaggctgataattgcagaaagatgcaggtgaacacatgggttcgtgggttcataggttctctgcttgctttttttttttttctttttttcccagacagcctcggtctgttaccaggctggagtccagtggtgtgatctcagctcgctgcaacatccacctcctaggttcagcgattctcctgcctcagcctcccaagtagctgggatttacaggcgcccgccacaacaccggctaattttttgtatttttagtagagacaggatttcaccatgttggccaggctggtctgaactcctgacctcaggtgagtccacctgcctcagnnnnnnnnnnnnnnnnnnnnnnnnnnnnnnnnnnnnnnnnnnnnnnnnnnnnnnnnnnnnnnnnnnnnnnnnnnnnnnnnnnnnnnnnnnnnnnnnnnnnnnnnnnnnnnnnnnnnnnnnnnnnnnnnnnnnnnnnnnnnnnnnnnnnnnnnnnnnnnnnnnnnnnnnnnnnnnnnnnnnnnnnnnnnnnnnnnnnnnnnnnnnnnnnnnnnnnnnnnnnnnnnnnnnnnnnnnnnnnnnnnnnnnnnnnnnnnnnnnnnnnnnnnnnnnnaaaaatacaaaaattagctgggtgtggtggcacatgcctgtaatcccactacttgggaggttgagacaggagaatcacttgaacctgggaggtggaggttgcagtgactgagatcatgccactgcactgcagcctgggtgacagagtgagacactgtctcaaaaaaaaacacaaaaacaaaaaaactgaaggagcaggaaagctcttttgctagtccctgtttctagtgtgctgcaacttccaccacacagggaataaagtctttctcaccatcagtgggctcggctgtcacaacagactaccttagactggggaactgaagcaataggcatttattggctggagtccaagattaaggtgcccgacagattgctgcctggtacgggctgtcttttagagttgacatagcaaagagaatgctctggtacctcttccttttctcatgagggtaccagccctatggattagggttgcacccttattgaaaccatccctggccaggcatggtggctcacacctaaatcccagcactttgggaggcaggtagattgcttgagctcaggagtttgagaccagcctggcaacatagacttatttggagatttatttatctctacaaaataaatagnnnnnnnnnnnnnnnnnnnnnnnnnnnnnnnnnnnnnnnnnnnnnnnnnnnnnnnnnnnnnnnnnnnnnnnnnnnnnnnnnnnnnnnnnnnnnnnnnnnnnnnnnnnnnnnnnnnnnnnntgagccatgttgcgccactgcactccagcccaggtgacagagtgagaccttgtctcaatttttaaaaaatataaaaaaagaaaaccgtcactaaaaacacaaaattaatcaaggaagaggggaggggaaatggaataaccgagcttgcagcacacgcagcaccagtcatgtggtgagcccctctggctggcgcctcgtgcctcagaatcaggtagactcttgttataagattacagttacccttactgctccagagataacaacttgaacattatgaaaccttaacttttccctttgagatttttttttattttaatttttttttctttttagagacagggtctcactcttgttcaggctgagtgcagtggcacaatcgtagctcactgcagccttgaggttctggtctcgagtgatcctctgcctcagcatctgaagtatctggaactacaggcacacacatctggctttttttttttttaaatactgacggggtcttgccctgttgcccaggctggtcttgaactggtgggcccaagggtcatcctgcctcggcctcctgaagccctgggattgcaggcatgagccaccacgcccacctgagattctttcaggccctgcataccagtgaaagtactgatgccagctgctctgaagaccccacaggagctgactcagcaaggaatgcagtttccacattctagtgaatcatcctcttaccctggccagtcagcgacccccattttccagcccctcaccttccatgatccccttaaaaccttagctcagaactcctgagggagatgtatttgaggagacgtctcctttcacctctcacctgggccttgttaaactctttctctgctgcaaaccctgctgtctgagcatcatggtctgttaactgtgcagcagacacatgaaaactgttggtcctatcacattaggacttcattaaccttaattagctccttggccaggtgcgttggctcacgcctgtaatctcagcactttggaggcagaggcgggcagatcacgagatcaggagctcgagaccagcctggccaacgtgggaaaccccgtctctactaaatatacacaaattagctgggtgtggtgacgggcgcctgtatcccagctactcaggaggctgaggcaggagaattgc

SEQ ID NO: 2926 - DNA, 40265 bp, Homo sapiens
  misc_feature 2230, 2231, 2232, 2233, 2234, 2235, 2236, 2237, 2238, 2239,2240, 2241, 2242, 2243, 2244, 2245, 2246, 2247, 2248, 2249,2250, 2251, 2252, 2253, 2254, 2255, 2256, 2257, 2258, 2259,2260, 2261, 2262, 2263, 2264, 2265, 2266, 2267, 2268: n = A,T,C or G
  misc_feature 2269, 2270, 2271, 2272, 2273, 2274, 2275, 2276, 2277, 2278,2279, 2280, 2281, 2282, 2283, 2284, 2285, 2286, 2287, 2288,2289, 2290, 2291, 2292, 2293, 2294, 2295, 2296, 2297, 2298,2299, 2300, 2301, 2302, 2303, 2304, 2305, 2306, 2307: n = A,T,C or G
  misc_feature 2308, 2309, 2310, 2311, 2312, 2313, 2314, 2315, 2316, 2317,2318, 2319, 2320, 2321, 2322, 2323, 2324, 2325, 2326, 2327,2328, 2329, 2330, 2331, 2332, 2333, 2334, 2335, 2336, 2337,2338, 2339, 2340, 2341, 2342, 2343, 2344, 2345, 2346: n = A,T,C or G
  misc_feature 2347, 2348, 2349, 2350, 2351, 2352, 2353, 2354, 2355, 2356,2357, 2358, 2359, 2360, 2361, 2362, 2363, 2364, 2365, 2366,2367, 2368, 2369, 2370, 2371, 2372, 2373, 2374, 2375, 2376,2377, 2378, 2379, 2380, 2381, 2382, 2383, 2384, 2385: n = A,T,C or G
  misc_feature 2386, 2387, 2388, 2389, 2390, 2391, 2392, 2393, 2394, 2395,2396, 2397, 2398, 2399, 2400, 2401, 2402, 2403, 2404, 2405,2406, 2407, 2408, 2409, 2410, 2411, 2412, 2413, 2414, 2415,2416, 2417, 2418, 2419, 2420, 2421, 2422, 2423, 2424: n = A,T,C or G
  misc_feature 2425, 2426, 2427, 2428, 2429, 2430, 2431, 2432, 2433, 2434,2435, 2436, 2437, 2438, 2439, 2440, 2441, 2442, 2443, 2444,2445, 2446, 2447, 2448, 2449, 2450, 2451, 2452, 2453, 2454,2455, 2456, 2457, 2458, 2459, 2460, 2461, 2462, 2463: n = A,T,C or G
tggggtttcgccatgttgcccaggctggtttcaaactccttggttcaggcgatcctcctcctcggcctctaaaagtgccgggattacagatgtgaaccactgcacccggtctaattccaagtttatatggaaaagcaaaagaccaagaatagccaacacaatactgaagaagagcaagttagaggagtgacacttcctgacttcaagacttactataaagctacagtaatcaagacgtaaggactggacatggtggctcacacctgtaatcccaacactttggggggctgaggcagaggatcacttgaacccaggagtttgagaccaacctgtctacacgtgagacctggtctcatttaaaaagaaaaaaaaaggagggggagccaggtgtggcagctcatgtctgtaatcccgcactttggaaggctgaggcaggcaaatcacctgaggtcaggagttcgagaccagcctgccaacatggtgaaaccctgtttctactaaaaatacaaaaattagctgggcgtggtggcagctgcctgtaatcccagctacttgggaggcttaggcaggagaattgcttgaacccgggagtggaggttgcagtgagctgagattgcgccactgcactccagcctgggcaacagagtgaacttcatctcaaaaaaaaaaaaaagaaggaaagaaaatcaagatagtatggtgtcagcaaaatagaccaatgaaacagaatagagcccagaaacagacccacacaaatatagtcaactatctttgacaaaggagcaaaggcaatccaataaagagtagtcttttcacaaatagtcctgaacaattggccatccatatgcaaaaatcaaaataaaaatctagacatatcttagaccttcacaaaaattaactcaaaatggctcatagacctaaatgtaaaatacaaaacttatcaactcctaaaagataacataggggaaaatctaggtgaccgtggtttggtgatgacttttttttcttcttcttcttcttcttctttttttttttttggagacagagtcttgctctgtcaccaggctggagtgcagtggcgcgatcttggctcactgaaaacctatttacttttcagctccgagtttgtcagggatagtttgtcaaaaaaattcttcctgtggccaggcgtggtggctcagcctgtaatcccagcactttgggaggccgaggcgggcggatcacctgaggttgggagttaagaccagcctgaccaacatggagaaaccctgtctctactaaaaatacaaaattagccggcatagtggcgcatgcctgtaatcccagctactcgggaggctgaggcaggagaattgctgaacccaggaggcagaggttgcggtgagcagaggacgtgccattgcactccagcctggaaacaagagcaaaactctatctcaaaaaaaaaaaaattcttcctgtgagtgggccatactccctggttcttcatacgctttatgatttttttgagaactgaatattctggccaggcatatagctaacacctgtaatcctagcactttgagaggctgaggctggcggatcccttgagacagaagtttgagaacagtctgggcaatatggtgaaactccatatctactaaaactacaaaaaaattaggccaggcgcagcggctcacacttccagcactttgggaggccgaggcaggcgattacctaaggttgggagttcaagaccagcctgaccaacatggagaaaccccatctctataaaaatacaaaattaggccaggtgcagtggctcacgcttgtaatcccagcactttgggggctgagtcaggtggatgacgaggtcaggagttcaagaccagcctggccaagatggcgaaccccatctctactaaaaaaaatacaaaaattagccaggtgtggtggcaggcatctgtataccagctacttgggaggctgaagcagggaattgcttgaacccgggaggcaaaggttgcgtgagccgagattgcgccactgcactccagcctgggcgacagagcgagactccgtctcacaacaacaacaattagccgggcgtggtggtgcatgcctgtaatcccagctactcaggagctgaggcaggagaattgcttgaacctgggaggcagaggttgcagtgagctgagattgcacaattgcactccagcctggacaacaagagtgaaatccgtttcaaaannnnnnnnnnnnnnnnnnnnnnnnnnnnnnnnnnnnnnnnnnnnnnnnnnnnnnnnnnnnnnnnnnnnnnnnnnnnnnnnnnnnnnnnnnnnnnnnnnnnnnnnnnnnnnnnnnnnnnnnnnnnnnnnnnnnnnnnnnnnnnnnnnnnnnnnnnnnnnnnnnnnnnnnnnnnnnnnnnnnnnnnnnnnnnnnnnnnnnnnnnnnnnnnnnnnnnnnnnnnnnnnnnnnnnnnnntaactctggcaaatctattctccgactcctcagggattgttaattttttttttttttttgacactggcaactctttgcccaggctggagtgcagtggtgctatctcggctcactacaacctctgcctcccgggtcaagtgattctcctgcctcagcctcctgagtagatgggattacaggcatgtgccaccagcccggctaattttttgtatttttggtagagacggggtttcaccatgttggctcagacgtctagaactcctgacctcaggtgatctgcctgcctcgggctcccaaagtgctgagattaaggtgtgagccactgtgcctgacctaaatttttgcttgttgagggctggagccatctgtattttttccaaactatttatgcaaagtgtgtgtctcttgtgtgtgtgtggtcactgaagttgttatctcttataaagtaatggtaaaaaccacaattacttttgcaccaatctaatatttattttgcagcaacctaattttttatttatttatgagacagggtctcactctgttgcccggctgaactgcagtggtgtaatcactgcttactgcagtctccaactcctggaatcaagaattctcctacctcagactccctagtagctgggagtctgcaggcatgcaccaccacaccggctaatttttaaaattttctgtggagccagggtcccactattttgctcaagctggtctaaactcctaggttcaagtattcctcctgcctcagcctcccacagtgtgagccactgtgcgggcctctattatctctgtagtcagccagtgagtgagctgacaaagattttctggcttaaaaacaaacaaaaaaaggcacgagtcctttaaatcttctgatatgttgccaaggtggggtgggtggggtattaatgcaggaattgcatctaagaggctgaatgaaaccaaggcaagcactcagagtacctccaggtccgtcaaagcgcacaaccccagcatttttggagggcaaggtcccgtgcctgttctggcaccagtcagctgctttcagaactggtgctgctatccccacagcggatggggctgaggaatgggagaagtagctgcttgattcacactactctcttcatcaacaacccccttgttaaatttccgggttctgaaacagttgattacaatcactgctcttttcgctcaatggttgctttgattcaggaaccaacccctagagcttccaattccaccattatgatgccttcgctccacactcttttgattactatagctttgtagttaagtttttaaattggaacaacttttatcttttctttaaaacaattttaaaaaatgttttggctattcagagcctttgcaattccatataaatttgagaatcagttttcaaatttctgcaaaaaaaaaaaaggcattggaattttgatagggattgtattgaattgtagaatgctttgggggttattgccatcttaaagtcttccaatccatgaacacaagatatccatgtattcaggtcacaagttcatttttggtaatcatcacacctatctatttccaaaacttttgcatcaccctagacagaaactcgtgaccatcaagcaataattcccctgccccctccctctatcccatgctaacttctattcgtctctgtgaacttgcctgttctagacacctcatgtacgtggaatcatacaatagttgttttttgtgtctggcttatttcacctagctgccataagttcttaacctatacgcaacacaatccccactttatttttatttttgggagtcttgctctgtcgcccaggctggagtgcagtgaatgatctcggctcactgcaacctttgcctcctagggtcatgtgaccttcccatctcacctcccaagtagctgggactacaggtgcacaccaccatgcccagctaatttttgaattttggagagatggggtttcaccacgnnnnnnnnnnnnnnnnnnnnnnnnnnnnnnnnnnnnnnnnnnnnnnnnnnnnnnnnnnnnnnnnnnnnnnnnnnnnnnnnnnnnnnnnnnnnnnnnnnnnnnnnnnnnnnnnnnnnnnnnnnnnnnnnnnnnnnnnnnnnnnnnnnnnnnnnnnnnnnnnnnnnnnnnnnnnnnnnnnnnnnnnnnnnnnnnnnnnnnnnnnnnnnnnnnnnnnnnnnnnnnnnnnnnnnnnnnnnnnnnnnnnnnnnnnnnnnnnnnnnnnnnnnnnnnnnnnnnnnnnnnnnnnnnnnnnnnnnnnnnnnnnnnnnnnnnnnnnnnnnnnnnnnnnnnnnnnnnnnnnnnnnnnnnnnnnnnnnnnnnnnnnnnnnnnnnnnnnnnnnnnnnnnnnnnnnnnnnnnntaacagactgagactatgtctcaaaaaaaaaaaaaagaagctgagcacaggaggccaggtaatttacctaagatcactcagctggtaaggatggtgctagcagccagccctacactcttaacctgatgcttcgctttgcatcactaaacttccttggctcaagtcagcgcagaggggccaaaactcataaccaagaatggcacctccttgccacaaagccccatactctccagatatgctagagatcagctgggcaacctccactgcagcactcactcactccctggcctcttactccccgtgccaggcccatgctgggtcctggaaaaacaggtgaactcctactaatagtgggagagggaaatttaggggacttcacccaggctgggggtcaagaagggaagactttagaagaaagtgccgttggctgcgcgtggtggctcacacctataattccagcacttgggaggccaaggcaggaggatcgcttgagctcaggagtttgagaccagcctgggcaactagcaggaccttgtctctacaaaaaataaaaataaaaaaattagccaggcgtggtggcagtacctgcagtcccagctactcaggaggctgaggtgggaggatcacctgagcctgggagttgaggctgcagtgaactgtgattgtgccactgcactccagcctgggagacagagggagccctgttgcaaaaagaannnnnnnnnnnnnnnnnnnnnnnnnnnnnnnnnnnnnnnnnnnnnnnnnnnnnnnnnnnnnnnnnnnnnnnnnnnnnnnnnnnnnnnnnnnnnnnnnnnnnnnnnnnnnnnnnnnnnnnnnnnnnnnnnnnnnnnnnnnnnnnnnnnnnnnnnnnnnnnnnnnnnnnnnnnnnnnnnnnnnnnnnttcctgtgccccatgcagcaaggcatatgcctaggaaggaactgctggatctgaggcttggcgatgttcctgctttagaaagtcatgccaaacgttttctaaagtgttggtgcaaatttacactctcagaaccaggaagaagagattgttttttttttttaattttattttacatgaaaatcttccatcctctccatacatcccatgctatctccattccccaccctgcttggcccaggctatgcctagaagcaagtcaaaggcaggtagagcttgggctgaggctgcctgagatgcctcaagcactctggtccacagagacagtcaacagtgaccgtggtctccaggcccagaaagagtctgaccacatctgatcatggctataaacggagcctggcaacaggagcaggacctgctgacaggatcagtgggctggtcatgtcagctccagtcgtaggagtggggcagggtgagggcaggaagagcagtctctgggtgtcacactcccctcacctgtttgtctgcccttacacctcaggctggtcccgaaagtggggctctgtcccaaaacccctgcctggacagtccttgacctacaagttgcaggcatgtgtctggccattgtcagactcactgttctcacgaccacaggaaggtgtccagcttggcctggaagagagaagcactgtcttcaccctcaccctctgcttaaccttggtcttgggcttaacaggcaatgggcgatcatgactgtgtcagtctggaggagctgtcaaggaagaggcatggagaaaggactgcatgcagggcgagaaaggactgcaatgcagggcaagaaaggctcagagccgggggtgggcgcgctgatacacagaatgaggcccagcactgcacacctgaggctgttggcactggcaggtgggggtataggtgaggcatagtatgggctccacagttcagctcagctcaacatcacagaaaaggatacaggctggatgaattttgtccggccaccgagcccatcgaagcctgtccttcctagggtggaaggaagagatgagtgggccaggctaatgggctggggggctggccaccctttctacccaagagggctggctcctgccactgtgggaagccacactcaccacatctttgtgcaagaggactctgacctgggcctcttgggctgtttctggcctaggatggcattccggcaaaaatagggaaggcaccaaccagttcctcatctggctctcctgcacagctctggccaccagtgagagctgggactcctgcagggaagaccccagggccagacttgatgagctggattcagcaaaggagggagggtagtggtggtggaacaagatcaggatctctgatgcctcactggaggcaggagggataatgagtagaatcccaagggtggctccgaagtacctcagtcctgaccaggagtgacaaggctctggcaagaccgtgccctcccaaaagtccagtcctgccaaagttagactgtgcttcttctagaaagctcttaccttcctggggcctttgcatatcttcttgggacatcctgaattggggagctacaagaatgagagagaaggcaaggggtaggtaagcagacatgggggcaggtgaaccaggctcagcacacgccccttggggagttaccatgtggcatgctgctgccatgcctgcattctgggcaaggcacctcagtgatcccaccccaagtgcagtctgttaacagctggacagccacagccagtagggtggcagagacagggatgactggggagactggaccatgtcccaatcctgtggcttccactcaaggccaaattccaacgctcctcagtcctcgggcacctcaccatgtcccaggctctatatggggctgaagagcccaatcaactaccacccacgggaggaaagccagtcatgccctgatacgagcaaaagaaatttaatgagccaggcctagtcctgtcttcccagagaggggacactacctccacgagagcctcagtaagtagcctttcagtaaagtagcccacaaaatcctctcagaacacagggccaagccatctcccagagagtgtgtctaagaagggcctggggcagaatagcgcatggccccaggccctggtctccaatcccagccccagagccagaaactgtatttccatccaattcctggggaacccagcactggataccctctcctggcattttccctggtgggtgagaagatggtgatctaaggctggcctgtggcttctcaagccataaggacaagagtgggatcagggcctgatgactgactccttgctcctgccctaacggcctgtggtaaggctacatgacaaccaaggctccaggaaggacagctgagttagggactcagaacttcactacctccttcactacctccacaggccatgaagtggtggaaatgtctctgaaaggcctggcagcctgaagaccccaggtgtccaccttcaactttacagcggaagaagggcaatgggaggaagccagagtacacagcagacactgacaggaccctgaggactacagcccacgggtcctaggtttgtttctcattgctaccaggcctcgcctctacaacaggggtgcccatgccccctgaggtttgggaggtaggacagcccagctggctgccctcttgctcccttccacctccactgtctagcatctcagtttctttctctttctctttttctctctgtacaaagtctttgaaaaagaggaaacctgcccagcccttgaccagcctccctgaacagtacctgtatgaatgagtatagtccttgtctccacagtgaattacacttggaaacctggccaaggagacagcctccctttttctggtcccactgtaccccagagcaggttcacctgccccactggaattccagacagcttctcatgcttgcccctgtgggtcaccccctgggtggtaaggccttgggctctgtggtttgagatgatcctccctcaggcatgagcctcaaggcaaacatagaagaggaagttcagagtccctcgctcaggactctggtgggcaggcctcaaggtattgggagcaccctctccagcccagacccaccccttctggcatcactgcattcctctaacttgcattccaatacgtttgccttgaaaggtgatggtgaggaataatgagacagagaaggggtttgcacagattgagtgctcaggtgagggaacaagaggtagctggaaccaagccatggccaagcctaggcaaccctcactgccccatcagccactcagagctaacagcaagggcctgcagagctgtcttagctatccccctaccagcccatggacagtgccagcgacttcactcactgtgacttctctaggcaaagtttttcgtagtaaccatgctgggagctggaggccgggctgggggagtatccacatcaaaggtagcattgagatcaatatcatcacggaagatggccggcggagcttcagattcacctccacaggggctgggctgaaggcagagatgaccggttacttggggccacagtggtaacccaggacaacagctcctgaagcatcagagataaccagctccagggacctggagcccactcctgactcaaggccacccctcaagaaagccctacctcggccaggcacagtggctcacgcctgtaatcccagcactttgggaggccaaggcgggggatcaagcggtcaagagatcaagaccacccgggctaacatggtgaaaccccatcctacaaaaatacaaaaattagctgggtgtggtggcttgtgtctgtagtcccagctactcgggagctgaggcaggagaattgcttgaactcgggaggcagagcttgcggtgagccgagatcgcccactgcactccagcctgggcgacagagcaagactccgtctcagaaaaaaaaaaaaaaaaagtttaaatttaatttaatttaaaaagcacacaaaactccatgtatagtgcaattacagatttggcacccccccaccactcccacatgcagaaaaaggagaaggaaatattccacattcaaccataagtacctctatgataactccctattttccaaattctcaatgagtgtgttttacttttataacacgggggggggggggggggggggggggtggggagtgaagttttattcattaaaactacagccgacaggattcttccagcccacccagacctggcagggctccccactcctgtcatacaaggagaaccctggggaatggcaagggtagctccaaagatgccttctcctttccttcctcaggaacttttcagagctgcaccacaatcccacttccactggggtgtaacatcagagggaggaagcctacctgcattgatttgggtggctaagcaatccaggcagccggactatttcttcctttccctgtccaggaccctagaagctctacctctgtccccgcctgaagttaaaatgaagactgcacaaacccacctcaaaccaactctaggctggctgctttgctcctcctctgggaaccacagcagccaggaccactcatgccaacttttttgcagtatccaattctgccaccatttaccaaccccagcaagttgaggctcaggttaggaaaggtaaactcagaggaaggcaggatctcgctgggtcctgtaaattttaccctccaggtggctcaaggcagactttctactcccagccatcccctaaggcgttgcctagtggtgcccaagctcaaggcagccaggcttattcacttgcacctcctggtcatccacaacactaaactcaagactcaggagttctcacggtgcctccctcactccccatatccacatctggatcatatggacacatttctcctctcttagactgtttcttttttttttttttgagacggaatcttgctctgtcacccagctggagtgcagtggtgcgatctcggctcactgcaagctccgccttccgggttcaagccttctcctgcctcagcctcctgagtagctggggctacaggcgcccgccaccacgcccagcaattttttgtatttttagtagagatggggttacaccgtgttagccaggatggtctcgcttcctgacctcgtgatctgcccacctcggcctcccaaagtgctggtattacaggcatgagcaccgcgcccggccttgtcttagactgtttctatattcttcttccttcatgagcttgaacctatttccctttctgccaggggtccactttctttccttcccactttctgtttgtcctaaaggagaaagaacctagggcttagtagtccttccctcactggttgaggctggcttgaggcctcctgagtgacactatcacccttgggacacccacccatggtcaagttacagggcttctgccagaggcctcagggagccaggcaagacactcaaagctcccctttccagaacagagcaaggccttgagcagcccattgcctgcgtggcatgggattagtcaacatctcctccatgactcatggctcctggcggccttaccctaccctaaggaaaggtctccctggctgtctctagctggagttcaggggcccttggggtccatgagagagatcttcctaacattgactctgtagtgggggtggtggctacatgctgatgcctccctaaaatgacaggtatgaagggtaatcctctgcaacaagtagaaggggcaaccaccatcagcccccagagatttccaaaaaattctggagacaaagcatggccaggggacaagagactgacacagcagccagaacccacaaggaggggtccatgaaggaaagggagggccttgcaaaagcattaaacaggcctgaaaactggaacatgatgaaattgtgagcttggctccaccccatcctaatctgcattggtagaacactaggcgttaggctgctgccctgggccaataaatagaagagcttttctcaaagacactaaacaaatatgtacaatgacctagggcagccaatattattggacccaacagtaaagccttctgcatctgggttcaggtaagactcaacatgatgccagcagtctgcacatcccccccaaaccctaccacataggttggcctccaaagtagccaaggaccaccaggtatgggaggggagcccaggaaaagtccatggtgcacaaatactgactctgagacaaacagaaatatgagaccataaaaaagaacatgatgctttgcaaaacagacatactcaaagagcaagaaagaatgcttgcaaattaaaacatgaatactgccaggcacagtagctcacgcctgtaataccaacaatttgggagctgaggtgggaggatggcttgaggccaggagttcaatactgacctgggcaacatattagactctatctctacaaaaaataaaattaaataaattaactgggcattgtggcacatgccgtaatctcagctacttggaaggctgaggtgggaggatcccttgaacccagggggtggagttgcagtgagccgagatcgtgccactgcactccagcctgggcaacagagcaagaccctgctcaaaaaaaaattaaatatgattactgattcagccctaaaaaggaagaaaattctaatcatgctacatggataaaccttgaagacattatgctaagtgaaataagccagtaataaaagacaaatattgtatgagtccacttatatgaggctcctaaagtagtcaaattgatagagaagaaagaatggtaagtgaaggagctgaggagaaaggggaaaggggagttattgtttaatggtatagaatttcactttgggaagatgaaaacattctggagtgggatggtggtgatggtgcacagcaattaaatgtacttgatgccacagaaatgtacttaaaaatggttacaatggtagttttgtttatattttactacaataaaaaatactgctgcagtaaaaagttataaaaataagaagcttcttaaaaaacttaagaaacttcttggccgggcacggtggcgcacacctgtatcccagcactttgggaggccgaggtgggtggatcacaaggtcaggagatggagaccatctggctaacatggtgaaaccctgtctctactaaaaatacaaaaaattagccgggcgtggggcgggcacctgtagtcccagctactcgggaggctgaggcaggagaatagcgtgaaccgggaggcggagcttgaagtgagccgagatcgtgccactgcactccagcctgggctacagacaagactccatctcaaaaaaaaaaaaaaaaattcttaatttttttttgtttttgtttttcgacagtctcgctctgtcatccaggctggagtacagtagcacgattctggctcactgcacctccacctcccagattcaagccattcttgtgcatcagcctcccaagtagctgggattaaggcgtgtaccaccacacctggctaatttttgtatttttagtacagccaccatatccagcagagatttattaattttcctaattttaaattaagaaatggtggtggctgggtgtggtgctcacacctataatcccagcactttgggaggccgaggtgggaagatcacttgagatcagaattaaagaccagcctggccaacatggtgaagccccatctctactaaaaatacaaaaaatagctgggcatggtggtgcgtgcctataatcccagctactggggaggttgaggcaggagatctcttcaaccgggaagcggaggttgcagcgagccaagattgcaccactgtactccagctaggcaacagagcaagacactgtttcaaaaaaaagaaaagaaaagaaaaggaaaaagaaaagaaaaagcaaagcaaagcaaagcaaagcaaagcggtggctcacgcctgtaacccagactttgggaagcccaggcaggaggatcgcttgaggccaggagttcaagaccagcctggaaataagtgagaccctgcctctacaaaaaattagttgggcgtggtggtgcatgcctgtagcaatcccagccactcaggagattgaggcaggaggaccacttgagcccaggaggtggagcgctatgagaacagtgaaaatttactgaagtttaccagcttcttcatcaccctctcccctgatactggaaatgttctactagaccagatttccaaagtggttgcttcagatggtttcaacagatcaactgttgccatggagagatggattcctggagctttctactcttccatcttcctgacatgactttttttttttttttttttttttgagacaggtctcactctgtcgcccagatagagtgcagtggcgtgatcatcacttactgcagtcttgacctcccaggctcaagtgatctctcacctcagcctcccgagtaggtggcccaagaaaacttaagacttcttccagaccttgtagtaacacattagcagtcacaggagaaaggtagaggcagagtctttgaggtcactttagttctgagggtcttgccatcagaacacaaagaagacagggcaatgccgttgctgaggttcaacaactatttttgagagtttgaggctatgagtttagaagaggctgtgcctaggctggcatggtggctcacgctcgtaatcccagcactttagtcccagctacccaggaggctgagcaggatcacatcacctgagcccaggaggttgaggctgcagtgagctgtgatcacaccatgcactccagcctgggcaacagaatgaggccctatctcaaaacaaacaaaccaacaaacaaccaacaaacaaacacaagaatagactgtgctggtgctgcctaatgcctagttaaaagagggcttttgctaaaaacaaacagacctgccaccgtaatttttttttgtttttgcttgaacggagtctctctgtcacccaggctggagtgcagtggcacgatctcggctcactgcaactctacctcccagggtcaagcgattgtcctgcctcaacctctcaagtaactgggattacagcgcctgccaccacacccagctaatttttctatttttagtagagacggggtttcaccatttggtcaggctggtctcgaactcctgacctcaggtgatccactcacctcagcctcccaagtgctggggctacaggtgtgagccaccacgcccggactttttttttttttccaagagagcggggtcttactctgtctcccaggctggagtgcagtggcacaatcatagctcgactcttggctcaagtgatcctcctgccttggcctcctgagtaactagaactacaagtgtgtgccacatgcttggctaagttttaagttttttgatacagggtctcactatgttgcccaggctggcttgaactcctggactcaagcaatcctcccaccttggcctcccaaagcactgagattacggtatgagtcaatgcacccagccaaccacttcaatatttatgcccagaaaaatactggaacaaaaatgaatgaagtcatcctcatgtggcttgatgagaagcccagcccagcttacagagaaggcttgtcaagtttagtgtcctgctggcctgaaagccaagggagaccattgctgtctccctgtaccaagatgggctgcaggccctggcatgaagcttactcagaatgaggtgggccgtccccaactgggagctacagaccagattctataatgtagtatatagctggttggcttgggcttagccatctaagctccaagctcatctatcccactggaacataagctccaagagacagagaaggtctgccatgcagtgggcactcatcaaggacctgctgtaggagtccaggcttccagcaccctgaagaggtaaagaaagtaaacaaaagcaaccaggcacggtggctcaccctgtaatcccagcactttgggaggcccaagtgggcagattgcttgaggtcaggagttcagaccagcctggccaacatggtgaaacccgtctctgccaaaacatacaaaaattagctggcatggtgacacatgcctgtaatcccagctactcaggaggttgaggcaggagaatcgctgaacctgggaggcggaggttgcagtgagccgagatcgcaccactgtactccagtctgggaacagagtgagactccatctaaaaaaaaaaaagattaaagactgggctgggcgcagtggtcacgcctgtaatcccagcacattgggaggccgaggcaggtggctcacgaggtcaggagtcgagaccatcctggccaacatggtgaaaccccgtctctactaaaatacaaaaaattagcaggcgtggtggtgcgcgcctgtaatcccagctactcaggaggctgaggcaggagaatttttgaatccaggaggcagagattgcagtgagccgagatagtgccactgcactccagcctgcaacagagtaagactccattaaaaaaagaaaaaggaaaaaaaaaaaaaagactggggcactgacaggagttgtgtgctttctgtctgggtccttgctggggacttttggcaggcaggggtagccttgaggatgctctcagctagtctgcttctgtgaaactctcaggagcagaaatgatgcccatgcttgcagggacaccaatccttctgcctcgtggctccctctgctggcagcttaaagcacgcactcctggcactaagggaattattttacagtggtttcatatttgtttcaaatctggggtggacagataaatgtggggagctactccataaacaggatgccccaagacgtcagtgcttctgccctattctcagaccacttctaggtcctctggccttctctggcctcccgtgtcagagcctaatttgcttcaaggctgcttgccagctaaatcttggctggctcccgggcaggctgtctgcagacatcaggtccacagaggtcacccaccccaccaaagccaggagagtaaagactgttaccagaaagctctcccaccttgtgacccctgtaccgcccaaggctaacaaacctctctaaaaccaggcggtcgacagtctcactggccactggtggcaggttcaggtttcctgcagcatcgttagcttctttttcaggctcttggggagggaaagaaaagtgttgagagaaaggctgaggcatcaagtccggagataatgcagaggacatgagcagcatgcagaaaggccagcccactgggaacagagcaaggcctgatacctcatcattaggctcaggagccaagccccaggtagagcccctcctctgataagggacctcagggatgtaagtgcaggacgactatgagggaagactcatggttctgtctgccctctgttgaggaggcccaggctccagccggaccagggccaaggggcacaccctgacccaggaggatgcaggggcccagaaccaccctgactggtgcaagggtcctgggcagagatagcccagccctgctctgggagggcacacaaccacccctcattcctgtcaagccagggatgtccctcaccatgatttccttgtcagcacctgtaagtccttctgggctgacttcagttctaacttggcctgatccaattcagagtagatgtctgcaactataagaaagtgtagggaatgaaagacaagccaagtggtagccttgtgcctgccccctcctgctgctccccagggagtgatcaaggtagcccagaagagactagagattgggcagagatcccagctctctgaggctaggcctcagtctggcaatgcacatccggagcgcctagaagcaaaggctgcttcctacatcctgcagcctgtggatgcaccatgccagaagaaaagcagctgtgctgaccgaatcaggttccaggagccctcctactccagatgtggtacaaaataggcctctgacgctgtcacatttgaggcctgtgctctccagccagctgagaggtcccaggagccaggaagagcagaggggagcatcagtgtccacatgttgggggatacctcttgatctgtccacccctagtggacaagccacatattcaggccaatgcccagtaaggactgtaacaaatttctgtaagtcctccagctgccccagggagtcagctgtgccatcaggtccctggccttgctcaggagaccagagtgaacatgacaaaaggagagccacttctccttcaactctgttcactgctaagttaccttgcttctggaggaaaacaaatccttcctcagcttgtcgccacctcccctgaggccttccgtgcctcttttagattctcgtactctctgcaatgtggcatggaaagagatgccagaaaagaacacctgcaggtcagactgagccacagcactaatcaacacaaagcactgcccaacccctcaactcactctcattcctactttgacacctgagccaacaagtaccaggtagcactgtggagggtcctgcagagaatgcaaggaagtgactatttctcctgcctgtcctgcaggcactggtgacttgagagggcatgcagaaagccccagtctcctagggggctccctaaaccacctggtcttaaaggaggcatcttggaccctctatgcctccagctaagtggccctccacccttcctgccaaccttacacccaccagagtgaagaatatggtagagtttgatcccagccaggcaggatcatagtgctaatggggaacaggctctacatacaatcacaatggggcttatagcccagagagctaggtcaactcccttagaaacagcacttagattcacactaaatcctcaacaatcctatgaggcaggtctactactatttccattcagaagttgagggtcaaagaggccaagaaactggcagcaggccacatagttgctgaaaggtgaatcagggttcaaacaaaggcagcatggctccagagtttgccccttagttccatctgcttacaagagatggggagcaatgacacggctggggccccatggcctatctcctgtgtttgcgagaggggccacagtacgcacttcttgagagacacacagtacacagccagctgttccacgctgactgtcccacacccatgtctcggatcatctcctccacctcagggcgctggctctgagtagaagctcaatcctgaaaaatacacccagcccacggcatttgcaatctggaggctgtgggtaggtacccagtgccgctctgccttcctttgctgccgttgctaaggtaacaggctggctgccaggatgctttagtaggtgggtgtgcccaaggaaaggccctgtggcagagatggcatagctccaaggatgctgctgagaaagaagaggtgctgaaagagggtctcaaggtcaggatttcctggagagaggtttctggaaggaaagacccaccaggtcatctggccacaggcgcagagacagggaggaatgtggcaagggctcccattccttggaatgggggaagagttcaagaggctaagatctgtgcccacacccagctgacctgagccctccatggcctatggagattgagcctcggacatgacccaatcccactccctgctgcagtcctaagaactgtaccacttcaggccctgggggcaaaggcacagtgcaggacccagctccaaactcactgctccatggtttcatcttgctcctgagccggcgggcctcctcttgtgcttgtttggtctcatcctgctgtgctctaagtacttcatctgcttctgaagagcaaatacacccatacctgatgcttggagccctcaggagccattgctaaagtcactaggaaaactctgctccagaactctctgcagctatgttttgaaaatgctgataaccatgtactcccaaaccccaggaggtaaagctcctgggcccactctcgcttgtgcttcttcttctaaaaggctctaagccagctgcttcttcacctcctgcctgcttcctcctgaaaggtatcttacagtagacacagcccactgccagcatttacggcccactgtgggctgccaaggtccagtggtctgggcctcatggtacatgttgtgcaggggctgaagaagtccagagcacaaacccaggcctcaccatccaacacccagacccatggaagttgccaagaatgaataattgagccaggggaagctggccaggctgccttcagcctaagccacttgtctctgacctgagaataccatgagagactcctgctctgcagccaggtgccagttgctccctcccaccagccagaccatgtgatccagcccagcccccaagcaggaacagagcaatgaatatcctggggccttgtctgttcacaaggatggctccctttccctttcaaatgcatccagcaaggactgctcctgcctacaaggccagaatatcaatcgtgggttcagatcatcgcctctcatgccccttggagagcaagaggctcaccaacccaggctgatgcaaaattctctgggtctaaggctgttcactctgcagactttgatctggttggtcagctcagcacagcgacttcaaaggcccttgctcctccctaggatgctgtttgatctggctcaggagagcagccagccaaggactagagtgctaatggaaggttcttcaggctggcctcatcagtagagtataaccactttcggaaatatggcccagcctcactgaggtcttagttgagcatcccctctgtaggtactgggaaggccttgactcttcaaactacctagtacaaaacccacaagtatagccatatggcccttttcttatgggatggatgggtacagtatggaagggcaaggggaagaagtatttgcctctattttacaactccccaaaccaaggtgatgactggagcagaaccagaagaaagcccagaatggggagtccagttctggggcaatacctccctatgaattctgtacccataaacctgaggacctactttcagtgtggagcacagcatctcggccttgcccaaggcctgcgcagagataccacagtagcattgcgttcttccagcgtatcccgcagagtgtcgatgatgcctggctgtctcgtttctccttgtctggagcaggggtagagggcggaggaaagggaaagcctgtccatccatcagcagaagaacttgggcccttggattcagtgcctcatcccttaggaggtgagaaacaaggctcaggcctgaaagctgggtggcccgcttctttctctgggatgtccaaaccagagaagctgagccagagccttcattcagggaaaagcccaccttctgctgctgaactacttaggaaaatattttactgcccattccctacctgccatgggtccagttagttatcaacccaggactcaagcaggttccagccaaactcagcagctgagccctctcccgaagtattcagtcccatcaggtaaccccctcccatcttggttcctgggcaagaagctgcactcgagacaagaggctcacctggtctaggtgaacagcttcagtcacctcccttccctctcttttctgcccaccacaacagctagcaggactcttggacatacaaagcagggaaaggccctgctctcccaaacggtttgaaaccttcctcctagggcccccttcctccagcatccaagtcagggcttcccagcacccctcgtctcttgctaactcacctttctgggaaagctgggctctgcattgtccagttcattctgaaaggcaatacccacaataagcagcaggaaagcatcatagtgacctccacgtggtctcccataaggctgtggggagccccaggattgaacaatgaggcctctagggcatgaatcctgcagtgcctcaaggccaagctaagctaacaatggaaagataacactgctgtagctctatgtgcccttttgaaaagtaggtaagatggaggaaaacaatctcggggcaaggccccaggacaggtaaagaggtagaatagtggaagggaagttaaagtagggccctgtgatcagtctccatagcagaagtttctatcacttccttggcctcatcgctctatttggtctcattccctctgggcatcagctgactcaccagggacacacaataggaatggccaggaccttgggcgactactcctcctctccaccctgggtcttcctgattcatagtcgacttcctccaagctctgaactggctctgtgtaccacaaaccttccagacctagtatccaatgaggtagctatgccaggacagctttgtacccctggatgaaacctcccatgtgtctagtcttaactagactattgtgaggatcaagtgagcctctcaaagcccctgcaaatgtttcacagcatgccacagaatcattgagaagctgtggcagaattgaacccagttcctgttcaggatgcacagaactcaacatccccatgagcaagagaggtgcctgctccataacaaagaaatccaggttttacaaaactgaaacgcttgaccaagggtccatggtggtagctagatggaatccagcaaaccttactgtagatcacttgtctaagatcaacagaagactcagaatttcacatgtaccaatagtatggcccaggcccagtgggtaaacaagcccctactgtcaaactctccaccaggactctgggggcaagagcttctggtggctgggctggttagcataggctgaacagctggagtggaggtggtgggtaaggaagagcacgcaagggctgcctgagaacagataccaggaatggctgctgcaccactacccatagtcccctgacttcttccacactccagcaggggcttcaagcccttgctccaaactacccaagatgttgctacctgtctcacaaacctggctttgaagctggaaataaatgaaactgcctttgttgccttcatcacagggaagacactacttaaactgggagcagttaccatgacgatgaacatgcttgctctaagcacaaaagctccatgttctgaagcagtgaggttccaaggacatcatgacaccctggggccagagccaaatgaactctatctgacagatatccagcaaattaaccctcagagtccagggatcatttgtgaacccaaaccaacttcctcaagagttctctgccaacgcagcctgcttgcacacaaaaaaagctaaatttagattaggaggggaagcagttagacgtataggagggaaactacccactttcccctaaatatccattcccacctgagctgcaactcttgattccaagagctctggtctggggaaggccaggcatctgactttataccaagctccctaggcaattttttttcttttaactttttttattaatagagatggggtcccatgttgctcaggctggtcttgaactcctgggctcaagtgactgcccaccttggtcacccaaagtgctgggattacaggtgtgagccatcacgcccagccccccaggcaattttgaggcacaggcaggctagggaacactgaatccaaaaatctcccgtgctggggagtagaagagttttctaatctgtcactaactgtccaagcagcaaagtaggcttacaggatggctgtaggttctttaaaagatgaggagacaagaccgcaggagagaattcagttggaattgacctgaaatcccaaagggagggtttacagtcaagcagctcccctcttcctcacagtgcatttctctgatgactgtgtctcatcagttgtcctctgatttttgtgtcccaccttgaaaactgtaccaagtctcacctctataacttcatctccatattccaggaacccccacttatgtggaaatagaaagtgaactcccaggccaggcacagtggctcatgcctgtatctcagccctttgggaggccaaggtgggaggattgctcgagcctaagagttcaagaccacctgggtaacatagcaaggccctatctctataaaaatttttttttataaattagggctggcacggtggcccacgcctgcaatctcagcactttgggaggccgaggtgggtggatcactcaggtcaggagttcgagaccagcctggccaacaaggtgaaaccccgtctgtactaaaaaacaaaactagccgggtatggtggcacgtgcctgtagtcccagctactcgggaggctgaacaggagaattgttttaacctaggaggcagaggttgcagtgagccaagatcacgccactaactccagcctgggtgacagagtgagacttcatctcaaaataaataaataaataaataaaaaataaataaataaataaaataaaaaaattaaccgagcatggtggtgcacccctacagtctagctactaggtaggctgaggtggggagatcccttgaactcaggagtttgaggttatatgagctatgattgcaccactgcactccagtgtgggcaacaaagtaagaccctgtctctaaaaaagaaaagaaaagaaaagaaaagaaaagagaaaagagaagagaagagaagagaagaaaaaaagaaaagaaaagaaaaaagaaaagtgaactcgcacaaggcttggagttcagtagatcagataaattctgggtacctttaagaattctgcatccaagacattctcctcctcctggcaagatcaaagaagagcttattgataatggttcttttgccaacctggatgggagaacaggtaagagtatgattgtgtagctgggtcatgcgcaaggaggagagtgttgtacatgggttgactacctgcctgacatgcatgtcaggcctgttctcagacctaatttttcaaagtacacctttagagtcaaaagacctctttactcctgcaggtaccccaagttggggctgctggttcgtggtcactgaagtcatattactacagacctacacggttaagtgctcaaaagatacctaactctaggtgcggagtcactgatgaaaagacagggaaggaggccagccaaatctacccagtgaaaactggcccaggcaacaagtccatctgccagctacctgtgggtgtaagcagactcccaaacactcaagggcacaagtgaggctcaactggccttaaaccaggagggtccaaaaaggtcagagatattgcagtttcagagctcttttcacattcctgctctctgctaaggagtctcttcagttgaggtggtcccaccccaatactctcacctggattcggcactgtgggcagtccgacttggtgctgtctcaaaccactgaattaggctggaatgaaaagcagaacaataactgatgagccctggtttgtctggggacataagccaggcaaacattctgaccacgaaaggtctgttctgctcctccttgacccaatgcctgcccaaataagaggacagtagcataggcgttacagcacctcccgcaaggcctgatgggtactcaggactccaaccagctggcccttttttggccctgttggcttggccaaaagctgtcctttaggcaacattctgggctttgactgggttgggagagatgatagtcgaagctcaggggccctcagagatgaggactctgataacaccccattttaagctggaatcccaaagactacactttcaaggtaaggatcaaccagaaataaagtaagtaagggtacaaaaataaagttagatataaggaataaaatctagtatttgatgcacaacagagtgactacagtcaacaataatctactgtacattttaaagtaactaaaagataggaatgtttgtaacacaaaaaaatgataaatgcttgaggtgatggctactctgtttccctgaagtgattattacagtgtatccctgcatcaaaatatctcataaacccaataaattgtatacctactatgtactcataactttttttttttttttgaggtggagtcttgctctgcgcccaggctggagtgcagtggcacgatcttggttcactgcaaactccgcctccttggtcaaacgattctcctacctcagcctcccaggtagctgggattacaggcatgcgcgaccaccccagctaatttttgtttttagtagagacagggtttcaccatgttggccaggctggtctgaactcctgacctcaagtgatccacctgcctcagcctcccaaagtgctgggattacaggatgagccaccatacccagccataaaatttttttaaattaaattttttgtttttttgtttttacagaatagaggcagggtctcactgtgctgcccaagctggtctcaactcctgagcttagtgctcctcccacctcagcctcccaaagtgctggaactattggtataagccactgtgccaatcaaaaaaatttttttaattaaaaaaaaaaaagagtggccgggcgcagtggctcaccctgtaatcccagcactttgggaggccgaggcgggcagatcacaaggtcaggagattgaaccatcctgactaacatggtgaaactccatctctactaaaaatacaaaacattagccggcgtggtggcaggcacctgtagtcccagctactcgggaggctgaggcaggagaatggtgtaacctgggaggcggagattgcagtgagctgagattgtgccactacactccagcctgggcacagagcgagactccatctcaaaaaaaaaagtaagtagtggtaaaagcaaaacacagctagctttgcatcatctatgcaggtggtccagcaaagctcaagccttaaactttaattagttcctactagtagactcccctactcctagggaccagggagaaactaagtcctctctggaaatgataccatcatcctggcctcaaagattcctataagtacattttcttttcttttctttttttttttttttttttttttgagatggggtctcaatctgtcacccaggctggagcgcagggtgtgatcttggcttactgcaaccttcgcctcccaggctcgagcaatcctcccacctcgcctcccgagtagctgggaccacaggcgtgcaccaccatgcccagctaaaattcccatagttttcaaataccatgtacaacatataatcaagagtaaccaggcgcagtggaatactaccagcaagaataaatgagtctacagctaagaacaatattatgaataaatcacaaaaacatacactgaggaagagaagccagatacaaaaagttatattttgtatgattctatttacacaagtttaaaagtaggcaggccaggcccagtggctcacgtctgtaatcccagcactttgggggtcgaggcgggtggatcatcaggtcagaagtttgagaccagcctgaccaacatggtgaaccccgtctctactaaaaatagaaaaattagccgggtgtggtggcgcacgcctgtaatccagctacttgggagactaaggcagaagaatcgtttgaacctgggaggtggaggttgcaggagccgagatcacgccactgcactccagcgtgagggacatagtgagactctgtctcaaaaaaaaaaaagtaggcaaaattcatctatgctctcaaagtcaagacagtagctatcttaaatggggaggtggagggaggtgttggtaggggttggaagagcatataaggaggtttctagaggtttctagagctgataatagtctgcatttttttttttttttttttttttttgagacaagtcttgctctgtcagccaggctggagttcagtggcacgatctcggctcactgcaacctcacctcccaggttcaagcaattctcctgcctcagcctcccgagtagctggggttacggggcacgccaccatgcccagctcatttttatatttttttagtagagacagggtttcaccatttggccaggctgctctcaaactcctgatccacccgcctcggactcccaaaatgctgggatacaggcatgagccaccatgcccggccaatagcctgcgttttcctgttttctttttttttttggtggggggactttcgagacagggtctcactctgtcacccaggctggaatgcagtaagcaatcatggctcacagctgactctacctcccaggctcaggtgatgatcacctcagcacctgggtagctgggaccacaggcacatgccactatgctcggctaattttctgtgtttttgtagagatttcatcatgttgctcaggctgttctagaacttctgggctcaagcaatctgctacctcagcctcccaaagtgctgggatcacaggcgtgaatcaacacgcccagccatacctgtttcttgatctgaattctggctgcatagatatgttcaatttgtaaacattctgtaagcatatacttagaatatgtgtacttttctgaactatattatacttcaattttaaaatgtttttttttgaaatggggtctcactctgtcatccaggctggagtgcagcagcacaatcatggtcactgcagcctcaacctcccaggctcaagcgatcctcctgcctcagccttgcaagtattgggactgcaggcacaggccatcatgcccaggtaatttatatttttttcacttttttgagagatggggtgtcactgtgttgcccagactggtcttggacccctgggctcaagcaatcagccacctcccaaagtgctgggattaaaggggtgagccatcatgcctagccaaaaaaacctttttttttttttaagactgagtctcgctctgtcacccaggcgggagtgcagtggtgcatctcggctcactgcaacctccacctcctgagttcaagcgattctcctgcctcagccttcaagtagctgggactagaggcgcccgccaccatgcccggctaatttttttgtatttttataaagacggggtttcaccatgttagccaggatggtctcgatctcctgacctcgtgatccccagcctcggcctcccaaagtgctgggattacagttgtgagccaccgcgcccagccaaaaaacatttttttaagtaaacaggtacacaagaaaaaaaagcactatgaaaacaaaccagagaaatgcccacaaagactttaggtaggccaggtgcagtggctcacgcctgtaatcccacactttgggaggccgaggcgggnnnnnnnnnnnnnnnnnnnnggaggccgaggcaggcgatcacttgaggtcgggagttcgagagcagcctgaccaacacagagaaaccccgtctctataaaaatacaaaattagccaggtgcatgcctgtaatcccagctaccccgggaggctgagcaggagaatctcttgaacctgggaggtggaggttgcggtgagccgagattacgccattgactccagccagggtaacaacagcgaaactccgtctcaaaaaaaaaaaaaaaaagaagaaaagaaaagaaaattagctggctgtggcatgtgctactgggaaggctgagatgggaggacgcttgagcccaagtcaaggctgcagtgagctgtgttggtgccattgcactccagccttgcaacagagtgagaccctgtctcaacaacaacaacaacaacaatctgctgagaggggcagtcacttgaggtcaggagttcgagaccagcctggccaacatggtgaaaccccgtctctacaaaaatacaaaaattagccaggcacggtggcgagcgcctgtaatcccagctactcgggagttgacgcaggagaattgcttgaacccaggaggtggaggttgcagtgagccgagatcggccattgcactccagcctgggtgacagagcgagactctacctcaaaaataaataataacaaggataaaaaagttaatggaatagaggcaatatatgaagagataatggctgataattttcagaactgattaaagaaattgctccacacggccaggcgcggtggctcacgcctgtaatccagcactttgggaggccgaggcaggcagatcatgaggtcaggagatcaagaccatcctgctaacacagtgaaaccccatctctactaaaaatacaaaaaattagctgggcatggtggcggcgcctgtagtcccagctactcgggaggctgaggcaggagaatggcgtgaacccgggagcagagcttgcagtgagccaagatcgtgccactgcactccagcctgggtgacacagcgaactccgtctcaaaaaaaaaagaaagaaagaaagaaattgctctacacgttaaagaaatcaatgaatcccgagcagaatttgtaaaaagaaattcggccaggcacaatggctcatggcttaatcccggcactttgggagaccaaggtgggaagatcacctgaggtcaggagttcgagacagcctggccaacatggtgaaaccctgtctctgctacaagtacaaaatttagccgggcagatgacacgtgcctttagtcccagctactcgggaggctgaggcaggagaattgcttgaacagggaggtggaggttgcagtgagttgagattgtcccactgtgctccagcctgggcaacgagcaagactctgtctcaaaaaaaaaaaaaagaaaagaaaaaggtaaaaagaaattcatttggatacactatactaaaactgcagaaagccaaaatcagagaaaattctaaaggtaatagagtctgaggataaagttccaaagtatgcttaaaggagtaactgataaactaaaatctacttcaatagctacaacggaagctagaagttggataagggccgagtgtggtggctcacactgtattcccagcactttggaaggccaaggcaggaggattgctttaggccaggagtttggaccagcctggctaacatagcgagaccttgtctctaaaaacaataataaaataaaataaataaaacagatgaaaaaagatataccatgcagtcaccaaaagacagctgaagtggctatctaatagcagataaaatggactttaaattagacaagataggccacgcacggtagctcaccctgtaatcccagcactttgggaggccgaggtgggcggatcacgaggtcaggagtttgaaccagtctggccaacatagtgaaactctgcctctactaaaaatacaaaaaaaattagccggcacagtggtgtgtgcctgtaatcccagctactcgggaggctgaggtaggagaatcactgaacccaagaggcagaggttgcagtgagccaagattgcgccactgcactccagtctggccacagaacgagactccatctcaaaaaaaaaattaggcaagacagactttgaattaaagtacaagagacaaagaaggacaaagaagaacatttaaaaaaagttcaatcctgcaagaagaacaattataaactccagcctgggcgacacagcacgatcctgtttcaaaaaaaaaaaaaattattccaaacaaaaactttacttaaaaacatacaattggccggtcgtggtggctcatcctgtaaaccccagcactttggcaggccaaggagggtggatcacttgagtacaggagttcaaaccagcctgggcagcatggcgaaatcctgtctctacaaaaaacaaaaattagctggcatggtgacatgcacctgtagtcccagctagttgtgaggctgaggcaggaggatcgcttagtccaggaggtcaaggctgcagtgagcagagattgtaccactgcagaccagcttgggcagagagcaggactctgtctcaaaaataacaccaacgaaaaaaataccacacatacacacattaaaatattcaacaataacgtagaagtgggaaaagaatgttagtattctaagctcttgagttgcctgggaaaatgagaaaggtgctgattaaccttgaaattggtaagttaaggatcataccttaatttctaggataaccacttataaatggaaatggggtatataacgacccaataactgagggaaaaatggagaaatacagaatatttaaccaattcctaccaaggcaagaaggagacaataagatataataggcaaggcaaaacagaatcgactaaagacaatatgtttatctttatttaatcagtaattgcaacaattttaagtagactaaatggtccagttaaatacaagattatcagactggatttttaaaagtccaactaaatgttgttttccaaggctgggtgggtggttcacacctgtaatcctagcactttgggaggcagaggtgggtggattacttgagccaggggttcaagaccagcctgggcaacatagcaagaccccatctctactaaaaatacaaaaaaaaaaaatagtcaagcatggtggcaggcgcctgtagtcccagctacttgggaggcaagatgggagaatcaccttagcccaggaggtagaggctgcagtgagccgagatggcaccctgcactgcagcctgtgtaacagagtgagaccctgtctcaaaataaaataaaataaagactttgcagtaagctaaagtactttttaatatacaaaaaaagaaataaatgctgtttcaaggatacatgtaaaacacaaggacacagaaaagtttaaagtaaaaggataggccctagcatttgagaggccaaggtgggtggatcacctgaagtcaggagttcgagaccagcctggccacatggagaaaccctgtctatgaaaaacacaaaaattagctgggcgtggtggcgcacgccgtaatgtcagctacttgggaggctgaggaaggagaatcacttgaactcaggaggtggagttgcagtgagccgagatcacgccactgcactccagcctacacgacaggagcgagactcctctcaaaaataaaataaaataaaaataaataaataaagtaaaaggatagaagaaaataggtaggcaaacagaaaatagagtacgcttagaggcgagcttaatttctagtctaaccaaaagcagtggctccctcagcatggggctcaggctgtcagcaacacaggcctaaacaaagcttgcaagtaagccagcagccatcagtgtcatgcctgcctttctgcttcctagggcctttaccccacaagaccctgtgattattatcacccaccattcccaggggtaacgctgccttatccttttgctaggaggtccaaaccggcctgtccacatctgctaggggaatctttccccactgctgtacactcaacagaatggccctacacggtcagcaggacccctggataggggagcattccttgccttccccatgttaaacgggtttgctgacatggcgaatacattggggtgtctgacagtgagatgactctgggtagaataattccaaaccatcaagtaaggcacagcaaactccttgggtagccagaagcctagcaggtttctatctggaagaaataaaaggacttgttgattggtgaaagctcacccttgcccaggctaacggttttgaaatcacatctgtttgtatagggatcaaggaagcatctatcttcactgagccatcttagtccccctcaggcttagctcagcatcacctctaccagaaagcctgtcctgacccacttctgcccaggttgggaagctcccgtgggcctcgtctaggaggaaggttctcatcacttgtctggattccggggttggaccgcctgaggcccaacacctcaaggccctgaagcggtacccgggcaaacaccgggccccaacactcagtcactcaccactgcaagtggaaggtgtggccgcagtggatggcggccacgtcgcggagtgatcgaagaagtcggagcagatagtgcacagagcacggataggcatgatggctggatcaaggggcccaggcagccaaagaaactgctacaggtccggcttcgtagacgcgccccccgcctccgcttgcttcaaatttggctccgcagcacgacttcctggagcgggccggaagtacaacacaaaactttgggcggagcgtgaatacttcgcctggattggacaaattctcggagggcggaactatgggcggggcttagcggccccgaggccgtagagaatcctgggcggagccggtcgctctcaggcgtcctctggggagactcgacctgccacttgagagcgcagcattaatcaaggcggggagcagcgaggctgccagctggacccttttccagggcaaggcagcgcatgtggtcccatgccagagctggcgcgaggcaggctgggccaaggcagagaaaaccgcagcgcaagggaatagaacaatggtcccgatgggtcccttgggctctggacagtgatggacctgcgctatggtctgtagttcccatagaccacaataccctaccctctcagtcctcagttcgggcgattctagaaagatggacacataggccccagtccctcaggtcaccccaggccaacttggcttcatccaagtaagatatgactatccttgagtttggagacactagggccagtacctgactttagctcttagctctcaggaggatcagttatgcttgagactgtagtagggttgaattttggaggcccagatgcttcaaagactagagactaacaaatcctttttattattccacatcagagaagttatctttgaggaggttatctttgaggtcctcccagagagcagcatcctggtgagttcacccaggcccacctgggctggagtaagtcaacttttgggtttttaggctagtatctgtggcagtgttactccctctacccagaagaaaccctgtgcatagtcccatatataaagctgatctgctccagctgaaatagacccagagtgagatttcatttggggcatagtggaaagcacaggtgttcacagaaagaaggaatcaacacagagcagcatagaatcttttgcattgctcaccctacaccctctccctagctcagggaagctatctttggctatgagcaggtctgtccttgcgctggctggcccaggtagattccagctctatgcctaaatcaagagtaggctcctcggtcaacaggagtcaaaaacagcagcccttacttgagctctcagcccaggagtattccttggtccaaatgcagcccaagacccactactcacatggatttctagagttcgaggacccccaccaccaccaccattgaggaatacactgtggtgaggatgatcttcaccccagcccaagaaatccacagggcactgttcactactactcccagccactacttgtgaaccgctcccagcctctcccttccccactgccttccaggggctcctccccagtaggacagaggagcaaaggcgagagggtggccagaggctttgcagggtgatgtttatttgccaggttcagaggcacacagttaacccaccgaccttcacacaccagagcagacccacaggcatgcaggggaagggcaggaccaccacggagtgccgagcaagggcgaggaccaatgtggctgcctatcaggctgtggtagggtctgacaaagggcacctgtcaggagcctccctcaggaaactgggggtttaaccctacttcctcatcccagaaaaagcaactcaatgtggctctgaggcacctggcctctgatagaagtgagctgtagaaagagggagttcctcttcatttcattgttgaactggcagaaaatctgcccctgtaaagggcaaacctccaaatcagattatgagttattgccatcagcaagccccctagggtggagaggacttgtgggctgagattgtaggaggtgggcatctggaagagcaaggaggtatcagccctccctgtttggcccagggtaaggacccagtaaggcgggacactgggtgctgggcttgtactctgccctgccaggtctcattgccacgtcctaatgttcctcctttcccttagaggctcatgaggttcagggtacagggcagcccactgcaggatcggaaaggcaggaaataacacaaataacagggtcttaggaaggacaaaaatggaagctctgccctcctactcattctctccactcctgaggacctccacagctagtgagcagtatcctagccatgtgccaagtctggacttaaacatactgccctacctttctgcatcctctatacagcctgtatctgctcctagagcagcccacacaccacaggcacacaccttcatgtgcagggcctaagaccgctgacagggcctcgctggaggaccagctctcagggcaaggccgcccaatttagggcctgggagagtgtgggacctgcagggcctgcctaggggaatggtgaggcaagagggaaggggaaggagagcaggagccccctgagtatccctagagcagcatcccacaaggacagaaactggtgaagctagcaaaagacagaaaagccacaaggaatccatgcaggggctgggccggccctgccactggcctgcccaccactcacacacatacacacaggagacgagacgctctcccgtgacccctagttatgccccactgggatgtgggggcatgggggagcgagggatcatgccagtgactctatgtacagtgagaagcccctcatccactctcccaccctcctgccatcccctgccccccctcaccaggctgcctactcagctggcctcctccctttgagactctgggcataaccagcagcctcttcccctttactagagggtggagcctggcctgtggcgcctctggggctgtgctgtccggctgggccatagccggctcaggggtggcagctgccttggggccagcatggcactgctttgggtggtgggcacagtgctctcttctgtggctggtgtggtctcccatcagtggctggagtagcgctcctgtcagtggctggggtgacactcccatcagggctggagtgatgcttccatcggtggctggggtgacactgccatcagtggctggggtggacttccatctgtggctggggtggcactacggtctgcgggggccacattatcactctttgagcacgagcagcatcaccctcaggggctgaggtagctccactcgcagctgcagctgtggcccacctgcagccccgggggtggcagtgtctgtggctgaggccgactgggctgcagccggctggactgctctggtgcccggagccgtttcatgagggtggtcactcggacagccttctaaaggagcacagtggagaaaggctaagggtgaggcttgctggatccattgcttggcagtaccaaaccaaactccttccatagtacccccggccacctccatccaccccagggccaagtctcagctgctcagcactcctacttaaggtaatcacagtggctacacccacacctgatggctgagaaaagcttgtgtgtggctgcaggggtgtgatgcaggcaagaaactgagtgccagagcaatacttgggatagagccaagaagggagttatccaagccttaccttccacttggcctggcaaagttcttttcaatctgggcacagacaccatccttgatgttcttatcagaagcacattgccagaaatcctggaaagggtgcaagtgtgtctggatctgagagaatgagccttttggagactctgctcagcccttctatgtggcatccagggactaccaggcagagcctctggctgccctgagctctaggtacctgcaccccttctaggcctcaaagatggggctgctgggttgagggggaccctggcctctcccaccctcccctggaccctgctcaccactcatgggagaggcctcttctgcagtgatccgctggtcttgctccacctccatcagccttgtgaccaggttttggctgtggacaaaaccaaggaggggatagtcatgggcaccccatctcaatgtctagggtgataaatgggctgggggacagaagcagaataccacagaggaagatgagagcaggacccctccccactcccttgcgttctaccaagtgctgggcaggcacctcctcacctgcctgcaaatatcatcccaatatggagagtcaaactcatagtcaccagccaggatcttgcggaaggattcttatcatggttctcataatcatcttcttccacctcctcatagaaaggtgggttgctgaaagcctgcatgggggaagggtcacacagaaaggccacagacacatgcccccacccatctgactgcaagcctgcttgtccatctgtccactcacaggatgtacatgatgactccatggcccagcagtccacagggcgtccataccgctgccggcctaccacctctggggctacaacacagcgcccatctgctggtcagtatcaggcctagccaggtccagtaccatccacaccgcttcctgagatgagcacattttccccctgcccagagcagctccctgaaggctgcccccattatccccctgcccctgccccaccccctgcttgcccagatactcgggggtcccacaggctccttgatgaggccattttctagcttagccagatggaagtcactgatgacaatcttcggttcttcagccggttgtagtaaaccaggttctccagctgtggtgtgagaatagcatgtggtgagcagaagacaccatgaggaccttggaggctagaccaaggccctgaggtgctgcccccccagcaccagcccagctgccaactggccctttgactctggctctgccctcaccttgaattcctgtgcacgatcttgagtgagtgcaaataggccacggcctccaggacttgccgtacacgttgcttgtgtctcgctccgagtagtagccctggtccaggatccagtcaaacacctcctccccgtggccctgagggacaccagcccctgagcctggcgtgggcagaatcaggggtgggcaggagcacttgggtgagctgcctacgccaggcagctggctgagcaaggcacagggcctgggacgccaagggtccagaaagggggtttccttagctgcagagggtgggacaggtgaagccctgggcgctggggaatcttgggtccccagacccacactcacagctccaggaagaaaagtactccttgcgggtcacaaacacatccaccagctgtaggatgttgggatgcttcacctggcgacagggaggggagccagtagttagggctggatgaacccctgggagaggctgtgtcaccacagtggccacagcagactaattggccagaggctgggactgcctgaggccactgccctctaagcccttccctgctgcctcccaccccgccccaatcccaggcctcaaactcaatcttgaggatgcctatctcgttcttggcagctttccgcaccttgcggccgtcccgctttggaacttcttgcaggtgtgcagcttgcctgtcgtcttgtccttggcccggaagatttccaaaactcctcactgcagccgacaggcacccactcaggcctggccttagcatcagctgcctccactgccacttccctagcccctgctcaccagcccacccagccttgcctgacaggccggcactcacgtcttgatgacctgtcccaaatcatatctgtcagtcacctccgatggctgttatagttcttcttgtcgcccagagtcacacacccaaacggcattgccaggctctaaccgcgggcacaatggggtctggcttagctgtactactctccacttccccacaacataggggtgcttttgggagaccccaacctggctcaggccaagctaggggcagagaccataccaggagggctagaggataggcaggcttagatcctacccctgcttttctggctagacatccagctctcagcttggctgcctgaagtgcaacagcctacatatgaaaaaatgtattaagctgataataagggaatagttttgtattctatacattcaaaaaaaaggcttatcaaacagtttattaaatttcagctattttacagatgaagggggctataaccacccacccacctgctagtcattctgaaggtctagagctaacaagtgttagtggatatatgaagaacgtgagcactgctagagagggcaaactcccctttgtaaagcagtttggtaaaaccactaaagtcaaacaaacatccctatgaaccagcaattgcactcctaaatacgtgcctacagaagtgcacatattcgtgatcaggacagtcatacaatgctcatagtagccatatacataatagccaaaaattgaaaaagaccaaataccaccaccaacaggatgtattgtggtagagtcacacaatggaatattattagcaatggaaacaaaggagctacagc

SEQ ID NO: 2927 - DNA, 23940 bp, Homo sapiens
  misc_feature 76, 77, 78, 79, 80, 81, 82, 83, 84, 85, 86, 87, 88, 89, 90,91, 92, 93, 94, 95: n = A,T,C or G
gcccacaaagactttaggtaggccaggtgcagtggctcacgcctgtaatcccagcacttgggaggccgaggcgggnnnnnnnnnnnnnnnnnnnnggaggccgaggcaggcggatcactgaggtcgggagttcgagagcagcctgaccaacacagagaaaccccgtctctactaaaatacaaaattagccaggtgcatgcctgtaatcccagctaccccgggaggctgaggcaggaaatctcttgaacctgggaggtggaggttgcggtgagccgagattacgccattgcactccgccagggtaacaacagcgaaactccgtctcaaaaaaaaaaaaaaaaagaagaagaagaaagaaaattagctggctgtggcatgtgctactgggaaggctgagatgggaggactgcttggcccaagtcaaggctgcagtgagctgtgttggtgccattgcactccagccttggcaacaagtgagaccctgtctcaacaacaacaacaacaacaatctgctgagaggggcagatcactgaggtcaggagttcgagaccagcctggccaacatggtgaaaccccgtctctactaaaaaacaaaaattagccaggcacggtggcgagcgcctgtaatcccagctactcgggaggttgagcaggagaattgcttgaacccaggaggtggaggttgcagtgagccgagatcggaccattcactccagcctgggtgacagagcgagactctacctcaaaaataaataataacacaggataaaaagttaatggaatagaggcaatatatgaagagataatggctgataattttccagaatgattaaagaaattgctccacacggccaggcgcggtggctcacgcctgtaatcccagcatttgggaggccgaggcaggcagatcatgaggtcaggagatcaagaccatcctgactaaccagtgaaaccccatctctactaaaaatacaaaaaattagctgggcatggtggcaggcgctgtagtcccagctactcgggaggctgaggcaggagaatggcgtgaacccgggaggcagacttgcagtgagccaagatcgtgccactgcactccagcctgggtgacacagcgagactcctctcaaaaaaaaaagaaagaaagaaagaaattgctctacacgttaaagaaatctaatgatcccgagcagaatttgtaaaaagaaattcggccaggcacaatggctcatggctgtaatccggcactttgggagaccaaggtgggaagatcacctgaggtcaggagttcgagaccagccggccaacatggtgaaaccctgtctctgctacaagtacaaaatttagccgggcatgatgaacgtgcctttagtcccagctactcgggaggctgaggcaggagaattgcttgaaccagggggtggaggttgcagtgagttgagattgtcccactgtgctccagcctgggcaacagagcagactctgtctcaaaaaaaaaaaaaagaaaagaaaaaggtaaaaagaaattcatattggaacactatactaaaactgcagaaagccaaaatcagagaaaattctaaaggtaatgagagttgaggataaagttccaaagtatgcttaaaggagtaactgataaactaaaatctgacttcatagctacaacggaagctagaagttggataagggccgagtgtggtggctcacacctgtatcccagcactttggaaggccaaggcaggaggattgctttaggccaggagtttgagaccacctggctaacatagcgagaccttgtctctaaaaacaataataaaataaaataaaataaacagatgaaaaaagatataccatgcagtcaccaaaagacagctgaagtggctatactaatgcagataaaatggactttaaattagacaagataggccacgcacggtagctcacgcctgtatcccagcactttgggaggccgaggtgggcggatcacgaggtcaggagtttgagaccagctggccaacatagtgaaactctgcctctactaaaaatacaaaaaaaattagccaggcacgtggtgtgtgcctgtaatcccagctactcgggaggctgaggtaggagaatcacgtgaaccaagaggcagaggttgcagtgagccaagattgcgccactgcactccagtctgggccacaaacgagactccatctcaaaaaaaaaattaggcaagacagactttgaattaaagttacaaagacaaagaaggacaaagaagaacatttaaaaaaagttcaatcctgcaagaagaaacaatataaactccagcctgggcgacacagcacgatcctgtttcaaaaaaaaaaaaaaattatccaaacaaaaactttacttaaaaacatacaattggccggtcgtggtggctcatgcctgtaaccccagcactttggcaggccaaggagggtggatcacttgagtacaggagtttcaaacagcctgggcagcatggcgaaatcctgtctctacaaaaaacaaaaattagctgggcatgggacatgcacctgtagtcccagctagttgtgaggctgaggcaggaggatcgcttgagtccggaggtcaaggctgcagtgagcagagattgtaccactgcagaccagcttgggcaagagacaggactctgtctcaaaaataacaccaacgaaaaaaataccacacatacacacaattaaatattcaacaataacgtagaagtgggaaaagaatgttagtattctaagctctttgagttcctgggaaaatgagaaaggtgctgattaaccttgaaattggtaagttaaggatacatacttaatttctaggataaccacttataaatggaaatggggtatataacgacccaactaactagggaaaaatggagaaatacagaatatttaaccaattcctaccaaggcaagaaaggagaaataagatataataggcaaggcaaaacagaatcgactaaagacaatatgtttactcttttttaatcagtaattgcaacaattttaagtagactaaatggtccagttaaatacaaagatatcagactggatttttaaaagtccaactaaatgttgttttccaaggctgggtgcggtggtcacacctgtaatcctagcactttgggaggcagaggtgggtggattacttgagtccagggttcaagaccagcctgggcaacatagcaagaccccatctctactaaaaatacaaaaaaaaaaaatagtcaagcatggtggcaggcgcctgtagtcccagctacttgggaggctaagatggagaatcaccttagcccaggaggtagaggctgcagtgagccgagatggcaccactgcatgcagcctgtgtaacagagtgagaccctgtctcaaaataaaataaaataaagatctttgagtaagctaaagtactttttaatatacaaaaaaagaaataaatgctgtttcaagggataatgtaaaacacaaggacacagaaaagtttaaagtaaaaggataggccctagcactttgaaggccaaggtgggtggatcacctgaagtcaggagttcgagaccagcctggccaacatgggaaaccctgtctatgaaaaacacaaaaattagctgggcgtggtggcgcacgcctgtaattcagctacttgggaggctgaggaaggagaatcacttgaactcaggaggtggaggttgcatgagccgagatcacgccactgcactccagcctacacgacaggagcgagactccatctcaaaataaaataaaataaaaataaataaataaagtaaaaggatagaagaaaatagagtaggaaacagaaaatagagtacgcttagaggcgagcttaatttctagtctaaccaaacagcagggctccctcagcatggggctcaggctgtcagcaacacaggcctaaacaaagctttgcaataagccagcagccatcagtgtcatgcctgcctttctgcttcctagggcctttagccccaaagaccctgtgattattatcacccaccattcccaggggtaacgctgccttatctcttttctaggaggtccaaaccggcctgtccacatctgctaggggaatctttccccactagctgtcactcaacagaatggccctacacggtcagcaggacccctggataggggagcatctccttccttccccatgttaaacgggtttgctgacatggcgaatacattggggtgtctggacagtagatgactctgggtagaataattccaaaccatcaagtaaggcacagcaaactctcttggtagccagaagcctagcaggtttctatctggaagaaataaaaggacttgttgatgtggtgaagctcacccttgcccaggctaacggttttgaaatcacatctgtttgtataggtgatcaggaagcatctatcttcactgagccatcttagtccccctcaggcttagctcagctatcactctaccagaaagcctgtcctgacccacttctgcccaggttgggaagctcccgtggggcccgtctaggaggaaggttctcatcacttgtctggattccggggttggaccgcctggaggccaacacctcaaggccctgaagcggtacccgggcaaacaccgggccccaacactgcagtcctcaccactgcaagtggaaggtgtggccgcagtggatggcggccacgtcgcgggagtgacgaagaagtcggagcagatagtgcacagagcacggataggcatgatggctggactcaagggcccaggcagccaaagaaactgctacaggtccggcttcgtagacgcgcccccgcgcctcgcttgcttcaaatttggctccgcagcacgacttcctggagcgggccggaagtgacaaccaaaactttgggcggagcgtgaatacttcgcctggattggacaaattctcggatgggcgaactatgggcggggcttagcggccccgaggccgtagagaatcctgggcggagcgcggtcctctcaggcgtcctctggggagactcgacctgccacttgagagcgcagcattatatcaagcggggagcagcgaggctgccagctggacccttttccagggcaaggcagcgcattgtggcccatgccagagctggcgcgaggcaggctgggccaaggcagagaaaaccgcagccgcaaggaatagaacaatggtcccgatgggtcccttgggctctggacagtgatggaccatgcgcatggtctgtagttcccatagaccacaataccctaccctctcagtcctcagttccgggcgttctagaaagatggacacataggccccagtccctcaggtcaccccaggccaaccttggctcatccaagtaagatatgactatccttgagtttggagacactagggccagtaccctgacttagctcttagctctcaggaggatcagttatgcttgagactgtagtagggttggaatttggaggcccagatgcttcaaagactagagactaacaaatcctttttattattcccacatcgagaagttatctttgaggaggttatctttgaggtcctcccagagagcagcatccctggtagttcacccaggcccacctgggctggagtaagtcaacttttgggtttttaggcttagtactgtggcagtgttactccctctacccagaagaaaccctgtgcatagtcccataatataagctgatctgctccagctgaaatagacccagagtgagatttcatttggggcataggtggaagcacaggtgttcacagaaagaaggaatcaacacagagcagcatagaatctttgtgcatgctcaccctacaccctctccctagctcagggaagctatctttggctatgagcagggtcttccttgcgctggctggcccaggtagattccagctctatgcctaaatcaagagtaaggctctcggtcaacaggagtcaaaaacagcagcccttacttgagctctcagcccagggagtatccttggtccaaatgcagcccaagacccactactcacatggatttctagagttcagaggaccccaccaccaccaccattgaggaatacactgtggtgaggatgatcttcaccctcagccaagaaatccacagggcactgttcactactactcccagccactacttgtgaacctgctccagcctctcccttccccactgccttccaggggctcctccccagtaggacagaggaagcaaggcgagagggtggccagaggctttgcagggtgatgtttatttgccaggttcagtaggcaacagttaacccaccgaccttcacacaccagagcagacccacaggcatgcagggagaaggcaggaccaccacggagtgccgagcaagggcgaggaccaatgtggctgcctatccaggcttggtagggtctgacaaagggcacctgtcaggagcctccctcaggaaactggggagtttaccctacttcctcatcccagaaaaagcaactcaatgtggctctgaggcacctgggcctctatagaagtgagctgtagaaagagggagttcctcttcatttcattgttgaactgagcagaaatctgcccctgtaaagggcaaacctccaaatcagattatgagttattgccatgcagcagccccctagggtggagaggacttgtgggctgagattgtaggaggtgggcatctaggaaggcaaggaggtatcagccctccctgtttggcccagggtaaggacccagtaaggctgggacctgggtgctgggcttgtactctgccctgccaggtctcattgccacgtcctaattgttcccctttcccttagaggctcatgaggttcagggtacagggcagcccactgcaggactcggaaggcaggaaataacacaaataacagggtcttaggaaggacaaaaatggaagcttctgcctcctactcattctctccactcctgaggacctccacagctagtgagcagtatccctagcctgtgccaagtctggacttaaacatactgccctacctttctgcatcctctataccagccttatctgctcctagagcagcccacacaccacaggcacacaccttcatgtgcaggagcctagaccgctgacagggcctcgctggaggaccagctctcagggcaaggccgcccaagtttaggcctgggagagtgtgggacctgcagggcctgcctaggggaatggtgaggcaagaagggaggggaaggagagcaggagccccctgagtatccctagagcagcatcccacaaggaacagaactggtgaagctagcaaaagacagaaaagccacaaggaatccatgcaggggctggggccgccctgccactggcctgcccaccactcacacacatacacacaggagacgagactgctctccgtgacccctagttatgccccactgggatgtgggggcatgggggagcgagggcatcatccagtgactctatgtacagtgagaagcccctcatccactctcccaccctcctgcccatccctgccccccctcaccaggctgcctactcagctggcctcctccctttgagactcctgggataaccagcagcctcttcccctttactagagggtggagcctggcctgtggcgccctctgggctgtgctgtccggctgggccatagccggctcaggggtggcagctgccttggtggccacatggcactgctttgggtggtgggcacagtgctctcttctgtggctggtgtggctctccatcagtggctggagtagcgctcctgtcagtggctggggtgacactcccatcagtggctgagtgatgcttccatcggtggctggggtgacactgccatcagtggctggggtggcacttcatctgtggctggggtggcactacggtctgcgggggccacattatcactctttgcagcacagcagcatcaccctcaggggctgaggtagctccactcgcagctgcagctgtggccccactgcagccccgggggtggcagtgtctgtggctgaggccgactgggctgcagccgtgctggctgctctggtgcccggagccgtttcatgagggtggtcactcggacagccttctgaaagggcacagtggagaaaggctaagggtgaggcttgctggatccattgcttggcagtgaccaaccaaactccttccatagtacccccggccacctccatccaccccagggccaagtactcagtgctcagcactcctacttaaggtaatcacagtggctacacccacacctgatggcctgagaaagcttgtgtgtggctgcaggggtgtgatgcaggcaagaaactgagtgccagaagcaaacttgggatagagccaagaagggagttatccaagccttaccttccacttggccctggcaagttcttttcaatctgggcacagacaccatccttgatgttcttatcagaagcagcattgcagaaatcctggaaagggtgcaagtgtgtctggatctgagagaatgagcctttgtggagctctgctcagcccttctatgtggcatccagggactaccaggcagagcctctgggctgcctgagctctaggtacctgcaccccttctaggcctcaaagatggggctgctgggtgtgaggggaccctggcctctcccaccctcccctggaccctgctcaccactcatgggagatggcctttctgcagtgatccgctggtcttgctccacctccatcagccttgtgaccaggtctttggtgtggacaaaaccaaggaggggatagtcatgggcaccccatctcaatgtctagaggtgaaaatgggctgggggacagaagcagaataccacagaggaagatgagagcaggacaccctcccactcccttgcgttctaccaagtgctgggcaggcacctcctcacctgcctgcgaaatacatcccaatatggagagtcaaactcatagtcaccagccaggatcttgcggaagagattctatcatggttctcataatcatcttcttccacctcctcatagaaaggtgggttgcctgaagcctgcatgggggaagggtcacacagaaaggccacagacacatgcccccaccccatctgctgcaagcctgcttgtccatctgtccactcacaggatgtacatgatgactccaatggccagcagtccacagggcgtccataccgctgccggcctaccacctctggggctacaaacacacgcccatctgctggtcagtatcaggcctagccaggtccagtaccatccacaccagcttctgagatgagcacattttccccctgcccagagcagctccctgaaggctgccccccattatcccctgcccctgccccaccccctgcttgcccagatactcgggggtcccacagggctcctgatgaggccattttctagcttagccagatggaagtcactgatgacaatcttcgagttctcagccggttgtagtaaaccaggttctccagctgtggtgtgagaatagcatgtgggtgagagaagacaccatgaggaccttggaggctagaccaaggccctgaggtgctgcccaccccacaccagcccagctgccaactggccctttgactctggctctgccctcaccttgagattccgtgcacgatcttgagtgagtgcaaataggccacggcctccaggacttgccgtaccacgtgcttgtgtctcgctccgagtagtagccctggtccaggatccagtcaaacacctccctcccgtggccctgagggacaccagcccctgagcctggcgtgggcagaatcaggggtagggcagagcacttgggtgagctgcctacgccaggcagctggctgagcaaggcacagggacctggacgccaagggtccagaaagggggtttccttagctgcagagggtgggacaggtgaaagcctgggcgctggggaatcttgggtccccagacccacactcacagctccaggaagataaagtctccttgcgggtcacaaacacatccaccagctgtaggatgttgggatgcttcaccctgggacagggaggggagccagtagttagggctggatgaacccctgggagaggctgtggtcacacagtggccacagcagactaattggccagaggctgggactgcctgaggccacttgcccttaagcccttccctgctgcctcccaccccgccccaatcccaggcctcaaactcacatcttaggatgcctatctcgttcttggcagctttccgcaccttgcggccgtcccgcttctggaattcttgcaggtgtgcagcttgcctgtcgtcttgtccttggcccggaagatttcacaaaatcctcactgcagccgacaggcacccactcaggcctggccttagcatcagctgcactccatgccacttccctagcccctgctcaccagcccacccagccttgcctgacaggcccggcaccacgtcttgatgacctgtcccaaatcatatctgtcagtcacctccgatggctggttatattcttcttgtcgcccagagtcacacacccaaacggcattgccaggctctaacctgcgggacaatggggtctggcttagctgtactactctccacttccccacaacataggggctgctttgggagaccccaacctggctcaggccaagctaggggcagagaccataccaggaggggctgaggataggcaggcttagatcctacccctgcttttctggctagacatccagctactcagttggctgcctgaagtgcaacagcctacatatgaaaaaatgtattaagctgatatataaggaatagttttgtattctatacattcaaaaaaaaggcttatcaaacagtttatttaaattcagctattttacagatgaagggggctataaccacccacccacctgctagtcatctctgaggtctagagctaacaagtgttagtggatatatgaagaacgtgagcactgctaggagaggcaaactcccctttgtaaagcagtttggtaaaaccactaaagtcaaacaaacataccctagaaccagcaattgcactcctaaatacgtgcctacagaagtgcacatattcgtgcatcagacagtcatacaatgctcatagtagccatatacataatagccaaaaattgaaaacagaccaataccaccaccaacaggatgtattgtggtagagtcacacaatggaatattatatagcatggaaacaaaggagctacagctatacccaaccacctggtgactcttacacagtgttaaggcaaaaagacacaaaagaatacatatagtatgagtctattgatagagttcaaacaggcaaacaaacccgtaagggggatacaaacacagcagtagagctataaagaaaagctaggaaaaagcagagtcagataatggtcccttctaagagaaaaggaggggttatgattgattcaggcacatggggggattctggaagacctatttcttttcttttcttttctttctttctttcttttttagagacaagtctcactatgttgcccaggctggagtgcagtggctattcatgggcaaagcccactactgatcagcacaggagttttgacctgcttcgtctctgaccttggttgctcacccctcctttaggcaacctgatgagctctagctcccaggaagtcaccatactaatgcaaacttagtgtagacacccaactggcatagcgcactgcagcccagagctcctgaactcaacgatcctcccaccgcagctgggattacaggcacccgcaccatgcccagctgttctgtccccaggctggaatgcagtggcacccaggctggaatgcagtggaatgatcacagctcattcagcctcaacctcctgggctcaagcgatcctcccacctcagcctcctgagtagctaggatggaccataggtgcacaccaccacaactggctaatttttaaaaatttttttgtagatacggatttcattacgttgcccaggctgttcttgaactcctgggctcaagtgatcctcccactcagcttcccaaagtgctgggattacaggcatgagccaccatacctggcttgggtaaatttttaaagtttacatactgatgtaccctcacaaactcttttctggaagaatactgaaggaataagagttctctcctgggcaaagaattggatgtcaaaaaggcagacatatcttttgttactaattttctgtgcgaatttttactattttactataatgacttcgatgaatttagtaatactgcactcaggcacagtgcttgggggattcctcagagggataatctgggtggagagcaaggtaaagctttggaggcagcattaggactcagtaggaaaagatttgccaggaggtagcaggtgtactggtcaggaagagcaaaacaagcctgatcctggtcccagctttcggctcgcatatgcattcatgcccactggggcccacaggggacctgggctgtcaggtccaggtgcaggcccccaaacagaacagatatagctggctcagtgagcgctaggcactctttccacctgggcacggtgtcccacaggtctgcaatcctgccaattacagcccaatcctcatctgtaggctaggggggctgactccagtgtccaaaggaaaaggcactcatagcccatgctcaaagcgggggtggggggttactgactagaccttcacagatctgacgccagggtgtgcctccatatacccggtcagtgtgacactggggctacagcaagctctgcactgaggctgcgctgaaatgctctgcctctgctgactgtgcatgttttccctccatgccaattagcacttgctgtgtgagggcctgagctagggcctgggggtacctagatgctccccgacctgaaggcactcacagctcaaggtagtggagaagggaggaggcaaaggaggcagcttggcaagatgaactctgccgccaaagtcaaagaccaggacccaaacgagccccatagccaaccctggctgctacttgctcctcccaggcagaagccagccaccaggctgtgattcccaggagtcacagccctggaaatctccctcagatttgccttcagcattagggaacaaactctatcattccttcatctgggtgcttgggctcagggaatacaaatgcatttcatcagcattattccagacagggtttaagcgtcttgcgaggcacagcagagacaaaggagaggctttgaagatcgtcactgactgcatgctgccaccatgggcacaaccctgcactcctccactggggagaagcatgtggccagaatccatcctcacagctgagagcagaggcatagccagttaccattgccggctacacattttcaaccataacagctgcaggagggggcctgcaacagtcatctcagtctgagggccgtgtactggcaggaggatggtaccttagcctgcagtctcccaagaaggctgggagggacctgtgcctggctctgttgctttgcttacaccattccctctggcaagagtgcccttcccccaaaagctcccgtcagattcctatttgtcacggcagagttatttataacattaaaaaaaattcagcactacctaaatgtccaacaacaggtgactcgccagctcaactgtgtccactcaatggtagaagtgtgggcactggcaagagctctgcccaccttggctttcctgtggagcagctgccaatgagcgaggtgctgagagcagaactgaatctcttctttcattgtgatttctgacattaaaggtggtttgtgcaacacattgtccaaaacaatcctgatgctcgaaggccagactcaaatggcccttttctgagataccttccacaacctccatgccccaccccccaccccactccacagctcccagctttgccagtgtggcgtgggtgggaggttttgtgcatgcctgtccttgacctggccccagctttcggctctgcatatgcattcgtgcccactgaggtccagggctggtatgggggtctgtcccatgaaaggcacagaaaactgggcctccaccccgtaatgtcagccggagccatgtcctgaagcctcaaggctgagatgggaacagatctgtctcccctgcccccactatggctgcccaaatttcagccagtcactcctcctcctcctcctcctcctcaccagttaagtatactggcttggggccctggacttggccccagggcaaagagaggagaaagagggcctggctttcaattagcaccttggttccctctgcccacacccactccaccatctgctatcactgttgctccctgggaggtttcgggtgtgtgcaccaagccctgggcacctgcttgcacaaaggagacctgggaggaacagccaagggacagctctcagaaagagaggaggccaagtgaaggggtttgtatttttcacccccatggcccagacccaacacccaacaatggagagcttcctctcagcaacacaggatctgagctcttcctcaggtacacttaggccatggaagggctgggagctccacaacagccatttccctggagacatggctccctccactctctgcagaggactgaacagtatgcactaccggctgcccagagggagcttgtggggagtgcaggccctgggcggccattgccctccagctggctctcatggagcctgagagccaagcactccccagttaggcctgctcccagggcctgaccactggactcagggaattgagcctccagcaatcctgagggtcctctgttggtgccctggtgataaatggtcccccagggactctgctgcatctttagtaagtctggcccagggaaagcccaaacgggacaaaggccaagaggtccggaggccccacttggggtcctgtcccctcctccgctgagatcatcctggttcaggccctacctttcatagcataaacagagtttcctgctaccttggtcccctgccacgtggggctccagagcttgcagaaatctagggaggccaggaggggcccaagaggcctccagctgcctcccaacaactgtagcaacacctcctaatttagtggcagctgtgaacaccagcctgcaggcaccccctcctctcgctgctctactctctcaagggctggggctgggtttcctgctgcaatgaacatgctgaagccaagccctgcttaactcacagctgaggtgtcacccacaggaccaggggagctgaagactccctcaaggtctgttaagaacaagggccaagcttctagaccaccatccaattgcttcagggaccggtcaaggggctgccctgactgagcctccggctcgagctaaatcatggtagaattcctacagctgaattttgcccatctaatgagggagtattgtggggaggtctctccagtttgggggtgggcatgcagtccagtgctacatcccgaaagtttagctgtcaacatgcaggaaagccaaaggccagctgtctcctcccaagcacttggggtccaaatctctgaacccctgaggagaatccactggaggctctgcttccctgtgggtggaggaggggaaatgcagaggaagcactagagtaaagggttgctatggtgatggaagttttaaaacaaggggagggggagggagatgtgttggtcaggtcccttcttcaagaatttcctgagaccttagcctggctgcttctcaaggttctgtgacccaggtccccatcaagaaaggggaggtggggagatggagagaattagaaaaaagagaatggggcagagacacagacaaagacagaacctgtgatggaagaggacaaggagatgacaaagtaaaagggacacaggcacaaagggcaggaaaggggaggtggacggagttctgaagggggcggatgggtgcccagcagagccctaaggcctccatggcgatgtctctaaatccctgggccaggagctatccatggtactgggaccttcgagactgcaccctctgtatcccccaaacatacactgaacttggtgtaggaggcacagccaaaaggaggccagcccttggagcatgttggtggggaagaggccagctgctgcagccccccagtcaggacagttccagcccgtctctctgccatcacggcagcttaggtaaagcaggtccaacatgttgaaggagacgcataggggtatggaaatgaggctcggatgcctggctgcttccctttatagtccccttctcagttggcccagctgtacttagaccctcccagccaacccctcccccatctgctacctttccaggctttgggtccccagagcccctcttacagctctgcttaatcccctctcacaacccccaacagcagatcctgccatgagtgccagaaacggcaccacaagcaacccagaacaggataaccacacagcccttcacctccccatgcctcagtttcccctaatggaaaccatgaatctggccttctcccagggcagaggactgcttgcctgcctgtgaatggtggccagggatggggctggagagtagggccatcagagatatgtgaacagccagcctaggagagcacctaagggtccacaccaaatattagaaaagggagacccttgccccaccctggaaaccaacctactctgagtggagacaccagttccccagttgaggaaactgaggctcagaagtcgctggactgccaggaatcaactctgagggtgggggagggcaccaggtctctaaaggtagtcctggggctcaaagcctggacttgggggtaaggggagtacagcacagggactggactactgcagctctgagcttttagtgtgggacagagggccctgatccttaggaaggaacctggtggagcggatctgcctgggaggtgcggacaaaagcaatttggcagagctatgcggggagggggctgggctcaagagcccagggtctctgccaaacagtacaagctggggaaggcagaagctcatctgtcactatcccagccacctccagccaggggccctgctccccaccgtgctgccaccctacccctttcccaagtgctgctggctcgcccccgctggcacagcaacacacatgcggaaacacacgtgtgagcaccaagccccgcacctcccagcaggaacatgtgcgcccccacccccccgtgcacgtgggtccatgcactggacccccagctggcacccaggtgaaggcttggaagtgaattttggctggggggctgctggtccccaggggcttggagcttcctcccccaccccgggcagccccgcccagccccctccgggttgtcgcccataaagaactctccgttgtcatggaattagtgactgctaagcgggagggaaggggcccggggacagttgggaggggctggaggggctctgggaacggggagggacggctcagctctcggcccctatcctcacgggggaccacaatcttcgagggttaatcttttcacaattccgagccgcagaagcttccccccagaaccccaagccgtccgaggtaatggggaactttagcccgaccccgcactccctcccccaaatctcaaagcccgcgcgctctgaccccgccaggacctcgagccctcgctgcgcccccgcgcacctgcatcccgaacctcgagccagggaaacaatcccccaaggccccacaacctgcgttcggaagcgcccccagcccggcccgccccgcacctgcagcgccggttggtcacagggaggaatgatcgcgggctcagcggggcgccgagggctccggggacggcgggcagaatccgctccggcacgcggggcagacgcggcgccagatgcagccgcttcggctagcgaacctccagcatcccagccgcttgccggcaccggattcgcaccccgggccgggggcgggctgggggcggggctcccaaccggccccgccccgaccctggcggagccttaagggcagaatcccactggagagaggagcgcgcgggatggcagcggtgctggtgagcactggcctgcttagccctggccaagttctcaatggctcccttaggccctcagcctggggccggaggaggcctcctatgcccaattaaggggtggtgagtggagagttgggggaaagcctgagtcctggagctgcataggatcgttgccagtcattagtctctagggaacggggctttgcccagctccccgaacccgacccaaaggcaggaccaacttagaaaaaccagatgggcagtcgggctagggcaggctcccctagcaggagcagtaaacacacagaggtgtgtgtttgcaggtagtcagtgtggcatcccctagctcccctagctacgcatcccctagctaggagcagtaaacacacagaggtgtgtgtttgcagtagtcagtgtgaaaacagtgagggccctagactgtagtagcaaagtctcctatcccacccatccccaactcctgcaaggccagagtctttcccaaacataagtaccagcaagggtggagcacagtcagccccttcctgtgtggcaccaaatttcccaaactataaaagtcacctgtacatggtgtggcctctgctttcttttcagtctaatcactgtcaaacacttcatgagttgatcactctagtggcctggcctgggatatggggacacaggagaactgtggcaccaaggtacccacctggcctgggtgctaatcagagggaggaggctcagaaccaccaggaggaagcttaaaggaagtccttggccatttctctgtcccttgtcagtgaggctcacggacccaaagccgacccacacccctcacaagccctgaggaccatcctaaggccagtatctgaagaccagaccaggcctctcagtgtctggagctgggttttatcccacctcactcctcccagtgagcctctgaccctgctgtgggagagggagttggggtcatccccaaaccctcagccatcttgaggcgccctggccacccatggctgatgacaggagggactgtccaagtccagaagctggggctgggctcagactgaaggctagcttaggaaatgaccgcctcaaacaaggttcctcaaaatttcctccagagggggtactgagcccttcaccttcctccctggcttggtgttacctcctctagccaggctggtgccacttctggggtccctgggctctgagtggtctcgggttatgggaccaccccaccactgggtaggaatctcctggcaggctgggtatctgcaaggcagaacccgttctcatctcagtatgctcggctgatgtctgcagaatgaatgaatggcctggcactgagtcttcctgccatctgcccactattcttgaaacaatgggtctctgagttttatggtgtagccagctgtagcttgctgaccccacacatgccacatacatgttttctgtctttcctgagggtatggctatccaggcatgggggtcaatgagaagctggaatggggatttttaggcaggggaggggtggctccttagcgccctgcctgctgctggcagtactccacctcttcttggtcctagcacgctctgtgcatgtgggtgagagcacgtggcagggtgtgtgtgcacacgtgtacgtttgtgtatgctctcttttgccgagggagatgcaacagcacagtgtatgcagtggtgcccggggcacgtgtgtctgcattctttgtgcacccaggcatgcttgctggcacgtgtgtgtgacgctgtagctggtccctggagttatcagtccccttcctgcctgacacaagtctcaggatgtggaggctgaatcaggctttgagagctggacatgggaagggggctggaccatgtccacagtgggcagggtctgtgctgaccctacatcattggctgttttcaggctccccaccagacagccccttgatctctggtgtatgtgaagatagacaagtctttgccatttgtggagggcatctgaagacaagaacccagggctaggattgagccatggcttatccctcagcccctagaaggaaggcacaggcagggtaggaccggcttcaatgttttggcttcaacctccagctgccttcaggcaggagatagtaacatcagctgaatgccatcctcttagctcttccagggcaggacgggaccaatgctgagctttgttcttacttccactattcaaagccagacggggtcagggacatgatttctcaccactccactggccagagtgatggcaggaggccctttagcacagacagagtttggaacaagagcagaggcaatccagattagcattgcctagtagcctttatgagaccctcctaaggaggcctgtaccctgaagacaggggctgcctgggttgggaggctgagaggagaagagggcccaagttcgtagttctggctcccaccaaagctagaaagtcagagggcagaataaggtgcgagccgcagtatccacagagcttcatcccccagctcaggttgggcccctacccaggatccaggacttatctgtgcccccaactcccagctctagggtgccaaaggcggcactcctatgcccttagattctggctggctgatagaagcccctgctaacccagcatgcgctccagcaaaggttcagactctaggaggtacctagattaccagtgcagctccccaaaagcctgaactctgacagaaccctcccaccccaggcccccagccatctttgaaactgccgactgttgtccatgttgcttggcttcagtccccagaagagggcccacaatggggaagggaagcagtcttttcctctggagccaggggagggggctgccccccgccccccaccttgtgatcactccaggctgtgtgggttattacattatgtttgaaattgccatggcaacaagctggaatcaagggtaattgcacttgtcgtcagggcaacggggcaaaacccacagcagccactgctgtggttgcccttggggtgcagtaaaggtcaggccagatcagagccaatgccagtcaagggctccggggctgtctagaaagggtaggttgccagggcccatggagttccagagtgcaaggcagggcatgccttgggagagagccagggcccccatccatgaccccatgcctggactctgcttttcccacaccaccctgtggctgaaacatgccacggtgcttaaagaaagcagaacagaacttttatatgctcacagctggtacttatagatagcccatgggccctcttcctcaattcctggcagctgagccacaggctctggaaagagctccgggatgccatgatggagccccaagccaggcagcaactgcacggtggggagaccccagcacagtggcaccagggcccagccctgtctcaggcgctcagggaagccactcatgagggtgctgccaccgtccagtaccacatggccagtagctgctcctgctgcttggcctccaaccggctgatgcttaggagggccagcgtggaaggcccagctggttgagacctatcagattgggttggaagagggcctcagggcagagaagcgctcaggccccagcgtgataacctgcttgtctggaagcacaaagtccacctcgcctgcgcctgggtgtgggccctctcagctgccacatccatggccacgtagcagcaggccctttcatctggttgatcagtcctgcctggggcagtgagtggccacttctctgcagcagcgggccaagtagtcagtaaggtcagcaccagccacatccagccggtaggtgtcaagtgggccagatccccagtgaggatgggtgccacataggaagtgccatggccactgcccagcaccgcccagtggtacgtccataagcatagagcgccagcagggcctgatgcactgtctgcatgctgggacatggaaatgctcaaagagtatttcagccaccttttctcggttggtgagtggtagatgggcgagtcggctacgagcacagacagcttctcgggctgcacacccagccttcaaagaacaggtgctgccatagcacctctagtgcatcccagtcatagaccacaccacggttcgcactgaataggatcccacttggttttcaggcactgcatatcgtggctggccctgggctggtgctgcagcagctgaactcgtgagggtatgacactgaggacatggtcctctcccgccgtccacatttggtgaatcctgtgcctgtatcaatcaccacggccgccatgtcctggaaggtcccagtgagtggcagcagagcactggcgaccgaactggcagagcatccatggtggacccagttcatagcaggccccgtggggcagtccaaggtgtgcaactactgataagtgtgtagatcctcagctgtcagcttgaatggggcactctggggctcagtggccaccatggccatggcaagaccttgcgtccagtgccaggtgtggtaaatgtgatcaagggaagctgctcctccgggtcctaggggagttgccaggttgctgctgatgcgtgatggagtgctgagtattactgtgccaaccttgtctctactcatatagatacaggtctcctcaggggtcaggggcacctgaatacccctacatgagtaggcaggcctaagggctcatcttcctgggtggagacctggccagttctccagggttgggggaccatcttgaaagagtgggctctttggtgatggggggttcttagataaagagggattcctagcaaggggtgtctgcccagtgagagggggttgatcagtagggggtgctcaggtaggggtggctgtccagcaaggaggatctgcccagtgaggagagtcgtccagcatctttggcctgagggttatcagggtgagcaggaatgacctcttcgtggctgctatgtcttcctggaggagggatctgggcacttcctgggtatcggctggtgcagcaggcctgagttcatccactgcagtttcttggtctggactatggaggcatctggcatcctagaggtgccatggaagggtctagcatccagatggtatgactaggttcatttttttcaccatcagcttggaccagctagtattagggacatgggtcagtatcctctcatcaaattggaggggctccccagtggaacaggcccagtcagcatcccaaccctgatgggtgtctcagtaccagggagtcccatgactccaggttgagcctggcctccttgggaatcagggctacctctcggtagtgccagatgagaggctgcagggcactgggctggacagcatgggtgtgatagaccaaaagtggagtgattgctgtcaggagacaggatgggtttggccgacagctgggtggacagcatatttcagggacatagatggatgggtggctgggcatgaggcccacaagcactgcccgtgagccacagggtcatggcacagcagccccatcaaataccagcacacggtcctccacaacttctgaagctggcaggttggggcactggagagggggatctgcatggcttccttcggagactgaatggggactgcttgtggcaggttacttggtaggcagacagtggcacattagagctggtttgtcacagacattggggagctgcttctgtggctgagagctacagatctcctggctactctctgggacttggagataactgggggctctgggcctggcattgggctgcctggcctggagtagagactggaagtttcttcatggggttctcagcctcctcagtt

SEQ ID NO: 2928 - DNA, 12187 bp, Homo sapiens
tgtatttcacaaaataggctatctcatcctttgagctattgagatgaattaatttataccctcctaagatccctctcgtcactaagattcttttattttatgacaaaaccatagttctgaagcttgtttctcccacctgaaaagactggatttgggacatgatcctgtagaacttcgaggtaagcctggtgaatcagatcatagggggtctggagggtgaaaaaaaagagtttggtctcatggatggggctagtattggggtgtaggggagattaggtcaaagcaagaggattcaaggagaaatgaattcctttagattggggaagataatcggaagaggtagaagacaccgtcatgacacttcctggggaagcagatgtatgtataaggatgtgagtattgtggttttgtaagaatgcattcctgaagatgttgcataatttaaaacctacatattttgattaattttctctgagaatagcagggtatgtgttctcggcgctcacaaatgtataatccattgtggcaaattttgctttcacatatttttttttatcattattgtcacaggttctgtgacggagttctggttctaaattcacagcataccaaggcagttctttaaagttcttgatactcttttatcatactaacttgtattccaaaattattgagttggagcacattttcccagcacttagcaccgcttttcatggatggttggagagggggtccaaaaattttacaatcatgttaacaaaagtaaccagcaacaaaacaataagcaaaatcactgccagagtattccttagcttgaaacaatacgttcacgtcgatagaatatggcatctatttctgtttaatcagttaaccctgctaagtagcagagcttacaattcatgtctaaaatcatgatttttttactagttttttaaaaaatgtggctctatatatataatttaacattttgcttgtaagacttaattttgcctgggtatggtggtcatgcctgtaatcctagcacttcaggaggttgaggcaggaggactgcttgagcccagggttcaagaccagcctgggcaacacagtgggaccccatcactaccaaaaaaaaaaaaaatagtcaggcatggtggtgtgcacttgtagtcccagctacttgggaggctgaggtgggaggtcacttgagcccaggaggtcactgctgcagtgagccattattgtaccacaacactccagctgggtaatagagtgagactctgtctcaaaaaaaaaaaaagactatttctaaatgtgtgctatattataccatataaatgtggcttcttgggcaaggaaagaggacaatatagatgaaaagaaattgatcctaccagaagtgatccttttatctgcataactctcaggcagttgtggaaataattggcagtatctattgttctgaaactggttttcgcaacttttattgggaacacatcccctctcctgcatgatcagtttctcctctccacggatcattcacatgagtaaagtcgtagcgtgctggtaaatgtttaagatcttgttctttgggggaaaaagttcctaagttctgcagttgccctggataacttcaaggtatcaacatggaagttatgtacaaaaatggctgtacaagccagtatgagctaacaccaacatactacccagtgttcttcaaacttcagctcacgcccattagtggggcttgcaaacattttagtggactataagcagcatttttttaaaatgaaaagtagattgttttacacataacaggagtattgttttgtacaattttttttttttttttttttttttttagacacagtttcactctgttgcccaggctggagtacagtggtacaattcagctcactgcaacctcggccttctgggttcaagcgattctcatgcctcagcctcccggtagctgaaattacaggcatgcgccacaaggcccagctaattattgtatttttagtagaacagggtttcaccatattggccaggctggtctcaaactcctgacctcaagtgatccaccgcctcggcttcccaaagtgctgggattacaggagtgagccaacgtgcctggtcaaaattttgttttcgtaattttaagtatgtgtgtagtaagtctcaatggaaatgtaattcttatgcaggtcacttgaaaaaaaagaagtctaaaagtcaccaatgtagtatcttctctttaaaaaaaaaaaaaacaacaggagaaaacctgaatctgccctttgctccactccttcctcagcttaatgctgcttctccattcctcctcacagcaaacctttctgaaatctttatagtcatggttccaccagttcttcacctcccatttctcaacacacttcagagtcagagtcagcaatgaatccatgttcctaagcccattgcttacttccgtcctccttggcctctcagcacacttggacacaggctgtttctctttctttggcatctgtgacaccactctcagcaaattcccctggtgtcccttctcagtctcatttattggcgttgtcttatctccccagggctgtccgaggtgttttctcccactactctcctaggtggtgccatccaatctcatgatgtcatatcattcttcctcatgcttcagccatactggttggtggcctttgtttcctgaacacatttaatgcatttcaagaccctcagggactttgcagcagctgctcgctaaggctggaatgctcttccccacatcttcatatggctgtttcctttctttcactcaccagcagcttaaactttgactcctctagagactttccttgtcacccaactaaggttgccactcaggtgctcccaatttaatcttcctaaaacacatcactgtatgtgtcctcaactagagtataagcttcctcgaaacaagaacatcaaaactccttgccctcatggagtttatagtcttatgatgggtgaagtaacataaaaaaaaaggcaccttatatagtatattagcatgacaaatgttagccagaaataaagcaaggagagttgctagggagtgtgtatgagtgtgttttgggagagtgtttgcaattttaaatatggtggtcaggaagggccccactgagaactgacatttgagtagacttgaaaagggaaaagaaatattgagtaaagattttaggatgggagtgtgacaggcctgctaggagaatagcaaatcgctgtggctgctgcagaaaaagtgagaaggaaagtagtaggagatgaaatcacagtggtgaggattcgggcagatcaggaagtgctcgtgtaagaactggatctttactcaaagaagagcaaaaattagtagacggttggccggatgcagtggctcacacctgcaatcccaggttcaggaggccgaggcgggcggatcacttgaggtcaggagttcaagactagcctgggcaactggtgaaacctcatctctactaaaaatacaaaacttagctgggcatggtggcgcgcaccgtagtcccagctactcaggaggctgaggcacatgaatcacttgaacacggtaggcagagctgcagtgagctgagaatgtaacactgtactccactccaacctgggcaacagagtgagatgcctcaaaaaaaaaaaaaagtaggttttagtaagggattaacatgatctgaattatgtttgtcatgacttctctggctgttgtgttgagactacattgcagaggggcaagggcaaattagggagaccgattaggatactgcagtaataatgtaagagatgtgggactctatctagagggcccatgaggtcctttgcatgctagtattctttactgctgtgcctggccatgataggattcagtgaatatttgcttatttaaaataacacactgggctaattgaacaacagtgccaatgagggagatatttctaggaataagttcttaggatttatgaacattttaatccagatttctttgttaactctgctctctggccctttcactcagccccgtttgcacctaaatatgactacaaaagaaacacagcatttatgtgtacttatttcaacttattttagctttgtaaagagtacaaggttgactcagggcccagcttggtgtctcatgcctgtaatttcagcattgtggaggccaaggcaggaagatattgtgagcccaggagtttgagaccagcccgggcaacacagggaccctgtctctacaaaaaaaaatttttaaattagctgggcatagtggtgtgcgtctaagtcccagctactcctggggctgaggtgggaggatcacttgagggaaaccctgtctcaagtggcggggctggggggagactcaggcagaattgtgaagatattcaattgctcctgacttatcaataatctaacatttcaacctaacattgatatctattttatgcaaagcattacacatgcactggagactgtataagacaagttccttttctcaaactacagtcgagttggatagtaaaacacacaacacataccaaaagacagctataaatccaaggcagtgtatgtcaagggaaattcacctattcagattggatcttgagaagtgcatcaggcttggaaaatgggtaaggggagagaaaagcaacagtgaatcagaacatgagttcccagttatgggacttgtaatgaatcctcaattaaaacaaaaaataatgaaaacaaaagccagggaggagaaagcccacgttatgacactaaaatatatctttccaaacaaatgtggataaaagccaagtagagaagatgagactttgaggtccctaacacaaaataaacagtaagcagccagccattccaagtggctgactgactttgtttaactttatttgtatttctggctggtgtgtttacagccaataggtcaaatatcagtcagtgtagggccctgagaagtcgggtatttaagagcatctaataggcacagattgtgctccatactgcttaaactgttccctaagtgtccaatttggagaaaacacccacagcaggataaccggcgagtgacgcggagtggctgcgagtccaagttatcactaacggatgggagcttgggctgggcacagtccagcgtactgaacccttcccccaccgtttcacctgcaacagaggtgtgtactgtcaaaaagcagcgcctccaagtctcttctggcactgtctggactggatccgaggcagacgaggaagctgagaaaaccctggcgttgaccccgtggacctggggccccgggaaggccagcgcttggtccaggcaggcggggcctgtgcggtgaccaccctggcctgaaaagtcccagccccgagcgccctccctcctagacctggaggcctggaacagccagtggacgtcggcccacctttcttttctttccttcccattttcctaccacctcccaccccctccgccttccgggcaaaggcagccagatccacccaggacacattctttgtccttatcctctgtgctcgtcccacagcaagccagtcgcggtccaaggctccagaggctgtgcaggagccgagctgggtggcgatcagcggcgggtccctgtccaaaacccagcagagccgccagggcgccccagacacagaaggcggggcgcggggagggtggggagaccacagcagtgaggcgccgagccgggaagtgaacgaggactgactcctgtcgcttcccgtagccgcccacggacgcagagccgggaaccctgacggcacttagctgctgacaaacaacctgctccgtggagcgccgaaacaccagtctttgggtgagtcgcgcgacccccggcctcgggtggcggggcagtcgcagaggcgtggctgctctgagggtctcgccagtggaggatggcattcggatgtcacggctctaaatcaccatttgatgggtgggacagtgtccagtccaccccgacccgccggtcctcacgcggcagagccggggctgggtggcggggacgctgcctctgcaggcgaggcgctccgggcataagggattatcaggagtcgcggcctttcttggacatccctggctggggtcaggctgttgccctggggtgtctcctcgctgcaaacccaccccacctgggctgctttctcacctgtccctcctagcctgaggccgagcgccacctccaagtggaggaatctggggaagtttccttccggaatttgtagtgacagtggagtgacctccattgcgttccctgcctctaacacgctcttaggatgccgagtcatttgactgcagtgttaaacattgcaaagcgcaagtcatgtgactcctttgaccgtacgtgaaacttaagtgatggctgcttgtgatgcatacgaagtgttcagctggcgggacctgtccctggggatacttcgggggttgcgtgatttaatgcaagcagatgcttaaattgggtcactggcttgttattatacatgtgtatggcaactcggcatccattcttttgctcttgttcttacttcctgaattgagtcacggagccagagttttgaggttttgataacgaattaagttaatgacatggggctatatttaggtggtaaaccaagagggatacagtttttttcttaataaagaaaaagtgatagatttgatcggtgtgtattgttggtgtgcagataatgacagaattgctggaagtaaaatacaggaagctctggtttcatttcccctttagtctgcttaaagtcgagtttttcctggagctattaaatgtagtgtagtgtccatgagtgctttatcttaaaaaatgtggctgatgctttccaacactcccctgccctgtgattattattttttaagcaacagagaaaaccgtatcttaatagtattaaaagtattggatttttccctatttgatttgtttaaattggaggaggaagagcaattctttctattcacaataataatagcaacatagcgcttactctttcgctgttttattaactcaatcctcagaacaaaccaatgattgaatactgtaattctcattttatggaaatgaaaatctaaatgaatacctctggtaatttacgggactgtttgattagtatttaccattaattaattaaattttttttttttttgagaggagtctcgttctgttgcccaggctggagtgcagtggcacaatctcggctcacttcaactccgtctcccaggttcaagcaattctcctgtctcagcctcctgagtagctgggactacagtgcatgccactacgtctggctaatttttgtatttttagtagggatgggatttcaccatttggtcaggctggtctctaactcctgaacctcaggtgatccacccgccttggcctcccaagtgctgggattacaggtgtgagccaccatgcctggcctattttagtatttttaataataattccatgttagaaattttctactgatgtattttttaagtcaatatttcctacactcaaatccaaaattatttagtatatgagcacactggtaagaatgggaggcagatcgttgatttaataatattctattatttggtaaatatcagtaacataatatataatttaaattttaaataggatatgaagaaaaatgctacatgcttacttttcttttcctctatttttactttacaagggccagtgcctcagtttcaatccaggtaacctttaaatgaaacttgcctaaaatcttggtcatacacagaagagactccaatcgacaagaagctggaaaagaatgatgttgtccttaacaacctacagaatatcatctataacccggtaactgatttctataagataactttttactatgccaggacagatccaatagaatattaattatccattgggagacagggcaagaataaagccagtgaacatatttaaagcacctactatgtaatagagatggtggtgggtgctgatacaaaacagctcttgtcctctagtggaggaagaagtcacaatgataatatgacgtgatgaacagtgttatgaacagggaacgtctgggtagagtggagggaatgccaacttttggtgagggaggaggctcagctaatcataaattgtagtttttaaaggaaaatggatttcttactcacaagtttttcattttcttttttaattagagctgtccatgagaagttaatgtctcgatcttccctcagcctttcaaatactgcttggcccttgagcagggaaaatgtcaaaagccaatgggagatggagagtgtgaagtagtaagggtctcgtgcagttcaggcaggtcctagaatcctgaatgactgtaattgctggaaattgccctgtaatcctgagcagtaaagagcttgtttagttttatgtggtggtgagaatctttaggaatgtctagtttccacgtatctgaagctgatcctgaatcgaggtctgaaaaaggacagccacttttttagtaaaccgcctagaagattctgggcaaaaggaagggtgagaatccttaaaatgaggccctaaaccagttttgttagtgttgtgggttcaagtttttgtcatttactttatagctgtatttcctttttccctaagttttatgtcattgtgtaagaatgaggtatcgctgctgtatcaagcaaagtcagttttaggagaatagcctttcagtggtagtaagtttaaaaaagatgacttcctgaagcggaagcttgtgaacatttaagatgactttgcgcatgttagagttaaaaacatcccaaggttgtaaactgattcctgcaaagatcttaacaacaacaacaacaacaaactaggctgcctgccacgggtgtcgaagtatcatcttggctcaagctgggagaatggataaaggttacactgttcatttctgccttcacacagaaaagaagataattttataggtaaaattcgtgcatatcttgattctagctactgctgattcctgtagtttctggggtcagtactctcaactattgaggtggaacaaaataagtagacttcatttcttgaggaaggggatctggagaagtagttctgcgctagagcagaaatgccttcagtcttgtggcatgggctggatgctgttctgaggataatgcatttccaaggagatatttttggcaaatagcttttttttctttcttttcaaaattctctgttttattacagttctcacaaaagagtcggaaaggttagaggtagactgaactgaatggcaaaaacatttgcgctctctttacgtttcactgctgtaaaatatttatagtataaagggcctgtattgactgaatttctctcatttgtagctagttgccctttcaatgttccaaaaaaaaaggctgtaataacttattttatttattcaattaattttttttttttaattttttgagatatagtttcctctggtcacccaggctggagtgaaatgatgcaatctcggcttactgcaatttctgcccccgggttcaagcaattctagtgcctcagcctcctgagtagctgggactgcaggcacgtctaccatgcccggctaatttttgtgtttttagtagatatggggtttcacagtgttggccgcctagtctcaaactcctgacctcaggtgatgtgcccaccttgacctccaaaagtgctggattacaggcgtgaggcaccatgcctggccaacttagttatttaaagataatcaattagatattttataagctagacttaggaaaacggttttcagctgggcatggtggctcacaccttaatcccagcactttgggaggccgaggcaggtggatcacgaggtcaggagttcaagaccgcctggccaagatggcgaaactccgtctctacttaaaaatacaaaaattagccaggcgtatggcagcctcctgtaatcccagctactcgggaggctgaggcaagagaatcacttgaactgggaggcggaggttgcagtgagccgagatggtgccactgcactccagcctgggtgacaagcgagactccatctcaaaaaaaaaaaccccccccacacacaaaacctgttttcttgaacatggttgttttgttactgataggttcaataagtaaatatatttattgtctgttgtatttttattaggcattataaacacaccgccactttttaatttttatttcattaatgtttccattttttttttttttttttttaagacagaggctcgctctgtcacccaggctggagtggagggtgcagtcttaccccactgcaacctccacctcctgggctcagccttgtaaatagctggactacaggcatgcaccaccatgcctggctaatttttgtattttttttggtaaagacagattttgccatgtttctcagtctggtcaagcactcctcccgcctcggcctcccaaagtgttggattacaggcatgagccaccatgcctggcctatttctaatattttggtccacattggtttagaccaactgtccacattaagttttcttggaaaagatgaagtaaatattgcaactggctatgtatttttttccctatttagtatatttctttgactagttcaactgatagaattccagacttaaaaaagtcaggctctaaggctgggtccagaggctcatgcctgtaattccagcctgtgggaggccaaggctagtggatcacttgagcccaggagttcaagaccagcttgagcacatagtgagaccttgtctctctataaaaatacaaaaattaactggggattgtggcgcagtctgtagtcccagctatgaggaagagtgaggtgggaggattgcttgagcccaggaggtgaggctgcagtgagctgtgagtttgacactgtgcttcattctgggtgacagagcaagaacatgttcaaaaataaaaataaaaagtcagagtccgggtgctgcggctcatgcctgtaatccagcactttgggaagccgaggcgagaggatcacttgaggtcaggagttcgagaccagctgactaacacagtgaaaccccgtctctactaaaaatacaaaaattagccgggcatggtgcggtggcctgtaatcccagctacatgggaggttgaggcaggagaatcacttgaacccggaggtggaggttgtaatgagccaagattgcacaactgcactgcatcctgggcgacagagtatacttcatctcaaaaaaaaaaaaagaaaaaaaaagttaggcttccttttctgttttttttttttttctttcttctctttttttttttttttttaagagatggaggcttgctctattgccatgctggagtgcagtggtgcaatctcggctcactgccacctttgcctcctgggttctgcaattctcctgcctcagcctcccgagtagctgggactacaggcgcacaccgccacgcccgctaattgttcttttgtattttagtagagacggggtttcaccatgttggccagcctggctcgaactcctgagctcaggcaatccgcccgcctcggcctcccaaagtgctaggattatggcgtgaaccaccgtggctggccacttacttttctttctattgaatttgaatgaataattggaagacagtatctttacttcataccaggaatgctgccagtgaaatttcttgtttggcgttcattatctacctatatatttaattttgctattgtttatagagttcttaagatatgataaatgctagctggttaagaaatcatttagaaatgaaacagaattggttgttactccaattaataagttgcttgtcaacataaatcctacctggtacccagttttcttaggaaccttgttccatgtttatccttttctgcttagtattctaagtactccttttttaccttacaatttgtcttaaaacacaacacagtcaagtctttcttttgtaacctgtgagataccttctagccttgtgctgtttttcttctctttttgctgcctgccttcctgactgagagtggatttcctcctaaggctctgccctctgatttttcactctcttttcttttttggttttactagtgaaatttgtctttaatgtctctttcttttatgtcttta

SEQ ID NO: 2929 - DNA, 12152 bp, Homo sapiens
ctaacttgaaggatgaatgagagcttctgtgtgtatttgatgaaggtgatgtggagaatggtgttggaggagaatttgggttctaggcatgcgattacagtttagctaaagaattacctcttaaatttcaggagtttgaaatgagttgattcagagactctggtcatcatcccagcgcactgcctcttaactttttcctgtcctcatgaacactttttctgtgaagtcagaatttgagaatcctaatggtttcccagataaaggacaaattacaatggtgctgagacagaaaaccaagctattccttataatggggcaaggggttaatggaggggcatgagaagaaggcaggaaggaagcggactagcatctaagcctaagtgtctgtttaattagttcatttattaggtgctactttgtgcctggaactcctttcctggcagttttcattcagtatttcatttaatcctcaaaaaaccctgggaagtgtatatcattattctcatttttaggtgagaaaattcacatccgatatgtggctagggtcccctagctagttagtgatggcattgagattaatccaggtttgttgatgccaaatcccatgctctgaatcctggtgctgatgaagcaaattgaaaccaccagtggggagaacttcctgtgcacctttccagcagtctctgactcagggcctcttctcagcacgttgaagaatccccatggtgaagtatgagctgagcagatctgcgttaggcaatgcccagtccaggggggatagtacttaatgggtgggagaggggagcccgtttctccattggaacagaggccagtggcagcagaagccctttgcaaatgtgtctgggcggtccatagtagttattcgcatattcttgcatggcaaactatagagagtttgagactgcagcaggacggattgaggtaggctcaagaaatgcctccctaaacgctgtgcactaggaggggagggggtggggtaaggtgcaggtcttcctcagagctctgtgaccgaccacaaagtgcagtgtagatttgtctgggagggttccatagagctctaagtgtttaccttggcgtcttccctcaatttggctggtcttaaaactccttaaaccacagtgactcctgactttctcccctatttctggggtattctagctctaaatctctggatcccccatctatgtcttgtttggcatcgaagctgctacactccagggtgtacacctcggccggagccacacacgttagtcctcacacacatgaaaaagtaggtttctcccctctttccctggggcacaggtctaccctttttcctcatcctgatcatctccagcctgggcatccggactgccaactgcctgattacctgatgcaaattaagactgcctgcttactgggattggctggggagctgagtacgcaaattggctcaccaagactttatctggtttaaagagttaaagtgctgccccagagaagggggggtgtgggggtcaacatgatttgaataatattcttctgtctttaaggcttcagtctttgggtggtttaataaggagaggagcagaggagagtgagttggttcaaagttgcctctcttcttccccctgctgaccccaagaggagactaggggcctcccacataggtggtggcagctgtctgttaagggtaaatgtttaatttattaaatgaagcagggcagagaggctggaccagcaggacttgggggctgagccaggggcctgtgtaggtattctctttctgtggggcactgacccgctgccatccctttctcactgagccattgaaggagtaggagagaaggtaaggatccccaaaggacaggatctccaaggaggacaaacaggagctaggacttgatccccagactgtgggctgacctctgagaccagacagagaaccaggcaggacctgggaagaaaggtgagaagggcaagccttggtttaagggcactcttacttccaggatggggttattaagggaaacagagctggggaggcaggcggggagggataatttttcactatttaaaaataaaataaattcctcagatcccaaaggaaacgagtgttggaaagggaagtgtcccctccacccccttgttaaatttttaccaactgagtcctggtgatagaacaagtggccatgaatgatgcaaaaggtgagagaccctgcagtggcaccggggaaaggggagagaaaggcaaggagaggaggcgagcatgggaggaggggatccgtgccctcaagcttagaatattctaatggttgtatgttcgggaatcaggaatttgaaagtctgatggttgttgtattacacattcatctttgttatttagttaaagccacatatgtcatagcaagaaaaattggacctgttattaaaatcagttgtgttttccctgcagatatcaagatgagtggggatgtaccgattccacggatgctcgcagcactctcagccaggtggagccaggtaagggtcttctctctcggggatggagggggtggggggaagagagttgttgggaattgttgaacaactggtgctcttcttgcttggtctttcagccaaccagaccccaaagctaggtcttaggaactaaggaattccctgaggacatgggatatgattctggagcctttgaacagtagatattgctccacgtggaacaaaacctctggaattaggctaggaagagaccagatacttaaaaacagaacaaaccaaaaaagttcaggagcagctgtgttcccaactgctgtgactggcagaggcagaaccgtctttcttagatggggacaaggccttttagccccagataccttgatagtcctactcaagcactaaccaaagaggcctgtgtacaaatgtttctcttccaaataacgtgcatgtgggtgcaaataggctcagagagaaaggcttggtgcctggaggtgactttgctttggaaagaaggaaaggatgtcagtagtcccagctagtcagcaggccaaggtgggaggattccttgagccaggagtttgaggctggaccgtcccaaaaaaagctgagaggaacaaagaagaattaaaaagagagtttcatagctctctatttttacctccatagttcaagccttgctttgaaagctcctataattaaaaagaacttaaagatgagtataaattgtagcaccaccaaataactttaatgcattccaaccagacctcaattagtctttcatctggatcattagagacatagaaattagagtggaagagaatcaatgtcccccagagctaaaatctttttcaaatcttgtagagcagttagttccattcttgaagctatgagattcttgtcaggggcaagataattgggggtcttggggggagggcatccacagtatgcatttgccataaacttttctgctccccagtttaatactaaacagtgtttccttgcacaggtagcaatacacatcaaactacaatctttctattttgcttgcttatgtacagaggcagcaagactaaggagaatgtgggccggtcacactcatgtttaatagattatttagcagagtatcttttactaagggtctgtggagaggggcacctgttctcccagttgagaagaagattcccttttatctcaaaaacctgagcaagactttaaactcagtcagctagagagtgatagatatagtccccacactgacacccttccctagagaaaaaccacccaggagccatgatccagagaggctggattgcccttttctggaagcaggctggctggaccaattctgtttacctggggcccattgcccaggtgtgtggggacacagctaagagagcgccacatggaaagaagaccacgcctaaccagcttgcactggtgttctgttactaagaccaatcagggtaacagtgttaggagtgagaatgagccacatagaaccctgaaagaggagccagaaagggagggagttcaaatcctggtgggggttaggaaggttagtgtgttatggtcaattgagcaaattctggcttcctatctgggagctatatataaagtaggttaagagagaaagatccagacattggctaagaccttcagaatctgtctcttatccggggataccaccaattcatatgtgaccttagaccagccactttgcctccctaggaggtaggaacggatgagctttgagagtatggatctagaatcaaacagacctgggataaaatttgcagctccactgcttactgctgcatgacctgaaaatttatccttgtcccttttgtaaagggggaaaagtaatgcccaattagagagtgggttgagagttacttgagatgatgtctcaagcccttagcacagtgcttgcacatggcagctgtgatcgtcattaagattctggaatatacagatgggcatcgctgctggtacttctggctcattccccgctttactcaggccagtgcatcagcccggaaggttggtttgctccctttcccatttaggaaaggattctgcacaggtcccttttcagctccaaggagccgtgatgtctggaactttaccaccaccaggagatctttcacttcagggctcccggctggagcatcaatacttaggtgatcttcaaattactgcctgtgtttaagggcaagaagaaagagtggctaattaaagtaaccaaacttcctggaaagtcgttctgactcattttctttttacgaagaaagcttattatgagtcacaatggttaccaacttggtttaatggcttcctttggatttaaaaggcagattcaccttctcagcagtgcatgaattaaggggtggtttgtctctggttttaaaggaactataaacaaaggtgacttagaaagccccagctccctgaaagcacccctgtgctgcgtgaaatccccaaggggtactggggggtaagaactgggaaagggaggtaaattccccatctgcactggtcaggaatgcccaggggagcattctcagggccagacacagactcctggctggtggagacgtggccgggggcacatgttttcctttctttggcctgtgaggagccgaggcatagatgaagaataagctgcccacgagctcagaatgtctttgcagcagcacagggaccagccaaagctcagagcccctgttcagtactctttcctctttctagatttctgactatcagcttttctgtccttcctacctaatgcttcctcatctgttgttacttttcctcacttctttttttgagacaggttctccctctgtcgcccaggctggagtgcagtggtgcagcatggccactgcagcctcgaactcctggctcaagggattctcctgcctctgcctcccagtagctgggactacaggcatgagccaccgcaccgggacttttctccactcttgaggctgaaacaatttttttctgttctcaattatgtggttgatgagaatatagccttacccatatttaaaagcccccaggtctgtaactgacaacccccaagtgcagatgtggctaaccctgtgactttgaccatgctggccacatcattgcctcaatcacaagggaggaaagaacagagggtcagaggaaggagggagagatcgtaacattcacagagcctcctcccacagcaggcacatgtagcaactttatttacagcatctcatttaattcttacaataaggctatgagatagagacacattaaccccatcttcattgatgaggaaaccatagctcagagtgagaaactaacttgcccatatcacacagcttatagccagaaatcaaacttggccttgtctgactctatcagactctatcctaggtctgccattaactccctgcatattatcttggcaagcgtttccccacatggacttcattttcctccccatagaggcggggtttggagtagatcctctttaaaggctgaatttaaaggatgtgtgcccagttctgcttttcacaattctttccatctgtttccagatcttgatttttgtgcagctttcctcagctctgagctctctctctccatcctttttcctggtttttccccattcctttctttccagcttccctttcagtcttttctcctctgacacccacagcttcttctctgtttgggctccgatcctctttgacttagcttgtagttgtataaccaacatcttggaggatggcttggtggcagatcctgggctcagatgaagagcatccctgtcctcaagagttgtccttctagtgcaggaattcatggctgcctggataacagtgacaacatgtgtcttaagggtgttctcaaatacttcatgcatttggcctttacaacaactctatgagagcaggattattagcctacttcacagatggagaaatggaggctggtgatgagaaagaaccttagcacttttcccaagctcccatacctagagaatgacagaactaagcctgagtctttctagtgctttctacctaaagatggtggtaggaagactgggagtcaacgtagagaaccagggacagggacataagacaatggtagctgtctgggcgcggtggctcatgcctgtaatcccagcacttgggaggccaaggcaggcgaatcacttgaggtcaggagttcaagaccaacctggacaactggtgaaaccccatctctactaaaaatacaaaaaattagccgggcgtggtagtgggcactgtaatcccagctactcagggggctgaggcaggagaattgcttgaagccaggaggcagagttgcagtgagccgagatcgcgccactgcactccagcctgggtgacagagcaaaactcctctcaaaaaaaaaaaaacagggtctcactctgtcacttacactagagtgtggtagggtgtcatagctccccgcaaccttgaactcctatgctcaagtgatcctcctgtctcagcctctgagtaactgggactacaggtatgcaccactatgcccagctaatttttttaaattatctcttgtagagccaggatcttgctatgttgcccaagctggtcttgaactcctggcctgaagcattctcccaccatggcctcccaaagttctgagattacatgtgtgagccaccatgcccggtgacaaccatctctagatgaagcacatgtgtgagcctgtgcgtgcgcacacacacacaccacacacactctccctccctttttatgattaaatgacagagcaagtctgaactgtattttatgatggagtacaattttcacagtccatcattaagtcctgcatgcacttgtgcccaggcttgaatttcttcatcgtaatagaaggagaagggtagtgcaggaataaaatgaagcagtggctaggtagcctctaggatctgcacctcagtctgtactggctccatccctcacctctcggaagagaggaatgaaactgtagtcccccccagacatggagggggtcctgatattcctgtatgaattcctgagaggacatcttgtccatgcctctctcttcttttggagacatttcaacccatccctggaaaatgagagaagctgctttcttagagacttattttttgtctattttaatctctaagaaaaaccaaccccacgttttctcttggctgccttttttttttttttttttttgacagagtcttgctctgtcgcccaggctggagtacagtggcatgatctcagctcactcaacctctgcctccagggttcaagcaattctcctgcctcagcctcccgaatagctgggatataggtgtgtgccaccacacccagctaattttttgtatttttagtagagacagggtttatcatgttggtcaggctggtcttgaactcttgacctcatgatccaccctcctcagcctccagagtgctgggattacaggcgtgagccaccgcgcctggccttggctgcctattcctacggatgccatcctcagtgcctggaagtcctttcttatctctcacctaagaccctcatgctctgcataagcccattacctcttgttctgcttttcttttttttttttttttttgagatgggtcttgcttcgttgcccaggctagagtgtaatggcacgatcttggctcactgcaacctcgcctcccaggtttaagcgattctcctgcctcagccttctcagtagctgggattacaggccaccaccaccacgcctggctaatttttgtatttttagtagggacggggtttcaccgtgtggccaggctggtctcaaactcctgacctcaagtgatttgcctgcatcggcctcccaaaggctgggattacaggcatgagcctccgcacccagccttgttctgcccttctcagagtggccccaccccaccttgtttctgctttctgtgacagggaaattagtaagtactgattcgccatcagcctgcagactgtggctccatgtgccagagatcgcagaacagcctgtggtgccaggtttgcttctctgcctccagcactcagagaaccttatcaaataaagcagccacagcagcactcacatccgtaccatgacttacaactacagatactttctcatccatagattcccacgcaacacccaggactagggtaagcagaggtggcaggattgtatggttcagatgagccgtgagagttggctagccctgcccgacaccattccctcttcctcttggagatctccttaaggaatggtcacccctcgaccccagttgccacctttgcagcccccagtagaacttggactcctttctgttcaacgtaagaggggaaaaaggagggggagcctggtgtgggaggcatccataagcatcttttaccacccagagttcccttagtttatgagtggtcattctttagagcactgctctcaaacagtctgggaggaggaccagtgtttatatttccagcctgtcacagacatgcaccagacctactgtgcccgacagcctgcagcttgcacttaccatgcgtactcaacagcaccaatggctcacacccaattcagctggagggcccactgatggagtgcttggatgtgctattacatttttaatttttttttttttttgagatggagtctcactctgtcacccaggctggaggcagtggcacagtcttggctcactgcaacctccacctcccgggttcaagcgattctcctcctcagcctcccatgtagctgggactacaggcatgtgccaccatgcctggctaattttttatttttagtggagacggagtttcaccatgttggccaggctggtctcgaaccccgacctaggtgatccgcccacctcggcctcccgaagtgctaggattacaggtatgagccaccgcaccagccaacatttctaagttcttatactcactctttgtccgtagctggtcctggacctcacagtgcacagaccagctttggtcgttgcggggactttctacctaaagatggtggtaggagactgggagtcaacgtggagaaccagggacagaggacataagacaatggtagctgtccggtgcggtggctcatgccttgtggtgcactaccttagtggagtttgcgttgtgtattagaagtctctttcctgtggcctccgtgagcaatggctccacctgaccctgggtacatcttctatgacctccttaccattcctctcactccctccctggagatgttgggggatgatgatggagacccagcaggagagggaggtcccagtctgtcctttgctgaccggggtggcatgacaccacctaccctgcagactggaagactgagcagcatccagagactcaggccactgcagcttctgagcctcagcccttcactaaggcacccaaaattgcagactcccccagccccaagctggagtaaatcctttatgtaccttgggttcaccttcctccctcagaaacgattagggcgataacacctgaatgtggaaaagtgctgaaaaagtggaggaagaatttagaaagaaatgagcttcaaattagacaagtcttagggccttgaagagcagccagaacccaggcaactgacatgagctacagtctgtcccaacccagcccccaagcacccgcatagacaagcagacatacactcagaccccagagttgggggtgcacctagaggcagtctcttttctggtcgaggttgctcttcaaggcagaattgggtgcttgaggaagtttgtgaaactacaggaggggcagaggagatacaagttggagtttggggccagcatttgttatgggtctgtggagaccacttccccccggagggcttgcccaggatgacccactcctaggactgtctaggaggtgaagaagtggaaaggggaaaagcaggagcccttcctctcatccccattcctcataggctttggtttggaggaaggggccagagtcaagctgagagtacttaaaaggaaagcggcatgaggtcaccccaacagggcttctggggttctcccacattggagcctgggggtctggcaggacagggcaggatgtgtaccagagccctcataagtggctgggtttcattcctatgggcttcagacaccaagagttcaagtgcccacctgggctctccctggactggtgagcttgctggtgggcgctcctggggtacagcagatccctgggagactcagggagggcaggcctttgtgccaagccaggagcatgggaacagctgcaggcatctcccaaaagcatcagtgctgttgttgactcaaaaaataatagggttcatttgcatggcattttacatacagcttccacacactgcctttcatctcctaccacggcaccaccaaagccccccatgtgtctcctttcctgcctgccacctctgggggcctcgtgtctcccccagactcccagtcttccccaccacagcctagcccacccttggcttagcccaccagaaaaaccagcggttggccttgcctgggtgtgcccagtccaggtttgtacgagagggtgggcaggtaggctggcgtatctggaccccactgggcacctcagctggggacactccactgccccagtagggggcttgccttcccttcagctgcttgggctggaaaaaggaacgaaaatcgaagccggggagcccagagaggtgcggaaaggagaggaaactgggtggttgctatgcgatggggtctcggcgcccaatttgcatagggcgatgatttccatactgcagggtgaattccatatccctgcctcaaagcctgttggggtggggagggggagaggtcatttgaaattcaatgaggatgattaaggttttcttgaggagggaagtgtggacaaaaggggttaagcctgtggcaaatgtcggctccagggctccaggttatcaaagggaggtgtgtacttgactggctccttcccaccccatctccacgggaccctggagagctgggggtggttggaggagtcggcgtgggctgggtgttataacttctgcctcacaggagagccggctgggtctccgtcccttccgcacctgggctccatttagcccctcagtgtcctgaggacatctgagttcgtgggaaggacactgcgtgaattctggggctgggttcatgccttcctccctctggtgaccttggactgacatctcaggttgtccctcagcgagactggggaataatccctgcactttcttgtttggcgaggaggtgtgaggacagatggattctggactcatctttatcacaaacctgcgaactcactgagttaccgtccctctttcggctggagtttgtgcataagacgaagggtctgaatctgaggtctctaaaacaacttccagctctgagatgctggggtctgtgaacacactccaatcctttcacacatcagttagtatttgtaaggctgtttgagcagtgtgaattgctgcacccctagtgtctctgatgtgttgagaagggctcctctgttctgactttggggtagttacttaaagctatctgctcagtttcttcctttataaaacaggattaatgatagtccctacctcata

SEQ ID NO: 2930 - DNA, 13953 bp, Homo sapiens
ataaacaggccccccctgaaattgtgcaacacagtgaccctgaagggcaggtgtcttggaaagcagatgggatcaaaagggcagaaaatcagatagatgaaaaggacatcaagaatatagaattagccgggcgtggtggtaggcacctgtaatcccagctactcaggaggctgaggcggagaattgcttgaacccaggaggcagaggttgcagtgagctgagattgtgccactgcatccagcctgggcaacagagcaagactccatctcaaaaaaaaaaaaaaaaaaaaacacaccacacacacaaaaacaaagaatattagagttcttttaggggaggaagcatgcactgaaaatcagtcacctcaggaaaggcaaggggtctcataaagaccacaggcctgacaaggttagggattggaaggtcaatgggccatggggaagttcacacaaggatctggggttacaaggaaacaagaaaatgaaagtggccaggcagtaagttggtcacaacctctcacctgggggctgcgacaggcccggagaatcctgggggagctggagggggcagaccaggggaccccatggaagactgatgactggaaagggagagcccagtgggggtggtggcatcgggggtgggggtggggcccagagcctccaagggatggagctgttgaagggggtaggggtggcccaggaggagaaggggagggactccctggggaaggggatttggggaggagctgtctgggcttcgggagtctggggaggggtatgtacaggcacacagacacacaagagacagaagagacaaaaaaagaaaagagtcttcaaacatccaactagagactttaattctctaataccccaccgtgccggacccgcccactccacccatccccaagttcagagacaccctgctgtcaaacaacagtgtaactcggctggtccgatggtagtgggttatcagaacttattaacatttgtgtcactaaaattggatacaacctcccactgctatatttgactggctaaaaaaacccaaaaacagcgtaactcccattgtggtgagaggagggagttgacaaggagaggaggatagttcaggtgaggaaaatttccaaccaatccatttgaatgaataccaggtcatcccaaagccacacctgtctcgtgggggggcagcacgtggggtagaccatcgagcccctctattcccagcgtaaagccaggtagcagagcgtgcaagggaaagagacaggcaggagagacccctcctaagacgcaggatctgccgtaaacgcccaaagtcctgaggtttaagaggaatcgtgcccttcccaggcccgcgacctcggtgcccaaggcctcaagcggtcacagctaggagggcggaagctccccttccccgcccgccccgggggggagggtgctaaggccctcgggagggaggggacgcgtgtttacaaacaaggggcgggagcgcaaggaaaagagcaccgggggagggtgtgggggaggggtcgcagataagcggtcactggctcgcctgcccttctgctggggcactcaccccgcccgctgtcgcccacccgtcccgtccagcctcccctggctccggctccggggtttgttgttctccgcctgccacgccgccgccgccgccgctgcgggatccagccagggccgtcgccgccgccaccgggacggaccccacaatgcatttcttttcgcacccccaccggcccacactgccctgcggcatgccctgagggaggaagggcgggcgagcggcccaagacatgatccctggctgagagtagggatccgaagaggtcccagggattcccaaggattgatcggaggattagctgagcacgaggaagccctgagagaaagactctggcctggattgggtcgaattaagcccgtcgctctgctcagtccaaaatgacagcgccaatgtggcagccatctttgtacagacgggaagtctcggcgcgattcccgccccctcgtctagttggaaaccgaggaggcggtctcctccggcctgttagccccctcgcccaccctcccctcaaatcacctccacactcgcgcatgcgtgtcagtgcaggatgattcgtcgctaccggagtgccgccatattggtaaaggcattagggcgaaggtggaacgaacttcctgttctcgcgggatctaaaggcgggactgccacgtccaagcaaaccgggaaagagaggatcccggagccggtgagaattctctgttttttctctaccatcctttccaggcctttcctcacctaatgagtcgtagagacgagggcccagagagtctgtaaagtggctggtgaagattagtgtcccagggccctacatccgggaggtggttcgggataaagagaactagtctgggaacaatgtaggtgggaacttaagggaatgggagagcggcccatagaggtggacgggggcgcgattggagtaaagcggaccctgtgtaggtatagagttgagtcaagtggagtcatgcctctgtccctctggtcagcgtgatggccagaggcctgggggccccccactgggtggcgtgggactgctgacctgggcgaccttggggcttctggtggctggactcgggggtcatgcgacctgcacgacgatctgcaagaggacttccatggccacagccacaggcactcacatgagatttccaccatggccacagccatgcccatggccatggccacactcacgagagcatctgcatggacatacccacgatcacgaccatggacattcacatgaggatttacaccatggcctagccatggctactcccatgagagcctctaccacagaggacatggacatgaccatgagctagccatggaggctatggggagtctggggctccaggcatcaagcaggacctggatgctgcactctctgggcttatgtgagtctccaggggatgggagagagaagggctggttctggatgttgggaaactccacagtacttgaccttgactctccctcaccaggcactgggggccacatgctgatctcagcagctccattttttgtcctcttccttatccccgtggagtcgaactctcccggcatcgctctctacttcagatcttgctcagttttgcttccggtgggctcctgggaatgctttcctgcacctcattcctcatgctcttggtaagtaacctctgacttctacctcaatctaacctatttcgttctttggaggaaaagggttctttctcctttatgatccctgaccttcgatattcccccaaatacacactcattgtgtcagatattccctcatctggttttcccccttcttccagaacctcattctcaccacactctggagcaacccggacatggacactccccagtggtgaggaagagacagatggggatgggagttggggtgctggggaaggtccgtctcccctattcctcacctcccgcacttgaggaggaggagtctggaatgcacatctcccttaagtctcaatgcctccattcccaggccagggccccattctgtctgtgggactgtgggttctagtggaattgttgcctttcttgtcgtggagaaatttgtgagacatgtgaaaggaggacaggtcacagtcatggacatggacacgctcacagtcatacacgtggaagtcatggacatggagacaaggtgagcccaggaacaactttcctgaaagctgacttgcctgcctcagaatctctcatcttatggccctcaggagggagaggacatgttggaagatctgttctccactctgacaactcttttcttccctcagagcgttctaccaaggagaagcagagctcagaggaagaagaaaggaaacaagaggggttcagaagaggcgaggagggagcacagtacccaaagatgggccgtgagacctcagaacgctgaagaagaaaaaagaggcttaggtaagggccagagttggtgtaaatttgggcaagggacatcatcacaaatcacatggaatatgtgctgtgggtaatggcggtatctgagaaacactaaaggactgggtgtaaagtggtctctgaggggaggtgtgagatagctgaccaagactggaacaagtggtgatggaagcctctgatcattttctcttcttgtctgtacaagacctgcgtgtgtcggggtacctgaatctggctgctgacttggcacacaactcactgatggtctggccattggggcttcctttcgagggggccggggactagggatcctgccacaatgactgtcctgctacatgaagtgccccacgaggtcggagactttgccatcttgtccagtctggctgcagcaaaaagcaggttggtgatgtctgccaaacacagctgcctcaaccctttatctctcctcactcaccctaaacccaaacagcctcttattagttccaaacaatcatactgtcattgacaagtcctctagaaatgagggggaagaagttctggttactttgtctttagctcagtatttcttaaactggtctataaaccatctgaatggtttagtggagtcttcacacacacgcctactcaatcagaaagtctgtggaaaggacctctgatctcttaagattttcagaaattgtctattctagactgctccctcttctctttttattttgatgtttagtttcaaatccatgtcccctatacctataccccaccagccacttctaaaccactgataatcttagctattggtgagtgcctttttctcttttctgcccatcaggcgatgcgtctgcaactacgacagcagtaggggcactggcaggcacagcctgtgcccttctcactgaaggaggagcaggggcagtgaaattgcaggtggtgcaggtcctggctgggtcctgccatttactgcaggtgctttatctacgtagcaacagtgtctgtgttgcccgagctgctgagggaggcatcaccatgcaatcacttctggaggtgctggggctgctggggggagttatcatgatggtgctgattgccaccttgagtgaggggtggataaactacccctgccccaaacctctacccctaactccagtcaggggtgcgtagaggttgggggccctggccagggacatctgccaaaggaaggaacttagcctgggagaatggttactttggcattagggccttcaagggctggcagtcttacagagctggagcggtgagaatgagaggccagagggaccatagtgttgggcactgtctgaccatttgcatttggaaggctaaatggggccatgaagaaggctggaagggacagggggtgatggagcctacctggtgtcccctaccccacctgttctcggagaaccaagttgctacacaggaattctccaaggtccagtttcctttctcccaccagttggtggaggcttcagggaagaccaggtcctggacagagagggtaacaggaggagtcggggataaacatcaaacatcaatcgtgttcctgatttgggagtgattggggggatggggtgggagagggttagttggtattctcatgcctgattttttttgtttctattccttttatatcactgtgtttgaatcgagggggaggggggtaaccggaaataaagacctccgatcttccgccccacatgcagtctttgtctttttgggggaatggggccccttgtcttctccacacccggggcccctaagcagcagtgtcgggccagccccctcggtgggaggtcggcctgcgctggtggccgcagatggcctaaggctggcgggctttgattggccccggctttgcccttgccacgcccctctgcgctgggattggcttagtgtgggattcccacccacccacagcccgccatggcgtctcagctccagaaccgactccgctcgcactggccttggtcacaggttgagggggttctttccccgggcggtttggggtattgggtgaggtcaggggcgtgcccttggagtgcgcggccgctgtgacctctggccccttaccccattttactttctgccctgtgacctctgatccctgccctctcctccccgtgcccggtccgcgtgttctgtcctacctcaggtgcggggagcggcatcggccgagcggtcagtgtacgctggccggagagggggccaccgtagctgcctgcgacctggaccgggcagcggcacaggagcggtgcggctgctgggcgggccagggagcaaggaggggccgccccgagggaaccatgctccttccaggctgacgtgtctgaggccagggccgccaggtgcctgctggaacaagtgcagtgaacgctaggccactttccccctctaaagctctgatattgcctccactgccccggcttttgtggggggtttttgatgcgtaacctccccctcccataggcctgcttttctcgcccacatctgtcgttgtgtcctgtgcgggcatcacccaggatgagtttctgctgcacatgtctgggatgactgggacaaagtcatagctgtcaacctcaaggtggcgatctctgaacctgcgagtttggcccccttagcctggggagggagttggaggagggctgtcaccccagctgatctttctcccttgttaccctttcccgccagggcaccttcctagtcactcaggctgcagcacaaccctggtgtccaatggttgtcgtggttccatcatcaacatcagtagcatcgtaggaaagtcaggttgagttggacgaggtcagccagccaagtggtatagagaggagaacccctccttagactcctgactcattccacatctctgactcacctataggtggggaacgtggggcagacaactatgcagcatccaaggctggagtgattgggctgacccagaccgcagcccgggagctggacggttggtcagatgcttgagggtgctggggagcacctggggggtctgagggaggtacagcattcagccctctccagaatcggcagccactctccttcccacagacatgggatccgtgtaactctgtcctcccagggttcattgcaacacccatgacacagaaagtgccacagaagtggtggacaaggtaggaggctgtgggtggagggcagaatcattcagagactcaatctcctgggcttcacagagagagagagagagagagagagagaatactgggcacagttcctggcaacattaaatattcaatgaatgtatgagaaatgaagacaaaaaagggtcacagactcagcttcaaaaaaatccataaaagaagctttcacccacatgagtatttccttacagattactaaatgatcccgatgggacacttgggggaccctgagggtgagcactgaatgtagtggggtcctgggaagggggcctgaatgaagagatccccaaagtttggggattttctaggggactgtggttggtgtctgtggagaggtttgtggggagggatgtctttggtgggagattatggctttttgggtctatgggagtgagcagaattctgccctctccccaccattctcatagatgtgcagatgtggtcgcattcttggcatctgaagatagtggatacatcacagggacctcagtgaagtcactggtatgaggccagcatggggagggagagggcagagaagtagaacccagacttatgagaaagcaagtaaggggagtctggagccactgggaagggcagaggttcccaaggcagggacagaagtgggtaccccctagcccatttgtgtctccacccatgcatctgtccaaagtttctgcccctcccaggaggtcttttcatgtaactgcctcaaggaccctggactctgccacccccccaccactctgcctggcctcctgctgatgaggactctaagttcccaggatacaaaggggtggcagtgtatggttcaggaatgctgaatatgggaagcaggggtgcttgtgacctaataaattccaagtcctcttccctgccacctccggctcttcttgtgtccaagccctagacccttccccacctccccctcctttccctttcccgaaggattgttccctttctctgctggtctcccagggcaacccccgccgccgggtgtgagaggaaagagtatgtgtcactgtgatgcgtgacactccgggtctttttgaagggaggggttcgtgcgtcacccctttccactgttctgcagcaccagtcccctccccccaactccctgggttcttatggtccccaagggtgattgttcatggccccatcttggtgtccagtctggccttgaaagggggtcttggaacaggtgccctcccccacccctctcctttctctgagtccccccctcccctttctctccaccttacatagctgcagccggcctggggtcggatgggggggattaggggagggggccaggattagggaatgaaccagccgatgaaaggggctggagagagcaggagggagggggctgggaagaggggagaaggggagggggtctgcgctaatcgactctggcgcccacataaggactggccacgactgaaggagaggacagggaagtaggggggaactggggtggggggcgagggcacccactctgccttgtcccagggacaggccaccccctggcagccgcagcccaagtccgggagcctcgctcgggcggggacaagatgcccatcagggtctctaactgccccccaccccctcgcccttatccctctcattccctacactcaatggggatcgctctgccccttcctcttctctttccccccatccccttcgtttactctagagtcctcgaagaggcttctgcccacttcccactccgacattctgcccctgtgtaccccacccacacgcgcacccccccttcccaatgggagctcatcttgtgtatgtccctgtttccgcgtggtgtctctattccccctttcctcccgtgcgctccctcccttccccgccccgggccgcggctcctgattgtccaaacgcaattctcgagtcatggctccggccgagagttgagtctggacgtcccgagccgccgcccccaaacctcgagcggagagcgggtcggagggtctagggagagccaaagcagagggtggagggagtccccaggtggtaaggggaatcccgggcacatcgggacctaggtgtgttctcaggactagaaggctaagcggcagatcttttgcagccttttcccccgggatcctggaatgggggttacggagaaggaggggggttgatccccagagtcgccagggtacgcagagtgggggaggtagcccttttccgagccctctgtcccctcctggggtcccagatattccaggccccggccccccggagctgggccccgcgtgggggcctctggaagggaaccgaggctaaggttgttggccgcgcgacgggctgggccgggggcggagaccgtggttccctaagtggcgcagaactcccgggacgcaggtcctcacgcgggacgagcccgtcccgtgggcgggagaaccgcggcgtccacgtcccgtccacccgcgccgcgaatggtgggtgacgtctccgccggcggggggagcgggtgtagcggagagcaggcggaagtgacgtagggccccagcgcccgggccatggcggcggcggtggcggggctgctgtctgagcagcggttgcggaccgagcgaacttggcccaggagcccgggcctaggagaggcgcggcggcggcgggagcgcgaacggctggagctgggtgaggggcagtgccgggcgggggcgggagcgggggcggagaggggcgcttctggaggggcggggtctacgcgagggcggcccccctgacgccctcctccccttccccccacccccagccttcttcgccttctcccggctgtggagccctggtggggggtctgcgcccggtcaccatgacgacgccggcgaatgccagaatgccagcaaaacgtgggaactgagtctgtatgagctgcaccggaccccgcagggacaggcattctccctttcaggcttaccccctcccccaaacccttatatccacagaccgatcacacagcttcttttccgtaatttgctctattctgccttgcctggccctacctttgatcaccttaatctttccaaagcactttcgcatttagctcatttaatcctcaaaacagcccgccagagaggtggaacaagtattattatcttcatttgaaagatcacaaacacaaaaattccttccctgttcctcattcagtgtcataagtcagtgcacataagactcactttgggagttattaaaagcagagcttcatgccccccaacattctgattcagtagtgaattgggttctcgaatctgaatttttaacaggcaccctatggggttctaatacaggtagcaccaggactttaaaaattttgttgaatagtttttcccaaccacagatttgtgccatcttcactcctaggcacttagccacctcagatcctcctattccaaagctcctactcttagttaatggacactaagtctgtcttttctccatttgctccaagtcatcagtccttctctttctcagaattcttgttcctatagagaccaacatgggtcttctcactgtatttctcaaaattcttattttatgggtgctgtttctaaaacccctttccctctaacccacaccacctttctactcactgatgcctcaggaagccataatggatggcacagagattgctgtttcccctcggtcactgcattcagactcatgtgccctatctgcctggacatgctgaagaatacgatgaccaccaaggagtgcctcacagattctgctctgactgcattgtcacagccctacggagcgggtaataggagagacagtttgagatgagatgaaggggtacaaagttagggccctctcactggtcttggttcagccaggcttcagttcccttgactgaccactcagggcttcccttctcctaccccaggaacaagagtgtcctacctgccgaaagaagctggtgtccaagcgatccctacggccagaccccaacttgatgccctgatctctaagatctatcctagccgggaggaatacgaggcccatcaagacgagtgcttatccgcctgagccgcctgcacaaccagcaggcattgagctccagcattgagaggggctacgcatgcaggccatgcacaggtgtgagggtcaggagagaagcagaactgatggatgggtccgtgggtcagtccttgttgcctgctagcttctaagcctcagcatcctagggctgaccacagactgatcattagggctggaaatcatgggtgtaaattgcagtttcttagaaacaactggccctgctcttcttaagaaaaatatagggctgggcacagtgactcacatcgtaatcccagcactttgggaggtgaggatgggaggatcacttgagcccaggagtttgagccaccttgaataacatagggaaatctcatctctacaacaaattaaacatttagctgggctggtggcacatgcctgtagtcctaccttcttgggaggctgaggtaataggatcacttgacctgggaagaaagtggatgttgcagtgaaccatgatcacaccactgcacactgcactccgcctgctgggcgacagaacaaggccctgtcacaaaaaaaaaaaaaggaaaaatgtagttaccccatgactttctagaagttagaacagtagagcgattttgagaataagccccggattatactgctggaagttaaatcacctcctaggccagcatctctcagtctttcatgtgtatcagattacctgtagatcttcagatgcaaactgtgattcagtaggtctagagttgggcccggagtctgcatttcacaagctcacaggggatgtgtatgctgctaccgcactttgagaggtacagcctatgatcactaacaagttacttaacctctctaagcctcagtttcctcagccataaatagaggtaatataattacctgtgtcataggattcattgtattaggtaaggggattgtgcaaaacacttagtatactgagtgcttagcacattgtgtttaataaatattaggtatctcattaggatttttcttatctcttaattctctgaagtttaaagtctaagccctttatccggatgccttctaaccttaaccacttgcttctacagggcccagcgtgtgaggcggccgatccagggtcagatcagaccacaacgatgagtgggggggaaggagagcccggggagggagaggggatggagaagatgtgagctcagactccgcccctgactctgccccaggccctgctccaagcgaccccgtggagggggcgcaggggggagcagtgtagggacagggggaggcggcacggtggggtgggtgggggtgccggttcggaagactctggtgaccggggagggactctggggggggaacgctgggccccccaagccctcctggggcccccagccccccagagccaggtgggaaattgagctcgtgttccggccccaccccctgctcgtggagaagggagaatactgccaacgaggtgaggagccctgtctttccccagccactgagaaaccaaagatcacctagatttcatcagaagtgggctttgcccaaacccaaaataccaccccaacccagaatccattttggaagcccctacctccagtcctcatctgaggcgctctggctctaagcctgtcctccctcccttccaggtatgtgaagacaactgggaatgccacagtggaccacctctccaagtacttggcctgcgcattgccctcgagcggaggcaacagcaggaagcaggggagccaggagggcctgagggggcgcctctgacaccggaggacctgatgggtgtggcggggagggtgggggtgccgaggaggtgacggtcctgaggagcctgctttgcccagcctggagggcgtcagtgaaaagcgtacaccatctacatcgcacctggaggcggggcgttcacggtgagagcttctgagggcatggtagaagaggggagaggagggagggtggtctgggccacatagaaccatgagcctggttaactcatcagcactcttcccctatacatcctctatctctttctatgtcccctctccttcccatcatccatgtccttttttgccttatcgcttttattattccttttttctttcctcccccttggtcaccttttgcctctcattcatttccttttccatcttctccaactttcctcttcttttcccctctctcccttttaccccctcctcagacgttgaatggctcgctgaccctgagctggtgaatgagaaattctggaaggtgtcccggccactggagctgtgctatgctcccccaaggatccaaagtgaccccaccaggggacagccagaggaaggggaccatggggtatcctgtgtcctggtctatcaccccagcttctttgtcccccagtacccccagcccagccagcaataagaggacacaaatgaggacacgtggcttttatacaaagtatctatatgagattctctatattgtacagagtggggcaaaacacgcccccatctgctgccttttctattgccctgaacgtcccatctatacgaggtgttggagaaggtgaagaaccctcccattcacgcccgccaccaacaacaaacgtgcttttttcctctttgaaacctgcagttctgtgtgtctgtttataggggtgtacaagaaaaagaaaggaaaatagattggggagggaggcctagaaataatgtaaatcagccttggaaatggggagaaaatg

SEQ ID NO: 2931 - DNA, 41081 bp, Homo sapiens
aagtcacaatgcagccctggatataacggccatgaaagtttatgtgctgaatcacaaagggcaaaatatgaactggcagagatgtcggcctctgaggttagagaggtcatggccacagtgctgaatgtgactttgggttgcccatccaggagattgggtggcagggagagcaaatgtatcatgaaggggctggttgtatcacgctggtcaaatgcatacaaaggagtctgtttagaagaagcgaagaagggaaagcaagcggacacctcctgggggcctcaggatcccacattattggaaacagtgcccccaacacccctccacctccaccaaaaggcatcctacatacctcttgttggtacactgggccctcagccacagaaaattggttctcagggacagagataacccaactaagccaatcagattgtctctccatgactttgaaccatggggcccagagacacagaggcaagagcagctctgctgagcggtgagtatccacactccagggacaaagtccatgagccctgaggttcccagaactgctctcagtcttccctattgagtcaactctgtcttcaaatcctagaaacccaatatttttacaatcaattccttttggagcttaagctattctgaatcagatttgcgatttgtaacaagaaaataataatagtaagtatagagttttaacagcactaaaataaaagtggaaaagggacagcagcatgccccagacacccgtgtgtcagcaataaccaagaatggagatggaaccaagacagcttgtcaggtccctcccctcactttccattgcaaaggcgtcagtaaagggggaattattcctttacagagcaagtattatcccactttgcaggtgaaaaactgatgctgaggttaagtgtgcaactcagaagcaaagcatccctgacaagctaaggaaggagaactctcagttggaaatacagagaggcccgctgccagctagaatcagtgccactttggccctaagtctgctcaacccacccaaaactagaccacctgccactcaaactctttgtctgagtccctctctccccagggccccaatcaaacagggtgctatttctcatcttctcctaaccctaatgtctctgaaacatgtttgttgggtttggggtttgtttgtttctatagattgcagttctaaaagtaaggaaaacctgcaggtattaatacaaataaccacaactgggagggatggaattataagaaatctctcccagcattagtaataccagtatgccttatttcataggagagcaggccgattacctgacccaacaatatagcccaggcccgggggagatgtgaaacaatgaggaagatatctctatgacccacattctttggcctgaggctctgccggagtccagcctgttataggtgaagtggccaagacctggaacatgacctttacatgagctgctgtaagccagtgtggcttttatctgttgtactttgggaaatcatccatgcctcaggaaccaaagtccttcaacctagagtaaggcgtttttaatagaaagagaggccagataggccaggcgcgtggcttacgcctgtaatcccagcactttgggaggccgaggcgggtggatcacgaggtcggagatcgaaaccatcctggctaacacggtgaaaccccgtctctactaaaaataaaaaaaatagccgggcgtggtggcgggcacctgtagtcccagcttctcaggaatctgaggcagggaatcgcttgaacccgggaggcggaggttgcagtgagccgagattgtgccactgcactcagcctgggcgacacagcgagactccatctcaaaaaaaaaaaagagaggccagataatccagcactttaggaggctgaggcagggggatctcttgagcccaggagtttgagaccagcctggcaacatggagaaaccacgtctctactaaaaatacaaaaaattagctgggcatggtggactcgcctgtagtcccagctactcaggaggctgagggggaagaatcacctgagcataagagtcaagcctatagtgagccatgattgcaccactgcatgctagcctaggcaaggggagtagaccctatctcaaaaacaaaaaacaaacaaaaaaagagaggccagagcgaagtacacaaatggattgacctgctcctgccaactgagggaaagccagacagggtgatatgctggctccgctgaagctgagagctgtgttcattctaccatcctggccgtgtggggagagccctaaagagaagcccatgtagatatccttggtctttattcaaggactagcaggacaggtcttcccactgagatggcagtctgctgtcagtgccagttcccatgaaactactctgaagatgaaagaaagataacagaaggccagttataagcacttaaggtgacttctgcttactctaggtttggttgagaaacatagctatggcctacacatgtacagtctgtgaactgcacagctcgacagaagaagctccagtgtggccctgatgctccctgctgaccacaccacacttgcaggaaaatggctaaacaaccacaaaacaaggtggccaccagctactacacagaaacttatttctgagcagctggagccctttgtttgtttgtttgtctgtttgtgatggggtatctctctgtcaccaggctggagtgcagtggcaagagcatagctcactgcaacctcaaactcctgggctcaaggaacctcctgcctgagtctcctgagtagctgcaactacaggcacatgccaccatgcccactaatttttaaattatttttttgtagagaaaaagggccgtgcgtgatggctcatacctgaatctcagcactttgggaggccgagatgggcagatctcttgagcccaggagttctagacagcctgggaaacagggcaaaatcccatctctacaaaaaatacaaaaactagtggtacatcctggagacccagctactcgggaggctgaggtgggaggatggctggaacccacggaggtgaggctgcagtgaaccttgatcttgccactccactccagcctgagtgacagagaccctgctcaaagaaagagagaaagagagagagagaaggagttttgctttgttgcccaggctgaggccttgttttgactcactccctcctctgtctcatctccacccccacctgccctggtccatcaaaactacaaacctcagcatgcaagacagccaagggagggcaagaacagctctgtgtgcccatggccttctaggatatgtggtgctcccaggtacagtgatataagtggtctgtaattatttttattttatttcacaagttattttttaaccataagttacagatgctaaaaataaagcccaaagctgaaaagcagctccaagggtgtgacaggccagaggacccaccccacagcctccctctatacatgatctcccacgcggtggctcacgcctgtaaccccagcagttggggaccgaggcgggaggatcatgaggtcaagagatcaagaccatactggccaacgtgaggaaccccgtctctattaaaaatacaaaaattagccaggcgtggcagtgcacacctgtagtccagctatccgggaggctgaggcaggagaattgcttgaacctgggaggcaggggctgcaggagccgagatggcgccactgtactccagcctgggcgacagagcgagactctgtctcaaaaacaaaaaaaaacatgatctccctgtgcgccccatcccaaaccctcctctccttcgccacatgccagcgcacaattccatcatatcacttgccttttcaaacaccatctatgactcttgtttttgggttcaagttcaactccttccataagcagtcaatacttttcagaatttggccctccaacaagagtttatgttctgccccaatcaaacccaaagtagttccctaaagcctctcctttctcttccctatctcctcccaccccacccagaagcctccattgcccaccagccaaggagacactgccactacccacaggcccagaggcctgggcacttgccctgttcacacccaccccaccccaaaaccccgcctctacagccctgcccttaaacccctcccacccttccttaagcctggctctagctttctggaggggaggaagaagttagctgccaagagaaggctgtggcctggcctcctcaacagcaacttggcacagactccctcgtgaaactgttagatggggttgttggcagcactgtgtaattaaataggcttttgtggattggcctggggacttagccgcctatataaatgttattcgagtgactgtacagcattgtttccatgcagaaaagccctcggactcagagcatctgaccaaacgtgacctttgggaaagtcctcttgctgttcggggggcgactctgcgggtttggctccagctgcagaaagagcgccaaagaaatctcaactccagcccgctaggctgggagtgggtgcgggagaaacagatggggggcacctatttagatctgatctttcttaatgtgaccctgagagggagggaagggggtgtctgaagcccctgggccttggatatgagatggagagcatgggtgatcccagaaaacctatccaccaccggacccctgacagatagatcaggggcttcttcctccattcggccttcggggtcagggggttcagcgggtgacaaggagaggcgtctgagggaccgggattattcagctgacccggtgcggggccgcgttctcacgcgggcactagggggcggcagaggcggaggcgccagcgccgaggagaggcttccaccccgagaagtttttccgcgcacccgcccgggccagagtggccgtctagacgcccacgtgggcttcctgcgatcgagaatgggttgggaccgggacggccaagccgatgctgtcggggacagctgggaggaagaagtacggggaggaggggcgggggcgcagcctacccgggctcgggctggggtgaagggcagccctgccaggcccgccccgaggccgcggatgcgaaaccgggacacaaggcacgcactcttgattctggcgcccgcgaggaagagggttgaggaagaggaaattggatgaggccctggaacacgttttaatgcagcgccctgacaggcaggagccaggcaatacgcttgggaatgtgaagccccatgggcaccagctagggggtcccggctgcgcggccagcctggaagagaggacttcttggacacctaacccggagggagcagagcttctgagtgcccagagagggaggctagggaagtgggggacagtcaagagtggggggacacaggcagggactgtcgactccacccaacacaaagactcaacgagtatgcacgtgactacacgtgagtgtggaggcttggccacagccctgtcttcatgacagcacagcacaaggctgatggggagggataagtgaccagaggtacagatgcagtaaatgtcttggaagtgggcctcagcctccccatttacgagattagactgggctatgtagcaccgtcccacccacacccagaagcaatcgcacaccctgtcagaaactggagccatagggaccccaaacccctacctggtgtccctggggcattgttgtaattttatgctagtcacccaggctttgtaaactctgggccctgacaccccagctggcagggcttgcagggtatctggattaagccatacaattctggtaaccacttagctgggaaaggaagcatcagatgggtgtcgggggagactgaaataacaacacaagcagtgacacagaacctgggaggagacaatcacattatttaaccatcagtcagcatggaagctgggcacaggtcctgggagtcccttccatatgccacacattaaccctttaattgcaggatcagggaaaggaggggtgcccaggggagggacaggggtggcaatgaacatactcagtggctcagggccaggcaatttaccagccaatatagaagaattttaatattccagccatctgcgggatgcagcctgcacacaccccacactattccgtttcttccctgggggagcatcctggccctcaagtacaggcagtgcctgccaaacccagaccaagtggaagagacagtgggcacatgggccaggcgccaacacctgtgggttagagagccccaccctggcagagtcagagccctgaggccaggggaccacatattccaactttcacagtgggtgcgacaggtgaggtgggaggaaggtgggaggaggtggggttcagccctgaaacccccctacacacagtcactgaggaaagtcctgactcaggatgtgggtgccggagcccacccccgagacccctgtcttcaacatctgctgatttttttggcgtttctcttttttgttattttgctttccacactttaaataattaatacaattactttaaatacaaaatacgccatgtcctttctcttctcttccatttgtttggggtgattggaggtgagttttaaataagggtctcagctctctaacgggtaacaggctccaggtgggaggccaagagccccagatgccactcctcccgtggggtgtccaggcaaccacttcacccctccctggcctgccccgactgagggctctccacgccctggcccagggctccctagatagtgagagccctcttgggaggtggcacagagctgatgttgtgggattccaggtgggcctggttccaatggacaggatcagacagagacggtcctatcccatgaagcagacaggccccagcagcaccctccccgcctcggtggggctcccaggtctgagaaggaggcatccagcactggcagctctccagcacaggcgttcgcacctccagcaccgtccggccttgctgtgtcttcagggggaacaaggaagaaagtgtgagcaggatggaggcaccccccaccctctaacctcaggcccagctcacctctcctctgagcaccttggccccatcagggtgactcaggatgtacagactggcgtgtctatgtgcccatgcgtgtgtgtttgcttctcccccaccgtgtgcctctgctgggcgccatgtgccagtctgtgtacacgtctgcattaacctgtgtgacgctggtgtttgtaccaagtgaacctcacccgatggcttccatcctttccaccttcctcaccggcttttgagctcctcaggcatccctgacaatccagcaggacggactcctccctgctccccctgggtgccctcccaaggggtcttcccacctccttcctccagcctgagtctgagatcagcccccaacccactcttcctgttcccacctggcagccatctctgaattctttgacataggggctagtctccggctcagctcatcctcattggccccacggagtctcaggggaccgtcacgggctgctccaagcaggggtaggagacgtcctggtgggctgagacgctgagcagccgcaggaaggtgagcggaccacacccactggggagccctctgagtccacgtaagagaactggaaggagagagaggctggcctcagagggggagagagagggctggcctcagagggagacagagacgggcctcagagcatctacggcaccaggacagctgagccagagtcatgagcagggaatggctggaaggaagggctgggaaagaagtgaggggctgagtgggagccaggagactgggggtacacgaaagcaaagtgagcatcagaggaccggtgaaaaggaaaagaagaaagagctaagaagtggagaggggtggcaggctccggggggggcaacagccaggggactgtcaccaaaacccagaaacactaagccctgagggggtgcactatggggcaggggaggggcagcgaggggccagctctccctgcgtgacgtcatccctaggcgtcacacaggtctcaccccctgctgtgaagttgcagaaactcggaaggcatcccgagcacagccctggttggggtcgacccagtactctcctgttggtgagggagaggggaggtcagggccacctaggtccaggctccaagatgctctttgccccacattccctcttccctcccagccctccccatcatgctcttagtctcctggtcctcctcctcccagagccctagaatctagccctactgctggattctactgcagcatcctactgctgagcccactttcatcacgtgacacctctgcccccaacagtaaccccaggccctctgactgaggaggtccgagtatggacagcctcatactgggacaacatgtggttgcaggcgctcacaagattcatctgttcaggtgcaaacaggtgtgtgcacgtatgtatgtttatctgctcctgagacactgggctgataaccaactggtacacactgacccagatcagttgctaaagtattggatacttctgacctggttagtaaatagctgcagttcccagcccctcagccctcacccttacccaacaccttcaccaagactcccccagcatccattctgcttgttcagtacccatgctttggggagatgtttgtgcaccctgaggctagcactgaccatcgggaagctctgggtggccagcttcaggtcctggcaggtgcgagcagggctgtcctgggtccctgttggccgcctcactgctcgatctcctcccgcagggagtcgagtgagccaaagatctcctccagccccccagactgccgggggctcccccggtcggtatggcctcatcttcctgcatcagacggcttccatcaccgagcgccgagtcttcttgggcatctgaatgggcagtggctggatcacctcgcctggggaccctgggtgcagggacagatggagagggcaagagacaaggttggtgtgagggtgagtgtggcagcagtggagcagaggggtacggccctgggagcagccctgactcctcactcacgggtgtcctggagggccctgcacacccttctctcccttgggtccgcctgggccctgacaggaataaatcaggtcatggaggggtcaagaggtcaagcatggatcaaggtcacagaaaatcaaatcagcctcctggctggaataaggggctccttggggggagtctatttgtcctgggagacatcatcaagtccagagggggtggagcaaaggtcagagctgaagggggtcactcatgtggctcctttggctcctttggggccagcaggtccctgtgaaatgaggaacaagaaaggacggtcactgcaggggaaggacaggactcagaggagcggggaggcaaggtcccaagtcacaggagcctcgggttactacaggaggggcagtcttgtgggaatactaggacattcagaccctggaagtatggggaggaggtactggtggtgacaggacaaatgggggaccctgaggatatgcttgttaggctggtagttccatggaagtcgttgggaggctgtgggtgggcagcagggggtttaggggattttgtggaggaacagaggcagtactcacggggaggccggggggactccaggaccaatggggccggatgctcctgggataccctaggaagggtagtggctggttcactgggtcctcctcccacaccctcctgagcacctgctcgcttacccacagctgagtcccactccaactccacccctctccaccccactctcaacccccacaacttccgggaccatgcctctactcaccatctcacccttctgcccaggggagccctgaggcccaggaagtccccgattcccttctctccctgctcacccgggggcccaatcagtccaatgagacctgggtggccctgagaagggtgcaggcagtcaagagaatgcaaagaggagtcatgtggatgggggagaaggccaagaggacatggagagggagccgggcacagggtccgtgagtggccctcactgagcaggactccctgggactggctgccggaggcctgaagcagagcagtgggcacttgggtcccacggtttcaggggcgagggtgatgggagagacacctggccacgtgtctgtctgtcactcacttctctcccttggctccagcatcgccccggagaccaggcagccctgggggtccctgtgggagatgggaagtcattctcttaagggagaggtgggaccaagttctccccaacagcctcccttcctccagggcttcagctctgtcccagggcactgccctcacccctcactcagcccaacccagtcactcaccacaggacctgggggcccagcctggcctgtagctccaggtcggcctgctgaccctgaagatttgagggggccacaggggtcaggaggagcatccccacactgcaccctcccatggcccctcactcccaccccagcccagcccttccctgcagtgactcaccactagcctgggagccccctcagaccatcagggccaggtttccctgctgggcctgcaggacccccgggcctgtcttccccggggcacctatagcgccaggatctccctgaaacacacacaagaatgtgtcctgaatggcagaggagtggggtgtgggcagggggcagagggtccaaggtggaggcaggaggcagggaggaagggccaaactctaggagcccctagcgcaggaacaagtacgggaacgcctgtccccataagggcccaacatgggagaggtggagatggggtgggcatctgagacggaggcatctgaggggtgggaggcggaggggatgctccagcactagggcagccttccctcaccttggctcccttccctccttgtcgcccctcggaaccaggcgagccagcaggccctgcaggtggagtgggaaggaagagcacatgaggccgtgggcagccaggctcaactctcccccttcctgtcctagacacacacatacacatgcacacacacacgtgcatacacaggacacgcgccgagggccgattcacagatgtgcagaacagatacagctgtgacagttgtgaaatactgggtagtctgtacatttggtgaagggccacttgcccacaccctacctggtggccgtctcctgccccagaaactaaaaaggttcacccctggcccacagaaaagctggccagccctcctccagtttccattctgctttgtcagtaaccaccactacccctggtgaaaacataacaccagaacccaggaacaaacatgcccgagataccgcacacccatcaacccaccagctctgcacacacactcgcccagtgcaatgagataccgcatacccttaaacccaccagctccgcacacacaccctgccccgggcaatgagataccacacgcccttaaacccaccagctcctcacacacacacacccagggcaatgcagacaccaggcacctccccacccatcccacctgcattgcccagcctccacccacacagcccagggactgcctcccaaggtctcaggggtccactcacttactcgctttccaagtggccctgggggtccattctccccggtgggaccaggggaccctagggagagaggaattggggtggctgagtgtttatcctccagccaagggacccctcggagtggggcacagaagaggggtaaagaggatgaggcttgggctcaggggggtggtgggtcaccaggcactcacaggctgtcctggctcaccatcctcgcctcggtcacccttagcacatcctggccctgcagaagtgaagcaaggtcagaggtgggcccccaacctggctggcatccctccaaaactgtcaataccccatccccttgcccaccctgccatacccccggcttcccatacccaagcccagcggccacacagaggacccccccatagaagccccaccctttttgcccttcccttctctgagtaagactcacccgagggccaccttctccaggggggccagggtcacaggaaaaccaacaggaccctgatccagatggagaataagagtcagggtcacagctccctagcccacccagcacagacgcccacaggcacacgccactgcctctctagaggcagtgcccccagtaccccccaggaagaggtctcctgcacccctttccctaccacgtgcactgcgtgtgtctaattcctcaaggtattaactgcagggcatctctcactttctctccggatcctagacccaggcatccctctggatgccccattcccagagcatcccccaaactcccgggctcccccactccaagatcctccctcacacacacccatattcccaggtctgtcattcacagggcctagaggactcagcccccactgccccaaactcacagggttccctttggggccatcatcgccgtggggcctttaggccctggtggccctggctctcctggctgccccgactctcctttctcccacgttccccgcgtggaccctgcagaacaagcggaggacacagatggcccagggaatctgaagatcagggatgcagcctctgcttccgagacaccttcagccatcccctactcccctagtgacaatgggacatacacagaaagtcaagcctacaaggggagttccctagtccccttccttcaagaaaggggaagaagggctcactcagaccagggatcaggcctcatagaggatgcagggagcagagactcttgctgcagaggagttccagctcaaggaggtcacaggaaaagtgaggcagggttgaggcgggtgacggggactggggagtaaggccttggagctgtcactcacttgacacctggctcgccctggatccctggagatcctgactctcctggttccccctgcaagagattagagtcaaaaacctcctctccttccccagccaaaaaattctgatattccccaatctcattctcttttgtctccccacccaaaattggcagaaatccaactcccatcccccattccatgactggtccactcacccccttcccagttaccttctctccagggggacccaggtcccaacacctcctgggggaccttgtgggccctggaagaggaacagaaataggtgtcattcttaggatggaggtgccatttcaggggcaaagtcccagatgagcagcccaaggttacagagtgaggcagtggaggcctcccgggagtaagggcttctcttggcccctgagacgatactgagtttatggtctgggaaagggaggcagaagaccagacacattggtctcaagggacagggctgagatgactcacatcagcgccattgggtccagctggacctcgaggtcctggggggcaggtggtccctgggggaaacagatacaccacagatgaggaagggaagtgagatggctgacatgaatggtggagagaggaggaggagcagccaggccagggagttggcagtggggtgtgggtgggggctggccagggaggggggtgactagtatggtggctagggtcagtaggggtcaactcaccataggacccacatctcctgtttctcccttctccccagaggggcctggcaaacctgtgcaagtatacaaaacatgggcccaggtgacgaccccacccaaagcacagccctagcagataggccccacagtcccctcccctcagactccgcaggccctccagtctgcatcggcggctgctggcagagtctggggcaaaacatcaccccatcctgaccccacctctcagccccgtcctatcccccaacacacctgtaggccaatgggtcctgggggcccattgaatcctcttttccttcatcacctttggctccaaagtgtccctggggtccccgagctccgggctccccactgctccctgcagggttgagggaaagcagagacaaggacacagggatgggtcatgggtcggtgttctctatccacaaataccacacacagctgggtgccaggcccagagcccctgctccactcccagccacaagggcagaggggagctgagggaggaccagaggctgctgggccttcgtgggggtggaggggtcactcaccgctgctccaggctgccccacaggaccaatgggtccgggggtccaggagggccctgggtaagagaagagagtcagagacaccaaaacagggagaggatcaggtgggactgaggttaaaggccaggaggtcagaagtcaaggtcatggacacttaatgttcacccttgttccctttggtgcccttctgtccggggtcccccacctcaccctgggggagaaggcagacaagatattagagaaaggtgatgggtagagtgggaaggatgacatgaaggggccaggggtcatgcccaggtcagccatctcatctggaaagaagattggtcggggttgtggggtcccctcaccttgtctccatcctctccagccacacctggaggcccagcaggacaggaagccccacaggaccctgcactccatctcggccagtcgggccaatggggcccttccaccctgtgggacaggaggaaggagtcatggcctggaggtgaccctcaccctcaaacacccacaggaaacttgtcatagcccatcaaccctaggctcacagacccctccccagtaccctccccaatacccccacactcactgggacacctttctctcctgctgctccagggggacccgcgggcctgggcgccctggcggaccaatgggtccccctgatcctgctgcacctcgttcccaggggagccctgagaaagcagatggtcagacccccaggaaggagacaccagcccgccctaccagagaacctcagaccacaattcccaaaagctcccaaaatcagatgcattctggcttccctggacagcctctgcccagccccacagcccctggtggtatcagaatgccactcccaccttcctcacccacccctttcccgggtccttcctaccacttccggaaccccagactcacgcagggccaggggggccagacggaccttcattccccttcaaaccaggtccaccctatgaccagacatttggggaagatgagacttcacgaaaagagaagggtgagagctggagagggagacaggctccaaaagatggaagtggggagtgacatggagggggtcagggacagggtcgggtggggactcaggatgcttggtgcttgtgacaggcaggggtctgggagtcacactcacacagtgcctgggaggcctctctctcctgggaatcccctcagaccagcaggaccatccttcctggggccccagggggaccagggtcaccctaaaaggaaaggagaggtgatgagccacagcatgctcccaaattaaacagagagctctccagccccccctcaaatctccaactacctgtcctttcagcaccccaatccccagctcccccacttcccctctgcctggcccctcactgactttgttccttcttttccagctgtcccaggtagtccctgctctccagggggccccgggggcctgggtgacctctctcccccatagggccggtttctcctgctgctccctagacaaaagcgagagagttcctgctctcaggcccttcatctcgctgtctgccagaagagcccaccctggcaccctaaaacactccttcagaacccctttatccctgccccaaagctcctgggaaattcccggcattcctgggccactgctgggttttctcctgccccatgtggagtaactacaccacttgtgtctctgttggggaactgcctctcctgggggacaagacgatgagaatgcgccccaaacagactgaagttcaggacccctgcctgaaatcccagcccccaccattgaccccagcccaggagtctgggtcaggtggaccggggcaggggcgtgtgaccgagagaagaggggcagaagactaatgctagggtcaggggtccattctctcctagggacaaacctacctgaggtcccccactcctggaggaccaggggggccggtcttcccttggaaaccctaggcgaggaagagagagaatgcagtgaaagcaggtgtgggcgctgtggggcagattcccaggaggaaggatccaggcaggatcacaccaagccctgggccctgggtctgagcagcaccagggcaggctccacctgccaggagaacgtccctgtgggctttccagacagctctggggttaaagggtctgatgagccccctgagaatgggtagccaggagcatcactcaccacttctcctctttggcctggggtcccggcagcccatccttcccaggggggccctggaaggggttcagttgtcaggtgaacctcagctggaaagcaggtagggaagaaggactcagagaagcgaggtgggtcagagctcgggtcaacttaccgggggtcctttcggtccaggaaacccgttgggaccctgaggtccaggaggccctagagacagaggtggggggagtcaggagaatgggggcaggggctgagtgggggactcagcttccttcctggggtgaggagggagctggctcacccaggctccctggggacctaggggaaggggactttcgatccacactcaccctctctccagggggcccatgggggccataccaccagatgttccctgtggggggaaacagagtcaaggagtgggaagagctgctttccgctgtccccgaggtcaggatgttgagggagagctggggctgagtgggcagggggcagttgagccttgtagagaccattcaccttagctccagacttcccagtggcacctcggggtcccgctgaccccgtggaccctacagagggaagaggagttgtcagagaaacccaaatgccccctctggaccttgagccacctgtttctctcccctgcactcaccgtggggccccgttctcccgaggccctgacttccccgacaggccctggtgggaatgaagcagagagaacattacccaggtgagactccccacagaccccctctacacctctccagcccttcccttctcacgccctccaccccccagcttacccgggctcccttctctccactggcaccaggaaagccaggaaatccagggacccctggtgagaacggagaaggggggaaattgagaagttatgaaaggtagggttaggaaggggcaaagggggtcaggagaggccacaaaggcagtggccagggagacccgagcctgccaagaactaagtggccttggacaaacccctgctgctctctgggcctctttcggtctctgtaaaatgggggtcagctaaattccctctggggtcccccactgccctgcatctgtgtttctggaatcagggatcagggaagcgaagaggaggagggaagaggaggaggggcacgttggggcatggcatcaccttgggtccctgacgtccaggatagccaggcagaccaggaacaccagcttgccctgtggagggacaggaagcagttaggagtgagaggaggcccagatgccatccacccctggagacctcaaccctcacatataacagccagcccccacccagcaacacacccacacaccccagcctctagcccctcattgcttgccccacagctgcctgacttttgttgctctccttcccgtgagtggattttccccaattctagtgctgggatcccacctcccctgccctacagaggtatcaggtccttcagggtcactgtgatctagctgcttcccacatgtcaactcagctccatctaccccatgagggaggtgggatctaccccagcacccactcctgcttcccaagaccaatccccctgcaggccctttgcccaccacaccccgactcccgtgcatgccccttccccagaggctccagggctcatcctgcccaggcagctgcagagcagggcttagaagagagattctgaagccagactgcctgggcataacccctggctctgcccttcactggccattaatcaacaagcatccctgtgcctctgtaaaacctcagcaaaacagtacgtcacatgccacctcataggatagataggacgcatcagcacagcacctggcacagggcaagtgctgggggagtcagctctggagaccacagacctcactgctattagactctctcatctcagaactccgctgcttggagtccgaacgcatgttcactctgccttgaagcaacagctactctctaagctcgtctccgtccaactcttcgtgtcagggacttttccctgacttcttatatatcccctcgcccatcagcagctgagagatgccatttacacagacagaagtatgactaatgcatggcctcttcaactgactggctgacttcagcggcgggcacccatgcccatcctgaccccagtgccacacccccagaggacccaggcacagaaccctcatcccatcaccttctcgcccatgagcctgggggcccagggtctccagtcggtccagtgcgtccctttggcccctcaggaccatccctcccctggaaccagggactccaacttcgccctgtgtgagagggaaggacaggtgagtgtggggactggaggtgggctctgggcccagaggagaaatgggcaacagtgaggctgaggaggctagaggggtcccaggagccactgcaggacaggaagcccacagggtagggatagtgtgtgatgggagggcaggcatgacacagaccatggggctatcatcctgtaggggtcaggctccaagggaacacagcactggaactgtggagtctggagactcaggagaataaaccggtgctggcgtctccagagtggaggctcagtagaacacggaattggggccagtgtggggtctctctcaccctgtcacctttcacgcctatgtcacctttgaacccaggaaagccatcctcacctgagaaagatagaggtgagagggcaccacagatgacagagggctggggttctaatgggattctgagaacataggtggaagcaggggctcgggagctggacggcagtgcggggcaggctgagggaaggcagtgaagagaggagatggcaggactgaggtgctgggaagctgggggcatgtgctcaccttctcacccttatgacccttcagaccccgaattccgtccacaccctagaatagagaggggatagaagtagactgatcaggggatggaggtgggttggaaggaccaagctctaagaccccatatagctcccctgaccacagccctttgtctcccagcctggtggtcagtaccttgacccctcgaggtcctgggtatcctagaggtccctgaggtccagagggaccctgaagataaaagagaggcatttataaaggggcctcagagtgtcactgtgggggcctccagggtggaagaaatggaagtaacaacattgctgtctgggtagggttacggggcacaggaattagaatgtggcagagccatatgaataatgagacaagggaatcccaaggactttgaggctcagagtctgagtggagactccctcaggggataaagacatggaagatctcacctggtttccttggttccagggggaccttccttccctgggtgaccctgggagtaagggatagaaaatgtaccagtggcccctgtcaccctctctgcacccctccctacacttcttccaacccaaatttctgtgacctagtgaagccaactgtccatggacaagcaccaccagtgacctttcagtgcagggtcactaaaggagctctgaggtcatgcactggggtggaaggccaaggggaactggatcggaagtggggtcccactcaccgggggtccgtctgagccaggcatgccggggagccctgcttcccttgaggaccctgcaggaagacaaagaggctcagggtcactagaggggtcatgttggacacagacaaaatcccagcagacatttagggttctccctacatccccactctaaacccctgtcctccaaatcacttagtcacttaccttctctccatgagggccgatggcaccctgggcccgggaagaccctacatacagggaaagagaagtcacaggggcctcccagggtctctctatccagcctcccggattcaaagcatgagcaacaagggcctgaaacccttaatttccgtatccttccagggtctcacccattgtggaagcccaagggaagtcatgaaaattggggacggagtaggggcaccgctcacctgggtcccaggggtgccctgttgtccaggaggtcctgctctccctggggtccctagaaacaggtgaccaggcacaggtcagaaggagatggagataaacacatttagagcatggagctgagtcccagcagcgatagccaagaaggcaagagcaggagcaggcaggggtcaaaatggcggccaacaggatgctggcagggacctcgggggataagatgggggtgggatctcctatccatcactcaccaagctccctttggggccctggggaccaccatgcctcggacgccctgaaacacaagatgggtgtgagcagcctgaaggtggcccggaggacctgtggttttcagaggcccggccattcccgagggtgtgacggtcagacctccaatcatcccaaacccaagcaaacacagctggcccaggcctgcagtgtgtgggactgtggatcgtgggcttgtgggctttggttttgtttttcttgaagatttatttcctatgcccagagcctcagggcaccacgccacatggccctccctgtgcacggggagcgaatgctgaggcagggcgtgtggggccagagcagggggagctcacagggaatgggaagcatgccgagagaggagaggagcaggaaggcagctagaaaggtggagagttggagaggtcaaggggtcacctcagggtagaagtcagggagtcacttacagggggtccaggaataccaggtgggcctttggggccaagagacctcgaggtccctgcattcacggtgaggggaggagacggcatgaatggataaaacgtgtccctttagtgctcatgtccccctcctggcttccccagagccccctcccccagcacagcccttggacactcaccgactctccaggcagccctcgaggcccaatctccccgtcatcccctggaggaggaggacacggtaaagctgctgtgccttctagacctcccctgcacccagccctacatttgccactacacttaccctctctccatcctcaccagggggaccaggaaggcctgggcaccagtatcaccctgcaaaatgggggaactcataagaggggcttcagagccccaacacaggcagacaccgaacctctgcacttagcccatccattactttcactgagctcctccaagcctccagcctcccttccctacctatcctcactcccatagaagatctatccccaatacaacacacacccactaatgtactcaccctatggcccttctctccagggagccctggggtccatcaaaacctcggtcaccctaggaggaggaaggatagccagagtgaggacacgacctgtccaagcccacccctccctactgcaccctgagctgggggggtgctgatcctggggagcctggagaactaggtcatccccaagaaacaactgagcccagcgtgggctgaaggctacggcttcagggaggggcccaagcctgttaccttcactccaggatctccaggcatccctcggctccatcagcacctgcccggccctgggagaacaagggaagtgtcagaacaagcagggcgcagtcccctaccctgcaggccctgtctccccacaacacccatccacccctggggcactacccttcgcccagccttgccaggagggcctgtgaggccctgaggtcctctggggccctgtgagaggagagatggggtggggttaggaggcatagggaggggagtgagggagactgagcggtgaacagatatgggggtgcagtggaggaaagtggtcacctgaggtcctaagtctccaactctcctttcaggccagggctcccaggttggccctgggagagagaagagaggatggcctaaggaaggacacagccaacagtggcctcggagtgttccccaaaagaagcccctttccaaactatccacaccccacacacaattaaagcatcctccacccgagcaccctgctcactcacaagggtccagggcgccctgtgtatcccatggggccagggggtccacggagcgccagctggggagcagggggacagcagagctgagggacaggcagtgggaacccccagccccagcacctccaaattcacccttcctctcctgatcctcatccactgcccaggattctccccaacctcctgttaaccccaaaccaacccaggcctcccctgccgcacactcactccagccaaccctccagtgccccccagagccttccctttccagggaagcagccccactcaccctcgcctgctcaggatcgcctgggcctgagcctcctgggccgccaccacagggcccttgtcacccccacactgccaaaccggaactgagggcaaggagagaaggtccaggttctcttccaagaaagcctgggaccctcccagccagaggctttctccagcgtttctgccccttgccccaggttctgccatccagcatttcccatggcttccagataatcacttagaggattccagaaactcaactctgccctcctccactgtccagcctctgcctccagaaagactctcttttggttctagagctctgaaatataggctgttctgcccagtcctagaagactggtgttttgttctaggtcacctatgaggccccatctccccaaccccaaagacgaatccctttggagtgatgatctttgatgtctttagagactcctccatatctttcctgcccatctggttcttggtaacatgacacaatccttgtcttccccatcagcatgttccaaaacccaagagacaactcactgggagcatgaggatgtgccaggaggaccaggagccccatctgatccagggagccctgctcggccagggggccctggagtgggaagagaatgcaaaagatggggtgaaagataaggggacatcaagatctagcatgattttgaaatatcctcttcaacagaataagtgtagattgctctagctctttccgagtctcccacccccatggggaaaattgagggtgagaaaccagatcagcaccctccccaccagagtctgccctcctttctggttgctgggaagcacaaccatcccctcattcattaacagccacctaacaggaaattactgggcatggtagccccccgcttggataccactagctccccgaagctcccccgtcacatggaggacacccccttaccctctctccagggtctccaactggcctgggttcccctggatgccagggggaccaatcaatccctgaggaacaaaagagtagggtcaggtgtgggcattcagacaggtgtggacactcagcctgtggctgaggagtggtcttgcagaacagatctgggaatctgggaagcgttgattggagggatgctcccgagttctgagaggaggcctgggcatatgtggggaaggctcagatgagcacatagaaggggtttctaagaaagaatggccaccaggtcactgctagacttaccgcagggccttctgggccagggggccctccacgagcataccctgtggagtcaaaggttaaaaatcagaggcgacaggaccagcacctcaaccccacttgcttctcctatttccactgcctcagccctgtgaccagcataacttaaggttccaacactgcaggctctcctttctctcccttcagccctcggggtccatgggcagctgaaggagacacacatgtagcccccagtggggcccgtgagcagccaggacactaggccttctccatctcaactccaaccttgattcttagatcctctcgagaccacttcagccctaccgaaagccccacagccctcccctaaaactccctcttcacaaacctttcaagcctgccaagagacctcagggttccctgcccccccagttcccagccccacctcagcaaacacaacctcccatctccctgagagcctctttcaggaaggtccccagaaacttccagtgtttttgtttgttgtttgtttttctttttttttgagacgaagtcttgctctgtcacccaggctgaagtatgtggcgcgatctcggctcactacaacctctgccttccaggttcaagtgattctcctgcccagcctcccaagtagctgggattacactgggattacagatgtgcaccaccatgcccggcaatttttgtatttttattagagatggggtttcaccgtgttggccaggctggtctcaaagcctgacctcaggtgatccgcctgccttggcctcctaaagtgctggaattacaggcgtgaccaccacacctggcccctttcagggattttaaaccacccaccttcccaaaccctcttctgaggaccctatcccatctcccaaactccctccctagaaccttaagaaaccttccacacattaccccaatacatcataaaagaatctctctaagattgtgggtagatttttatttggggaagaggagggcatggacccacatgagaacctgataaaagctaggccgggcgaggtggctacgcccataatcccagcactttgggaggcggaggcaggcagatcacctgaggtcaggagttgagaccagcctgaccaacatggtgcaaccccgtctctaataaaaatacaaaattagcgggtgtggtggcacatgcctgtaatcccagctacttgggaggctgaagcaggagaatagttgaacccaggaggtggaggttgaagtgaaccaagattatgccatcgtactccagcctagcaacaagagcaaaactccatctcaaagaaaaaaaagaatctgatgaaagctgtgagtcttctccagaaatgaaaaagtatatgctattatgcacagaattttatttaggatttcaaaggttcacaagtttaaatatgccccaaaggttaagcatccatactctaagtaaatttggagccaggcacggtggcgcacgcctgtaatcccagcactttgtggggccgaaacaggcagctatttgaggtcagtagtttgagaccagcctggccaacatgtgaaaccccgtctctactaaaatacaaaaaatagccgggcgcagtggcacatgcctgtaaccccagctactcgggaggtgaggcaggaggatcgcttgaacccaggaggcagaggttgcagtaagccaagatcctgcactgcactccaacctgggtgacagagtgagaccctgcctcaaaaaaaaaaaaaattggaagcagtccccactgaatgcattgcccttcctctggccctcaagtacattccaagcccacagttccctcccttgcacacctccactcagatacctgttcccaactctagggccagaaacaaataagaacatggagaatgggagacattcaccaccaccccaactccccccaacaaagacttcagaatgcccctctccaccttcattctgaccaaacagcaatgatccgtttcaaaatctctgaaatcccatatcaaccccaaatacccagagagcagcataaaggaaaggcagtagagctcaagggaggcaagagaggggaggtatgggatgcggcagcagggtagaggaggcagcagaactgcaaggcaggcagaagacggagcggagtagacaggaagcagtcccactgacaggaatactggaagatatgagaacaactaagggacacagaacaaaatgacaaacacttggagcaagaatgatgccagggccgaagaaaattaaacatggccaacatggctagaaaacaactggacaaacaggaagtggctgaacagacaggaagcagtgaaggaaagaggatccaggagtgaaccttcaacaacaacatggctaccgtgacccagagagaaaagaaaggcacaaaacggtagaatgtgactcctgcaaagggaatcatgacagtgaagggtaattcttccagaaaaacaaacatcaaggctaggacacacaggaagtagccatgagaaatatcgaggcccacaatgaaactttatgatttaaatgacctgagacatacaggaagtggcttattgtcaaaggaaatgtcacaagatagcatgaaaaactagagccagaacagaaataataaatcctttgcagtcaacctgacacagttaccaagatggatgccacagctggagaaggcaggaagggacagatataagtggcctgtaggttaaaaaaaggtgacataggaagttagatcgtttggtagaaacagaacaaaaaattatttcaccaagaagaaatgatagagaaacactgaaaatggacacaagtagtagtttattgaccaaaagctttatgaaatccagcttcagttagacaggaagtgatcagaaagacaggaagtggctacatattttttttttttaattcccaattgccctgagcttcgaagtatccacaagagtcacaaggtaagacatttggcaaaggaaggcaggtagtaatctttcaagcaacatatacatcatatgtgaacagaaaatgacaagtcacagatgggaaatagtcacagccaacagccaaggatcgaaaccaacaagaagcaattcttgtagctcccactggagtcaagaatgaaagagaagctcctttcacttacggctcctgagtgggctgtctccgcaagagggcagggccaagctctgtctcctcacgataatcatccccatagccataggtgtaacgtagggcccttcaggggggtctgtgccaccctccccatattcctctgcctggaacctgcggctgtgggggggacctggagatctgtctgctccttcccagggatggggagggagagggtagatggggatgttagggctgagaggaggcttaccctggaccccagggtgtgacaactctagcccaaaggattccaaggttaatcagaactggattttttctcccaagaatagccatggagtggttgtatataaatggaagggccatcaaaggccaaaaatggggagagatgtccaaaagtgggtccagtgggaagaagtggtggataaaatgaagggtggccagaggactggatcagagtggacagtccatggacacaatgacagacaaaggagtccaggaatgaccaaagagtagggaagacaaaaggtgacaacactggacagaaagtggctcccgggaacagaaataggcatagaaagtaagaccattagacaccaacatggagacgaagtcactcaggaatcaaagatcatggaaggaggcctggatactgaagggaacgggctggacttagagagtcaagcaggccatagttctagagtgacccaaagacagaggccatcgatggaaatgaggaagaaccctccgccagaggaggggctggtccatcaagacgtcatgggctgaggggagtgagtcacaggtgccactgcccccagatggggtgagggtggggcatagagttacctcctcaaggggtggcaaaggctcgactccaggatttcttcctcttcacctggggtggggtcctgaccccaaggagaaaggagaagagtagcacggggtgggaaggaaggagaaaggttagcagaagggaggcaaacagcacctgtcccccgagggcagggtctgtctgtgctgggggatgggggaaatctcagacttgcagcccctttggagggggatagtttggggagagtgaacctccaaggtcatagaggttgggggcagagatctggatgccccggctctacctgccggtaactgctgcctctggtccggggcggggccaggcagtgggggaagctgccctccgagctgggcatcgggaaaggggagctgctcccatgctgggtcaaagcctgcagttggagagggcctccggcctggtgagggggcgcctgccaggtcattgacctcttggcaggtggggtaggctttcagggaggggtccgatccccctaggggaagggggaggcctgtggtgggggctcccagggcgctgcagcagagagaagggagggggcaggaactaagtaaatccccataatctaaacacactgtgcctctccccaggcatgggggaggggaggaaggtgtcctaggagatgattgctgggggtgctgggagaaaggaagaaatgaaggggtcccttgagtttacctgataatcaggggttgtccccgtagtcacacatcataataggggggctcgtagtcatagtagagagactcagtgggctgggattgggggtgggcatagacaggaaggggatggggtaattggaaggtgtggggtgaagggcgggaggggagatataaagatggtgtgggagttgggaaacgggggaggtgtggagttgggaaacaagagttgaagatgaaaggagaggttgagggtcaggagggaggtggggagaggtggaacaagggaaggggttccacatgtggggcagaagcagacatgattaagagattgaccctctgactttagaccactgaccccagagcctatctgtattctaactctccagaccccatccaaccaggctcccttcccttcccttcccttcccttccccctactacctccccttttcctgccccccaggtaggtgggggccagagactgggttccccactcccacacttctgcagacccaccctcctttgatattccctccatccctactccttcccattcctcctccttggtctcaccatccgactgctttctcctggcttcagtcccctctcctacctgcctccccagctctcaccccttcccactgtctcccaatctcttaattcaaagaaggaagggaaaacccagggacacagttcaggaagactggaagaggagacgcagagcagggaacacagctcccagccacaaattcttataacaactctttttatttttagatgaaaataaaaaggctgatgaatgaggactaggagagggggtgatgggaatagggagatgagggtggggaggacaactaaggaggagagatgccgggtgtcttccctctctggggtgtgctgcacttgggggttctcccagctccctcacctgctctggggttcctgattttgtggcctgtgaagtcttgatggttgctgctgtggagatcttgggctctgtgaggctgttggttttggggtctttccctctggcccccctcgcattccagtccttctgttcacatgattcataggctgcctggacccctgggacaatggccagctcctgacatcaccctgcaaagacatgagagagatggagcggagagattcagagagaggcagaggtatcatccgggagaaagagtataggaggccaatcctaggtaaaaccctaagatgggagaggtcactgtcagtcctccatatgcatagcccttttcagttttcaagggatctcataggacttcataacaaccaggaaagttggcagaacaaggatctttctttctacccatttttcagtacgttccattcagaaaagcccaaaaaggcaatgactgccccaaggtcacccagagtggagaatcaggaccagatcccaggccttccagaattctttgcctcccctctgcgctttgtgcaatgcatgagcccttccacagtggcttccagagacagggctcagctttagatgccttgccttccaatggcagtgatgatgagaattctctggacctctagaaatggagtggggagaaccattcctgagttccaatggcatttacttttgcccacacatggtgcttagcatactctcattgcaccgtaatttagggatgttgtctcatttccagagcccacctgggagctcttggggtgatagagactttatattctcttctttgttctccttgtccagcaggtattcagaaaatttgactggcttggagggtgaatggagggatgggtgaatggagggatggatgaatggataatgagtggatgggtggctgggggcttacatgcattaatgaatgggagcattgataaatatgaatgaataaatgtacgtatgggagggtggactggtgggcagatgaacaggggttacaagtagatggaagcaaatgggtgaataggtagatgggtgaacttatgtgggtgaatgactgtcggatgggaagtaagtgggtcaggagatgggtgagtgagtatattgaaggagggagtgttgagttggtggaaggataatggatagatggtggctgaatggatgcatgcatccttgttgcatgggtagatggggagggtgggtgggtgagtgaatagctggatggaggagttgaagggatagatgggtggaagcatagatgggtggtttgaaggggagagtggttaagcagggggggattgacaggtgggtggatataagccttcatgcatgactaggtgggcgtgtgatgcatgatgagtaaatagatgggggagtgggtggtggatgtgtgcataggttggctgaggagtggtgaattgatgggtgggtgaggagagagaggggttgaaaggatggatggatgagggaacgatgaagactgaaggacagagtaagtggctgtggacagtcctgccatataggtaggcattagttctcctgcagagaacagtagccctgaagatagaaaatagaaatgaaaattcataaaaaaaaaaatgaaggcctagggaataggaagatgacatgctggggccagaagggtagtggcacaagataggggaccagaagtcaatcctgcctctgattgctctggttacctcaaagattcttcatccagaatacgggcaccaaagatgatcactccatgggtgtccaatactggacagcacttcgggggagaggccgggtgactcgcttcttgcagtcaacaatgagggtgacagctggcccttcacagccacagccacacggtgccacctggaaatggtggaagaggttcaaggaactcttggctgactgaagtaggggagtcaacatggttggagagcagtgataagagttaagccaatggtgataagagcagtaataacaatggctaccatttattgagtgtttacagtcaccagacaccatgccgtcactttcttatttgtgccaattctatttaatgtctattttaagatgtagaaactgaggctcaaaaattttaagtaacttgcccaaggtacaggctagttcacatgcagagaaggctgtacactctaaagcccaaactctggactagaagtgactgaagttgggcagtgggtaggtgtggtgtggcccaaagggtctcaagggtttcacagtttagagttaggggtttgggggcacttcctcctgaaagtgtgggccaggcagaccagaggagcaaacaacttacttgccatctgctaggctgaggcctcggaagactggctgagagggaggttgagccgcccagtctggtcttcatacaggaagcggacaggtcggcccagctccaggcccagcttcggacaccctgggcactgtagagagtcaggaggggagcttggagaccagggcgggtccgacaacagtcagcagagagaaatctttgggaaatcctcctagtaaccgagagagatacaacagagtgagaggcaaagggagccgccacaacccctttcctcctggtgtctgatcctagccccatcccattacctccccccaggcctaccccaccatgtcacccatacctgggaaaagtggcgagtgggtgcactgagctgggcaggtcgtgccactcggtaggccacatcagctggcagatgcctttcgctctccggacaccatcagggagggaggggaacctcagggcccggagacatccacagggggtgcacctgggagagtccatgattatcaggagaagggacatgccctaggagggcataaataggggacatttgggatctagaactcagctttccagggctcaaactcctgcaagggaaaggtcacctcaccctcacttgcttctgaacagtacctgaatggatggaaatgcaaaggtacctggaggcagggcagcatcagctggcattcaaccccatgacactctgcccctgtctctcctagcatctgcctctcttacgctctctctttgtcttttagcttataatctgtctctctctgtactctctgaatacttctctcaactcttcatctgtctcctgtcctctcactctcttactctctctgtctctttatgttggtctttctgtctctgtctcttcttcttcctccatttctctcacattctgtccatctttttctctccctcgctctcactctcttccatatctctcactctctgggtctctggcatctgtcccgtctccagcacaaacaacattgggcaatcgatcatcctggacacaggaggtgcaggggggccacgaggaagagatcagaaagcagctctatgagaggggcttcaagcagctacagatcccaggtttgggggatggggtggaacaaccctgagcatgctgaggaaaaagatacaagaaagctctcccaggagtctgtgctcctggtttaggagatgagttggggaggggtggaggaatggggggcaggggctgaagcgccacgaggagccggaacaggtccagggccctgagccacacatctgtggatcccatcaggtgcttgcccagaacccaggcaagctccccacacctggaacctcaatcctgtctcaccaccccaccaaccccaccacctgggacccaaagattcaagatccagcccaccagccctgtcaactagaactcagcttcctagggctcaaactccctggaaaacaaaagatcaccttgccccacttgctcccctatacacatactcttcacaccatcagctccagattggaaaaatcccaagagagttccagcaaaactttcatagaagtgtggggcagggcagaggccagagcaatcagagagtggagctgggtggggtgggtgaggtggggcgggcaggcagagaaaaggccctttagtccaggagccgggaaaccacggccttcccccccaacccccacctaagcctggcccctcgcgtgtggcagctccgcaaacaccaacacacaagggccgctttgagagacgaagggtggtgagacagagacacagagactcacagagaccccaggccaaggagacctcggaggtcccaccctccaccaaatcccaagggagtacaattcgatcatatggacaacctacccacaggtcgcccaccatcttcccacaccaggccacatacttgcccccctgtatccagcctcatctgcccacaggctctccactggtagccccattaccctccaccactctacctctggccccccaatgccttattctctaaccttaggaattctacagtaactcatttccctaaagtcccatcttacccactcagcccctgaaataagaaacagtcatcttagccatccccctgcctccatgcagaggatccctcttccccctaagaaagactcctagagtctacaggcaccatacgcctcatttcctggccctgggcttcactgtcctcacatcttggaagttcttccttctgtaatctatctaaatcttttgtgctgccattctgaccattttctctctaaagcagagaagaattgaaagtcaagttaaatataaatcagccctcagtgtctccagaaatgggctttttccagcctgtgaggacctggtgctcacagccccctccttgacatcaaatcccctttcctagaagccagaattctgggtcctgggaaaaagaaggaaaagatcagggttgtgggcaccagggtcccagggagcctggctggccagagggaggaggggctaggcaggaatgcaaagagttggctctggctcagacacctgatcctggcctgtccggagggccgtcctgttggcagccagccccagtgtccccagagccagctgcgtggcagcatcgagggcacagggagggggagggggaccctgtcaggaggccaatgagacaggtagtcaaggcttcctttctttctgggcttactgggctctctctgaatcacaggtgctcaccccttatcccagagatatcgacagaaaggccataagaccacacgcctcacccatcaacattggcgtctaccatccccacaccagcaatgactggaccggctggccctggccatcttcagctcttcccaaggactcaagacaagcatccatccccatcagggtctctaaagtggtcctccacctttcagccctatctgccctcccccagtcacttcaggacaaagagattcctaccctgatgccaaggaacacaggtgtcctgccctccagcctgagccttgaagccccaaatctccttgttagactcagaagctgctgccccaggcatcagctgccccttcccagagacactcagagctccagcctgactccgaggacccaggcatcaggaccctcttacctgcccagcctggggccgcgctcagccccagcaccagaggtaggaggaggagaggcgatggcagcggctgcaccgctccatggctgagaagccgaaacgccgggtcccaggacccaggtcggcctgagacgctggatgccctgaggctgacagaagacagggagcagacatgagcctcagacgccggggtcccagggaggtcagaggctgcgggcagcgacagctgtcgcggcccagctccatgcagcaaggcgccgtcggggctcccggcactgctccctcctcggggctgccgcttctgtgtgtccccggccaccctggcgcccagagcccccacctcgccccccccccggcccggcccccgcctccagccgcccgcccacagccaccgaagggaaaccccacctcagtctccacctggggagggaggcgggaaccctccctctatcgctcgctctctcctgcccttgtaggtctcaacggcctgtaccctaagattctcttttcgggaaccccaatatctccctagccccttccttttctaggacccaaacgtccagtcacacacactccctcccattcctccctcttgggggcccagagccccctttcagcagaggcctgggcgggatttagggcacgtgggagggggagaggcgggcctgggggtcgcagtccccaccccacccataatcaggtcccataattacttccctcaccccgccccgtgtaattacagagccgggccggggcgggggttttatagacaaggctatagatagcgacgaactggggcgggggatgtgggggaaggtgtttacggagagcaagaggccagagactgggacccaccgacaaacacaggatagtcaggtccaggagatgcaaatgggggacgcggttagggagtcccagagccgaggtagagggggagcatggtaagatgagcgagcagtcgactctggttggaagggtccagggaaatggggtcactcgggacgtgggccgcctccgggcgggcaacgcctgagaagcacgcagcgctcggcgcccatgcgcccccacgagcgggcacggcgccgggtctgcccggagcccgcagcgcgcccggaggaaggccgcagcgagccgaggcgccgccgcccgctggcgcggagagggcacgagcgaacaggcgcctttgagaatccaccgcccccccttcctcctccggccggccccgcccccagccggcacaccctctccccccctccccgacaaagcttgccttgtgtcccccaccctgcgtgccctcttgggccccacggaacctcggcggcggcgtccagggatcgcgtccggagctcccaccggataccccccccaagcccgaaacggcgctgcccatcctcatacagtcacctcagtcagaaaacagcgattttaatttgaaagcgattttatgtatgagaggggaaaggagccccaagagaagggacgcagggcaaaaatcatgcagccccagcaccccacctctgcgggctggcacctcccctcaattctcaggccaggatcctgtgtccccagcctatgctatgtgcccaggctggaggagagctgtaaagggaaggcctccgggactacactcgtgaaaccatcccctgtggggccctgtcctcacagcccaggccccttccccaagttagacaggaagagataggggggcggcgggaagctgggaaggctagtgcttggagagccctagggacaggccatttcagggcctgcctttcccaaacacccacctccaccactggcatttcttagtcaacctgggaaagtcagtacttctttgagtctaactgcaagtctctatcctcacaggaaattaaaaatagcagtcggttcctacatctccaccagccccttcaccaccaccaccaccttttttatatttcagctgactgcagaaggaggtgaagtgtaaaaagagactctggacagtgacagggcccctcctcttccagagaggcccccatctgccaggtttgagaggaggaaggcctgtcagggccctatctcatgtccatcagcttgggaggcctgccccccagtatccacctctgggggagttcccatttccactcttcagatgggaagcaaaatgaggcaagatgagaaggaagcaaggtcctgaggcaaggccagtgctttgtgctgggggaaggacagagggtgagaaatcaccccaaatctgggagaacccgacaaattcagagactcaaggccaccgaagagagacaaccagtcctcaaggtatctggggtcccttccaacttgggatatcaagcagatcccttggagggtttatgtcttggttctgccctgtacttctcaccccatcaaggttctgggaacatggccccccacccgccccagggcttggagtccctcttggatgtgtgctcctccagtgtgagaagcaccacgttgggtctgagctcaggccagttgatggggagcctcaagcatctccatgaggaaggtgtcatgggggtgtcaccaatgagcttgaagaaaaacagatgctctagacacttaaggccaatgaccggagggcaggaagacgtagcagcagcttggcaaacctggggtggaggtgggagaagggattgagagctggaagcacacgggccctgaacacatcctcatagcactccccaccccaagggagcctcagtgccccccagccccatctcaccgtccctgctgctcagggtacttcttttgcagtaggtctccagtgatgcatacactttctcccgcaggacctccacctcactaggttggagaggcccttggcatctgggatggcagggaagagaggaggaagagaaatgaagaaaaccaaatcaggatggccatgcagatgtgagccacaggatgccccttttgggctgcactgcttgccctttaccagaggcctggcaagggaagcagggcccactgggtttgtgggatgatccgtggatgtgggtttttcctcggccagttgggagatttccaggttgagggtcttacgagggggatagctgggtaacttaggagtctcggagaagaggaggctccaaggttgccttgccttgagagacaaaggtaatcctcctcttacctggattaaacagaatgattgccctcagcagccaagctctgtcttgtccatcctcatgtcacgcattttggacactagctctgtcacaccctggagagggacctgcaggtcactcaaaggtcacagctcagccagccttggacacgaccagcctatagccccaccccctctatctacatgccagcctagccgagggccactgacgatcaaagatggctcctactcctgctgaatgggctgagttgcggtgcacgtgaagaccttggcaaggaggatgccatctcgaacatcaatggatcggtgtgagaaggaggcaatgagggttcattccagcctgggtggggcagcaagggtcaggagccagaaatcaggccaagggatcaaagcacatcagtggaagagaaggagaaaagaggtggcgaggtcagcaagtttggctcctgggtacgcaaggtaaggccactggggtcactaaagatcgggaagtcaaagaggggtcaatgtcaagaagtcaaagggatccaaggtcactgacctgcccgcagcaatatgacctgacatccagaggcaaggaggaaaagtgtgggatcctcttcgcccactcaacaagcgtgaatgctgtttgtcagctgcctgacagatgttagtcacagggtcatttggctgcaggggacggggtaagagttatggaagattttgagatatgctgggagcccccttgtaagaggcttttgaaccccctccttacatatagtcttcctgtgagccccatccaaaccaatccctgtaagtgatcttctcttctggcattagtgcaaacaattatttatttgggacatgcctatggttctgcagtgggttgtttggggagtggagacagaaggagctatcacatccacctcagatgtttgaagaccttgtttggcagcacctccagtcccaagtagtgttaggaaggttatgaggggaaagagggggaggggatgtagaacagacctagactgcctcccccaacccccatcacgaaggaagtggattgaccccaacactcacgctgctgccgctacccccggttcccccaggaccctcacgccctggtcactcttctgttccacagcaagctctgcctccaggatcctgtccacaggatctcctcgggggctcccccagccccctccccatccccatccttgtcctttccccgctgcgctcctcctgtaccgctgcagggggaagggggagagaaaaaatggaaagtcagcagccgccatgaaggggttccacaaatatccttacggcctcatcaggatctcatggcccttggggatatttataggaattggggaagtcactagaaagggtggactgggggcagccctgaaggagggttataaaagggcaggtaagtcagtcgggaagggtgaggtaggtaaaagaattaggaggaatttaaatggagagcctactacatggttaaaaaaaacatgccaagattcaacctggaaagctgattgaaaaaaaaaatttttttaaataaaatatgccaagaaacatgctaagccattttaccattcactcaattatcataatgatgctggaagcatttattctcatttttaaatgaagaactcggggttcaaagagattagtttgcttaaattcatataatacatggcaggcatacaactgactctaagtgtgtctgagtgcaaatcttgtgctcttctgactcaacaaaaggcagtgaaaggagcactggcctaggtctttgaagatgtgggttctgatcccaaacctcctgccactcctttgttgcatgaccttgggaaagccaagcctcaggctcatcttctctaagtgggtgttttgaccaagatatgctctaaagtgtctctcagaatcctaggaatctgactaagaagataagatggagacacagaagaaggaagggaagccctgaggtcttcagtaaagctgtaagcttaagagtgcccagtcccaggagttagaggaaagatcacagataacaggagcagagaccagagaaggtccatggaatcagaggaggaaccactcaggttagaaatggggaacagcccatcatggctaaggaaaagttatcctatcctaggatcagtctagggaggggtctatgtgcaggccacagaggcctaaccattaagaaggaaactcaagggccagaacagggtacagggaggagagctgcgaagggagagagaaatcaaatatcgccctctagaggagagaggcagtccacccttccagagaggtacacagtctgagtgggataagggagaagggcatgtgtctaagacgcctgggcagggcgggtccttaccctccctcttcatgccagtggccaggcattctgatagcggcagtactgacagcggttccgctggcgcttgtccactgtgcagtctttttgtcccggcaagagtatgtaaggtctttgcggatggtgcgtttgaagaagcccttgcaccctcacagctgtaaaccccgtagtgtttgcctacagggaaaggggaggagcaataagaggttgcatggagacaccttcaccatttagtctgtttccaatctccccctagcaaaacttaagtcctccctgtttgccaaatacagagatagggaaccaggagctgagtgatgatccagcccagtctcctcactgttcagaaaccctacacgctgcttccttttccctctgaccttcccccaatcgcgtcctacatctcagcttcagcttctttactcccatcaggcctcccccaggcacttgctctgaccaaactccataagccctgggaatcccacaggtgatgatacatggccagactctccctctctgttcatcctctgagccacatacctgagcttctgtccccgcagatgcacatagccgtttgccagccccagggccacctggagggggtggacagtgcaggccccgacccctaagactggtggcttcacatcttcaggggggccagacccacccccagggagtgaactgttgagttaatctg

SEQ ID NO: 2932 - DNA, 12724 bp, Homo sapiens
acgctgggtctacagcattaggaatccattcaaagagtatatacataagattgacctataggatgctcaatgaagtatgatgtaacaccaaaaatgcaaatagaaacccttaaatgtcaacaacggaggaatagttaaacaaaattaaggcatatccatattatggaatactaagtatcagaaaaacacaaaaatattaaaatactttatagtgaaatttaaataaaacaggagaaatgaaatatcaagatatttttcgatcttgatttgataactgaagagtaaggaagaaacagttacaaaacaaggcaaagcagacaacccaatttaaaaatgggcaaaagatgtaaacactctcgcaaatgaaattaacgcagatagcaaataagtatatgaaaagatgaacactgtattcatgagatattccaaagttgaaacaagataccactacgcagctatcagaatggatagcatccaaagtaaccgacagccccgcatgctggcgagcacgcagagcaacaaggagagcctcacttctggtgggagtcaaatggcacagtcactctggaagatggcttggcagcttcttaaaaactagtcttactacatgagtaatcactcttccaggtattacccaaatgatataaaatgtatttccaaaaagaaatctgcatgtacacgattacagcagctttattcataattgccaaaacttgaagcaaccaagatgcccttcaattgctgaatgaattgaagtacatccatgcatgagatattactcagtgattaaaaagaaatgagttaccaagccacgaagacataagtgatcttacatagatatttccaagtattcaaggcgtctgaaaaggcaatatattgtatgatctaattatatgacattccagaaaaggcaactatggaaatgttaatgagatctgtggttgcaggggttggagaaaaagaagggtttaataggtaaagcagaggggaattttttaaggcatgaagctactctgtacgaacctataatggtggagacatgctattacacacgtgtcaaaactatagaaccttatagcacaaagaaaaaatccatagaaccttatagcacaaagaatgcgtcaatgtatgcacattttaaaaaacgcattaggtagaaggatcccaagatgtaaggcagatgtgacaaagcaatccaactgtgttacaaatgtatgaaacgatttcactgaagaaggtggggcaaaatgctaagaaatgagagtagtcagtcagagtaaaggcaaaaggaagcggaccaagcactgaactccgtgtctgctcaacatggcatcacccaagcacccagcagggcccgcctttaaacggctcttgacagggctgctacgtgaattatctaatgacaagcgcgtgtgccccggcctgccacctgcacacgggcctcccgcatcagggcagcctcggggccctgatcactccgcgctccagcgttttgcttaaagctgagataaaatggcctggagaagctcgtggcccctgaggtctgtccacgaccaaagaccaaacaattccggaggcaggaggggtcccccaacccacccggagagcgacctgggagccgccgccagaggccgggggagatgtggaactgcccccaccccgccaccccgccaccctgccaccccgccaccctgccaccccgccgcccgctaccacgcgctgggcgcccgccgccacgacccgggcggacgcggacgtcgctgccagcttaggagccgcaaggccatggctacccggtcagctcaggatcaaggacccaaggggacgcgtcgcgacggggccctctctcgcggccggcgcgctgccgtgacgtcacggccggggtgccgcggcgcctgtcgggaaccttccagggggcggggccgcgccgaggccctcgggggcttcgcggagacagccagtgcgctgccagggtcctgcgggttggggcgagggccgagaggtggagttggaggtgaacgtgggggcagcatgctggctgcccggcccctgcctgggttctgagtgctgcggtgtcgcgggagctgaggccgcccagggcgtggagcgacttctgcgtctcgtccagggtcctgtgctccccgcagaatcccccaggcgcggtgtggacgtcaaagcgacctctagagaacattcctagctctcagaacgttctcgctggggagggaaagtggaaaaagaggggcgaggagcggagggacggggtgggacccctgtcgcggggcgcctgtcagggagaggacctggcaaggccggcctgggtcgcctccggagctgaaggctaagtggtctcatccagggacctgctgtgaacacattgaatagcatagaaaacaaaagcacacgctccaagtccatcctttttttttttttttttttttttttttttttttttttttttgaggcagagtcccgctcgtcgcccaggctggagtgcggtggcgccatcgcgctcactgcaagctccgcctccctggtcacgccattctcctgcctcagcctcccgagtagctgggactacaggcgcccgccgccaacccggctaattttttgtatttttagtagagacggggtttcaccatgttagccaggatgtctcgatctcctgacctcgtgatccacccgcctcggcctcccaaagtgctaggattacagcgtgagccaccgcgccggcaagtccatctcttaaaatgtgctcccgtcaggacctgggtctgggctccacgaaggagccttgcatgtgaggtttccttccaagtatgcctgctgttggaagggtttttataatcttttgtgttccccaggctttttgttcttaaccccttaaatatctttaactttgttttcaacttttcagaaatgatcatgcgattgtaaaacagtgggaatgagctgtgtaaactacggccggttctatggatgtttctataattgaagaattgctttttgcaaaaatacggattcccggtccccaacgcaggagggtctggtttttagatcctggagggacctgaaatccatttaacaagctttagggttcatgtctgctgttttttgccttgtttccttgcatttttttttttttttttgtgccttccaatggatacagtacatttttttagaattcatcttgatttactgataatgtcttgggaaatatcattatgtatagttttcgtagtggtcctctaggtatcacagcacgcagacgtaacttctcacaacctgtttgcgtggatgttttttgtacctgagcgagttagaaaaacaccacctttgagacgaattaagagtcctttattactggcgaccgagagacggctaacgctcaaaattctctcagccccgaggaaggggcttgataacttttataccttggtttaggaaggggggggggtctagttaaaacaattttacagaataaagtagtcaaaaagttaaaagggtaaatggttacaggaaagtaaacagttcaaggtgaggggctttaagactattacaagatgatagacccggggctttgggcgttatcaatcggaaaattcctgggaactgcggatgtagcttgccacagtatcttaccagttaattgcattctggatgtggtgggagtcagcctgcacaagttaagtccttgagaaaggggctgccagtgaagagccaagatggagtctgtctggctctcttagctaagggagagtcaattcaggtggaaaagggctaggtgattaaaggaaaagggagagtctgaaaacagttagtaaaaaccaggttggcattacagttttactggttcaagggaagtattactatatacttccccgtccctccgctctcgcccccctttttccgttttccctccccagctagaacgttctgagagctaggaatgtctctaggaggtcgctttgacgtccacactatattagacagcatgaaaataacttcagacccaatagaccaatatctctcgtgaacttagacacaaaaatccttaacgaaatgttagcaattgaatccaacactatatgaaatgaatcatacaccacaacccaaggtggtttattcagagatgcaaggctaatctggtatttgaaaatcaaccaatgtaatacaccttaccagcagggaaagacgaaatctatgaccagattgcctgatgcagttttctgcatcacttgacaaaataaatactcatttatgataaaaacaaaaactgctctcagcaaataaggactaaaggggagtgcttcagcttgataaagcacatgcgtgaaaactctgcatcattgtacttaatcatgaagactgaatgcttgccttctaaggaggaaacaaggcaaggatatctgctctgcccactctattcaacagagcactggaagttctagtaataggccatgcagtatggcaaaaaataaaaatgaaattcatacagatcagaaaggaagaaataaaactgtctatttttagttgacatgacgttcacatagaaaacccaaaggaatctacaaaaacctcctggaactaatgagtgagcgcgcaagtttgcaggctgcaatgtcaacatatgaaaatcagctgcatcctatgtactaacacaaacagaaggaaactgaaataaaagatggaataccatttacagttgcttcaaagaaaaataatatttaggtctaaatccagcaaaacacacacagaatctgcatattaaaaagtacaaacactgatttaaagaatgaagacctcaataattggaggggtttactatgttcatggatgaaagactcaacagagtaatgaagtcagttcttcccaaattgatttttaggtttaatggatttctagcaaaatctcagcgaggttctcttgtagacattgacaggcttactataaaattatataaaaatataaaggctgtacaatagccacaataattttgaagcagaagaataaaggggaggagtcactcttccagtgttaagatttactacataatcatataaatcaagactgtttgtatggatggagggtgtgatattgatagatacgtagatcaatttaacagaacagaggtccagaaataagccagcacaaatattctcaactgacgcagtagtgcaccacacaatgactttggtgaatgatgaactgaacggcacataagatggtggtcccataagattatgacatttattttgacttaccttatctgtgtttagatgcataaattatggatgagcacagtggctccacctgctgggacaggtgggacagggtttcacccagcataatgtattatgtatatataaacacaatacagtatatgcattatcccagtatatgtattatcccagtatgaatgtattatcattgtgtattatacagtataaatgtattatttattatgaatattggatagcaatgagatgcatgaattattgttacatgcaaaaacatcaaggattcactcaagcaacacggtgaataaagaagctgaacataacagggcacatactttatgtgtaagcccctcagaaacaccaatctagcatctggttttggaagtcaggacagtgctttttgtggagaagggttaatgactggagagggcgtgaaggcagcttctagttcttgatctgggagctggttccatgagcacagtcttttgtgaaaacatatgcagacgaaggcttgttacttgtgcacagttgtgtaggtttgtaaatttcacttagttctgtaggtttgttaaatttaacttaaaaattaatttaaagagcaaaagtgccacatacaatgttgtttcatcactacagattttactctaggacatttagttgcttagtgtgaagtttgacccaagcccaaggcctttttcaaggcgtccttaaattccttgtcctcaggcagtaaatcaaagggttaattattggcgtgacaacagtgtacacggcagagtgagcttgttggagctctgggaatcaatggcttggggccggacatacatgaaaagcaagctgtatagaagacggtgaccacggtgaggtgagaggcgcaggtagagaaggctctccagagccggtggccgaggggatgcgcaggacagccagggtgatgtgccaatatgacagtatgtggccaggagcggaaacaccaggatgatgaaggccaggatgaaatccaccagctctgcatggagaagtccgtgcaggccagcttgaggatgggggaaatgtcacagaagaagtggttcagacgttggagccacagaacgtgacgctggagataaaacagaccttgatcatggagatgtgaagccactcacaaaggagaagcccaccagctggaggcacagccccggggtcacaaggcgtggtagcgcagcgggtggcagatggccacgtagcggtcgtaggccatggaggccagagcacacactcggtgcacaccagggagctgaagaagtagagctgcgtcatgcacccgacgaagagatgcgtttctgctggaggaggaagccctccagcatcttgggggtgatgtcagaccgtaccagatctccaggaaagacatggagctcagaaagtagtacatgggcctgtggaggaggtgctgctccagacgatgaggatgatggccaggttctccaccaggacaaagaggtagtgagcaggaagaggaggaagagcaggtactgcagccctggggccgtggggaggcccaccggatgaaggtgctgaccttggtgacattctccccactcatgcctctgtgcttgggagctcaggcctacaaaacatcaaagagcaagaggaaagggctgcagggcagctgaggcagagaagagtggagctggacttggatggggagttttggtgcaaagagaggccacgtggctccccgagcaccaggagagagcagtgatctgctgatcttctgagttttaaagtagaaaacttcttgtgcttgcatttacatataaccatgaagtaggaatgaggaagagagtatatgctgaggacagagccgggcagctccagggtgggcaaaacccaaagctctgagtccaggggcactacagtccacacgtgcctggggcagctctcaagatccaagtgggcatggacacagagctggcctccttagggtccttcatctgagggttcctgcaagtcggggcagcagcctcggcatgagtgaggggctatcagcctaccagggcagaaccccaaactgggctaaccagccggaggaatcagggagggctcccaggaaagggctgcctggctctcggggacctggtccacaggtggggagagagagggtagccacagccccttgccccacagggcatctggtggttcttttcattggagtctaggtgggttgaatggcagacttccaccagctcacagctggggagggtgaccccagtttctggcccaggatgctaaaaattgatgagaagactaggagagggccaggtgggtgcgaataatctggagtctgtgctggggaggcgtggtgcgcggcacttactggagagcctcaggtgacgtgtagggggttggctagacaagtcgagttcatggaagagttgcaggctgaaaacaaacttctagaagggaattgcccagggacaggtttacacttggaaacgcacctgtaccctgccgtctagggtgagcattctgtgggaacccaagatcatccactggggcggcatggcattccctgccttaaaatgccagcgtgcagttcagagtttaggatcaatttcacaagcattactactcactccagtcaccgcctactgtctccccaaaacaaaagcaataagaaccccgccattaaaggggtctcaagatgtgagtctgaatgtagcctctctagacaccatccaggtggtgactgtgtcctcttcccagctgagtggccacagggggctttaaagtccacaaggagaaagttggggtccacaggagctccttggaaggccagcagcccccacctgttgactgggttgctggggagagctggcggtgggggtagtgagctttggttcttgtgcttttaacccagacagtagaggcacctatagatttctcttgattatttggatagtggtaactgatcattaggagttggctagttaataccggattgattcattaaattgaaactgtgttactttacaaatcagggccctttacagcacactctatccatcccctgaacttgttagacaatggctgcatttcttttaaataaactttttattttggaataattttagatttacagaaaagttacaaagaagtgcagagagctctgggagatcttccattcagcttcctccaaggctaacttcctacataagagggtatatttgtcacagtaagggattgatattggtattactgtggactaaactccgactttggctttcatctttttttccctcgaatgcccgtttctgttccagggtaccccatgctgcgggcatggctgcctttttaacttggctgtacctccctggtttctgtggacagacgaaagtccaagcggacgctgccgagggaggctggcatcctctcatcgtaaacaaggttcccaatatgttacaaagactgtttttgcccagtcacaaattcaaacctaggtctccaatcgagagaggaaagtgaagctttccgtaccacagaacagatgtattttggggtggtccgtggacgggtactgcagtagctcctcccggctgcacctaccatcagcctgcagccatttacttgatgccttccctggtgcctggcagagccacccagaaccagtcctcgtcaatgatgagtagcaaatgctgtctgccccattcagccacctgaggctgctggctgattctgggtatgatttagacatcagggcataacccaatgcctgtgaatatgtacccagcacagtactcaaaaagcaagggccatttatggagcatccatgagccatcctgcttggtgctggccgtgagactgagaggggagtccctgctccagactgtatgtggggggcatgtggagtggggattgtcaatacacacataaaagaagagctctctccccatgcaaggaatacaacgtaccctaaaatcacgcgaaaggagcccatcggcaacatggaaagtgctggatcctacctggggcgtctggaagctcactgcaaacggctgcagctgcctgcaggagtgaagagtggcttctgcctgtgtccacaactcccagtctggccacagtgaccagacgagccttgaacatgctcttgagaagtgggtgcctgaggcactggggagaaaccactgtggctttttctgatgagcatagggactccaggtccaattatccccctgatgatggaaaggcccacactgccaattaggtgagcctgtgccctggggccaggctggcccctgcctggctgagggcacccaagcagaggctgttgagcccgtcctggctccctgtttgggcccttcgccctcctcagtggctatctatctcccacactcctactggaggagctgctgtccatgggccacccttgttcctgcacagcccgcaccctctgaggaagaatttgtcccacctgacctctgtttcctctctggtccaatttttccgacctccctgttctcgccactctaattccatggccccaggtgctcctcagataggctggctcctgccccccgcttggggctttgggactcactgtgccctctggaatgttctccttccgcatcagccgccccctccctcacttcctacaatcccacacccagccaggacattcctttttcctccctgccagatgaggaaagggagaaaccctctctggcctctcccagctgccaggggagaaacctgtctggcctctcccagcttctgggggctcctggcttcagggtctgtggcaccaacacttgatctctgcatctcaggtcacgtcacctcccatgatctgtgtgtcagatctcttctggtgtctccttatatgagtgtttattattttcaaatttatgcataatagatgaatatgttttggagtacatatgataattgaatgcaattataatttgtaaatatcaaatcagtgtaaagggctattcatcacctgaaatatttgtcttttctttataccagaaacattcaaattattctcttatgactattttgaaatatgcaatagattactgaaaactatagtcaccttactgactctaatgctcagtcttatttcttctatcaaactatacatctgtatccattaatcaacccgcttcatcctgcagtcccctatacccttcccagcctctcataaccaccaatctactattccatgagatccactttttaagctcccacatatgagtgagaacatgcgatatttgtcttgtgcctggcttatttcacttaacataatgacctccagttccatccatgttgctgcaaatacaagatttcattctttttatggctgaataatattccactgcatatagtaccacttttttaatccattcatccattgaggtggacacttagattgattccatattttggctattgtgatagggctgcaataaacatgggagtgcagatatttcttcaatgtattgatttgctttctttggatatatacacagtagtggaaaggttggattttatggtagttctatgtttattttttgagaaaccgccattgtgttgcctatagtggctgtactgatgcccactttcaccacttttttcaatcgtagtactggaagtcctagtcagagcaatcaggcaagagaaagaaataaaagcatccaaattggaaaggaggaaattatattagtcttgtttgcagacaacatgatctgatgtttgaaaaacctaagaactccaccaaaaataatgtatattcatcaacaatgaatgaggttctgctttctctacattctcaccaaaaactattattccctgtcttttttaaaataaaaccattttaaatgggatgagatggcatctcactgtggttttgattcacatttctgtgattttagtgatgttgagcatttttttacaaacctgtttgccatttgtatgtattcttttgagaatatatattcagatcttttgcccatttttaaatgagatcatttgggttttttgcttttttttgccactgagttgtttgagctccttatatattctggttattaatcccttgtcagatgatagtttgtaaacattttctgtgggtcgtctcttcactctgttgattgtttcctttgtgtgtagaaactttttagtttgatgtaatcttatttctctgtttttgctttggttgcctgtctttccaggtcttacacaagatcattctttgcccagaccaatgtcctggagtgtttcccaatgttttcttctagtggttttatagttttgagtcttagatttaagtctttaatccattggattgaatttttgtatgtggtgagagatgggggtctagtttcattcttctgcatatgatatccagttttcccagcacgatttattgacgagactatcctttcctcatcatatgtcttggcacctttgttgaaaaggagttcactgtaaatgtgtggatttatatctgggttctcttcctgttccattggtctatgtgtctgtttctatgctagtaacatgctggtttggttacgtagctttatagtatatcttgaagtcacgtcgtgtgaggcctccacctttgttctttttgtcaggattgctttggttattaggggtcttttgtgattccatataaattttaggatttttttctatttctttgaagaatatcactggtattttgatagagattacatttaatctgcaaatcctttgggaagtattgtcattttaacaatattaatccttccaactaataagcatgaagatctttccattttctgtgtcgtcttcaatttttttcattagtgtttcatagttttcatctacagatctttcacttctttagataaattgagtcctaggtattttatattcttcatagcattatacatgggtttgctttttaatttttttttagattgttcactgttggcatatataatagtactgacttttgcatgttgattttgtatcctgcaactttactgaattcgtttattattctaaacatttttttttttggtggagttcttaggtttttctaactatcagatcatgtttctgcaaacaagactaatataacttcctccttcccaatttggatgccttttatttcttttcttgcctgattgctctggctaggacttccagtactatgcttgaataaaagtggtgaaatgggcatccttgtttagttccaaaccttaaagggaaggttctgaaattttcccaattcatatgatgttaactgtgggtttgtcatatatcgcctttattattttgaggtatgttcctttaaacccagttttttatcacaaacaaatgttgaattttgtcaaatgctttttcagtatcgttgatatgatcgcagtcttttttcttggttcttttaatgtgatgtattacatgtgccatttgcgtatggtgaaccattctttcatccctgggatcaa

SEQ ID NO: 2933 - DNA, 13628 bp, Homo sapiens
  misc_feature 4999, 5000, 5001, 5002, 5003, 5004, 5005, 5006, 5007, 5008,5009, 5010, 5011, 5012, 5013, 5014, 5015, 5016, 5017: n = A,T,C or G
cacacagtcaagatagctacatttgaaacttttctataatatctgatttagtggccaaaaaccatgattgcttggtttatgctctttcttacataggcatttatttaaaacatatttacaacctgaaaacttctgaaaagtgccagctgataaaactcccaggggaattttaattattatatgtgatgtatgaattatcaactatgaatttcccaaagtcctagaagttatggaggggatgaagaactaatcaagcatgatgctctaaactgcttataaccctcccttctttacctctttcttcccatactcctccttgacctactcttcctcccatcttttcctttttcttactttactgttcaaaataggaataatgactccttcttaatgtgcttacaaatcctgtattttgatgagtattgccacattaaagtataatacataatacattttaaatagaaaataagctaaaggagattttgcagagactgtaatgaatctcgttattcttaaaagttatcaaatgtcaatgtttgtcctgacattttcaagcagagttcatcacaaatgggtccttccttgtgcgttttacgaaaaagaacatatacactgtccttcctcatttcaatgataaaagctgaatattcaaatgcccactattcttcactctgtatatcaccagcatgaagcatgggtttgtgttttgacttccctgtttctaaatcaaccaaagaaagattcaggacatgattccataaaggcaacactgagaacagtgaagcccattatttctcctcccactgcaggccgaggtcaccatcccgtcattagccatgtcataacataattgtattactactccttatgtgggcagatactgagaataactgaacacatcacatcgttgtaaaaatgaaaaagtaccacttctttgtcctatctagcataaaaccagtgaaaacaatctttggaaatgacgctgcactaagaaactgaaaagactgttattactctgtaggtatatatttaaactgatgatctgacatctttaactagaatgaaaacaagactatatcactacagaactccaattgtaagctcatttaatccaatttatttggtagcattcagctcaattaagggatacaatgttacttaaaatagtctaattagatgaactccactatggtactcatctttcaatgtctgaaatataaccatgcattaggctgcaagggtgaatactgttaactccagcctccatgtgtctgtccagtctatgagctacactgctattccaacactgacctatatacagcaacatgccatccgttctggctgtttgtgtaagagagcctcacacacttgccttaaccaacatcattcgcattgttcccacaatgggctatgtgaaatggaggctactttgcatagtgatatgttcataacgtgtattagtcttacagtagagcatactagattaaaccgtttccaaaaatgcctcctccagagtttattaactgaaaaatgtagtagcattttggcaatctatagagcagcagtgccggaaagtgtcagcagagtaaaacatcacattttagtttagaaagcttcaggaagagaatattcattttctccattagagtctctctgacattgaaaaaaatgtcaccgggaaactgtagctacagttgtaggattctaaagccagatagatactggttccgctgggatttagcacaccaactttaaataagcaaagtgttgcaggtttaaaataaagataattagtaatttatgatcttatcaccctattaaaaacaaatacctgacaaactgactgctatttgtagtaagctacatattcattacgcctccgaaggaacaagatttactttgcagtattgttcttttggggatgtctgatccaacttgttttaataatgtaggcacagatttcttacttcaccttttccaaacttctgtccttcttccatttccctcaaatccactcatgtcattgcaaaaacaaatgctagttgactgcattatgcacaactacattgtggagctggacagaaattttgtaccaatgctaatcatggtggagtgaaaaaactcagtgcctgggatttgtggggcctagaaaactatccagtacatttaatataatcgggaccgtgacaaatatatctgatggactgctacacagagatgggccagagatgtccctggagaacatttccatgaagtcttcttccactattagaaacatgtcttatgactttggattttaaaaatctattattctctggataagttaaatagaagactcgcaactagtctacagaaagggtcctaatttgcatttaaaaagaacagtttgcttcttatacacggggtgacttaaaaggaattcaatgagctagtaaagaaattctgaatactttctaaattaatttattcaattcacagacaacccactaaaattatttaaagcacttaattggaaaatgatttaatatattgaagtattcctgattttccaaagcatttaacttttaaattaaatctgaccctacttatcacaagacgaggagtgaaatgtgtatccaagtcattaacttctttttggggcctaaaatcactgataacttaataagatttgtccagtctcattgccaaaatagttctgagcttttggttccggtactacagtggaataagtctttactctccaagatagggctgcaactttattattttttatagcaatagtattggtgtcataagcaaaataaaacgtaacacaatacttgagtgtacagaaaaacagattttagactaaaagaactatgtcaccagcaaataatgaaacttcatcacacaactcctatgcgcttgccaaagttccccgtacctttcaacttgcccgtagctgaagggcccctgtacaatggaagcccttctgccttgctcaagactggatgtccctcttttctaactgcctaaacaccatcggcacacagcacagtcctttgagtgggtctcacactggacacagctcgaggagcttctccacggggaagtgtgtgtgtgagagcctgcctgtgtgtcaacactgccaagactcggagctgcgactcggtcgcgtggtgcggagtccagggctgagaaggcagccactaaatatctctgtatcaggtaaaaaagccgtttggtgatgactcgccaccaggcaatgttgggagtcccaacgatttttcccgtggaatgcaccgagggtcgccatggatgtgccgcaggggctgtgagtatcaggcagatttatcaccaagcgagagttgggcgtctaaaaggccgcccagcgttttagagaactcaattctctctgccaacgttcatccaacgggactgctagacacgtccaactagccctaggcgtgggcagtcgtgcccctgcgaccactctgggggacggtccctgcgtgtcctccctctctgggatgagagagttcgagaagccgggagagtaacccctccctcgtaccccctgactgtcctataggtggacccagccgaactccgcagcagccaggccagcgccccacctccgggtcaccggcatgatccgcctctccccgggcccccgcggcctggcacccgaggtcagcgggccgtgggtacagctcagccgcggaccctgctccgcgatgcgggagctttggacttgaacgcgacgtgctcgcccggctcccaacaaacttgcaattccgcgcgcaccccttaaacaggaactgttccccaaaccttgacccagctaccccgctgtctctggcccgcggacctgtgtccgaacccgggctcggctgccggaaccggtttgagaaacaaaagagttgtggggcagttttccctgtggggggcaggggcgcctcccaggtccctgcccccgactcccggctgctcccctggcaactaatccggagaagggaagtggtgccacgagccccactgcccggggagggagggagagagaagggggaactgggaaataaactgaattctttactctgcctccgttcctggaccccagacacacccccaaagtattccacggttttctctattatttttttaaacgccccccggcaaacctaggcagggatccttagccgcgaacagcggaaggaaagaatccgagcaaatcgtgtcactttccgcacaatcgcggtgtttggcaagccccggagctactccacaatatttactacccaagcgcacgcaggctgcagcgggctgcggccgagcgcgcccgggaccggcctccgccaagccggccccgccgcggcccggccaccgcgctcccctcccaggatcaagcagcaagaacacggtggaaacaaaagcagagcgttcacctgttgcaatagtaggggtccaggcagggagaaggtcccagacagggagcgtcgggcgcacggcgggctgggctggaggtggataaaatcttacgtccatttcactctcacatcaagcactccttttctttttccttttttaaaaaaaagtgttcagcaaaacaagcttagacggaacgagtgaggtgtctgggctcaggagtaaaagaaacaccttccttccctcacatccgtttgggtttgtttaagaagaagaggaaaaaaaaaaaaaagaggggggaaaagcgctcaactctccccaagccgcggcgcgcacccgtcggcgccgagcgcgcagcctgctccaccgccgcctttggtcccgccgccgccgctgccgccgccgccgggcaggtaacttcatgcgctcattgtccccccgcccgcccccccatccccgcctcccgcgcccctcgcagcccggcacacgcgctgggctctaggtactgggcgttttattggagattctgagttgttctgcttgtagtttatttctccaccttggaggcccgggatgtggggggtgggggggtggnnnnnnnnnnnnnnnnnnngagaaccaaccagacacaaaaccagacaagaaacaaaaacgaaaaccacacaaaagccaagacagagaaaacccacaaaaaagacaacaagcacacgacagagcaacaccagaaacaaaaacgaagacaagacgagaaaggggggaaaaaggaaacagaacaggcagcaccaagagaaaaaccggggaaaaaagaggaccaagcgaccaacgggaaaaccaccaaaaaaaccaaacacaaaacccccaccaacagaacagagaaacaaaaaaaaagggacaagagaaacacgaaaagaaaaaaaaggaaacacgacaaagcaacgcaacacaaaacaagcacacgcaaacaaaaaaaaacaaaacacacacgaggaaaaagaaagaaaaggaagaaaagaaaacacgaaaaaaggaaagcgagcgacccgggccgggcggggaagggagcgcggccggacgcgggcacgaaaggcccaatggctgctgttcggaaccagaggccggggaccggagaaaggaggagcggaaaggagaaggaggagagcacggcctggctgggacagaagcggtgggaccctgggaggccccgctgtgcccgtgccgcgctcctcgggaccagcgcgtcgcacacaaaggggctgccgaccagagccaccagcgcctcagggcaccgtggggagcgcgcagctagggggcctgtgcgcccccgccccgcagccccgcccccggccctccccggccccaccccactcccaccgccctcccgcggccgtccccacccctatctccgcgacccccactcctcctcggctgttccccaacctgtcactgtgctcccctccctactcccggcccgtagtggaggtgactttcctgcgcaggccgcttctgagggcggagaacccacagggagtgcgacccctttgcacgctgtgagtggcaactgtccgagggactcgagccgatcgaagggtgaggaccagctcgcctgggggtggaggcctggaaaagccgcccctctttggcttccctctgccgcctgcagcccgcacccctccagattcgtgccccactggacggtttgcgaaggctgaggctgccttggggactcacaaaaaccacaggggtgattcgaagtgtaaatagggaaacaatcatcagcacacaatccggctaagggataacatatgagtttgcttgttgtccttcatgggattcttctctttttatagctgacgccctatagggctcttggcagtccacgaaagacctggagtccgcctccccatttctcggtcggtgagtggcaggaggaaatcgccaaacatgttttcccgctttgcctccccaactggaaacttgcaacttgccgtgtcctggaggttgagacaatttggggtctcttggctgcctccaacagatttatctctgagggcagtgtccttggtgagaggtccaagtaggtgtgggcacattttcctccatctcatgagggagcagccctgcacactagggcccaaaactctgcgaggagcttggaagttcttcatccgttccacttgttttgctactccacacacccttctaggcatgttgattgccaactgctctgtgcagctttcccatagctgtctgttcccgtgcatttggagcaccaagcaaatacgagcagagagacctggaaaaaaaaatgatgaagacagtattatgataaaattaacatggctgagtgaattgtcaatgcaagttcctttactaactctttgtaagttttgctttgtactccttacatcctctttctcttaagccattgttttaatttctttcgttatcatttttaaaagtaacagaaatacagctttcttcctaccttcacgattgactggtggaggttgggttgcaaagaggaagcagtaagaaaaaataattattctatacattcaaagtccttcaaggcacaaaataaaagtaagaaatagaaaatatgtcctttctcctaataaggtctttataataaaatttaaatgaagttttgtgtttcataacagcttcccaaatactttgtagatactaaaatgtgcctgtatgtatttccttccacaataataatagtaataataacttttttaggtccaaattaaacatttctcagcttaaatttctatcctcaatccaacattattatatcaaaacttgatttttaaaaataaaactttcttggaattcatcattgatgtcgtttgatggcctcgtgaacatcaggaagatgaaatgaaatggttcaagactggaacaatccattatctgcatcttgactcctgggagataatgatatctcctgctttcctctacagactaccagttttctctgctttaagggaaaatccaaatgcatgagacctgtgcattcttctaataatcaagagtctggtttcttccatcggagtgtatggagttaaagtggtatactgtactggcatggtgtgataggtgggaatatgagctactgggggaaaaagttcttacttctagcacttatacaaagagaggccatctcagtgtaatctgaaaaaatgctcactttataatgcttatccaaggcccatcaaaaactaaatggatgtatttgtactaaaagttggggaaagttgatatctaaacctctgagcaaatctttcttaatttagaaaataaaatagagcatcattgtatacttttcagtttcctggacattcaactccacatcatggataaataaaatagttattttccattcactcattcatttgtacattaatcaacagagagagtggtgaaaaacactaatgtttgtattatttataggtttaaaatacaaaacaaattacttaaaatggttcctgctctaatgtagtctttcagagtagtattttccaaactagtctggtcagtgaagtcatcttagcatttagaaaaatactcatgccagagccccacacgcacagattctgattcagttcttttcagtagggcctgagcacaggaatttttaaaagctctccagtggctttaattttcagaaaagttgagaaccactggcctaaaaggaaagataaggtagtctagaaggaaagagtccttaacaaggaaatgttaaaagtatgaaattttagtagataggctggattgtcattttgtgttgaccccataagaggacattgaggatcaccactcccaaaacctcatcacctacgctgcctttagagatggagttggcaatttgcccatttactgtcagtaaacttgcatgacttgtaaaggccaggttacagtttattcacctgacctaggaactttatgtactctagttaccagaaaatagtgcctgtaaacaaaacgtgtctttaccagtgctgatgtaatgctatcagtacctactgtgaaatgcctactatatcgtggacctggtcctaatttctttacattgaatttcgcagtttatttaattttccagattactttggaaagcctcatcagtaattacaaaccacacggagatttgattttgttccctcaacattgcccatcttcactttaattatagtttcacaaattgtacgttttcaaatttatacttgttttcagtgaccacattttatgtctactgattctttgattatgtaggttaagtcctaaatcttgtagtaatgtctccaaatcacatacagaatgtgtactttggggaaaatagcttttagacagttaatcctatctgtgatttacaagagtcttaaaaaattattcaacaaaccatggtacttcctggcaggcattctttgctagattttggagtagtttttcttcaagggttgaagccctctatagatgcacatgagaatgaaatgtcatatgaggggttgattttgaaatgccagatattaaaactaaaatcaaagcctgccgtattgtaaactaaattaatatttagcccttcactggcctttctgatttatgggctagttttccagtacagctgatgtcgcaatatttctagggaaaagaaagcctcattcttttaaaataccattattttatacctcatatggcccacctaggattttaagccctcattggacatgtgtataccaatgaggttacatggtgaagtagctatttgtttccttagaatctagccaatcctgagtgtatacattttaaattcaaaaggacatcattaatggttttcatgggaaatgtttacatgtctcaatttaccagttagcatttactgttgtccagggttatttaacatttttctaaagtatttaaatgtaaaatggaatgatatgcaataagtaatatctttcaatggaagaatgcagatactgaagtttatttcctggggagactagtgagaaatgactagattgtaagtctttctacagaaaataaaggatttcagaatgatgaggaaagtttgagggaaatgaaacaggtccacgatagctcacatggtactaaatgactcataaaatgcagtattttttacataatttgggagtgtgccatgcttgtacatctcaccattgagtgtggtacagtactttgatcttcaacaaacacaacatttgtgacataatagctataataggactattcagctattttacacggcaatatccagtcctctctcatcaggataaactatgaggacaaatcctttcaaaatcagaattattccttgtagaagagtgaggctacaattatcccttaaataggagcagctgcaacatggttcggcctggagcatggcagtgaagtgtttttccaatgcaattaaatggattttttaatgaaactaatattctataaaaagtcaattggtaggggagtaagtgtggaattgctgagatgaagaaacaatcattttgcttacctgagttaatattcctgccttagtaaatgatattttgtaagaatggataatcaaggctcatattttcctgtgaagtggggcccaaaagaaaaccaggtaatacaaaggaaagataattctggtttatttgtacactctacatcttattttgaaatgattcacagccatattttgatattgtttttcaaaatggtatgatgagtgaacagcaacattcaatttaaacagcaaaggtaatactgtggtggaaaaatataaagagagctcacaggactatattagtcagtgcccacatcgagaatgagacaaagaggaatgggaacttaaatttctaccacagagatgattaaaggatcagaaaataagacctttaagaaagattaaaggaccttctagggagaacaatactgagaggcaatgtaatgtcttcaaatcgtatatatccagagccgttcacaagcaacagggaaagaacacctccacggaagatatgacatgaggaattggatttaatactagaacatggaggactaagcccacacgaaaagaatttttcctagcgtaagctaaatgtattgccaaaggagaggtgtcggctctcagtaggactgatttaaaaatctctgcaaccaaagtttgtgaattcacctgcacatccactgacacccttcttgagtatgctttcctatataagatcgagtgggctgatagtttgaacttagctctgattatctaaaagacatatctcataaattttggataacatatagggaagttcagccagatgtgagctaaataatctctacagttctttgaagtcaataaatgcttccctttatattatgacttgttgatgaatatttcaaggactttcgttacacagaaaaataacacatctgattttgcaggcaaaatttaagattgacataaaactaaaaatcaaaataacacatttctagagtgttacattagtaaaaggatgtctcacatgatagggatggtcttttaggatgacctcagagccaaaaacaaaaggagtctcctgccttactatcatatattttaaggcatggcattcactaagtcaaaattcacacattttcagataagaaataccccagattcccaatcaggctgatggccgttgctgaattccgattatcccatgaaatcttccagggttgtgtgggtaaatgtgactttgcaccctccccctaccgatctcccccaggaataggtactgtttccttccactaaaaatccacttatgcttgactttacataatgtgattagctatctacccatgtattgttttaatgtttccattttattccaatggcttttgaatatgcctgtctctattaatgtgtttgatactgattataggctcctaagagaaggggcagaatctctttgaacctgactttgaatctcttcaataggatatatgacccatgtatcatcagttccttaaatattactctttgcaagaagatgacctcttctgaatttgtctctcccaaattcaattcacctgttgaggctccaactctgacgtgatagtatctgggacgggtctttgataattaggtatagacgaggtcatgaagatgaggccgccaggctggattagtgcccttataagaaaagataccagagagattgctgtctccctccctgatatgtgaaacacagaaggtggctgtctacaagttacgaagagggcccaccccagaaacatgtgatgtgacaccttgatcttggattttcaggctccaggactgtaggaaaataaattcctgtgactccagcctccaggactatgagaaaaataaatttgcccagtctatggtattttgttataaagcccaagctaagacaacaacttagcaatctttttcttggtctcagccagagttaatttggatgctactgatgcagattcaaggtataacagtatataatcacttccactgcattaagcagcttaggaagagttacagtagtcttatattctctatgttgcctcatctgtattgttaagttcaatatcacctttagttaaagaaaccattattaagagtcctctgtgtgtcaggtgtgtgactaacagtatatgttagttgctgttgatcctccttttcttccccttcccttttcgctcttggctgccttacccatttatgttttctgtgtcgcctgtatacacatttgtaatcctagattagaaattagtcagagaatgaacagagaaaataacacttaagccaagagaagacatgaaccgagtcggagaggcttcaaaaacaaagaaaagtttggaaacaaccagatcaatgagtatttgctataatttttaaggtgttgaggtggaagtaggaaaaggacagatgcaaagaaccatgagaggagacggaggaggttctgatagttgcaatgttgtccttctaactgagagctggaactctctgttggggagtcttgaagagctttaatataggatctaactttgattatttggattataatattttatgaacaatgggatttttcacacactattttcgttacagaaggattccataagcaattgcaggaactacttactacagaaagagagagcagatactacttttccaaaattctataaatctgttttagtagctattgaatgtaaatatacctagaaaatattgagtattgttaccctctgtaatatacctatctctttttttttttttttttttttttttttttttttttttttgagacggagtctcgctctgtcgcccaggccggactgtggactcggtggcgcaatctcggctcactgcaaactccgcttctcgggttcacgccattctcctgctcagcctcccgagtagctgggactacaggcgcccgccaccgcgcccagctaatttttttatttttagtagagacggggtttcaccttgttagccaggatggtctcgatctcctgacccatgatccacccgcctcggcctcccaaagtgctgggattacaggcgtgagccaccgcgccggccatacctatctctttagcttcatatttttccagcctcacaatccccttcctctcaccccaacctcagtatcttaaaatatagcaaactacttaaacaggaccacagcccctaaatgcaactctaaattcaaaaagttctgaaaacttaaagttgtgtagttgtgtcatgacacttggcagcaaaacctagaggcatcatctaatctgaactgacaaaagcctctttagagttattgatcctactcaatgtatgttcatatgttttattgcagaaatattaccgttccattagtggtactacctcaaatctcacattaaatgtggtttatgtaatattctgtaaaacttttaaaagttaaaaaaaatgtttatttcaaaacgcaattgtctgtagggtgtcagataagagtgatggacctgtacttgtagtaagctaaactcactgtgacttattttgaaacagaggaaaatttgcctacaataaaaccactgatattaaatgtacacatttgataagttttaagaaaggatgcatttgtggaccactgctacaatgacagtgcagaaaaactgcatctttttacaagttttcctgaacccctttgcagtcaatcctcccccagtcttcaatccccagaaaccac

SEQ ID NO: 2934 - DNA, 13490 bp, Homo sapiens
tgaatgtaacatgaaatcattccttccgccttagcagacagatggagagagacattccatttgtttccagccttttgtctttggagcatttttggcatttccttcaggaaactggaggtgtgacctaaggtttccttagtgaacacatttctgtttcccacagttaaccttacccagaatgacatctactctattaggtgaggtttatcttcatgtcccaactgtgtcctgtgcattacaatgacacttgaaagcacaaattctgaaagtagcgaaaagattagagagcccaacagccaaaacactttaatcccccaaaagatgacaataatcaaaaacaagaattaactattaaataagtctgtgatgcttgcaaagtgccttcattttgtagttggaaaaattaatgactggaatattaatgctttcagatactatgaattgaaggttttcagataaaagtgttatgctatcagcccacattttacagctagctgcttcactgatactgtatacttctatgtggttcagagataggctgggagaagccaagacagtgtcctgaaaaaaaaaaaaaaaaaacacatgattaatacccatatccatatccccacttccccaacatgttggtgaaaggccaagaatgtatcttttttgatgggttttgaatgatgattgagtctcatcatttaaactagatttacaacccatttttgtgtataatttctttaaaagcccatatttgatgacagaattattgcatttaattatttggcttaaatgcagtttaaaactcaaacaattctacttactagccaatgtggtatcagaaggttggtggtttttatctcattctttactactcttcagtgttaacttattgaatttctcttcctgaaaaagatagagtggtttctaaacaaaccacacttttttcacaccctgttaaggtaaaaatcctttaaagaataatagaaatttgtccttcactttgattccaaaggctacacaatccagtagatgactcaataattatttttaagaatgctcttcacaaagggactttaaaaaaatcagtttattaatgtttaaaagttgataaagctatgtgcaaaatgatcacaaaagtcagaaacctattaaatactattctttttaaaaaaacaagacatctctcggttaattgcactgaaaaccatactaaagagacagtaatatatttttattctttgtaatattatacatatcttcaattactatctaatgaatagctggactgaaaagtttctggcgttcccaccagttaaagtaatgcttttaagggcacaagagggtggtattttcttaagaaatacacttcaatggtgttaacacgggttagaaaaatccaataaaatgacttctgctgaaacaaatcattcaaaaatcaagaaaagtacttttaacacaacaaaatacaaccatgttgttgcttgaatgaatcacacaacattctgaaataaacatcaacaaaagtgccaaagacagatgtcattttgttagactcatttgctaagaaatctcccttggtttgcaaaagttaatccattcggtttcactttgttttgcttgtctgtttctcctaggacaccaaggatcctggctaatatcattagataaagtgggcttccttatgcagatttcggcttcaatggatatgaaatggtaacactttcattgaaaagatgttttttaaagaaatcaaagtgacttcaaccaaattccaaaaaaggatcccgcttacatggaaactttggcctcagcgaaggacattgttttacacctccaaacatcttcatcttcccacagcctacgtactcaacatagcctatttgctatagatgatcgacattccacaaccccagctctgataactctcaggtagttaaagtataaagtaaaagaacgtgaggaggggtatgaagggaagggagggtggggtgtgggatgtacagggcatccctaaaaagcagaagtgcacacactcacttgggtttgaaactaaagtgaaggaaaacatctcctcaagctccagacaaagagacgctttcacatggggacattagtctttgaggaggggccaaagaaccctttaggagcttgacaatgctagacctttggctcagtgcaaaatcaaagctccagggggtagaaaatatattccaggccgggacctgatctccacccttcccagtgcattgttacaggaactaactctacccaccaacacccgacaccaccaggctgttcgtattctccccctcctccctctggcttgcagcagctcctccctggcagcagtcgaagcccagagattttttccaaacactggggtggccagcgaccaagtaaagagcgcttccggtgggtggacagcttcagttctaggaagaagagttgacgtttccagaagacataatggtctctgggttgtcccctcgtctttctgggggtgggaggaattgtccgatttgctgcggctgaattccatgccggcgtgatgggtcgcttgaatttgccagcagagtctccgctcgggcacttgcagcaggacatgtccggatgaaggcccgacgcatctccttgttggtcagagtgtaaatgatggggttggtgcggagttgagcacagctaacaccaggaagtactccgctctgaagaggatgtcacaggtctcaccttgcagcccacatccagcaggagcaggatgaagagcggtgcccagcaggcgatgagacgctcaggacgataattacggtcttgagcagcgccagcgacttctcagagctgcggtggccttggaaatgttcttgcggaacgtcaggcggcggctccgagtcctgaccaaggagagattctgcagtacagaatgacgatggagagcagaagcagagtgaagaccgtggtgcagagaggatatagtgcttgtggtagagcggcagcacggtggagcagctggacagcgcactgtgcagttccagcccatgataggcaggccacccaggatgagggagatgacccagcaggcgtgattagcaggaagaggcggaagttattgctcccgttgtggagtttcattttcagcatttgatatagcgctcaatggcgatggcgaggagactgaacacggaggctgacagggccacaacatactcccttcccgcagaaaccactgggcgggagtgagcttgtaggtggtggccccaacaagagcaggttagctgtgtaggctactcctgccaacaggtctgagagggccagattgcaataaaatagtacatgggtcggtggaatttcttggttttccaaatggtcagcaagacaagatgttctccaggatgataaagcagcagatgagaatgaacaccaccgaggtcagtttatgctgttctccttgtccgcgctgatattcagctttcccgtgtagttgtaatgccggacgtgatatcatagttgacgtagtcagagaccgagctgcggtgggccttgaccagcgggacgtggtgggccccatggtgccaaccctgtgtccccaggaagccggggtggcgctactccggcgaacgctagagggcgaggcgagagagccttcactggcttcaggggtggttcgatgagtatccaggctttttgtgtagcttttccttggctggagagggcctcggaaaccgcagccttaacaagtcagaggagagagtcagggaaagagccacagcatactggcataattcattctactaaggcactgctccaattgtgttgttgttgatttgttttaaagaaacttggggagagccagggagagagattttttttaaaaatcaaattatcttttttcttccttttttttctttttcaaaaaaggaagagggggaagaaaaagagagggagaaactctatggccacattcactcaagggaaatgggaattacgatgttggctgtgggttgacaaaaaaaaaaagatgatgaaaggaaaacaaggagtgggaggaatgggaaacctagagaactacaccccattttaactccatcctgccctctcaccaccccacaccccctcacccccggatttccagccatgagattctcgaagcagtcaccagcttagctgcacgctcaataccagcccacgtctctcctcggaaaagctcaactgccagtctgagggcgaagacacacacctctgtcccccatgcccacccccagcccccagttcaaagatactagcaccacctcctaattgccatgtgccatgcaagaaatcagtttgcaggaaaatcatttgaaagcgtaagccatttgggggctctattaataactctctagagcaggtgtgcttagggtccgagggcgcagtgaggtgtgggcagccaggcccgccccgcttgctgtaaacaggaaagcttagcgcctccgtgaagcgactgccttttctttcttcttttattctccccgcctccccccgcgcccccccaccccaccccccaccccaagccagggcagtaaatttaaaggtattcagttaaaaccattcataacagattgcagcaaatcccagaagttcgtacattagttgattgcataaatattttttgctttgtttagtttagccaaaacataacaaaagagagaaatcaaactactcatgacagccataatacatgctaccacatttctaattcgattgcaaaactactcttcagaaactcacattaaactgctccctggtgcattgctaatttgcgtgggcagttttatttactgcagtcccccaacacgttgactcctctcctaggatagaaagttacaaagaaactttctaagacggcactggtcagcagaagtctacttctaagtgcttaaatatttcaaggtaatgcagcaatgcaataaaatgaggtaatagagatgagaaaatcccagcaactccgcgaacagcagaggctgctcaagccaagaagctccgcattttccccaactaatgttataccctgctcctgggcagtactaatttaagccattacccacgctcccaccacccaccatattctttgtctataggatttccaaaatttaacgccttccctcctatcctccgaccaactgcaattttcactgcccctacacccgtaggttccacagttgggaattaccttttttctgaactccataaatcacaagtgcccaagaacaatctgatcgagatgggcccttagtagcccagagatgcaaattttcagcgcccggagatgcatgttttctaagttttgtttgcctcgttcgacttaaaaattcgtttctgacacctaagccctaccacaaccgggcccccgcgcccgcgacccccgccattcgccgccccctacctcgctcaagcagggcgaagtgcgttcggagagcccgggatctgtacggctcgcttcgcatcttgctgctgcccccgactactgcgtagtgctctcgcaaacttactcgagtcggggtcccctccctccgcagcggagcctccaatggccagtcccgctcgccgcggccagttccctgcctgctacgcgaagtcacccgcgccgcgccaaggctgggtggtttcttcaggaagaggctgggaggggttaatgccttaccccccacgccctctgtcagctgggggcccccggatctgaactgctgagacgcactgtcaggaaagatctggggcagaagcaaaaaaaaaaaaaaaaaaaaaaaaaagaacccctcctcccaaacaacaaatgaaagaaaaaaagagagagagagaaggggcggagcccggtaaccctggattctactgtataaatcactgccctcgcccagatagacgctgatccctggctgtgggaggattctcccgagcccctgaaaaaaaaaaaaggtggagagactttgaaaacttttcttcgaaaagtctgaggaggcagaggacggcccggagtctcgtagcgcaccgccctggtccacaccccccgcagccctaggaggatcggtgtgctgagcttgtggccaggagctccccgaccactttcgcgcgagcagcagaaaacctgagccgcggcccggcgagtgtcggcggcgcttggggaggagaggctgggaaggggctgcgagaggtacggaggagacaagcagcccgggaggagaatgaaccgggaggttcctgtactccccccgccaccccagatcctcgtgctactccaactgcggtctgaggggcagtggctttcccagagtgcacagagaaatgaaccagcgccgttttggtgttgggcgaggggtttccctcagctgagcacaaagtcaggctgtgtgtcccgattctggccaatggagaggtcgttgagggggtgggctgctgctgagtcctgagagattaaaacgcctgggcagctcaggaatttccaaagggggagattctcggccaggagctgcgggcaactgcagctgcccagcaggagccggcacccttctctcacattctgcttgggagtcgctcagaggcctcaaatctcattactagcactttgcccacccttttcttttgcttagatgtacttaagaacgtgaggctgagaggcggacttggtcagatctgcctgcgtgacaagctcggacaggacgcttctgcccttgcattactgttgtaaaagtttccacccagtccctggtccactgcgttcccatcccggcagatgtgaactcaaaaacttcctccgctgtgcagtttcattggcagacacaccctgtacctgaatgactcagaaggaggcagaatgaacaaacaacagcccctgacttctgggattttgtgagtttgccaaaaaaaaaaaaaaaagaagtgacagttattcacagctgttttaaagcattcatcgacagcgacgcacccaatacatacccacagctcaacaacagtacagtgcatataatgtggaaaccaagataacggtcctctaagactccaggtagatcctaattggatttgaagacttatttcacttaaaggggaagaggtatattgtgttacccagcacaacaaaacgggggacttggcattcccccccttctcccgcctccacccacctaatttatgcattctttaaagccaaaggaatcaaagtgaaatttcacacctagtctgttcaagcatgtgctaggttaatttaaccttactgctctgtgaagtaagtaagcattgctgccattttattgttgagagaagtgtcattcagacaactaaggtgacttgtagatttcccactagtgagtggcagagctgggttccaaaacctaaatattgcaaatgccttgccttgtggtcaaacgctatcagtcaataaatagttaaggaattgaaatatatgttcctagagggaaaagacttctagatttaaagttttacatttgctgcatttctgactgtacaagtctacaaaagcatataaaagtatgctaatgaatgtccttttaaaaccactcattttctacgtaagcatcaaagtgtatacatatgcatattaatgaatgttttctgaaacttctcattgtctgcctagatatctcatgtaacattgtacttttagtatttgcacatagtgttacacatattaatcctttaatctgacaagttaggcactataattattctaattttacaaacaaggaaattgactccagacatattaagcagcttgcttaatgtgggacaggctgcagactcttaaccactactcagaccaccatgataaacctcaaacaggttcaagaatttccttggggatatcagttgtttcttgtgaataccactggtttttaacattcaatattgataaagtgttttacagagtccaaaacctttcagattgttatttaataatattcatctttagtacacacctatgagatgtaatgtagatgatcaacttaggtaaaattagatagtaggcaaatgtttccagcaatggcgtctggccaattccaagtctctagttcccatataagtctcttcccattgctctccaaggaggcctaaaaattgcattctcaagctatctcctgactgccagtacaactccctgtctgctgcgcctagaagtcaagcccaacattcctaccttaagtttgctccatttccaatttttgattcaaagtggctttgttgttctttacacatgctttagtgtttctctttaaaagtttacagaaaaataccacacaatctttggagcatacactaaacaaaaatttgtcataaatgtgccatcaaatgtaactgtgtgagctatcttttttttttttttttttttttgagacagaatctcatctattgcccaggctggagtccagtggcgtgatctcagctcaccgcaacctccgcctccaggttcaagcaattctcctacctcagcctcctgaatagctgggattacaggcatgcaccccacacccagctagttttgtatttttagtagagatggggtttcaccatgttgtccaggcggtctcgaactcctgacttcaggcgatccacctgccttggcctcccaaggtgctgggatacaagcatgagccaccgagcccagccatgagctatattttttatctgctaaatattgcactctactcttttccctttcctttttttttttctttttttcaactgagacagggtctggcctgctctgtcatccaggctggagtgcagtggcgaaatcatagctcactgcagccttgattcccgccctcaaaggatccgcctacttcagcctcccaagcagctgggactacaggcaccgtcaccatgtcctgataattattatttttattttttgtatagacaggagtctcactttgtgcccagggtgatcttgaactcctgcgctcaagcagtcctcccaccttggactctcaaatgctgggattacaagcctgagccttactctctttcctaattgctccagtcactttccaatcccttttctcccctcttccctcccctgacccagtcactggtaaaaatccaggctttccttacttgtctattcacaggagaataactagcctcttatttcaaggaggaaatagtatgacatctcaatttccctcctctccaagctccagcttaatagcaactttacccacccttaccccttcccacctgtttcagaaataaaagcaactttactcctttccaaggcaaactcttgccaggtcagcatgctgcttcctccaaactttctgagacttggctcaattattcttattctccttgtactttcagttcttagcttctgaggactctttactttcaacttacataaatgttatgtgttttctctaccaaaaactctttcttcccttcatcctaggtcccaatatctctcttcctcgtttgccaacattcaaaattagtggaacatgactgagccttggaacagacacttggttcagccttgatattgccagttctaagctatgtgactttaggcaagttcttttaactccttgaacctcagtgtcctcatctgtaaaatgaaataatgatatttgcctctttcattggaggattaaggagctacatacctgtgagaattccctacactacagagaaaatgcttcaccatccaccacctccatcttttattattattattattattattattattattttactttagttctggggcacatgtgcagaatgtgcaggtttgttacataggtatacacgtgccatggggtttgctgcacccgtcaatccgtcacctacattaggtatttctcctaatgctatctctccctagccccccacccccaacaggctccagtgtgtgatgttcccctccctgtgtccatggttctcattgttcaatacccacttatgagtgagaacatgcagtgtttggttttctgttgtgtgttagtttgctgagaatgatgatttccagcttcatccatgtccctgcaaaggacataactcatcctttattatgcctgcatagtattccatggtgtatatgtgccacagtttcctttccagtccatcattggtggacatttgggttggttccaagtctttgctattgtgaataggccacaataaacatatgtgtgcatgtgtctttatagtagaatgatttataatcctttggtatatacccagtaagggaattgctgggtcaaatggtatttctagttctagatccttgagaatcgccacactgtcttccacaatgttgaactaatttatactcccaccaacagtgtaaagcgttcctatttctccacatcctcttcagcatctgttgtttcctgactttttaatgatcccattctaactggcatgagatggtatctcattgcggttttgatttgcatttctctaatgccagtgattatgaggttttttcatatgtttgttggctgcatgaatgttgtcttttgagagtgtctgttcatatcctttgcccactttttgatagggttgtttggttttttcttgtaaattgtttaagttctttatagattctggatattaaccctttgtcagatgcatagattgcaaatttttctccccttatataggttgcctgttcactctgatgatagtttcttttgctatgcgaagctctttagtttaattagatcccatttgtcaattttggcttttgttgccattgctttggtgttttagacatgaagcatttgcccatgactatgtcctgaatggtattgcctaggtttcttctaggatttttcttgttttaggtcttacgtttaggtctttaatccatcttgagtaatttttgtataaggtgtaaggaaggggtccagtttcagtgttctgcatatggctagccgttttcccagcaccatttattaaatagggaatcctttctccctttcttgtttttatcagtttgtcaaagatcagatggctgtagatgtgtggtgttatttctgaggcctctgttctgtgcgttggtctatatatctgttttggtaccagtactatactgttttggttactgtagcctgtagtatagtttgaagtcaggtagcatgatgcctccagctttgttctttttgcttaggatgtcttggctatgtgggctcttttttgattccatatgaaatttaaagtagtttttcgcattctgtgaagaaagtcaatgatagcttgatggggatagcattgaatctacaaattacttgggcagtatggctattttcatgatattgattcttcctatccatgagcatggaatgctttccatttgtttgtgtcttcttttatttccttgagcagtggtttgtagttctccttgaagagtccttcacatcccttgtaagctgtattcctatatattttattctctttgtagcaattggaatgggagttcactcatgatttgtctctctgtctgttattggtgtataggaatgcttggatttttgcacattgattttgtatcctgagactttgctgaagttgcttatcagcttaagagattttgggctgagatggtgggattttctaaatatacaatcatgttatctgcaaacaggacaatttgatttcctcttttcctgtttgaataccctttatttctttctcttgcctgacgccctggccagaacttctaatactatgttgaataggagtggtgagagagggcatccttgcttgtgctggttttcaaagggaatgcttccagcttttgcccatttagtatgatattggcgtgggtttgtcacaaatatctcttattagtttgagatacattccatcaaaacctagtttttgagagttttcagcatgaagaggtgttgaattttgttgaaggccttctctgcatcaatgagataatcatgtggtttttgtcattggttctgtctatgtgatggattacgtttatctattgcatatgctgaaccagccttgcatcccaggtatgaagctgacttgaccgcaccacattgtctttaactgtctttaagtgcaatcattgctttcaccatcccactttccatttttttttcactttgctttttaattttccaataaaattttaaagtcaaaataatatgtgcatatcttttaaagagatcaaatggtacaaaacttgaaaagaagagcattagtcctccgaggttcctggttcaccaatttttccagtcactgtgaagtcttgttgattttcttctggtagccattgcaaatcttgaaatcccatgttttatacctccatttcttcattatcaatcttataacatatctataggttttctgccatgttgaaggagtattaattaacttgaagaaggatgcttaattataaactttctgaattcttgcatgtctgacattttaaatattctattatttacttgataatattttgactaggtatcaagttaaaagttgtaagtcatttcccctgagaattttgaagcattactcttttgtcttttaatttctagggctactgataaagagcataaagctatttgatttcaaaacttcacagctgactattttttgtctctggatgtttttagaaacttctcgtctcttcagtattccagagtgacatgatgatataccttgattttctaagtcctttgcattctgaaaattatctgaaattatttctttaatgacttcatcttctctccagtttttctatttccctttttgcaaatcccactattcagattgtggaccatctatctagcctgatttttaatttcctcctattttattttcctttttgtactttcaatccttcagttaatagctctctttcactctcatactttaatttccaagggctctctttttcttttctgaatgttacattttacagaactctgttcttatgttagggataccacatctttacttatctctgaggatatcaggtgttgttgttgtttttgttgttgacattttctcctattttctttgttgtcacactttctatttgttttgctctcagttctttgtgccattggctttcccaattgtcagatgatctctgccgtccatttatatttcaaacagaggctaaaatagaggcaaatcagaaagctaatttaaactttgtgtgggggcttgtcaatggaggggtggtaaatgatcaggataaacactttcgtgagtatgccaaatgtcaatatctggagttctcaagttttgggcaggtcagttttgccaacagaaattctaaaatctcttgtctgacttctagcattttccggagtgaaccaagaaagaaagtgggagagtgaaggagggaacacctcaccatttgatatttagatttgaactgaataccatgatgggaaccccctctacacactcagctccatcaggtgtctctgactccagtgacctctgatttaacccattcagagaagaaacctccagtc

SEQ ID NO: 2935 - DNA, 16543 bp, Homo sapiens
ggaaggaagtaccacttgagcagagactgagatgatgagctgtgcagaagattttgctgagaatattccaggtagagggaacagtaagtataaaaaccctggagatgggatccaacagaagtctgtggctgtaacataggaacagtgggggagaaaggagataaaatcagaggtaccgtagatgggggccttatcagtccctacccaatggtttggattttattacaaggataactaaaatgattggagtgttccaacaggttgtgacatgattggattgatggtttagaaagatgccctggctgctggattgtgcataataagtggtatggggtggatgcgtgaagggagcgggatggctagcatggaagaagggagaccagattggaaactctgaccatggtccaggcaaggaggatggtggctgggtagtagctggtggtgagggtgcggagcacttaagttcaaggtacaaaattatgggctacacacagctatgattgagtcactagcttctgttactcattcagactctcaagaaacaagacaggaagttctcatcattaagatcatcattgagactgaaagctgccttcgtgaatttaagcaggtataatgactagggggaatgctacttgcaaccacaactaaactcaatgatgatcttaatgaggaggatcatcaccataatggctaatagttattgagatttatagttcactgagcacattatttacattctccattttagagataaagaattgaggtcaaaagagagtgagtaacttagccaggtgctaagtgtcagtgctgtgctcttaatcattgaacatttcccaacaattactttctgaacacttgttatgtaccaggcactgtcctaatactaaggataaaatgattagcaaggaattcatggtacctattcttatgaaggctctttccaataaagcaaacatacaaataaataggaaaacctagcagatgctgattacaggctaggagaaaataaagccagtgatgagttgacatagagtgtctgggatagaggacacaggtaggggtactttacattggatggtcagagaaggtttgtgttaatgttctgaggcaggattgagctgatgaatttaaggagggtaattaagtccagtgtgactggagcaaaaagagaaaggcatctaaagatgaggattttgatattaagaatgatgagaagttttttaagctggagagtcaatgataagatttgaattctttactgattcctttggttgccttgtggagaatggattggagagggcgaaactggactggggagttactagaaagctattgctttctacatctattgtggctgcatagataatggtagcttgggctgggatgagttgttggaatttgataaaaatgaacgatttaagagatgtttttggaaggtgaaaattgacatgaacaactcatcacacatgctagagttgcagcaaactgtaagcctcttgagaccaggagacattgtttgttccctgtcctacaccaggggacatagcactgataggagacactaactaaatattgattgaatgaaggtgtattgagcaaatgaatgaataaatgcagcataataattaatcacgtcctggcatatcaaggtcaaaattaaattattgaattacagaataaaattaccactaaaggtagattgtcttaattgtcttaaattttgttaattttcatcattgaaggttagtgtttttttgtttttgttttgttttttgtttgtttgtttgttttttatcctctgactatatatatgtgacttcctggatgaaaatcatttaaacagaaaattaatttcccaatgttgttttcatacattgcccatatagttgtacatttttggaaagggatttagtaaaaagcaagatgtgagaataaaacagaaacgtcatttcaaaagttttttgaaatggatttttgatctagataattttacattaatacttaaaatcagacttgaaaaaaatgatggcttttctttaacttatgtctaaaatgtgaatttaggagaatgggagaccctgattcaaggagaaaagagccttatttttcttaaaaccaatggaaatttgttttaaaaatacataaatatgtaaattttaagagataattcaaatctctgagaaagaggactgttaatttatgtataataaaagcacttagtcaatatttattctatttcatagcccagtgtgtaaagatttaaatcataatgagctactcctaggcaagcagaataatcaacataggcgtttccagtggaaatctgctaaccttatactattgaggaaaacccaacactgcattgaaataaggacattctttggactcttaagaaattacaggcctcatttttgtggttgaagtgtttggataacttgataaggagattatataattcccttatagggatatttattagcattgttttcattttgtaacaataacaaatgacaaatgtaacttcagaaataggaacaaaatgacagttatatccctggatgatcaaagttgtgagatcaagaagttatagaaaattcagctctctttctagtttcacttatacttttaagattgtgcatatttcctaccagactgcacactccctgtggtggaaaaggtcagcgtcgaccctgtgaacactgttcacactcttcgttaagttatttagttagccaaaacttagatattttcacaaaagtcccagtaaatatgaactctaatccacttatattacttaaaattctgcatgatcacagttgtatattttttacatacataaactatctgatgttattcttttttaatataggattattcatacaaatattccatgttctggtattatctaaagatttataattttgaaaaaaagagtattattcaataaccataatggccaatcctattccaaatttattaaaaatgagtttagattcaaacccactccctatatgcattatttgtcccactcaaaagtttatcctggaagagcaatattatccttttattaccctttcccagaagagaaaaatttttaaatgtgcctcatttaatgactttaaaaacatacaaaacattctttcaagcattttttttgaaaattgagtaaaaaatgtttaacaaaaaggtgttaactttatgttttaaggaaaaatattgaaaatgttatcctggagtgcctcccttaggatgactctgctgccgtcctagctttccctttggagtctgaaggacgggtgtatctccttaatgttctggctaggtcattgtctcattctgggagctgtcaagcactctcctagccttgcagggtccagtagaataattccatacgtgaactctcataggcagcatttgcacaggtggtacaaggcatttaagattgggtagaacgatgtcgatattctgtgagtaattttatattgtcttcctgtttatattctacattttgtaagtattgtttaggactttatttgcagtaatgggacttttatttaaggcaaaaatctgcatcgtgcaatgtatcttgcagaagcgagatgaattttagcagatgacatattgccataagacaagattgtttaaatgagagaaattaactttaatcatatttgtgctttgtagttttgccccatcattcagttttttaattaagaaactataatgtcaggtttggttaaaatatcattgtcagaaaatttgaaactcactggatcttagctttaagactgagactttcattttaaaaataaaatagctgaatgaaaaatagttgctttagttaagaatacatacataaagtgtttaattgttaaatgtgaaaaaagttttagtagccttgtgttacattttttaagcttgaccagaatctaagaaagatgaaaattaattcaaatactgaagctaaaacatgttaatgaactaaataaaagttgacacatttctaatttatccatcttcccaccttttacccttaagtatttaaagtattcatagacaaaagccatccttatcatttcactccagttaacagtgcataaactgaagtttggatattttctcaaaagtgtgtcaaaatatacatttcaagtgcattaaccactttccttatgcttctgaagataaagaattgcctgaacatctcaagatcttgaaagtttatagtgatggaagcataggttgcaatgaatgtgttggccttgtaaattctactcctagaactgtagcataagcaccttcttaataaagaatgacgcagtcataaatttatgtataccatgacgcgtggaagtatcaaaaatttaactttccatatgtcaaaagaggagaaactattattttaatatagttgaacactagttgaaatagtagtcttttcactgtgttttgcccagacccagactggcagagttaacccagacggcagagttaactcaaagcacttgatcctttggaatactctttttctcccttttctttttctgtctttccaccctatccccttccaaaaaaaaaaaaaaaaaaaaaaaatcatgacatgaaaaccatacttagtttatggacaagaattcttagaataatttattctttgttaagcacagactgaagttatattgttttgttatattgagtttttatatcaatatagggtgctgcaagctgtgtacaataaaggtcaagggtagtgatttgctgacaacaattaggaaaagagaatatagaatgcacaggaacattttcagaaatgggttttattatatttcataggcaccactactttacttttggtgggttttaatacttgaatcaaaataaaataatacatgagttaagtttaaaccaacagattaaaaccccaggcccccgagcccctcattttggttgtagctcttgtgtagatgctatggtgtgagggctgctttctttcaatggctggttgtcattcaggctggttgtcatgtgactgcctgtctgtgcctgctgtacaggtgagcggatgttctgcacagcagtgtagacaggcagacacatgacaactctgtccagccaggcccttggttccttcaggttcctttgctcatagacagatacaatcagcctgttttccagatttggtgattttggagagtaggggaaagggagaaaaatacacaatataattaaacattaaaacattatggaactaaaacaagttagacttttgactttattcagaaagtacatttatacatttgttccaaatgtgctacatggataatttgcgtaacagaaaactcacattaaaattttaaggaaaaaaagagattaacacaaggtttattcttaagtccaattcatattattactggcccacatgtagtcagagtcagcgtaattgaaccagatgtttttcctctttgcaaaaaactgcatattttaatactgagttaaagataaaaactatgtttatgcatgtttcttttagtagataagtaccataacctgtccatgaaaaagaaaattatcatttacatggaaacagcagcccttttcaaaataattatgagcctaatttatttggcaacccaagttgctgactttggtatttgatgctctgataatggatcctacaagggaatatgtttttaccaattatatgtgaaacaacaggaacctatttaatgtctcattttccttttaaatgcaaagtttataactgtggatgtgaaatcaaattaaagcagttgtgagcttaagttatccacctcttaattaactatagggccatgctgtgaatcaaagggtacaaactggaaggctgttactcacagtgatgctcagaatgtgttttggatatattagtgcaatatagttacaaaatagtacttaagaaaaggcagaaaaggcaaattcatttatatccaaaaaattaaaaccagatcctttgaaaatttttcttataatttatatgagctatagtgttaaatatgcagatataaaatttaattctggtgagttgagagtaattctattttatatcaattatcaattcacatctttagaagtattaagcaaattcccctccccttttaaaacaaaaatatccaaatagtcaaaattccagtaagtaggacttcttaaaaaacacagcacaaaaaaacacagtattgtccaaggattgtataattagacattttctcaaagaactttaaaaaaacaaacagtttgtgatttatctttaattgtaaaattctgagaaaatagcaaatagaacttaatggaaagcaaaatagttttagatactgagaaaattacaattttctacaaatcggacttttatgcagtgattaggtaaggtaatgttttaacaaaagctaataagtgccatttctgtgtatttatgtaatttcaagaaaacaaatttccgattctgtttcggccatcacttcgagtaaaggaactttttttttttcttgacagaatcaaaaacatgagtaaacttggctgtatttaaataattacaaggttagagtatgccaaaaaccagtgccttaaaatactattgtttattgttgctgcattcagtgcaacagaaagtaattatagagtgattcacttacaaagatatattggtggaaattaaaaattactataattctttataacttttcctctctctcccataataatttgatccagttaactctgctcaattaaaggaatgatgcatgcaacctgaaaaataaaaagaaatatttgtgagtttgtatgttatgctttaatataaaacagttttattaagcaagatataaaaattttttgagccagaaaaaccacaacagtttttcaggggaaaaaaaaatcttgctgaaaacaattgttctattcataaggcttttggacaatttatgtttctgataatttttaaaacacacttacagtaactatgtgacatatgcacacttcattgttatgttgacctgcccctaaacttgttaaaaagatgaaagactgaaaaccatattgacctttttttaactcccaaattataggttgaatattagtttattattacttaaaatactagctaaaacataaagagctatttgtattattatcataccatgtaatttttagtgtggttattacaccttgtttctttttgtcttttatttcttaaggaaaaaaatgtaagaaaagaattgtcttctaagtttctgtagtgaaattaaaccaaagcaactccaggaaactggctgtcacgctaagtcaaaaattcaaaatgaagatttaattatttttcctaatttacttcgttatctctaactattaaactgataaaaattatttgtaagagacctttgaaaatgagtaaatatttatttctacttatttacagaacatgaaagtaagaagggatttgaagtaagaaagtttctatcttaactcagaatttcctgtctcaggttaaagcctgaccttctagttattttaagccaggatttctgaggatggtctcttagttattattttgacgttattgtgatgggtgggctattctccttagagagagtaaagtgcattgtttataaagagcagatcccttacagagtaagtgaaagctttgggtctctttaccgagcatggatgcttgtggatgagtgaattttttcacattaccaagttgactttttatatcttataacagcttaagacttcaaccaaaaaagtggggagaattctttcttaggatttttatgcctaaactgtttcccacagagtgaaatacatgggtggtctgtagggagaggtgggggtagatagtatattttggtcttttacaaacataaacatattatctgggcgaaagcccgaatgccaagcaggaaggatattaagcctattgactaactacaggaaagtatcagtgtgaaactttgtcctatagtaaacagtctttctttgattttgagatctgtggctaaaagaaaaatgagtttgaaaatttaagtccaccgttttagattgatccttttccagtaagaaattgtggtgttgaagctaaggctctgaacttcctttctcttagatggtggaaaatccttttaacccagtacctagtccaatttatcaatcattcacatgctaaaatgaaaaatattatgaaatttctatgaagtgtagtttggacagaccctgaaacaattttctcttcatgccacatataatgtttaattttaatacttacacttattacatccaggggtagttttagttaagatgctcactgttggttagtttcctctggaatagattccatgatccctaaaatattttatatctccttataaagtaatatgaaaataaaattaaacatttttctaatttacctggaatagatatggctataatgtatataaatgtgggcgtgtgtaccagcgcataaactacaatctgccttcattcagcagagctttataaaatgagcttttacctttgatctttaatttagccatataattgaaaaataagtactattcgttttcatttgttaaaactttgcctcgaaaatagtcgctagagccacatcaagcatgtgcaggaactccttggttatccttttacaaagtattcttatatttctactcctgtacttatgccagaggcacccttatgtcccttctatctccgactaaaagtcatcctgagggagaaaataggtgagggacccatagggattcatttctttaaacaaaaagaccgtttaacatgaagaaagaaattgaaattaaatatacattaaatgaagcaaattttgaaatgtaatcatttctagagtaaaaaaaaaaaaaaaacccagaaaatttagaaaaacattaccaaagtaccttgttagctatttttcctcttcagtaattgtatcaatagaaaaaatatatttcttgaaaaaatgagctcctctaagttactttttttagttttctttgtaaaagaaactatatagatttttaacatctcatttgttctactaaaaataattaataggaactctccaagtcacaatagaaaatgaaaggataactttactatatcatctaagtgaagtagctaaatttctccttgctgtttatattttaactaataatcatgaatatatgagaaacttaatgttttctttatacacattttggggtgatcagaagggtaatttttaaagtaagtgttttgacaaaagaaaacttagggaatcttttataataaaatattttgctaaagagaattgagtcaatttttgaattgttgcaaaatgtataacttagaaaagaatttgttcaggaacactgtaactttaaaggaggacaaaagagattatgtttatttttcacaaaccctgtagagagatgttttcattatatagaattgtttcggaatagaaattaatgggggttaagaaaatagggatgaggcaataacatttttccagaactttctttaaggggccgacctctaaagttcgcacagatcacattgcaatccagacttgctctattattttctctattaggatttcattcgcttgagggttttcttccctcccaccttcctccccctctcccaccctctttcacctccagacagctggaaactgaccaaagaaaacttctgccttcgtttacaaattccttttttatcgtgggtttctagacaaagtgccttattttaaatgctcagagaagtggaagcattgtaagtataggcaagagggctcagctgagcagcaattattaaccactctttgatttaaaaaaaagtaaaacagatatttacaggggtatctaaagatagaggtttttattccctgatttactcgttgctgactcaataagttgtgggtcggtgctcttctctgggcaaatcccatctgcatttctggtaggcaagacttggcaggttcttcttttattgttaggtactattattcctgttgttatattacagaaggaaatcttcagaaaagcactatccatatagcatttaaaaaccagcagtattctttactttggggaaaaatgacttcagtcctgggatgttaaaagttatacataagccttcatccatataagtttttaaatctttgaattattattaaacaattcaaaagtagctcattaaactattcttaagtgtctggaatgagttttttcatatttcattttgaagtggaaaacctttaagaaaacacttgaattatcaatcttcagaaataaaaaaaaaaaaaacagaaatcgctatataccacacacttttgctcttttaaaattaaatacatctctacccatcaacatgtacctctgtttcccttgcatgttaacacaaatcatgggctccccacctaggttccttggtcacagaccaggtgagcagtcaagaaggccttacccgctggtcttcccttcggcgtcttttctcagcagtgtccccgagggcttcttggtccctagtgtgcaaaacctgtgaaaaaaacactggatatgagattcaaaaaaggagcaaacaaatgtcttctccttggaaacacccattttgtccccagcggtccatggcgttgctctcccttgcccagtctaaccaatgtgagactactgtacaacggcattgtcctgaacaggtagtctgaacactggggcgacggagcggatctccagaagcttccttctatgtacttaaaatcctctcccggtcctcaggaaaagctcccttcctgcaccaggggttgcattcagctttcccccctgaattctgctgcgctgactagacacactcaagggctgtgatttccagtcttgacgtggcacatttgctgcagactgggaactggcaatgaatttaggaccaggaaaagggggagggctgggctggagagtccatatagggatgatgtcaccctggggaggtttgggtatgcgctgtgccgctggagagaccgctagatcgcctgctctcagacatgggtctgtgcataaaatggtaccagatgttttagtgtaacttaagcagtcatttcatcttcaggccagatttttttcctcaactgggcaggaagtgggcccagtatggaaaagctgtaaaaaaaaaagagtcaagatgtacagttcggctgtggccaatgaaagtgagttagtgtagaagtacaaatttactgtctgacccaggctagagaagtaattgaagatagagggtagatgaaatagtaaacagaaagttgaacactggaaggcagagctctttggaaacctttttgagctttcctgtggcactttattttctggtatttcactcgtcaaaagggcagataagtttctgtctgtctgtctgtctgtctgtctctctctctctctctctcccccctcttcccctctccctccctctctctccctccctccctccttccctcccgctctcctctctttctctccttctctctctccctccttctcctgtctgttgaatctgtcagcagctgcaggctgctctagacttgaacagtaattatagcaacttcctgaaagtgaagcccccagaaaagtctggagaaatgttctttgtcatggcctctacatgagtaattagttccacatgggccttcctagtttccctcagctattttggctgggtctctgaatgctgtgctatagtttacctaaagaaacgttacagtttttgtttgaagcatccactacgaaacaacgactcaggtttctaacaaatcgcctctggtagatccatgctgttaggtatagcattgtttttcacttgaattcctgattctgttttgatacttttgttttgttttcatggtattctgtggcttagtttatctctggttaactaaatctgttgaaatttgccaagtaccgcttgaccaaaggttatagatatcagcccactggcatctacttttctttccctgttgtggctgttttcaattatataactcttgaatattctgaatatgtagttctctcactttccctccataggattctgatcaagctagagtcgcctcaaacaagagcttgattaattgcccttctgaagatcaaaatgtgagaaatttctaggtagcttccaaatttaatttgaccaaccagactaagaaacttagccttcttaaagaaagtacagccaaagcaattcatttccactggccttctgaaatactttttagagtagaaaaatatatctcttttttatacgctgcattgtatatttcaaaaagcttcaagtggtactgtcctaaagcatttgcttttcataaaatggcctcttttgaatcattaaatagcaactactgaagagttcaaaagttatgacaagcccttgttatcttgtgaggaagattaaatagataaacatgaattatctggcatcttaggatggaacagaggttagcactgggtacaccttcatagaaatatttatatcatcaataggagtcagaggaatgactttatatctctgtactttgcttccatatttgtgtctttaggacctattcaatagtgcttgcacaagcccataagctcacctcccttttttccctgtcactgcttgcatattactggaaatgatctaagtgtgataaatacaatctaatacttgtattatatgtggataccaactccattcttttcaaagtattgtgtgtttactcacatgaagtcctcatagaggagccataaaccactgaaccagtagtcgccagtattccaggtgtagacctgcttctgccacagaaagtgaaagcctttttttctgccactttcatttatgtccataagacatgccttggaaatttttgtcaaggcaaacaaaaggggttttgatcagactgcaccatgatttcaccttagtctgtacatctatatgccctcaaaggttctactacctacaccaaatagaatcttacaatatttccatcaagtgacttaacttttactaatcattatgactcgtgaaacattttaaggaattttctccagagacagctatagaattgagttccccttagaatatatgtccatctccttgagtttccagttaactgaagtgttgtgggtgctcttgcctccaaatagttcaacgaatatttattcttgcctactcacctgctgtcacaataccagcaactgggcatacaaagattaagacctgactcctgccctcaaaaagtcacacttacataaaaagttaggaatacacatctgttaccaagtgcagtttaaaaagttgtcattctgctctgaaaagtccttggcattgatttggaaatgccttaataacttttcttcgtctgtaaagttatcacttgaatacccaaaatgtattgggccctagaaagcaaggttgacatgacaaatccttgactttgaggaactaaagttatttaatttgcttatttcaaaagtgttgaccaaagtgattattgaatcaatagatggttttgggtgactacaaaatttgctctttataaagggttattaaaaggaaacgctgtttcagttagttattgttcccaatcttggccatttttatgactttggaaattctcaaattgaaaccaggactgaggcttctttctgtgtcctctaaaggggcagggttactagtgtttacaattattttgtgatatccagatatgcgtcttcagctaatattttatagccttaagttttttttgttacaagattagtgcacaagttcaacaatagagaggtatgtcaagaaaaaaattaatcatcattatccattccaacttcttatcatcattatcccttccaacttcttaaccctttctgtcttcccaaactaatggtaactgttggcatgattcctttgactactttctcaatggtcattttacagcttctttacagattaaaaatccattcatgtacaacgtatttgtttcttataataatcctatagtgtagctattatatcatccccattttattgatgataaaattaaagctcagagagcttaaacattatttcacagagtccacaaatggaaaaactcagtttttttctgtgctcagaaggatattgtcaaccacagaaacaacttgttcccctaccgaattcttatagtgcttatatttcctgttgttaaatgccaattaattatctgctgcgctttcacagttttgtactaagacgttacctgtactgtattttatgtatttaaacttttttttcctagataaaatataagctaattgaaggcaggaaaatatatttgtattttttttttttttgactggctgatggtagtccatttagtaaactgtaaaagaatgagtaaagagctatatggtatgcatgtggtttctggtcaaatattcgtcatataataacttaagaattacagctctcttaaaaaaatcataaataaaaaacatagtgtgctttaatatttatatatgtgtctgcagctacgcaccagattgaactattctttttgaaataatgtaaacattgaaccaaccatatttccttgcttatttttggccttctaatgttctggagcatcctgtgcagctaccagtgatataatcttgtgtgaaaagcaggatctaaccaagtgtagtgtttcctttcttgttgttttctccttcccagtttgtatctaagataaaaatctactgaccttagttcattgcaaattagagaagatagccccacttagtttggctttatgttggtagattagcacttttttttttaattggaggcaatgcagtcccctaatctcctgcatttctattttgttagggctcaaaggaatagatatgttgtagcagagcattccacttttcttcctttcctgaatcacaaacaaatggcttccctcaaatcactgcagtgaagtgccttcttagcagagatgcaacatcagcctgtaaaataaaggagaaatatttcagaggagtaagagatttccttcaacaactgaaaaagaagttaaatcagaaagctataaatcataaacttaatgcactgattttacagtcttcagaaagtttgcaaaagacaaagattgtgagagaattgatttaaaacgtacatttacggacgcatgttttgtttttgcccgtctctaaaatttccattgctagtctgtttatttagaaataagctcctaaccaaaagcagtatatattttatgaacattcttcctcaaatcaattgagaaagataatgttacgtctttgaattttactaaccactggcggcacagcagccatttttatatttcagtagcataatacatccagcagacaaaccttaaaactctagctctattggataccagtcgcaagaaagtaaatatatgatttatgactccaataaattggaagcactgtcttgaaatctttaggggaaggcaagttaaagggattagaaaattttgctggccttttcaggcagattttaagtgagagcatactagcagtgtagtctgctgccgcttacaccctcaaaagctgacaagcatcatctgaatgctatgtgctatgagctcccgtgaattccatgttacaatcagactttaaaatgagggctggttcccttggacaagagaatctggtgtcctcaggtcactgacaattttagaatattgactcctgatgtcttttggcatcacagtattttatttccttagtgtgactcaaaaatgaatatgcatgatatcctaaggaaaaatacctgtatgtgcataatataaggacacagaaactacttttttttttgcaggggtggaaaagtaccctttctgtggatggggatacatgttaagcataatggctacaaggaagcatggtgtgaagggaagctttctgctttacccagaatacctgcaattatgcagtaggtcatttagaagctctaagtctttaagtaatgataggcatacttgcgtaatacatagcacattgccttattttaggattttaatcttctagtatatacaaaaggggaaacccaaattacatgaattctaaaagggtttgatccaacataagtctgtttagctgtgtccattatagatactttaatagccttctcaattctgttcagtttccagagaatttactctagtttctaaggacatatggaccatattagaatacttctattcatgccatcatggaaattggctttacttttacatacaaaaaaagtacttggcatataaattggttcatgttgaaaggttatttacaggttgcaaagagtattaatcacatatctttataaacacttattttagtattaatcaactaaaaatgattccatttgccacacagaatcagattcagtgccatttcactgccactcaggaggagactaaaaagctatagagacaataacatatactgttttctgaatttagaggtttgttttgtttattagttagtattttgttttgagc

SEQ ID NO: 2936 - DNA, 13688 bp, Homo sapiens
agtatgtcaaagtaattcaaggatagtcttcagcaaatagtgctggggagaaaatggattctacgtacaaataaatgaacctcaatcttcactttaccctataaaataatcaactcaaatgagttctagatctaaattctagagcctagaataatataaaattctacaagacaacatacaaaatctttacgaccttggaataagcagatttctttggtaggatgcaaaacatgcaaccattttaaaaactgataaattgaattttattaaaatttaaaatgtctccccttcaaaaacaccactaaaaaaataaaaggcaaaccacaaaccgggaaaaataatagcagaagataattcaataaaggcgatcaagaatatgtaaagaattcttataacacaataacaataagatatctattaaaaataaatgggcaaataatttgaaaagaaggtctccaaagatgtggagaccttggtgaaaggtcaccaaagatgtgtaaatgacctatacgcccatgaaaagacgctcaaatcatagtcattagggaaatgagaactgaaatcataatgaaataccactacaaatccacaggatagctaaaataagaaagacgactgtattagtccattctcacactgctataaagagctacctgagactgggtagtttataaatgaaagaggtttaattgactcactgttctgcatgcaggggaggcctcaggaagcttacagtcacagtagaaggtgaaggagaagcaaggcactcttacatggcggcaggagagacagcgtgtacaggggaaactgccacttttaaatcattctcactaacacaagaacagcatgggggaaaccgcccccatgatccaatcactcctaccagtccctccctcaacacatggggattataattcgagatgagatttgggtggggacacagaccaaaccatatcaattaccatacaaagtgttgctgaaactggggtgtgggaattcccacctttgctggtggacatgtgaaatgttcagccactttggcaaacagtttaacagttttgtaaaagtcaaacgtatacttacaacttagcattcccattcctaggtatttatccaagtgaatgaaaatttacatctgtgcaacaacttgtacttgaatgttcatagcagcattattcatatagccaaatatccatcaactggtgaatagataaacaaattgtggtatgatgaactactctcaataataaaaaggtatgaactacagatacatacaatgacatgcagtatctcaaaagattatgctcagtgaaaaaagccagatgtaagaacacatatcctatgatttcatttatataagttctacaaaaggcagaattatagtgagagaaagcagatcagtgcttgaaagggatggaactgactgtaaagggatgagggacattcctagagtgatggaaatagtccatagtttgtgtggtgatagtgtatatgtttcaaaactcatcaaattgtatacttaaaactggtgaatgcattgaatgtaaattatatcttaatttaaataaatcatggaattataaactataatgttgcaagagatagccttaccccaatcttaatcttcatcccatccaacatcttgcaaggggcacccattttttggtaaaaacaatttttaaaattgttctgatccgtcaaacaaaaatgtgtccacatcaacaggctgtttcaaattgatcacgtgaaagagatttgtttcttcctggcttgcccaggataaagttgtgtcttctgatttttaatctgccaaatatccaaaagcagacaaaaatttgtcaatgctccaaatatttagaacaacttaaatgtttggtacaacatggagaaatagctgaagatttgattgagtttttcatttttcatccaggtgttcagatgcagaataacgtaagaacgatgaagtggatgggcagatttccaaggcagctggaagtaaattggacactgcatgacccaaagatgtaaagccaaaatttcacattcaaagcaagtcaggaggtaaactacaccatggagacatgagggagattgtcaatgagactttcatgcctcagaatttgagatgatggtgatgatgatggtgattgataacaattgcagcagcaattatttcttgagtgttactaagtatcaggctctgtattgagccatttacatacattatcttatttattcttcaaatagccatgtgaatgaggtactgttgatagccctgcttgattcaggagaaaactaaaagtaaagagttcaggaatcctccccaattttgtacaagtagtacaagctgaggagaggcacagtgttgaggttgggtgaagggggcaacatgatagccacagaaatcattagagaaccaagtacatccaacttttgtggccaaaagtacttcagcttccactattctgttgttaaaggtgttagaaagcactttattttcttctaaaatagactaagggggaaagtattccagttttccttatctcattatgagctttaagatgattattttcttcctcataactcctgtcaaagcttattttgtcccctcccacaaaatctggacccatggcaggatgaagtcctcttgtcctgcactctgtgcgaggagcagtgtctctgaggtgccaaggccagaagatgccattttggtctatagacaaaaccaagaggtttgagtggatcaaaattgtctaattaagtccagattcatgatttaagtatttaaaaattagtcaagttttgtgtcattctgtcaatctaaaatgccttgttctttttctgggaaaacaactcttcaaaaattgtaagatctcatgtttattgagtattaccaggtagcacataatttgcctagcacttcacatacattgtcacatatgagtttcatctattatcctaaatttgcaggcacagaaattgagtttaaaaaaattttttaaggtaccctggtaaaggcatggctgaagccagcgactgtctgactccaaagcccttgctctttacctttctccttcctgactttccctttgaaaccagactgaggagagtcagatggttaagagaccaagtttctaccctgcctgtgtctctttttgagtagaaacctgagcctcacagaagctgctatgtatctacggacggaggactcaaggatgtttgcaagcacaactttcttccgggagtgtcatcacacagcagctcaacccaccaagttgccccttcttgcattatttatggatattatggaggattcaataattgcaacatgtgctatgggagtgttgcaatgcattggcaacagttcttagcttttagttaagacaatcaattccaaggagttttcatggagctagtcaagaagaaaggcaatgactaaggtcaaaacccacagtggactcaggaagagatggtggtactgtcttgacagatggcttttgcctcttacctaggtacttcccataccactgggattgttggttatttttaaaaagatattaaaaatataacaagaaggagaggacctaaaaggaaaggattctctaagaactatctctaacttttattgtaagatccattgttagtaatccatgctgtaggaaatcaggagagtagttactgctgggaggggtcccaactggacggaagcacagttgctacctaggtgcactaatgttctgtctcctaacctgggtgcacaggttatgttcagtttgaactgaactggtatgttcagtttgaaacttcatggagctgtatacctatgacatatacattgtctgtatgtatattatgcctccataaaaagtaaaagaagaaacattgcaaatgaagtgaccaattaagaacttcaccctcttttaatctggagcacaaaactttgcaagaagcatagttaaaactttcctgtgatgcagacccaggtatttgtggctctgctaaagaccttagcatggccactgtcgtgggttccttttggtgaccccctgtgagcagatctctctttaaggcttggacacctccagtggagaaagaggaaaggaggcagagcagaggtcaattcactctgatccgacctcccacagagaccagactgttggttcctgctcattttccacacttcatttctattttagtgactgtcagcactaacatgcctatcacagatgcctgcctggcctaacagaaagactagatggctgtctgccctcagcagagggattcccaagaggcacttcataccacatcacatgtcttcttaagctcaggatctcctgagttttagctagagaaagcctaggaataggtatatttaccaatttattttgtagtagttataaacaagtaccctatgttaaattaagttgacctaaacctgcccccttacatattttaagtttggcctaaagatttctccatagatatgaactgaaacctaactggatgtataaacaggctgtaaacgacttttgtacaaatcattagtttcggccaatcacatgtggccaagtgttcaaaccacgttcaaacaagacaaacaccggctgtaacaagtccagctgtttctgtaccttgcttccattttctgtccacaaattttctagaccatgtggcagtgctggagtctctctgaacctgttccggtttgggggctgcacaatcacaaatcgttctttgttcaattaaactctatcaaatcgaatttgtctaaggtttttctttaacacctaaaaattgtttccaaagataaaaaatatttttttcttcctcaaatctctgttcaccaaactcctcacaaatttatattagacaaaatgctttgtgctagaaagaaacagttgacactcagtgagacacaggaaaagttaaccagcccactgccccttccaagaatgtagtggtgaaggggatggaagtggtctggcaaatgaaataagattgatcagatattgatcatcaatattgaagctggagcataggtacatggggatttataatactcttctttctaattacgtagttttgaaattttccataattctaaaagttttaacaagacaacaagacatttaagtgagtgccagatggccagtgtggatgattaaatctaatatgatcaaattcacaaatgagacaaatgttcatgttataaaagaaactgtcttttcattgaggaggagtccttctcatttcaacagagtttggcattaaacaggaagtcctagaggtgagggatttttctcatgtcaatgctcattttgtaaagctattccacctggtgcagtagacaatacatgggctttggagtcggttgatgttggtttgaatactaactccgttgtttactggctatataatctcagaagcatatttaactttccaaaactcagtttcctcaactccaaaacacagaattgtgctgtgaacaaatgtgttaaagtgctaagtacagtgcctagaatatagagggtgtttacttttatcaggttgcattaatattaccaacatcgttgaaacaaagactatgcatatggtataaattacaggacgcgtaatctgttgttttcctgaggtattagcattcccttccatgatctctgatagagtaacatttatcagcttaagatttaccaagaatctgtatgattttagtgatttgagccttaagctaattgggtcatattgtagaattctctctctagatcacattcactttctttcattgatatgttctaatgcctggaaggtcacctttgacatcctaatcacaaagttaaaggcttttcctgtttctcctgctctttgattcttctgcagccaatgggctattggccactgttattcttgaaattacactattttattgtctgacatgatgctgtgttttcctggttcccttccacctcttgacagcttgtttctttttcttcattagctccttctttatctaccttttaaaatgagaaattatttagttcaatccttggctctggctttcctaggatataccctctcctttatttccaacatctcctccatgcagatgactcctgaaactccacccaaaacctcattgcaatcaacacagcaaagcaatgaacattttacttgatcactgaaccttcaccaatacctaacatctctaggtataagtttctcatctgagctcaaaactgtctttctctacagattccccattattccagtcttttaggactgaaatctcaactttatatcttccctttcctctatgaaagtatctaagtagtgaccactagagtttggatatggttcgtttgtccccaccaaccccatgattaaatttcattcccagtgtagcagtgttaggaggtgaggcataatgagaggtgttcagtcataggggtggatccctcatgaatagattaatgccttccctggggttggtggggttgggggtggtgaatgagtttccactctattagtttccacaagaattggttgttaaaaggagctggcacctcctctctccctctcacttcctcttgccatgtaatctttacaggagcggctccccttcaccttttgccatgagtggaaacttctgagatcttcaccagaagacaacacagtttggtgtcatgcttcttgtatagtctgcaaaacaatgagctaaataaactctttcctttataaattacccagcctcaggtattcctctatagcaacacaaaatagactaagatgtgaccaagccttgttgattcttatttcacagtgctggttatattcctactgacaacaactaaatcggactcttttacctttcctaggattgctgaaaaggccccttaatggtttcctaatttcaacatcagttacctccattctataccccacatctatgtcaaactacctctcccaaaacactgtcagaccatgccactctgccaatcagaagccttccaggactcctcattgctactggactgtatctaaaaccttcagctcagagttcaagagcctccataatgggcctcatatacttttactacctccccttccctcaacttgtctacataaaataacaactccagataacttatttccttactctcttccaaatatacttttatccttccattcatcttcctttttctagactactttccccaccaaaactgccttcctaacctaatcctaactcccaaatgggacaaggtcagatctcacttctttagtaatgatgttcctcattctctaagttgaactaatcgtcctttcaaaaaagtttccacaattcgtattcagataatacatttggtaattaaccactactgcctactgacatcttttccattattgcttgctactattaagtgctttattgttattaagttttcatatttgtaaatcttgtctctccaacttgattgtttacctcttcttttaaaggggcaagcctatcctctttgtatctcacaaagcatttaagagtaacttgtacaatgtataactttttgtccaaataattttagaaatgtttacctccaatagttaggaactattcactcgctttgtattctttcagttaatatgtcttcatgatggtcctcagagctttgagaaagatgcatctccaaaatgtgtgtgtattctgtcatggtttgtatgctggatcctttctcctgcttcacggcagatttggcctttaactatatggcagatttggcctttaactctaccattaaccaactgagtatgatttctaaacatagagaatagacagctagattagttatgctgtataatgtgaaataagaattttcttccccctaccccacacagatcttactcaataaaattgttttaaaaatgtgggcttgattactcactgttattttcatctagtattattttaaatatcaagtgttttgaaaataaatgaatgtgatatgttcattgacctatttgtaagaagctagtatccgcaaattgtgaaatacagtcaactagcaattatcctcatacagatccaggctttccttatgactagtgatctgtggtctgttgccaaccagctctcttcttcctccagctcaccccaacctactttacccaaccacactgaaaataaatgttcacttggtccaacatactaaatcaatctaacacaggttgaaaaataagtatcttatatgccaatctccgttgatttgtacagctgcctggattgcagtgatgcaaagaattctaaagctatatccagattcatcaggaaggcctattagtgagtctgctatgagcacaagacaagatgtgttggcacttgaaccatgatttgcaatctccagccaaagcaaaacttacaatgtggagtttcttgtagggaccaaaggaaactacccctttgccctctgaggttttgctgaaaactcagctgacaaaaaggttaatggagaaaaggcacacaaaattttattgtaatgtgcatagcacaggggatcacaggagaagatagaagtgatatgcccttttccataggggaggaaggagatgggaagtgtagacatttttttaaggagcagtaagtcattagggaaaaataatgcacctgggaggtgggaggcagacttatgggaaggtgaggggtggaactgcacaggaacaaaggtcatcttattatgcaaattagtcccacaggtaatctcttggagctgctctcaggagaatagatgaaaagtctgtctggcagggtgaagattcccagtctcttctcttctcaggtgattaatctttcctggttatttgtgaggtccctaaggaaagcatttaagataattgcatttattttggaaaggagctttcttgtcacataaagaaattccaggaagagtccttccttgtgcttaagagacaagacaaaggtgaggaaccttcattcttaggcagcttctagggctcctcagcacatcacagcaacagtcttggggcatcactttctgggccccaacattctcaaaggcaaagattctgttttattcatcctacacatcttcctctcttccccttttactaagtcatggcagatatagcctgctatgaattggcaccattagagaaggtatggttgcttagctgtatctgtgcctaaagtgaacatgttactcttagtcacacccagtttctacttccacttcttgtggaaacagtccccatcttcattagaaatccattcatctcctattttcagtctacatggttccagggagatgaccataaccaagctcattgtgacatgtgattcagaccacccaacatgattattacatttttcaataatggcttagaaaggacatttaacccaacagggacaatgagataccttagagttttcttctaggtgtttgtgagggaaagagtcactcttattgcttgctggatttgaaactaagaactacttgctgtcacatggagttgacacttttaagcttacaaaaaaaaaatgaccaagtcaaatatgatgataataacagttgtgattaactaacctaagcccccaaatctatcattctgaaccctgaatacctttcgttaatacattcccttttctgcttaagcctttttgagtttcctgcacttattactgacacagactccctgagacaaagctttataaggaccttctttgactccatcaactgcaaaaacaatatctaataaaaaacataagaaatggctgtgtgggtgatattatgctggtgttaggaaagctcataccccggcagtagaaaacatagcaattcaaaagcactgttctgggaagtgactgctagctgggtctgttttttgctttacatcattgctctcttcgtgagtactaataattgagactaggtcatatactttataagtgcttcaacagcagtgcattggtccaggaagggaagtttggcagctgagtcacctgtcaggatagtgtgttgcaggaatctccaaatcaaggagagacgccttcccaaggagaggtggagctggaccgggcagctggggaaaagttggtttctagccacaggctttttctgtaggtaaatcaaaccagcctagtttccaatctaggcacagagcaggcactccagtctcagacactttgatcctttccatagagacaaagaggtaatggggagaggccatagcctactcattcaagaaggtagttctcaggataaagttcatcacaaatgtctgtcctctctggattttggcagctttgttgcctgacttgataatggatcgtgtcagaacgttacctagaggaatatgcccactgcttagcgagtatcttgacattattgaccttgagtaacttgaggaaacagtagagtctatgatttgcttcatctgggttgatattttttccaactacaaatagtagcttcccgcttccccaggatcagactcaggggtgccttaaacgtcaatgctgaactactcatttcagctccaggaaaataagtctgtttgtctcaaaagaattgttctctgaggcaaaacaatcttttgctgcaacgcccccacaaagcctgcatgaaagggtcacacaagtatgtacaaaggaaagatcagtgaagatttcctttttctccctccgttttttttccttttagcgctgagctatgaacatgcttaaaagtccgaggatgagatcaattctgaatggtccttgttcttcaggataagttcaaaggtatcaaaagtagcctttaaggctgaaggaaaaatgctttctactttgccgccaaaagagtttgaagtctggggcttcatagaaattccaaggtgagaaccagaagggaagtcatagactgttccctgaattggaggatatggctttttttttttttttttttttttttttgtagggaaatcaaatcccacagctgtgcctttggaacaattagacacacctagaagatcacaccaggatgttaagaaatgagacaaacagtgagcattctgacatcatatacactgattggctttttaaactctgggccttttcacacagattttacccagataaaaatgcaagcatctgaaccatatgcttaatgttttctctgtaccgctggctggagcagctggcaaaacatgatctaggactgctaaaatgttctgacaaaagcactttagtggggtctgcaggacagggtctgaaagatgtcagaattttaaaaggtactaattgctcaaaggatgaagcaatccctctgaaaactaacccagcatttaatagaacccagaacaatactgagaatctcagagggaaaatctgcttgttttctaaccctgctgataaagaggaaaagcataaccactaagcacagggcaatgtggaagaatgtatggcttttcaggcacctatgaatccttcaagaactgtacccaaaactttagcaattgagcagaaacaaaagagcagaagcctattaccaaatcactgttggaaagaaggctatttggccctgcaaacctctgatgtctgtcagttcaatccttccaacagctcttgcagaggtccgccggaagacagtgaggggactgtggccaagggatgtggaagaatgtcctgtcctcaacaggaggcccattaaccctccagggagagctcaaaacccacaacagatctctgacccagttattgcctcatgcaatcaatgactgtctaataggaatttatcaaacctatgaaatcttacatactaggcagtgaaaccaagtaaggactaaaaaaaccggatgccatctgaatcaatcaggcttggggacatgggtccctatcgtgatgttttacacagccacagtgcctctctacatcaaggagctcacagattctgggcttctgataatcatttctcaatcctgtgaatataaaccaaactaaaattctaagttcctcaaccatctgaagggacccatcctctcagccgggggcatccaaattttacctaaaaactagctcaggccatgatgggaagagggagctggacatgcctattataccttccttcctgttggaattcaagcacagctgaccagctttaacatcaatacaagaccttaagattgatagaacagactcttaagcctgataagtaatatttacaatctatttctctgaagcctgctgctggaggcttcctctgcatgacaaaaccttggtcttcagaacccttcgtaacccagacattctttctataaaccagacattccaggtccttagataataacttttcaaccaattgcctatgaaaaaatctttgaatctggccaggcatggtggctcatgccgtaatcctaacactttgggaagccaaggcaggcaggttgcctgagctcaggagttcaagcaagcctgggcaacactacaaaaccccatctctgctaaaactacaaaaaattagccggggtggtggagtgcacctgtagtcccagttacccaggaggctgaaaccagagaattgcctgacccaggagatggaggttgcagtgagctgagattgtgccactgcattccagcctgggtgcagagcaagcctctgtctcagaaaaaaaaaaaatctttgaatccatctatgacctggaacaccaccacctcaactcccaatccccctgccctccacttccagttctcccgcctttccaaccaaaccaatgtacatcctacatgtattgatttgatgtcttatgtctccctaaaatgttaaaaccaagctgtagcccaaccacctttggacacatattctcaggatctcctggggcttgtcacaggccattggtcacttacatttggctcagaataaatctcctcaaatattttacgagtttgactttttttgtcgacacctattttatcaacagaactaggaacttgaagatgataaataactcaatatctaacatacacaaatacatcacagtagaatccttggctcttgatcccattgccaatggcattttcaataagaacagaggaactaaattaagcaaagaaagatgttccagtatagccattctattctccaaatgagcaattaatatgttactgctggctgaaaaatatgatataaacagataacaacataaaacacatcccaggttagtcagtatacacacaaacacattagtctctgatgatacatccaggaattaattgagtataaaatattgtgtagaatgaggacactctcatggcaatgaagaataataatggttttacaaaatacagcagtgagccagcatcccattaccctcccctcagtccccttcctctctgccttttccttccgcctgaacagcaatgcacaactgagggagttgcccgagatggctaaacggagggcatgacttctgagatgaatcagcagatgtgtggcctactgctccctcagaactcaatcagaactcaggaggagtcgctctaagatggtaatagcctcattactgaggttataaaggcagcaacatgtctctctgaaagataaaacagtattatccacatttcatttggtaaattaaatccctttgagctatttaccatcttgaagatagtgctagtctctgtgagcagaagtttcaaagtgagatta

SEQ ID NO: 2937 - DNA, 18755 bp, Homo sapiens
atagtgaatgaataaatgtacgtatgggagggtggactggtgggcagatgaacaggggtacagagtagatggaagcaaatgggtgaataggtagatgggtgaacttatgtgggtgaatactggtcggatgggaagtaagtgggtcaggagatgggtgagtgagtatattgaaggaggagtggttgagttggtggaaggataatggatagatggtggctgaatggatgcatgcatcctgtgtgcatgggtagatggggagggtgggtgggtgagtgaatagctggatggaggagttaagaggatagatgggtggaagcatagatgggtggtttgaaggggagagtggttaagcaggggaggattgacaggtgggtggatataagccttcatgcatgactaggtgggcgtgtgatcatagatgagtaaatagatgggggagtgggtggtggatgtgtgcataggttggctgagggtgagtgaattgatgggtgggtgaggagagagaggggttgaaaggatggatggatgaggaactgatgaagactgaaggacagagtaagtggctgtggacagtcctgccatataggtagcatctagttctcctgcagagaacagtagccctgaagatagaaaatagaaatgaaaattctaagaaaaaaaaatgaaggcctagggaataggaagatgacatgctggggccagaagggtgtgggcacaagataggggaccagaagtcaatcctgcctctgattgctctggttacctcaagacttcttcatccagaatacgggcaccaaagatgatcactccatgggtgtccaatactgacgagcacttcgggggagaggccgggtgactcgcttcttgcagtcaacaatgagggtgcagactggcccttcacagccacagccacacggtgccacctggaaatggtggaagaggttaagtgaactcttggctgactgaagtaggggagtcaacatggttggagagcagtgataaggttgaagccaatggtgataagagcagtaataacaatggctaccatttattgagtgtttaagtgcaccagacaccatgccgtcactttcttatttgtgccaattctatttaatgtctatttacagatgtagaaactgaggctcaaaaattttaagtaacttgcccaaggtacaggctattcaacatgcagagaaggctgtacactctaaagcccaaactctggactagaagtgactgagtttgggcagtgggtaggtgtggtgtggcccaaagggtctcaagggtttcacagtttaagtgtaggggtttgggggcacttcctcctgaaagtgtgggccaggcagaccagaggagcaacaaacttacttgccatctgctaggctgaggcctcggaagactggctgagagggaggtgaggccgcccagtctggtcttcatacaggaagcggacaggtcggcccagctccaggcccgctgtcggacaccctgggcactgtagagagtcaggaggggagcttggagaccagggcggtccggacaacagtcagcagagagaaatctttgggaaatcctcctagtaaccgagagagaacacacagagtgagaggcaaagggagccgccacaacccctttcctcctggtgtctgatctaggccccatcccattacctccccccaggcctaccccaccatgtcacccatacctgggaaagctggcgagtgggtgcactgagctgggcaggtcgtgccactcggtaggccacatcagtggacagatgcctttcgctctccggacaccatcagggagggaggggaacctcagggcccgagcacatccacagggggtgcacctgggagagtccatgattatcaggagaagggacatgcctcaggagggcataaataggggacatttgggatctagaactcagctttccagggctcaactccctgcaagggaaaggtcacctcaccctcacttgcttctgaacagtacctgaatggtgggaaatgcaaaggtacctggaggcagggcagcatcagctggcattcaaccccatgacctcctgcccctgtctctcctagcatctgcctctcttacgctctctctttgtcttttagctatgaatctgtctctctctgtactctctgaatacttctctcaactcttcatctgtctccgtctctctcactctcttactctctctgtctctttatgttggtctttctgtctctgtctctctgtcttcctccatttctctcacattctgtccatctttttctctccctcgctctcacttctttccatatctctcactctctgggtctctggcatctgtcccgtctccagcacaaacacatctgggcaatcgatcatcctggacacaggaggtgcaggggggccacgaggaagagatagagaagcagctctatgagaggggcttcaagcagctacagatcccaggtttgggggatgggtgggaacaaccctgagcatgctgaggaaaaagatacaagaaagctctcccaggagtcgtgcctcctggtttaggagatgagttggggaggggtggaggaatggggggcaggggctgagctgccacgaggagccggaacaggtccagggccctgagccacacatctgtggatcccacagagtgcttgcccagaacccaggcaagctccccacacctggaacctcaatcctgtctcccacccccaccaaccccaccacctgggacccaaagattcaagatccagcccaccagcccgtctaactagaactcagcttcctagggctcaaactccctggaaaacaaaagatcaccttccctcacttgctcccctatacacatactcttcacaccatcagctccagattggaaaaatccaaagagagttccagcaaaactttcatagaagtgtggggcagggcagaggccagagcatcaggagagtggagctgggtggggtgggtgaggtggggcgggcaggcagagaaaaggcctttgagtccaggagccgggaaaccacggccttcccccccaacccccacctaagcctggccctgcgcgtgtggcagctccgcaaacaccaacacacaagggccgctttgagagacgaaggtgagtgagacagagacacagagactcacagagaccccaggccaaggagacctcggaggccccaccctccaccaaatcccaagggagtacaattcgatcatatggacaacctacccacggtccgcccaccatcttcccacaccaggccacatacttgcccccctgtatccagcctcactgccccacaggctctccactggtagccccattaccctccaccactctacctctggcccccaaatgccttattctctaaccttaggaattctacagtaactcatttccctaaagtccctctctacccactcagcccctgaaataagaaacagtcatcttagccatccccctgcctcctgccagaggatccctcttccccctaagaaagactcctagagtctacaggcaccatacgctcaatttcctggccctgggcttcactgtcctcacatcttggaagttcttccttctgtaactaatctaaatcttttgtgctgccattctgaccattttctctctaaagcagagaagaatgaatagtcaagttaaatataaatcagccctcagtgtctccagaaatgggctttttccagctgctgaggacctggtgctcacagccccctccttgacatcaaatcccctttcctagaagcaggaattctgggtcctgggaaaaagaaggaaaagatcagggttgtgggcaccagggtccaggggagcctggctggccagagggaggaggggctaggcaggaatgcaaagagttggcttggcctcagacacctgatcctggcctgtccggagggccgtcctgttggcagccagccccgtgctccccagagccagctgcgtggcagcatcgagggcacagggagggggagggggacctgtccaggaggccaatgagacaggtagtcaaggcttcctttctttctgggcttactgggtctgctctgaatcacaggtgctcaccccttatcccagagatatcgacagaaaggccatagacacacacgcctcacccatcaacattggcgtctaccatccccacaccagcaatgactgaccgggctggccctggccatcttcagctcttcccaaggactcaagacaagcatccatcccattcagggtctctaaagtggtcctccacctttcagccctatctgccctcccccagtcattcaaggacaaagagattcctaccctgatgccaaggaacacaggtgtcctgccctccagctgtagccttgaagccccaaatctccttgttagactcagaagctgctgccccaggcatcgctggccccttcccagagacactcagagctccagcctgactccgaggacccaggcatcagactcctcttacctgcccagcctggggccgcgctcagccccagcaccagaggtaggaggggaggaggcgatggcagcggctgcaccgctccatggctgagaagccgaaacgccgggtccagggacccaggtcggcctgagacgctggatgccctgaggctgacagaagacagggagcgactatgagcctcagacgccggggtcccagggaggtcagaggctgcgggcagcgacagcgtcagcggcccagctccatgcagcaaggcgccgtcggggctcccggcactgctccctcccggtggctgccgcttctgtgtgtccccggccaccctggcgcccagagcccccacctcgccccgcccccggcccggcccccgcctccagccgcccgcccacagccaccgaagggaaacccaccctcagtctccacctggggagggaggcgggaaccctccctctatcgctcgctctctctgccccttgtaggtctcaacggcctgtaccctaagattctcttttcgggaaccccaattcttccctagccccttccttttctaggacccaaacgtccagtcacacacactccctcccttccctccctcttgggggcccagagccccctttcagcagaggcctgggcgggatttaggcacagtgggagggggagaggcgggcctgggggtcgcagtccccaccccacccataatcagtctccataattacttccctcaccccgccccgtgtaattacagagccgggccggggcggggtatttatagacaaggctatagatagcgacgaactggggcgggggatgtgggggaagggttctacggagagcaagaggccagagactgggacccaccgacaaacacaggatagtcagtccaaggagatgcaaatgggggacgcggttagggagtcccagagccgaggtagaggggggcagtggtaagatgagcgagcagtcgactctggttggaagggtccagggaaatggggtcctcggggacgtgggccgcctccgggcgggcaacgcctgagaagcacgcagcgctcggcgccagtgcgcccccacgagcgggcacggcgccgggtctgcccggagcccgcagcgcgcccgagggaaggccgcagcgagccgaggcgccgccgcccgctggcgcggagagggcacgagcaacaaggcgcctttgagaatccaccgcccccccttcctcctccggccggccccgcccccgcctggcacaccctctccccccctccccgacaaagcttgccttgtgtcccccaccctgctgcacctcttgggccccacggaacctcggcggcggcgtccagggatcgcgtccggagctccaaccggataccccccccaagcccgaaacggcgctgcccatcctcatacagtcacctcgtccagaaaacagcgattttaatttgaaagcgattttatgtatgagaggggaaaggagcccaaagagaagggacgcagggcaaaaatcatgcagccccagcaccccacctctgcgggcggccacctcccctcaattctcaggccaggatcctgtgtccccagcctatgctatgtgccagggctggaggagagctgtaaagggaaggcctccgggactacactcgtgaaaccatccctgtgggggccctgtcctcacagcccaggccccttccccaagttagacaggaagagataggggggcggcgggaagctgggaaggctagtgcttggagagccctagggacaggccatttcgggccctgcctttcccaaacacccacctccaccactggcatttcttagtcaacctgggaagtacagtacttctttgagtctaactgcaagtctctatcctcacaggaaattaaaaatacagatcggttcctacatctccaccagccccttcaccaccaccaccaccttttttatattcagtctgactgcagaaggaggtgaagtgtaaaaagagactctggacagtgacagggccctccctcttccagagaggcccccatctgccaggtttgagaggaggaaggcctgtcagggcctactctcatgtccatcagcttgggaggcctgccccccagtatccacctctgggggagtccccatttccactcttcagatgggaagcaaaatgaggcaagatgagaaggaagcaaggtctggaggcaaggccagtgctttgtgctgggggaaggacagagggtgagaaatcaccccaatcatgggagaacccgacaaattcagagactcaaggccaccgaagagagacaaccagtctcacaggtatctggggtcccttccaacttgggatatcaagcagatcccttggagggttttgttcttggttctgccctgtacttctcaccccatcaaggttctgggaacatggccccccccctgccccagggcttggagtccctcttggatgtgtgctcctccagtgtgagaagcacccgtctgggtctgagctcaggccagttgatggggagcctcaagcatctccatgaggaagggtcgatgggggtgtcaccaatgagcttgaagaaaaacagatgctctagacacttaaggcaatggaccggagggcaggaagacgtagcagcagcttggcaaacctggggtggaggtggggaaggggattgagagctggaagcacacgggccctgaacacatcctcatagcactccccaccccaagggagcctcagtgccccccagccccatctcaccgtccctgctgctcagggtactctgtttgcagtaggtctccagtgatgcatacactttctcccgcaggacctccacctcatagggttggagaggcccttggcatctgggatggcagggaagagaggaggaagagaaatgagacaaaccaaatcaggatggccatgcagatgtgagccacaggatgccccttttgggctcacttgcttgccctttaccagaggcctggcaagggaagcagggcccactgggtttgtggatggatccgtggatgtgggtttttcctcggccagttgggagatttccaggttgagggtctactgagggggatagctgggtaacttaggagtctcggagaagaggaggctccaaggttgcttggccttgagagacaaaggtaatcctcctcttacctggattaaacagaatgattgcctcaggcagccaagctctgtcttgtccatcctcatgtcacgcattttggacactagctcttcagcaccctggagagggacctgcaggtcactcaaaggtcacagctcagccagccttggcacggaccagcctatagccccaccccctctatctacatgccagcctagccgagggccacgaccgatcaaagatggctcctactcctgctgaatgggctgagttgcggtgcacgtgaagcctgtggcaaggaggatgccatctcgaacatcaatggatcggtgtgagaaggaggcaataggagttcattccagcctgggtggggcagcaagggtcaggagccagaaatcaggccaaggattcaaagcacatcagtggaagagaaggagaaaagaggtggcgaggtcagcaagtttgctccctgggtacgcaaggtaaggccactggggtcactaaagatcgggaagtcaaagagggtcaaatgtcaagaagtcaaagggatccaaggtcactgacctgcccgcagcaatatgactgatcatccagaggcaaggaggaaaagtgtgggatcctcttcgcccactcaacaagcgtaatagctgtttgtcagctgcctgacagatgttagtcacagggtcatttggctgcaggggcgggggtaagagttatggaagattttgagatatgctgggagcccccttgtaagaggctttgacaccccctccttacatatagtcttcctgtgagccccatccaaaccaatccctgtaatgagtcttctcttctggcattagtgcaaacaattatttatttgggacatgcctatggtttgccagtgggttgtttggggagtggagacagaaggagctatcacatccacctcagatgttgaaagaccttgtttggcagcacctccagtcccaagtagtgttaggaaggttatgagggaaaggagggggaggggatgtagaacagacctagactgcctcccccaacccccatcacgaggagagtggattgaccccaacactcacgctgctgccgctacccccggttcccccaggacctcaacgccctggtcactcttctgttccacagcaagctctgcctccaggatcctgtccaaggcatctcctcgggggctcccccagccccctccccatccccatccttgtcctttccccctgacgctcctcctgtaccgctgcagggggaagggggagagaaaaaatggaaagtcagcgccagccatgaaggggttccacaaatatccttacggcctcatcaggatctcatggccctgggagatatttataggaattggggaagtcactagaaagggtggactgggggcagccctgaggaagggttataaaagggcaggtaagtcagtcgggaagggtgaggtaggtaaaagaatagggaggaatttaaatggagagcctactacatggttaaaaaaaacatgccaagattcaactgagaaagctgattgaaaaaaaaaatttttttaaataaaatatgccaagaaacatgctagcacattttaccattcactcaattatcataatgatgctggaagcatttattctcattttaagatgaagaactcggggttcaaagagattagtttgcttaaattcatataatacatggaggtcatacaactgactctaagtgtgtctgagtgcaaatcttgtgctcttctgactcaaaaataggcagtgaaaggagcactggcctaggtctttgaagatgtgggttctgatcccaacctgcctgccactcctttgttgcatgaccttgggaaagccaagcctcaggctcatcttcctaaagtgggtgttttgaccaagatatgctctaaagtgtctctcagaatcctaggaatcgacttaagaagataagatggagacacagaagaaggaagggaagccctgaggtcttcagtaagtctgtaagcttaagagtgcccagtcccaggagttagaggaaagatcacagataacagagacagagaccagagaaggtccatggaatcagaggaggaaccactcaggttagaaatgggagacagcccatcatggctaaggaaaagttatcctatcctaggatcagtctagggagggtcatatgtgcaggccacagaggcctaaccattaagaaggaaactcaagggccagaacaggtaacagggaggagagctgcgaagggagagagaaatcaaatatcgccctctagaggaggagagcagtccacccttccagagaggtacacagtctgagtgggataagggagaagggcagtggtctaagacgcctgggcagggcgggtccttaccctccctcttcatgccagtggccagcacttctgatagcggcagtactgacagcggttccgctggcgcttgtccactgtgcagttttgttgtcccggcaagagtatgtaaggtctttgcggatggtgcgtttgaagaagccctgcaaccctcacagctgtaaaccccgtagtgtttgcctacagggaaaggggaggagcaatagaaggttgcatggagacaccttcaccatttagtctgtttccaatctccccctagcaaacttaaagtcctccctgtttgccaaatacagagatagggaaccaggagctgagtgatgatcagtcccagtctcctcactgttcagaaaccctacacgctgcttccttttccctctgacctccccccaatcgcgtcctacatctcagcttcagcttctttactcccatcaggcctccccaggtcacttgctctgaccaaactccataagccctgggaatcccacaggtgatgatacatgcccagactctccctctctgttcatcctctgagccacatacctgagcttctgtccccgcgattgcacatagccgtttgccagccccagggccacctggagggggtggacagtgcaggcccggacccctaagactggtggcttcacatcttcaggggggccagacccacccccagggatgacactgttgagttaatctgggatgggggaaatagggaagtcacaggaagacttattggaagcagaatgtcacagaagtgatggaaatcattccctaccactaagcaaggccctgcatgcacattccagaggctgtcatttacactgcagtctatgtgaaaggccatccctggagccaaccccaaagtgaataaacaggccccccctgaaattgtgcaacacagtgaccctgaaggcaggtgtcttgggaaagcagatgggatcaaaagggcagaaaatcagatagatgaaaagacatcaagaatatcagaattagccgggcgtggtggtaggcacctgtaatcccagctactaggaggctgaggcaggagaattgcttgaacccaggaggcagaggttgcagtgagctgagttgtgccactgcactccagcctgggcaacagagcaagactccatctcaaaaaaaaaaaaaaaaaaaacacacacacacacacaaaaacaaagaatattagagttcttttaggggaggagcatgcactgaaagatcagtcacctcaggaaaggcaaggggtctcataaagaccacaggctgacaaggttagaggattggaaggtcaatgggccatggggaagttcacacaaggatctgggttacaaggaaaacaagaaaatgaaagtggccaggcagtaagttggtcacaacctctacctgggggctgctgacaggcccggagaatcctgggggagctggagggggcagaccagggaccccatggaagaactgatgactggaaagggagagcccagtgggggtggtggcatcggggtgggggtggggccccagagcctccaagggatggagctgttgaagggggtaggggtggccaggaggagaagggggagggactccctggggaaggggatttggggaggagctgtctggcttcgggagtctgagggaggggtatgtacaggcacacagacacacaagagacagaagagcaaaaaaagaaaatgagtcttcaaacatccaactagagactttaattctctaataccccccgtgccggacccagcccactccacccatccccaagttcagagacaccctgctgtcaaaaacagtgtaactccggctggtccgatggtagtgggttatcagaacttattaacatttgttcactaaaattggtatacaacctcccactgctatatttgactggctaaaaaaacccaaaacagcgtaactcctcattgtggtgagaggagggagttgacaaggagaggaggatagttcggtgaggaaaattttccaaccaatccatttgaatgaataccaggtcatcccaaagccaccctgtctcgtgggtggggcagcacgtggggtagaccatcgagcccctctattcccagcgaaagccaggtagccagagcgtgcaagggaaagagacaggcaggagagacccctcctaagcgcaggatctgcctgtaaacgcccaaagtcctgaggtttaagaggaatcgtgcccttccaggcccgcgacctccggtgcccaaggcctcaagcggtcacagctaggagggcggaagctcccttccccgccccgccccgggggggagggtgctaaggccctcgggagggaggggacgctgtttacaaacaagggggcgggagcgcaaggaaaagagcaccgggggagggtgtgggggggggtcgcagataaagcggtcactggctcgcctgcccttctgctggggcactcaccccgccgctgtcgcccatcccgtcccgtccagcctcccctggctccggctccggggtttgttgtctccgcctgccaccgccgccgccgccgccgctgcgggatccagccagggccgtcgccgcgccaccgggacgcgaccccacaatgcatttcttttcgcacccccaccggcccacactgcctgcggcatgccgctgagggaggaagggcgggcgagcggcccaagacatgatccctggtgagagtagggataccgaagaggtcccagggattcccaaggattgatcggaggattagcgagcacgaggaagcccctgagagaaagactctggcctggattgggtcgaattaagcccgcgctctgctcagtaccaaaatgacagcgccaatgtggcagccatctttgtacagacgggagtctcggcgcgagttcccgccccctcgtctagttggaaaccgaggaggcggtctcctcggcctgttagcccgcctcgcccaccctcccctcaaatcacctccacactcgcgcatgcggtcagtgcaggatggattcgtcgctaccggagtgccgccatattggtaaaggcattaggcgaaggtggaacggaacttcctgttctcgcgggatctaaaggcgggactgccacgtccagcaaaccgggaaaggagaggatcccggagccggtgagaattctctgttttttctctacctcctttccaggccttttcctcacctaatgagtcgtagagacgagggcccagagagtctgaaagtggctggtgaaagattagtgtcccagggccctacatccgggaggtggttcgggataagagaactagtcttgggaacaatgtaggtgggaacttaagggaatgggagagcggccctagaggtggacggagggcgcgattggagtaaagcggaccctgtgtaggtatagagttgatcaagtggagtcactgcctctgtccctctggtcagcgtgatggccagaggcctgggggcccccactgggtggccgtgggactgctgacctgggcgaccttggggcttctggtggctggctcgggggtcatgacgacctgcacgacgatctgcaagaggacttccatggccacagccaaggcactcacatgaagatttccaccatggccacagccatgcccatggccatggccacaccacgagagcatctggcatggacatacccacgatcacgaccatggacattcacatgaggattacaccatggccatagccatggctactcccatgagagcctctaccacagaggacatggcatgaccatgagcatagccatggaggctatggggagtctggggctccaggcatcaagcagacctggatgctgtcactctctgggcttatgtgagtctccaggggatgggagagagaaggctggttctggattgttgggaaactccacagtacttgaccttgactctccctcaccaggactgggggccacagtgctgatctcagcagctccattttttgtcctcttccttatccccgggagtcgaactctccccggcatcgctctctacttcagatcttgctcagttttgcttccgtgggctcctgggagatgctttcctgcacctcattcctcatgctcttggtaagtaacctcgacttctacctcaaatctaacctatttcgttctttggaggaaaagggttctttctccttatgatccctgacctttcgatattcccccaaatacacactcattgtgtcagatattccctatctggttttccccccttcttccagaacctcattctcaccacactctggagcaacccggcatggacactcccacagtggtgaggaagagacagatggggatgggagttggggtgctgggaaggtccgtctctccctattcctcacctcccgcacttgaggaggaggagtctggaatgacatctcccttaatgtctcaatgcctccattcccaggccagggccccattctgtctgtggactgtgggttctcagtggaattgttgcctttcttgtcgtggagaaatttgtgagacattgaaaggaggacatggtcacagtcatggacatggacacgctcacagtcatacacgtggagtcatggacatggaagacaaggtgagcccaggaacaactttcctgaaagctgacttgccgcctcagaatctcctcatcttatggccctcaggagggagaggacatgttggaagatctgtctccactctgaccaactcttttcttccctcagagcgttctaccaaggagaagcagagccagaggaagaagaaaaggaaacaagaggggttcagaagaggcgaggagggagcacagtaccaaagatgggccagtgagacctcagaacgctgaagaagaaaaaagaggcttaggtaaggccagagttggtgataaatttgggcaagggacatcatcacaaatcacatggaatatgtgtgtgggtaatggcaggtatctgagaaacactaaaggactgggtgtaaagtggtctctgagggaggtgtgagaatagctgaccaagactggaacaagtggtgatggaagcctctgatcatttctcttcttgtcctgtacaagacctgcgtgtgtcggggtacctgaatctggctgctgcttggcacacaacttcactgatggtctggccattggggcttcctttcgagggggccgggactagggatcctgaccacaatgactgtcctgctacatgaagtgccccacgaggtcggagctttgccatcttggtccagtctggctgcagcaaaaagcaggttggtgatgtctgccaaaacagctgcctcaaaccctttatctctcctcactcaccctaaacccaaacagcctcttatagttccaaacaattcatactgtcattgacaagtcctctagaaatgagggggaagaagtttggttactttgtcctttagctcagtatttcttaaactggtctataaaccatctgaatggttagtggagtcttacacacacacgcctactcaatcagaaagtctgtggaaaggacctctatctcttaagatttttcagaaattgtctattctagactgctccctcttctctttttatttgatgtttagtttccaaatccatgtcccctatacctataccccaccagccacttctaaacactgataatctttagctattggtgagtgcctttttctcttttctgcccatcaggcgatcgtctgcaactactgacagcagtaggggcactggcaggcacagcctgtgcccttctcacgaaggaggagcagtgggcagtgaaattgcaggtggtgcaggtcctggctgggtcctgcctttactgcaggtggctttatctacgtagcaacagtgtctgtgttgcccgagctgctgaggaggcatcaccattgcaatcacttctggaggtgctggggctgctggggggagttatcatatggtgctgattgcccaccttgagtgaggggtggataaactacccctgccccaaacctcacccctaactccaggtcaggggtgcgtagaggttgggggccctggccagggacatctgcaaaggaaggaactgtagcctgggagaatggttactttggcattagggccttcaagggctgcagtcttacagaggctggagcggtgagaatgagaggccagagggaccatagtgttgggactgtctgaccatgttgcatttggaaggctaaatggggccatgaagaaggctggaagggcagggggtgatggcagcctacctggtgtcccctaccccacctgttctcggagaaccaagtgctacacaggaagttctccaaggtccagtttcctttctcccaccagttggtggaggctcagggaagaccagagtcctggacagagagggtaacaggaggagtcggggataaacatcaacatcaatcgtgtgtcctgatttgggagtgattggggggatggggtgggagagggttagtggtattctcatggcctgattttttttgtttctattccttttatatcactgtgtttgaacgagggggaggggtggtaaccggaaataaagacctccgatcttccgccccacatgcagttttgtctttttggggggaatggggccccttgtcttctccacacccggggcccctaagcacagtgtcgggccacgccccctcggtgggaggtcggcctgcgctggtggccgcagatggctaaggctggcgggcctttgattggccccggctttgcccttgccacgcccctctgcgctggattggcttagtgctgggattcccacccacccacagcccgccatggcgtctcagctccaaaccgactccgctccgcactggccttggtcacaggttgagggggttctttccccgggcgtttggggtattggagtgaggtcaggggcgtgcccttggagtgcgcggccgctgtgaccttggccccttacccacattttactttctgccctgtgacctctgatccctgccctctcctcccgtgcccggtccggcgtgttctgtcctacctcaggtgcggggagcggcatcggccgagggtcagtgtacgcctggccggagagggggccaccgtagctgcctgcgacctggaccgggagcggcacaggagacggtgcggctgctgggcgggccagggagcaaggaggggccgccccagggaaccatgctgccttccaggctgacgtgtctgaggccagggccgccaggtgcctgcggaacaagtgcaggtgaacgctaggccactttccccctctaaagctctgatattgcctcactgccccggctttttgtggggggtttttgatgcgtaacctccccctcccataggcctgttttctcgcccaccatctgtcgttgtgtcctgtgcgggcatcacccaggatgagtttctctgcacatgtctgaggatgactgggacaaagtcatagctgtcaacctcaaggtggcgattctgaacctgcgacgtttggcccccttagcctggggagggagttggaggagggctgtcacccagctgatcttttctcccttgttaccctttcccgccagggcaccttcctagtcactcggctgcagcacaagccctggtgtccaatggttgtcgtggttccatcatcaacatcagtacatcgtaggaaaggtcaggttgagttggacgaggtcagccagccaagtggtatagagagagaacccctccttgagactcctgactcattccacatctctgactcacctataggtggggacgtggggcagacaaactatgcagcatccaaggctggagtgattgggctgacccagacccagcccgggagcttggacggttggtcagatgcttgagggtgctggggagcacctgggggtctgagggaggtaccagcattcagccctctccagaatcggcagccactctccttcccacgacatgggatccgctgtaactctgtcctcccagggttcattgcaacacccatgacacagaagtgccacagaaagtggtggacaaggtaggaggctgtgggtggagggcagaatcattcgagactcaatctctctgggcttcacagagagagagagagagagagagagagaatactggcacagttcctggcaaacattaaatattcaatgaatgtatgagaaatgaagacaaaaaaggtcacagactcagtcttcaaaaaaatccataaaagaagctttcacccacatgagtatttcttacagattactgaaatgatcccgatgggacacttgggggaccctgagggtgagcactaatgtagtggggtccctgggaagggggcctgaatgaagagatccccaaagtttggggatttctaggggactggtggttggtgtctgtggagaggtttgtggggagggatgtctttggtggagattatggctgttttgggtctatgggagtgagcagaattctgccctctccccaccatctcatagatgtggcagatgtggtcgcattcttggcatctgaagatagtggatacatcaagggacctcagtggaagtcactggtatgaggccagcatggggagggagagggcagagaatagaacccagactatatgagaaagcaagtaaggggagtctggagccactgggaagggcaaggttcccaaggccagggacagaagtgggtaccccctagcccatttgtgtctccacccagcatctgtccaaatgtttctgcccctcccaggaggtcttttcatgtaactgc

SEQ ID NO: 2938 - DNA, 15351 bp, Homo sapiens
caaacctggggtggaggtgggagaaggggattgagagctggaagcacacgggccctgaaacatcctcatagcactccccacccccaagggagcctcagtgccccccagccccatctcacgtccctgctgctcagggtacttctgtttgcagtaggtctccagtgatgcatacacttttcccgcaggacctccacctcactagggttggagaggcccttggcatctgggatggcaggaagagaggaggaagagaaatgaagacaaaccaaatcaggatggccatgcagatgtgagcacaggatgccccttttgggctgcacttgcttgccctttaccagaggcctggcaagggaacagggcccactgggtttgtgggatggatccgtggatgtgggtttttcctcggccagttggagatttccaggttgagggtcttactgagggggatagctgggtaacttaggagtctcgggaagaggaggctccaaggttgccttggccttgagagacaaaggtaatcctcctcttaccggattaaacagaatgattgccctcaggcagccaagctctgtcttgtccatcctcatgtccgcattttggacactagctctgtcagcaccctggagagggacctgcaggtcactcaaagtcacagctcagccagccttggacacggaccagcctatagccccaccccctctatctacagccagcctagccgagggccactgaccgatcaaagatggctcctactcctgctgaatgggtgagttgcggtgcacgtgaagacctgtggcaaggaggatgccatctcgaacatcaatggtcggtgtgagaaggaggcaatgaggagttcattccagcctgggtggggcagcaagggtcggagccagaaatcaggccaagggattcaaagcacatcagtggaagagaaggagaaaagagtggcgaggtcagcaagtttggctccctgggtacgcaaggtaaggccactggggtcactaagatcgggaagtcaaagaggggtcaaatgtcaagaagtcaaagggatccaaggtcactacctgcccgcagcaatatgacctgatcatccagaggcaaggaggaaaagtgtgggatcccttcgcccactcaacaagcgtgaatagctgtttgtcagctgcctgacagatgttagtcaagggtcatttggctgcaggggacgggggtaagagttatggaagattttgagatatgctggagcccccttgtaagaggcttttgacaccccctccttacatatagtcttcctgtgagcccatccaaaccaatccctgtaagtgagtcttctcttctggcattagtgcaaacaattattatttgggacatgcctatggttctgccagtgggttgtttggggagtggagacagaaggagtatcacatccacctcagatgtttgaaagaccttgtttggcagcacctccagtcccaagtgtgttaggaaggttatgaggggaaaggagggggaggggatgtagaacagacctagactgctcccccaacccccatcacgaaggagagtggattgaccccaacactcacgctgctgccgtacccccggttcccccaggaccctcaacgccctggtcactcttctgttccacagcaagcctgcctccaggatcctgtccacaggcatctcctcgggggctcccccagccccctccccaccccatccttgtcctttccccgctgacgctcctcctgtaccgctgcagggggaaggggggagaaaaaatggaaagtcagcagccagccatgaaggggttccacaaatatccttacggctcatcaggatctcatggcccttgggagatatttataggaattggggaagtcactagaaaggtggactgggggcagccctgaaggaagggttataaaagggcaggtaagtcagtcgggagggtgaggtaggtaaaagaattagggaggaatttaaatggagagcctactacatggttaaaaaaacatgccaagattcaacctgagaaagctgattgaaaaaaaaaatttttttaaataaatatgccaagaaacatgctaagcacattttaccattcactcaattatcataatgatgtggaagcatttattctcatttttaagatgaagaactcggggttcaaagagattagtttgttaaattcatataatacatggcaggtcatacaactgactctaagtgtgtctgagtgcaatcttgtgctcttctgactcaacaaataggcagtgaaaggagcactggcctaggtctttgagatgtgggttctgatcccaaacctgcctgccactcctttgttgcatgaccttgggaaaccaagcctcaggctcatcttctctaaagtgggtgttttgaccaagatatgctctaaagttctctcagaatcctaggaatctgacttaagaagataagatggagacacagaagaaggaaggaagccctgaggtcttcagtaaagtctgtaagcttaagagtgcccagtcccaggagttgaggaaagatcacagataacaggagacagagaccagagaaggtccatggaatcagaggagaaccactcaggttagaaatggggagacagcccatcatggctaaggaaaagttatcctacctaggatcagtctagggaggggtcatatgtgcaggccacagaggcctaaccattaagaggaaactcaagggccagaacagggtaacagggaggagagctgcgaagggagagagaaataaatatcgccctctagaggagagagagcagtccacccttccagagaggtacacagtctggtgggataagggagaagggcatgtggtctaagacgcctgggcagggcgggtccttacccccctcttcatgccagtggccaggcacttctgatagcggcagtactgacagcggttccgcggcgcttgtccactgtgcagtctttgttgtcccggcaagagtatgtaaggtctttgcggtggtgcgtttgaagaagcccttgcaaccctcacagctgtaaaccccgtagtgtttgcctcagggaaaggggaggagcaataagaaggttgcatggagacaccttcaccatttagtctgttccaatctccccctagcaaaacttaaagtcctccctgtttgccaaatacagagataggaaccaggagctgagtgatgatccagtcccagtctcctcactgttcagaaaccctacacgtgcttccttttccctctgaccttccccccaatcgcgtcctacatctcagcttcagcttcttactcccatcaggcctcccccaggtcacttgctctgaccaaactccataagccctgggatcccacaggtgatgatacatggcccagactctccctctctgttcatcctctgagccactacctgagcttctgtccccgcagattgcacatagccgtttgccagccccagggccacctgagggggtggacagtgcaggccccggacccctaagactggtggcttcacatcttcagggggccagacccacccccagggagtgacactgttgagttaatctgggatgggggaaataggaagtcacaggaagacttattgggaagcagaatgtcacagaagtgatggaaatcattcccaccactaagcaaggccctgcaatgcacattccagaggctgtcatttacactgcagtctagtgaaaggccatccctggagcacaaccccaaagtgaataaacaggccccccctgaaatttgcaacacagtgaccctgaagggcaggtgtcttgggaaagcagatgggatcaaaagggcgaaaatcagatagatgaaaaggacatcaagaatatcagaattagccgggcgtggtggtagcacctgtaatcccagctactcaggaggctgaggcaggagaattgcttgaacccaggagcagaggttgcagtgagctgagattgtgccactgcactccagcctgggcaacagagcaagctccatctcaaaaaaaaaaaaaaaaaaaaacacacacacacacacaaaaacaaagaatatagagttcttttaggggaggaagcatgcactgaaagatcagtcacctcaggaaaggcaagggtctcataaagaccacaggcctgacaaggttagaggattggaaggtcaatgggccatgggaagttcacacaaggatctggggttacaaggaaaacaagaaaatgaaagtggccaggagtaagttggtcacaacctctcacctgggggctgctgacaggcccggagaatcctggggagctggagggggcagaccaggggaccccatggaagaactgatgactggaaagggagagccagtgggggtggtggcatcgggggtgggggtggggccccagagcctccaagggatggagtgttgaagggggtaggggtggcccaggaggagaagggggagggactccctggggaagggatttggggaggagctgtctgggcttcgggagtctgagggaggggtatgtacaggcacacgacacacaagagacagaagagacaaaaaaagaaaatgagtcttcaaacatccaactagaactttaattctctaataccccaccgtgccggacccagcccactccacccatccccaagtcagagacaccctgctgtcaaacaacagtgtaactccggctggtccgatggtagtgggtttcagaacttattaacatttgtgtcactaaaattggtatacaacctcccactgctatattgactggctaaaaaaacccaaaaacagcgtaactcctcattgtggtgagaggagggagttacaaggagaggaggatagttcaggtgaggaaaattttccaaccaatccatttgaatgaaaccaggtcatcccaaagccacacctgtctcgtgggtggggcagcacgtggggtagaccacgagcccctctattcccagcgtaaagccaggtagccagagcgtgcaagggaaagagacagcaggagagacccctcctaagacgcaggatctgcctgtaaacgcccaaagtcctgaggttaagaggaatcgtgcccttcccaggcccgcgacctccggtgcccaaggcctcaagcggtacagctaggagggcggaagctccccttccccgccccgccccgggggggagggtgctaagccctcgggagggaggggacgcgtgtttacaaacaagggggcgggagcgcaaggaaaagacaccgggggagggtgtgggggaggggtcgcagataaagcggtcactggctcgcctgccctctgctggggcactcaccccgcccgctgtcgcccatcccgtcccgtccagcctcccctgctccggctccggggtttgttgttctccgcctgccaccgccgccgccgccgccgctgcggatccagccagggccgtcgccgccgccaccgggacgcgaccccacaatgcatttcttttccacccccaccggcccacactgccctgcggcatgccgctgagggaggaagggcgggcgagggcccaagacatgatccctggctgagagtagggataccgaagaggtcccagggattcccaggattgatcggaggattagctgagcacgaggaagcccctgagagaaagactctggcctgattgggtcgaattaagcccgtcgctctgctcagtaccaaaatgacagcgccaatgtggagccatctttgtacagacgggaagtctcggcgcgagttcccgccccctcgtctagttggaaccgaggaggcggtctcctccggcctgttagcccgcctcgcccaccctcccctcaaatacctccacactcgcgcatgcgtgtcagtgcaggatggattcgtcgctaccggagtgccgcatattggtaaaggcattagggcgaaggtggaacggaacttcctgttctcgcgggatctaaggcgggactgccacgtccaagcaaaccgggaaaggagaggatcccggagccggtgagattctctgttttttctctaccatcctttccaggccttttcctcacctaatgagtcgtaggacgagggcccagagagtctgtaaagtggctggtgaaagattagtgtcccagggccctaatccgggaggtggttcgggataaagagaactagtcttgggaacaatgtaggtgggaactaagggaatgggagagcggcccatagaggtggacggagggcgcgattggagtaaagcggacctgtgtaggtatagagttgagtcaagtggagtcactgcctctgtccctctggtcagcggatggccagaggcctgggggccccccactgggtggccgtgggactgctgacctgggcgacttggggcttctggtggctggactcgggggtcatgacgacctgcacgacgatctgcaagggacttccatggccacagccacaggcactcacatgaagatttccaccatggccacagcctgcccatggccatggccacactcacgagagcatctggcatggacatacccacgatcacgccatggacattcacatgaggatttacaccatggccatagccatggctactcccatgagacctctaccacagaggacatggacatgaccatgagcatagccatggaggctatggggagttggggctccaggcatcaagcaggacctggatgctgtcactctctgggcttatgtgagtcccaggggatgggagagagaagggctggttctggattgttgggaaactccacagtacttgccttgactctccctcaccaggcactgggggccacagtgctgatctcagcagctccatttttgtcctcttccttatccccgtggagtcgaactctccccggcatcgctctctacttcagtcttgctcagttttgcttccggtgggctcctgggagatgctttcctgcacctcattcctatgctcttggtaagtaacctctgacttctacctcaaatctaacctatttcgttctttggggaaaagggttctttctcctttatgatccctgacctttcgatattcccccaaatacacatcattgtgtcagatattccctcatctggttttccccccttcttccagaacctcattctcccacactctggagcaacccggacatggacactcccacagtggtgaggaagagacagatgggatgggagttggggtgctggggaaggtccgtctctccctattcctcacctcccgcactgaggaggaggagtctggaatgcacatctcccttaatgtctcaatgcctccattcccaggcagggccccattctgtctgtgggactgtgggttctcagtggaattgttgcctttcttgtgtggagaaatttgtgagacatgtgaaaggaggacatggtcacagtcatggacatggacagctcacagtcatacacgtggaagtcatggacatggaagacaaggtgagcccaggaacaatttcctgaaagctgacttgcctgcctcagaatctcctcatcttatggccctcaggaggggaggacatgttggaagatctgttctccactctgaccaactcttttcttccctcagagcgtctaccaaggagaagcagagctcagaggaagaagaaaaggaaacaagaggggttcagaaaggcgaggagggagcacagtacccaaagatgggccagtgagacctcagaacgctgaagagaaaaaagaggcttaggtaagggccagagttggtgataaatttgggcaagggacatcatacaaatcacatggaatatgtgctgtgggtaatggcaggtatctgagaaacactaaaggatgggtgtaaagtggtctctgaggggaggtgtgagaatagctgaccaagactggaacaagggtgatggaagcctctgatcattttctcttcttgtcctgtacaagacctgcgtgtgtcgggtacctgaatctggctgctgacttggcacacaacttcactgatggtctggccattgggcttcctttcgagggggccggggactagggatcctgaccacaatgactgtcctgctacataagtgccccacgaggtcggagactttgccatcttggtccagtctggctgcagcaaaaagaggttggtgatgtctgccaaacacagctgcctcaaaccctttatctctcctcactcacctaaacccaaacagcctcttattagttccaaacaattcatactgtcattgacaagtcctcagaaatgagggggaagaagttctggttactttgtcctttagctcagtatttcttaaactgtctataaaccatctgaatggtttagtggagtcttacacacacacgcctactcaatcagaagtctgtggaaaggacctctgatctcttaagatttttcagaaattgtctattctagacgctccctcttctctttttattttgatgtttagtttccaaatccatgtcccctatacctaaccccaccagccacttctaaaccactgataatctttagctattggtgagtgcctttttccttttctgcccatcaggcgatgcgtctgcaactactgacagcagtaggggcactggcagcacagcctgtgcccttctcactgaaggaggagcagtgggcagtgaaattgcaggtggtgaggtcctggctgggtcctgccatttactgcaggtggctttatctacgtagcaacagtgttgtgttgcccgagctgctgagggaggcatcaccattgcaatcacttctggaggtgctgggctgctggggggagttatcatgatggtgctgattgcccaccttgagtgaggggtggataactacccctgccccaaacctctacccctaactccaggtcaggggtgcgtagaggttggggccctggccagggacatctgccaaaggaaggaactgtagcctgggagaatggttactttgcattagggccttcaagggctggcagtcttacagaggctggagcggtgagaatgagaggcagagggaccatagtgttgggcactgtctgaccatgttgcatttggaaggctaaatgggccatgaagaaggctggaagggacagggggtgatggcagcctacctggtgtcccctacccacctgttctcggagaaccaagttgctacacaggaagttctccaaggtccagtttccttttcccaccagttggtggaggcttcagggaagaccagagtcctggacagagagggtaacagaggagtcggggataaacatcaaacatcaatcgtgtgtcctgatttgggagtgattgggggatggggtgggagagggttagttggtattctcatggcctgattttttttgtttctattcttttatatcactgtgtttgaatcgagggggaggggtggtaaccggaaataaagacctccatcttccgccccacatgcagtctttgtctttttggggggaatggggccccttgtcttctcacacccggggcccctaagcagcagtgtcgggccacgccccctcggtgggaggtcggccgcgctggtggccgcagatggcctaaggctggcgggcctttgattggccccggctttgccttgccacgcccctctgcgctgggattggcttagtgctgggattcccacccacccacagccgccatggcgtctcagctccagaaccgactccgctccgcactggccttggtcacaggttagggggttctttccccgggcggtttggggtattggagtgaggtcaggggcgtgcccttgagtgcgcggccgctgtgacctctggccccttacccacattttactttctgccctgtgactctgatccctgccctctcctccccgtgcccggtccggcgtgttctgtcctacctcaggtcggggagcggcatcggccgagcggtcagtgtacgcctggccggagagggggccaccgtactgcctgcgacctggaccgggcagcggcacaggagacggtgcggctgctgggcgggccaggagcaaggaggggccgccccgagggaaccatgctgccttccaggctgacgtgtctgagccagggccgccaggtgcctgctggaacaagtgcaggtgaacgctaggccactttcccccctaaagctctgatattgcctccactgccccggctttttgtggggggtttttgatgcgtacctccccctcccataggcctgcttttctcgcccaccatctgtcgttgtgtcctgtgcggcatcacccaggatgagtttctgctgcacatgtctgaggatgactgggacaaagtcatagtgtcaacctcaaggtggcgatctctgaacctgcgacgtttggcccccttagcctggggaggagttggaggagggctgtcaccccagctgatcttttctcccttgttaccctttcccgcagggcaccttcctagtcactcaggctgcagcacaagccctggtgtccaatggttgtcgtgttccatcatcaacatcagtagcatcgtaggaaaggtcaggttgagttggacgaggtcaccagccaagtggtatagagaggagaacccctccttgagactcctgactcattccacatcctgactcacctataggtggggaacgtggggcagacaaactatgcagcatccaaggctgggtgattgggctgacccagaccgcagcccgggagcttggacggttggtcagatgcttgaggtgctggggagcacctggggggtctgagggaggtaccagcattcagccctctccagaatggcagccactctccttcccacagacatgggatccgctgtaactctgtcctcccagggttattgcaacacccatgacacagaaagtgccacagaaagtggtggacaaggtaggaggctggggtggagggcagaatcattcagagactcaatctctctgggcttcacagagagagagaggagagagagagagaatactgggcacagttcctggcaaacattaaatattcaatgaatgttgagaaatgaagacaaaaaagggtcacagactcagtcttcaaaaaaatccataaaagaactttcacccacatgagtatttccttacagattactgaaatgatcccgatgggacacttggggaccctgagggtgagcactgaatgtagtggggtccctgggaagggggcctgaatgaaagatccccaaagtttggggattttctaggggactggtggttggtgtctgtggagaggttgtggggagggatgtctttggtgggagattatggctgttttgggtctatgggagtgagcaaattctgccctctccccaccattctcatagatgtggcagatgtggtcgcattcttggcactgaagatagtggatacatcacagggacctcagtggaagtcactggtatgaggccagcaggggagggagagggcagagaagtagaacccagactatatgagaaagcaagtaaggggagctggagccactgggaagggcagaggttcccaaggccagggacagaagtgggtaccccctgcccatttgtgtctccacccatgcatctgtccaaatgtttctgcccctcccaggaggtctttcatgtaactgcctcaaggaccctggactctgctcacccccccaccactctgcctggctcctgctgatgaggactctaagttcccaggatacaaaaggggtggcagtgtatggttcggaatgctgaatatgggaagcaggggtgcttgtgaccctaataaattccaagtcctcttcctgccacctccggctcttcttgtgtccaagccctcagacccttccccacctccccctctttccctttcccgaaggattgttccctttctctgcctggtctcccagggcaacccccgcgccgggtgtgagaggaaagagtatgtgtcactgtgtatgcgtgacactccgggtcttttgaagggaggggttcgtgcgtcacccctttccactggttctgcagcaccagtcccctcccccaactccctgggttcttatggtccccaagggtgatttgttcatggccccatcttggtgccagtctggccttgaaagggggtcttggaacaggtggccctcccccacccctctccttttctgagtccccccctcccctttctctccaccttacaatagctgcagccggcctggggtcgatgggggggattaggggagggggccaggattaggggaatgaaccagccgatgaaagggctggagagagcaggagggagggggctgggaagaggaggagaaggggagggggtctgcgcaatcgactctggcgcccacataaggactggccacggactgaaggagaggacagggaagtggggggaactggggtggggggcgagggcacccactgctgccttgtcccagggacaggccccccctggcagccgcagcccaagtccgggagcctcagctcgggcggggacaagatgccctcagggtctctaactgccccccaccccctcgccctgtatccctctcattccctacactcatggggatcgctctgccccttcctcttctctttcctccccatccccttcgtttactctaagtcctcgaagaggcttctgcccacttcccactccagacattctgcccctgtgtacccccccacacgcgcacccccccttcccaatgggagctccatcttgtgtatgtccctgtttcccgtggtgtctctattccccctttcctcccgtgcgcctccctcccttccccgccccgggcgcggctcctgattgtccaaacgcaattctcgagtctatggctccggccgagagttgagttggacgtcccgagccgccgcccccaaacctcgagcgggagagcgggtcggagggtctaggagagccaaagcagagggtggagggagtccccagggtggtaaggggaatcccgggcacacgggacctaggtgtgttctcaggactagaaggctaaagcggcagatcttttgcagcctttcccccgggatcctggaatgggggttacggagaagtgaggggggttgatccccagagtcccagggtacgcagagtgggggaggtagcccttttcacgagccctctgtcccctcctgggtcccagatattccaggccccggccccccggagctgaggccccgcgtgggggcctctggagggaaccgaggctaaggttgttggccgcgcgacggtgctgggccgggggcggagaccgtgttccctaagtggcgcagaactcccgggacgcaggatcctcacgcgggacgagcccgtccgtgggcgggagaaccgcggcgtccacgtcccgtcccacccgcgccgcgaatggtgggtacgtctccgccggcggggggagcgggtgtagcggaggagcaggcggaagtgacgtagggcccagcgcccgggccatggcggcggcggtggcgggagctgctgtctgagcagcggttgcgaccgagcgaacttggcccaggagcccgggcctagggagaggcgcggcggcggcgggaggcgaacggctggagctgggtgaggggcagtgccggcgcgggggcgggagcgggggcggaaggggcgcttctggaggggcggggtctacgcgaggggcggcccccctgacgccctcctcccttccccccacccccagccttcttcgccttctcctcggctgtggagccctggtgggggtctgcgcccggtcaccatgacgacgccggcgaatgcccagaatgccagcaaaacgtgggactgagtctgtatgagctgcaccggaccccgcaggtgacaggcattctccctttcaggctaccccctcccccaaacccttatatccacagaccgcatcacacagcttcttttccgtaattgctctattctgccttgcctggccctacctttgaatcaccttaatctttccaaagcacttcgcatttagctcatttaatcctcaaaacagccctgccagagaggtggaacaagtattttatcttcatttgaaagatcacaaacacaaaaattaccttccctgttcctcattcagtgcataagtcagtgcacataagactcactttgggagtttattaaaagcagagcttcatgcccccaacattctgattcagtagtgaattgggttctcagaatctgaatttttaacaggcacctatggggttctaatacaggtagcaccaggactttaaaaaattttgttgaatagtttttccaaccacagatttgtgccatcttcactcctaggccacttagccacctcagatcctcctttccaaagctcctactcttagttaatggacactaaagtctgtcttttctccatttgctcaagtcatcagtccttctctttctcagaattcttgtctcctatagagaccaacatgggtctctcactgtatttctcaaaattcttattttatgggctgctgtttctaaaacccctttcctctaacccacaccacctttctactcactgatgccttcaggaagccataatggatggcacgagattgctgtttcccctcggtcactgcattcagaactcatgtgccctatctgcctggaatgctgaagaatacgatgaccaccaaggagtgcctccacagattctgctctgactgcatgtcacagccctacggagcgggtaataggagagacatgtttgagatgagatgaaggggtaaaagttagggccctctcactggtcttggttcagcctaggcttcagttcccttgactgacactcagggcttcccttctcctaccccaggaacaaggagtgtcctacctgccgaaagaagtggtgtccaagcgatccctacggccagaccccaactttgatgccctgatctctaagatcatcctagccgggaggaatacgaggcccatcaagaccgagtgcttatccgcctgagccgctgcacaaccagcaggcattgagctccagcattgaggaggggctacgcatgcaggccatgacaggtgtgagggtcaggagagaagcagaactgatgggatgggtccgtgggtcagtcctgttgcctgctagcttctaagcctcagcatcctaggagctgaccacagactgatcattaggctggaaatcatgggtgtaaattgcagtttcttagtaaacaactggccctgctcttcttagaaaaatatagggctgggcacagtgactcacatctgtaatcccagcactttgggaggtaggatgggaggatcacttgagcccaggagtttgagaccaccttgaataacatagggaaactcatctctac

SEQ ID NO: 2939 - DNA, 12599 bp, Homo sapiens
tgtctttggagcatttttggcatttccttcaggaaactggaggttgtgacctaaggtttcttagtgaacacatttctgtttcccacagttaaccttacccagaaatgacatctactctttaggtgaggtttatcttcatgtcccaactgtgtcctgtgcatatacaatgacacttgaagcacaaattctgaaagtagcgaaaagattagagagcccaacatgccaaaacactttaacccccaaaagatgacaataatcaaaaacaagaattaactattacaataagtctgtgatgttgcaaagtgccttcattttgtagttggaaaaattaatgactgagaatattaatgctttagatactatgaattgaaggttttcagataaaagtgttatgctactcagcccacattttaagctagctgcttcactgatactgtatacttctatgtggttcagaagataggctgggagagccaagacagtgtcctgaaaaaaaaaaaaaaaaaacacatgatttaatacccatatccaatccccacttccccaacatgttggtgaaaggccaagaatgtatgcttttttgatgggtttgaatgatgattgagtctcatcatttaaactagatttacaaccacatttttgtgtataattctttaaaagcccatatttgatgacagaattattgcatttaatttatttggcttaaatcagtttaaaactcaaacaattctacttactagccaatgtggtattcagaaggttggtggttttatctcattctttactactcttcagtgttaacttattgaagtttctcttcctgaaaagatagagtggtttctaaacaaaccacacttttttcacaccctagttaaggtaaaaatctttaaagaataatagaaatttgtccttcactttgattccaaagagctacacaatccagtgatgactcaataattatttttaagaatgctcttcacaaagggatctttaaaaaaatcagttattaatgtttaaaagttgataaagctatgtgcaaaatgatccacaaaagtcagaaactattaaatactattctttttaaaaaaacaagacatctctcggtttaattgcactgaaaacatactaaagagacagtaatatatttttattctttgtaatatttatacatatcttcaatactatctaatgaatagctggactgaaaagtttctggcgttccctaccagttaaagtaatcttttaagggcacaagagggtggtattttcttaagaaatacacattcaatggtgttaaccgggttagaaaaatccaataaaatgacttctgctgaaacaaatacattcaaaaatcaagaaagtacttttaacacaacaaaatacaaccatgttgttgcttgaaatgaatcacacaacttctgaaataaacatcaacaaaagtgccaaagacagatgtcatatttgttagactcattgctaagaaatctcccttggtttgcaaaagttaatccattcggttttcactttgttttgctgtctgtttctcctaggacaccaaggatcctggctaatatcatttagataaagtgggctccttatgcagatttcggcttcaatggatatgaaatggtaacacatttcattgaaaagatttttttaaagaaatcaaagtgacttcaaccaaattccaaaaaacggatcccgcttacatgaaactttggcctcagcgaaggacattgttttacacctccaaaccatcttcatcttccccagcctacgtactcaacatagcctatttgctatagatgatcgatcattccacaaccccactctgataactctcaggtagttaaagtataaagtaaaagaacgttgaggaggggtatgagggaagggagggtggggtgtgggatgtacagggcatccctaaagaagcagaagtgcacaactcacttgggtttgaaactaaagtgaaggaaaacatctcctcaaagctccagacaaaggacgctttcacatggggacattagtctttgaggaggggccaaatgaaccctttaggagctgacaatgctagacctttggctcagtgcaaaatcaaagctccaggggggtagaaaatatttccaggccgggacctgatctccacccttcccagtgcattgttcacaggaactaactctcccaccaacacccgacaccaccaggctgttcgtattctcccccttcctccctctggcttcagcagctcctccctggcagcagtcgaagcccagagatttttttccaaacactggggtgccagcgaccaagtaaagagcgcttccggtgggtggacagcttccagttctaggaagaaggttgacgtttccagaagacataatggtctctgggttgtccccttcgtctttctgggggtggaggaattgtccgatttgctgcggctgaattccatgccggcgatgatgggtcgcttgatttgccagcagagtctccgctcgggcacttgcagcaggacatgatccggatgaaggcccacgcatctccttgttggtcagagtgtaaatgatggggttggtgccggagttgagcacagtaacaccaggaagtactccgctctgaagaggatgtcacaggtcttcaccttgcagcccaatccagcaggagcaggatgaagagcggtgcccagcaggcgatgaagacgctcaggacgaaattacggtcttgagcagcgccagcgacttctcagagctgcggctggccttggaaatgtcttgcggaacgtcaggcggcggctccgagtcctgaccaaggagtagattctgcagtacaaatgacgatggagagcagaagcagagtgaagaccgtggtgcagaagaggatatagtgctgtggtagagcggcagcacggtggagcagctggacagcgcactgatgcagttccagcccagataggcaggccacccaggatgagggagatgacccagcaggcgctgattagcaggaagagcggaagttattgctcccgttgtggagtttcattttcagcattgtgatatagcgctcaaggcgatggcgaggagactgaacacggaggctgacagggccacaaacatactcccttccccagaaaccactgggcgggagtgagcttgtaggtggtggccccagacaagagcaggttagtgtgtaggctactcctgccaacaggtctgagagggccagattgccaataaaatagtacagggtcggtggaatttcttggttttccaaatggtcagcaagacaaagatgttctccaggagataaagcagcagatgagaatgaacaccaccgaggtcagtttaatgctgttctccttgtcgcgctgatattcagctttcccgtgtagttgtaatgccggacgatgatatcatagttgagtagtcagagaccgagctgcggtgggccttgaccagcgggacgctggtgggccccatgggccaaccctgtgtccccaggaagccggggtggcgctactccggacgaacgctagagggcaggcgagagagccttcactggcttcaggggtggttcgatgagtgatccaggctttttgttagcttttccttggctggagagggcctcggaaaccgcagccttaaacaagtcagaggaggagtcagggaaagagccacagcatactggcataattcattctagctaaggcactgctccattgtgttgttgttgatttgttttaaagaaacttggggagagctcagggagagagatttttttaaaaatcaaattatcttttttcttccttttttttcttttttcaaaaaaggaagaggggaagaaaaagagagggagaaactctatggccacattcactcaaagggaaatgggaatacgatgttggctgtgggttgacaaaaaaaaaaagatgatgaaaaggaaaacaaggagtggaggaatgggaaacctagagaactacaccccattttaactccactcctgccctctcaccccccacaccccctcacccccggatttccagccatgagattctctgaagcagtcaccagctagctgcacgctcaataccagcccacgtctctcctcggaaaagactcaactgccagtctagggcgaagacacacacctctgtcccccatgcccacccccagccccccagttcaaagatctagcaccacctcctaattgccatgtgccatgcaagaaatcagatttgcaggaaaatcattgaaagcgtaagccatttgggggctctattaataactctctaggagcaggtgtgcttaggtccgagggcgcagtgaggtgtgggcagccaggcccgccccgccttgctgtaaacaggaagcttagcgcctccgtgaagcgactgccttttctttcttcttcttattctccccgcctcccccgcgcccccccaccccaccccccaccccaagccagggcaagtaaatttaaaggtatcagttaaaaccattcataacagattgcagcaaatcccagaagtttcgtacattagttgttgcataaatattttttgctttgtttagtttagccaaaacatacacaaaagagagaaataaactactcatgacagccataatacatgctaccacatttctaatttcgattgcaaaactctcttcagaaactcacattaaactgctccctggtgcattgctaaatttgcgtgggcagtttatttactgcagtcccccaacacgttgactcctctcctaggactagaaagttacaaagaactttctaagacggcactggtcagcagaagtctacttctaagttgcttaaatatttcaggtaatgcagcaatgcaataaaatgaggtaatagagatgagaacaatcccagcaactcccgaacagcagaggctgctcaagccaagaagctccgcattttcccccaactaatgttatacctgctcctgggcagtactaatttaagccattacccacgctccacaccacccaccatatctttgtctataggatttccaaaatttaacgccttccctcctattcctccgaccaactgcattttcactgcccctacacccgtaggttccacagttgggaattaaccttttttctgaacccataaatcacaagtgcccaagaacaatctgatcgagatgggctccttagtagcccagaatgcaaattttcagcgcccggagatgcatgttttctaagtttttgtttgcctcgttcgattaaaaattcgtttctgacacctaagccctaccacaaccgggctccccgcgcccgcgaccccgccattcgccgccccctacctcgctcaagcagggcgaagttgcgttcggagagcccggatctgtacggctcgcttcgcatcttgctgctgcccccgactgactgcgtagtgctctgcaaacttactcgagtcggggtcccctccctccgcagcggagcactccaatggccagtccgctcgccgcggccagttccctgcctgctacgcgaagtcacccagcgccgcgccaaggcgggtggtttcttcaggaagaggctgggaggggttaatgccttaaccccccacgccctcttcagctgggggcccccggatctgaactgctgagacgcactgtccaggaaagatctggggagaagcaaaaaaaaaaaaaaaaaaaaaaaaaagaacccctcctccccaaacaacaaatgaagaaaaaaagagagagagagaaggggcggagcccggtaacccctggattctactgtataatcactgccctcgcccagatagacgctgatccctggctgtggagaggattctcccgagccctgaaaaaaaaaaaaggtggagagactttgaaaacttttctctcgaaaagtctgaggggcagaggacggcccggagtctcgtagcgcaccgccctggtcccacaccccccgcagcctaggaggatcggtgtgctgagcttgtggccaggagctccccgagccactttcgcgcgagagcagaaaacctgagccgcggcccggcgagtgtcggcggcgctctggggaggagaggctggaaggggctgcgagaggtacggaggagacaagcagcccgggagggagaatgaaccgggggttcctgtactccccccgccaccccagatcctcgtgctactcgcaactgcggtctgagggcagtggctttcccagagtgcacagagaaatgaaccagcgccggttttggtgttgggcaggggtttccctcagctgagcacaaagtcaggctgtgtgtcccagattctggccaatgggaggtcgttgagggggtgggctgctgctgagtcctgagagattcaaaacgcctgggcagtcaggaatttccaaagggggagattctcggccaggagctgcggagcaactgcagctgccagcaggagccggcacccttctctcacattctgcttgggagtcgactcagaggcctcaaactcattactagcactttgcccacccttttcttttgcttagatgctacttaagaacgtgagctgagaggcggacttggtcagatctgcctgcgtgacaagctcaggacaggacgcttctcccttgcattactgttgtaaaagtttccacccagtccctggtcgcactgcgttcccatccggcagatgtgaactcaaaaacttcctccgctgtgcagtttcaattggcagacacacccgtacctgaatgactcagaaggaggcagaatgaacaaacaacagacccctgacttctgggttttgtgagtttgccaaaaaaaaaaaaaaaagaagtgacagttaattcacagctgttttaagcattcatcgacagcgacgcacccaatacatacccacagcttcaacaacagtacagtcatataatgtggaaaccaagataacggtcctctaagactccagagtagatcctaattggtttgaagacttatttcacttaaaggggaagaggtatattgtgtctacccagcacaacaaacgggggacttggcattcccccccttctcccgcctccacccacactaatttatgcattcttaaagccaaaggaatcaaagtgaaatttcacacctagtctgtatcaagcatgtgctagttaatttaaccttactgctctgtgaagtaagtaagcattgctggccattttattgttgaagaagtgtcattcagacaactaaggtgacttgtagatttcccagctagtgagtggcagactgggttccaaaacctaaatattgcaaatgccttgccttgtggctcaaacgctatcagtaataaatagttaaggaattgaaatatatgttcctagagggaaacagacttctagatttaagttttacatttgctgcatttctgactgtacaagtctacaaaatgcatataaaagtatgtaatgaatgtccttttaaaaccactcattttctacgtaagcatacaaagtgtatacatagcatattaatgaatgttttctgaaacttctcattgtctgcctatgatatctcatgtaacttgtacttttagtatttgcacatagtgttacacatattaatccatttaatctgacaagtaggcactataattattctaattttacaaacaaggaaattgactcccagacatattaagcgcttgcttaatgtgggacaggctgcagactcttaaccactactccagaccaccatgataacctcaaacaggttcaagaatttccttggggatatcagttgttttcttgtgaataccacggtttttaacattcaatattgataaagtgttttacagagtccaaaaacctttcagattgtatttaataatattcatctttagtacacacctatgagatgtaattgtagatgatcaactaggtaaaattagatagtaggcaaatgtttccagcaatggcgtcctggccaattccaagttctagttcccatataagtctcttcccattgctctccaaggaggccctaaaaattgcatttcaagctatctcctgactgccagtacaactccctgtctgctgctgcctagaagtcaagccaacattcctaccttaagtttgctccatttccaatttttgatttcaaagtggctttgttttctttacacatgctttagtgtttctctttaaaagtttacagataaaataccacacaattttggagcatacactaaacaaaaatttgtcataaatgtgccattcaaatgtaactgtgtagctatcttttttttttttttttttttttgagacagaatctcactctattgcccaggctgagtccagtggcgtgatctcagctcaccgcaacctccgcctcccaggttcaagcaattccctacctcagcctcctgaatagctgggattacaggcatgcaccaccacacccagctagtttgtatttttagtagagatggggtttcaccatgttgtccaggctggtctcgaactcctgcttcaggcgatccacctgccttggcctcccaaggtgctgggattacaagcatgagccacgagcccagccatgagctatattttttatctgctaaatattgcaactctactcttttcccttcctttttttttttctttttttcaactgagacagggtctggctctgctctgtcatccagctggagtgcagtggcgaaatcatagctcactgcagccttgatctcccgccctcaaaggtccgcctacttcagcctcccaagcagctgggactacaggcaccagtcaccatgtcctgaaattattatttttattttttgtatagacaggagtctcactttgttgcccagggtgatctgaactcctgcgctcaagcagtcctcccaccttggactctcaaagtgctgggattacaagctgagccttactctctttcctaattgctccagtcactttccaactcccttttctcccctttccctcccctgacccagtcactggtaaaaatccaggctttcccttacttgtctattcaaggagaataactagcctcttatttcaaggaggaaatagtatgaccatctcaatttccctctctccaagctccagcttaatagcaactttacccacccttacctccttcccacctgtttagaaataaaagcaactttactcctttccaaggcaaactcttgcccaggtcagcatgctgttcctccaaactttctgagacttggctcaattattcttattctcccttgtactttcagtcttagcttctgaggactctttactttcaacttacataaatgtttatgtgttttctctacaaaaactctttcttcccttcatcctaggtcccaatatctctctctcctcgtttgccaacttcaaaattagtggaacatgactgagccttggaacagacacttaggttcagccttgatatgccagttctaagctatgtgactttaggcaagttcttttaacttccttgaacctcagtgcctcatctgtaaaatgaaataatgatatttgcctctttcattgtgaggattaaggagctcatacctgtgagaattccctacactacagagaaaatgcttcacccatccaccacctccacttttattattattattattattattattattattttactttaagttctggggcacatggcagaatgtgcaggtttgttacataggtatacacgtgccatggtggtttgctgcacccgcaatccgtcacctacattaggtatttctcctaatgctatctctcccctagccccccaccccaacaggctccagtgtgtgatgttcccctccctgtgtccatgtgttctcattgttcaaacccacttatgagtgagaacatgcagtgtttggttttctgttgttgtgttagtttgctggaatgatgatttccagcttcatccatgtccctgcaaaggacatgaactcatcctttatttgcctgcatagtattccatggtgtatatgtgccacagtttccttttccagtccatcattgtggacatttgggttggttccaagtctttgctattgtgaatagtgccacaataaacatagtgtgcatgtgtctttatagtagaatgatttataatcctttgggtatatacccagtaaggaattgctgggtcaaatggtatttctagttctagatccttgaggaatcgccacactgtctccacaatgttgaactaatttatactcccaccaacagtgtaaaagcgttcctatttctcacatcctcttcagcatctgttgtttcctgactttttaatgatcaccattctaactggcagagatggtatctcattgcggttttgatttgcatttctctaatgaccagtgattatgaggtttttcatatgtttgttggctgcatgaatgttgtcttttgagaagtgtctgttcatatctttgcccactttttgatagggttgtttggttttttcttgtaaatttgtttaagttcttttagattctggatattaaccctttgtcagatgcatagattgcaaaatttttctccccttaataggttgcctgttcactctgatgatagtttcttttgctatgcagaagctctttagtttattagatcccatttgtcaattttggcttttgttgccattgcttttggtgttttagacataagcatttgcccatgactatgtcctgaatggtattgcctaggttttcttctaggattttcttgttttaggtcttacgtttaggtctttaatccatcttgagttaatttttgtataagggtaaggaaggggtccagtttcagtgttctgcatatggctagccagttttcccagcaccattattaaatagggaatcctttctccctttcttgtttttatcaggtttgtcaaagatcagtggctgtagatgtgtggtgttatttctgaggcctctgttctgttgcgttggtctatatactgttttggtaccagtactatactgttttggttactgtagccttgtagtatagtttgaatcaggtagcatgatgcctccagctttgttctttttgcttaggattgtcttggctatgtggctcttttttgattccatatgaaatttaaagtagtttttcgcaattctgtgaagaaagtaatgatagcttgatggggatagcattgaatctacaaattactttgggcagtatggctatttcatgatattgattcttcctatccatgagcatggaatgcttttccatttgtttgtgtctcttttatttccttgagcagtggtttgtagttctccttgaagaggtccttcacatccctgtaagctgtattcctatatattttattctctttgtagcaattgtgaatgggagttcactatgatttgtctctctgtctgttattggtgtataggaatgcttgtgatttttgcacattgttttgtatcctgagactttgctgaagttgcttatcagcttaaggagattttgggctgagtggtgggattttctaaatatacaatcatgttatctgcaaacagagacaatttgatttcccttttcctgtttgaataccctttatttctttctcttgcctgactgccctggccagaactctaatactatgttgaataggagtggtgagagagggcatccttgtcttgtgctggttttcaagggaatgcttccagcttttgcccatttagtatgatattggctgtgggtttgtcacaatatctcttattagtttgagatacattccatcaaaacctagtttattgagagttttcagctgaagaggtgttgaattttgttgaaggccttctctgcatcaattgagataatcatgtggttttgtcattggttctgtctatgtgatggattacgtttatctatttgcatatgctgaacagccttgcatcccaggtatgaagctgacttgaccgcaccacatttgtctttaactgtcttaagtgcaatcattgctttcaccatcccactttccatttttttattcactttgctttttattttccaataaaattttaaagtcaaaataatatgtgcatatcattttaaagagatcaatggtacaaaacttgaaaagaagagcattagtcctccgaggttccctggttcaccaattttccagtcactgtgaagtcttgttgattttcttctggtagccatttgcaaatcttgaaatccatgttttatacctccatttcttcattatcaatcttataacaatatctataggttttcgccatgttgaaggagtattaattaacttgaagaaggatgcttatattataaactttctgattcttgcatgtctgacattttaaatattctattatttacttgaataatattttgactagtatcaagttaaaagttgtaagtcatttcccctgagaattttgaaagcattactctttttcttttaatttctagggctactgataaagagcataaagctattctgatttcaaaacttccagctgactattttttgtctctggatgtttttagaaacttctctgtctcttcagtattcagagtgacatgatgatataccttgattttcta

SEQ ID NO: 2940 - DNA, 201 bp, Homo sapiens
gggagaaggggtaggcaggtgtgaggcagcagtgagtcagaggctcaggcagcctcgccctcagagcagagggggtggtttcaggaatgagaagaaggaargaaagccagagttcaaagacccattagggtctaaggcaactggccccatggagcaacagggaaaggcaggttggggtcatcgagtgggtgctggggtgct

SEQ ID NO: 2941 - DNA, 201 bp, Homo sapiens
tgaggcagcagtgagtcagaggctcaggcagcctcgccctcagagcagagggggtggtttcaggaatgagaagaaggaaagaaagccagagttcaaagacycattagggtctaaggcaactggccccatggagcaacagggaaaggcaggttggggtcatcgagtgggtgctggggtgctgagtcaacccagggtaagaga

SEQ ID NO: 2942 - DNA, 201 bp, Homo sapiens
attagggtctaaggcaactggccccatggagcaacagggaaaggcaggttggggtcatcgagtgggtgctggggtgctgagtcaacccagggtaagagatkgctctcccctgccatgactggctgcaaactgggttcccagcacagacgtgagcttggacatcaggcctgtgatgacagaggccctggctgcctccctggc

SEQ ID NO: 2943 - DNA, 201 bp, Homo sapiens
ttgttacaggagcatcattaaagaaactgatttggggcttgaaaaacactgaggtatgaacactgtctgttagagctggaaggactcctcatcgtcagacstcgctcccggggcagaaattcctccgcctcttccccaacagcctcggctgctgcttgtccactcccagggacgggaagcccacttcatcaccgggaggcc

SEQ ID NO: 2944 - DNA, 201 bp, Homo sapiens
ctgggtcatggcccaaggctcctagtcgccaaccttccaggcctttccacaacgagccctggagtcagcaggaagccagccaacaggcttctgcaaaggawcttttaaaggtagtaaaaagccaatgaggacaaccacaattccaagcaacacttggagtgggagccataaaaccagcccgatgaaagagagctgttgtgt

SEQ ID NO: 2945 - DNA, 201 bp, Homo sapiens
cgagccctggagtcagcaggaagccagccaacaggcttctgcaaaggaacttttaaaggtagtaaaaagccaatgaggacaaccacaattccaagcaacasttggagtgggagccataaaaccagcccgatgaaagagagctgttgtgttttagtgttaacatcacttatgggggaatggatccagacacattctgaacag

SEQ ID NO: 2946 - DNA, 201 bp, Homo sapiens
ttattcacgagaagtccctttctggacaagggtccattgtactggtggagctgaagggaggaaaggggtccacacaggggttctgggcccagggcacacartgattttaccagagacaagcctgagttcaccatctcttctctgtggaattgagctgtgcagatgaaatggtcttttaatattatctcttctagaaagaaa

SEQ ID NO: 2947 - DNA, 201 bp, Homo sapiens
ccaggtaccatctgaaggggtggggagagccactctctcaggaaggaggttcgccttctcctgccaaaattctcttggttctcagatgcgcagctgtgctytttggctttgagattcctggggctagaaactcccaaccagagagtctcagtggtggtgctagggtcgggggagaggagagcctttctgaaggacgtgtcc

SEQ ID NO: 2948 - DNA, 201 bp, Homo sapiens
cttgtttactgtttgtttctcccacaagactgtacctgccatggggactgggctctgttttgttccctgctgtgtccccacatctccaaatagtatctgaygcatagtacatgaatattgctgaacaactggacagaagggttcgagcaggacagcaccatggtcaaagttccatcttggaaagcttactctaaatgccat

SEQ ID NO: 2949 - DNA, 201 bp, Homo sapiens
ggagaggtcagggatgaagatatggttgggtctttgctcgtgggacagtctgggtctttgaggcatggctggaactgtgagaagagagccccaggggaaakacctggaagcagctgcaagagaaggaggggtctacggagagtcagagggatgggggctggtccctagaagacagtggaacagggttgcagagaggatgac

SEQ ID NO: 2950 - DNA, 201 bp, Homo sapiens
tctttgctcgtgggacagtctgggtctttgaggcatggctggaactgtgagaagagagccccaggggaaagacctggaagcagctgcaagagaaggagggrtctacggagagtcagagggatgggggctggtccctagaagacagtggaacagggttgcagagaggatgacagagctcactgcaggaaggatgcatgcagc

SEQ ID NO: 2951 - DNA, 201 bp, Homo sapiens
tccccagaggctctgcctgcttttgaccccaggttcccctggtaaccttctgggtatccctcagtttcctactctttccttagaaaggagacaagggtctrgtttcctgatgtccagaagctctgtgagtttgggatgattgagccagctttccctggagaaggtgcagctggcttcttaatgacctgcggagcagggaag

SEQ ID NO: 2952 - DNA, 201 bp, Homo sapiens
gtccccacagaggttcccgacagagcctctgtcatctatttcgttctactcccccctggagccatggttctggtgaaggtgacgtgctcaccccaaggcaytcacctcagggctggcctgccttccatccgtcaggctcctgtgaatcagtgcccaggtctttcctgtttgctgggcactccctatgggaatgatcgagga

SEQ ID NO: 2953 - DNA, 201 bp, Homo sapiens
cagcacatatttgtggcatgaatatatgcccattttacagattaggaaacatgagtcaagtgacttgcctatggttagacagcaagtaggtggtagagccyagctttgaatcagtctcactccaaatcccttgaacttgggataatctgctcagctggtgatatggtctctgcttcaagttcaaggaactcatgcctggag

SEQ ID NO: 2954 - DNA, 201 bp, Homo sapiens
ctattacagacatcagaaattattaggtggtattagaaattttacaccaataatttgacaaattagataaaatgaaaaattctgtaaaaagcataattcawgaaacaggtcaatatgctcacggattagaagtctcaatatatctaagatgtggattcttcctaaatttacctacagatttgacacaatttcattcataat

SEQ ID NO: 2955 - DNA, 201 bp, Homo sapiens
gtggttgtaccattttacattcccgtcagcagattatgaatgttctggttctcccagatccttgccaacactggctatggtcagtctgctaactttcaacytgtttaaatttagtggcatattactaaatgcgtagtggtatatcactgtgatttcaatctgtatttcctaatgactgatgatcttgaacatctttttatg

SEQ ID NO: 2956 - DNA, 201 bp, Homo sapiens
aaaaaaaaaatcaaagaatttgttctaactactttaagaatgggatggctattacgtgtctaagtggggaaaatcaaggagggaggtgtccctggagatgyagaaatggaagattttaaagtcatgggactagaagacatcacctagggaatgagagtaaatagaaaacagtgtcatcctacacaaattactcttagacaa

SEQ ID NO: 2957 - DNA, 201 bp, Homo sapiens
gcgacagagtgcatggggtgacagtagtaaaggcacaaaggtggctgtggtcatcgaggggtggtggggatgatggcggtgaggcggtggtgatggctaayggtggtggaggcaatggtagtggtgacggcagggatggtggtggttgatggcagtaaggatggcgatcggggtggtgacgatagacgtagttagaaacag

SEQ ID NO: 2958 - DNA, 201 bp, Homo sapiens
tttggtggatggatgtgaatgtctgtgtgtgtgtgtgccctctgttcatgttcttcacaaacttttctatgtggatggtcatcttttttattgattactargagctctttctatagtaaagtcattcataactccaactatttttccccagtttttcatttgccttatgatatacagaagcttaaagattttatgtcatca

SEQ ID NO: 2959 - DNA, 201 bp, Homo sapiens
catgacatcactggactggtcaactgaagtcatccacggtagtagtatttacactacggaaattggcaaatgctataaattaggacttttcccaccgagarccggttgttaaacatttatcagcacaccactgattgacataatcaccaattgtgttttgaaaagaaatcactctggtatttgggtggaaaacagattcca

SEQ ID NO: 2960 - DNA, 201 bp, Homo sapiens
tggctgctttttagatgatgttctccaatctgagcctgggtgtgtctggacctggagtgctttggtggtgctctgactcctcctagtcaagaaatccagcwcctctcaggccagcctgtctgtgggttcagcccgatattctgaggagggcacagactcactcactcactagtgggtcaattactgcccatagggaccctc

SEQ ID NO: 2961 - DNA, 201 bp, Homo sapiens
tcccttgaatttttaagcatctctgttttatgatctctataattttggagagaaaccaaggcagctagtgactttcttgaacaaaatttctttgcctacaygccagtttgggaggacatagtagtatctggcctatgaaggacttctggcttgtaccccaaagcaggaaagcggcacgggcaaagaccacggggtaggggc

SEQ ID NO: 2962 - DNA, 201 bp, Homo sapiens
aggtgagaagtccactgtcaatttgattagtttttcttaaaacttggagtgctggaactttatcactagtgaagagatgtgtcatttctcatcagtttagmctggacttgtagattccttttaatctacaggattaagtttcttcaacttgaatattttattggaaacttatttaatgtttgactccgttctaatagttat

SEQ ID NO: 2963 - DNA, 201 bp, Homo sapiens
agcttagccggcagagggtccacacctatggacttgaaaaaaaatagtgacatgttgtgaaagctgacatgatggtcatttctgggcgttgtatgcatggrcatcactcctgggcgaggggaaagccagtctagaagccttgccaatggttccatttgggaacccagggcagaagcttcccctctgtcttttttctcagag

SEQ ID NO: 2964 - DNA, 201 bp, Homo sapiens
ctgtcccatttggccaacactcacatgctaatggcacccagatctgtctttatctcagaaccttctccagctcctgcttggttctctcatgccaccccccwttctctcctaggtgactgcaatagctttgaaactagtctctctccttttactcttgttctcatatttaatccttatataatcccaacttgcctatgagac

SEQ ID NO: 2965 - DNA, 201 bp, Homo sapiens
tcagtggctgcctgatggtgaaagaagagaaattgttggggaggagggggaataggggcagaactcatctctccccacagaaggtcaagaggccacccacmgcccagccccagaagaccacctcaaactctgctgccctccaggaggaggggatgcctcctctgatgtgacgttgtctgctttggccttccaaagctcaat

SEQ ID NO: 2966 - DNA, 201 bp, Homo sapiens
agaattgggactgatggtttgtactattactatccgcatcctttttcaggtaaggttgagtaacttacctgaagtcacactgtgagtaagctgcctaccarttggtcatgatcaaaactgggcaccaaatcactacttaagcaggacacatcggctaggtgcaccatgcacttcccattcaacttcaggcaactaagcaca

SEQ ID NO: 2967 - DNA, 201 bp, Homo sapiens
gactcctattggagaggtagggtaaggatcccccacggatggtcttgaaatttgggcagaaaaaaagtgagggttcctaatgacccctggaggccatttasatctccacgtggattagcttatcacacacactccaaccccaactgagctggccagtggtgagaagataacatttgcggacgagttgtgaagtggcgctat

SEQ ID NO: 2968 - DNA, 201 bp, Homo sapiens
gtccctaagcagagaacctcattaagccctcatgaggactcctaatctccagaaactttaagacaataaatttgtgttaagttgctatgtttgtggtaatktgttacagcagcaatagaaaacttatacagagactgaggaggttcactgtatcaatgtaaagtcatttgcttactcgctcattagcagaaagggctggta

SEQ ID NO: 2969 - DNA, 201 bp, Homo sapiens
ttttcaaactctagatagaaagctgcttgggtgtggaatgtaagttgaaagtgagactttcacactaggggcaaactttgcaacagaggaaacaattgtaraaaaaccaatttagttaattgtctttgtttcacctgctgttcatgtgtacctggagcttgctgctcccctgaagcctagtcttgctccagtttgagtggc

SEQ ID NO: 2970 - DNA, 201 bp, Homo sapiens
gcaacaccctcacagacacagccaggcttaatactttgtatccctcaatccaatcaagttgacgttcagtattaaccatcacacctggcatctcatctgartttttaaatgtctcactcacggcagcaaaacatctggttactattacttgagcctagaatctaatgtgttacacgacattcaccccctttgccccgggtt

SEQ ID NO: 2971 - DNA, 201 bp, Homo sapiens
cccttctgttctcagtaacagagaccttgagagtttttattagagagtgagtgagacaaaacttttcactgtttttcatgttcctaataacagcctaagtygtaacctgaatttttatgtaactaattatgactgtgacttgggtatgaaagatttatacaatcagaaaagaaattacctgggttatctctgagcaggcgg

SEQ ID NO: 2972 - DNA, 201 bp, Homo sapiens
ttgaggtcccatctttgtcttgatgataaccccctaaccctcccaaggcatttgatttgaaatgtaatttgggatcactttcttggcctcctccagtgaawgagatttgaagatgatttctaaactgtggcattcttgttactaaaaaccctcctccaaggaagcagaatagatgcaagtctttatcatctgggtccccgt

SEQ ID NO: 2973 - DNA, 201 bp, Homo sapiens
agagggaacatattaagaggagagtgaaaagaggggccaatttcctttctttgaaagggacaacataatttttatcatgaccctgttttccaactcaccagtatagaatcataaataatgtgaaaatctaaatctatctatctatctatctatctatctatctatctatctatctatctaattttaaaggtgaactgctac

SEQ ID NO: 2974 - DNA, 201 bp, Homo sapiens
ggtggtactgccacctcagcctctcgagtagctgggactacaggagtgcaccaccacacccagctcacttttgtatttttagtggagacagggttttgctrtgttgcccaggctggtcttgaactcctgggctcaagtgatctgcccacctcggcctctcaaactgcttggattattaggtgtgagccaccgtacctggaa

SEQ ID NO: 2975 - DNA, 201 bp, Homo sapiens
gcaagcctgtccggcctgcaggctgctcacagatttgctggggaaaaccatccacgtccccactgggaatgaacctgctgtgcagggaggtatgccctgcrctgaaatacctgatggtctggtctgaattttggaagcaccagagtgactttatgaccaggaccaaaggtcacataaatatcgattggcttaaaaatgcat

SEQ ID NO: 2976 - DNA, 201 bp, Homo sapiens
tgtgagttatcgatacattaatagctacagttcaaataataaactacccagaaactataacacgcaaggactatcttggatattaggatgcaagcctgtccggcctgcaggctgctcacagatttgctggggaaaaccatccacgtccccactgggaatgaacctgctgtgcagggaggtatgccctgcgctgaaatacct

SEQ ID NO: 2977 - DNA, 201 bp, Homo sapiens
taggaatgagaattcctattgggaatctcctctttatttatttatttatttatttatttgagacacagtcttgctctgtcgctctgtcaccaggctagagwgcagtggcatgatcttcctctttattcttataagagaaggataagaggagccattcagacttccagcccagagctccagatgacactgccccctttcatc

SEQ ID NO: 2978 - DNA, 201 bp, Homo sapiens
tgctgtcacactgttctgtacatgcacagcccatggagcacagtctggtgcctgggcactctgaggaagctctgcctcttcctgggctctctagggcaggktttgcaaaaggcactgcatggaatgcctgccctgagatggttaaaaacaacacaattaattttgttaaatcccacagaaaaccaagtttggaaaatgctg

SEQ ID NO: 2979 - DNA, 201 bp, Homo sapiens
ctcaacttctttgagcccagtgactgtagaagaacactcagtgcctcactgcatgtgagagagggtggcatgggggaaggaaaagccatctctttccccasatggcagtcttgaattgaaaaagacccacggctccaggcactgtcaaatctggatggctcccttttaaattccctacatctgcagctattaaagaagtta

SEQ ID NO: 2980 - DNA, 201 bp, Homo sapiens
ggcagggctagccagtgtctgttctctcagcctctcagttgtgatctcttttgctctgagatgtgcacgtgtacacacacacacacacacacacacacacacccataagtgcattcactgcataactgaccgatgttataagcattccagacataaaatgctgttaaacagccaagcatcatccctggaaatgcaggcctg

SEQ ID NO: 2981 - DNA, 201 bp, Homo sapiens
atgcaaatgacccttggcagtcatttagatctccatgtgaattcgcttatcacgcacattccaccccaaacagagctggccaagccaagcgtgatgcttgwtgagggctgggttgtttccccctgcactgcccaagtccatgtctggttagcctgtgcctgacttctacctcacaaggatacacagagttcccactcaaag

SEQ ID NO: 2982 - DNA, 201 bp, Homo sapiens
gcagacggctggggaaaggaagacatcttccaaccaaaaccatgtgagagaaaatgcagagcaatttgttatatgccttacaattttaagaaaaaaaaaaataaaaagcaaaagcaaactttcctttgctggggattggagcacaaaattggtcatgtttgaaggatggaagagttcttcattttcactgtgtcttgtacc

SEQ ID NO: 2983 - DNA, 201 bp, Homo sapiens
acagctaatgcaaactgatgcaaaaacgtccatattgcaaaggaaaagtggaatcccaagactgttgatggaatctgctcagtatggaaggaaatgccatrcaaatgtgtgtttgaaagataatcaggaagccagactgcaatgccaagaaaaataaacccagtctgataatccagactatcctgggccaaagagccagat

SEQ ID NO: 2984 - DNA, 201 bp, Homo sapiens
ggcaatggggtcacacaggagaggaaagaggctgtgggggccaaggctacctctctcatgggagaacaggagaccataagcgtcaactcaggctttgggamgtgaaatgctgtggcgctgagttttgggttatctttgatgaactctggcttatccacactggactagtgagctgtgtgtctcaccaccctcccctttccc

SEQ ID NO: 2985 - DNA, 201 bp, Homo sapiens
attattgtcttcagctttgtgggccaacttttctttctttggttggaatttatagctactgaattgtaacgtattactctaattatatatacttaattctwtaattgacttgtttggaatctcatggctcattcttttatgatacaatattttgattcatttatcagttaggtggagcatgacttgaagtacttcttttaa

SEQ ID NO: 2986 - DNA, 201 bp, Homo sapiens
acaagcttggagaacaaatgctaccttaactcatgaattactatacagctacaaaaaataagaccatgtggtacttgaataaggagagtgactgagaggayggaaatagcattatactatacagtcatttgacttttaaggacacaccttcattgaagtataattgacaattaactacacctatatacagcatacaatttg

SEQ ID NO: 2987 - DNA, 201 bp, Homo sapiens
aacaagcttggagaacaaatgctaccttaactcatgaattactatacagctacaaaaaataagaccatgtggtacttgaataaggagagtgactgagaggmtggaaatagcattatactatacagtcatttgacttttaaggacacaccttcattgaagtataattgacaattaactacacctatatacagcatacaattt

SEQ ID NO: 2988 - DNA, 201 bp, Homo sapiens
gtagggggatgtgccttcccagatactagaacattcaacccagaaagctgctgtgataaaatcaatatgagatcaacctaggaaaaggcaaatcagtgackgcagatttggcaataaaatagaaaacaggatccagaaataaatgccaatgtatatgaaaattagatgtataataagagttaccactccaatgggaaaatg

SEQ ID NO: 2989 - DNA, 201 bp, Homo sapiens
ataaaatattagtaaacaaatttgacaagaaagccataggacctatataaaaaatggctgtaaaaccctattgaaggtcataaaataagattggaacattkcttattcgtgggtaggaagacattctcataaatacacaaatttaatgcaatcattttagacttagatgaaatgatcttaaaaagttcatttgaagtaata

SEQ ID NO: 2990 - DNA, 201 bp, Homo sapiens
aacaacacacacctacataaccaatgggtcaaataagaaattacaagagaaaatacactttgatatgaatgaaaataaggacacaacgtaacaaaacttaygagatgtagtaaaggagtgcttagagagaaacttgtagctattaatgcttacattaaaaaagaaacaggccaggcacagtggctcatgcctgtaatctca

SEQ ID NO: 2991 - DNA, 201 bp, Homo sapiens
aataaatttaaaagaactgaagtcacacaaaatatgttcatctaccacaagactgaaattaaaaccagtatccaaatgaaatctgggaaattcacagataygtggaaattaaacaacacacacctacataaccaatgggtcaaataagaaattacaagagaaaatacactttgatatgaatgaaaataaggacacaacgta

SEQ ID NO: 2992 - DNA, 201 bp, Homo sapiens
gttctttctgttcttggagatagtgtcatacacttaccaagagtgatggttattagaggcactgagacaaaccccttctggggaccagcactgctgtgcccgctggggccccagtctgcccctctgtgtccagccccatgagaacccgctgttgcacgaagggcccacacagcatgggcagatcttccctccagcctcagg

SEQ ID NO: 2993 - DNA, 201 bp, Homo sapiens
aggtctcagacaaggtcaaggtgactccctaaccatgaggtggcttcccacaggacgtgagttgggctcagcggctggctctcataccccagaacacggcytctcctggcatttcccttgcacgtggtcctaggaattcccaccaagcccctgtgtgagtgcatgtgaaggaagcagcagaggatgagggacaggccggtg

SEQ ID NO: 2994 - DNA, 201 bp, Homo sapiens
accagccactctctggagctgcagtcactgggctccagcccctcttcaacctggcagggtggctagagctcagatccccaaacctcacctgagaaccccccagagaggcccaggggagagacaggacatgcccccatcctcttggctgcctgtcccccagacattagcaacactggttcccacactttccccattagcctg

SEQ ID NO: 2995 - DNA, 201 bp, Homo sapiens
ttcagcctgggaggcagaggctgcaacgagccaagattgcgctactgcactccagtctgggtgacagagcgagaccatgtctaaaaaagaaacataccacrtgccaggtaccactctaagccattcactatcttagctcatttaaccctcatgatgaccctgtgaggttcacagctgaacacagaggcacagcgaaacgac

SEQ ID NO: 2996 - DNA, 201 bp, Homo sapiens
gcctgtcacctgtggtgatgttgcttcctccttaccatggaattccatggaatttaaatcactggaatgatactgttgcacacactcaattcccttacccyctcttgacaaccctccagccctggtgaaatctgtctgggtgctgtctgcttatacccgggtagctgaacatgctggggaaacggccaccctgctgactag

SEQ ID NO: 2997 - DNA, 201 bp, Homo sapiens
ttgagcccaggaggcggaggttgtcgtgagctgagattgcgccactggactccaacctgggcaacagcagagtgagacctagtctcaaaaaaaaaaaaaaagtgacagaatagactctttgtggtaataaaatacccaattataaatgggacctaacgccatgtcaggcaaaggttaagtctcgcaccccctatgcttgaa

SEQ ID NO: 2998 - DNA, 201 bp, Homo sapiens
atgtgggtggggccagataagagaataaaagcagacctccggagccagaagtggcaacacgctgggattcctttccacgcagtggaagctttgttctttttgctctttgcaataaatgctgctgctcactctttaggtttacactgactttatcagctgcaacactcaccctgaaggtctgcagctgcacttctgaagcca

SEQ ID NO: 2999 - DNA, 201 bp, Homo sapiens
tcagctctctgtaaaacagaccaatcggctctctgtaaaatggaccaatcagcaggatgtgggtggggccagataagagaataaaagcagacctccggagycagaagtggcaacacgctgggattcctttccacgcagtggaagctttgttctttttgctctttgcaataaatgctgctgctcactctttaggtttacact

SEQ ID NO: 3000 - DNA, 201 bp, Homo sapiens
tgccaacgtgggctcctgcgcagcctgagcctcccagaagagcaccgctccctgctccagggcgcccagtcccatcaaccacccaagggctgaggagtgcsggcgcacggcacgggactggcaggcagctccacctgcagacctggtgcaggatccactgggtgaagccagctgggctcctgagtctggtggggacttgga

SEQ ID NO: 3001 - DNA, 201 bp, Homo sapiens
gctcaggatctgcagcccgccatgcctgagcctcccccacccccacccccctccctgccaacgtgggctcctgcgcagcctgagcctcccagaagagcacygctccctgctccagggcgcccagtcccatcaaccacccaagggctgaggagtgcgggcgcacggcacgggactggcaggcagctccacctgcagacctgg

SEQ ID NO: 3002 - DNA, 201 bp, Homo sapiens
cactcacccccgttttcttcctgagggtagtttttaatgggttcacggcccaaaccttgtcacagggaaatggagctcaagtagagagcagcagtcttacyaggcagaagaaaaagatgtcaaagtctgagatttctgagactggaattgagctcaggataagagcaacttacagaaaaggagccccaaaagcctgaatag

SEQ ID NO: 3003 - DNA, 201 bp, Homo sapiens
tttaattattacatcttcttttcatttctgatatgtgtatttattccctcctcctccctctctcctctttcctttattactcttgacatagttttgttagwtttattggttctttcaaaaatcagcctttggctttgttgaacctttctgttgtactttttttttttcaattttatccattcctttttattattgttcttt

SEQ ID NO: 3004 - DNA, 201 bp, Homo sapiens
tatcttttattaatagactgctaaatatagtttgctaatttttgcttaggacttttgtatttatgtacaaactggcatttaaaaaaacattcttaccaggytttggtgtcaagtttatgttattctcatcaatatacccactttttctggattctggagtagttcatatgagatgaaaattgttgttgttggaaaatttgt

SEQ ID NO: 3005 - DNA, 201 bp, Homo sapiens
aaacaaatatagtttgagataaatccaaattgttatggtttatcttttattaatagactgctaaatatagtttgctaatttttgcttaggacttttgtatytatgtacaaactggcatttaaaaaaacattcttaccaggttttggtgtcaagtttatgttattctcatcaatatacccactttttctggattctggagta

SEQ ID NO: 3006 - DNA, 201 bp, Homo sapiens
gtacattgctactggagtatcactgcttctgtgccttctcagcacacagagctagagaatgttacagacacacacacacacacacacacactcttaacttyaagcaatacttaactgatacttccaactcccatctgaaaacaaatgtaccattctagacttcccactttccatatctgtaaaaccctttcctaacagtga

SEQ ID NO: 3007 - DNA, 201 bp, Homo sapiens
cctctcatgttttaacataggcaaaaaaaaaaaaaaaaaaagaaagaaaaaaacaaacaaaaaaactaatctggtggtactttctaagttctgtctgatarcctctttagtggaatcatcaagtttatttagcatatttcctatcttactgcattaccagaggtgacaatattattaaaccacccactaccccacatccag

SEQ ID NO: 3008 - DNA, 201 bp, Homo sapiens
cacctttgagaggctggaaatggaacaagtttgactttcaagcctggtgagtcttggctcctttatatttaacagtttgtcctccagctcacctctccctytcatgttttaacataggcaaaaaaaaaaaaaaaaaaagaaagaaaaaaacaaacaaaaaaactaatctggtggtactttctaagttctgtctgatagcct

SEQ ID NO: 3009 - DNA, 201 bp, Homo sapiens
tggtctctacatgttggctcacttgggctccttcacaagatggtaacctcagggcactgtttatatggtggttcggggatccaccgtgagcaatctagccrgcaaggtgatgatttgtcatttgtatgacaaagctttagaagtcatatagaatcacatctgccacagttacaacctgcccagattcaagaggggaaatag

SEQ ID NO: 3010 - DNA, 201 bp, Homo sapiens
ttcgtgtggcctcagagcatctccacgtggtctctacatgttggctcacttgggctccttcacaagatggtaacctcagggcactgtttatatggtggttyggggatccaccgtgagcaatctagccggcaaggtgatgatttgtcatttgtatgacaaagctttagaagtcatatagaatcacatctgccacagttacaa

SEQ ID NO: 3011 - DNA, 201 bp, Homo sapiens
tttattcagtgtgttataattattttccagttatgttttgttgtgtaaccattcaaaagcctgggagtttgacacaacacttattttattatctttcatgrtttctgtgggttgggaatttgggatggactcagctaagtgattctggctctgggtccctcatgtggttagagtcagacaacagccagagctgggagagcg

SEQ ID NO: 3012 - DNA, 201 bp, Homo sapiens
tttcctcctcccttaacagcatattgtgaacaactttctatttcaacaaaatatttgtaaaggtgtaacattgttttaaatatttgtttagtatgctatgrcatgattgtattgtcattatttcagtcaattacttttgggggacatttaaaggtactttattattataatcaatgccataataaatatttaaaatttctt

SEQ ID NO: 3013 - DNA, 201 bp, Homo sapiens
gacaagggggatagaaattgggttagaaattatgggattttctttggtggactgaaggaagtgaagaggaagtaaacattctcatactaatgagtgtcgtygttttgtgtcataatagtgcatatggcactaggttattatttacacagagactgagagactgaactgctccagagtagggacaatgccttgttcatcttt

SEQ ID NO: 3014 - DNA, 201 bp, Homo sapiens
tgtgtgtctttaattcttctagcgctgctaggttagggtctccccgaccgagctgttctcggcagagaacaaatgtctgttgcttaagccacccagtctawgacattttgttatagcagtccaagtagattaggacaagggggatagaaattgggttagaaattatgggattttctttggtggactgaaggaagtgaagag

SEQ ID NO: 3015 - DNA, 201 bp, Homo sapiens
ccttcttttctcccccagttccctcacacgcccagctgtccccagcatcacatccccagctgtccccagcatctctcccaaaattgtcttaatctcttcaytcccagcttctctgcaactcccttccttttttccatgcaacctccttttcatccttttaatatgtgagccaacctgcctcttaatgagaaaagaaggaaa

SEQ ID NO: 3016 - DNA, 201 bp, Homo sapiens
tttgtttctacattgctggaaaatgagaggtttcagcagaagatggaaaattatcctttattttgattctgtgtttgaacaccttccacttctctgcaaaktgaggggtatattttagtataatgcttggctcatggaaccagagaatcaaaaattagtcaaggttccaagaagactggtgaagctttatgcctcaaagag

SEQ ID NO: 3017 - DNA, 201 bp, Homo sapiens
aacgggctgaagttttgagcttgagtggacagagttgccagccaacttccttcacctccaaaaggctctccggaggcagtttccaagtcctcctttttccyacccaacagagcggcaactggcagcaagctgccagttgtgtaagtccacacagccacaatcactgtggatgaggatgaatcctgagtgcagccctctgtc

SEQ ID NO: 3018 - DNA, 201 bp, Homo sapiens
atgcagacagggtcagggaggctcatggggaggcctttgcagggagctggggatgaggactttgaccacatgggagtagcaggaggagatgggatgaatgsgaaacaggagaaggagcagaacttgtcggccaacctggacaattcagacttggaccaacaggagctggtgaacgggctgaagttttgagcttgagtggac

SEQ ID NO: 3019 - DNA, 201 bp, Homo sapiens
ccacgtggattagcttatcacacacactccaaccccaactgagctggccagtggtgagaagataacatttgcggacgagttgtgaagtggcgctatgcagrcagggtcagggaggctcatggggaggcctttgcagggagctggggatgaggactttgaccacatgggagtagcaggaggagatgggatgaatgcgaaaca

SEQ ID NO: 3020 - DNA, 201 bp, Homo sapiens
gcagtctcctcacggtctctgttctcctgagactggcaaatgatcatcagaaaccgtcctggccttggcaatgatgccggcctcactaaacaagctatatygcagcagtgtaattgccagttaaagagcacttcgtcctaattaacctcttcagggaatgagtaaaagcatcaagaattccagagttcacagaacctgtgc

SEQ ID NO: 3021 - DNA, 201 bp, Homo sapiens
tccactgtacagacattaaacaataaataagacaatttcccataataacaattgctgtgaagaagctaaaacaaagtcacaggtgggcagggaagacgggygtccttgtgacaggaacgtcagtggtggtctctctgggaagttaacatctgggagacaccagatgagacagcagcagtcacaaaagatccgaggggagcc

SEQ ID NO: 3022 - DNA, 201 bp, Homo sapiens
cgtctctctcccggcatgcgtgcagaggaaaggccatgtgaggacacagcaagaaggtagctgtgtgcaagcccaggagagaggcctcaccaatcctcccrgtaccttggctcagacttccagcctccaggaccgtgagaaaataaacttccggtgttgaagccacccagtctgcaatactttgtcatggcagcccaagta

SEQ ID NO: 3023 - DNA, 201 bp, Homo sapiens
ccctaccccacattcatgttaaaatcctaaccccagtgttactatatttggagttagaattctcaaggaggtaattaacgtaaaatgaggtcaggagggcrgggctcaaatctgataggactggtgtccttataagaagagacgccagccgtctctctcccggcatgcgtgcagaggaaaggccatgtgaggacacagcaa

SEQ ID NO: 3024 - DNA, 201 bp, Homo sapiens
cccctgccacccccgagtcccccctaccccacattcatgttaaaatcctaaccccagtgttactatatttggagttagaattctcaaggaggtaattaacrtaaaatgaggtcaggagggcagggctcaaatctgataggactggtgtccttataagaagagacgccagccgtctctctcccggcatgcgtgcagaggaaa

SEQ ID NO: 3025 - DNA, 201 bp, Homo sapiens
tacagcagtctttccttctctatataactggtgttcagggatggtcccaggacccaagctggtccagcaagaggaaacctcagagattcagctgagcagtygggcaggctgtcacttgcttccctgctgagccctgaatccaatccagcaataatatggaaccagtgatcactagtcttcccagttacagatccttttctc

SEQ ID NO: 3026 - DNA, 201 bp, Homo sapiens
aaaattaggagtatatggacaaggatataagaacagagatgctgaatgcttgtttttcttaacccgtgcataggaaaaagcttggttgggagatacatgcsaatggtaatggtttttaatgtctggatgataatttaaaaatatttttatgtgctttgctatatttccaaattggctacaatgcaaatttatccattttgt

SEQ ID NO: 3027 - DNA, 201 bp, Homo sapiens
attataatgacaaaaaatccaaaagcaaccaaaaatataaaatgtctataaaatgtgcaaaacacctatgaagaaaatgacagaaatttattgagaaaaayaggagggttgagtaaacggagagactctgtgtccctgaataggaaaattcaggattgtaaagatttaaattttctccatattcccctataacagtaacac

SEQ ID NO: 3028 - DNA, 201 bp, Homo sapiens
ataacacatattataataactataaataggttaaatcttcctgtgataacataaataattctcagattggctcaacaaatatcacctgctttttttttttwaaaaaaagcaaaacatacaaaaaatatagattaaatgataaaccagtaaaaattagtatttagaacatagtatgcactcaagaaatatttgttggcaaag

SEQ ID NO: 3029 - DNA, 201 bp, Homo sapiens
gtggattcttcctatagaattcttccaattccaattctatggaattggatgctattaaacctgtcttcagccatccacatggacagacggcaaggacaaargcttctaaacatcctgactattggtcagcagtgactgggaatggatcacttctttttcagtggtaagtacacgagatttaaacccaacatgaggcctggt

SEQ ID NO: 3030 - DNA, 201 bp, Homo sapiens
tgcccggcctggataagattttctagtatctcacagacctcctccagagagctgcgcctttgctaatcctcttctgtaacaggcattttgctttgatgacrcctaactccaaactataagcatggaatatcttggtatacttatattcacatcatatatgttccaatagggcagaattgtttctttttacaaatatgcata

SEQ ID NO: 3031 - DNA, 201 bp, Homo sapiens
atttttatattacttttagtagagatggggtttccccatgttggccaggctggtcgtgaactcctgacctcaaatgatcagcccgcctcagcctcccaatrtgctgggattacaggcatgagccactgtgcccggcctggataagattttctagtatctcacagacctcctccagagagctgcgcctttgctaatcctctt

SEQ ID NO: 3032 - DNA, 201 bp, Homo sapiens
accgcagacccaactgaataagtagctccaggcagccatattttgtaccccacaacttgctgtgaccacgtctaactggagcaaggggcacacgtgacccraaggctgcaactccaaagactctcccgtgacacatcctaagaggtgagcagagccagctggacagaactttttgaaaatttacactgaaaaaatgattaa

SEQ ID NO: 3033 - DNA, 201 bp, Homo sapiens
ccagccagaccttaaggacaaagaaccaggcttctggatttgcgctgttccctcttctcctccccagtagccagcaacatcataccaatcctgtcaaccaygatccttaccatacccacagcctcttctaaggaaaactgtcttgaccgcagacccaactgaataagtagctccaggcagccatattttgtaccccacaac

SEQ ID NO: 3034 - DNA, 201 bp, Homo sapiens
ttgagcatctgaggattttagtatctgtggaagtcctgaaaccacatgagtgagaagcaaatagctttaaaatagcattaacagtataatctgtttaatgyaaactgctaggatgtattttgcccagatcctgtttaagcaaggcttgatattttacatgctccttagagtctgtcttgttgggcctttcatcttactctt

SEQ ID NO: 3035 - DNA, 201 bp, Homo sapiens
actattccaaaccacaagtgttgctcttctaggttattatagtagtttcctaactcagcctccataatccccattttttacaacagaataatcctttaaarctataaacctcatcaagtcacaaccctgattacaacctattgatgcttaccactgcttttaggatcaactcaacattcttcactgggactctgagcgacc

SEQ ID NO: 3036 - DNA, 201 bp, Homo sapiens
tgtgattgctcctaacatggccagtatcaaacaagcggctcacaaaattcctgcaaatttaacaataagctcgcataagccagtgtgcactggctccggcrcaccaccgggatcataaagcaaatggaggaagttgtcttgagggaattcagacaggcttggtgtaaaagagacaaggagactcagcctcaaatgcatcca

SEQ ID NO: 3037 - DNA, 201 bp, Homo sapiens
caccaactccccagtgctgttcatgtgaaatgagtgagttatcatgaggtccagttgttttaaaagcgtgtagcaccttctccctccctctcttcctcccrctctggccatgtgagacgtgcctgcttttcctatgccttctgccatgactgcaagtttccttctcctcagaagcagaagccactatgcttcctgtagagc

SEQ ID NO: 3038 - DNA, 201 bp, Homo sapiens
atcatgggggcagagttctcatgaatgggttagcaccaactccccagtgctgttcatgtgaaatgagtgagttatcatgaggtccagttgttttaaaagcrtgtagcaccttctccctccctctcttcctcccactctggccatgtgagacgtgcctgcttttcctatgccttctgccatgactgcaagtttccttctcct

SEQ ID NO: 3039 - DNA, 201 bp, Homo sapiens
ggtggggcctggtgggaggcaattggatcatgggggcagagttctcatgaatgggttagcaccaactccccagtgctgttcatgtgaaatgagtgagttaycatgaggtccagttgttttaaaagcgtgtagcaccttctccctccctctcttcctcccactctggccatgtgagacgtgcctgcttttcctatgccttct

SEQ ID NO: 3040 - DNA, 201 bp, Homo sapiens
gagccacacgggaagggaagaatgcaggtgacttttaggagcagagagcatcccctagctaatagtcggcaaagaaagcaggtgatatggtttggatctgygtccccacgaaatctcctgtggaattgcaatccccagtgttggaggtggggcctggtgggaggcaattggatcatgggggcagagttctcatgaatgggt

SEQ ID NO: 3041 - DNA, 201 bp, Homo sapiens
gatctaacatgccactgccaatttgaagatggagagccacacgggaagggaagaatgcaggtgacttttaggagcagagagcatcccctagctaatagtcrgcaaagaaagcaggtgatatggtttggatctgtgtccccacgaaatctcctgtggaattgcaatccccagtgttggaggtggggcctggtgggaggcaat

SEQ ID NO: 3042 - DNA, 201 bp, Homo sapiens
ctctggaaggagaacagtgcagtccatgagaaagtcctgtttgttaggcagacaatactcaaaactggaggaaggaggaacaggtataaactgaggtcatycaaggaggcaccatggatgacatgggatctatttttaggtaagtcagcagatgagacaattatttaaagggcacctttgaagactatggtaggcagaatt

SEQ ID NO: 3043 - DNA, 201 bp, Homo sapiens
tctgtgaactcatctgatccttgagtgtccctggaagagaaactgagctttcattttgcagacaaagaaagtagttagctgatttgtccctggttttgtaygccaacgacccttagcattgagactggagctcatgcttactgaactctgaacttgggcctgtcaccctgcctgactctgcctttgaacaaaaggtaatga

SEQ ID NO: 3044 - DNA, 201 bp, Homo sapiens
catcaggcctctttctgggacatcagatcctgaatctgtgggggtcacgcaggcagacaggggtactggggctgaaaccctctgacctggcactgggggaytggagtctatgatgcatagacatccatctctgataaacttagaatatgattcagacccagatgcatgaacttgctgcttccagagaagccctgcctacat

SEQ ID NO: 3045 - DNA, 201 bp, Homo sapiens
accacttgcaaccaggctgcactgccagtctttccccaccaagccatcgtaagccactgtcccgccctctcccactcagcagctagtcttgctcttgtccyccctgtacgtccagttggactgcccaaagccctgactcccccttactgcctcccgcccatcttctggtcttagccagccctaccccaatcctcttccctc

SEQ ID NO: 3046 - DNA, 201 bp, Homo sapiens
cctgcgctgaaagcacattttcaggcatttttggatatcctgccaccacagaatacactgagaggcagtaatttttgaagataaaatgttcaacaactgcrtcttttgaccttctgggattcctatcataggttttgatcaacttagtctgaattccatggggctaaactgtatgtgagaaaatgtgaaatcctgatatcc

SEQ ID NO: 3047 - DNA, 201 bp, Homo sapiens
aaccccagtgtgtgagtctggggttaactcttcccgatggcaaattagttccttatgatctgcaattttatgttgtaggttgagattttctttttcccatmggcatcctgtatattctggtgtggagattgtcctttataatgggtttgcatgtatttctctaggagctctagtggttttactgatctgggacctatcttt

SEQ ID NO: 3048 - DNA, 201 bp, Homo sapiens
ggagtgctgcttttatctaggcatttatatctttaaaaaaattttggaaaaggtctagctattatcatttccagtgtttcttctccctcacttcctctacscttttcttatagactaccctacttgttcttcaaaactcttaataatatcttttaacaatatttcttaatatttcaatatcttaatattttctcttaatat

SEQ ID NO: 3049 - DNA, 201 bp, Homo sapiens
catcacagtttaccctctgacactggcttcagagttgcctcattatttagcctggaggccaaggccaggtcatgatccagccttttccttttggtgcttcrgagcttctcatgataagtctttgtgtttcagtaaggcacaggcgggacatggtagtgggagacatcagtaggtctccagggcaggtaggggcctctgggt

SEQ ID NO: 3050 - DNA, 201 bp, Homo sapiens
ctaatgcaaactgatgcaaaaacgtccatattgcaaaggaaaagtggaatcccaagactgttgatggaatctgctcagtatggaaggaaatgccatgcaartgtgtgtttgaaagataatcaggaagccagactgcaatgccaagaaaaataaacccagtctgataatccagactatcctgggccaaagagccagatctga

SEQ ID NO: 3051 - DNA, 201 bp, Homo sapiens
tgcgctgtttaccaaggatgtcctgaggtcagtacatgtgactccatgagcagtgagcatgttgctctctggccttgagatgtttaactcttggttggcgwtaatctggattgcaagttttatttctgagactgatcattcaagagctatcaagcattggtcaggcacggtggttcacatctgtaatcccagcacttgggg

SEQ ID NO: 3052 - DNA, 201 bp, Homo sapiens
gatccaatgggacaatgtttgtgacaggacctaacaccgaatgcaagggagaaaggcagatgtggaccccaggcgaagttgaccctgctggtcataccacycccgcatgcagtaggcagatggggagggactcacaggctggagccagactgcctgggttcaaatctcagctccaccactaactggcctgatgcccttggg

SEQ ID NO: 3053 - DNA, 201 bp, Homo sapiens
tttttttcctgtggtctttgggaaatgcacagcagtgtggctaatgtgtcttttatctgcttaaacaaaataaattgaataaaaactccaaaaaattagaraagacggggacactctaccctccctataaggatccaatgggacaatgtttgtgacaggacctaacaccgaatgcaagggagaaaggcagatgtggacccc

SEQ ID NO: 3054 - DNA, 201 bp, Homo sapiens
ccgaggccgtaagacttctctaggatgcagttctttttccatctaaagagggtaatacaatagccaaagagtggaagcaaccaagatgttcatcagccgaygaacggatgcacaaaatgtggcacatgtgatggaatatgattcagcaaccaaaagacatgcaacaacatggaagaacctcaagaacactgtgcccagtgg

SEQ ID NO: 3055 - DNA, 201 bp, Homo sapiens
aaaaatgatttctcacctctcaaatctttgcacattttccatgtaaagtgaaatgtatttggataattctttaagtaaaatagaaatgtctactgccgggkagaaattgagagaagtttaactaaaattaaaaagcagaaaaattctaaagtccttattatatgtctccacattatcttatttgatttccttcccagcact

SEQ ID NO: 3056 - DNA, 201 bp, Homo sapiens
gatcaggacaagattttaatttttcatgaagagtaaaactgtagctttctacatggccagataactggggtaatttgctcacacacacgagtgcagtttcwgcttggggctattgaggcctctgcgatgacccggattgctaaatggaaaggagggtgccttgttaggcaggggtggcagagggaagcgaggagtccttca

SEQ ID NO: 3057 - DNA, 201 bp, Homo sapiens
ttctctctaagattctccattgatcccctgagtcaagaaaatgtgtagtttatcatctgcctgatcaacaatagctgagttcctccaagttgcctcatccytttccttacatcagatcaggacaagattttaatttttcatgaagagtaaaactgtagctttctacatggccagataactggggtaatttgctcacacaca

SEQ ID NO: 3058 - DNA, 201 bp, Homo sapiens
accaaatggaatcagtctccaaacctttggaggctctgtcattcagcttgaggcaaattccattaagctcagttacaaaaagatgaaggaactgggcggcyagtgagtgctacatcttgggcaacgagcttatggcccctcgaccgccttgtcttgtgtataccacattgcagtttggttttcatgcatggctgacatggg

SEQ ID NO: 3059 - DNA, 201 bp, Homo sapiens
gagaagttttatgccagggatatatgaccagaatacatgaaggtcttttgaatttattttcaatagccctgctactctcttctctatgaaatatttagcayttaactcgttatttctgctgctggcaaagtctcaggtgcaggtggctttgtagacatggcagaatgtcacaccaaggtaattgtttctctttatttcctc

SEQ ID NO: 3060 - DNA, 201 bp, Homo sapiens
atgtctcagttaggaactaaaactaagcttcaggctcctgttcccgagaatttgctccgtcctgacaaaaaccgcatcaattttcccagttaactaccaayaggtgggagagaagggcacacaccaaaatgtcatttataatttaaaattcattattgaaaagggctctgcagtaatagttcaacctcaatcatttcaaag

SEQ ID NO: 3061 - DNA, 201 bp, Homo sapiens
gaagcaggggagctggacgtccgtcacatgtctcagttaggaactaaaactaagcttcaggctcctgttcccgagaatttgctccgtcctgacaaaaaccrcatcaattttcccagttaactaccaataggtgggagagaagggcacacaccaaaatgtcatttataatttaaaattcattattgaaaagggctctgcagt

SEQ ID NO: 3062 - DNA, 201 bp, Homo sapiens
gcccgtaattttaattgatggcacccacttcctcccggtgctcccaacacccatgggggaactcagcctcacagtgttcgcggggaaacccaagtcattcygtggccccgaagtcatcctaatgttaggttcccaaaggctgtcctcagcagagagagaataaaaaggaatgcctcagctcatgtgtcacaagcaggctgt

SEQ ID NO: 3063 - DNA, 201 bp, Homo sapiens
gcctcttgcatacaggtggtgcctaataaccagggaatgggacattcacacaatccctccatgccccagtttttgacccctgcatcaccctctctcatcaygtcctccacgcatgctgcccaagaatgaacaaacgggagacagggccaggctcttgctgagaactgcaagtgccagtgcccagctagagagcacagcacc

SEQ ID NO: 3064 - DNA, 201 bp, Homo sapiens
ccccttgctctagagggggccattccactaggtctcacatacagggtgtgagtagaatgatacgtcacctctgggctggatcagttaagagctgctgggcyttttccatgttctttcaaatctccctctcatccttgtccatagtgaccttgggggccacactatagaaggaatctggtttcagaattaccgtgtggagca

SEQ ID NO: 3065 - DNA, 201 bp, Homo sapiens
atgtgaggacacagctgaaaggtgccatctatgaaccagaaagtgggccctcaccagactctgacttggccagtgctttgatgttagacttctcagccacygaaattttaaatttctgttgtttatcagctacccaggctatgcgattttgttatagtagcctcagtggactaacacagggatgatcctaatagcttccag

SEQ ID NO: 3066 - DNA, 201 bp, Homo sapiens
gccagagggcaggagccagaggaaagcagagggaggtaaggttagaaagacccctcaggaccggattgtgaagaggccgaatggcgatcaaggtgatagaktctcctctgtgtgctgggagacccaatgccgccaattctgaagaccgtgggctgcattggccagggatgcaatggagccaggaactctgttggcaagatc

SEQ ID NO: 3067 - DNA, 201 bp, Homo sapiens
gcaggtgggcctgggtgacagcgactgtgtgagcctgaacagagggtcagtgctgtctaaggtgggaggaagaaagtcttaatgaggaccctgacaaagcrgcatgcaacatgggcactgaaaccaactctaacagggatactggatttccaagtgattttatcgatggttgaaggctcaacatcgtggctagcttatcgt

SEQ ID NO: 3068 - DNA, 201 bp, Homo sapiens
aggcaagagagccacgacaactgcttctgtgacatgccccgatgtcccctctggccccccagatgatgtcttctcaaacagaaagctggccaggtgctcamacacaggcttggcactcatagcccttgaggggcagggcctgggagcttggtcctccctctccccacaccctggagaattcctaggaaatatgccaagctc

SEQ ID NO: 3069 - DNA, 201 bp, Homo sapiens
aatgtttgttgctgtaaatctgtccttgaaacatcctgggatgaatgcaaatttgatttttactccctaaacaaacaaacaaacaaacaaacaaaccctcmgaattagcaaagaaattctacggaagttacaagctaggctctgttgctgactgactggacatatctggggcgcccaataagatatttttcactccagtga

SEQ ID NO: 3070 - DNA, 201 bp, Homo sapiens
cagtggggcccaacgctacctaggggatctgattgtctctttggaaactttctacagggagtattcactgggtcagggcaggcctgaatgctagtcacacygctggctgtgtgactttgggccaaacaccaaatttctctgagtctcagtttcctcgtttgataaacaagggcttgaattgagctctggctcaaacgcctt

SEQ ID NO: 3071 - DNA, 201 bp, Homo sapiens
gtgagctgtgtgtctcaccaccctcccctttccctaggcaaagaatcatgccacactctccccctgcccctgtcatggacacagggtcctcctttgaggtrggaaaataggatctggaggcaggaaacacatgaggctgattcacacttcagctacgaaaggaaatatcctccccatagggtgtacgccgagtaaatgact

SEQ ID NO: 3072 - DNA, 201 bp, Homo sapiens
aaaacccacttatttagaacttcaagtgtcaatataaaataatgtttttttaaaaattgttttgctctcaaaaatctaccttagagttgagtaaattaaawattcaattagcagatattatcaaacatctgcagaggagactgtggagaattaacaacaaagcaaaaccaaacagacagtccttgtcctccagcagtttgt

SEQ ID NO: 3073 - DNA, 201 bp, Homo sapiens
cagcatgcgcacgttaacctttcctttgctggctgcttccagcctttcaccctgctgctacctggcctgacattttatagatttcagcaactgggcaggayatcacgggccttctggagcacacaggtgggtggtacctggtatgcatagactcacccctttccccgcacaaacaaaactctgtagccaatgtgaaacaga

SEQ ID NO: 3074 - DNA, 201 bp, Homo sapiens
aaagagcctcagccatgtggatcagtcttttgggcataatgtcctggttatattaggaccccagggactcttggaggagctcctcagggtccttctgtatytctgatttctgcagcacatcattcactgactcacacatgcacatacacacaccctagcccaaacctcctggtgggtggagatgaagcccactggctgtga

SEQ ID NO: 3075 - DNA, 201 bp, Homo sapiens
tcgccgaatacttctaggttcccagctctcgtagtgtcttgtcatcagcaagttctacttgctacgtgtaaggcaggggagggcgttctggggatagtaasttagcaatgcaggtatttcctgtaaagagcctcagccatgtggatcagtcttttgggcataatgtcctggttatattaggaccccagggactcttggagg

SEQ ID NO: 3076 - DNA, 201 bp, Homo sapiens
tatcttgagaggtatttttatttcccaagaaaataataggcaaggaaacgctgaacccataagaatgaatgagagcatttctggcatagtaacttctgggygaaggtaaaacattgcaactgctaccgataacacagcaaaagataaaataaatttgttttttaagcatatatatatatatgtgtacctcattgattacat

SEQ ID NO: 3077 - DNA, 201 bp, Homo sapiens
tagaaaaaggacaaactcatcctatgaaaatgctgggcaattatcttgagaggtatttttatttcccaagaaaataataggcaaggaaacgctgaacccawaagaatgaatgagagcatttctggcatagtaacttctgggcgaaggtaaaacattgcaactgctaccgataacacagcaaaagataaaataaatttgttt

SEQ ID NO: 3078 - DNA, 201 bp, Homo sapiens
ccgctctgtgataagccaccacccacattctgttgacctagaatttgtctgttctgaataccacacaaagtttgccagtcaccctctggggcttgaaggcwctttttcttttctgtggggggtggtccctcagcaaccagaccaggcctgcaatttctgagaccccaagatgtgtgggctcctaaagcattctctcctatc

SEQ ID NO: 3079 - DNA, 201 bp, Homo sapiens
attgtttataattttaaattatgaacagaggtgctagaactttcttgttcatgtctcccagtgcaaatatggaaaagattctatgagaggttgctcctggragtggggtgtctggttcctagagtacggcattttcagctgtattaaataaagccaaactgtttcccaaaagagttgcacaagcttctgctctcaccagca

SEQ ID NO: 3080 - DNA, 201 bp, Homo sapiens
tttcaaactcacagaaaaatagcaagaatagtataaggatctcctatactttatctcagatttagcattttgccccatttgcttatcatttctctctcacwtatatatatatatacacacacacacacacacacagagacacacacatatatagtgtgtgtgtatctatatgtacacacatatatatataaatatataggc

SEQ ID NO: 3081 - DNA, 201 bp, Homo sapiens
cccaagattccagcgtgagatctggtccctggtgtggcagtgttgggggtagagtctttaagaggcgattaggtcactaagagggattcatgccactctcrcaggactggattaattctcgaggaagtgagtgagtccttgctctcacaggactgaattagttacaagagtgtgttattataaagcaaggcttctccctga

SEQ ID NO: 3082 - DNA, 201 bp, Homo sapiens
aaatctcctaacaaagtctaaacatgaacagcaaaaaatggtaacctgtaatcatgagataaaatcatcagttgaggtagacctagagatactaacactaytggcattagcagacagaggacttcaaaattactatcatctgtgtggcaaagaaaagaaagagtagctcaacggagaactggaacccataagacagaatca

SEQ ID NO: 3083 - DNA, 201 bp, Homo sapiens
ttggggtctcagcttttatgtagaggaggttttctaacagactgatctgccctaggcttgactcctgtccccatatctcttgaggtcgtaacaatcagagytcaaggtcacctgcattgggcaaatactctcaaagcaaaagtctgctttagaacccaactttctctgagtttttggcctcttatgaatctttagttcctg

SEQ ID NO: 3084 - DNA, 201 bp, Homo sapiens
ctcaaagcaaaagtctgctttagaacccaactttctctgagtttttggcctcttatgaatctttagttcctgctttctcactgaggtatttaaaggattgyttaaatgttttatccattatttaaaattgttttaagtgggagagtcagctaagttatctagcctcccatatagccagaaacaataagctgcataaatagt

SEQ ID NO: 3085 - DNA, 201 bp, Homo sapiens
gaatgtcttaaatgcttaaagcaattgcctcattttaaagacataacttacatagagaggcacaaatattaattaccaagcttgaaccttgcttgtaaatktactgcctagagtgaatatttatagattaaggcacaaatatcaaaaaataagatagaatgatggaagatttaactgcctaaagcaaggacccacttctag

SEQ ID NO: 3086 - DNA, 201 bp, Homo sapiens
gaaatggcttcatctgctccctctcccaggactctccaaagtgaaatttgaaatgtggacagacgggtcagctctggacagctccacttccagaattctcrtgggcaagaaacaattatttattttttcctaaacagacagacagtgctgagcttattcaacaacaacaagctgcttttcaaccttgtcttcttggaaagg

SEQ ID NO: 3087 - DNA, 201 bp, Homo sapiens
tttcatcatttgatgttcatttgcttttcatccttatgtgctttggctaaagtgctaaagaaaggatgtcatgtttggggtaaaacccctctcaagtttcrgctggtgaatgcttgatgcacctccccaggtacctcctgcagctaccctaggggacagggcaaaagaacaaggtgaaagaacccaatcgctggaggcagc

SEQ ID NO: 3088 - DNA, 201 bp, Homo sapiens
gaaaaaagatcctgaaacttcacctccaccagaacattcagagagttgttctcccagattccaacatcaattacactgaacaaatgctctctctatgttgyggacccaactgagaggtggctggccatggtgcaggtacaccaggtagacatctgtctgcaggacgcttgggcatcttctcaactgactcatctataaggg

SEQ ID NO: 3089 - DNA, 201 bp, Homo sapiens
ttgcagtacatgggagaaccagctctgtgcaccatccaactgcactgactgcgctcagaccccggcccaggtctccccactattggctgcactcttatccyggaaggctgtgggtcactgtctccatggagccagtgcccatcctacctgctcatttctgggacacacgctccctgacttcctggagagttcaaagcaaca

SEQ ID NO: 3090 - DNA, 201 bp, Homo sapiens
tttctttttaatgcaggccctgacgcatttcttggaacccaatggcaaccttggccaagaaatataacccaaataagagcatgtagagaccagtggggtgygttagaatgcacaggattttccaaccctggttgcctgatctgccaagacactgtggcttattcaccaagcccaacttgtacaccttggaagccctcacca

SEQ ID NO: 3091 - DNA, 201 bp, Homo sapiens
gagtgagtgaggccaatcaggagagagagtgttggcaggtcttgctgatttagaggagaggtctccccttacagattatttccagtcctggctctgctccrgctgaagcagagagattaaagatttgttaaaaaaacaacacaatcttaaaataatgaaaagacaggtttgttgttttttacaaaagagctttaaaagatg

SEQ ID NO: 3092 - DNA, 201 bp, Homo sapiens
agtgaattaaaacataattcacatagaacagtctctggcacataagcgtttactgccagtcttgtcagagtttgacaattttaaaagttttttttttttttccagggggccagattttgattttcttgatcctcactattgcttctttattttctattaaggcacgctcttttctttattatttttaaagtttgagatgaa

SEQ ID NO: 3093 - DNA, 201 bp, Homo sapiens
gctacagccactgtcgggggactcccctgcctgctgtctgtatactttcccttgcatgatcccaggcccgacagctgagcatatgggataagagtttccccattcgctgagctcttcgcttgcccttgtggtgtgcattccacggggtggccattgccctaacggtgggtaacactagcaagctggtccaggagggggagc

SEQ ID NO: 3094 - DNA, 201 bp, Homo sapiens
agtatctcttatctctttcgcatttcccatctttggtttttctatgttgcattctgtataatttttcaaatccgtcttccagctcttaaattaactcttcrgctatttctaacctactgttacactcttccactgagttttgaattttgaattttcagaagttctttttagccattcataaagatgattggccatttgtat

SEQ ID NO: 3095 - DNA, 201 bp, Homo sapiens
tctctattccattatttttctccctcttttccaggtattctaattagaaatatgctacaaattttcattctatttaagtatctcttatctctttcgcattycccatctttggtttttctatgttgcattctgtataatttttcaaatccgtcttccagctcttaaattaactcttcagctatttctaacctactgttacac

SEQ ID NO: 3096 - DNA, 201 bp, Homo sapiens
ttgtgagtctgtctttattcctcataattccttcttatacctcaaattctctttatgtttgtctaaaatgtctattttatcctaattttaaagagttttttatgctgtgtaattactcttatgttcgtgtattttttttctttcaacttgataaaccttttgttcccctgccctctggctttgttgagatgttacctgata

SEQ ID NO: 3097 - DNA, 201 bp, Homo sapiens
aatgggacaactgagctcccagggatgctggactacggggctatgagtgaactgtcagttcagtgaagtcctagttgttttcacagatgctgacagaatccgcggaggagtgaggagagggtatccaacatgagagacagtctgtaaagattcccgtttgtccttgaggtcttggaggcatctctggctaaagcagctccc

SEQ ID NO: 3098 - DNA, 201 bp, Homo sapiens
cttgtacccactgtcctcccagccactggccccttcaatgccttatatcactaggcagcagaggaacctgaaagggatcccatatctagaaaagagcatgwaagtcctgtccttgagcttgctagtgggcataaaacactttgaggcaggcgtacagagaccacgtatttgagttgtggctggtctgacagctgctgagtc

SEQ ID NO: 3099 - DNA, 201 bp, Homo sapiens
ccaggcctctgctcaattcttgtacccactgtcctcccagccactggccccttcaatgccttatatcactaggcagcagaggaacctgaaagggatcccayatctagaaaagagcatgaaagtcctgtccttgagcttgctagtgggcataaaacactttgaggcaggcgtacagagaccacgtatttgagttgtggctgg

SEQ ID NO: 3100 - DNA, 201 bp, Homo sapiens
gtagtcactgttaagctctgtcttccctcattagcctggagaatacatgtgttctggatctggccctcatgaggcacccaggtgcaggactgggcacaagmtcacctacaatcaggaagcatgggtggttcccggagacccaggatgctgtacagggctgggccccagctttctgtagttctgtccctcagttctcctggc

SEQ ID NO: 3101 - DNA, 201 bp, Homo sapiens
ctgacttcggcatccaagccacatttcctttctgagtcagtggcccgctttccagacggggtggtgacagggtgcgccctgacgaagggctgacactttcmcaggactgttcagggcccagcccaaatgggaaacttggctcttgtcagttgaaggatttcactcaggcctcgctgagatgacttgtacttctgcttagac

SEQ ID NO: 3102 - DNA, 201 bp, Homo sapiens
tgtgtgacttacttttccaaggaaatgggggtttaagtgaatgtgtgtcaattccaggctctaccttggggttttactccctcttcacatccccttccccmtcctgcacttcctcctggtcatctcagagcccagaccatggtgggctcagcagggtctgcccagataccccctgaagaggtggggagagacaccctctca

SEQ ID NO: 3103 - DNA, 201 bp, Homo sapiens
agtgcctagagtacacgctagaggaacactttcacaggtgcacaggaagacatatccaagaatgattccagttgcacagcttggaatatctccaaatgggmattaacccaaatgctggctgtcaacagcagaatggatacatcgtggcatagttatacaaggggatatccaggaatgaaaagaacaaggtatgactatacc

SEQ ID NO: 3104 - DNA, 201 bp, Homo sapiens
gccactgcactccagcctggtgacagagtgagactctatctcaaaaaaaaaataaaataaaataaaacaaatttcaaatcaataacctaatctttcaccayaacacatagtaaaaagaagagcaaactaaacccaaaacaagcagggcaagcaagtagtaaagattaaactggaaattaatgaaaagagaatagaaaagca

SEQ ID NO: 3105 - DNA, 201 bp, Homo sapiens
aggcaggcggatcacaaggtcaagagatcgagaccatcctggccaacatggtgaaacctcatctctactaaatatacaaaaattagctgggtgtggtggcktgcgcctgtagtctcagctactcgggaggctgaggcaggagaatggcgtgaacctgagagacagaggttgcagtgagccactgcactccagcctggtgac

SEQ ID NO: 3106 - DNA, 201 bp, Homo sapiens
tggtaagtaattaagaggaggctggtagctccatgagagcaacaagctagactgtaggacagctagtttactagggaagaaaatgaaccaaaaaaaaaaaatgaacaaagcctcagagaaatgtgtgacaccattaagcacaccaccatatgtgcagtagaagcaccagaaaaagaaaagagaaaggaacagaaaattatt

SEQ ID NO: 3107 - DNA, 201 bp, Homo sapiens
atattttcattggctacatttgagagtcccctttcactctatccttgctaaaactgaattttatcattaaaaattgctgatttcatggccaaaaatatatwgttaactgttttaatttgccttattttgattattaggaaggttcagaatctaatatttaataatgatgtgtatttggtggatggatgtgaatgtctgtgt

SEQ ID NO: 3108 - DNA, 201 bp, Homo sapiens
gactctatctcaaaaaaaaaataaaataaaataaaacaaatttcaaatcaataacctaatctttcaccataacacatagtaaaaagaagagcaaactaaayccaaaacaagcagggcaagcaagtagtaaagattaaactggaaattaatgaaaagagaatagaaaagcaatagagtaactcaacaaacccaaaaattggt

SEQ ID NO: 3109 - DNA, 201 bp, Homo sapiens
ccattgtactattccaaaccacaagtgttgctcttctaggttattatagtagtttcctaactcagcctccataatccccattttttacaacagaataatcstttaaaactataaacctcatcaagtcacaaccctgattacaacctattgatgcttaccactgcttttaggatcaactcaacattcttcactgggactctg

SEQ ID NO: 3110 - DNA, 201 bp, Homo sapiens
aaatgatgccattcgtgaaaaaaaccctgtcaaaagctcagtaacctgcctgcacatcaatatttttgactgagcctcggagggcaaactcaggctcaggrgcctgcttgggaatgagggcaatttggagagagcacaggccaggcgcttagacacatctctctaactgcggcctcttcccacattattctccttctaaat

SEQ ID NO: 3111 - DNA, 201 bp, Homo sapiens
tcaagtaaagatgaggccattggtgtgggccctaatccaacatgattactgtccttataagaagtgataagtttggacacagacaccacagagaggagaaygcagacacacagggaagagaccatgtgaagacagaggcagagatgggaatgatgctgccataaggcaagggacacctggggcttccagaagctggaaggg

SEQ ID NO: 3112 - DNA, 201 bp, Homo sapiens
cctttatgtctagctaagggattgtaaatacaccaatcagcactctgtatctagctcaaggtttgtaaacccaccaatcagcaccctgtgtctagctcagrgtttgtgaatgcaccaatcggcactctgtatctagatactctggtggggacttggagaaactttgtgtggacactctgtatctagctaatctagtgggga

SEQ ID NO: 3113 - DNA, 201 bp, Homo sapiens
gtgccaaatgctgcgcaagcctggaccacagtaggctgtgcccagactggacatgggccagactcacatctagaaggtgggactgaagatgaggctcggcsctggatagggccgatattcttctttgccgggagagcgaatgcagaaaaggatgggctcagacacacggactgacccctccttgtgtctcactggctgatc

SEQ ID NO: 3114 - DNA, 201 bp, Homo sapiens
cccagtgccaaatgctgcgcaagcctggaccacagtaggctgtgcccagactggacatgggccagactcacatctagaaggtgggactgaagatgaggctsggccctggatagggccgatattcttctttgccgggagagcgaatgcagaaaaggatgggctcagacacacggactgacccctccttgtgtctcactggct

SEQ ID NO: 3115 - DNA, 201 bp, Homo sapiens
ctgcattagaatctgcattttaacaagatcccagaccgttcacaagcacattgcatctcaagaggtgctggcacaggttacagcacaccccattctgcaaytgggaatgggttaatcccaatgcccctgagaccttgggaggttctgccaccatcatttgccttgaaaattataaatgtactgataacgtctataggtggg

SEQ ID NO: 3116 - DNA, 201 bp, Homo sapiens
ttctcatttctccacttctcaacccctggaacatgggtgaaaggccaggtgtgccctcctcagcttggagtgactcagccatgggccctggcagtcaggtwcagggttgggggtgtgagcctgcccactcaccagacgagcatgggtgggcaaggctccagcaccctccacagagctctggcccttcctacccagcctggc

SEQ ID NO: 3117 - DNA, 201 bp, Homo sapiens
tcccgccagggagataatgcttcatgctgagatttgaggactggcaggggaattatctatctatgtatctatgtatctatgtatctatgtatctatgtatstatgtatgtatgtatgtatgtatctatctatctatctatctattttttaaaatttattgtcctgtggaataaagtttttagactgtgtgtgatcctagtc

SEQ ID NO: 3118 - DNA, 201 bp, Homo sapiens
gccgttcaaagtcagtgcacatccaagcgtttgctgagtgattctgctgcgcgggtaaccacccagacccgtgaacagtgcaggaggccagttcggaagtwatcatgagatgatcacccagtgtgatggaagcatctcctgggaccggctgacaatttgggaagtttacagagcacttgagagagacacaacccgagggga

SEQ ID NO: 3119 - DNA, 201 bp, Homo sapiens
agactggaattgagctcaggataagagcaacttacagaaaaggagccccaaaagcctgaatagggtttctctttggtcccggactaaatcctaagctgtakgaacagcagcaagatttcaggggcctggaaatatttggggagctaagagctcaacagagattttacaggttgtatagcactgagtaggtgaaattctggc

SEQ ID NO: 3120 - DNA, 201 bp, Homo sapiens
acaggagatattcataatcagctccagaaaaaaactatgaaatttttgttgtggttacataaaatttataaattaatttagggaaagctgacatctatatmatgttgcatgttcttatctaataacacaggattttaataattgtttgagtctacttttgcttctttcaagagtattttatagttttccttgtgcgtattt

SEQ ID NO: 3121 - DNA, 201 bp, Homo sapiens
caatggcaaggtgctaagtgtgaaattagggggctggtgggttcctgctgtcagcaagtgtaatctttgcctgagatctgtcagaaggcaggggagggtgragagtgttcacagaaggggtttttaagagcagggttgcttttatgaaaagtcacatatatcatccagacacaggtatgtgtgtgtattctgcatacatat

SEQ ID NO: 3122 - DNA, 201 bp, Homo sapiens
acaggacactggaggaggtgcagtgagcagtagagacggccctgtgcccactccttcccttccatgctgcaggcctcttctcttcatctcgagaaagccaytccactcaaccatccagagcacaccacggagggctgtggggagcaccaagatgggaaccccagggctgcccccagagatatttggcgttggggtgggggt

SEQ ID NO: 3123 - DNA, 201 bp, Homo sapiens
ggaagagggagcgaaaacagccgcaggtgcaaggcacagcagagcagctgaattgaaacagggtcctgaggtcagaccctgagcagcaaagccctccttcytccacagatgctgagtggctccgccctgggctcacaaagatgaacaagctacgctaggtgcttcatcagtgctgttggatggatggatgagaaatggaga

SEQ ID NO: 3124 - DNA, 201 bp, Homo sapiens
ctgtataagaaaccaacctgggagacaactgaggacagactccaggcacccaacagcattttggtgcagaagcacctgcagaaataagcccttttcccacygggacccaacttacggaaggccatgtagaactcgcggagggtcagggagctgtcactgttgtaatcgtcaaatcggaggaggtcacctggtgagcaacca

SEQ ID NO: 3125 - DNA, 201 bp, Homo sapiens
caggcatgacgcaaaacaatgaagcttggtaccttcctctcgccacaggatgtttgcaactgcagcagcagagaatgaggaaagcaggagtgtgatggagkcaaggaaaaagaagaaagcagtgttaaaccgtcactgcagtgattccatttatgaagatcctggtacctagtccatcacttacagaatctataccactca

SEQ ID NO: 3126 - DNA, 201 bp, Homo sapiens
attgccctaggaacagtatcttgggggaagctctggacatgaacaaatgctttcaggtctccagaccctttgattcttaagtgaatctttgaaatcatgcsctaggaccacagaagctaatggaatttctcacatttcatggatgatcaagagtaagcaacatctctcccagatttcctggacaaccagcaggagaagtga

SEQ ID NO: 3127 - DNA, 201 bp, Homo sapiens
ctggctgagggaaatcaagtggttacagcctcttagatttagcccctcatcctcccaggattcaaagagggccttgcatcaaggctgccaaactattctcrgtcagtttccatctggtcttttccctggagtgtccatatttgtcatctcagctaattttgaattttctaggttgaaggtacaaggctcactttggaacca

SEQ ID NO: 3128 - DNA, 201 bp, Homo sapiens
gtttggaaaactgcccaactatgacattgtatcatctggtataatacaacgctggcttggtgagtgattgctgaaagggaagctcatcttcgtgaacagcrtaggagataaagcgtgaattcaaaaccaagaaaaatgagtttaaaagtgccaactaatacacaaataggaatgcgatgtcacaagataactttgaaaaca

SEQ ID NO: 3129 - DNA, 201 bp, Homo sapiens
tcatgtagtcttcccaaagtgtgttcaacaaatccttcagtgttggatatttagaaacaatattaggatattatttttaatctcttgcaaatacaaacaaygcagtaacaaacattgtatttgtgagagattaaaaataatgtcatagctcaatttttgtccacatccatgattatggcctttggaaaaattctgagaagt

SEQ ID NO: 3130 - DNA, 201 bp, Homo sapiens
agaagtgcaaggaaatagccaaaggaatgttaatatgttaattctcagaggttcagtggctgcctgatggtgaaagaagagaaattgttggggaggagggrgaataggggcagaactcatctctccccacagaaggtcaagaggccacccaccgcccagccccagaagaccacctcaaactctgctgccctccaggaggag

SEQ ID NO: 3131 - DNA, 201 bp, Homo sapiens
aatcctggaagaagtgcaaggaaatagccaaaggaatgttaatatgttaattctcagaggttcagtggctgcctgatggtgaaagaagagaaattgttggsgaggagggggaataggggcagaactcatctctccccacagaaggtcaagaggccacccaccgcccagccccagaagaccacctcaaactctgctgccctc

SEQ ID NO: 3132 - DNA, 201 bp, Homo sapiens
ggcttggcagccaacataaggtacaaacacccttggatgtgatgaagcaagatcaagtcacttaagcaaccaccacccactaaagagaggttcagggcatmagagaggcaccagcccagaagcattcctcatccctactaaaaattaacatgaaaaggaaggagtctcatgtgtgcagtgctatctgctctgtgtcacagg

SEQ ID NO: 3133 - DNA, 201 bp, Homo sapiens
cttcaaaattactatcatctgtgtggcaaagaaaagaaagagtagctcaacggagaactggaacccataagacagaatcaaaaggatctagaactgtaaartattatattgaattttaagaattcactggctagaattaacataaaaaaactctgaagaaaaggttaatgaactcaaaggtagattgaagcttgaaggggg

SEQ ID NO: 3134 - DNA, 201 bp, Homo sapiens
atgcttcatgctgagatttgaggactggcaggggaattatctatctatgtatctatgtatctatgtatctatgtatctatgtatgtatgtatgtatgtatstatgtatctatctatctatctatctattttttaaaatttattgtcctgtggaataaagtttttagactgtgtgtgatcctagtctttgccccctggaggt

SEQ ID NO: 3135 - DNA, 201 bp, Homo sapiens
gctacttgagaggctgaggtaggagaattgcttgagcccaggagacggaggttgcagtgagctcagatcatgccactgcactccagcctggctgacagagygagactttgtctcaaaaaaaaaaaaaaaaaaagagtgaaaaagtgtgttcaggagaggaaaccaaagatgtggtccagcaatcttttgttaaggagatta

SEQ ID NO: 3136 - DNA, 201 bp, Homo sapiens
gctagtcttgctcttgtcctccctgtacgtccagttggactgcccaaagccctgactcccccttactgcctcccgcccatcttctggtcttagccagcccyaccccaatcctcttccctcacttgtcccctaggggtacctgggctccccaagagcctctgcccacctcagcccagggtctgctgttccttcatgggtgcc

SEQ ID NO: 3137 - DNA, 201 bp, Homo sapiens
tgtgaaattagggggctggtgggttcctgctgtcagcaagtgtaatctttgcctgagatctgtcagaaggcaggggagggtggagagtgttcacagaaggkgtttttaagagcagggttgcttttatgaaaagtcacatatatcatccagacacaggtatgtgtgtgtattctgcatacatatatttctcactgtgcataa

SEQ ID NO: 3138 - DNA, 201 bp, Homo sapiens
agggagggttgacgctagctctgatgtgaaatgtctccttagggccactagcggtgccaacagaaagcagacataccttggctgggctggacactcagcaygggtgtggagacagcctgcagccagcatctgggctccctgggaggctggcccacggccacctctctgttcctgggaacacctgagcaacttggcagcttc

SEQ ID NO: 3139 - DNA, 201 bp, Homo sapiens
cactcagcacgggtgtggagacagcctgcagccagcatctgggctccctgggaggctggcccacggccacctctctgttcctgggaacacctgagcaactyggcagcttcatacagaacgtggaatacagaggacttttcaaaacactgcggcatccttctgaaccctggggcttgagaatcttaggtcttccaaaaccac

SEQ ID NO: 3140 - DNA, 201 bp, Homo sapiens
ctctgaggtcttccagtttcttcatcttatttttgttcaatggaattaactttcttcttgaagacttgcttttcagaaccttctgactttctgttctaacktgaatggattctctcccaggtttcttacacagttgtcccacaagtcctgccggggttttgtttcactggatacctggcttagctcttctgtttcttggac

SEQ ID NO: 3141 - DNA, 201 bp, Homo sapiens
accatggcacatgtacacgtatgtaacaaacctgcacgttctgcacacgtatcccagaacttaaagtataataaataaataaaaaataaaaataaaagaamtgtgaaggcaattacctcactgccttccagtgttgctaatgccaatctgccaacaatgattcctgatcctttgttgataacttgtcttttacctctggaa

SEQ ID NO: 3142 - DNA, 201 bp, Homo sapiens
tgttccctatcccccacagccagttgctcttttccttcctgttggttcttcccttttgtgctcttggctttctcaaaatgtctcacgatccccgtttgtcygctgcattgtgcatgatgggttgatcagtgcaggcagtagacaccggtgtgcattgcctgtggctgtgtaggtctctgtctcttcccctgggagggctgc

SEQ ID NO: 3143 - DNA, 201 bp, Homo sapiens
cgactgtaaaggacccataggatggactttatgtttgtcatgctgccatgcgactgtaaaggacccataggatggactttatgtttgtcaggctgccatgygactgtaaaggacccataggatggactttgtttgtcatgctgctatgtgactgtaaaagacccatgggatggactatatgttctttctgttcttggagat

SEQ ID NO: 3144 - DNA, 201 bp, Homo sapiens
caatttggatcaacattttctagaagtttttcttaaaaagttgccacctgacagtgttatagcagaggccataaggccaaagacaaaaataactgtacacwagcgcacacacacagttgccatctgaaataacaaccccagaagcaggaaggaggcatgctgcctgcggggctttgttcaccacgggcctctgggttgcag

SEQ ID NO: 3145 - DNA, 201 bp, Homo sapiens
cagaggtcaaggggtgggcttttgaaaacaggcccctgcagctattctgcactggccgcagggtcaggagctgcatccggtcttaattctgctcctgctaygtggcctcagagaggtcacttatcctcccagaaccttagtttgtgcatctgtaaactgacccctattatacaggactattataaggatggagagatagcc

SEQ ID NO: 3146 - DNA, 201 bp, Homo sapiens
gttgagtgtgcattgaagttttgacatgcagaggacatcctggagagccttggtggcccaggcccaggtctcactgaggaagtaaagtgaatccacacccrgcagtaactggcagttccttttacttcctcaatgagaccacgtaagctccttgtgaacagagtttgaactcatccctcctgtggcctcagagagtgggca

SEQ ID NO: 3147 - DNA, 201 bp, Homo sapiens
aagggcggggcactgggcagggaatccatgagaccaatccatagatactggtataactaagggcacagcaccagtcctctagctgatggccttgagacaaycttataattcaaaggccacagctgtgcccatgcagatctcacgtcacctacatcacacctgcagccccgggagcaccatctttccaccagagagtgagac

SEQ ID NO: 3148 - DNA, 201 bp, Homo sapiens
ggaaacaaatcttctagttatttaggttttaatggccaagaaggggtttctaatcctttatttcagactcagaattctgtttttgtgctggtccgtgctcyccttcacactcctgagaaactccttgaaaccaacacccatggctgtgccctggtcccatgggaagatggatcgagaactgtctgactcttagtgaggacc

SEQ ID NO: 3149 - DNA, 201 bp, Homo sapiens
cacccatggctgtgccctggtcccatgggaagatggatcgagaactgtctgactcttagtgaggaccgatgtccaggcatctcaggaaatcctcgcatggytagtgttttatcttttaagaggaagaggctcaaggcctcttacagaggcttgggggcctgggtcccagggggccttctgggtcctggaggccagttataa

SEQ ID NO: 3150 - DNA, 201 bp, Homo sapiens
cccatggctgtgccctggtcccatgggaagatggatcgagaactgtctgactcttagtgaggaccgatgtccaggcatctcaggaaatcctcgcatggctrgtgttttatcttttaagaggaagaggctcaaggcctcttacagaggcttgggggcctgggtcccagggggccttctgggtcctggaggccagttataact

SEQ ID NO: 3151 - DNA, 201 bp, Homo sapiens
gactcttagtgaggaccgatgtccaggcatctcaggaaatcctcgcatggctagtgttttatcttttaagaggaagaggctcaaggcctcttacagaggcwtgggggcctgggtcccagggggccttctgggtcctggaggccagttataactgctgcccaaacctcccccacagccaagggctaagggggctgtgctgta

SEQ ID NO: 3152 - DNA, 201 bp, Homo sapiens
gccagagtggggcccagcacccaactaaaggttgcagtaactctggagtctgagaagtccattgggcacaagtgtggagctggggcggactgcaaagcccyggacagaccccgggcagggaccaatatagcctgctggtcagtgtggctagatcagatccctggcaagtgggacaggaaggacagcatgtttgagatttgg

SEQ ID NO: 3153 - DNA, 201 bp, Homo sapiens
tgcttcattggcttctgcaggctctgcagacccaggtttcttgcctacctcatttcttaagatttactccttctggcctctctccctagcaccccccacamcccctaaaatgaggccaaagtagttgacttgggctcggagacacccatgctgaggtccccaaaggagaagtgtgctagggccacaaaacacctggggcct

SEQ ID NO: 3154 - DNA, 201 bp, Homo sapiens
gagcggcaatgcattacccttcaaaaataataaataaagttccagagtaattgaaaagcctcttcgtctcttctgagatggcgcgtcccattctctgtcaygtttcccaattatcaccgtgagtgatactccctaacgcagggagcttaattgccatcttaccgtgtgttgcatttaccgtgtattcctaaagcaaaattt

SEQ ID NO: 3155 - DNA, 201 bp, Homo sapiens
gcagacggtgcttcagggattcagtttgtcttatgctgggaaaagtcagtcttgagccaaatgtaggtacccatcccaatagacgaagaagcctcagggayggacttccaaggctggcttggtctccatgcagggttctggcaggcacacccacacatggcctgctgaataccaccagcctccaaagctacccaagtctgt

SEQ ID NO: 3156 - DNA, 201 bp, Homo sapiens
ccttgggaggttctgccaccatcatttgccttgaaaattataaatgtactgataacgtctataggtgggaggttgtgccctcccagttgtacctgaaaaaygaatatccacatcctctgactcagaataatcagcagaaagccctggctaagtgttaggggcccagagaagtggcccccacatcaaccagcaccgcacctg

SEQ ID NO: 3157 - DNA, 201 bp, Homo sapiens
cccagttgtacctgaaaaacgaatatccacatcctctgactcagaataatcagcagaaagccctggctaagtgttaggggcccagagaagtggcccccacrtcaaccagcaccgcacctgcagaggaagttctggatccttttgaaaggagtacgtggttcggttatcccaggggtccacggccctggggagaccattctc

SEQ ID NO: 3158 - DNA, 201 bp, Homo sapiens
tgaaaaacgaatatccacatcctctgactcagaataatcagcagaaagccctggctaagtgttaggggcccagagaagtggcccccacatcaaccagcacmgcacctgcagaggaagttctggatccttttgaaaggagtacgtggttcggttatcccaggggtccacggccctggggagaccattctcgcctcttgctga

SEQ ID NO: 3159 - DNA, 201 bp, Homo sapiens
atcacaagggtgatgcggcagaaaagccatgagagatgcacacgtactgtaggtgaggcttaagaaaatgcgaacgtccagcttggacccccgttggttcmccgggaagagggagttccttttatttatgcccacaaaccagctgagggccagggtgagtacaaacaccaacgggcagatctcaagccctacagacgacca

SEQ ID NO: 3160 - DNA, 201 bp, Homo sapiens
tttctagactaactggcaagttagaatttgaggatgcagatgcagctgaacaagtgcagatgtcctgttagtaccctcttcccctggaagggaaacatgtrggggcagtctcttctctgaccacattggtgatgcgggtaggaagaaccctgggcattggggttgaggacagcttttccctccggagccagatggcctggt

SEQ ID NO: 3161 - DNA, 201 bp, Homo sapiens
aatatacctaccaaccctatgccccaaggcggctgtgggtctttagcgggcactggggtctttgtagctgatttcacattccatggggcctcttgcattcktggtaggtctctacttctgaaacttgagaccctttgtagtaacctcccctaaggaaaacaccacctcttaaacacttgagtgactgtgcatctcagccta

SEQ ID NO: 3162 - DNA, 201 bp, Homo sapiens
gaggcccttatctcttagcgcatgactcatctcttcgcgcatgactcatctctttgtgcatgactgtattattctcagcgtgtcatgtggttcctgtgcakaactgagctcaatgaatatttgctgatttcagggagtgtgttagcctaggatgctacctcctgggaagccctgagaggaaggatagttaagaattcatat

SEQ ID NO: 3163 - DNA, 201 bp, Homo sapiens
tgtggttcctgtgcataactgagctcaatgaatatttgctgatttcagggagtgtgttagcctaggatgctacctcctgggaagccctgagaggaaggatrgttaagaattcatattacccagggaggtctggccttgccctctttggctacagggaggcaatctctaggctctggaatgtcatgcctcataggggtctct

SEQ ID NO: 3164 - DNA, 201 bp, Homo sapiens
tctgtctgaaggggataaggaagatgagtaagcccagagacgccacccagatggagaatgtggggtgggcttggaagtgccgctccatacactgcccatcscaccacctgtggagggggagagagtcctttggggcccattcccaccccacctggatgcgttttgcagtcccaacaagtatataaacagttgttctgcctg

SEQ ID NO: 3165 - DNA, 201 bp, Homo sapiens
acagctgcctgtgagagcagacttctggctgcttcaccctggcaactgcccaacagacaccttctggtcaggaaggtatgtgcaggtctagaagtcaatcwtctgggggaaaggggtgggccctccaggtctccagcatcagctccctgagcccacggtcccaccccctgctagggcccacactgtccaggccactcccat

SEQ ID NO: 3166 - DNA, 201 bp, Homo sapiens
gggtgggccctccaggtctccagcatcagctccctgagcccacggtcccaccccctgctagggcccacactgtccaggccactcccatccttttaccagtrtttatttacatactgtgtgcccgatgctgggcagcctccagtcctgggcactgtgggtgcctgtggtgggaggccaagggagggatgttcaggatgagac

SEQ ID NO: 3167 - DNA, 201 bp, Homo sapiens
ttactgagggcactccatgcccgggccaagcttgccactggggtcctgagatgaaccaagggattccaggaacagaatcttaaatccttctttaccccagragcaactgtgctttaatgagttgcaagagagaactttgcccaaacttaaatcatgaagtcatttgtccgaaattactgagctcctctggtgcccgacagc

SEQ ID NO: 3168 - DNA, 201 bp, Homo sapiens
taacaaccttgtctaaggtcttcagggggacacagacttcatcttaggctgccgtgtctacctgatattaacactgctaatgacagtcaccacaaggtcaracagaacactgggtggaggatcaggagaccacctgacttcagctgtgagaccttaggaaaggcattcactcccctgcccttcctactcctattccctatc

SEQ ID NO: 3169 - DNA, 201 bp, Homo sapiens
ttggcctgaggctgtttcctactctctccttgagcctttatggatatattttggataaatgtaattagctacccggggaagcaggagatacttattttatrgggagagagttcttctctcagtggagtgtgggtatcagcctccatgtgctcaacatacctggagacttggtcgggacttgtgcacgtccccccagctcag

SEQ ID NO: 3170 - DNA, 201 bp, Homo sapiens
acttgtcataggacagcttagccggcagagggtccacacctatggacttgaaaaaaaatagtgacatgttgtgaaagctgacatgatggtcatttctgggygttgtatgcatgggcatcactcctgggcgaggggaaagccagtctagaagccttgccaatggttccatttgggaacccagggcagaagcttcccctctgt

SEQ ID NO: 3171 - DNA, 201 bp, Homo sapiens
ttatttgcaggtcatacagggtctggatctcgccccgcactgtgatctcctgcacgtgcagccaggggctgtcagctgcagcactgactatgaagcgcccrtcgggggatgtgtgtggggtgcctgttacatcaccattggggccaagcacagagtctgtgacactgtcaacgagcagctgtcgggcagcagaggcggggc

SEQ ID NO: 3172 - DNA, 201 bp, Homo sapiens
acccccccagggctgagctggccctgcgggtggctcctttaagttcttcagcatgcccaccttccccgtggacagctccaggaacagcaggtccggctccrtgtgcagagccgcgtagatgttgtattgattgctttcagtgaaggagcgctggaaggccaagtctgagatgcccgagtttatttgcaggtcatacagggt

SEQ ID NO: 3173 - DNA, 201 bp, Homo sapiens
cggtgtgcagcttggcacagaaatgatccctttacacagcagcatatgttctcatcgtagctcaaggcataaatcatacttcctaacgaaaaaaccccaaycttggtagcagcgcataccttatactaggaaacttgcaaggagaccagtgttgaaccacaaagcgagtacaggtttttgcttttgtctgtaaaaatgtac

SEQ ID NO: 3174 - DNA, 201 bp, Homo sapiens
gagtgccaacaggagatctttgttttctgctccacaggtaatttgtatcgcttccactcaaaagtctgtcttcctttgggcgtagagtctagaaatggttygagttccaaactgatattgcagccgagttccaaactgataaagcatctgaatccattaccatgacgacaagttcctaggtgattgcttcaagttctacat

SEQ ID NO: 3175 - DNA, 201 bp, Homo sapiens
gtcagggagctgtcactgttgtaatcgtcaaatcggaggaggtcacctggtgagcaaccaagtaagtcttcatccaggtcctgcttcttcagcacatgctrtggggtgaggaggagaacaaggccagaatcagatgagtttagagtcataggcattgatgaaaatgactcaggccaagagggaatccagggacagctcagt

SEQ ID NO: 3176 - DNA, 201 bp, Homo sapiens
tcagggagctgtcactgttgtaatcgtcaaatcggaggaggtcacctggtgagcaaccaagtaagtcttcatccaggtcctgcttcttcagcacatgctgkggggtgaggaggagaacaaggccagaatcagatgagtttagagtcataggcattgatgaaaatgactcaggccaagagggaatccagggacagctcagtg

SEQ ID NO: 3177 - DNA, 201 bp, Homo sapiens
actgtggtcacactgaccctgtcctcgggggcgaggctgagctgaaccacttctgcagagggaaaggaggaggcacggtcaggtgcaggcccagggattgkagtctcaactcaaggtgaatagccatgaatttcctgggtggaagaggcccagaagggcttcacgactccctgaaaattgtttacaatgtgctgactaaat

SEQ ID NO: 3178 - DNA, 201 bp, Homo sapiens
aaggaggaggcacggtcaggtgcaggcccagggattggagtctcaactcaaggtgaatagccatgaatttcctgggtggaagaggcccagaagggcttcaygactccctgaaaattgtttacaatgtgctgactaaatgtagagatagacacttttgctgggcgaggagccaagacttaggtcaaatgcccaaaaggctat

SEQ ID NO: 3179 - DNA, 201 bp, Homo sapiens
tcacgggctcatggttggcagctgtggccctggtcaattggtgccctcccttgccacccaacacctcccagccagctcagtgagaagcataaacgcgtgtygacttacgggtctttctagctgagtcttcaatgaagagcgaggagatatcttcatccacacccacttcatttttggcaatgcaggtgtatgcccctgtgt

SEQ ID NO: 3180 - DNA, 201 bp, Homo sapiens
atggctgtttccctacatagtagacaatcaatacttcacgaataattacacatgaatcttttctcccttcagtctgaccacctggcacaggagctggggartatgcagaaagcaaagaagaatgtggcaggctgtgccccagaatttgaagttttcctcactccattaaagaggtgtacctgtaggactttctgggcttgg

SEQ ID NO: 3181 - DNA, 201 bp, Homo sapiens
ctgtggccttctgttctgggttctgcagtgtgtgtgtattgattggggaatgtgggtaagaaaaccctcgccgaaatgtgttctctctgcagtgctgatgyggggatggggtaccagagaggagtggatgggccacaggtaggaaaacaaaatctgttttgaaaaggtatagcttcaggaactcacctggccccactcgtg

SEQ ID NO: 3182 - DNA, 201 bp, Homo sapiens
cgtctgtggtgagaccacctctcccaacccgtgtggcttgcaaaatgatcattcaaaccaggacacatgtaagttccactcatatgtgggagagggaaggygagcctgtttttgctgagtctctgatctaggcggtctccagagggctatgtgggttgtacttcttcgatgcccatgtgagagtcaccacagcctgagaca

SEQ ID NO: 3183 - DNA, 201 bp, Homo sapiens
attgccatctgcatctaagtccctgaacagagattccaccaggaggcgcttctgggaggcagggtcttgtctgctgtctccttcttggagtggctgcagaygggtctggagtgccagaaggacattcttcaagcgggcgtagccggccatggtgcacgtgtcacctgaaagagaaggtgaggttattattttgagacttat

SEQ ID NO: 3184 - DNA, 201 bp, Homo sapiens
gggggccggggtgggaaatggaaaactggattcctccatcatgtgactttcactgaacacgatgcccacctgagccagttcggagctgctgaggtggccaytgccatctgcatctaagtccctgaacagagattccaccaggaggcgcttctgggaggcagggtcttgtctgctgtctccttcttggagtggctgcagacg

SEQ ID NO: 3185 - DNA, 201 bp, Homo sapiens
agatgttctcagaggtattgaacacatgctcttagacaccagggggccggggtgggaaatggaaaactggattcctccatcatgtgactttcactgaacaygatgcccacctgagccagttcggagctgctgaggtggccattgccatctgcatctaagtccctgaacagagattccaccaggaggcgcttctgggaggca

SEQ ID NO: 3186 - DNA, 201 bp, Homo sapiens
ttgatctgagcagcagtttggggaggctatgaggggacaacatgcatggagccatttactaaccattcacctgcaggacgtgggtctggaacagctgctcrtggccggaagcatggcaggtgtaattgcccatgtggatggtggtcaccttggtgatgtacagggaatcatcctctccaaagtcctgcacagggcaaagat

SEQ ID NO: 3187 - DNA, 201 bp, Homo sapiens
ccggaagcatggcaggtgtaattgcccatgtggatggtggtcaccttggtgatgtacagggaatcatcctctccaaagtcctgcacagggcaaagatgacratgagactggcctctttattgaacgggctggaaaccatagctgtctcctggttttccagaaatcctgcagctgggagagagttcctttctgcctggccct

SEQ ID NO: 3188 - DNA, 201 bp, Homo sapiens
cttctgtgatcacctacaacacagagtgggaatcctagtgagggcccatgcaggtgggggctgaacctggagacacctgtacgctcaggtggagtcacccyggcagaggggtgcttgggagagagatgactaacaaacctcaatctcagggaagaggcaggagcaaagtgggagcagttcaggcacatcctaggcagggac

SEQ ID NO: 3189 - DNA, 201 bp, Homo sapiens
gtcccatgctgggcaatgctgccccttgcagggctgagctggagcggggagtgccttagaggcatcatgggccagtctcacctgatgtggttgatgatgargtttgttgggggaatgaagaaatcatccactcctgcaaagggtgtgcggatgaggtgctggctctggccggtgctggcttctgtgatcacctacaacaca

SEQ ID NO: 3190 - DNA, 201 bp, Homo sapiens
caccccggcagaggggtgcttgggagagagatgactaacaaacctcaatctcagggaagaggcaggagcaaagtgggagcagttcaggcacatcctaggcmgggacccattcttcctgaaagaggaagtggtgggacaggactgattgcccgaattgcttctgccccatggttaagcctgccttgctgcactttgtcagcc

SEQ ID NO: 3191 - DNA, 201 bp, Homo sapiens
tggacatctgagttgagacatccacgccgtttttcagccaagtgattctgggcatgggaatgccctcagcatggcatcttaggctggctgccactccaggmtcctgtgcctggctctctggatagacacggatgactggcggcactgtgggtgagagtcagtgctggtgagaaagagacggccctgacctggacttgggcc

SEQ ID NO: 3192 - DNA, 201 bp, Homo sapiens
atatagcaaatggaattttagaaatcaaatggcatgcctggttaaagatagacttttaggattttgcctgtgtatgatgtagaagctgccccaggcacagwtacttacatagctcatgaaaatcttttccgtgggtttgaggtgcctctggatctcacagtccacaggatggatgacgatgataccgtcgtcggagaagac

SEQ ID NO: 3193 - DNA, 201 bp, Homo sapiens
ctggatgaaggaatgagaattttaaattctcagcctcatctattcctctcttagcctgggaaaaaatttggaaccacaccacatatagcaaatggaatttyagaaatcaaatggcatgcctggttaaagatagacttttaggattttgcctgtgtatgatgtagaagctgccccaggcacagttacttacatagctcatga

SEQ ID NO: 3194 - DNA, 201 bp, Homo sapiens
aatctagatcccaaataacacaaaaccttaaccttcaaagtattttaacaaaagcaacaatggcagcttccgtctccagctaagccctccagaagggtttygatttgcacccaaggccctcttggaacaaaggaagaaaagccaagggctcagtgtctagacacaacatcaagcaggtagacaggggctaccttagcccgg

SEQ ID NO: 3195 - DNA, 201 bp, Homo sapiens
cctccagaagggttttgatttgcacccaaggccctcttggaacaaaggaagaaaagccaagggctcagtgtctagacacaacatcaagcaggtagacaggkgctaccttagcccggtcccaccgaccaagggaagacaatgctctcagagtctcctaaccaaagcaagcaccagcaccagctctcccaaccccaacccctg

SEQ ID NO: 3196 - DNA, 201 bp, Homo sapiens
cctgactgaagggaatgccccaaaggatggctacccatcaagagagaggcgaggctggtggacagatggcttctcagccacctggccacacttcctccccscaacaccaatgtgccagcacccaccacagtgttctcggtgtcgcctgctcagagcactgggcccatatcctcccacatcctccatgtctagttccagtat

SEQ ID NO: 3197 - DNA, 201 bp, Homo sapiens
cccatcaagagagaggcgaggctggtggacagatggcttctcagccacctggccacacttcctccccccaacaccaatgtgccagcacccaccacagtgtyctcggtgtcgcctgctcagagcactgggcccatatcctcccacatcctccatgtctagttccagtatgctccacctcccaggtggctggtgacaagacaa

SEQ ID NO: 3198 - DNA, 201 bp, Homo sapiens
gggataaatcaagcagatgattgggacttggcagatctgtgctgccaactccccgaaaaatagaaattggagccccatttacaatgcacagcctgatgtcytcattacaagggtgggaagtttcctacaggagtatagataatttagcaacagaggaataaataaagtagttagacaagtaaatgctaaattaagaggaag

SEQ ID NO: 3199 - DNA, 201 bp, Homo sapiens
tttcctacaggagtatagataatttagcaacagaggaataaataaagtagttagacaagtaaatgctaaattaagaggaagaaaaataatgggtttctgtraactcataaatgctcattttcctgggtcacagaacttttcagggccaattaaaattgtcaactatgatctcaaaataccaaagaggcacacagtgcacta

SEQ ID NO: 3200 - DNA, 201 bp, Homo sapiens
catttctctcctttccctgactgcagtcagcatcatgtcagcaagaactaaaaaaaggccagagtcaatccaactgggattctccttgtgtgtgtgcatgsgaggaggcagggggctcctctaaggcttttcttcccagtgtcccccaggatctgaagtatcagcatcacctggagctcagaatcttgggacccacctcag

SEQ ID NO: 3201 - DNA, 201 bp, Homo sapiens
cctaccaggccgattttggccttaccagcctccatagtcacatgagccaattccttaaaatagatctctctttctgtctctttcttcatatatacacacgcaccctaggggccctgcctaatactgtcatagcatagccgtctttaagctcactgaaggcaggtgctgtgtctcctttgttcagccctctgtgggtcatac

SEQ ID NO: 3202 - DNA, 201 bp, Homo sapiens
cttaaggaggggattctgccagcaggcggcctctggactcaaactgcaactcttctctgggtctccagctgctgcctaccaggccgattttggccttaccrgcctccatagtcacatgagccaattccttaaaatagatctctctttctgtctctttcttcatatatacacacgcaccctaggggccctgcctaatactgt

SEQ ID NO: 3203 - DNA, 201 bp, Homo sapiens
gtacataaaatggatcagttttctggcatgtaaattatatcccaataaagctgttagaaaatgaaatactatgttaatgccatgagtttttgagtttttttcctgtggtctttgggaaatgcacagcagtgtggctaatgtgtcttttatctgcttaaacaaaataaattgaataaaaactccaaaaaattagaaaagacg

SEQ ID NO: 3204 - DNA, 201 bp, Homo sapiens
ggtcccaatgctgtgtccccctcaactcatatgttgaaatcttaacccccaaggtgatggtattaggatgtggggcctttgggaggtgattaggtcaggaragtggaattctcatggatgggattggtgccctcataaaagagaccccagagaggcctctgccccttctgccatgtgaggacacagctgaaaggtgccatc

SEQ ID NO: 3205 - DNA, 201 bp, Homo sapiens
actccagcctggggaacaagagtgaaactctgcctcaaaaataaaataaaataaaataaaataaaataaaataaaataaaataaaataaaataaaaataaataaataaaaacatgagtcttgaaacaaaaagttcaatactcagatcagatgataaagccaagagaattttccagaatatagaataaaatatatagaacag

SEQ ID NO: 3206 - DNA, 201 bp, Homo sapiens
tgcactccagcctggggaacaagagtgaaactctgcctcaaaaataaaataaaataaaataaaataaaataaaataaaataaaataaaataaaataaaaahaaataaataaaaacatgagtcttgaaacaaaaagttcaatactcagatcagatgataaagccaagagaattttccagaatatagaataaaatatatagaa

SEQ ID NO: 3207 - DNA, 201 bp, Homo sapiens
ctgcactccagcctggggaacaagagtgaaactctgcctcaaaaataaaataaaataaaataaaataaaataaaataaaataaaataaaataaaataaaaataaataaataaaaacatgagtcttgaaacaaaaagttcaatactcagatcagatgataaagccaagagaattttccagaatatagaataaaatatataga

SEQ ID NO: 3208 - DNA, 201 bp, Homo sapiens
caccactgcactccagcctggggaacaagagtgaaactctgcctcaaaaataaaataaaataaaataaaataaaataaaataaaataaaataaaataaaataaaaataaataaataaaaacatgagtcttgaaacaaaaagttcaatactcagatcagatgataaagccaagagaattttccagaatatagaataaaatat

SEQ ID NO: 3209 - DNA, 201 bp, Homo sapiens
ttcaacaagatgccacttctaggaatcagaaagcaagaaagtgtgcttgaaaattaaaagcatgagtcttaggctgggcgcagtggctcacgcctgtaatygcagcattttgggacgctgaggcaggcggatcacctggggtcaggagtttgagaccagcctggccaacatggtgaaaccccgtctctactaaaaatacaa

SEQ ID NO: 3210 - DNA, 201 bp, Homo sapiens
atgcgtgtatgtgagtatatgagtgtgtgagtatatgagggtgtatatgagcatgtgtgagaatgagtatatgtgagtgtgtgtgtgtgtgtgtgtgtgtkagtgtgtatgtgtacaccactgcattccctgggacagaggctcagtggcatgacagagtgaaggtgtgagaagccaggtttcccacggctgggcctgcag

SEQ ID NO: 3211 - DNA, 201 bp, Homo sapiens
gagtacgagtgactgtatgtgtgtgtatgtgtatgagtgtgaatgtatatgtgacagtgtatgagtgtgtgagcatgtgtgagtgtatgtgagagtatgaktgtatgagtatatgtatgtatgtgtgcatgtgtatgtgtgagtgtaagagtgtgtgtgtatatatgtctgaatatgtatgtgggtgtgtgtgtgtatatg

SEQ ID NO: 3212 - DNA, 201 bp, Homo sapiens
gtgtgtgtgtcagtgtgagtgtgtgtgtgtgtaagtgtgagagtgtgtgtgagaatatgagtgtgtgagtacgagtgactgtatgtgtgtgtatgtgtatdagtgtgaatgtatatgtgacagtgtatgagtgtgtgagcatgtgtgagtgtatgtgagagtatgattgtatgagtatatgtatgtatgtgtgcatgtgta

SEQ ID NO: 3213 - DNA, 201 bp, Homo sapiens
ggagatcgagaccattctggctaacacggtgaaaccccgtctctactaaaaatacaaaaaattagccgggtgcggtggcaggcgcctgtagtcccagctaytcgggaggctgaggcaggagaatggcgtgaacccaggaggcggagcttgcagtgagccgagatagcgccactgcagtccggcctgggcgaaagagcgaga

SEQ ID NO: 3214 - DNA, 201 bp, Homo sapiens
ccatcaatctctctcttccccagggttctcattttgagtggagttgaggtagaagaattccttgggacaagaacacttaccggccaggtgcggtggctcamgcctgtaatcccagcactttgggaggccgaggcgggcagatcatggggtcaggagatcgagaccattctggctaacacggtgaaaccccgtctctactaa

SEQ ID NO: 3215 - DNA, 201 bp, Homo sapiens
catagatgactgatagcctttcctgagagcaaatgaggagagagaacgaatacaagtgactgcatgaatgaatcaattactaaatgaaggtgctgagcacctgaaggcaggctggagaataggaaggaccagcaaagttaggtggaggctggggaagccaaggactggcttcttcactggcattacaaatttggtgcagag

SEQ ID NO: 3216 - DNA, 201 bp, Homo sapiens
cagcactttgggaggctgaggcgggcggatcatgaggtcaggagattgagaccatcctggctaacacggtgaaaccccatctctactaaaaatacaaaaawttagccgggcgtggtggtgggcgcctgtagtcccagctactcgggagtctgaggctggagaatggactgaacccgggaggtggagcttgcagtgagccga

SEQ ID NO: 3217 - DNA, 201 bp, Homo sapiens
ctaagatttgagcttgaagaaagaatatttagtagccaacatttaatgcaaactgtatatagtatatagtaaataggtgttttttttttttttttttttttgagatagagtctcaccctgttgcccaggctggagtgcaatggtgcaatcttggctcactgcaacctccgcctactgggctcaagtgattctcctgcctca

SEQ ID NO: 3218 - DNA, 201 bp, Homo sapiens
agttttgaattttgaattttcagaagttctttttagccattcataaagatgattggccatttgtataatctcttgattttcaatcatatttttaatttttwaaaaatattaaatatacatattttatattcggtatcattttgttattcacagattttgttggttcttacatggcattctccttttggtgttttgatttct

SEQ ID NO: 3219 - DNA, 201 bp, Homo sapiens
gaatggccctagtaatcatgaccaaacttttagccccgggtcctacccatgggattaaaatgtctaagcaaaaaagaagaaaaaaaaaagaaaaaaatatmtttttcttgtttttggttaagtctgcttttcatcattacagatttgaaaggaaaaaaaatcagttatcggcagattaactgcttgattcaataattcatt

SEQ ID NO: 3220 - DNA, 201 bp, Homo sapiens
ggtccgcagcttcactcctgaagccagcgagaccacgaacccaccagaaggaagaaactctgaacacgtccaaacatcagaaggaacaaactccggacacrccatctttaagaacttgtaacactcaccgcgcgggtccgcggcttcattctcgaagtcagagagaccaagaacccaccaattctggacacaacactggtc

SEQ ID NO: 3221 - DNA, 201 bp, Homo sapiens
gtctagctaatctagtggggacttggagaacttttctgtctagctcagggattgtaaacacaccaatcagcaccctgtcaaaatggaccaatcagcgctcygtaaaacagaccaatcagctctctgtaaaatggaccaatcagcaggacgtgggtggggccagataaaggaataaaagcaggctgccccagccagcagtgg

SEQ ID NO: 3222 - DNA, 201 bp, Homo sapiens
agcggccagctggcaccactggccccggacagcgaggggcttagcacccgggccagcagctgcggagggtgcgccaggtcccccagcagtgccggcccacygggctgttctcgaattctcgccgggcctcagctgcctccccgcagggcagggcttaggacctgcagcccgccatgcctgagcctccccaccactgtgggc

SEQ ID NO: 3223 - DNA, 201 bp, Homo sapiens
gtagaattcttgcatcatggtcttaccaccccaaaattctaccaatgttcttcattgccttcttgcttcttaatatcgcagaaaagtccaagaacagaatgttttttttccttcctaccagacagtgtctgagactcacctttgacacaaatgtaactgaaggggagaagctgcccctgggcaagccggtcagctgaaacc

SEQ ID NO: 3224 - DNA, 201 bp, Homo sapiens
acatgtcagctacacgtgcagaaagttgccttcagaacacaagtgagagtgcaggcacaatctgcccagttgctgaatgataatcactatgtgtgtgtgtkttttttttaaattatacatgtaagagatgtggcagagcagacagagcaaagacaacatttaacatttcaaatcagtctttattgcagctctcctcctcac

SEQ ID NO: 3225 - DNA, 201 bp, Homo sapiens
ggcaggagaatggcgtgaacctgagagacagaggttgcagtgagccactgcactccagcctggtgacagagtgagactctatctcaaaaaaaaaataaaayaaaataaaacaaatttcaaatcaataacctaatctttcaccataacacatagtaaaaagaagagcaaactaaacccaaaacaagcagggcaagcaagtag

SEQ ID NO: 3226 - DNA, 201 bp, Homo sapiens
ttaatgcttacattaaaaaagaaacaggccaggcacagtggctcatgcctgtaatctcagcattttgggaggctgaggcaggcggatcacaaggtcaagakatcgagaccatcctggccaacatggtgaaacctcatctctactaaatatacaaaaattagctgggtgtggtggcttgcgcctgtagtctcagctactcgg

SEQ ID NO: 3227 - DNA, 201 bp, Homo sapiens
catgtttctcccgccagggagataatgcttcatgctgagatttgaggactggcaggggaattatctatctatgtatctatgtatctatgtatctatgtatstatgtatgtatgtatgtatgtatgtatgtatctatctatctatctatctattttttaaaatttattgtcctgtggaataaagtttttagactgtgtgtga

SEQ ID NO: 3228 - DNA, 201 bp, Homo sapiens
agccgagatcgcaccactgcactccagcctgggtgactgagtgacactcggactcaaaataataataataataataataataataataataataataataataataattcttcatggaaaagtcaataggccacaacatccagagtctcatgaacacatcttggagacagaagaatgaactggcttacttgagaaaggcct

SEQ ID NO: 3229 - DNA, 201 bp, Homo sapiens
gagccgagatcgcaccactgcactccagcctgggtgactgagtgacactcggactcaaaataataataataataataataataataataataataataataataataattcttcatggaaaagtcaataggccacaacatccagagtctcatgaacacatcttggagacagaagaatgaactggcttacttgagaaaggcc

SEQ ID NO: 3230 - DNA, 201 bp, Homo sapiens
gagattacaggtgtaagccactgcacctggccttatattttgaatttttaattaaatagcaattaaatttttcctataagtctagtatggctcttttttttatttttgaagagtatttagatctgtcacaatttcttattgctttaaatattttattttgcttttttttgttgttctcaactttttagaattggggggtac

SEQ ID NO: 3231 - DNA, 201 bp, Homo sapiens
tatgttctttctgttcttggagatagtgtcatacacttaccaagagtgatggttattagaggcactgagacaaaccccttctggggaccagcactgctgtgcccgctggggccccagtctgcccctctgtgtccagccccatgagaacccgctgttgcacgaagggcccacacagcatgggcagatcttccctccagcctc

SEQ ID NO: 3232 - DNA, 201 bp, Homo sapiens
atatgttctttctgttcttggagatagtgtcatacacttaccaagagtgatggttattagaggcactgagacaaaccccttctggggaccagcactgctgtgcccgctggggccccagtctgcccctctgtgtccagccccatgagaacccgctgttgcacgaagggcccacacagcatgggcagatcttccctccagcct

SEQ ID NO: 3233 - DNA, 201 bp, Homo sapiens
tatatgttctttctgttcttggagatagtgtcatacacttaccaagagtgatggttattagaggcactgagacaaaccccttctggggaccagcactgctgtgcccgctggggccccagtctgcccctctgtgtccagccccatgagaacccgctgttgcacgaagggcccacacagcatgggcagatcttccctccagcc

SEQ ID NO: 3234 - DNA, 201 bp, Homo sapiens
ctatatgttctttctgttcttggagatagtgtcatacacttaccaagagtgatggttattagaggcactgagacaaaccccttctggggaccagcactgctgtgcccgctggggccccagtctgcccctctgtgtccagccccatgagaacccgctgttgcacgaagggcccacacagcatgggcagatcttccctccagc

SEQ ID NO: 3235 - DNA, 201 bp, Homo sapiens
gatgagcagtgggtagtcctgggggaagaacaccaaacactcttttaattgctaaaagatggagtgcaagggtgctcccctgttgaaagcctctctctctstgtgtgtgtgtgtgtgtgtgtgtgtgtgtgtgtgtgtgtttctccatgtgtcctcttccctgtagccccatctctctgaggagcttccagcggtgcagaa

SEQ ID NO: 3236 - DNA, 201 bp, Homo sapiens
ggggcttcttgcacctgtgacccaaatgcaaggccaaaggtacattttccaactaggaagcgggctgttaagcgtcctctgcaacggactcttgcccacactttccctagtttttaaatgcagatgaggtagaactcacgggggcagctggctctgcttgtttaattggggtgcattagcgctgaattggagcccgaggct

SEQ ID NO: 3237 - DNA, 201 bp, Homo sapiens
gggggcttcttgcacctgtgacccaaatgcaaggccaaaggtacattttccaactaggaagcgggctgttaagcgtcctctgcaacggactcttgcccacactttccctagtttttaaatgcagatgaggtagaactcacgggggcagctggctctgcttgtttaattggggtgcattagcgctgaattggagcccgaggc

SEQ ID NO: 3238 - DNA, 201 bp, Homo sapiens
gatcctgaccttcacggtaccatcctgcacaaaaacttctgctggcctggtgtattagtcggggttctcttagagggccagaactcaaaagagagagagakatatatatatatttatttattaagtattaacttacacacctgtaacaggttctgtttgcagctctcacaaggtcccacaatagactgtctgcaagctgag

SEQ ID NO: 3239 - DNA, 201 bp, Homo sapiens
ttttccctggagtgtccatatttgtcatctcagctaattttgaattttctaggttgaaggtacaaggctcactttggaaccacaaacagaatctgcatgtstaaggcttgacatggccttttacccagggttaaacacacacgaggccatgcagaccttgcgcctggttccccggctgtgctgcactggagcagatccagc

SEQ ID NO: 3240 - DNA, 201 bp, Homo sapiens
aggcgggcggatcacgaggtcaggagattgagaccatcctggctaacacggtgaaaccccttctctaccaaaaatacaaaaaatcagccaggcatggtggygggcgcctgtggtcccagctactcgggaggctgaggcaggagaatggtatgaacccgggaggcacagcttgcagtgagccgagatcacgccactgcactc

SEQ ID NO: 3241 - DNA, 201 bp, Homo sapiens
gcactttgggaggccgaggcgggcggatcacgaggtcaggagattgagaccatcctggctaacacggtgaaaccccttctctaccaaaaatacaaaaaatyagccaggcatggtggtgggcgcctgtggtcccagctactcgggaggctgaggcaggagaatggtatgaacccgggaggcacagcttgcagtgagccgaga

SEQ ID NO: 3242 - DNA, 201 bp, Homo sapiens
ttggtgaaaccccgtctctaccaaaaaatacaaaaattatctgggcgtggtggtgcatgcctgtaatctcagttactctggaggctgaggaaagagaatcrcttgaacccaggaggcagaggttgcaaaaagttcagggctcctgaacagcagccctggttataggtgaggtccatcccccatcctgtgttcctgtctgcc

SEQ ID NO: 3243 - DNA, 201 bp, Homo sapiens
agtctcgctctgttgcccaggctggagtgcagtggtgcgatctccactcactgcaaactctgcctcctgggttcacgccattctcctgcctcagcctcccragtagctgagactacaggcgcccaccaccaagcccggctaagtttttgtatttttagtagagacggggtttcaccatgttagccaggatggtctggatct

SEQ ID NO: 3244 - DNA, 201 bp, Homo sapiens
gagtctcgctctgttgcccaggctggagtgcagtggtgcgatctccactcactgcaaactctgcctcctgggttcacgccattctcctgcctcagcctccyaagtagctgagactacaggcgcccaccaccaagcccggctaagtttttgtatttttagtagagacggggtttcaccatgttagccaggatggtctggatc

SEQ ID NO: 3245 - DNA, 201 bp, Homo sapiens
agtcaggacagcacccccaactctgtctctgggaggaggtggtgagactcacaccttctgtctcccaattttctttttttttttttttgagatggagtctygctctgttgcccaggctggagtgcagtggtgcgatctccactcactgcaaactctgcctcctgggttcacgccattctcctgcctcagcctcccaagtag

SEQ ID NO: 3246 - DNA, 201 bp, Homo sapiens
tctatgtacttgaagtcaggacagcacccccaactctgtctctgggaggaggtggtgagactcacaccttctgtctcccaattttctttttttttttttttgagatggagtctcgctctgttgcccaggctggagtgcagtggtgcgatctccactcactgcaaactctgcctcctgggttcacgccattctcctgcctca

SEQ ID NO: 3247 - DNA, 201 bp, Homo sapiens
ctcagttaatggcaactccatccttccagtcctcatgcccaaaaccctggagttatcctggactcctttcttttctaataaccacatgcaactcatcagcraatctctttggcaccgcccttcagaatatacccatgatccagcctctcctcaccaccatcgtgcccattagctgaattattgcaacagcctcctaacttg

SEQ ID NO: 3248 - DNA, 201 bp, Homo sapiens
cattttcagaaaatccatgttcacagcttgctctgtagagcctgcccccacaagttatgatttatattttattataaggtgaaaagagacaaaaaaaaaaatcctcacaagggaaaaaaaaaagcccactgactctttacagcaactcccagggcatttgatttaaagggacattgtcatctttaatgttttcattccgag

SEQ ID NO: 3249 - DNA, 201 bp, Homo sapiens
aataagcattacggatagaaagaacaagatgagagaataccaagagagtagcaggggagggctattaaggtgtgtgtgtggggggtgggtgctggtgtggsggaaagcctctttgagtagagaatatttaagtgaagatctttaaaatgagaagaagccagccaggccaagaatgggagcaaggacattctagttagagaa

SEQ ID NO: 3250 - DNA, 201 bp, Homo sapiens
cccctgaactggaacgaagcagagttgggagctgagctctgctattctgcgggacgcttgtgagctgtgaccaggcagcagcagccccgcaggcagcacayctgtgctcacaccctcttgcccgtgtgtgtgggagaggggaagagggagcgaaaacagccgcaggtgcaaggcacagcagagcagctgaattgaaacagg

SEQ ID NO: 3251 - DNA, 201 bp, Homo sapiens
gcaccaatcggcctccttcattgactgggcctctgtagggaggcagtgaggctcagggaggaagagactctgtggggagttcctgggttctgcaatcagggtatagaagctgaatcagaaccttcctgtgggaccctgtaccttggagatggggccggaagtggtcactgagtacaagtcaagccctgaggccagggcttc

SEQ ID NO: 3252 - DNA, 201 bp, Homo sapiens
ttcctctcctgaatgttctttgagatgcatctgaatactgctatcaacgcttgattgcatctctgtacttgtctctttatggatggcttttttttttttttgctctgatgcatagaactgtattagcaaaatcaaggttccttacagaaataaacagatgtcagattagaccattctttgtattgatgcatatctgttttc

SEQ ID NO: 3253 - DNA, 201 bp, Homo sapiens
cttcctctcctgaatgttctttgagatgcatctgaatactgctatcaacgcttgattgcatctctgtacttgtctctttatggatggcttttttttttttttgctctgatgcatagaactgtattagcaaaatcaaggttccttacagaaataaacagatgtcagattagaccattctttgtattgatgcatatctgtttt

SEQ ID NO: 3254 - DNA, 201 bp, Homo sapiens
tatcctaggcacacacattcattttcttttttctttgagatagagtctccctctgtcgcccaggttggagtgcagcagtgctatctcagctcattgcaaamttcacctctccggttcaagcaattctcatgcctcagcctcccaagtagctgggattacaggcacgtgccaccacacatggctaatttttgcattttttgt

SEQ ID NO: 3255 - DNA, 201 bp, Homo sapiens
gcttttgtgttaatccacacattaaaaataatgtgaaattaatatatcctaggcacacacattcattttcttttttctttgagatagagtctccctctgtygcccaggttggagtgcagcagtgctatctcagctcattgcaaacttcacctctccggttcaagcaattctcatgcctcagcctcccaagtagctgggatt

SEQ ID NO: 3256 - DNA, 201 bp, Homo sapiens
gattgcttgagcctggaaagttgaggctgcagtgagcctagatcatgctattgcactccaacctgggcaactgagggagaccttgtcttaaaaaaaaaaaatcagttggtcagggcttgacaaaacaattctgaatttagaagaaaaaatatccaagaacagctgaggaaattttgaaaaaagggagtgattgtcattttg

SEQ ID NO: 3257 - DNA, 201 bp, Homo sapiens
tgggccactgtgggacatcacgtggatgaagggcagaggttcagggcatacagcaagtaaaaagcagagctgggactcgactatttgggtttccttgtgtwcctgggctctgtctgctgtccagggaatctccctgtctgtttccagagttgtctaggttgccagggaaggcctgctcacctctgggtgccctccaattcc

SEQ ID NO: 3258 - DNA, 201 bp, Homo sapiens
aggcatacacaccacgccctgctaactttgtatttttagtagagatgggatttctccatgtcggtcaggctggtctcaaactcccgacctcaggtgatccrcccacctcagcctcccaaagtgctgggattacaggtgtgagccactgtgcccggcccagaggcataaaattagtggtcaataatgttccttattttcctg

SEQ ID NO: 3259 - DNA, 201 bp, Homo sapiens
agtctagaagccttgccaatggttccatttgggaacccagggcagaagcttcccctctgtcttttttctcagaggcattattattattattattattattwttattaatttttgagacggagtcttgctcttgttgcccaggctggagtgcaatgatgtgatctcggctcactgcaacctccgcctcccaggctcaagaga

SEQ ID NO: 3260 - DNA, 201 bp, Homo sapiens
ggtgagaagtccactgtcaatttgattagtttttcttaaaacttggagtgctggaactttatcactagtgaagagatgtgtcatttctcatcagtttagcmtggacttgtagattccttttaatctacaggattaagtttcttcaacttgaatattttattggaaacttatttaatgtttgactccgttctaatagttatc

SEQ ID NO: 3261 - DNA, 201 bp, Homo sapiens
aacatctacttttacaaaaatttaaagtttctttagtgatatacttttttatatggagacatactaaaaaattctatttgactgatgaaaggctttctatktttttattaaaccaaacttcttgtttatattcaattttcctgtcatcttgtctcttcgtatattttaaatcaagctcttctatgttaatcactcttgttt

SEQ ID NO: 3262 - DNA, 201 bp, Homo sapiens
tctctttcaatttcttaaatacttccttttcaggcttttaagccccaagaattccttggtacagctttctctgtatcctgtaaattttgatatgaaataawagtctctttttctttgcttttgagaccattggtagttttccttttaatttcctctttgatccaatagatatatccaggaatgttttcttaattatcagaa

SEQ ID NO: 3263 - DNA, 201 bp, Homo sapiens
ttgtatttttagtagagacagggtttcaccatgttggccaggatggtcttgaactcctgacctcaggtgattcatccacctcggcctcccaaagtgctgggattataggcatgaaccactgcgcctggcctatttttcaagtcttttcatcctcctgtatctggaataaaattccctttctcattcctcattttgtctatt

SEQ ID NO: 3264 - DNA, 201 bp, Homo sapiens
tcagtcagttaatttttttaaaacattttgcaagcattcactcatttcctctaggttctaaaatttgttgcctcagagttgcaatgtagtgttatttattttttgagataaaatctcattctgtcacccaggctggaatgcagtgacacgatctcggctcactgcaacctccacctccacctcctgggttcaagcgattct

SEQ ID NO: 3265 - DNA, 201 bp, Homo sapiens
gtcagtcagttaatttttttaaaacattttgcaagcattcactcatttcctctaggttctaaaatttgttgcctcagagttgcaatgtagtgttatttattttttgagataaaatctcattctgtcacccaggctggaatgcagtgacacgatctcggctcactgcaacctccacctccacctcctgggttcaagcgattc

SEQ ID NO: 3266 - DNA, 201 bp, Homo sapiens
agtcagtcagttaatttttttaaaacattttgcaagcattcactcatttcctctaggttctaaaatttgttgcctcagagttgcaatgtagtgttatttattttttgagataaaatctcattctgtcacccaggctggaatgcagtgacacgatctcggctcactgcaacctccacctccacctcctgggttcaagcgatt

SEQ ID NO: 3267 - DNA, 201 bp, Homo sapiens
aagtcagtcagttaatttttttaaaacattttgcaagcattcactcatttcctctaggttctaaaatttgttgcctcagagttgcaatgtagtgttatttattttttgagataaaatctcattctgtcacccaggctggaatgcagtgacacgatctcggctcactgcaacctccacctccacctcctgggttcaagcgat

SEQ ID NO: 3268 - DNA, 201 bp, Homo sapiens
atcacaataacactggctatttaaaacaaactgtgcattttcaccctatagtcttgggatagttcaagtaaaattatctatattttgaggacttgacaaaactcagctgtacatttttctatggtagatttttctttaaaaaatccatggtaattgctctagctcaagtttctcttttcataagtcagtcagttaattttt

SEQ ID NO: 3269 - DNA, 201 bp, Homo sapiens
gtggattacctcaggtcaggagttcgagaccagcctggccacacggtgaaaccccgtctctactaaaaatacaaaaattagccaggcgtggtggcacgtgsctgtaatcccagctacttgagaggctgaggtaggagaattgcttgagcccaggagacggaggttgcagtgagctcagatcatgccactgcactccagcct

SEQ ID NO: 3270 - DNA, 201 bp, Homo sapiens
ctcagtgaatctaaacattaagtttcaatataaaatctttagaaacaccgtaaaactatgtaaacagtggtagtttgcatctctttgtttgtaatcaatcactgagcccatgaaattcaaagccagacaaatccttgtactactaagggtcataagccagaatgtcttaaaaaatatcctcaaagctttggaatccagtaa

SEQ ID NO: 3271 - DNA, 201 bp, Homo sapiens
gctcagtgaatctaaacattaagtttcaatataaaatctttagaaacaccgtaaaactatgtaaacagtggtagtttgcatctctttgtttgtaatcaatcactgagcccatgaaattcaaagccagacaaatccttgtactactaagggtcataagccagaatgtcttaaaaaatatcctcaaagctttggaatccagta

SEQ ID NO: 3272 - DNA, 201 bp, Homo sapiens
agctcagtgaatctaaacattaagtttcaatataaaatctttagaaacaccgtaaaactatgtaaacagtggtagtttgcatctctttgtttgtaatcaatcactgagcccatgaaattcaaagccagacaaatccttgtactactaagggtcataagccagaatgtcttaaaaaatatcctcaaagctttggaatccagt

SEQ ID NO: 3273 - DNA, 201 bp, Homo sapiens
gagctcagtgaatctaaacattaagtttcaatataaaatctttagaaacaccgtaaaactatgtaaacagtggtagtttgcatctctttgtttgtaatcaatcactgagcccatgaaattcaaagccagacaaatccttgtactactaagggtcataagccagaatgtcttaaaaaatatcctcaaagctttggaatccag

SEQ ID NO: 3274 - DNA, 201 bp, Homo sapiens
aatattcctggatttgtatgttagacaaggacatgggtccaagtcatctcttggattccagtcattcctgtaaccaaaaccaattcttcacaatttattcmtttaaaaaaatcataagccatgtggtttcaatgcgctttaatttgaattcaattaaaaagaatttaacaagtcagcttttcccaaacaaaactttatatt

SEQ ID NO: 3275 - DNA, 201 bp, Homo sapiens
tgaaccatcgttgcatcctgggaatgtgttccctgcttgagcatttagacacattcctggattctatgtctttttctttgcgtgtgtgtgtgtgtgtgtgtagtgtttgtttatacacatgcgtctctcctgtgaaactccctttttaaaataaattatccttgcataatattcctggatttgtatgttagacaaggacat

SEQ ID NO: 3276 - DNA, 201 bp, Homo sapiens
gtgaaccatcgttgcatcctgggaatgtgttccctgcttgagcatttagacacattcctggattctatgtctttttctttgcgtgtgtgtgtgtgtgtgtgtagtgtttgtttatacacatgcgtctctcctgtgaaactccctttttaaaataaattatccttgcataatattcctggatttgtatgttagacaaggaca

SEQ ID NO: 3277 - DNA, 201 bp, Homo sapiens
ttgaacccgggaagaggaggttgcagtgagccaagattgtgccactgcactccagcctgggtgcagagtgagattctgtctcaaaaaaaaaaaaaaaaaaatctttcaggcttttggttaacacttcccaatggctcaccacaaagactatgccagttgaatttccaggagcagtttttgtgagcaatggtttctttaatc

SEQ ID NO: 3278 - DNA, 201 bp, Homo sapiens
atggtgaaaccccatctctacaaaaaatacaaaaattagctgggtgtaatggcatgtacctgtaatcccagctactcaggagactgaggcacgagaattgtttgtttgaacccgggaagaggaggttgcagtgagccaagattgtgccactgcactccagcctgggtgcagagtgagattctgtctcaaaaaaaaaaaaaa

SEQ ID NO: 3279 - DNA, 201 bp, Homo sapiens
catggtgaaaccccatctctacaaaaaatacaaaaattagctgggtgtaatggcatgtacctgtaatcccagctactcaggagactgaggcacgagaattgtttgtttgaacccgggaagaggaggttgcagtgagccaagattgtgccactgcactccagcctgggtgcagagtgagattctgtctcaaaaaaaaaaaaa

SEQ ID NO: 3280 - DNA, 201 bp, Homo sapiens
acatggtgaaaccccatctctacaaaaaatacaaaaattagctgggtgtaatggcatgtacctgtaatcccagctactcaggagactgaggcacgagaattgtttgtttgaacccgggaagaggaggttgcagtgagccaagattgtgccactgcactccagcctgggtgcagagtgagattctgtctcaaaaaaaaaaaa

SEQ ID NO: 3281 - DNA, 201 bp, Homo sapiens
tgggaggcagctaaaagctggcctgagaaagggggtgggccagagagtgctgggcagcattggaaaagatgccaaaccttccaaacctgggtgctgagggsggctttggtggagggagcctcatttgtacaaacacgttcatgtagtcttcccaaagtgtgttcaacaaatccttcagtgttggatatttagaaacaatat

SEQ ID NO: 3282 - DNA, 201 bp, Homo sapiens
ctgggaggcagctaaaagctggcctgagaaagggggtgggccagagagtgctgggcagcattggaaaagatgccaaaccttccaaacctgggtgctgaggrcggctttggtggagggagcctcatttgtacaaacacgttcatgtagtcttcccaaagtgtgttcaacaaatccttcagtgttggatatttagaaacaata

SEQ ID NO: 3283 - DNA, 201 bp, Homo sapiens
tgacttagcaggtaacctggtatagataaaagcagggagtggattgcattccactggctacctggggtcttgtagtcacactctgaagataggcactgtatttttttttttcccttgaatttttaagcatctctgttttatgatctctataattttggagagaaaccaaggcagctagtgactttcttgaacaaaatttct

SEQ ID NO: 3284 - DNA, 201 bp, Homo sapiens
gcagggctagccagtgtctgttctctcagcctctcagttgtgatctcttttgctctgagatgtgcacgtgtacacacacacacacacacacacacacacamccataagtgcattcactgcataactgaccgatgttataagcattccagacataaaatgctgttaaacagccaagcatcatccctggaaatgcaggcctga

SEQ ID NO: 3285 - DNA, 201 bp, Homo sapiens
atcaggcagggctagccagtgtctgttctctcagcctctcagttgtgatctcttttgctctgagatgtgcacgtgtacacacacacacacacacacacacmcacacccataagtgcattcactgcataactgaccgatgttataagcattccagacataaaatgctgttaaacagccaagcatcatccctggaaatgcagg

SEQ ID NO: 3286 - DNA, 201 bp, Homo sapiens
aaatcaggcagggctagccagtgtctgttctctcagcctctcagttgtgatctcttttgctctgagatgtgcacgtgtacacacacacacacacacacacacacacacccataagtgcattcactgcataactgaccgatgttataagcattccagacataaaatgctgttaaacagccaagcatcatccctggaaatgca

SEQ ID NO: 3287 - DNA, 201 bp, Homo sapiens
cacagtcgatatgtcagtttgatgtctcaagagctaccattaattatgtatccctttggttagaaatgcaaatgacccttggcagtcatttagatctccaygtgaattcgcttatcacgcacattccaccccaaacagagctggccaagccaagcgtgatgcttgatgagggctgggttgtttccccctgcactgcccaag

SEQ ID NO: 3288 - DNA, 201 bp, Homo sapiens
ccagatgtgaaggggagagggctgggcatggccatataggcaaagaatgtgcaagtctcctttgagcccacgagttcgagaccagcctgggcaacatagtraaacccccctctctacaaaaaaatatgaaaattagctgggcatggtggtgcctacctgtagtcccagatacttgtgaggctgaggtgggaggatcacctg

SEQ ID NO: 3289 - DNA, 201 bp, Homo sapiens
aagccgagatcatacccatgcattccagcctgggcgacagagtgagactccatctcaaaaaaaaaaaaaaaaaaaaaaaaaaatatatatatatatatgcrcacacacacacaccacacacacacacacacacacacacacacacacacacaaactgaaagcataataatactaaaagaaaatataaataaacatttacat

SEQ ID NO: 3290 - DNA, 201 bp, Homo sapiens
gatctttggtcccaggaattcgaggctacagtaagccatgattgcaccactgcactccagcctgggagatagagtgagaccctgtctcaaaaaaaaaaaaatcggccttatagcaaacattgaactctcaaccgactaaaaaatgtacaaactggccagggtcagtggcacatgtctgtaatcccagcactttgggaggcc

SEQ ID NO: 3291 - DNA, 201 bp, Homo sapiens
ttgggaggctgaggtgggaggatcacttgaggtcaggaggtcagggctggaatgagccatgatcacaccactgcactccagcctgagcaacaaagtgagamccccatctcttaaaaggaaaggaaaaaaaaaaaaacttccaaaatttttaaaggtaacctatgggagatttaagattagggaatatatgaggcactgaga

SEQ ID NO: 3292 - DNA, 201 bp, Homo sapiens
ggcaggagaatggcgtgaatccgggaagcggagcttgcaatgagccgagatcgagccactgcgttccagcctgagctaaagagcaagactccgtctcaatrataataataataataataataataataataataataataataataaaccgttggttcagggagaacaggaggaatctctagagaagaggaacagatgaag

SEQ ID NO: 3293 - DNA, 201 bp, Homo sapiens
gcatatgatgctgcagtagccttagttgccaacagggaggtaggactgggtggaaaggtgatgcccagagactggataagattttcttcctttttttttttgagacagttttgctctctctcgcccaggctggagtgcagtggcgtgatcttggctcactgcaacctccactttccaggttcaagcgattctcatgcctta

SEQ ID NO: 3294 - DNA, 201 bp, Homo sapiens
cctttaatcctcagaataaccctatgaggaaggcaccagcattatccccattttacagttgaaagaactgaggcatagtgtgattaactaatttgtctaargtcacagagttaagtggcatggccagacaatggaacctcgttgccttaccctcaatgctgtgaaacaatagacaacagcccacagcaacaccctctacac

SEQ ID NO: 3295 - DNA, 201 bp, Homo sapiens
gaagtgcctgggagatgtggtaggattcccctagtaagtaacacaaggggaatacacacacacacacacacacacacacacacacacacacacacacacacagagtgtgtgagtgtggatctaagcaaaagtcagacatctatgaatctgtgatccgggctctgagggtggcgcgtctagtatcagcttgcacaaattgga

SEQ ID NO: 3296 - DNA, 201 bp, Homo sapiens
aattatttaacatttccttagtctctgtttgttgatctgtaaaggcagaaatagcacattccacatagagtagttgtgatgatcaaatgaaataataataagcttgtcccatgcttagcatggtgtccagcacacaggcagtcctccaacatgtgccaccatcatcaacaacattaccattcatgaaaagagctaagagag

SEQ ID NO: 3297 - DNA, 201 bp, Homo sapiens
gaattatttaacatttccttagtctctgtttgttgatctgtaaaggcagaaatagcacattccacatagagtagttgtgatgatcaaatgaaataataataagcttgtcccatgcttagcatggtgtccagcacacaggcagtcctccaacatgtgccaccatcatcaacaacattaccattcatgaaaagagctaagaga

SEQ ID NO: 3298 - DNA, 201 bp, Homo sapiens
tgaattatttaacatttccttagtctctgtttgttgatctgtaaaggcagaaatagcacattccacatagagtagttgtgatgatcaaatgaaataataataagcttgtcccatgcttagcatggtgtccagcacacaggcagtcctccaacatgtgccaccatcatcaacaacattaccattcatgaaaagagctaagag

SEQ ID NO: 3299 - DNA, 201 bp, Homo sapiens
tggagtgctgcttttatctaggcatttatatctttaaaaaaattttggaaaaggtctagctattatcatttccagtgtttcttctccctcacttcctctaygcttttcttatagactaccctacttgttcttcaaaactcttaataatatcttttaacaatatttcttaatatttcaatatcttaatattttctcttaata

SEQ ID NO: 3300 - DNA, 201 bp, Homo sapiens
aacctctgcctgctgggttcaagcgattctcatgtctcagcctcctgagtagctggaattacgggtacccaccaccacatccagctaatttttatattttkgtagagatgtggtttcgccatgttggccaggctggtttctaactcctgacctcaagtgatctgcccaccgcggcctcccaaagtgctgagattacaggcg

SEQ ID NO: 3301 - DNA, 201 bp, Homo sapiens
tgatggtctcacaggggtcagtgatcccagagcaggagctggcggtgggtgggcggagcagaaggaactttgaaccacaccttcttaggcacaaacatacatattgaagcgccacaaaacagagcaaagtagtgttatccctgtttgacctatgaggaaattgaggcccagagaggataacttgctcaaagttatgcagcc

SEQ ID NO: 3302 - DNA, 201 bp, Homo sapiens
agtggatgcctgaaatcatggatagtactgcacctgtatatactggtttttcccatacatacatacctatgatagtttaatttataaattagatacagtargagattaacaacaacaataattcataacatataacaatatattataataaaagttatgtgaatatgatatatatatcttcctctcaaaataccttattat

SEQ ID NO: 3303 - DNA, 201 bp, Homo sapiens
ccgggaggcagaggttgcagtgagccgaggtcgtgccactgcactccagcctgagcaatagagcgagactccatctcaaaaaaaaaaaaaaaaaaaaaaaagtcctgcctgaggcaccaaatgatagcgagaaactggcctccatgcctatgcatttgtcagactcaagacctggggctctggcttccccagagacctcct

SEQ ID NO: 3304 - DNA, 201 bp, Homo sapiens
cccgggaggcagaggttgcagtgagccgaggtcgtgccactgcactccagcctgagcaatagagcgagactccatctcaaaaaaaaaaaaaaaaaaaaaaaagtcctgcctgaggcaccaaatgatagcgagaaactggcctccatgcctatgcatttgtcagactcaagacctggggctctggcttccccagagacctcc

SEQ ID NO: 3305 - DNA, 201 bp, Homo sapiens
ccaactcaccagtatagaatcataaataatgtgaaaatctaaatctatctatctatctatctatctatctatctatctatctatctatctaattttaaagrtgaactgctaccttagggagcttccattcttttttttcctcttcttttctttttgagacagggtcttactctgtcacccaggctggagtccagtggtggg

SEQ ID NO: 3306 - DNA, 201 bp, Homo sapiens
ggccaatttcctttctttgaaagggacaacataatttttatcatgaccctgttttccaactcaccagtatagaatcataaataatgtgaaaatctaaatctatctatctatctatctatctatctatctatctatctatctatctaattttaaaggtgaactgctaccttagggagcttccattcttttttttcctcttct

SEQ ID NO: 3307 - DNA, 201 bp, Homo sapiens
gggccaatttcctttctttgaaagggacaacataatttttatcatgaccctgttttccaactcaccagtatagaatcataaataatgtgaaaatctaaatctatctatctatctatctatctatctatctatctatctatctatctaattttaaaggtgaactgctaccttagggagcttccattcttttttttcctcttc

SEQ ID NO: 3308 - DNA, 201 bp, Homo sapiens
ggggccaatttcctttctttgaaagggacaacataatttttatcatgaccctgttttccaactcaccagtatagaatcataaataatgtgaaaatctaaatctatctatctatctatctatctatctatctatctatctatctatctaattttaaaggtgaactgctaccttagggagcttccattcttttttttcctctt

SEQ ID NO: 3309 - DNA, 201 bp, Homo sapiens
aggggccaatttcctttctttgaaagggacaacataatttttatcatgaccctgttttccaactcaccagtatagaatcataaataatgtgaaaatctaaatctatctatctatctatctatctatctatctatctatctatctatctaattttaaaggtgaactgctaccttagggagcttccattcttttttttcctct

SEQ ID NO: 3310 - DNA, 201 bp, Homo sapiens
aggctggggcaggagaatcgcttgaactcgggaggcggaggttgcagtgagccgagatcatacctctgcactttaacctgggcgacagagtgagactcttktctcaaaaaaagaaatgatgattaagaattatgttacatctctggcacctcatttgcagccgacacctcagtttataagacagtgagcttcaaaatggca

SEQ ID NO: 3311 - DNA, 201 bp, Homo sapiens
ccctggtgggcaggggcatgggggtgcatggagggatgaacagagtgtgagcaagggctgcaaacaaaccgattaaaataaatgttctgctctctgttttcttttttttccttcgagttttttctttttctttctttcttttttttttttctcagacatggtctcactctgtcacccaggctagagagcagtggcacaatc

SEQ ID NO: 3312 - DNA, 201 bp, Homo sapiens
taagcgattctcctgcctcagcctcccaagtagctgggattacaggtgtgtgccaccatgcccagctaatatttttgtatttttggtagagactgggtttygccatgttggccaggctggtctcggactcctgacctcaggtgatctgaccgccttggcctcccaaagtgttgggattacaggcatgagctactgcacccg

SEQ ID NO: 3313 - DNA, 201 bp, Homo sapiens
ttacatcctctgccttttccctttattataatccttcagtgatctaatagcctagtaataagatctatcattctgcaggggatgtcttcataaacaaatartctatgatctcaatccaaacgcagtggagttacaaatgttcctggatttatgctcttgtaacatgcactcatcgttggaaatgattatggaggaaggcga

SEQ ID NO: 3314 - DNA, 201 bp, Homo sapiens
cttttgaggtgagcttcctcaacttatatctacatagcatatcttttaaaataaaaaacagacgtacctgtctaggcgcacccctaggagttgcaggggayaggcgtttggtggaccaagttgcgtgagacatacaagtgattgatctcatgagatctggggcgggggatgcaggtggcttggcagtcaggcaggagtgaa

SEQ ID NO: 3315 - DNA, 201 bp, Homo sapiens
cactattcttcagcctcccttctggaccccagagcctcattctgttgggacccaggagctattggctcaagagaggcaggattgtggggctggatggggaytgggtgccacattctgattgttgtgatgtcagaatcctattcatcatcattattgctgtcatcaattgcctgtgaggggcattggcctgaggctgtttcc

SEQ ID NO: 3316 - DNA, 201 bp, Homo sapiens
tgtcatgtggttcctgtgcataactgagctcaatgaatatttgctgatttcagggagtgtgttagcctaggatgctacctcctgggaagccctgagaggamggatagttaagaattcatattacccagggaggtctggccttgccctctttggctacagggaggcaatctctaggctctggaatgtcatgcctcatagggg

SEQ ID NO: 3317 - DNA, 201 bp, Homo sapiens
attctaggcttttgaggtgagcttcctcaacttatatctacatagcatatcttttaaaataaaaaacagacgtacctgtctaggcgcacccctaggagttrcaggggacaggcgtttggtggaccaagttgcgtgagacatacaagtgattgatctcatgagatctggggcgggggatgcaggtggcttggcagtcaggca

SEQ ID NO: 3318 - DNA, 201 bp, Homo sapiens
ggcaagcttccctggttggcagtgctctgagtgtattgtcacacaccagtgctgtctgcacaactccactgggaggggacactggggagttatgtgcttgsaactcttctgggccccatgcccctcttccctctgttgatcttaatgtctccttgtgctgtaataaaccataaccatgagcataaaggtttttgtgagctc

SEQ ID NO: 3319 - DNA, 201 bp, Homo sapiens
agatttggattcaccgggaagtctgagcagaggagaacaaaactcttctgcttgtacctgtgctgagtccagcctatagttccacaaactagttacgagcrttcgcttgtcccagtcaaaatcaggatcccaagggtccaaagatgctatcagccttcatatgtaaaggcaaaaacctgggacctccagaaccccaccaaa

SEQ ID NO: 3320 - DNA, 201 bp, Homo sapiens
gcagaatcatctgtctagggaccatctgtatttgggggttattccaatgtagcacctgacacatgataatgaatggatttttctggctctctctggctctrttttaaactgtcatcattttaaaccatgaaatatgtcaagtgataattaaacctcaccacagacaggtactgtgaaaatgattaacttttaccatttcct

SEQ ID NO: 3321 - DNA, 201 bp, Homo sapiens
ggagacaggtgagactgtttgctgctctaagtgaacagaatgtttggagctgcatcagagggcactcgcaatgcctgcacctctgctgatgccctctgccrccagcactgggcgaatgaggaaaatggagctgggggcagagctcctgtgagggccatcggggagtccttgagcctctgtggcatggagataaggcaaagc

SEQ ID NO: 3322 - DNA, 201 bp, Homo sapiens
agttattctggtggggacttggagaacctttatgtctagctaagggattgtaaatacaccaatcagcactctgtatctagctcaaggtttgtaaacccacmaatcagcaccctgtgtctagctcagggtttgtgaatgcaccaatcggcactctgtatctagatactctggtggggacttggagaaactttgtgtggacac

SEQ ID NO: 3323 - DNA, 201 bp, Homo sapiens
tcccaataacattatttcttgttcagaataaaatcccaagtctttcctacaaggccctctacattcggtctgctgcttttctctcttacccaccctactcmatgccatgggcgtgctcagcactcctcaatcacgccgctctcctgcaccagggcctttgccttggctgttccttttgcttggaatgttcttccccagata

SEQ ID NO: 3324 - DNA, 201 bp, Homo sapiens
attttaaatcaagctcttctatgttaatcactcttgttttacgtattcgttacgttgtttgtttgatatagatcagctgttcagcacctactgtctctcarcatgcttagtgctcttaaccctaaattccacattgcctgacgctaccatgcatgcatgcttttttgttcacctgtcatcactattctcacccctttaagg

SEQ ID NO: 3325 - DNA, 201 bp, Homo sapiens
ggagtctgagaagtccattgggcacaagtgtggagctggggcggactgcaaagccctggacagaccccgggcagggaccaatatagcctgctggtcagtgyggctagatcagatccctggcaagtgggacaggaaggacagcatgtttgagatttggtgtgattcacctcagctggccttggaagagcaactctgatcctt

SEQ ID NO: 3326 - DNA, 201 bp, Homo sapiens
ttaacctcactgtctgtttctttcctgcttaccaagtacacatccctgctccccaggagcagagacttaactcttgggcaatcactcaggtgctgaggggkgtgtgtgtcagcccttggaggacttgaggggctcctgggtgtgttatggctcttccgtgagaacctaagcattacctgtctgtggcttcagctcggagga

SEQ ID NO: 3327 - DNA, 201 bp, Homo sapiens
tatcgttaggaaacaaattcaaaattaagccatatgtttaatctaactccaattaaaaaatcagttggtaggtgccaggcaccgtggctcatgtctgtaaycccagcactttgggaggctgaggtgggcggatcgctcgagtccaggagtttgagaccagcctgggcaacgttgtgaaaccctgattctaccaaaaataca

SEQ ID NO: 3328 - DNA, 201 bp, Homo sapiens
tcgtcttcctcccactcctatcctgggctctctttttctagataacttttactcagctaccagctcttggccttcatgccacttcctcagggaagccttcytgatttccccagactagtcaggtgcccacagccctctgttcttttccttcatagctcttatcacaattgcaatcaaataattactggtacaattatttgt

SEQ ID NO: 3329 - DNA, 201 bp, Homo sapiens
agcagagacttaactcttgggcaatcactcaggtgctgaggggggtgtgtgtcagcccttggaggacttgaggggctcctgggtgtgttatggctcttccrtgagaacctaagcattacctgtctgtggcttcagctcggaggagaagctgactctgtaataagtaaaataacgtctctgggtgaaaatgataggcatcat

SEQ ID NO: 3330 - DNA, 201 bp, Homo sapiens
ctgggattataggtgtgagccaccacacccagcccgtttgttaacacaaccaccaggttgattctttaaagatctaagtcagattggatcaatcccctgawgaaagcccttctgtgactttctcactgaaatgtcctcactttgggctttgttttagctcctgactggcctccgaggccctgtgtgagtgggcccttgctt

SEQ ID NO: 3331 - DNA, 201 bp, Homo sapiens
catctagaaattaagggaatgtaggcagtaagttcaagatcctagacttaagattacacatacataattgtttttaactttatttcagggagaaaagtagytagcatggagataaggtattcattcaagggacaactgtgattggggaaatttttcgagacaaagaagaagtggtatagagtaggaattttaatgaagaag

SEQ ID NO: 3332 - DNA, 201 bp, Homo sapiens
tccttatgtccatttaatgctgagttcctccctcctctcaaaaaccactacttcccagagcccttaaccagcagcacatccagttgctttgagtttccccsaccctgtgctgtctctgcttccccttcacatgggctgccttcaaattctaaccaggcggcggctggcaggtgggaggcagggaggctgtggagagtctgg

SEQ ID NO: 3333 - DNA, 201 bp, Homo sapiens
tctagggcatggcccatgttctctggggccacatgagcaagggctggttccatatatgtaaagatgagcttggaaagaagcgtgcatgaattgtgtgtgtkttttttaaagtgcatgctaaatactctggtgctggctaaagaagcctcgctatgaattttggaggataatccccactcttgtattctccataatttcata

SEQ ID NO: 3334 - DNA, 201 bp, Homo sapiens
cacgtctaaaccagagtccatcattgtattagtccattctcacactgctatgaagaactgccagagactggataaattataaaggaaagaggtttaattgmctcatagtttcccagggctggggaggcctcaggtaacttacgatcatggcagaaggggaagaaaacatgtccttcttcacaatggtgggaggaatgagaa

SEQ ID NO: 3335 - DNA, 201 bp, Homo sapiens
tatttgataattacaggtggttagatgtgcaactttctcctattcggtcattatggaggcaaatttattcacgagaagtccctttctggacaagggtccaytgtactggtggagctgaagggaggaaaggggtccacacaggggttctgggcccagggcacacagtgattttaccagagacaagcctgagttcaccatctc

SEQ ID NO: 3336 - DNA, 201 bp, Homo sapiens
gaactttgttctccatgttctgctgtgaataaacccagatccaacaggcaggatcaagatcccagagtctaagactttggtggaaccaggagaccatctcrtctagcctctgcataagaaagatacccttgtccaaggggagttctggcctttgccccctgcccctgggaggggattgctaagcccttggactgtgctgcc

SEQ ID NO: 3337 - DNA, 201 bp, Homo sapiens
atctcaccagggaatggccccttgtgggggccccacagcaggggctgggggcaaagtctccccttctaccagacacaagcacaggcacactcctgggggcygcctggcccaggcccaggtcatgccgagcacagggtgctgctggtggccacgcctctgcttagcttctgaggtgggggcagtgggctgtgcctcctcaag

SEQ ID NO: 3338 - DNA, 201 bp, Homo sapiens
ccttattttcctgcatgttacttaaagggacctagaccaacatggcaaaagtctgaacacagaggctaagtttttcactcaggaaccagctccagggttcyttcgttcttcctgaaagtcttggaccctcagcatccttccctagactactctgtggcctagattctggtgagttggtccttcctcctaggtcatctgagg

SEQ ID NO: 3339 - DNA, 201 bp, Homo sapiens
ggtaggggcctctgggtaggggcagaacatgctcagcaggaaataaaatcctttcctgctgccagttctgttatacagctcccaggctgcctccttggctytcacccagggcaaggccttgcccagcattctgcactacagaggtgctggctataaaggctttcctgtctgtggctcctccctgcagcctgccaggcctcc

SEQ ID NO: 3340 - DNA, 201 bp, Homo sapiens
aaagatggcaacacattctctgatgctccttcctctgagacgtagagtacaatttttctcctctcaaattaggtgtggccttagtaacttgcttgaacaayagaatggaacagccaagacttgacttctgaagctaagaaggcttgcagcttccacatgaatgtcttggaacactcactcttagacccctgagccaccatg

SEQ ID NO: 3341 - DNA, 201 bp, Homo sapiens
ggattctaccccaggactgcctggtaccaggtctatgctcgtgactcccccaccccagggatgaagggaagaaaccacataagctggaacaacagccaagycaagagaagatatcaggaatgggggctgactttaagctcactctccctccagaacctgccttcctcaaaagtaggcctgtcctcttgattgtgaatctcc

SEQ ID NO: 3342 - DNA, 201 bp, Homo sapiens
gatattgagggctctctcatcctggatgctccttgctctatggccactaaacttaacatgactcttccaaagggtttttctgttaattgtcaatgccagcmcagggctggcatgtagtgggcatgcaatgcttcattgttaagagtaaactacgacacacagaggcaccatttccgttatggtgtgaaatgcaaatgtcat

SEQ ID NO: 3343 - DNA, 201 bp, Homo sapiens
gaagaaatccagaagctggctgggtccaaagggagaacagggacataggataaagagcctgcatttgaagttagggtgaggagaagggaagcaggaatgaygtggggggctctagtcttcctgtctaagtgctggggaccccccctgagcaagacccttctctcttggccttggtcttctcttcttccacatatggggagc

SEQ ID NO: 3344 - DNA, 201 bp, Homo sapiens
gaaagctgctgtgataaaatcaatatgagatcaacctaggaaaaggcaaatcagtgactgcagatttggcaataaaatagaaaacaggatccagaaataartgccaatgtatatgaaaattagatgtataataagagttaccactccaatgggaaaatgatagctctctgatagatgatgctggggcaacctgctatccac

SEQ ID NO: 3345 - DNA, 201 bp, Homo sapiens
aggagtgacaccttaaatagtgacaacaaaataccaaaatgccacgagaatcaagcacagcacaaagaaggcttttgggggaactatgatttttgagccamcaagaaaatcaggagaatttcaggaaagaatttaaggagataatggtcactattgagatgtcaagtcttccaaggttaagaatatcagggcaatttaagg

SEQ ID NO: 3346 - DNA, 201 bp, Homo sapiens
ttcccaacacagcttttctgtgtctcagacctcatctccagcttgactattgatgacagccctgtctctcctgaccaggccttgggagctccctgctcccrtctcagccagatgttctgcctaggcctgctcctgaaggctgtcagtgcccccagcacacgacctagcactgaattccacaacctcaccccaactcactat

SEQ ID NO: 3347 - DNA, 201 bp, Homo sapiens
cccagagaagcagagtgatgcaaccaacaccacacagctgggaagtaccagaactgagatgccacccttggtctttctgggagctcacaggcaccactctycaccaaaaaggggtccttaagagaggagcactgctataccaagtgggcggcaactcacaatgtgtgaaaacctcaatgagtcagaaggattcggtggata

SEQ ID NO: 3348 - DNA, 201 bp, Homo sapiens
acgctggattagaataaataatgatggcaggtctcatgaacaccaaatccatgccatgcaccaggcagcgtgctaagtggtgcttgtgcagcccctccttyacttctctccatggctgcagcaggtgggtactgccattagtcccattttacagtcgaggaaaaggcccagagaagcagagtgatgcaaccaacaccacac

SEQ ID NO: 3349 - DNA, 201 bp, Homo sapiens
gcccaggtctttcctgtttgctgggcactccctatgggaatgatcgaggagaggcagcccagctcttctgccctcccaccaggactacagctgaccctgasggtgaggcactgaaggctttccactggagtccagacccaagaggccatctgcagaaagagaagccctggctctaggtggacattgctgggagaggcccca

SEQ ID NO: 3350 - DNA, 201 bp, Homo sapiens
agacttccctgcttggcacacaaggcctttccccagcttgctgtgatccacttgtctgcctttatccccaactatgctctcccctacacccaggatcccawaatcacttgctcttcccggagactggaggtacttcatgcctgtactcctagaaagccttccccacactctcaacctagcaaaccttcccttgctcttcaa

SEQ ID NO: 3351 - DNA, 201 bp, Homo sapiens
gacacgccatctttaagaacttgtaacactcaccgcgcgggtccgcggcttcattctcgaagtcagagagaccaagaacccaccaattctggacacaacastggtcagcttgagttcagacttccctgcttggcacacaaggcctttccccagcttgctgtgatccacttgtctgcctttatccccaactatgctctcccc

SEQ ID NO: 3352 - DNA, 201 bp, Homo sapiens
gacaaatatctctcctaatcatgggagtggccactgacacacactgaaaggggatgggcaggtgccagtactggtgccgtcatttacaagtccagtaactsggaaagttatctggcttctctttgcctctcagtaaacaccaactaggaaaaggagtgcatgagatgacgtccatacagcccctggcggtgggctggcagc

SEQ ID NO: 3353 - DNA, 201 bp, Homo sapiens
ccctgccatgactggctgcaaactgggttcccagcacagacgtgagcttggacatcaggcctgtgatgacagaggccctggctgcctccctggccagtacyagcctggttctctgaatgcctgggtagttctgggcaatgctggcaagcagggcccatgcagggatggggcatggagggacagcgcacagagggccaacgg

SEQ ID NO: 3354 - DNA, 201 bp, Homo sapiens
gtccaaggaacatcaacggaccaatccaagatggaagcgtctcacacaagcacaaggcggcatcctaatttatagtaatgggaccattttcaagactccarttttgaactgaggtctacttaaaatactaatagcttgaaaaggccaaaaaaattcctacaattccctttgcttaattttttggtgcagagcattctaatg

SEQ ID NO: 3355 - DNA, 201 bp, Homo sapiens
cactgtggtttgagaatcctcccagttctctcttttgctcttatttccctgcatgagtgctcacaggataggccggagggcgtggggtgctgtttcccccmacactcgtgttccaggcatggggagtctcagagcagagcagcacccacttgcttgcttgctggaagcccagggcttctctccctgggcctcatttcctca

SEQ ID NO: 3356 - DNA, 201 bp, Homo sapiens
gcgaggtgctctagctgagagctctgcccctggctaggaccaggcttgatgacctggggtctgttctcctcttcagagatggggaagggagctccactcastgtgaaaaagtatggggattggagtcactgtggtttgagaatcctcccagttctctcttttgctcttatttccctgcatgagtgctcacaggataggccg

SEQ ID NO: 3357 - DNA, 201 bp, Homo sapiens
caaagatgggatttccaggtcttttaactgacaggaatgacctgtagccgattcccagagcaaggtaccctttggagcaagcagagtcacacccagcgagrgcatctccacgtcaggcagaggctgacctgcactgcgcagggcctcctgcatcaggcagagggtagtgtctgagactgaagggaaaggaaatctggaaag

SEQ ID NO: 3358 - DNA, 201 bp, Homo sapiens
aacacactggcacatcctgccttttactgcccacagctgtggctcagaaatccagacgtctgggctggtcatctatctcatccagggctgagaaatgtagsgaacacaaagatgggatttccaggtcttttaactgacaggaatgacctgtagccgattcccagagcaaggtaccctttggagcaagcagagtcacaccca

SEQ ID NO: 3359 - DNA, 201 bp, Homo sapiens
tcctctaattgggaaacagaggccagtataagggcttcagggggaggagggcatggctacaggactgggtctgtctcttgttgagctgagctgacagccaycacaggcagctgagtttgcggctgaaagggttggttctctcaaaggtcacctgctggcatttggccatgccaaggtcctgggatcctacataaggatttt

SEQ ID NO: 3360 - DNA, 201 bp, Homo sapiens
ctggctcttgcttcccggtaaggcatggatgtgctggttcctctaattgggaaacagaggccagtataagggcttcagggggaggagggcatggctacagsactgggtctgtctcttgttgagctgagctgacagccatcacaggcagctgagtttgcggctgaaagggttggttctctcaaaggtcacctgctggcattt

SEQ ID NO: 3361 - DNA, 201 bp, Homo sapiens
caggtctgttagaaacaaattttcagcttctagaagggtagcaagtatggggtgaggcccggaaagctgcattttaagagtctgctgattctagcacagayagtccactgagcacgctttgggaaacacagttttagcaaacatgcttaccttccccctacctgacagggctcacttggccaccttgcttgagagctgact

SEQ ID NO: 3362 - DNA, 201 bp, Homo sapiens
aaccacataacaccagggcctcaggaaactcaacgaagaacctgtttactctggctttccctagaggaagcccaggacaggcctagctgaggaaacgcaayggtatgggagagctgctatagattctcacctctagaaggtctgcaggtctgttagaaacaaattttcagcttctagaagggtagcaagtatggggtgagg

SEQ ID NO: 3363 - DNA, 201 bp, Homo sapiens
gagagagccattgaggggcagagaatggagctgagaagctggagccccgaagaacagggtaggggcaatcactggcttgcagtacatgggagaaccagctytgtgcaccatccaactgcactgactgcgctcagaccccggcccaggtctccccactattggctgcactcttatcccggaaggctgtgggtcactgtctcc

SEQ ID NO: 3364 - DNA, 201 bp, Homo sapiens
atttggactgcacaagtttctgcccacatgtttggaaagtcatttcagtgttttctctgagtcttgctggtttccaggtaaagagaactttgtgttgttcyaaataaggggattttgtctttgcctttgtggtaaccttggctaagtcaagccttacagtgaggtttggagaatttcagggaagccccctccatagctgga

SEQ ID NO: 3365 - DNA, 201 bp, Homo sapiens
gagctggggcccggatcccattgccagggcctctctaactcagcctgggatggggagactcagaatacagttgaacttcagcattgattaatccggaggcrtgactcttccagagaaaaggtgggatgcttgcatataaccttgacgtccatgccttgaatgaggctcagcaggggctgccaggttgggacccgcagggga

SEQ ID NO: 3366 - DNA, 201 bp, Homo sapiens
ggggaaaccatccaggtgggtcttgctgggatggaagtggggtgctgcagcatcctccccaggctcggccccacctcacatcctcacagctgcctgtgagmgcagacttctggctgcttcaccctggcaactgcccaacagacaccttctggtcaggaaggtatgtgcaggtctagaagtcaatcttctgggggaaagggg

SEQ ID NO: 3367 - DNA, 201 bp, Homo sapiens
gtgagcaggggtctgcagctggacaacacctccaacactggcaggtgggggaaaccatccaggtgggtcttgctgggatggaagtggggtgctgcagcatsctccccaggctcggccccacctcacatcctcacagctgcctgtgagagcagacttctggctgcttcaccctggcaactgcccaacagacaccttctggtc

SEQ ID NO: 3368 - DNA, 201 bp, Homo sapiens
ttcctcctggaccttggtggggcgtaaaccacttctgagctgcctgctgccctgggcaagattcctttctgggagcctcttatttcgtctcaggaccccartggccaggctggcctaagcatggagagcgccctgggagttcttggggtcaccagctggcaaacccatttctcaagtctgtagagctacacggactggcgt

SEQ ID NO: 3369 - DNA, 201 bp, Homo sapiens
tgacttcaggaaacccaacagcacacagcattaattaagtgcatgaatcacatgacctgagtctgtccaatcccagtgagctttagcacttttgtgggatrcactggactagaggccatctgtcttccactggacctggagctgtgaggaggggaggctggcactcaccatgaaggggaacccccagagaggggcaaaatg

SEQ ID NO: 3370 - DNA, 201 bp, Homo sapiens
tccttacagcagaggatggtcgaaagatttaaggaggaaataataataataaaaatgatgatgatggcaacaatactgatgacctctctattgaaacacaycatgtggccaggcacagtggctcacacctgtaatcccagcactttgagaggccaaggtgggcggatcacctgaggtcaggagtttgagaccagcctggca

SEQ ID NO: 3371 - DNA, 201 bp, Homo sapiens
gctttcctgactcagagagctgctgttcctgtaacctgccctagctgctcgagcctactgttgttcatgttccatggaatcatcaaggagtctcagtgagsggaggtgggtggggaagatattgccagaagtggactccgagggcaggagagagggtcttgtccagtgacatgcaggtcaatgtataacaactggctccct

SEQ ID NO: 3372 - DNA, 201 bp, Homo sapiens
agagctatgggaatttagtttagagttcctgtgactttgaaaaaccattgatccccatatgctccaagtggctgcatgtcaagcctttatagtgggggttractcattttgcggcttccttaatggctgtgagtttacgttttattgcatatctattatttgggctgggctgtgatgaatggtttggctgtctggttcaaa

SEQ ID NO: 3373 - DNA, 201 bp, Homo sapiens
gctctccagccagctcctatcaggggccactttggtgccaaggcttctgagtgccctggccctgagtgtggcccacagctcttcacccagtcagtcactaygtcccgtgtgagtggagttcctcttacatccccaccactccctaaccccaggacacagcttgttcccgtgcagcccacaagctgggccttgtagtagtgg

SEQ ID NO: 3374 - DNA, 201 bp, Homo sapiens
caagcaccatggcacagaggtagactattgagggtcaggaccaacaccagggctggaagtggctcagaagaggagtctctggaggtgcatttatttgtggragctgagaaggagtggatatttgatggggtttgggtttgagagaaagcagccctccacgggacacctgttctgaataacagctctgctgctcgggccccg

SEQ ID NO: 3375 - DNA, 201 bp, Homo sapiens
gtggaggcccgggatgcaggatggccggatccagctgtaccttgcacctactctgctccctctgcactaggggacatgaggaaggagacatggtggccacrtctcccacagggacacagtctgcttgttaccaagtctgctctttcactcagcacctccaggtgtcaggggtggcagggccctgggctagctttgttctag

SEQ ID NO: 3376 - DNA, 201 bp, Homo sapiens
aggcggcggctggcaggtgggaggcagggaggctgtggagagtctggcatgaattttccaaagtggacagtcagcctctgaatgatggagagctgactctkggtctgggggccctgctcagcccaggcctttattgttaatttagagaattcgagggaagcatccagaggggaagcccactggcattcctttccaattaga

SEQ ID NO: 3377 - DNA, 201 bp, Homo sapiens
cactgtagtccctcctggactctgctgggtagcacagattctagaagccagggtgtttctgatgggctggcccttgtgggacaggatgccaggtggggtgygcagcgtcgggaccaacagtcccccatccctcatctggaccagcagtcctctatccctagccactggtacctgccaagtttgaggcacccaaggggtctc

SEQ ID NO: 3378 - DNA, 201 bp, Homo sapiens
ctccccagggcagagtaaattgaggggagcagcgcacctgagtgtctcagacaggccctccatctgtttttgtaaatcaggttttactggaacacagacayattcatttgtttacattttatctacagctgcctcacgttgcaatgtcagagttcagtggctgtggtagacactgtatggcttacaaggcctaagatgcct

SEQ ID NO: 3379 - DNA, 201 bp, Homo sapiens
gggacaagaccctccccagggcagagtaaattgaggggagcagcgcacctgagtgtctcagacaggccctccatctgtttttgtaaatcaggttttactgsaacacagacacattcatttgtttacattttatctacagctgcctcacgttgcaatgtcagagttcagtggctgtggtagacactgtatggcttacaaggc

SEQ ID NO: 3380 - DNA, 201 bp, Homo sapiens
gtgtgtggtgcctctaagtaatgacccttggacctcttggtccccttggaccttagggacttctgaagacctggtgctggaaacctcatgtctggaggcgygggtgggacaagaccctccccagggcagagtaaattgaggggagcagcgcacctgagtgtctcagacaggccctccatctgtttttgtaaatcaggtttt

SEQ ID NO: 3381 - DNA, 201 bp, Homo sapiens
gcaggtgtcctgctgtggtaggcacctgtcttccagcttgcccaactctgggactagtcctgcagcctgtcctggcacagatgtagcccaaagcctgacaytctgcctccagagctgcccaaagaccagcaccaagcccttaactggtaacacaacctgatggtaccatgtctcagtgatgggtggggggacttatttcat

SEQ ID NO: 3382 - DNA, 201 bp, Homo sapiens
gtttttgatgtacatccacccgctacaagttaatcgcctcttcaatcttgacaaaaacctttcttctcacccataggctatggttcaaaaggcttaaaaartcaactcatgacccctgtggctctctggagcccatggatgttgccccagctggaggccacatcatcacattggggaccctccactatgcatctgaagcaa

SEQ ID NO: 3383 - DNA, 201 bp, Homo sapiens
caaaactccctggcgagtcagtctctgaggatcactcagactatgaggtccaatggctccttcgctgccccagctgcacccagctcagcaccacctggccyggtttggtgattcactttccataaacctcaggatgggcctgcaggctaggccacgcccaggcatagactttgccaagacctgtccactgggctgtcagca

SEQ ID NO: 3384 - DNA, 201 bp, Homo sapiens
tccttatgagacgaggagaagacatgggggacaaagaaggaggccctgtgaagatggaggcagacactggagttacattgctgcaagccaaggaataccargagccaccagaagtggaagaggcaagggcctggagactttgaagggagtgtgatcctgccagcaccttgatttctggcttctggtctcctgagtggtgag

SEQ ID NO: 3385 - DNA, 201 bp, Homo sapiens
agggcctggggctggggttaaacaggcaggggcagtaatgacaacctgttcttcacaaagcacgctcatatccacagccgcataagccccacagggaggcygggtgaggaacatctgcccatcacacagatgaagaggctgaggctgaatgaggtgaagcaatttgccccaggtctcaagtggatcctctcccctgatgcc

SEQ ID NO: 3386 - DNA, 201 bp, Homo sapiens
atcacaaaggtaggggtgaaactaaacgtttgaaaaagtatcctttgacaaatttgccatgtggtgggttgggttttggagaattggcctgtagtctgaaygcaggggagtcactccccctcccactagggacccacaggctggcaggagatgctccacaggctgcccctcccccagcacccctgcacggctggtcatgct

SEQ ID NO: 3387 - DNA, 201 bp, Homo sapiens
agtaaggatgcctgtctggggcctctggggcaggggtggggcaggacacaaacccacaaaaataaatttcaatgatcacaaaggtaggggtgaaactaaaygtttgaaaaagtatcctttgacaaatttgccatgtggtgggttgggttttggagaattggcctgtagtctgaacgcaggggagtcactccccctcccact

SEQ ID NO: 3388 - DNA, 201 bp, Homo sapiens
agggagcgggctcctctgcctggcactgaaggcctgccagcacctgatttccagcctcatctcccacaactcacactgagctggacacaagcggaactgcyggccactctccaaatgtcctgggccttcccccgtcgctggccaccagggagggcaccacctcacagaggagctcaaaactatgcaaatatgcccagatca

SEQ ID NO: 3389 - DNA, 201 bp, Homo sapiens
gactgggagggagactcagaagagtgggtgtcaccacaatttgcctttgccaaaaccttttctgtgttaggcagacgcatggcagcaaagttttaaagtaytgggatgcgagaaatctctttcccttatatgggacatttctctctctcttcgtcttgggtaggttctttaaattatcttgcagtgagaaccctatcatgt

SEQ ID NO: 3390 - DNA, 201 bp, Homo sapiens
aagaggcagtcacagggaattaatgggcttaccataagcaggctaacaaacacccttcctgaaagcaggaggccataacatttcagttgttggagaactgsgttttagttcctattacaggtttcccttaatctcaggcgctatttctcacactgacttgaactcgataagacactcataaacccatcagcaccctctcaa

SEQ ID NO: 3391 - DNA, 201 bp, Homo sapiens
cttctgtgtccctctggtcctctgctggctgggataactggctgctgcatcctccctgagttattcccagccatttgcatgtagaagatgtgcactttgcrcaggaaaaactcgtgcaaaattagaatgtgtgaatactgatagaaccatcgtagttctgctcctgtcagctacatgaatattaaccaaacagcaaatatt

SEQ ID NO: 3392 - DNA, 201 bp, Homo sapiens
agaccaaggtccaaagggaagtgctcctggcctcaaggggcatggaggccagtggtggctgtgggaggccttgcttgggggaatatcctgacccgcgagtmcaccagactgtgagcccagatcatgagcacacccagggctgagctcagcttcaagtgacctcagacagggcaactcagagtcccttgccgtgggaagtga

SEQ ID NO: 3393 - DNA, 201 bp, Homo sapiens
aaaaaatagctgtcgaggggactgtacagggcaccgagctaggctttctgaggggattctttcagtttgacagccgaggtgcccacctgccttcctgtccrctcaaatattacccagccacacaggctcaaaatgaggcagctggcgggaggagcagagcactggtctcaagtctcgtccccacttccccacttgtcccct

SEQ ID NO: 3394 - DNA, 201 bp, Homo sapiens
cattcctcaggttgagatgggccctgggctctgagggctgtcccaaggccactgttcccagatatcaacctcaggttgatacccattaataccaacatacrgtcttcaagaggttaccgtgtgccgggaacttacacgtcaccttgtatgtatttaatcctcaggaaaaaaaaaccctgaaaaccccaatccagaaaacaa

SEQ ID NO: 3395 - DNA, 201 bp, Homo sapiens
gggcaaacaaaaaaaccagggcaggaacatcaaagagcactaggaagggcggatgcccatgggttccacaggaaatggctcaataagcctcagcactgtcmtctctgcagcctcacacgatggggtcttactgggccagtgcacagaggagggatgggcaggaggggcttttggctgcatcagagtcccctgatgagcact

SEQ ID NO: 3396 - DNA, 201 bp, Homo sapiens
ttgcctccacattgtgggcccagacctctgcatctgtttaaggccttgtgtacctggcccctcctccacgaggcccggtttgaacacatcccccagcacaygccctctcaatttcaagcaactaggcccacgtgtccccccatttaccggctgcctgcttgattctcaggggtgttgctcacctgatgagcagctctgttt

SEQ ID NO: 3397 - DNA, 201 bp, Homo sapiens
gctcgggccgcatctctgggaggtctgggctatgggcaagttatactaataatttgagagaggaagtagttgctggaatggtttctttagtcaaccaaatyagggcagagtcatggaaggggaagtcccagaaggtggtggccccgcctgtgcatggaatcttgaccccactgctggcagtgtggcagctccagggagaag

SEQ ID NO: 3398 - DNA, 201 bp, Homo sapiens
gtgctatctcagctcattgcaaacttcacctctccggttcaagcaattctcatgcctcagcctcccaagtagctgggattacaggcacgtgccaccacacrtggctaatttttgcattttttgtagagacagggtttcaccatgttggccaggctgggttcgaactcctggactcaagcgatccagcctcaacctcccaaa

SEQ ID NO: 3399 - DNA, 201 bp, Homo sapiens
gcaataccagactcccaatgtcacactggatgttgtcaatggaaggcaagaaatgagaggcacaaatagtacaaagatggagaaaaatcatatgtagttawatccaggtaatgcaccaataaagttataaggattaattggtacgtaacgaggccagtactaaaatatacaaaattaacagcttgcttatacaccagcaat

SEQ ID NO: 3400 - DNA, 201 bp, Homo sapiens
gaaatcatggcagcttttttcctcgggttttcctcaatcaaagcatatttaaggtacagtgactatctagtagagatctacaacttgttttgtctttttawaaccacacaagataggcaaaacactaaacccaacaccagtcagctactggaaaaaagtttaaggcccagatctgaccaggaacccttaccaactgttctg

SEQ ID NO: 3401 - DNA, 201 bp, Homo sapiens
atattgcctgaaacaccttcaggacctctctgtgtcttgtgtctagcttcttatccaggaaaactgaatcccggttaggatttgagagagtccctccaagytacaggttaggttactacaaatatatgagaaatttgtgccaatgtgatggagtgcaattatttaaacctaattgctggaactctttctaactggcttcat

SEQ ID NO: 3402 - DNA, 201 bp, Homo sapiens
acctggcaagtctgctgttttacttccataggccaaaaccttacaatctagtgaagtgaggccatccttgatgcctctaacctcaggccccatccaatgtytcacaagtcatttcagatttaccttcacaatatatccagaaataggctctgaccatttctgctccatcaccctggccaggtcacactacctgccacttag

SEQ ID NO: 3403 - DNA, 201 bp, Homo sapiens
atagtcttcctgttcctcttttgcttggaacctggtttttcatagtccttattacttatagttctctaaaattctgatttatggtccccaactagaatatragttctagggaaattattgctcattcatggctgtttccctacatagtagacaatcaatacttcacgaataattacacatgaatcttttctcccttcagtc

SEQ ID NO: 3404 - DNA, 201 bp, Homo sapiens
ctggagtgcagtggtgtgatctcggctcactgcaacctccacctcccgggttgaagtgattctcctgcctcggcctcccgtcaagtgattctcctgcctcrgcctcccgtcaagtgattctcctgcctcagcctcctgagtagctgggattacaggcacctgccaccacgcctggctaatttttttgtatttttagtagag

SEQ ID NO: 3405 - DNA, 201 bp, Homo sapiens
ctccatcttcctgttcttttgagacagagtgttgctctgctgcccaggctggagtgcagtggtgtgatctcggctcactgcaacctccacctcccgggttsaagtgattctcctgcctcggcctcccgtcaagtgattctcctgcctcggcctcccgtcaagtgattctcctgcctcagcctcctgagtagctgggattac

SEQ ID NO: 3406 - DNA, 201 bp, Homo sapiens
aactttcttcatataacaagcctttactggggaaactgagcattgttgaagagatccaactctggtctcactttaaatttatacccacaattcttaagtgrgccctcattgttgcccagcagtcctatcagatttgcctggccagttcagtctcatgttgaacttttacctctctcttcaaacctccaggcttgactgaga

SEQ ID NO: 3407 - DNA, 201 bp, Homo sapiens
atcgaaatcaggttatctgttatctaaatcaggtccaggttcagacaagacttctcatgtgaggttcctaggattcagctcctcgcacaccattcctctgmatctgaagacctgtaaacactcactccacaggcccatgcataacagtggggcggcacaggacaacttctacagatattttcatttaaaaagggagaaaat

SEQ ID NO: 3408 - DNA, 201 bp, Homo sapiens
gctagaatgaaatcagattatcccaagatctcctggtaagaatatggaggtgagtgcagtttcccagctggctcacggaacatactgactgtcactgaagsctgacgtgctctatttttccttttgtaggtaaagtttctacagaaacacagggacagcctgtgatgcgttcctcattctgagacgcttcatgtctaccag

SEQ ID NO: 3409 - DNA, 201 bp, Homo sapiens
tgttgggaaggagggtgaacctggtcatcagggttagcccaagcaccacagaataaccttgataagtgttatcatttcagggatttggttcaggtgtacamagtggaacaggtggaatgtggttgcaggtaaaatgccatgtcccctcttgctgtttccgtaacaatttcaaagacacactattatggctctaagaaataa

SEQ ID NO: 3410 - DNA, 201 bp, Homo sapiens
aataatcaagacaaagacatagttgtgggaaatgttcctaaagactgaagcatagattaaaagcattcatcatgttccagaagaaaaaatggtaagaaatsgatactacacttacccaaataaacatttggataatgaagacaaaggacaagtggttctagcattttagccagaaaaccacaaaacaatttattttttaaa

SEQ ID NO: 3411 - DNA, 201 bp, Homo sapiens
tcctaatctccagaaactttaagacaataaatttgtgttaagttgctatgtttgtggtaatttgttacagcagcaatagaaaacttatacagagactgagraggttcactgtatcaatgtaaagtcatttgcttactcgctcattagcagaaagggctggtaatttacgacaaaattagagactttccagagagatataga

SEQ ID NO: 3412 - DNA, 201 bp, Homo sapiens
tgtttgcttcatgaaaaaaaaaaaagtcatctgctttaacttttgaatttgcttgacatctggaggaaggggagataaaagggagactctaagtgccgtgyaattttagccagttgcagatggaacatggctatcactcatggtgggaaatgtgcttctggggaagatgaaaagagagggcagatcacaaggtggccatag

SEQ ID NO: 3413 - DNA, 201 bp, Homo sapiens
tctgtcaaatggggctgataacctctgtcctgtaattgctataggagtcaaggcccagaatggcaccttgcctggcctggctccaggggaggagcaccccrgatggcagagaaatactctttgaattttagtggtcagattttcatccctctgaggcatggggtgagtgtggggtgtgtggaaggttctgggggtcaatct

SEQ ID NO: 3414 - DNA, 201 bp, Homo sapiens
tggctaggaccaggcttgatgacctggggtctgttctcctcttcagagatggggaagggagctccactcagtgtgaaaaagtatggggattggagtcactrtggtttgagaatcctcccagttctctcttttgctcttatttccctgcatgagtgctcacaggataggccggagggcgtggggtgctgtttccccccacac

SEQ ID NO: 3415 - DNA, 201 bp, Homo sapiens
gaacatcgatcatctctgcttcctctacttgtccacatgtccctcccaccatcgacatgagccaatgggggtcctggcatacaactagcactcaacaaacmtgtgccagataaacaaaggaacgaacacatggctttgtccagagttgcttctactgagacatgcatggcctctaagtttcctttgaccctgagtccaggc

SEQ ID NO: 3416 - DNA, 201 bp, Homo sapiens
cttccccactcacacacccgttctggcgaccctgcgccacctcagttccttaaacatgcctaccatcaccttggggctacaacaccacagctagaatcttkcccccgcccctttccaagcctcttcagatcggtggggctgtgcagagggctggcttgcagcatctgctcaagacacgtggtcactgatggaatgatgact

SEQ ID NO: 3417 - DNA, 201 bp, Homo sapiens
gccccctgcttcccaaatcgcacacctggcactacctcaccatcttgcccatccccagccaatcagtcctggctcaggtcatttctaccactgtgtctctyagggtgccagtttcccaccactcctaccacctctgctgtagttcaggaagccattaacacccccggatgaccactatgcctccgatcatgtccccaccaa

SEQ ID NO: 3418 - DNA, 201 bp, Homo sapiens
gggggtggcaatcagagtccaaattctgcacttgactttcaacattaactgccctataaagctgattcttcctccagcatgcagtgtgatgcccaccaagmagatgggccctgatgcaccaacactgggatccttgggacaggaagagttttgccttctgaattattatacccaccacacccatgaggggtgcttcttaat

SEQ ID NO: 3419 - DNA, 201 bp, Homo sapiens
agtagtgggtatgcttgggtgggtcacactggaatagagcatggtgtggggtgcgtctgggcactggtaagattctgtcttttgatctgggtgctggttaygcagatatgttctctgtggaagttcactgagctatacacttatgacttattcattttctctctgtgttatgcttcaatgatatgtttatttaaaaaaggt

SEQ ID NO: 3420 - DNA, 201 bp, Homo sapiens
tggaagggacagtgggggagaagcaggtgctgcagaagttgactctgtcactcctgattattttaaaaggccagtttgggtcaaactggtctttgacttargaatcctgctgcccagaggggctcgtgttctggtctggtagttggtgggacttttcctcctttaggctcagagatcctttttctgtcaggggctgataca

SEQ ID NO: 3421 - DNA, 201 bp, Homo sapiens
tcaagatattgaggcaggaaaaaaaaaggggtgagatgggtcatccatgcatcccagctactgtgaaactgcattctaggcttttgaggtgagcttcctcwacttatatctacatagcatatcttttaaaataaaaaacagacgtacctgtctaggcgcacccctaggagttgcaggggacaggcgtttggtggaccaagt

SEQ ID NO: 3422 - DNA, 201 bp, Homo sapiens
tcattcaaaccaggacacatgtaagttccactcatatgtgggagagggaaggcgagcctgtttttgctgagtctctgatctaggcggtctccagagggctmtgtgggttgtacttcttcgatgcccatgtgagagtcaccacagcctgagacacataaggagaatgcagtagtgccagcctgtggccttctgttctgggtt

SEQ ID NO: 3423 - DNA, 201 bp, Homo sapiens
acacagaacttgttctggttttttggggtcccaacacagaaccgagtccttacggatgaggtggcctggtctgctcttggagaagcagggtggcaatagtygacagggccagtattctcagatgaccattgttctttctggctgtgggatgtggggttgtgaccacccccgagactcggcctaaggcagggaaggatatag

SEQ ID NO: 3424 - DNA, 201 bp, Homo sapiens
ccttgggtgagggtgaatgggtgcatctccagcaacaacttgcaaaaacgaatcatttctttctgcagagaggtgcttgatggcggattatagaaaggtayaaatagtgctacaagacatttggggtcttgatggcttagagacaggcttggtcgtctggcagtggtaagtttacagaagatattgggggctctctgaagt

SEQ ID NO: 3425 - DNA, 201 bp, Homo sapiens
tagatgggaatgtggaagaatggtgcactgaaacaagacttggctttacatttagtctgactttgccagttcctagctgtgtgacattggtcagtgtcttmacttctctgatcctcatctataacataggggttaagaccactgggactagatttttgtgtctagcaagcagagggtgctcaatttactgctactgtttct

SEQ ID NO: 3426 - DNA, 201 bp, Homo sapiens
agaatggtgcactgaaacaagacttggctttacatttagtctgactttgccagttcctagctgtgtgacattggtcagtgtcttaacttctctgatcctcmtctataacataggggttaagaccactgggactagatttttgtgtctagcaagcagagggtgctcaatttactgctactgtttctttctttcctctgctgt

SEQ ID NO: 3427 - DNA, 201 bp, Homo sapiens
agggaaggcacaatggcagctctgagcagaagccaggtggtgtgtgaagtcagataggatgagtgagtggtctggagtccctgccatgaaacccctgtggycaggctgggcagcccctctgtcagctagtgaggcccaagccagccagactgtgtcctcctgccttctgcatatgctcatcagccttgaagttctaggcca

SEQ ID NO: 3428 - DNA, 201 bp, Homo sapiens
aagaaaatgccagggaattccaagaagccatgcaatcattgcttggtatcaggcctgtcattttagctcatagtagagatggaaaattacaggctgtcatyggtcaatgtcattcacgcttcactgctctgacaccctagattcagaggttacttcatcaaaacgcagtgccatgggccattgaactgatgtgggcatgtc

SEQ ID NO: 3429 - DNA, 201 bp, Homo sapiens
tgcttggtatcaggcctgtcattttagctcatagtagagatggaaaattacaggctgtcattggtcaatgtcattcacgcttcactgctctgacaccctakattcagaggttacttcatcaaaacgcagtgccatgggccattgaactgatgtgggcatgtcagcctcgtttctctgagtcacgagttcctcctcggcttt

SEQ ID NO: 3430 - DNA, 201 bp, Homo sapiens
tccaggagcagtttttgtgagcaatggtttctttaatcctagcccacagtgatgaaggtaggtttattcaaatgatttcatactttttttttgtgataatrcatatcctagactttccagttatgagaagggaagcatcatgctgtaattcctggtattatgctttcagtgttttgccatttaggcaaaggtaaactattg

SEQ ID NO: 3431 - DNA, 201 bp, Homo sapiens
aatgtcttttcagtatttattgaaaacgtcctacatgttttctctttcaatttgttggtgttatgaataatatagactgatttcctgacagtgaaccatcrttgcatcctgggaatgtgttccctgcttgagcatttagacacattcctggattctatgtctttttctttgcgtgtgtgtgtgtgtgtgtgtagtgtttgt

SEQ ID NO: 3432 - DNA, 201 bp, Homo sapiens
gaatgtgttccctgcttgagcatttagacacattcctggattctatgtctttttctttgcgtgtgtgtgtgtgtgtgtgtagtgtttgtttatacacatgygtctctcctgtgaaactccctttttaaaataaattatccttgcataatattcctggatttgtatgttagacaaggacatgggtccaagtcatctcttgga

SEQ ID NO: 3433 - DNA, 201 bp, Homo sapiens
ggctcactgcaacctccacctccacctcctgggttcaagcgattctcctgcctcagcctcctgagtcgctgggattacagatgtgcaccaccacacccagytaatttttgtatttttagtagagacagggtttcaccatgttggccaggatggtcttgaactcctgacctcaggtgattcatccacctcggcctcccaaag

SEQ ID NO: 3434 - DNA, 201 bp, Homo sapiens
atcttttttgttttgctttctattaattttagtctctattctttcttgcaagttttgttctctttcaatttcttaaatacttccttttcaggcttttaagmcccaagaattccttggtacagctttctctgtatcctgtaaattttgatatgaaataatagtctctttttctttgcttttgagaccattggtagttttcct

SEQ ID NO: 3435 - DNA, 201 bp, Homo sapiens
tatcactttatgtgtgtttcttggaaaaaagttattgctagtttttaaacccagtctgctcatctctgcttttaattggggaattcagtcatatttgataygagatattcacttctcaactaccaatttcaaacaacattctctgtatcctctcttatcccaataaaatgaggtttaaagtgaagttttgagtatttttac

SEQ ID NO: 3436 - DNA, 201 bp, Homo sapiens
cccaggctggagtgcagtggcatgatctcggctcactgcagcctccaccttctaggctcaagtgattgattctcctgtctcagcctatcaagtagctaggmctacaggtgcgtcagcacacctggctaatttttttattttattttttgtagagatgcggttttcctaggttgctcctgctggtctccgactcctgagctc

SEQ ID NO: 3437 - DNA, 201 bp, Homo sapiens
attttttgtagagatgcggttttcctaggttgctcctgctggtctccgactcctgagctcaagtaatcctcctgcctcagcctcccaaagtgctaggattrcaggtaagagccactgcacctggctcctactctttttactgaaacaatttatctttagttacagcttggtatcagaatttctttcattgtctctctcctc

SEQ ID NO: 3438 - DNA, 201 bp, Homo sapiens
tgtttagagcgggggttagctgactttcttaaggggctagcgagcagatatttttggcttcatgggtagcacagtttctgccaaatacccaactccgccaytacagcatgaaaatagccttcaagacacataaattaatgaacgtggctgtgttccactgaagttttatttaaagttggtggcctggatttggcccatggg

SEQ ID NO: 3439 - DNA, 201 bp, Homo sapiens
aaggggctagcgagcagatatttttggcttcatgggtagcacagtttctgccaaatacccaactccgccactacagcatgaaaatagccttcaagacacayaaattaatgaacgtggctgtgttccactgaagttttatttaaagttggtggcctggatttggcccatgggctgcagttggcctgcctatggtttagatcc

SEQ ID NO: 3440 - DNA, 201 bp, Homo sapiens
cacagtttctgccaaatacccaactccgccactacagcatgaaaatagccttcaagacacataaattaatgaacgtggctgtgttccactgaagttttatytaaagttggtggcctggatttggcccatgggctgcagttggcctgcctatggtttagatcccacctcaatcccagcatgatttcaggctgcttgcagaga

SEQ ID NO: 3441 - DNA, 201 bp, Homo sapiens
cagcactgtcatctctgcagcctcacacgatggggtcttactgggccagtgcacagaggagggatgggcaggaggggcttttggctgcatcagagtccccygatgagcactgggcaccaagcacttgcccagtcagctgcattcccttttgcagacctgtgcccaatgctggcccttccaggcaccaactacagacatgcc

SEQ ID NO: 3442 - DNA, 201 bp, Homo sapiens
gccagccacatcacgcccctcatactcagagccttgtttgctgggggccagcccctctcagaccctactgcctcgcacactccccttgctgttgctctagygtgccaggcatgctcccctcctcccaggctgtctgtctgtctccctctcctgcaagtctgctccaaccttgtctggcagccccatttctggagcctaacc

SEQ ID NO: 3443 - DNA, 201 bp, Homo sapiens
tgtgtgcctgtcacagtcctggtgcacagtgggccctcaaaaaatagctgtcgaggggactgtacagggcaccgagctaggctttctgaggggattctttyagtttgacagccgaggtgcccacctgccttcctgtccactcaaatattacccagccacacaggctcaaaatgaggcagctggcgggaggagcagagcact

SEQ ID NO: 3444 - DNA, 201 bp, Homo sapiens
agccctcgggagaactcgaggctcttttgcactcctcaggctggggcacgctggaattgaccaaagctcagagcagcaggaagagatggaaaagcccatcrcgcatggattcccacccgctactgatgacttgtgctgtgcctccaacacagtcatttaacctcactgtctgtttctttcctgcttaccaagtacacatcc

SEQ ID NO: 3445 - DNA, 201 bp, Homo sapiens
agttcctgggttctgcaatcagggtatagaagctgaatcagaaccttcctgtgggaccctgtaccttggagatggggccggaagtggtcactgagtacaartcaagccctgaggccagggcttcccctaaggctttcccctaagaggggaaagaggacctcgaaagaggcactgagaaagcaaaggccagaggagacactt

SEQ ID NO: 3446 - DNA, 201 bp, Homo sapiens
aaggccagaggagacacttggcagggcagagtcaccccacaggttccacaggctggagtaccataggccccggcccccatatcttggagatctctggacamtactcccaatggtttgagcacattcaaaactctaaagaactggatgttcagatgtttttgacacaagctacagagaattggccaaagcctttaagtgctt

SEQ ID NO: 3447 - DNA, 201 bp, Homo sapiens
gcagagcctacaaccactgtctatcgtggtgcaaacagctctccatgctaatcaaacgcctctcatctttttacaatgaattcatgactggttcatataargacaataaaaattaaatgagtcatgagctcctaaatcattttcttttggtctttttaataactcccttccaaagaagagctagctgagagcatacgcttc

SEQ ID NO: 3448 - DNA, 201 bp, Homo sapiens
aaggacagtgaggaagacagttatgagatgaagggtgggtgacattgttgaggcaggatgtgccgactaggtttggggacagtcacttcaccctccgagtrgccgctgtgcaggctgggtggtcagagaagcagagggctgaggcccagaatgggtttgcatgttctgtttctgcagaaagtgaggcagcaccccatcctt

SEQ ID NO: 3449 - DNA, 201 bp, Homo sapiens
tctgcttagcttctgaggtgggggcagtgggctgtgcctcctcaaggactgaggtgagtggggacacagggccaggtcagaagcacatccagacacacagstgcttcagtaacgaaacccacagtcagccaggaagtaaacaaattacaggctgcactttgttagctctggggaacatgaacgtgagcagacactactgat

SEQ ID NO: 3450 - DNA, 201 bp, Homo sapiens
ccctgggctgctgatctgctggggtgcacctgtctttgggggccttacaccattcgtccataattctagcctctgctcagtggtggatttgttttccctcytacaagctgggctgggtaaggctaaagcctcctgcaaggcagtggctcaggtgtccttaggagacataccaggtccaggcccaggctgaacttcctgaca

SEQ ID NO: 3451 - DNA, 201 bp, Homo sapiens
ctactctggaggctgtgatgggaggatcgcttgagctctggaggtcgaggctgcagtgagccaagatcatgccactgtgctccagtctgggtgacagagaragaccctactgcctaaaaaaaaaaaaaaaaaaaaggcaaagtgaagacatcatgaactgaaccactgccccatcaggggagccttgggtggaagccaggg

SEQ ID NO: 3452 - DNA, 201 bp, Homo sapiens
gggcactgctgcactccagatgtgccattggggaagttagagaggaggaagactcagaaaacatcaacaaggctcccctcacttctggaccctctgttatktgaactccctcttggatgcatgtttaatcttaggctggaaaaggcgctccagactcttgcagcacacacatctgaccctgtcactcccccatcaaacatc

SEQ ID NO: 3453 - DNA, 201 bp, Homo sapiens
ttgttctctactctggtacggagcttgtgactctcaggcacttagcaagtgagtcaacccaaatgatgactccccatgtacgccacctggatgggccacayacgattgggtgactcataagtgcttctgagagcaacattactcgctgcaaaatctgactggctccttcttacttggctccaggcgagaggggtacattta

SEQ ID NO: 3454 - DNA, 201 bp, Homo sapiens
aattacatgtgtcattagaatggcattctgtaatagctctgtgactgaattcattaatagaattcttaacagataagacaaattaatattttgttgctcaygaaagcttctcattaagagagtagtgaaaaagtggttaatattttgttgccaatcaagatgtctcatacaaacgacaaagaaaggaggcccacgctcctt

SEQ ID NO: 3455 - DNA, 201 bp, Homo sapiens
gttgcactcctgggctgttctcccctaattcttgcttcaaaaatgcaagtgaatcccgatgacctggctttagcccccttcagcctgatttcttctaaggkttgctttccacaccgtcccaagtgggcctactgcttatgagcacctcttgtgtgccaggcactgagctgggtccttggtacacttcagcctgaaaatgcc

SEQ ID NO: 3456 - DNA, 201 bp, Homo sapiens
cagcggcccactgatgggactggctcccttttgctcttcccccaaatctgtgcactcagggaggctggggcaatagccagaggtggcatgagctgagggargcaggctggctctcggtgcagtgggtactattttgtctattccctattcatgcttacgactctattgggacctgggggaccccaacagatgtatccccct

SEQ ID NO: 3457 - DNA, 201 bp, Homo sapiens
tgggagctgagctctgctattctgcgggacgcttgtgagctgtgaccaggcagcagcagccccgcaggcagcacacctgtgctcacaccctcttgcccgtgtgtgtgggagaggggaagagggagcgaaaacagccgcaggtgcaaggcacagcagagcagctgaattgaaacagggtcctgaggtcagaccctgagcagc

SEQ ID NO: 3458 - DNA, 201 bp, Homo sapiens
aggactcagacctcagcattctccccaagagtagaggaggcatcctttcctcatcagatgaccacgaggctcccctgggccacgaggctttgtgccgctgytcctgccacctggggcaaccgcatgtgtctgggcagagagccagaaccaccttggctcctggtatggaaacaggcccaattttcccagataactgaagct

SEQ ID NO: 3459 - DNA, 201 bp, Homo sapiens
accttggctcctggtatggaaacaggcccaattttcccagataactgaagcttgagaaacttaaatttgtttcatctgagttcttttaacaggaaaccaamcaccaggcctcctagatcactgcatccggacaatgagacacacctgctgcctattgaccatctcctgtcttacccctccctaattccctgctatctaaac

SEQ ID NO: 3460 - DNA, 201 bp, Homo sapiens
acgtctgatctgtggtcagactagaaggaaaagaccaattgggccatcggggaggggctcttggaggcagcagcagggcttcccctgggccctagagatcygcttctcaggtgcggctccccagccacctgtatcatatctctgggggtgggtaattaaaacacagattcttgcccctctgcctcaggctgatgcagatgc

SEQ ID NO: 3461 - DNA, 201 bp, Homo sapiens
tattccaagcggctctagagaaaggtctgcaggagcctcaaacatggggctaataggaaacaaaaatccaagtgggagacggaagtcttctgtgtccctcyggtcctctgctggctgggataactggctgctgcatcctccctgagttattcccagccatttgcatgtagaagatgtgcactttgcgcaggaaaaactcgt

SEQ ID NO: 3462 - DNA, 201 bp, Homo sapiens
tgcaaaattagaatgtgtgaatactgatagaaccatcgtagttctgctcctgtcagctacatgaatattaaccaaacagcaaatatttggatcacttaaartttaattaaatgaatgttttattggatttaatttgtgtcaatattccccagctcctttcacagttctgaagggatttatggctactgagccctctccttc

SEQ ID NO: 3463 - DNA, 201 bp, Homo sapiens
aaagaagctggggcattggagtgacaaagtctattgatctggtcccatccctgtgaccagagtcacactgtgaagttggcgagtaggggaggagccaaggkggagtgcgcatgcccagtgtctcctgaacaaacagggcaacatctcccggaccttgtgactttggctggtgtttacagagtgaagctgctttggcgtatc

SEQ ID NO: 3464 - DNA, 201 bp, Homo sapiens
atcatggggtgccacagtgtggcaggcaggagaggcatccatcagaaggagcaaagggtccttgctgaggtggagagcacagggcctcctggtcagcaggrgcatggctgtcacagtgctgcataccagctcttccacctccgctggttcctgtgtgtggggtagccttggtcagcttggccactctatgggtctctccca

SEQ ID NO: 3465 - DNA, 201 bp, Homo sapiens
tgacattggtctttttcctgctttcagactgaaactgaaacactggcttcaacagaagccaatgttttattggttccgtagaagacatatacatcttctgytggttttatttttctggaggataacacagtcatcatccatgctctcctctcctcgtctttggaggtcatgcatttgatgagagtgaagaacatggtctag

SEQ ID NO: 3466 - DNA, 201 bp, Homo sapiens
aagcattacggatagaaagaacaagatgagagaataccaagagagtagcaggggagggctattaaggtgtgtgtgtggggggtgggtgctggtgtggcggraagcctctttgagtagagaatatttaagtgaagatctttaaaatgagaagaagccagccaggccaagaatgggagcaaggacattctagttagagaaaac

SEQ ID NO: 3467 - DNA, 201 bp, Homo sapiens
ttgactgtgggcttggcaacacagaggtcatttgggacctctaatgtttcgttagagcactggggaatgaagccatctttggaatgggttggacagagaaygggaggtgagaaggtgaagaggcattctttagaagggttttgtcatgatagagagcagagaaatgggatggtagacagaaggtcaaggatattggcttgt

SEQ ID NO: 3468 - DNA, 201 bp, Homo sapiens
tgggatggtagacagaaggtcaaggatattggcttgttatgtttttaaggtgttgtgtttgtgtgctaatgggagtgattggatagagagggagaattgtrtgctacaagagagagaagggagaatttcagaagaaaagtctctgagtgggtgaggcaggggcacggagcctgagtgggggcccagcctctgatggggcag

SEQ ID NO: 3469 - DNA, 201 bp, Homo sapiens
tttcttactggcatctggtggacgcagcctgaggatgccatggaacagctcaaaatacacagaacagtctccatgacaaagaattaaatggctccaaataycaatagtggcgctgttgagaactgtgctatatattaataaccacaatgctagcaataaaaatgtgacttgcacacccttaaaataaatacttatttttcg

SEQ ID NO: 3470 - DNA, 201 bp, Homo sapiens
actggacatcgtgagcccagccagcgctggccagacagttctgagcatgcagagcacagagcccaggcgtgggggcccctgtgggcaaacccagggtacayagaccacagcacgcacacccaacatggctgctgactattttcaaggtcctgaccttggcagcttctacagacggattaggaagttgtgggcagaacggct

SEQ ID NO: 3471 - DNA, 201 bp, Homo sapiens
ggcctttgcgtagctgaagggaaacctacgtttgcaggcagcggaaggagtaacccactccagggataacagggagctctgcccagggagggtccatatcygcctctcactccaccgtccttcccccaagcatgagtcagggcatgcaggaggtgctgacacacagcggagttcccttctgtgcctccagcaggagactag

SEQ ID NO: 3472 - DNA, 201 bp, Homo sapiens
cttataacaggagcatgtttaaaaccaggcatcaatatcttgttactctgtgcatattctccaccagcaatttgatgcgaagagatagatttctgacagaratgcataccaaaggcttgcacaagaacattcataggaccattatttataattttcccaaactggaaacaagctggtacatcaacccaggtggcatattct

SEQ ID NO: 3473 - DNA, 201 bp, Homo sapiens
tattatcatcaatgaaaaggaacaaactcctgctataaatgaagtgacaataggcaaatctcacagacatagtttgaagcaagcagccaggcacacagagrtcattctgtatgagtccgttgatacaaagttcaaacataggcaaaattactctgtgatattagaaagacagggtaataggctgggcgcggtggctcactc

SEQ ID NO: 3474 - DNA, 201 bp, Homo sapiens
ctgggcaagtcctgggaggagcctgcaggaaggctggggccctcctagacctgacttgccccttggggtggcccctgatgctctggataaagcagcctcaygagtggggctgactctgggggatcctggggccctgggctttcttcccccaccggcatgatgtaggaggaagccctcttctgaactgtttttgggggttca

SEQ ID NO: 3475 - DNA, 201 bp, Homo sapiens
ttggagccctgagccagctggttctctcctttagctcaaatcctgggcctggtatttgtgatctgcattaatggccttgagggacacttcaaggtcttgastccagagacctcagaaggtccctgctgactgttgcctgaaacccttttcctaggaaaatatctctgaaataggtgggacttaggaggcagataataacag

SEQ ID NO: 3476 - DNA, 201 bp, Homo sapiens
gcattccttcctatacagacctggggcagcagatccccaggggtaaggaaattctagtgctgcttggggtagaattgagagcaggccctggagatgtttgrccataaggtgcatttgccaggggcagtggctcatagaaaccattatgaggaattggacagtgggctgttggctcacagcactgcatgggtgtagggcaat

SEQ ID NO: 3477 - DNA, 201 bp, Homo sapiens
aggaaacttacaatcatggcagaaggcagaggggaagcaagcatgtcttaatatggcagagcaggagagaaagagcaaaggcggaagtgctacacactttkaaaacatcagatcttgtggaaactcactatcatgagagtggcaagggggaaatttgatcccatgatccaatcacctcccatcaggtccctcccccagcat

SEQ ID NO: 3478 - DNA, 201 bp, Homo sapiens
gcagagcaggagagaaagagcaaaggcggaagtgctacacactttgaaaacatcagatcttgtggaaactcactatcatgagagtggcaagggggaaattygatcccatgatccaatcacctcccatcaggtccctcccccagcattgagaattacaattcaacatgagatttgggtggggacatggaaccaaaccatatc

SEQ ID NO: 3479 - DNA, 201 bp, Homo sapiens
ccacaggccagtcttcttggcattctctactttgaaatgattataaactgtctcaagttggagaggatgctcggtgtcagatgctggaggatatctgacayggtccttgccttccttaacatattagctttttgcttggaggaagtcctggggtagggtaggggagtaaacagacccacgggaagagacaggctgagtagg

SEQ ID NO: 3480 - DNA, 201 bp, Homo sapiens
ctgtttgaaagaagagagagaagtcaagaaatatttgtaaacaatgagaagagaagcgagaagacaaatggaaatcttgatggaggtggcactgctaaaaycttgtaatagtaataatatttcagctttgaccagtgtcctggcagaatgaggggaacacatacagctcaagtgaggttcagtcaggtgccagctggctgg

SEQ ID NO: 3481 - DNA, 201 bp, Homo sapiens
tgagaagtactgattgtaaatatcattctgtctctcttacttaaaaacaaacccttgactctaggcagcccctgcattgcctggttgcattcccatctttrtgttcacaagtccaaataccagtgcttttcaggcagaaatcctctgctttcagtgtgttaaagctttgtaggttggccggacgcggtggctcacgcctgt

SEQ ID NO: 3482 - DNA, 201 bp, Homo sapiens
gatctgcttctcccctgcccagagctttggatggctgttcttggcctctcattccaggcctctatagtctgactgacctgacactgtggtccccactgccycctgctgcccgcactctgctctaggatgacaacagtgccgtttcttgaatgtattctgtgtcctccagcctcagtgtctttctttgctcccactgttctt

SEQ ID NO: 3483 - DNA, 201 bp, Homo sapiens
atccgagtggcagcccctgtcaggacagctggacagcgctggagggggcatctggggactaagcatcactccatttttctgggtcgcatgtccaccttgakaattattcctcggttacaggaaaactgtctgctctctttctacaaagactgaggtgagggtctgtcagaggctgctctccataccctagaggtggtgctg

SEQ ID NO: 3484 - DNA, 201 bp, Homo sapiens
ccataccctagaggtggtgctgtgccatcctcccgtctctgcagcctgggctcagaggcacagcctggcctggaggaggcccttgggcaagggagctccayagagtgtatgcccctctttcatgcagcatttctcaggagcaaggtcagatcccagctgcccttgggaactgggataacagtgggaaccttgggggctgcg

SEQ ID NO: 3485 - DNA, 201 bp, Homo sapiens
gggcagacccttggggtcgtgctgccctggtacttcccgagcctgggtcaactcgccagttctttctccatctctgaccccttttccacaccagaatgcasaaaacaagtccaccttgccatgcagccttctctgacccgtggctcccaacccttcctcctggggctgcactagcctctgggttctctttgtggcacaaga

SEQ ID NO: 3486 - DNA, 201 bp, Homo sapiens
ccatgccctttcctccaggccccagtcctcctgcctctacatgctacctcccaaggctgtgcctccctgcccctacctcgcacagcttgagcacagtggcygctccaggaggggttgagtcagcccactggcctcctggggtgtgccatcatgattcatcacagtggtgccacagctaggcctgaggcccacctgtgaatc

SEQ ID NO: 3487 - DNA, 201 bp, Homo sapiens
tttcttctcccctctgtggggccaggctatggactgcggaggaccgtcacagccacctcccgccactccatctccacagggcctgaccctgccttccggcrcccccagagctaagaaggagaggcaggcggccatcttggccctgtggcgaactctcggaatggtcttcactgttcagctccttctctcccaaccgccacc

SEQ ID NO: 3488 - DNA, 201 bp, Homo sapiens
cactccatctccacagggcctgaccctgccttccggcacccccagagctaagaaggagaggcaggcggccatcttggccctgtggcgaactctcggaatgstcttcactgttcagctccttctctcccaaccgccaccccacgcaagggccacaagagcctcccagaatcatctttctttttgtgcccttttctgttccca

SEQ ID NO: 3489 - DNA, 201 bp, Homo sapiens
gctcctgcaagcctctctactctctccatcctactgtataccggccagatgcagcatccagtaaaggaatctgaggccccaggagacggaagaaccacatmctgaaggtgtccgagtccccatgtcactgtgtgcacagaaactgaacaccagccttgagctgttacaggaatggagaacaaatctttgcactaataaata

SEQ ID NO: 3490 - DNA, 201 bp, Homo sapiens
ttgatgcctccgttcctcttctgtaaaatgggcataaaaagagaccctgcctcagagaacctgctctcagggagaaagggaaacccccgtgcatgctccaygtgccacccaccgcccctctttgctgcagtcacctgctgactctgggttatgccccaccccatttcctgtgttgtagcctatggctaacagcagtctccc

SEQ ID NO: 3491 - DNA, 201 bp, Homo sapiens
ctgctctcagggagaaagggaaacccccgtgcatgctccacgtgccacccaccgcccctctttgctgcagtcacctgctgactctgggttatgccccaccycatttcctgtgttgtagcctatggctaacagcagtctcccttatatgccacctgtgtaagtgccaggtgatttaaacatccaagttgattacctgccaac

SEQ ID NO: 3492 - DNA, 201 bp, Homo sapiens
ttgctgcagtcacctgctgactctgggttatgccccaccccatttcctgtgttgtagcctatggctaacagcagtctcccttatatgccacctgtgtaagygccaggtgatttaaacatccaagttgattacctgccaactctccaccttacaggtggccatatcctggagtccagacactgtcattacaaattatagcag

SEQ ID NO: 3493 - DNA, 201 bp, Homo sapiens
caaagatcactccgcctcctctgcatctgtccctctttcactctcctacacaatcgttcccgaccttcttctccctcctcagacttccacatctcttcccytatcctcacgctcagccatgaccttgcttcctgattcactgagaaaacagacgtctgcacacgcacccaccacaccgacccacccatctctgtcggttca

SEQ ID NO: 3494 - DNA, 201 bp, Homo sapiens
gaccttgcttcctgattcactgagaaaacagacgtctgcacacgcacccaccacaccgacccacccatctctgtcggttcacactctcaggcttctttccygttaactgggtctgccgcccatccatctaagacaatccccaacctgggccctggattccacctcccctcgcctactcaaagaagtcatctggttgtactg

SEQ ID NO: 3495 - DNA, 201 bp, Homo sapiens
tgcacttgcctgggtttcctcccaccactctggcatcttcctctcattctcttttggggctcccactcctcttcctgacctcttcccatcagaggctcttmgggctctgtcttggcttctcttctctatccacattcacctactcagtgatctcatccaactcagagctttaaatgctgtcagtatgctaagggtttccaa

SEQ ID NO: 3496 - DNA, 201 bp, Homo sapiens
gggctctgtcttggcttctcttctctatccacattcacctactcagtgatctcatccaactcagagctttaaatgctgtcagtatgctaagggtttccaartttccatcttcagcctagccctctcctcgtctatccaactgcctgttcaacactgccacttgaatgtctgatagcatctcaaactcagtatgcccccaaa

SEQ ID NO: 3497 - DNA, 201 bp, Homo sapiens
cttctctatccacattcacctactcagtgatctcatccaactcagagctttaaatgctgtcagtatgctaagggtttccaagtttccatcttcagcctagmcctctcctcgtctatccaactgcctgttcaacactgccacttgaatgtctgatagcatctcaaactcagtatgcccccaaattaactcctgatcttccct

SEQ ID NO: 3498 - DNA, 201 bp, Homo sapiens
gctaggacacatcttcccccagtgactgcgtggcgagtgccctcaccccttcaacacctggctcacatagcccctctggatgaggctttccctgggctatygtatttaattttgcccacccctgccctgccctgccctaccctgccctctgtgttgctgttctcaaaagtactacccacgttgtaatctacgcatccattg

SEQ ID NO: 3499 - DNA, 201 bp, Homo sapiens
cctgccctgccctaccctgccctctgtgttgctgttctcaaaagtactacccacgttgtaatctacgcatccattgttgtttatctgtgtctcctccctgyaatacaagttccgtgagggcaagagtttttgtctgtgttgaaacctgttgaatttctgcagcctagaacagctcctgccaggaagtatttgtgtgaatga

SEQ ID NO: 3500 - DNA, 201 bp, Homo sapiens
caagagtttttgtctgtgttgaaacctgttgaatttctgcagcctagaacagctcctgccaggaagtatttgtgtgaatgaccgcacactgcctccagggmtaagcacttttcacctgcaggcctgccttgggggctggggctggtgggcacactgcagcctcaggtgtaggttctgagggggcacctctaaggtcacatg

SEQ ID NO: 3501 - DNA, 201 bp, Homo sapiens
gagggacagccacttgccaggccattctccctggaagtgcccatggcatcagaacatcttcatctgaggatcaggaaccggggctggagaccaggaggccagtccctttggtgagactgaggccccggccagagcctttgtggttgtgccattgtaaggaccgcacttctcccctgggatgagggctactccctgcagcct

SEQ ID NO: 3502 - DNA, 201 bp, Homo sapiens
aggtgcatttatttgtgggagctgagaaggagtggatatttgatggggtttgggtttgagagaaagcagccctccacgggacacctgttctgaataacagstctgctgctcgggccccgctttctctgtggagccggaagccctgagctttgtcaggaggttggaggcgtcaactgctatggttctgcaggacagtaatcc

SEQ ID NO: 3503 - DNA, 201 bp, Homo sapiens
aacccagagtgagggtgtggggaatggctggcctctgggctagaagaggtgctccttagcctttggggctaaagagctgctcaggaagggccacgataagyagggatcagtattgctgatgctgagaaaatctcagatggggcactggcttatcttctgggggtttccagctcactcctcatctgctgcttcaggcaggca

SEQ ID NO: 3504 - DNA, 201 bp, Homo sapiens
actccctgttaccctcagtttggtttctgggctcctgcctggagcctgggaggtagcctcggccatgcaaagatttcccttgagatgtgagctctggaagsctcaggcattcacatcctaagcccgtcaacacctccaatccaagggagcaagctgagaaatcgggaatgtgaccttcagtgcttaattgcacattgaagt

SEQ ID NO: 3505 - DNA, 201 bp, Homo sapiens
aagtgtacagatgggagatgagaccgggcctgtccctccctgcccaggagctcaccctgctttcagagagcctcagcctacggtagcttcagggcggaccygctggccttcccacggtggtcttccttccgcatttgtcctcacctgcagtggggagcttgggtatttgtggctgacggttttgctccagaggcctgcctt

SEQ ID NO: 3506 - DNA, 201 bp, Homo sapiens
tgaagcagcctctatcctcagggagcctgtggtccctgagggggaaggacaacaatggcatggcacagggtgatggggcacacacagaaatcttcatcatyaccctcaccgccgccatcattgacctggttaatgtttgcctaatatttactataggcaaagtctcatgctactaatcactttacattaagtagctccttt

SEQ ID NO: 3507 - DNA, 201 bp, Homo sapiens
gactctgctacctgctgactatgtgatcttgggttagctacttctctgagtttcagtttcttcatctgtgaaactggacatagtgtacagtgctgacacawgttaaatgctgggtatcactttatacaactggagtactaagagcctattactaactacggcgatattgacaagcaaagtcattcaaatggaacactgact

SEQ ID NO: 3508 - DNA, 201 bp, Homo sapiens
aactacggcgatattgacaagcaaagtcattcaaatggaacactgactgtgaaccctgtcctccagcgctggcctcaggagactcacgtggaagtgggctycttgaagccctctctatgtacttgaagtcaggacagcacccccaactctgtctctgggaggaggtggtgagactcacaccttctgtctcccaattttctt

SEQ ID NO: 3509 - DNA, 201 bp, Homo sapiens
ttcaattacctatttaaaattcgctgaaccataaatctattaccagagctatgggaatttagtttagagttcctgtgactttgaaaaaccattgatccccrtatgctccaagtggctgcatgtcaagcctttatagtgggggttaactcattttgcggcttccttaatggctgtgagtttacgttttattgcatatctatt

SEQ ID NO: 3510 - DNA, 201 bp, Homo sapiens
tcagtgaggggaggtgggtggggaagatattgccagaagtggactccgagggcaggagagagggtcttgtccagtgacatgcaggtcaatgtataacaacyggctccctagagaagaaaaaatgtccccccttcccctttttggtagcatatgtgtggtgtgaatttctatgatgtaaatattctcaacgtggccaattta

SEQ ID NO: 3511 - DNA, 201 bp, Homo sapiens
cagtgcccctgggggtggggtgggcttgcacccacctcttgaatgccagggcttgcacttaggaactgtgagctggcaggtcacacccaagggtatatgcrttgcccactttaagcagagcttgaacatcttctaatgtaaggggcttcatctcttttgggccaaggatgtcccctctagtctccagcgtgggcccagcac

SEQ ID NO: 3512 - DNA, 201 bp, Homo sapiens
tcttgaatgccagggcttgcacttaggaactgtgagctggcaggtcacacccaagggtatatgcattgcccactttaagcagagcttgaacatcttctaaygtaaggggcttcatctcttttgggccaaggatgtcccctctagtctccagcgtgggcccagcactgccctttcctctcctctctgctgacccctgcctgg

SEQ ID NO: 3513 - DNA, 201 bp, Homo sapiens
gggcactccccaccccacttcttcccaatgaccgggccacagccttgagaaggtccctgtgccatgtttaagatatctttaaattggcatcaaaggtgggracctgtctttattatccatccactgggtggacagtctgtggtcacaagaaaaaggctgcccaccgccccccaccacccaactcagggaggctgatctcac

SEQ ID NO: 3514 - DNA, 201 bp, Homo sapiens
caagtctatgaccaagaaacaaaaagaagctttacaacgttaaaaccgaagcacacagctcgttttatcccaggcgcgcttgctgaacagcatcagaaccrtgcagtgtttggggaagtaaagcctgggatgcattgcagcatggcacagtttatcttgctggtgacgggcttctaggatggacatcacgcagggcaacgc

SEQ ID NO: 3515 - DNA, 201 bp, Homo sapiens
gcagagcctccaaggccttggggaagtgtgtggcaccgtacatcatgctgttcaaaacttccttcgtcatttcttccctttactgagggcactccatgccygggccaagcttgccactggggtcctgagatgaaccaagggattccaggaacagaatcttaaatccttctttaccccaggagcaactgtgctttaatgagt

SEQ ID NO: 3516 - DNA, 201 bp, Homo sapiens
aatgagttgcaagagagaactttgcccaaacttaaatcatgaagtcatttgtccgaaattactgagctcctctggtgcccgacagcactggggaagggccrtggaccctggaggaaaggcagcctgatgctcagagctctgcttctgtgcagatgatcactcgagatcccaaagtccaaactcgctttttgggaaggcttt

SEQ ID NO: 3517 - DNA, 201 bp, Homo sapiens
ttcagctaaaggctccctcccctcttccagcttcaaacatttgtctaattctagaagaaatacatgcccatcagagaaccacttggaaagtgcaaataaawataaagaaaaagaaaataaatcatcccgaaatccacctcccagatgcagctgctgtcaacacactgctggccagatgtgaagctgggccctctccatgag

SEQ ID NO: 3518 - DNA, 201 bp, Homo sapiens
ctagaagaaatacatgcccatcagagaaccacttggaaagtgcaaataaatataaagaaaaagaaaataaatcatcccgaaatccacctcccagatgcagstgctgtcaacacactgctggccagatgtgaagctgggccctctccatgagtgacactgagcccattattgaaatgagctctttcacgtagtccagccctc

SEQ ID NO: 3519 - DNA, 201 bp, Homo sapiens
aaatgagctctttcacgtagtccagccctcgtctgctgtgcgggctccgagacctgttttctgatcttcctcctattcttctcaaattccaatcattggcygggcgtggtggctcacgcctgtaatcccagcactttgggaggccgaggcgggcggatcacgaggtcaggagattgagaccatcctggctaacacggtgaa

SEQ ID NO: 3520 - DNA, 201 bp, Homo sapiens
tggtggctcacgcctgtaatcccagcactttgggaggccgaggcgggcggatcacgaggtcaggagattgagaccatcctggctaacacggtgaaaccccktctctaccaaaaatacaaaaaatcagccaggcatggtggtgggcgcctgtggtcccagctactcgggaggctgaggcaggagaatggtatgaacccggga

SEQ ID NO: 3521 - DNA, 201 bp, Homo sapiens
ttgggcaagaaagtgtcaacacccaaggttcatgtctttcttatcttcaccccagtcagccctgcccacctgcccagcaattccacacaggtgactacaaragaggtggggggtatggggggaccaaggggacttcagcagcactgatcactgggcatgctcctgcccaggggcctggcattgactatccccctggctgga

SEQ ID NO: 3522 - DNA, 201 bp, Homo sapiens
tccgtgccctgacactgtgtgtgttgggcctggctcccaggtagggagggaatcagatctctccggacaggggcagggtccagtcttagccttagccttgrtccacaggatactttactccttcggagggaaggtccctggggtgtgtggcagaggcttggggaccaccccactcctccctggtgcccctgtgggtgatgg

SEQ ID NO: 3523 - DNA, 201 bp, Homo sapiens
ggagacattgtaaatattccatcagccacttgtgcccctgccagactgtgctcaaagggaccatcttcattctgtggcaggtgaagctcctgtaaaaggcrtgggtggggctgggagactccgaagagtcaaggggagggaggcgttgtgtaatgtgggcaatgtggaaagtgctacacaggctgtcgggagctcagattc

SEQ ID NO: 3524 - DNA, 201 bp, Homo sapiens
gactgtgctcaaagggaccatcttcattctgtggcaggtgaagctcctgtaaaaggcatgggtggggctgggagactccgaagagtcaaggggagggaggmgttgtgtaatgtgggcaatgtggaaagtgctacacaggctgtcgggagctcagattctgagagggagacaggccatgtggtcaaggcccaagccttggat

SEQ ID NO: 3525 - DNA, 201 bp, Homo sapiens
cggccctgccctgaagaggagacaatcccagccaccctgcaccatggtgacgggtctggatctctgaagggggctagtgcctgtgtcacccatcatgtcarttccttggggggcatgctgaccatgtggtacatgtggccatgctcactgaagcccagacctccatacctcacccagtggggacaacccaaaacctgcaat

SEQ ID NO: 3526 - DNA, 201 bp, Homo sapiens
ccccatgagtctccggggtgctggaatctcccttcttggggtcactctactctcaggagtccccctttgaagaatatccaaaatgtactggagaggggaaygcaggacatggctcaacatcatgaaagagctcagctgccactgctggaagcaatccctttggggaagggggcgtggacctaggggcaaaggcatggggaa

SEQ ID NO: 3527 - DNA, 201 bp, Homo sapiens
caaacagaatctgcatgtgtaaggcttgacatggccttttacccagggttaaacacacacgaggccatgcagaccttgcgcctggttccccggctgtgctkcactggagcagatccagccgactccaaggctggtggcaatatccacctccacttgcacctgaatacgcagacaatgcctcatctcaatttgcaccccagc

SEQ ID NO: 3528 - DNA, 201 bp, Homo sapiens
tgacatttacaatcctctcttttattcctattagagaaagcaaaattggttggatccctgggagagggatccacatatactttttatggttgactggcagwtctgtcaggtggccccagagtgaaagagcactgtatgaaaacatgaataaatgctaaagctctcctggtattaagaactttattttttactattgtgtta

SEQ ID NO: 3529 - DNA, 201 bp, Homo sapiens
tggaaaacctccaccagctagattccctaacaggtcagcattccttgtggaaggtgggcaacagcttcttatgaactccggctccccctttgccctgtccrgcagctcagccctcctcccactctccctgtcaccagccccaagagcagaagcagtagtgctggactagaggtcagtcaccaggcagggaagtcggagggg

SEQ ID NO: 3530 - DNA, 201 bp, Homo sapiens
tctgaggattatctacacgggaaacttatcaaaatgtgggcagcccgtggagggagctgcagaaaccctcatttctgtgaaagtcggtgccaggcggaacrtgtgggtttttcaacctgaagcttctgagctgatgcgcaggctgtggtctcagctcacatccagaatgcagggcctggcagtgtgagaagccggggctgc

SEQ ID NO: 3531 - DNA, 201 bp, Homo sapiens
tgggcagcccgtggagggagctgcagaaaccctcatttctgtgaaagtcggtgccaggcggaacgtgtgggtttttcaacctgaagcttctgagctgatgmgcaggctgtggtctcagctcacatccagaatgcagggcctggcagtgtgagaagccggggctgccgagggagggttggcagtggggataaacagcaaacc

SEQ ID NO: 3532 - DNA, 201 bp, Homo sapiens
tttttgtaaatcttcaaaccaaaccatgcagtttactgaagagccagccctgtgcttaggagagccctggatgggaggcacaaggatggggtctctctccygcctcagcctctagggctcagtgagcctgggagagtcacacctttcccagaacttgttttctcttaagtgggaattgggaatgggtacatgggaggcagt

SEQ ID NO: 3533 - DNA, 201 bp, Homo sapiens
aaaggggaagaataatggaaggctgacctgaagaaagagatattacgtttgttttttccttccacagattttcctgccgctgaacccctccaatgcagcargcactgtgctattaatagttgctagagatacagcagtgaatgggccagcgcggtcttggcatcacacagttttggtctggggtccagctctccctctatc

SEQ ID NO: 3534 - DNA, 201 bp, Homo sapiens
aagagtctgggtggtcagtaaatataatctgaaggtcacagtctcaccatcagcacctgccccacactctgaagaaggcagagttgagtggaataatgccrcttcagctgccacccgggagaggactgtgaggactgcggcagtcacggcactccctcccctgccccccaatggcttctgcgctcttgatccagtgatcta

SEQ ID NO: 3535 - DNA, 201 bp, Homo sapiens
gcattacaattaagtaataatgaaagagaaatcatgtcttttgatcaaataatgcattaatcctaccctacactgagtaaccttattcactctctgggaaygttgactttttgaggtaatttttatttctcattccgcaggacaggaaacagggacaaagaaaaagagaacggcaggcatcaaggaagacaatgggaggaa

SEQ ID NO: 3536 - DNA, 201 bp, Homo sapiens
atgatacacattcagtagaaatcgtacttttaagtgcccatacatcccttctgtttgtcactttcagtacagtattcaataaattacataagatattcaayattttattataaaataggctttgtgttagatgattttgccctaagtgtaggctaatgtcagtgttctgagcatgctgaaggcaggtcagactaggctacg

SEQ ID NO: 3537 - DNA, 201 bp, Homo sapiens
accccaggagccaagggcactggcaccaggatggaggggaggaccagggtagtgactggcaaaatgcaagtcggcctgtggaggccaagcctgttttacarcctgtctgcagggacatcctaggaatggataagttgggcttctgagctgcccagccacagacaggccgggttggtgaggtagggtatggcgagggtgctg

SEQ ID NO: 3538 - DNA, 201 bp, Homo sapiens
tatctctggagtcacagggccacaactgagcaccaaagcctgctcccctttagtgagtttgaagggtcaggcggggacacaggctgccttagtccattttstgctgctataacagaatacctgagactgggtactttataatgaacagaaatgtattggctcacagttctggagtctgggaagtccaagattgaggggctg

SEQ ID NO: 3539 - DNA, 201 bp, Homo sapiens
caaggcaagtgctgggaaaaccctggctactgtcatcaggaggcagtgaattcttcagtttctgggactcctggcaacacagggcctgtgagaatcaaggraaagcttccaagcctcagtttctgtcctggcttggctaagatgaggctcattgggcctcctggggagggagacggacacaagcccttgtcggaggaaata

SEQ ID NO: 3540 - DNA, 201 bp, Homo sapiens
agcgctctcttcatggagccccagggagtcctttctggaagacaggagctttgcgatcctgtcctctgcctctaccggtgagtcagcaaaatggatctgarcgcaaggctagagccacagccgtgtcccactcgataaggtttccgctggttctctcctctgacgtcaaaacccatctgtgagatggggacatgaaagcca

SEQ ID NO: 3541 - DNA, 201 bp, Homo sapiens
atctttggtattctgcagatcattgtaacataatttgtatttatactgttcatgatttggagtgctgcttttatctaggcatttatatctttaaaaaaatkttggaaaaggtctagctattatcatttccagtgtttcttctccctcacttcctctacgcttttcttatagactaccctacttgttcttcaaaactcttaa

SEQ ID NO: 3542 - DNA, 201 bp, Homo sapiens
tcattttcatgactgtgggttttccaaggtctgacatgataaagggaaaaggctttgtgatgactgaagagtgaagagccagagtcacagcctctggcaawgcaagaagaaaggcgagagcggtgtcaactctgaggagtttgtagggaatacacaccatttgcccgtgtgtcactttgcctcattcaagatgctgtaact

SEQ ID NO: 3543 - DNA, 201 bp, Homo sapiens
ctttggggaatttatcttgagaaggagggaaggagcaaaggaagctgccaccaacatggaaaaggaaaacatctgaagatgaactgtgctgcggtctggcratgtctgcctgcagatgcagtgccagtttcactaacagctaatgcaaactgatgcaaaaacgtccatattgcaaaggaaaagtggaatcccaagactgtt

SEQ ID NO: 3544 - DNA, 201 bp, Homo sapiens
gagttcacattaactttactagttaacgtgaatatgtttgagttcctgctcacatttttttttttttttttttacttaggggaaagtaaaaaaaaaaaacrtgtgcaggaattcaaacataaaaaatatgtgcaggaattcaaacacatgcacattaactagttaaggtctcagacaaggtcaaggtgactccctaaccat

SEQ ID NO: 3545 - DNA, 201 bp, Homo sapiens
gtgcctgcacagcagcatgagagctgtcccagggcaaaggctacaggtaccaggtgagtggcgctgtggctcttggggaggatttacatacctcaggttcrgatagcatcactggcagatccatcgtgagccctgagctatccaccacaaggtcctgctgcctccaatccctggagagagctgagctcagccagaggatgg

SEQ ID NO: 3546 - DNA, 201 bp, Homo sapiens
aagaatcgcttgaacccggaaggtggtggttccagggtgccgagatcgtgccactgcactctagcctgggcaacaagagaaaaactctgtcttaaaaaaamaaaaaaaaaggaatttcaagatgtcgacagcagagcattaaagcaagcatgggccccttctgagtgtggacccctgtgtgactacacatgtctcaagcca

SEQ ID NO: 3547 - DNA, 201 bp, Homo sapiens
taggcatttatatctttaaaaaaattttggaaaaggtctagctattatcatttccagtgtttcttctccctcacttcctctacgcttttcttatagactaycctacttgttcttcaaaactcttaataatatcttttaacaatatttcttaatatttcaatatcttaatattttctcttaatatctgttttatattttcta

SEQ ID NO: 3548 - DNA, 201 bp, Homo sapiens
agtgttggcgcaactcattcatggtgttgggaggtccccagacccttctgctaggacatctgtttcttaaaaccagggcaaatggttaacccttcaggccmatccctctggaaaaggggaaatactgagcttttacctaacgtggctgctttttagatgatgttctccaatctgagcctgggtgtgtctggacctggagtg

SEQ ID NO: 3549 - DNA, 201 bp, Homo sapiens
tatatatacacacatatatatatacacacatatatatatacacacatatatatacacacacatatatatatacacacatatatatacacacatatatatayacacatatatatacacacacatatatatacacatatatatatatacacacacatatatatacacatatatatatatggttttctttgagacaagttctcg

SEQ ID NO: 3550 - DNA, 201 bp, Homo sapiens
tgggttttccaaggtctgacatgataaagggaaaaggctttgtgatgactgaagagtgaagagccagagtcacagcctctggcaatgcaagaagaaaggcragagcggtgtcaactctgaggagtttgtagggaatacacaccatttgcccgtgtgtcactttgcctcattcaagatgctgtaacttgcagaacagagggc

SEQ ID NO: 3551 - DNA, 201 bp, Homo sapiens
aggcatttatatctttaaaaaaattttggaaaaggtctagctattatcatttccagtgtttcttctccctcacttcctctacgcttttcttatagactacsctacttgttcttcaaaactcttaataatatcttttaacaatatttcttaatatttcaatatcttaatattttctcttaatatctgttttatattttctat

SEQ ID NO: 3552 - DNA, 201 bp, Homo sapiens
gacaaccaggctagaattacaactaaggttgtcattctaagagaactgggccattatgcccacaccaaactctggagcagtggcttggagattttggccayggggcgagacaggccattaaaatggagagctctgactgagaggaatttggaacagagtatgaggaagtttgagcctaaaagtactcttaaaacaatgaac

SEQ ID NO: 3553 - DNA, 201 bp, Homo sapiens
agagtggacctcactgaccccgagtcagtgagacactcattgagccatctttatatatacatatatggtggtcatgggatccttcttcacctgaagaaggrtcaagccaatcagaatgaatctaactgacccacctaaagtttacacccatgaccttggcctcttaggcaaagtgcctcaacatctgggggtggggctgca

SEQ ID NO: 3554 - DNA, 201 bp, Homo sapiens
gaaggtttacagaaaggaaattcgcatgaaagattttatctagaaggtgcttctgctgaacgcatactaagtggtcagaagggtttctgaaggcccagctstgtgcactgggcttgtctgtgacttgcggggtctgtctccatgcatggcacccagcctacacactggtggcactgaggggcagctggagagagggaagcc

SEQ ID NO: 3555 - DNA, 201 bp, Homo sapiens
gctgcttttatctaggcatttatatctttaaaaaaattttggaaaaggtctagctattatcatttccagtgtttcttctccctcacttcctctacgctttycttatagactaccctacttgttcttcaaaactcttaataatatcttttaacaatatttcttaatatttcaatatcttaatattttctcttaatatctgtt

SEQ ID NO: 3556 - DNA, 201 bp, Homo sapiens
ccctgagtcagcctagtggccttattacataatcaaagcaggactttgtgtattttttgttttttagtaactcaaggtcatatgtaaatcagggtctatargttgaccaagatcagaaatagctctgtttaatgcagtgaacaggcactgaacttctacacgcttcccaaagaaggagaagaaggtagttgctgcaaacca

SEQ ID NO: 3557 - DNA, 201 bp, Homo sapiens
agatggggtcacagagaggttaaggactctgccaaggccatgtggcagacaagtggcaaaactgaaattccaagtcaggcacgtagacccacgacatctaytctcttaactcccacctgctgccgcctgtctgttttgttttgtcctgcctgttttgttttgataaacagttgtttttagtataatggggaaaatctagag

SEQ ID NO: 3558 - DNA, 201 bp, Homo sapiens
gggggagggaaaacttccttccttgccttcttccagcccccagaggcagatgccccaaagctgcagcctccagctcagtctccctggatagatttcctccytcacagctggccttggcttccaggatagatattttcctagcaaggtgtgtcaaagtcataggttaccaaattccagttttatttttacattcctgccccc

SEQ ID NO: 3559 - DNA, 201 bp, Homo sapiens
ccatgcattccagcctgggcgacagagtgagactccatctcaaaaaaaaaaaaaaaaaaaaaaaaaaatatatatatatatatgcacacacacacacaccmcacacacacacacacacacacacacacacacacacaaactgaaagcataataatactaaaagaaaatataaataaacatttacataatttttggctgtat

SEQ ID NO: 3560 - DNA, 201 bp, Homo sapiens
aaaacttaaaaatgtgactgtcacgataatctaaagtgagcatatgttaaagctgtgtttgctttcttaatgagagagcccacagtgcagacgctgattcmgaggaggacttgaggagccacatgggcactggagaaagaaggttgggatgagatgcctaggctaggcacacagtaggtgagtgatctgcagggtaagaaa

SEQ ID NO: 3561 - DNA, 201 bp, Homo sapiens
catctcagccataatgcatctgcactgctcactccctgaacaccgggaaaggagcgaaagcagcagcctgatgggatttggcagatgtgctggctctcacyagactcacacactgcgcaatgactccagcctgctctctgcctccatatttatcagttcccagagcctgagaatggcctcctggctgccttgtctgtcatg

SEQ ID NO: 3562 - DNA, 201 bp, Homo sapiens
gactcacgtggaagtgggcttcttgaagccctctctatgtacttgaagtcaggacagcacccccaactctgtctctgggaggaggtggtgagactcacacyttctgtctcccaattttctttttttttttttttgagatggagtctcgctctgttgcccaggctggagtgcagtggtgcgatctccactcactgcaaactc

SEQ ID NO: 3563 - DNA, 201 bp, Homo sapiens
tgtaactctctagctgagaggtgggcaagttactctagcatggtgcctctgggcctcatctataaaaaggggataacgatagttcctctctcatagattgytgcaaggattaatgaattcacttagaacagcttagcatcaactatgaatgctgtatgattacctgaaattaattatgtggcttcagaggcaagctctgca

SEQ ID NO: 3564 - DNA, 201 bp, Homo sapiens
tacccatgcattccagcctgggcgacagagtgagactccatctcaaaaaaaaaaaaaaaaaaaaaaaaaaatatatatatatatatgcacacacacacacmccacacacacacacacacacacacacacacacacacacaaactgaaagcataataatactaaaagaaaatataaataaacatttacataatttttggctg

SEQ ID NO: 3565 - DNA, 201 bp, Homo sapiens
tagagatggggtttcgctatgttggccaggatggtctcaatatcctgacctcatgatccgccctcctcggcctcctaaagtgctggggttacaggcatgarccactgcgcctggctgaaagcattaaaaaaataataataataaaataaaataaaaaataacataaccataaaaagtagaattttttaaaaatacagtata

SEQ ID NO: 3566 - DNA, 201 bp, Homo sapiens
ttcacagtaaccacagttggtatcacagtaaccaacttggctgccaatgctgggaatcttacctcctccttaagatcaaggccccaggaggagccaagatrgccgaataggaacagctccggtctacagctcccagcgtgagcgacgcagaagacgggtgatttctgcatttccatctgaggtaccgggttcatctcacta

SEQ ID NO: 3567 - DNA, 201 bp, Homo sapiens
gctgggattacaggcatgagccactgcgcctggcctaattttttcttttagtatttgttagcatatattttcaattaatttcatttcaaattttgtgccaytatatttagacatgatctttgtaaatagcacatccgtgtattttaaaaattcaatctgaaaattgctattgactaacagataaatccaatccactaaaac

SEQ ID NO: 3568 - DNA, 201 bp, Homo sapiens
tcaggagagagttcacattaactttactagttaacgtgaatatgtttgagttcctgctcacatttttttttttttttttttacttaggggaaagtaaaaawaaaaaacgtgtgcaggaattcaaacataaaaaatatgtgcaggaattcaaacacatgcacattaactagttaaggtctcagacaaggtcaaggtgactcc

SEQ ID NO: 3569 - DNA, 201 bp, Homo sapiens
cagatctgaccaggaacccttaccaactgttctgcttcagcagaggttacaagccacttttaatgaaagctttgcatttaaaaatttctcattaaagacakgagtacattttaaatttgattcaatgcatatgccacttgaatttgacattgacttcctgctcccatagggctgctttgtgtgggaaagctggtggcagat

SEQ ID NO: 3570 - DNA, 201 bp, Homo sapiens
ctttgccttggctgttccttttgcttggaatgttcttccccagatatctacagggtttattttctcatttccttcaggtctctgcttagtatcaccttatygggaggtcttctctgacctcgtctatctcagctctccttgtacccttactctcttaccagctgcattttccatttaccacttgactttctgcattcattt

SEQ ID NO: 3571 - DNA, 201 bp, Homo sapiens
gaaccgagtccttacggatgaggtggcctggtctgctcttggagaagcagggtggcaatagttgacagggccagtattctcagatgaccattgttctttckggctgtgggatgtggggttgtgaccacccccgagactcggcctaaggcagggaaggatatagttggacctcggagagcatctttctgcttactagcattt

SEQ ID NO: 3572 - DNA, 201 bp, Homo sapiens
attgtgcaggtgtgggactgattggcccatcaggcctgggccgtgtggccacctccaggggcagggactaggtgtttgggctggggtaaaatggctaatgsaaagggtatattgggcagattgacaccctatgaccatcatagggatgcagagagggccccctcccttccccctatctgcatcacaactgcatcgggaagc

SEQ ID NO: 3573 - DNA, 201 bp, Homo sapiens
gtcccccagggtggaagccatagagggtgctcacaaccctgtcttcagctggctgccagcagggctgtcctggcttgcttggggcctgtgatgctggaccscagtggagagggagggcacgcgtaggtggctcctctgagcaggtggctgtctacaggctggggatggcagggccccggaaggtctgtcccgccctggcct

SEQ ID NO: 3574 - DNA, 201 bp, Homo sapiens
caagcttctttcctgcactgacttcattccagcagtccatgatccataagaaaatcatgacagtcttgtaggtgtctgggggaggagagaggacagcaagracaagtggctcttgagaggaaagggggaaggagttcatgtttaaattatttattacaccctccaggaaccatccaataaatgatacaacttaacatccac

SEQ ID NO: 3575 - DNA, 201 bp, Homo sapiens
ctcagagtcctctcaagaaaaagaagtctctgcaacttggagcaatctctaagtagctgtctgagccccctggaagagggctgttgtgggcagctgcattyagtgtgagcaacctggagtgggcctgtcctcctgctcgttcccaggttcaggcctggaagagggagttggaggcatgagagaagccactgtggggagagc

SEQ ID NO: 3576 - DNA, 201 bp, Homo sapiens
tttcagaaagtgaggctctagtttcacactcgggactggcaggtcatgtttgcttaggagatctgcactgcaaaggagccagagccatgctgagtgtgcaygtgatggtcacccccttttttccttttccctgaagacagcagcagccctcctctcccgggttccctcacagccttgctagaagccaggccaggctggaca

SEQ ID NO: 3577 - DNA, 201 bp, Homo sapiens
ggctgacaagggctgaattatcccagccatttgctcagcttactcaagtgttcgctcatggctgtaattcaacatgatgggaacagtcagagaaaagtacyggtttgagtagatgaattttggcagtcgcaatcagcattggccctcacagtggacacgggagtatcttagaaaggtaagggtggcaccttttgctgaagc

SEQ ID NO: 3578 - DNA, 201 bp, Homo sapiens
gtcacataatgtgaagttgcagttggttagccatttgtggccctaaaccttcaatggaggggatgctcctgagtcaggtacagtattgaaataaggcaaaycaaaacaggaaacctcctcaggttctgtgactgggagcttcctctctagacctgaagactttctagactctcctgggccttgtaagctgtgcagaaaaat

SEQ ID NO: 3579 - DNA, 201 bp, Homo sapiens
ctctcctgggccttgtaagctgtgcagaaaaatcagctattactcatctgttcctctttcagtccggggtcgagtcagagctgggaaccaacccaggtgtycattgctagacaatatcttacttttctttgacagaaaaatagtttactgaagcaccatagtgcttctattctttttatacttgtacactgttctggagaa

SEQ ID NO: 3580 - DNA, 201 bp, Homo sapiens
ggatccagcaccatggacagcagcacactaccagctggactcaatatagtgtgaaaagtttgtgttaccaaggtcccaggcatgaatatccatgtatcaamgcatgttgataacatagccattctatgtcttttgctgtgttgcataacacaagaactaatcaggaggcaaagcaatgttagatttagtagtcaatataga

SEQ ID NO: 3581 - DNA, 201 bp, Homo sapiens
gggagggagggtggaccaggaagagagaatagcataggaaaatgttgggtggtatgaaaattcagggtagctctagaagaatgaaaagtcctggtgagaastaatggggggaaagactagaaatgcatattgcagtttcataactaatataaagtatctccaattcatcataaacgacatgttttggataaaaagcctaag

SEQ ID NO: 3582 - DNA, 201 bp, Homo sapiens
tccagctgatttttgtttgtatatttgatggcaatttaaaaatattttttatatttattttataaccagcttcttggttaaattttactgtttgtaatagkttttccattgattcttttggggtttccatttgagtatttatgtaatttgcaaacagcaattatcttatctcttctttccaattcctatacttccaggtgt

SEQ ID NO: 3583 - DNA, 201 bp, Homo sapiens
atcttatctcttctttccaattcctatacttccaggtgttttctcttgccttagagctttaaccaattctcaacccatgttaggcgttgtgttcatactgsgcacccttgtcttggcttttgctttcagaagaaaacctttagcatttccccattaagtgacaggctggcttttagcctgagatatgtttattatattaat

SEQ ID NO: 3584 - DNA, 201 bp, Homo sapiens
gcatagaagccaaacagaatataatattctagaacttagagaagtctctctgagatgggaaataaacatcagagtgcaaggctaccaaagaagccagaaawtgagggtcagaaaccctggaaaaggaaaccagaaagaagtgagctcaacattttcggcttccccttgagttatatgattatgcctgagctacacacataa

SEQ ID NO: 3585 - DNA, 201 bp, Homo sapiens
aaaaataaatcctctgtggaaatctataaagtgatccacaggctttacaatttttcatatataatctccagcatccagtctaaaattaccaggcatagcaygaaatgggatcgaatggctaaaatccaagaaaacagaccacagaaacagagccacatgttatccagatcttagaattcttaggcacaagctttagaataa

SEQ ID NO: 3586 - DNA, 201 bp, Homo sapiens
aacactaagagcaatactttatagcgaacttttaaggcaaaaacgcagaaaattattcagatgaatgtatagctatgcaagaagaaataatgagcaccaamaagcattaaaaaaaccataaaaatacatttcggctacttaacacaacaataatgcactgtaagataaaaatatttgtagaactaaaatacatagtaatat

SEQ ID NO: 3587 - DNA, 201 bp, Homo sapiens
aacttcaaccaagaaaacatggctatagataaagtaggcaagaattattatcagtgataaaaagggatggttcataattagaaaaggaacaacttaacagraatatatagcaattctaaacttgtacatacctagtagcatagtctaaatatatgcaaagccagaactcaaagaactaagaggagaatttttttaacccac

SEQ ID NO: 3588 - DNA, 201 bp, Homo sapiens
ttgtcatagcgctgagggaaagaaagcagaaacaaatagtacagtttataagattttatttttataaatctcagaaacaagcaaaaccaatctctgatgayagatgagtagtaacctttgcgaggataatgaccgggggacacagaatggtttgtgggatgctggaaatgttctatattatcatcttggtggtggtcacat

SEQ ID NO: 3589 - DNA, 201 bp, Homo sapiens
caattaaaatcttcacttggactgacaaaatacagctaaataaagtggcgccttatgtagcatgtattccactgctggctcccacttactgtgcacacagwaagagttttgcacactttatctcatttatatggctgagttaaaggcagaaggaaaactattgagttgttggatttctcagcacaccatgtctgggtcttc

SEQ ID NO: 3590 - DNA, 201 bp, Homo sapiens
tgcctttctcatcttcccagaagaccagatgtgaaggggagagggctgggcatggccatataggcaaagaatgtgcaagtctcctttgagcccacgagttygagaccagcctgggcaacatagtgaaacccccctctctacaaaaaaatatgaaaattagctgggcatggtggtgcctacctgtagtcccagatacttgtg

SEQ ID NO: 3591 - DNA, 201 bp, Homo sapiens
ggtctgacataaagatgcaaaatgtgccagagtcatggtggggccagcggtgattgatcaggctggagcctctgagaaggtgagcaagctgggaaagggcyggctgggggcaggactgggtgcaagtggcgtctgattgggataagctgaaaacacccaaagtggccagtgcttaaggtcaggcacaccctcttctccaaa

SEQ ID NO: 3592 - DNA, 201 bp, Homo sapiens
ataaagatgcaaaatgtgccagagtcatggtggggccagcggtgattgatcaggctggagcctctgagaaggtgagcaagctgggaaagggccggctgggrgcaggactgggtgcaagtggcgtctgattgggataagctgaaaacacccaaagtggccagtgcttaaggtcaggcacaccctcttctccaaagggacact

SEQ ID NO: 3593 - DNA, 201 bp, Homo sapiens
gatgcaaaatgtgccagagtcatggtggggccagcggtgattgatcaggctggagcctctgagaaggtgagcaagctgggaaagggccggctgggggcagkactgggtgcaagtggcgtctgattgggataagctgaaaacacccaaagtggccagtgcttaaggtcaggcacaccctcttctccaaagggacacttgaag

SEQ ID NO: 3594 - DNA, 201 bp, Homo sapiens
tgcacagcccccagaggaacttccgactcctacccacactcatgaacctccaccatgtgtgcctcactcagggtctggtgattttggattgctgtctgaayaaatcattggtttgggctcccacaggctttttgtacagggaggtaaatccccatacacactttgattagaaggcactttcattgtaccactataacactt

SEQ ID NO: 3595 - DNA, 201 bp, Homo sapiens
attaaaaatggaacttaaagtagtttaaattaaatgagttatatttaattaaaaaggctttaaggcacaataagaccgtttttcaattttcttttacaacwgagtcaaaaggaagaaaggcccccagtggtcagcagagctagattggtgtttacttaggacctggcccatctgagaatcccaaggaaaatccagttttat

SEQ ID NO: 3596 - DNA, 201 bp, Homo sapiens
gtagtttaaattaaatgagttatatttaattaaaaaggctttaaggcacaataagaccgtttttcaattttcttttacaacagagtcaaaaggaagaaagrcccccagtggtcagcagagctagattggtgtttacttaggacctggcccatctgagaatcccaaggaaaatccagttttattccctgtcctctttctgtt

SEQ ID NO: 3597 - DNA, 201 bp, Homo sapiens
ttgtcccctgcagcctgaatcagttatttcccttgaggagtaggtgctgagaaagacaatgaggacagaagtgggcattttgcccacacttctctcatagrctaacccagcagttctcaaatggggacatttaaataatccagagtataggccataccctaaaccaattaaatcacaatctctgggggtgggacacaggca

SEQ ID NO: 3598 - DNA, 201 bp, Homo sapiens
gacacaggcatcagcattttttgaagccaccccagtggttctaatgtatggacaagtttgggaaccactgggttaatcatgcatcttaacaccttacaaaytcttgccccagtgggcctggccagtgctctgcaccatggtgcccagctgcctcagacaaacctctgcaggtgccagtgggctggcagggttctccaatga

SEQ ID NO: 3599 - DNA, 201 bp, Homo sapiens
gtgggcctggccagtgctctgcaccatggtgcccagctgcctcagacaaacctctgcaggtgccagtgggctggcagggttctccaatgagggtgccctgytactcccacatatggggaagggtgtcccttcgtaacagagggtatcagctgggtgtcacaggcacagaaactaatgtaaacagtggtgccagtttctctt

SEQ ID NO: 3600 - DNA, 201 bp, Homo sapiens
agtgctctgcaccatggtgcccagctgcctcagacaaacctctgcaggtgccagtgggctggcagggttctccaatgagggtgccctgttactcccacatwtggggaagggtgtcccttcgtaacagagggtatcagctgggtgtcacaggcacagaaactaatgtaaacagtggtgccagtttctcttcccagcaagtca

SEQ ID NO: 3601 - DNA, 201 bp, Homo sapiens
cagggttctccaatgagggtgccctgttactcccacatatggggaagggtgtcccttcgtaacagagggtatcagctgggtgtcacaggcacagaaactamtgtaaacagtggtgccagtttctcttcccagcaagtcagtggagccagaggatggcttgggcaggcccacactcgccttccatgaggaccgatgccagct

SEQ ID NO: 3602 - DNA, 201 bp, Homo sapiens
acactcgccttccatgaggaccgatgccagctcagtatccagaactcactggatgcaggtgggaagagtaggctcaagcagccaggactgagaagcctccyggtgacatggagaatggggccactgggcttgcagtgcacgagacacaaaggggctcacctgcaccccagacccccggcactgggtcaccatatacatggc

SEQ ID NO: 3603 - DNA, 201 bp, Homo sapiens
taaacaaattaataatacctcatagactctctttgagaagtcaatgaattaatctacttagtgctttggcaaaatgaaagctgtttattaattctatcatmtcaatagctatggaattaagaaattcatattaggaatgagaattcctattgggaatctcctctttatttatttatttatttatttatttgagacacagtc

SEQ ID NO: 3604 - DNA, 201 bp, Homo sapiens
cagatgacactgccccctttcatcctcaccctagagatgtccctggttccctagccctctctaactcttggctacacagaaagagatatcacaacaaaaamcaaatttttaatgcaataagactttgtatctagctgggagcaaagctgagattcagaactggggaggtggggagtgcatctatctcatcttgtcttccat

SEQ ID NO: 3605 - DNA, 201 bp, Homo sapiens
ctcaactattttgcttgctggatttggcagggtggtggaccttctaagaagaggcatctggtcaagccatgactcccctcccatgtaacccctctttcttwccaagaatgattccagctaaacctcaaagcagctgcactaaggagctccctacagccacaggatatgtatctctggagtcacagggccacaactgagcac

SEQ ID NO: 3606 - DNA, 201 bp, Homo sapiens
cagctgcactaaggagctccctacagccacaggatatgtatctctggagtcacagggccacaactgagcaccaaagcctgctcccctttagtgagtttgawgggtcaggcggggacacaggctgccttagtccattttctgctgctataacagaatacctgagactgggtactttataatgaacagaaatgtattggctca

SEQ ID NO: 3607 - DNA, 201 bp, Homo sapiens
aggagctccctacagccacaggatatgtatctctggagtcacagggccacaactgagcaccaaagcctgctcccctttagtgagtttgaagggtcaggcgkggacacaggctgccttagtccattttctgctgctataacagaatacctgagactgggtactttataatgaacagaaatgtattggctcacagttctggag

SEQ ID NO: 3608 - DNA, 201 bp, Homo sapiens
ggaaggcaggcaaacaaagcaggggagcaaagatttaacagcacaaggcaggccttactgccagggccaacccctgctctgaagatccaaaaatgcaactscataaaatgccccatgtttatacaaacttggctcacgtttctctgtgtgcttgctgagaggtttgaggctggctctgcagcctcaccaactgtcctccac

SEQ ID NO: 3609 - DNA, 201 bp, Homo sapiens
ttcccaatcccaccttccacccagcgcatttctgtgctaaattctcacgtcacccacggtttggcctgtgctgctaactaaatatgctttgtgctgcattygccgctcaccattgtgctcaccacattcttaaagctgtttgtgatgattctttcttctttctcataatcccacggtgagatatcagataagaatttcttg

SEQ ID NO: 3610 - DNA, 201 bp, Homo sapiens
tacttgtaacacaagaacagtcattttgaataaattcagatttaaattatatataccattctcatctggaatggataacgaatcacagataattttgttcyagtcagcatggtcataaaagtgtttctgttcctaagaattactggacaactggtgctatggtttggatgtttgtcccccgccaaacctaatgccaaaatt

SEQ ID NO: 3611 - DNA, 201 bp, Homo sapiens
tggccctcaagcctcaaggatagaatcacaaatcccatttctcttcaaccacttagccagccttagtacagggccaggcacacagctaggtgctcagtggrtgtctgttgattactaagatttaagtcaaccagatgtcccgattggccaagccagcccagggctcagagaccctctaggtagggataagagaaagtcaaa

SEQ ID NO: 3612 - DNA, 201 bp, Homo sapiens
attgttatattgcctgtatttcactcgtggcaaacctaaaggctggagagggcgattcccttagctccaaagctggctagggaacaaacagattttagccyccggggccctctgagttgagggtgcacttgaagcaaaggcagggccggggatgccttaggcggcagcacaggcaagaggcaaagtgatttagccccaaca

SEQ ID NO: 3613 - DNA, 201 bp, Homo sapiens
tcgtggcaaacctaaaggctggagagggcgattcccttagctccaaagctggctagggaacaaacagattttagcctccggggccctctgagttgagggtrcacttgaagcaaaggcagggccggggatgccttaggcggcagcacaggcaagaggcaaagtgatttagccccaacaggaaaaaccaattgtggggtttta

SEQ ID NO: 3614 - DNA, 201 bp, Homo sapiens
ctagggaacaaacagattttagcctccggggccctctgagttgagggtgcacttgaagcaaaggcagggccggggatgccttaggcggcagcacaggcaasaggcaaagtgatttagccccaacaggaaaaaccaattgtggggttttaaaacaacaaacatcctggaggagaaagtggcaacatgaaacacacaaggtga

SEQ ID NO: 3615 - DNA, 201 bp, Homo sapiens
actgaaaacccatggtgtctgagctcaaaacctatctctggtctataagcactgaggcacatgaggtgacaatttaagaaagaatcaatattaacatgtayaggtatgtagtacgtgactatgtatatgccatgggtaagagtcgtttagaaaaagttcagtaaaatgcatgaaagacgtataagaccatgtaacgcccac

SEQ ID NO: 3616 - DNA, 201 bp, Homo sapiens
agcacccaggccccaaaaatggggtggctccaatggcagcaccctagccccaaaaggggaggctcccgccacagcacccaggctgcaaaagtgggggggckgccactgcagcacccaggccccaaaagtggggggctcccacaaatgcctatttctcaaaagcaggtatgctctctggaggctgctaccatatcacttctc

SEQ ID NO: 3617 - DNA, 201 bp, Homo sapiens
cccacaaatgcctatttctcaaaagcaggtatgctctctggaggctgctaccatatcacttctcaccccttcctggttccttggttccccctcaaatacaraattctatcaatattgattttactactatatttatcttgaccagtgtacagacagtccctgacttaggtttggtttgacttaggatttttcaacatgagc

SEQ ID NO: 3618 - DNA, 201 bp, Homo sapiens
ggcaggtcagactaggctacgatgtttggtaggataggtgtatgaaatacattttcgacctatgatattttcaacttacagtgggtttatttggatgtaaycccgtcataagtcaaaatgcatctgtgtaggataaaggggggggggatataacaacatttcattatttcaataaattgtacctctcagaattgtttcctc

SEQ ID NO: 3619 - DNA, 201 bp, Homo sapiens
ctgtgagttatcgatacattaatagctacagttcaaataataaactacccagaaactataacacgcaaggactatcttggatattaggatgcaagcctgtycggcctgcaggctgctcacagatttgctggggaaaaccatccacgtccccactgggaatgaacctgctgtgcagggaggtatgccctgcgctgaaatacc

SEQ ID NO: 3620 - DNA, 201 bp, Homo sapiens
tacccagaaactataacacgcaaggactatcttggatattaggatgcaagcctgtccggcctgcaggctgctcacagatttgctggggaaaaccatccacrtccccactgggaatgaacctgctgtgcagggaggtatgccctgcgctgaaatacctgatggtctggtctgaattttggaagcaccagagtgactttatga

SEQ ID NO: 3621 - DNA, 201 bp, Homo sapiens
tgcagaatctacacagtcatcacctccctttcctgaagcagcaacattcctggacttggaagacaaaagctaccctggagcaggggttgcaggggagcaarataacaacccccaaaaagcgttacttcctcccaatgaccagcatctgctccttcttgttggcacacaaagaattagggtgttaacagctaagataaagag

SEQ ID NO: 3622 - DNA, 201 bp, Homo sapiens
gccattctcctgagggtctttgtagagactaaccaggcaattcaagcttggtttcggaatacactttcagcatctgagaggttttagagccattactcacrtcgtgttatcaacctcttgtctgtatccacacaggttgccttcttctgtccccaccaaaaaggaagtgcaattttaattcactttgtgatctaactgatc

SEQ ID NO: 3623 - DNA, 201 bp, Homo sapiens
ctgggtttaaatcctggcaccaaacttctgttctaccttggagaggttatattacttctgagccttagtttacttatttctaaaatggcaataatatgtamctcgaaaggcttttgtgaggattgaaggagttagtgtcaggcatagagtaagaactctataaatgctgttacgtggaaacccatttgaaatgccacctac

SEQ ID NO: 3624 - DNA, 201 bp, Homo sapiens
tcgaaaggcttttgtgaggattgaaggagttagtgtcaggcatagagtaagaactctataaatgctgttacgtggaaacccatttgaaatgccacctaccrttacatctataagaacaaaccagggtgaggcaggtgggtcacctctattaggctgccatatagccacgccttagtttcctgagaaagcatttggggctag

SEQ ID NO: 3625 - DNA, 201 bp, Homo sapiens
acccggtctctactaaacatacaaaaattagctgggcgtggtagcaggcacctgtaattccagctactcaggaggctggggcaggagaatcgcttgaactygggaggcggaggttgcagtgagccgagatcatacctctgcactttaacctgggcgacagagtgagactcttgtctcaaaaaaagaaatgatgattaagaa

SEQ ID NO: 3626 - DNA, 201 bp, Homo sapiens
agttgagtggaataatgccgcttcagctgccacccgggagaggactgtgaggactgcggcagtcacggcactccctcccctgccccccaatggcttctgcrctcttgatccagtgatctagctagggtgtgtgaaatcttacagggagaaggagcaggaaaagaaaatcatattcgggactaagaataaaaatgtcttccc

SEQ ID NO: 3627 - DNA, 201 bp, Homo sapiens
cttggagttatgaaatacataagccacaaaatctggtatttaacttttaatctgctttgtaatctaagatcaattatgttttatgttttggtactaatggstagcattaaaataaaatatattcatttcaactgtgattttggcaagcgccaaatcagttcataagaggatgcaccaagactgctggtttctgggttgtgt

SEQ ID NO: 3628 - DNA, 201 bp, Homo sapiens
ggactctgccaaggccatgtggcagacaagtggcaaaactgaaattccaagtcaggcacgtagacccacgacatctattctcttaactcccacctgctgcygcctgtctgttttgttttgtcctgcctgttttgttttgataaacagttgtttttagtataatggggaaaatctagagacagtaagataggaggccctggc

SEQ ID NO: 3629 - DNA, 201 bp, Homo sapiens
gttccaaacaagtcataaagtacactgacttgatgctttaaccatcttgtttggaagggaggtgtttcattgcttcccctgtggtttcctaccagagcttyaacagacattcccccagtcaggagaacctggtgctaacctggctgccgcatagataggacaccagaagaccagaaggtggacgaatccacccaggttcaa

SEQ ID NO: 3630 - DNA, 201 bp, Homo sapiens
cactgacttgatgctttaaccatcttgtttggaagggaggtgtttcattgcttcccctgtggtttcctaccagagcttcaacagacattcccccagtcagragaacctggtgctaacctggctgccgcatagataggacaccagaagaccagaaggtggacgaatccacccaggttcaaggacaaatcagtggctaggcct

SEQ ID NO: 3631 - DNA, 201 bp, Homo sapiens
ataggccagagagaagcaatcccattaaactggcaatgggtttaatacaaacttctctttctattccaggaaacagccctgttgggaagaatgggaattcyggccctcagagtttcggtggcattgttcatccattctctctctcagcctctctcccagaacttggtaactttaccagactagccattaaggattagccat

SEQ ID NO: 3632 - DNA, 201 bp, Homo sapiens
taggccagagagaagcaatcccattaaactggcaatgggtttaatacaaacttctctttctattccaggaaacagccctgttgggaagaatgggaattctsgccctcagagtttcggtggcattgttcatccattctctctctcagcctctctcccagaacttggtaactttaccagactagccattaaggattagccata

SEQ ID NO: 3633 - DNA, 201 bp, Homo sapiens
gtctggcaggaaacttaggagggagcccctacccaggccaggctgatggccaggagactttctgagggcctgcctcctgctctggctgcgtgggcaccagrggccttcctggcttaggtgaacagtgttctgtccatgcctctgtaatctctcctggccggggggaggtgacagaggggatttttctgaggatgaagttag

SEQ ID NO: 3634 - DNA, 201 bp, Homo sapiens
gcttaggagagccctggatgggaggcacaaggatggggtctctctcccgcctcagcctctagggctcagtgagcctgggagagtcacacctttcccagaayttgttttctcttaagtgggaattgggaatgggtacatgggaggcagtcatactaaacgacatgtctaaggccattttcagttctaaaggtctatgccttt

SEQ ID NO: 3635 - DNA, 201 bp, Homo sapiens
tagaagttcagttattctgatctaaacagagctatgatgttgaagttttcctctaagtctaatattaatgcttatttttaagatgataattcattaatcayctagaaattaagggaatgtaggcagtaagttcaagatcctagacttaagattacacatacataattgtttttaactttatttcagggagaaaagtagcta

SEQ ID NO: 3636 - DNA, 201 bp, Homo sapiens
aaaatctaaatctatctatctatctatctatctatctatctatctatctatctatctaattttaaaggtgaactgctaccttagggagcttccattctttyttttcctcttcttttctttttgagacagggtcttactctgtcacccaggctggagtccagtggtgggatcacagctcactgtagcctcaacctccctggg

SEQ ID NO: 3637 - DNA, 201 bp, Homo sapiens
aagtcctgtctggctgggcatgttggctcatgcctgtaatcccagctctttgggaggccgaggcaggcggatcatgagatcaaggggtcgagaccatcccrgccaacatggtgaaactccgtttctactaaaaatataaaaattagctgggcatggtggcacgcgcctgtagtctcagctactcaggaggctgaggcagga

SEQ ID NO: 3638 - DNA, 201 bp, Homo sapiens
ggatcatgagatcaaggggtcgagaccatcccggccaacatggtgaaactccgtttctactaaaaatataaaaattagctgggcatggtggcacgcgcctrtagtctcagctactcaggaggctgaggcaggagaatcacttgaacccgggaggcagaggttgcagtgagccgaggtcgtgccactgcactccagcctgag

SEQ ID NO: 3639 - DNA, 201 bp, Homo sapiens
aggtcgtgccactgcactccagcctgagcaatagagcgagactccatctcaaaaaaaaaaaaaaaaaaaaaaaagtcctgcctgaggcaccaaatgatagygagaaactggcctccatgcctatgcatttgtcagactcaagacctggggctctggcttccccagagacctcctgaagaggctactcaatacagcacagtt

SEQ ID NO: 3640 - DNA, 201 bp, Homo sapiens
ctgagcaatagagcgagactccatctcaaaaaaaaaaaaaaaaaaaaaaaagtcctgcctgaggcaccaaatgatagcgagaaactggcctccatgcctaygcatttgtcagactcaagacctggggctctggcttccccagagacctcctgaagaggctactcaatacagcacagttaatgccctgagggctggactttg

SEQ ID NO: 3641 - DNA, 201 bp, Homo sapiens
caagacctggggctctggcttccccagagacctcctgaagaggctactcaatacagcacagttaatgccctgagggctggactttgaccagtgggagactrggcacaggaggaagccagcagacaaattcccccttgtttccctggatggtctctacggagatgcagtgccccaagtcttctttgaagatactgtggaggc

SEQ ID NO: 3642 - DNA, 201 bp, Homo sapiens
tagagaccccagactgatagaagtaactggaagtaagagtggtgacttttcaagagggcagaggacaaagttctttcacaggggtgcttaggcagagataygattagatgagggcgtggcatacgagaagatctagctgggagggcatttaggcagaaggcctagcaggcataaagaaggaactggctgatgtagctaagc

SEQ ID NO: 3643 - DNA, 201 bp, Homo sapiens
tattatatgtaatatttcagattgcgattgactgcaggtaactaaacctgtggaaagtgaaagtgaaacctcaaataagggggaaccactgaaaggactcyagatctgatgttaggtgtaaggaaagccatggaggggaggagggtgagcaaggatctatagtatgtttttaacagatgtctctggctgctgtatgaagaa

SEQ ID NO: 3644 - DNA, 201 bp, Homo sapiens
aagtggggttcctccactgaagtaagtaagagcataaacgcagggacagtggcctcagcatgggtagcttaggggtctttggggctcctgctgggtttgasgatgttcagaggcagaggagggcagatgtgttgtgctgcagctctgacgctgggagcagaaggaccaatgccacctgcagcacataacctgagattccat

SEQ ID NO: 3645 - DNA, 201 bp, Homo sapiens
acaaggggtgagaggtggagctggggaggcagctatttcaagaactcttctggagtccctaatgggagaaaaatcacactctatacccagatatcaacttstgtgagttgggaggtcacaagtaatgtgtgaataacaatacctcaggtgtgctgagttggaaatgagttgttttatgataatgaatttcaagtggattta

SEQ ID NO: 3646 - DNA, 201 bp, Homo sapiens
agagttcacattaactttactagttaacgtgaatatgtttgagttcctgctcacatttttttttttttttttttacttaggggaaagtaaaaaaaaaaaaygtgtgcaggaattcaaacataaaaaatatgtgcaggaattcaaacacatgcacattaactagttaaggtctcagacaaggtcaaggtgactccctaacca

SEQ ID NO: 3647 - DNA, 201 bp, Homo sapiens
ctaagatatctggttcctatgacagccctgtgaggtaggtattattatccattttacagttatggatactgaggaacagagaagttaaacacacctactgygtgcttaataacatgtaaaccacagcagaaagaaaaaagaaaaggaagagatttccacttcccctggaatctgggatgatagaggacttcatgtgtgatg

SEQ ID NO: 3648 - DNA, 201 bp, Homo sapiens
aggtggggaggcgcttctgtcagctgcatcacagactcactggtggtctcactgattctctggaaagggcttttgcaagaaatagaatatgacttccattmtcaactcttaaaaagaaaaatacacacagttttcaatctagatcccaaataacacaaaaccttaaccttcaaagtattttaacaaaagcaacaatggcag

SEQ ID NO: 3649 - DNA, 201 bp, Homo sapiens
aggatcaactcaacattcttcactgggactctgagcgacctagtcactgcctacctctactgcattaccttgtcccatgtatcccctcactccctaacccmtgctggctcttctcagctcccagagctctcgtcttcctcccactcctatcctgggctctctttttctagataacttttactcagctaccagctcttggcc

SEQ ID NO: 3650 - DNA, 201 bp, Homo sapiens
gggatggggccaagtgtcatgagaggcgaggaagaactcagtcagctaaataatgtaataatcctacacatgtggcagtatatgcaagtgacttccattgycaccacctaaagtagcacagagggcctccatttctcttttcttttttttctgtcacatgtctatcccaggggcttccatttttcaagtgagaaatgctag

SEQ ID NO: 3651 - DNA, 201 bp, Homo sapiens
tttcccttcttctccagggatcccctgcctctcttcacattggaccctcactctccattgtccttgggtagtcactgctccctgccgctgcatggccaagmctccaggccctcctgcagggtgtttttctccaggtagggctccccacatggccaggccctagcctgaggatagccctaaaatctgcttccttctccttca

SEQ ID NO: 3652 - DNA, 201 bp, Homo sapiens
aaatgctttgtaggtgactattctaccgaggaggtgaacactattgctgggagtctgtgaatgacagctgcatgcacatctcttaaatcagcagtggctcrggatgctacctgggtgctggcctatgatggaggccgcagttgggtcatttcatttcctaagatgcaggcataggcatcccaaccagctcagccctggatc

SEQ ID NO: 3653 - DNA, 201 bp, Homo sapiens
ctggggatttggggcctctgacatgctgccaaggccatgccacccaagcctctctctcatccctttgaagtccttgaggcagcaatgatctctacccatcyctacctccgacagtacacattttagctttattatgagatcctggaaaggtagagcctaaatcctgccatgtcatattttgcttgacattcatttattcga

SEQ ID NO: 3654 - DNA, 201 bp, Homo sapiens
agaagtgcacaactgagatcaccctgcttataataagtggacggagttcactgcatctggctattttaattacctgcaagcaaagtgattttgctactttyctttagaggagctttttgaaagtagttttcactctgattactttcattaacaagtgatcaaaatgcatcaaagcagaaatgagcacaacaagaagaaaag

SEQ ID NO: 3655 - DNA, 201 bp, Homo sapiens
aacatatgaaaaaaagctcatcatcactggccatcacagaaatgcaaatcaaaaccacaatgagataccatcttacaccagttagaatggcgatcattaaraagtcaggaaacagatgctggaaaggatgtgaagaaataggaacgtttttacactgttggtgggagtataaattagttcagccattgtgaaagacagtgt

SEQ ID NO: 3656 - DNA, 201 bp, Homo sapiens
acaagatgagaagggctctgggtacatagagagggggaatgcaggtgggagacagggagacgaggcagtctggtaggctggggtttcctggggctctagayacaaggctaggagcatggcccctcatttggaacataggactgatgtgaaaggtaggatcccttcctccatgtggccccaaagtcatatattccaagcggc

SEQ ID NO: 3657 - DNA, 201 bp, Homo sapiens
ccacagccagccacaaccaagagcacagacagttgggtaattttgcttccaaatactgactcagcctctgtaaccgcttcctgggcccaaagaaaactaaygagtgctcccttctcagggacagtgccccaagtggcagtgagggaaaacccacgagctcttccactcttggatgccagcggcctgctggcacgttcttcc

SEQ ID NO: 3658 - DNA, 201 bp, Homo sapiens
ggtgggagtataaattagttcagccattgtgaaagacagtgtggcgattcctcaaggatctggaaccagaaataccatttgacccagcaatcccattactrggtatatacccaaaggactataaatcctattctactataaagacacatgcacatgtatgtttattgcgccactattcacgataacaaagacttggaacca

SEQ ID NO: 3659 - DNA, 201 bp, Homo sapiens
caagtgaccttttttagcaaatcatccatgaactggattaagatacgtggatgggaaggtccatgtgaagggctgagtacagggactgaccaaggcaagtsctgggaaaaccctggctactgtcatcaggaggcagtgaattcttcagtttctgggactcctggcaacacagggcctgtgagaatcaaggaaaagcttcca

SEQ ID NO: 3660 - DNA, 201 bp, Homo sapiens
gactctcctgggccttgtaagctgtgcagaaaaatcagctattactcatctgttcctctttcagtccggggtcgagtcagagctgggaaccaacccaggtrttcattgctagacaatatcttacttttctttgacagaaaaatagtttactgaagcaccatagtgcttctattctttttatacttgtacactgttctggag

SEQ ID NO: 3661 - DNA, 201 bp, Homo sapiens
tcataacacatattataataactataaataggttaaatcttcctgtgataacataaataattctcagattggctcaacaaatatcacctgctttttttttwtaaaaaaaagcaaaacatacaaaaaatatagattaaatgataaaccagtaaaaattagtatttagaacatagtatgcactcaagaaatatttgttggcaa

SEQ ID NO: 3662 - DNA, 201 bp, Homo sapiens
ggcgcccgacaccatgcccggctaatttttgtatttttagtagagatggggtttcgctatgttggccaggatggtctcaatatcctgacctcatgatccgycctcctcggcctcctaaagtgctggggttacaggcatgagccactgcgcctggctgaaagcattaaaaaaataataataataaaataaaataaaaaataa

SEQ ID NO: 3663 - DNA, 201 bp, Homo sapiens
cataacacatattataataactataaataggttaaatcttcctgtgataacataaataattctcagattggctcaacaaatatcacctgcttttttttttwaaaaaaaagcaaaacatacaaaaaatatagattaaatgataaaccagtaaaaattagtatttagaacatagtatgcactcaagaaatatttgttggcaaa

SEQ ID NO: 3664 - DNA, 201 bp, Homo sapiens
tagtggccttctgtccacttttgcaatttgcatttgggtggccacctgtcccctgcactgtgaccaaaatctgtctctgagagctcctttcctgcatctawatgtccataggccatgaaatcagatgatcaaggtggttagaattatgtttaaagcaggagacactaggctgtgaggacatcaagtggggttcctccactg

SEQ ID NO: 3665 - DNA, 201 bp, Homo sapiens
ggcacacccaggaggcagctgttctaacagtggaagaagtaagtgccacaaatcattctctaaaattggttcatttgcggacatctctaaggggatgagcsataatccaaataactgagcttaaggcctttacatgacaaaatatgttttattctaagtgtaaatattttggatggagttcctgctctggggtataacaca

SEQ ID NO: 3666 - DNA, 201 bp, Homo sapiens
tccagcagtttgtagtctgaggcaatggggtcacacaggagaggaaagaggctgtgggggccaaggctacctctctcatgggagaacaggagaccataagygtcaactcaggctttgggaagtgaaatgctgtggcgctgagttttgggttatctttgatgaactctggcttatccacactggactagtgagctgtgtgtc

SEQ ID NO: 3667 - DNA, 201 bp, Homo sapiens
cttgacacagtggcaagtgctcctccctctctttggagaagatggcccaaactgggtcactgcttccctgtccagaaaagcaggcagagaggctgagtgaycatgcgaggcacaagggctggggcgagggagggaacagccgagcccccaggcctctgctcaattcttgtacccactgtcctcccagccactggccccttc

SEQ ID NO: 3668 - DNA, 201 bp, Homo sapiens
caggagaggaggctcctgcattccctgacgtggtatctctggccacaataccctcgcagatgccccatgatgaatgtcatgggaggctccataggaaatgmggacacgaggacagtgagggaggtgatcctggcctgctcttcccctgcctttgccccattctgagactggggctgtcccaggagggaggttctaagggac

SEQ ID NO: 3669 - DNA, 201 bp, Homo sapiens
tgtcccccagggtggaagccatagagggtgctcacaaccctgtcttcagctggctgccagcagggctgtcctggcttgcttggggcctgtgatgctggacyccagtggagagggagggcacgcgtaggtggctcctctgagcaggtggctgtctacaggctggggatggcagggccccggaaggtctgtcccgccctggcc

SEQ ID NO: 3670 - DNA, 201 bp, Homo sapiens
cacacacatgctagcccacttacacaccggttgggaatgagggattgtagccagtatgagagatgggagaatcgtgctattaatgagcaaggccaaaactygaccaggcctctgcggggaagggctgggtggataagtgggtaactctgagctcagagaaactctgcaactcatctccaggccactcactgtgattgctgg

SEQ ID NO: 3671 - DNA, 201 bp, Homo sapiens
tgtggcagtatatgcaagtgacttccattgccaccacctaaagtagcacagagggcctccatttctcttttcttttttttctgtcacatgtctatcccagrggcttccatttttcaagtgagaaatgctagaatgcctttgaggtactatctagaaggttctgctagcagatatcgcctgtaacattcaggagaacttggg

SEQ ID NO: 3672 - DNA, 201 bp, Homo sapiens
tttcttgagcatattaaatgagaggacaaatgggaaagctctttgagagcaaaaggcacaccggttacactatttgaatgtaaggtattattttaaattcygtataaaggggaaaaaagtaatatgccagcacagctttacaggcctactgtttttaaaaaataaacacacacacacaaaacagaaacctcaactcatttt

SEQ ID NO: 3673 - DNA, 201 bp, Homo sapiens
ctaagggacgctcaaaccacttgcaaccaggctgcactgccagtctttccccaccaagccatcgtaagccactgtcccgccctctcccactcagcagctastcttgctcttgtcctccctgtacgtccagttggactgcccaaagccctgactcccccttactgcctcccgcccatcttctggtcttagccagccctaccc

SEQ ID NO: 3674 - DNA, 201 bp, Homo sapiens
ctgtgtgatgctggggtttaaaatatgaccaaatccgtcaccttggaagtgagcatagtacccaacaggtagtttttcacccttgctcagtgccacccctmcccattagtccccacgtcttttgttctcacacacatatatatatacacacatatatatatacacacatatatatatacacacatatatatacacacacat

SEQ ID NO: 3675 - DNA, 201 bp, Homo sapiens
tgtaacgtgtaagtagtgtaaattcaatgtggttcaaagtctaggcagaccacaagctacttgccacattccttgaccattaggtaaaattttcttagtcyccattttcacagagagggcagtcctcccaggtctcagccttaagtagaatcctttctgtattgtgcaggcccaaagtacacttgctgtcctgggatggag

SEQ ID NO: 3676 - DNA, 201 bp, Homo sapiens
tgcgactgtaaaggacccataggatggactttgtttgtcaggctgccatgcgactgtaaaggacccataggatggactttatgtttgtcatgctgccatgygactgtaaaggacccataggatggactttgtttgtcatgctgccatgcgactgtaaaggacccataggatggactttatgtttgtcatgctgccatgcga

SEQ ID NO: 3677 - DNA, 201 bp, Homo sapiens
tcctaggtgattgcttcaagttctacatgcagcttccagtcacagttggcgagggtcctgccacgctcactgggtcgttctcttccacactcacatgaagmttttctttacctcatggcctctgctctcttccctgtttcccctctacctgggcacccctctaagtggcagtgctggtgttagccacccttctgctttgtc

SEQ ID NO: 3678 - DNA, 201 bp, Homo sapiens
ctcatcagtttagcctggacttgtagattccttttaatctacaggattaagtttcttcaacttgaatattttattggaaacttatttaatgtttgactccrttctaatagttatcttttctttctaaacttctgttcttcccacttcacggctcaacctcttcatgggtttgctctgtgatttgagagagcttttcttgtt

SEQ ID NO: 3679 - DNA, 201 bp, Homo sapiens
acacacacacacacacacacacacacacacagagtgtgtgagtgtggatctaagcaaaagtcagacatctatgaatctgtgatccgggctctgagggtggygcgtctagtatcagcttgcacaaattggaattaccaactgcttccccaaatccaaacccaagaatcaacctcctaggttgcagttcagctgaaatgtgct

SEQ ID NO: 3680 - DNA, 201 bp, Homo sapiens
gggctgtcccaggagggaggttctaagggacgctcaaaccacttgcaaccaggctgcactgccagtctttccccaccaagccatcgtaagccactgtcccrccctctcccactcagcagctagtcttgctcttgtcctccctgtacgtccagttggactgcccaaagccctgactcccccttactgcctcccgcccatctt

SEQ ID NO: 3681 - DNA, 201 bp, Homo sapiens
aaaaaggaattaatattgggtctaaatcaattttgattatctgtctaataatcaaatagagactatctatttggttaacacttatatagcaattacgatgygtcaggcactgttctaagcacttcacaggtattaactcataaccctcctttttctactccatgatgggggcaatgattatccctcaatcagatgaaagag

SEQ ID NO: 3682 - DNA, 201 bp, Homo sapiens
aaattggaattaccaactgcttccccaaatccaaacccaagaatcaacctcctaggttgcagttcagctgaaatgtgctgttcataacagtgacaactcawatttgcttcagtgaagcacactcttacatgattttcaattccttctgtgactgagcacaggctcaactgattaatcctgtgctggggatttggggcctct

SEQ ID NO: 3683 - DNA, 201 bp, Homo sapiens
ttctgcagatcattgtaacataatttgtatttatactgttcatgatttggagtgctgcttttatctaggcatttatatctttaaaaaaattttggaaaagrtctagctattatcatttccagtgtttcttctccctcacttcctctacgcttttcttatagactaccctacttgttcttcaaaactcttaataatatcttt

SEQ ID NO: 3684 - DNA, 201 bp, Homo sapiens
cgcaatgactccagcctgctctctgcctccatatttatcagttcccagagcctgagaatggcctcctggctgccttgtctgtcatggtaatggattcagawgctttgagaggttcaggatccacagttgatgggagtgacagggaccctcttggattctccaaagaaaagtgtacacagctcagagaacacctggggccgg

SEQ ID NO: 3685 - DNA, 201 bp, Homo sapiens
ggttttgctatgttgcccaggctggtcttgaactcctgggctcaagtgatctgcccacctcggcctctcaaactgcttggattattaggtgtgagccaccrtacctggaagtgttctgttctctgcagctaaacctttaacctaggccatcctaagccctaggcccattcccattattatcatctcatttaatcactgata

SEQ ID NO: 3686 - DNA, 201 bp, Homo sapiens
cagcattgttatgagagcagatgtgacacaaagtatttcatgaatttgagggttaaggcagggcacaaacaaaagtgagaattaggttgaaaacaaagttrtctaagcatccatcttggctctcagtgctcagatcagtgcctggcaaaagtgaggtcattcaataaatatttgttggataaatatttgttggaggaatga

SEQ ID NO: 3687 - DNA, 201 bp, Homo sapiens
tgtgcacgtgccaggacaagtccctcggtgcacacagcgcacgtgagctggagcccagcatagagctgaggaacagcgctggggtcccggcggttcaccakcttaccaccaggtgtcgctgtgtgcacgagggcaaagggcacccgcagaccagcagggccgagccgggctctgcagaatcggactgggctccctgtgggg

SEQ ID NO: 3688 - DNA, 201 bp, Homo sapiens
ctcctgggttcaagagactctcctgcctcagcctcccaagtagctgggattacaggcgcccgacaccatgcccggctaatttttgtatttttagtagagayggggtttcgctatgttggccaggatggtctcaatatcctgacctcatgatccgccctcctcggcctcctaaagtgctggggttacaggcatgagccactg

SEQ ID NO: 3689 - DNA, 201 bp, Homo sapiens
aataatatacatagagcactgctgaacacatagtgcatgctcagtaagtggtagccatagctgctgagagtatttttgctgttgtttgcctgaggggcagragaagcctctgcatccccttcagcccaagctcaggcagctcctgaggcttgttccttatcctcactcatcaggcctctttctgggacatcagatcctgaa

SEQ ID NO: 3690 - DNA, 201 bp, Homo sapiens
aatagttacttttacattgtgttttattacgtgaagattctgaaggagctaaccccagtgtgtgagtctggggttaactcttcccgatggcaaattagttmcttatgatctgcaattttatgttgtaggttgagattttctttttcccatcggcatcctgtatattctggtgtggagattgtcctttataatgggtttgca

SEQ ID NO: 3691 - DNA, 201 bp, Homo sapiens
tcagctacccaggctatgcgattttgttatagtagcctcagtggactaacacagggatgatcctaatagcttccagatagattaaatgggtcacccacaargaataaggatcagtctagcattggactttttaccaatgacactgcttgcttaaagatgatgcctttaaaagtatgacggtgtggtttttctctcctggat

SEQ ID NO: 3692 - DNA, 201 bp, Homo sapiens
cagagtgagactctatctcaaaaaaaaaataaaataaaataaaacaaatttcaaatcaataacctaatctttcaccataacacatagtaaaaagaagagcraactaaacccaaaacaagcagggcaagcaagtagtaaagattaaactggaaattaatgaaaagagaatagaaaagcaatagagtaactcaacaaacccaa

SEQ ID NO: 3693 - DNA, 201 bp, Homo sapiens
taaggcgctaggtagtgagcattttggaggataggatactgtttgaagaaatggagatcaaatgtgaagacagtcatggttcttgcctacagatcacttamaattgtgtggccttagatgagggggtttgggtggtgagtatgcgtgcggagggcttctggcaggagagctccaggggtgtctttccatcacaggatgtat

SEQ ID NO: 3694 - DNA, 201 bp, Homo sapiens
accataatattaacctttcaccatgagacctgtacctggtgcagaataagccatatgtaaatatttgccattactactatttgagtttctcgcagaaaccraggcacttaaaataccaccaaagtgcttcatggtcatcctgcggcactgaaggtgagaggtgtgggtataagagacctctggaatagcacacatggcttt

SEQ ID NO: 3695 - DNA, 201 bp, Homo sapiens
actcaacaaacccaaaaattggttctttcaaaaaaaaaaatcaacaaaattgacaaaacctttagctagactaacaaaaaaattttttagaagtctcgaaktactaaaaatagtaaggaggatgatattactactgactttacaaaataaaaaggattataagggaagagtatgaacaagtatatgccaataaattagaca

SEQ ID NO: 3696 - DNA, 201 bp, Homo sapiens
atgagccaatgggggtcctggcatacaactagcactcaacaaacatgtgccagataaacaaaggaacgaacacatggctttgtccagagttgcttctactkagacatgcatggcctctaagtttcctttgaccctgagtccaggctgccataggacagccccttggtaaactgaacaagaatactccatgctcacaggctt

SEQ ID NO: 3697 - DNA, 201 bp, Homo sapiens
taaagaccaccctccttctgtgatggcctcccctacagcttccctggccctccacattccagccacgctggcctgcctccagcccttgattacagcaagcrcctccctgtctccaggtctcctggacatctggctagttcctctcacctccctgtctcttcctttacattatccctcagacaggtgccctacccataacta

SEQ ID NO: 3698 - DNA, 201 bp, Homo sapiens
tgtcctcagggaggctcttgggaatcaatgcctggaatcccaaaggccaccatgttttcatcagcaacaaattacacacacacacacacacacacacacaytgcactcgcaggtaattttctaaatatgtaacaacggatatagcatgagcagtgaccaatcagaatgaatccaagtcatatatgcccagttcgaccacac

SEQ ID NO: 3699 - DNA, 201 bp, Homo sapiens
gtttgagaaagtttcctctccccaagactcattattcatggtcttgcttactaagaattgcaacacagaggtggatagaagccaggattattattacagastctatacatctatacattattgatacgtctatacatttaaagttatcctttaaaaaataatagatcagccaggcatgatgtctcacacctgtaatcccag

SEQ ID NO: 3700 - DNA, 201 bp, Homo sapiens
ggcagatcatggggtcaggagatcgagaccattctggctaacacggtgaaaccccgtctctactaaaaatacaaaaaattagccgggtgcggtggcaggcrcctgtagtcccagctactcgggaggctgaggcaggagaatggcgtgaacccaggaggcggagcttgcagtgagccgagatagcgccactgcagtccggcc

SEQ ID NO: 3701 - DNA, 201 bp, Homo sapiens
agggcagtcctcccaggtctcagccttaagtagaatcctttctgtattgtgcaggcccaaagtacacttgctgtcctgggatggagataaaagcctttgcyactagccctgaggtggcccgtgctgggtctgacgctgccccctcaaacctcagggtgccatgacattggcttgctcactcgtcactgcctttgagagtgg

SEQ ID NO: 3702 - DNA, 201 bp, Homo sapiens
gaggcatagtgtgattaactaatttgtctaaggtcacagagttaagtggcatggccagacaatggaacctcgttgccttaccctcaatgctgtgaaacaawagacaacagcccacagcaacaccctctacacagtggttctgggcaaaacaccttgttggcatcatatattaacaaatccactgacccccaaaagaccatg

SEQ ID NO: 3703 - DNA, 201 bp, Homo sapiens
cttagaatatgattcagacccagatgcatgaacttgctgcttccagagaagccctgcctacattttcccccttgctctttaaatggcaagcataatagaamacggttatacaactaaaaagaaaaatgttttctaagtaggagatgctctcaagaaagaccagatttaggtgaaggtttacagaaaggaaattcgcatgaa

SEQ ID NO: 3704 - DNA, 201 bp, Homo sapiens
ttctgacttaacgcctaaagttttttaaggcctagtatcttctcaaataacacaagaagcataaaattctttagtactgaccatcatcaccatctcttgtytcatattttaaatgaccccaaattagtcattttattatcaatgcttttcttcagtcaacacttacttataattatgcctatgtttttgcctattcccttt

SEQ ID NO: 3705 - DNA, 201 bp, Homo sapiens
ccactcaagagcccccagtgcaacaccaggtaggactttttttttttttgtctgctttgtttttctctctctggatatttcagatcactttaatttttttyttcaaaacctaaaatgtcagcaattatattttgacttatttgatagatctttcagtatagggcacttatttttttggatctctctttgcttattgtgtcc

SEQ ID NO: 3706 - DNA, 201 bp, Homo sapiens
tcactgcagctcggacccttatgaatatgggtttggtgaacactgtgcttgtaaagcttagagaggaggtctcaaatttgacggcatctgttgctgcctayccagttccgatggaagcctccatgcccacgcacctgctctgcttctctctctctcctttcctctcaagtttctttaattcagatcaaccttccctggtag

SEQ ID NO: 3707 - DNA, 201 bp, Homo sapiens
caggtgggggctgaacctggagacacctgtacgctcaggtggagtcaccccggcagaggggtgcttgggagagagatgactaacaaacctcaatctcaggsaagaggcaggagcaaagtgggagcagttcaggcacatcctaggcagggacccattcttcctgaaagaggaagtggtgggacaggactgattgcccgaatt

SEQ ID NO: 3708 - DNA, 201 bp, Homo sapiens
cctgacaaagcagcatgcaacatgggcactgaaaccaactctaacagggatactggatttccaagtgattttatcgatggttgaaggctcaacatcgtggytagcttatcgtagagaccagacctctaatccctatgccaacaagcttccagtgcttatgggagagattaagttaggatttgtacattttcctgcagtggg

SEQ ID NO: 3709 - DNA, 201 bp, Homo sapiens
acaaatgtgcaagttaacatgtcactgcacagtctgggcctttaatcagcggcaaattgtgagttgaacaaagacgtaaccctctagcctggatcagtaartaatccttgggcagatctagtaaacaaggtcccagagggaggacttgccaccctctttttcccttattcccaagttttggataattttctcaataccacc

SEQ ID NO: 3710 - DNA, 201 bp, Homo sapiens
tggggctaagactctcaaaatattcttaagaagacatgcaaagagccaggctcagggaccaatgccagttctggtggaggaaagttcccttttagcacatrgacagcacactgagctgtctgagcaatggatacatagtatgtcacccccaaaatagccccagcttctccactccatgttgaccaagagagctccttggct

SEQ ID NO: 3711 - DNA, 201 bp, Homo sapiens
ctggggctgcgtgtgacgctcgtgggccagcctgagttccaggtgggcatgggcttggtgggccctgcactcacagcggccagctggcaccactggccccrgacagcgaggggcttagcacccgggccagcagctgcggagggtgcgccaggtcccccagcagtgccggcccaccgggctgttctcgaattctcgccgggc

SEQ ID NO: 3712 - DNA, 201 bp, Homo sapiens
gaacatgaataaatataacttgttttctgtttaattatccagtctcctgagaatgctctgtcatggctgtgttttgtaaacaggcatctgcagaccatttygaacggtttacatcagtgtatttgtttttgattccaatttcctgagcgtgccacagtggctgatgaactcctgatgaggggttcctgtgccagccgtcag

SEQ ID NO: 3713 - DNA, 201 bp, Homo sapiens
gccatactaagatatctggttcctatgacagccctgtgaggtaggtattattatccattttacagttatggatactgaggaacagagaagttaaacacacytactgcgtgcttaataacatgtaaaccacagcagaaagaaaaaagaaaaggaagagatttccacttcccctggaatctgggatgatagaggacttcatgt

SEQ ID NO: 3714 - DNA, 201 bp, Homo sapiens
ggtggatcacaaggtcaggagatcgagaccatcctggctaacatggtgaaactccgtctctactaaaaatacaaaaaattagccaggtgtggtggcgggcrcctgtagtcccagctactcgggaggctgaggcaggagaatggcatgaacccaggaggtggggcttgcagtgagctgagatcgcaccactgcactccagcc

SEQ ID NO: 3715 - DNA, 201 bp, Homo sapiens
gggctgggtggacatccagattttaacaagcatcccaaggggttctatgatggcctgagaaccactgtgttacaagatgagaagggctctgggtacatagrgagggggaatgcaggtgggagacagggagacgaggcagtctggtaggctggggtttcctggggctctagacacaaggctaggagcatggcccctcatttg

SEQ ID NO: 3716 - DNA, 201 bp, Homo sapiens
gaatcgtgctattaatgagcaaggccaaaactcgaccaggcctctgcggggaagggctgggtggataagtgggtaactctgagctcagagaaactctgcarctcatctccaggccactcactgtgattgctggagaaaggagcaaggatcccacgatgtggcaggcacacccaggaggcagctgttctaacagtggaagaa

SEQ ID NO: 3717 - DNA, 201 bp, Homo sapiens
aaaaataaacattttccccagtaatattttattttctatatgtttggattgaggagaatggaggggtccagggtcaactcagatcgtccttctgccggatrttgaaccttctagcccctttcttcaatatttattttcttctgagacagaaaccagcccccagccaatcactgcttcagactacacaaggttatgagaaag

SEQ ID NO: 3718 - DNA, 201 bp, Homo sapiens
aaactggatagagaggatagtgaccagatgcaagagtgaaagcaggaaagaccagatgctcagttgtcaagaggtgcaaagtgatgtctaacccattatcrtcatcactaccatccaaccagcacctaaggtttattgattgctaactatgccttggacaccagtcctagccctttatatgtattgtttttcctaatcctc

SEQ ID NO: 3719 - DNA, 201 bp, Homo sapiens
tttatagactttattaattttaaagaaaaacaggacaagtttatagtggagaaagctggcagatatcattttactcaagtgatcaaaattaacattaccartggtgtcaccagttgacataaattcctacttgatgggatgtggggagaagagctcggcataatttcagtaatattcttgccaaaagttcatgaagaaaca

SEQ ID NO: 3720 - DNA, 201 bp, Homo sapiens
agatggggaagggagctccactcagtgtgaaaaagtatggggattggagtcactgtggtttgagaatcctcccagttctctcttttgctcttatttccctscatgagtgctcacaggataggccggagggcgtggggtgctgtttccccccacactcgtgttccaggcatggggagtctcagagcagagcagcacccactt

SEQ ID NO: 3721 - DNA, 201 bp, Homo sapiens
acatggtgaaaccctgtctgtattaaaaatacagaaattagccaggcgtggtggcgggtgcctgtagtcccatctacttgggaggctgaggcagaagaatygcttgaacccggaaggtggtggttccagggtgccgagatcgtgccactgcactctagcctgggcaacaagagaaaaactctgtcttaaaaaaaaaaaaaa

SEQ ID NO: 3722 - DNA, 201 bp, Homo sapiens
ctgtgcccacagagggactgacgccctgctatgagaactgacattggagagctgctctgcaagtagggaatctgaggagggcaagggagttggggggttcycaaagctcagggcttcccatgatatccccctgggatgaaaacaaatgggtcacactgcagtgatggcccaagtcagtgtgggttggttggcacaagacag

SEQ ID NO: 3723 - DNA, 201 bp, Homo sapiens
gtgaacagcaatgatgagcccatgctctgctccggggaccactccggggcctaacgagaaattagagggaggtttgaggcaaccttgtgtaaactagtggscttctgtccacttttgcaatttgcatttgggtggccacctgtcccctgcactgtgaccaaaatctgtctctgagagctcctttcctgcatctaaatgtcc

SEQ ID NO: 3724 - DNA, 201 bp, Homo sapiens
gagaaggaacacctttcatctgtcaggaggcctgtcaattctgccaaaagagtttctatgtaaccaatttgtatgaaaccaaagcacaaataggtttctayatattgtctaatgtccctgggcacggcttttggaggtggttatttctggtcacagctgaagatcaaacaccaaacacaagtgccaaagcatacttttcaa

SEQ ID NO: 3725 - DNA, 201 bp, Homo sapiens
atgttcattgcactgagtgttgggatggggccaagtgtcatgagaggcgaggaagaactcagtcagctaaataatgtaataatcctacacatgtggcagtwtatgcaagtgacttccattgccaccacctaaagtagcacagagggcctccatttctcttttcttttttttctgtcacatgtctatcccaggggcttccat

SEQ ID NO: 3726 - DNA, 201 bp, Homo sapiens
tgcctctccaagctcttctccttagagcttccagagctgctgttggggctaatcccacattctctcatctctgtcttcagtgaaataatgtttgagaaagyttcctctccccaagactcattattcatggtcttgcttactaagaattgcaacacagaggtggatagaagccaggattattattacagactctatacatct

SEQ ID NO: 3727 - DNA, 201 bp, Homo sapiens
agtggctcatgcctgtaatctcagcattttgggaggctgaggcaggcggatcacaaggtcaagagatcgagaccatcctggccaacatggtgaaacctcawctctactaaatatacaaaaattagctgggtgtggtggcttgcgcctgtagtctcagctactcgggaggctgaggcaggagaatggcgtgaacctgagaga

SEQ ID NO: 3728 - DNA, 201 bp, Homo sapiens
gcagagcagacagagcaaagacaacatttaacatttcaaatcagtctttattgcagctctcctcctcaccggttgagtggtgttgggcaagtcattaaacytctgtgagcctcagtttcctcacctgccaagttaggggtaataacagtccttaccctgaagggctgtcacagaattaaagaacagaaagtgcacagaatg

SEQ ID NO: 3729 - DNA, 201 bp, Homo sapiens
aggaagggggatagactgccacaggggaaaggatttgctgtgtgacatcaggcggtcaggccgtgcccctcctgggggctggcactggagtaggtctctayttcaatacccaatctgagcacgtttgtctgctcaggactgttcaatccctcctgcccaccaggggagcctctctcttcactgtcatctccctactttgta

SEQ ID NO: 3730 - DNA, 201 bp, Homo sapiens
caacaaagtgagaaccccatctcttaaaaggaaaggaaaaaaaaaaaaacttccaaaatttttaaaggtaacctatgggagatttaagattagggaatatrtgaggcactgagagatgataataaaataacaacagtttatagagtacaatacaggaaacaaagaaaaagaaagcataaattcagaaaacaaaataagctg

SEQ ID NO: 3731 - DNA, 201 bp, Homo sapiens
tgaattacagagcttcagcatgtgtaaaaacaatagcatatttactatgtgccagaaactgttttaagcactttagccatactaagatatctggttcctaygacagccctgtgaggtaggtattattatccattttacagttatggatactgaggaacagagaagttaaacacacctactgcgtgcttaataacatgtaaa

SEQ ID NO: 3732 - DNA, 201 bp, Homo sapiens
tgcctaagatgatacttgtgatatcttttttttttttttttacaacactgtgttgtatgaatgtgtaatttaatttccttaaaagctttccaagtctagcwtcacacaggagtgagctcactgaatcactggtgttgttactaatgtccccagcagacattaacacaaacggagtcctgcgctgaaagcacattttcaggc

SEQ ID NO: 3733 - DNA, 201 bp, Homo sapiens
gccacccatgtgctgtgatgtcagggcagcagaagaggcagtaggaagagcagtgatgctgatatacaggaggacttgtgtgccaagccctgggacaagcytcttggtgaggtgtcaccaccagcctgtgtgacagccggggaagtcaaggcacagagtgtgggcaccacctgtccaagcctctatatggccaagtgtcca

SEQ ID NO: 3734 - DNA, 201 bp, Homo sapiens
tcatggcttgttgcagccttgacttccccaggctcaggtggtactgccacctcagcctctcgagtagctgggactacaggagtgcaccaccacacccagcycacttttgtatttttagtggagacagggttttgctatgttgcccaggctggtcttgaactcctgggctcaagtgatctgcccacctcggcctctcaaact

SEQ ID NO: 3735 - DNA, 201 bp, Homo sapiens
attctgggttaaactaaattttatgtttgagatttttcaggttactcaggtagtttgcatatgagctacaattccttctggcgatcagtctatggttatamattttcaaggaaatttctctctgtctactcagtgccaagatttgaggcaggaacattttcttgccagtccttgggactgggtggatttctttctttcttg

SEQ ID NO: 3736 - DNA, 201 bp, Homo sapiens
cacaaagaaggcttttgggggaactatgatttttgagccaacaagaaaatcaggagaatttcaggaaagaatttaaggagataatggtcactattgagatrtcaagtcttccaaggttaagaatatcagggcaatttaaggagacaatggtcactattaagactccagtcttccaaggtcaagaagaagacatatctcaaa

SEQ ID NO: 3737 - DNA, 201 bp, Homo sapiens
ttttggatatcctgccaccacagaatacactgagaggcagtaatttttgaagataaaatgttcaacaactgcgtcttttgaccttctgggattcctatcayaggttttgatcaacttagtctgaattccatggggctaaactgtatgtgagaaaatgtgaaatcctgatatccctttgaagagtatgacctggtttatgtg

SEQ ID NO: 3738 - DNA, 201 bp, Homo sapiens
tggagataaaagcctttgccactagccctgaggtggcccgtgctgggtctgacgctgccccctcaaacctcagggtgccatgacattggcttgctcactcrtcactgcctttgagagtggtttgttcatttttgtacctagaaatttctctaaccttcaagtccagtcatatatttagaaaaataaacattttccccagta

SEQ ID NO: 3739 - DNA, 201 bp, Homo sapiens
gagctgagatcatgccacttcactctagcctgggcaacaagagcaaaagtctgtctcaaaaaagaaaaaaaagagaatgttaacatcaagaaaaggccaamaggaccaaaacacagcagaaacacatgtgtggagcagagccaccacctctgtctgtacttgggctaagccagggtccgtggaacactttgctgggtacag

SEQ ID NO: 3740 - DNA, 201 bp, Homo sapiens
ccccccagccctcccagatctcctccacctaaaggaggctgccaacctgctggcctgaggacccccgctcctgtggttccttagacggaacagcaggcccygaggcagggccccagcagcgccttcacagctgctcagaactccaggctgggcatcaggcagtgtctgtggtttcagggttgggaccaggctccacttcat

SEQ ID NO: 3741 - DNA, 201 bp, Homo sapiens
ggggtggggctgcatctggcacacagtacgtcctcagtaaatcattttcttattgaagacttttgtgcccctgcagccttattctgctgtcagcattttgyttaagaagcaagcaaactaatactattgacatgaagatgtttacctactatttaggtttaaaatttggtttaaaatatgtttaaatgattcaataattat

SEQ ID NO: 3742 - DNA, 201 bp, Homo sapiens
ctctaaggaggaggctgtccctccatggcagcacctccagcagaagtacatgagcttgcctctggcctcatctcagcagcagccctgctgctgtctccagyggccagtggaagagtcagcaaacaccagcacattcccactgggtttcctgaccctccaaaagcccttcacagtaaccacagttggtatcacagtaaccaa

SEQ ID NO: 3743 - DNA, 201 bp, Homo sapiens
taacatcaaggacattaatgttattttgttcatcatggatttttttgcattaattttgatttgtaaaatattgcattaaaatattatttgttttaactacygcgtctttgtgttggaggcacgcacctcaattgcctcactctgatcctcgccctgttttgtgccaggcatagaaactggagataagtgagtgaatcagct

SEQ ID NO: 3744 - DNA, 201 bp, Homo sapiens
gatttttagaaagacagaaacctgagaagaggaagttgcttaagaaaattataattgcttttatttgaggaaggatatatgtctttaggctgaaggacccwcaaaaggaaccacaaagtcagacacatcattgcaaaattttataacatcaaggacattaatgttattttgttcatcatggatttttttgcattaattttg

SEQ ID NO: 3745 - DNA, 201 bp, Homo sapiens
tttaaaaacaaaaggagagggttcaaaatgacagggtaggtacatgcatttctttcgcctgctgagactcaattacaatgtctttaaaagagtaaattacmacagtaaagatagtggaagaggcacccttggtgagcaagggatttaagtacatttccagaacattcactggcgcacaggacagaggacacctcagtccac

SEQ ID NO: 3746 - DNA, 201 bp, Homo sapiens
gccacatactaatattagaaagccagatgtttcaaacattttaaaaacaaaaggagagggttcaaaatgacagggtaggtacatgcatttctttcgcctgytgagactcaattacaatgtctttaaaagagtaaattacaacagtaaagatagtggaagaggcacccttggtgagcaagggatttaagtacatttccagaa

SEQ ID NO: 3747 - DNA, 201 bp, Homo sapiens
gatagattctcctctgtgtgctgggagacccaatgccgccaattctgaagaccgtgggctgcattggccagggatgcaatggagccaggaactctgttggmaagatctgctcaaggagaagagaacagtccaagagctcataaccagagctgcattgagatgtggctttgggaaagggatgaatgacagatgacccagttt

SEQ ID NO: 3748 - DNA, 201 bp, Homo sapiens
gacctgagactcagtgtggcagcaccgggcaaactcccccagttgttcctgtgctgcaacctctgccaagggacttctgacaggcaggccagctatgaccragctcacctccaggactttccagctcagtgcgggaaacagacggctacccaaccaacatgcagaatgacctatacgttacacaataacacacacgaggga

SEQ ID NO: 3749 - DNA, 201 bp, Homo sapiens
aggccgaggcgggcagatcatggggtcaggagatcgagaccattctggctaacacggtgaaaccccgtctctactaaaaatacaaaaaattagccgggtgyggtggcaggcgcctgtagtcccagctactcgggaggctgaggcaggagaatggcgtgaacccaggaggcggagcttgcagtgagccgagatagcgccact

SEQ ID NO: 3750 - DNA, 201 bp, Homo sapiens
gtcaaggcacatcatacaaagttgtacttaaaaaaacaaaacaaaacaaaacaaaacaaaacaaaaaaccctgaagcacaagtaacacaccacataagcawgcaattttcttcactatggttttgccccagcataggaacgagcccccaactatctgtgacatgaatggttctgagttgagaagagctgggagcacacaca

SEQ ID NO: 3751 - DNA, 201 bp, Homo sapiens
acttttacaggcagaccagctgtagggtccattctctttatgacatgcattatggatctccccaagagaagaaggcagaggaggtcacctgagggtgaacstactgagcccagagtgatgggcccctcaggagctgggaggctcagccaggactgtgccctaatggctgggggaggctatgggctccggccctgctgcttc

SEQ ID NO: 3752 - DNA, 201 bp, Homo sapiens
cgtttttgaccagagtcaataaaagcatgttcagcaaaaccaatataatatagcatggtgtcattcttttatttagttttttaaaaatgctcacgcagtgktacataatcttgagccctggtagaagtgagaattaaaaatatggaggcatctgtggtatgaccccctgggtcacagaacccctaaatttcatgtcctccc

SEQ ID NO: 3753 - DNA, 201 bp, Homo sapiens
ctactatttataagggcagatgattcgtatctcttcccgactctgtgttccatgacatcactggactggtcaactgaagtcatccacggtagtagtatttrcactacggaaattggcaaatgctataaattaggacttttcccaccgagagccggttgttaaacatttatcagcacaccactgattgacataatcaccaat

SEQ ID NO: 3754 - DNA, 201 bp, Homo sapiens
atgtttaaaactagagctcattggaattcaccaaaacctggacaagttccccagagacctgcaaaagcttaatagtcctatttgtttttgaagtaagggayactgtgcaaatccattccacctgcctgtccatattagtgtcattttctggtctggtgggttagacgggggaaggattacccactaactggcaacggggta

SEQ ID NO: 3755 - DNA, 201 bp, Homo sapiens
agaaggcttgcagcttccacatgaatgtcttggaacactcactcttagacccctgagccaccatgtaggagatctgactaccctgcaggagagaccgggargagatactctgagactacaaggggtggaggagtatagctaagcccagccttccagctgaccctgtcaagatgctagatgtgtgggtaacactggataagg

SEQ ID NO: 3756 - DNA, 201 bp, Homo sapiens
ggagaaatttctaagtcaaaggttgcaaatatagggcccccaggcccccattcccccagcagacagtggtaaacatctggcactttcccactgaacccagrtgtggccttcttatttacctctcacatcactccaggcagccactaccaagagaactgtgttaccacctgtggtagattaaagatggcaacacattctctg

SEQ ID NO: 3757 - DNA, 201 bp, Homo sapiens
atggacttttgatggaaaaaacagcacatacatgttgataggaagaaaataggagagacctagaggggtgcatcatgagggagaaatttctaagtcaaagkttgcaaatatagggcccccaggcccccattcccccagcagacagtggtaaacatctggcactttcccactgaacccagatgtggccttcttatttacctc

SEQ ID NO: 3758 - DNA, 201 bp, Homo sapiens
ggcagaaggaatatttgaaaatatattggctaaaaatttacaaaactgaagaaagacaactcaatatctgaagcaaggaatcctcaagcaaaataaatacraaggaaaccacaaaggcaaattattatctaacaactgaaaaccaaagataatgagaaaacataagaagcagccagaggaagaaaagacacattattttca

SEQ ID NO: 3759 - DNA, 201 bp, Homo sapiens
gcagatgcaaaatagcatgcttcaaaatacccaaaggaaatgcttcccttgcaatttcccttgcgccagggcttcactggacccttataaactccgcctgscttccaaggtaggggagtctgaaattatacattcttagggcaaagtgactggaactaactcacagcacaaactgcaggctctactcaacacctaagggca

SEQ ID NO: 3760 - DNA, 201 bp, Homo sapiens
attgaatggtttttaaaaaggcagatgcaaaatagcatgcttcaaaatacccaaaggaaatgcttcccttgcaatttcccttgcgccagggcttcactggwcccttataaactccgcctggcttccaaggtaggggagtctgaaattatacattcttagggcaaagtgactggaactaactcacagcacaaactgcaggct

SEQ ID NO: 3761 - DNA, 201 bp, Homo sapiens
actctcatctctttcttctgcctggggcatcttccttcagagcccccagcctcacaaaaagaccccagaaaggcaggaacgtgaggctccaagccacttarctgagacttactgagacagagagaactttctcctgggaaagtcccctggtggagcagagggagaaggggctggagccagaggccacgctgctgtggggga

SEQ ID NO: 3762 - DNA, 201 bp, Homo sapiens
ggaacaagaagagagaaggaacacctttcatctgtcaggaggcctgtcaattctgccaaaagagtttctatgtaaccaatttgtatgaaaccaaagcacarataggtttctacatattgtctaatgtccctgggcacggcttttggaggtggttatttctggtcacagctgaagatcaaacaccaaacacaagtgccaaag

SEQ ID NO: 3763 - DNA, 201 bp, Homo sapiens
ccaggcatgaatatccatgtatcaaagcatgttgataacatagccattctatgtcttttgctgtgttgcataacacaagaactaatcaggaggcaaagcartgttagatttagtagtcaatatagaatttgctaatttcttttagattgtctccctctttggagacagtaccacagagaaggatgtggtgaagggtaaaac

SEQ ID NO: 3764 - DNA, 201 bp, Homo sapiens
gggcagggcttaggacctgcagcccgccatgcctgagcctccccaccactgtgggctcctgcgtggcccgagcctccccaacgagcgccgccacctgctcygtggcaccaggtcccattgaccgcccaagggctgaggagtgcgggtgcactgcgcgggactggcaggcagctccacctgcagcccggtgagggatccact

SEQ ID NO: 3765 - DNA, 201 bp, Homo sapiens
taaacagttgagagacgcccttgaaaatctggagttctgcaggtgggtgggaaggagaacaagcaagctcactctctgcggaattaggatgatgtgtcacygaccctttctgacacccctgcccctaccctggtgtccccttctgaaacctcctcctttgtctagggtatttcttcttttgtagctttataagagacatct

SEQ ID NO: 3766 - DNA, 201 bp, Homo sapiens
tgtaaatgtgattcatttcattaaaacaactggatatacaatatttgatgtctgcggtaactctaacttctcctcatttccctttaggggagtgagagttyttaggtacctgctgtctgatcagttgcaagtgccaagtctggtggaggaggaaggaatgcagccataacatcagcaaagctgcatgaagtctttccctct

SEQ ID NO: 3767 - DNA, 201 bp, Homo sapiens
tcattctggatggaagtgccaaggagacagggttccctcttccccagcttccagtcaaggtatataatatttccctgggaggtcaggatgccagcacaackaatccctgccagctccaggctgtggagactaaattccaggcaaatgcaactgagcagtctggggctctcatcttccactcagctctgactcataagatgg

SEQ ID NO: 3768 - DNA, 201 bp, Homo sapiens
cttgctccctctctctttgccagctaaatgtgaaggaagcttcattctggatggaagtgccaaggagacagggttccctcttccccagcttccagtcaagktatataatatttccctgggaggtcaggatgccagcacaactaatccctgccagctccaggctgtggagactaaattccaggcaaatgcaactgagcagtc

SEQ ID NO: 3769 - DNA, 201 bp, Homo sapiens
gttgtataaagagatccatttataaagagctattttgaaaaaaaacccaaaacatagggtgtgcatggcatatatatatatatatatatatatatatatakatatatatatatatataaaagactctaaagttacataccaaaatattatccctggttctctctgatggtaaatcacttttatttttctcttttgtgcttt

SEQ ID NO: 3770 - DNA, 201 bp, Homo sapiens
aaggagagaacacataactgagctcagtgtttaccttggtattaggactgggtcatggcccaaggctcctagtcgccaaccttccaggcctttccacaacragccctggagtcagcaggaagccagccaacaggcttctgcaaaggaacttttaaaggtagtaaaaagccaatgaggacaaccacaattccaagcaacact

SEQ ID NO: 3771 - DNA, 201 bp, Homo sapiens
tgctgagatttgaggactggcaggggaattatctatctatgtatctatgtatctatgtatctatgtatctatgtatgtatgtatgtatgtatgtatgtatstatctatctatctatctattttttaaaatttattgtcctgtggaataaagtttttagactgtgtgtgatcctagtctttgccccctggaggtcacctgtg

SEQ ID NO: 3772 - DNA, 201 bp, Homo sapiens
agggagaaactgaagccacctggcagggggttgggtgggaggaccaggcttgttccgtcacaacctggtgaggttagaacaccaagtcctggcacccagcytgacacagcccctcccactgcccaggcacctactttcttattctccacaaaatgctcagcttaggtgggccccattctgacaggtgggcgcctcctacac

SEQ ID NO: 3773 - DNA, 201 bp, Homo sapiens
gtacattttttaagccacttaattgaatctgtgccagtaaatcttttagtcttctcttagcatgtagaatttcaattttgtccatggatttttgtgctcakcccccagtgaaaatgaacatttgtgctgaaaagctttttatcaaccgttctcaaaatgtcagtcccccttatctccaaagcccaccgaaatctttgtgcc

SEQ ID NO: 3774 - DNA, 201 bp, Homo sapiens
cttgagctaggctctgtttctgaaagtccaggtctccagactgcttgtaacaactaaagcccggttctgttgggggtgtgggggtgggtggtggtggtcamaagtaaagcctgctgtctcaaggcctgaaacttcagaggggactctgagtgtactcccagtgggcacctaacctcctgatcgaggtggcagcaggccacc

SEQ ID NO: 3775 - DNA, 201 bp, Homo sapiens
tcttgagctaggctctgtttctgaaagtccaggtctccagactgcttgtaacaactaaagcccggttctgttgggggtgtgggggtgggtggtggtggtcwcaagtaaagcctgctgtctcaaggcctgaaacttcagaggggactctgagtgtactcccagtgggcacctaacctcctgatcgaggtggcagcaggccac

SEQ ID NO: 3776 - DNA, 201 bp, Homo sapiens
gagaacatcagattaactttttctgagcccttgaagccgagagcaagtctgaaacatgattcccgacctcttctcgctctaataaacttttcaaggagggrtcgcattccgaccctgcagtgctggcttctttccagagctttctaatgacttggtattgtctctggatgaaaaccatcctgggagtgggagacccttacc

SEQ ID NO: 3777 - DNA, 201 bp, Homo sapiens
aatctaagtctgaaaatattcctgcttcaaatcttaagttaaaaaacataaacatcactatagtgtctcttagagtttgttttcaggcaataatttttttwttttttttttttttgcaacaagtcagctttcattatttgtgaacaatctttaaatttaccaagtttgataggctggaaaaggaacctagacaaagcaata

SEQ ID NO: 3778 - DNA, 201 bp, Homo sapiens
actcaggaggaccagtcggcttgggctgggcatagaactccagccatgctagccagtctgtggtcagctcagcctggcaaagtgtgcagtggacccagggmcacctgctatctgctcagcttgtccttgtctgctgtaggatgccacctggcctgactcatttcagcgcagcatcctcaaatttcctctgactgaccccca

SEQ ID NO: 3779 - DNA, 201 bp, Homo sapiens
gctgagctggtaaagggccatgccacccacttttccatttcaggttggttttacagtccagggccagagtggggcccagcacccaactaaaggttgcagtractctggagtctgagaagtccattgggcacaagtgtggagctggggcggactgcaaagccctggacagaccccgggcagggaccaatatagcctgctggt

SEQ ID NO: 3780 - DNA, 201 bp, Homo sapiens
tctgtaaactgacccctattatacaggactattataaggatggagagatagccgccaaaaagaaaaaaaaagcacagggagttgatgatgctacggaccakgtgggaagcccttaaggccttaccagggtggaaagagacaaggggctagaatgacacacgcatgagccagcgccatttggccctgcgacagaggagcgca

SEQ ID NO: 3781 - DNA, 201 bp, Homo sapiens
ctttctcaatctgaagatgaaagtatttttcaattctggaaaattcccagccattatctcttcaaacattactttttcattcttgctattttcaccttctwtaactcctattagatgtatatgggttcttgtcattgtcacccatatcttagctgctgttttatgttttccttttctttttctctctatgctatattctag

SEQ ID NO: 3782 - DNA, 201 bp, Homo sapiens
actgccacttagagtcctgacaccagggcttgtgtggtttctaatcgtattcagtgagatctcagaatagttctctcaagtacacagaccccgtgtcctcrtgaaaataaataaaacacatcttgtgacaacttcagtcctctttgcagagggaaggctgggatatggacccctgcctatgtgtgagacccacaaacccag

SEQ ID NO: 3783 - DNA, 201 bp, Homo sapiens
gcttgtccacttacacacacacacccacacacacacacacccccacacccacccacacccacccacacccacacacccacacacacacacacccccacacmcacccacacccacacacccacacacacccacacgggactgccttctccctcagctttcctttctgcctgctatgaaatcctttctgagtgaggcttgccc

SEQ ID NO: 3784 - DNA, 201 bp, Homo sapiens
caatccacctcgtctgtaggaagcttgtccacttacacacacacacccacacacacacacacccccacacccacccacacccacccacacccacacacccmcacacacacacacccccacacccacccacacccacacacccacacacacccacacgggactgccttctccctcagctttcctttctgcctgctatgaaat

SEQ ID NO: 3785 - DNA, 201 bp, Homo sapiens
cccaatccacctcgtctgtaggaagcttgtccacttacacacacacacccacacacacacacacccccacacccacccacacccacccacacccacacacmcacacacacacacacccccacacccacccacacccacacacccacacacacccacacgggactgccttctccctcagctttcctttctgcctgctatgaa

SEQ ID NO: 3786 - DNA, 201 bp, Homo sapiens
tcttcaggcccaatccacctcgtctgtaggaagcttgtccacttacacacacacacccacacacacacacacccccacacccacccacacccacccacacmcacacacccacacacacacacacccccacacccacccacacccacacacccacacacacccacacgggactgccttctccctcagctttcctttctgcct

SEQ ID NO: 3787 - DNA, 201 bp, Homo sapiens
ttcctgtcttcaggcccaatccacctcgtctgtaggaagcttgtccacttacacacacacacccacacacacacacacccccacacccacccacacccacmcacacccacacacccacacacacacacacccccacacccacccacacccacacacccacacacacccacacgggactgccttctccctcagctttccttt

SEQ ID NO: 3788 - DNA, 201 bp, Homo sapiens
tttctcatgctgccccacccccttcctgtcttcaggcccaatccacctcgtctgtaggaagcttgtccacttacacacacacacccacacacacacacacmcccacacccacccacacccacccacacccacacacccacacacacacacacccccacacccacccacacccacacacccacacacacccacacgggactg

SEQ ID NO: 3789 - DNA, 201 bp, Homo sapiens
gccgtgatttggactgcacaagtttctgcccacatgtttggaaagtcatttcagtgttttctctgagtcttgctggtttccaggtaaagagaactttgtgwtgttccaaataaggggattttgtctttgcctttgtggtaaccttggctaagtcaagccttacagtgaggtttggagaatttcagggaagccccctccata

SEQ ID NO: 3790 - DNA, 201 bp, Homo sapiens
ggaccgccgtgatttggactgcacaagtttctgcccacatgtttggaaagtcatttcagtgttttctctgagtcttgctggtttccaggtaaagagaactwtgtgttgttccaaataaggggattttgtctttgcctttgtggtaaccttggctaagtcaagccttacagtgaggtttggagaatttcagggaagccccct

SEQ ID NO: 3791 - DNA, 201 bp, Homo sapiens
gagcaaagccaagagcatgctgtttggccccagacccactcatgggaactgtgctcataaagcagaggctgctatggtaccaggcaccaagatggtgcccragcagtgctataatctgcttgatgacggcatctgggacattaagtaatgatgcctggtatgccccacaaatccctgaagtccagtcttggcctctggctc

SEQ ID NO: 3792 - DNA, 201 bp, Homo sapiens
gagaccagcctggccaacttggtgaaaccccgtctctaccaaaaaatacaaaaattatctgggcgtggtggtgcatgcctgtaatctcagttactctggargctgaggaaagagaatcgcttgaacccaggaggcagaggttgcaaaaagttcagggctcctgaacagcagccctggttataggtgaggtccatcccccat

SEQ ID NO: 3793 - DNA, 201 bp, Homo sapiens
tcctgggttcacgccattctcctgcctcagcctcccaagtagctgagactacaggcgcccaccaccaagcccggctaagtttttgtatttttagtagagayggggtttcaccatgttagccaggatggtctggatctcctgacctcatgatctgcctgcctcggcctcccaaagtgctgggattacaggcgtgagccaccg

SEQ ID NO: 3794 - DNA, 201 bp, Homo sapiens
ggtgagacccaggaaaaatgagcagaactttgaactgcatggaatacaattagtcggtacactgtctacagggcagacatctgcatttagcctgagacacmctgggttgcctccagggctgcctttaaggtgtggccactattgctccttttccaaagccccaccttcctcacagctggcccttctgccacggaacattcc

SEQ ID NO: 3795 - DNA, 201 bp, Homo sapiens
gttaatttagagaattcgagggaagcatccagaggggaagcccactggcattcctttccaattagaagcagctaccaactgcttctccaaccagcagaagycagagctccctgaaaggctgccccatcaccgctcctccttgtgtctgggaaggtgtgtgcacatctttagttgaaggcaaggggagataggtgctctgtg

SEQ ID NO: 3796 - DNA, 201 bp, Homo sapiens
aaatataaagtcagatcacatcccttctcgacttgaagccctccaataatctagtttcacccattgtgaaaacaaaagtgcttaggttagcttccaggggsccccaggacctttgaccctgcccccagcttcccataccactcctaccatcagacctatttttacctagggggctaggacacatcttcccccagtgactgc

SEQ ID NO: 3797 - DNA, 201 bp, Homo sapiens
atctctttggcaccgcccttcagaatatacccatgatccagcctctcctcaccaccatcgtgcccattagctgaattattgcaacagcctcctaacttgtmtacatgctcctacttttgccctgtaacagtcttttctcaaaacagcagccaaagtgcttcctttaaaatataaagtcagatcacatcccttctcgacttg

SEQ ID NO: 3798 - DNA, 201 bp, Homo sapiens
ggctgttcttggcctctcattccaggcctctatagtctgactgacctgacactgtggtccccactgccccctgctgcccgcactctgctctaggatgacarcagtgccgtttcttgaatgtattctgtgtcctccagcctcagtgtctttctttgctcccactgttcttcctgccctttactccaatcacacacatccttc

SEQ ID NO: 3799 - DNA, 201 bp, Homo sapiens
caggggtttgtcacccttgccctagttgtctgaggccctgaactaccgctctgaaagggtctgtactgaccttgttaccacaaagagcagaagcccctttyccaggaagacaactttctctaaacaaatactacagtcttgcaatgctcatctgacacttgtctctttccaaagagatagccattaacacttgttaagttc

SEQ ID NO: 3800 - DNA, 201 bp, Homo sapiens
ctgtattaaaaatacagaaattagccaggcgtggtggcgggtgcctgtagtcccatctacttgggaggctgaggcagaagaatcgcttgaacccggaaggyggtggttccagggtgccgagatcgtgccactgcactctagcctgggcaacaagagaaaaactctgtcttaaaaaaaaaaaaaaaaaggaatttcaagatg

SEQ ID NO: 3801 - DNA, 201 bp, Homo sapiens
ggtcaggagttcgagaccagcctgactaacatggtgaaaccctgtctgtattaaaaatacagaaattagccaggcgtggtggcgggtgcctgtagtcccakctacttgggaggctgaggcagaagaatcgcttgaacccggaaggtggtggttccagggtgccgagatcgtgccactgcactctagcctgggcaacaagag

SEQ ID NO: 3802 - DNA, 201 bp, Homo sapiens
tatccatcatcaggggattggttattatgttttggtttcaaatagaatttgaaagagccaggcaggctgggcgcggtggctcgtgcctgtaatcccagtaytttgggaggccgaggtgggtagatcaccaggtcaggagatcgagaccatcctggctaacacggtgaaaccccatctctactaaaaatacaaaaaaattag

SEQ ID NO: 3803 - DNA, 201 bp, Homo sapiens
aaagtctccttttctaaattgacacttatgtgattttttttaagttaacaaaacaaagaagcttctccaagaggcccccagctgacttcccctcaggttcwttggccagatccgtgtcacatcactcctaaacaaatgtggaaaagccaccctgactggcatcaggtggtgtggggggaggtgggcaaacaggttctgtca

SEQ ID NO: 3804 - DNA, 201 bp, Homo sapiens
cgccaggaccaccttcctaaatgtccacagctcctcctgtaacctgtagaatatgtctacttggccaaccacattcagcataaagctccgaccacaatccyttctccttccaagcgcctgtctctggtctttgctgcaggctgcactgcccagcctgcgggatggtaaccttgcaggctgtaatcctttataagaaagaaa

SEQ ID NO: 3805 - DNA, 201 bp, Homo sapiens
ccactgaccctggactgattctgtctgctttacacaggctgcacacttgagtgcctttgcatcctgaaaagaccttttcacctaaagggcctaattgtaayagagtgaaatgttaactttccactccaaagtgaaaatgggtcatatgttacatgcatgcttgttcaatacccatgcgccaggaccaccttcctaaatgtc

SEQ ID NO: 3806 - DNA, 201 bp, Homo sapiens
atggtggtgtgtgcctgtagtcccagctactcaggaggctgaggtgggagaattgcttgagcccaggaggcggaggttgtcgtgagctgagattgcgccaytggactccaacctgggcaacagcagagtgagacctagtctcaaaaaaaaaaaaaaagtgacagaatagactctttgtggtaataaaatacccaattataa

SEQ ID NO: 3807 - DNA, 201 bp, Homo sapiens
ggtgtgtctgtgagggtgtttctggatgagattgacatttgaatcagtagactgagtagagaagattgccctccccaatgagggcaggcctcatccaattygttgaagacctagatagaaaaaatgagcctgggtaagagggaaaccctcctgtctcactgctgagctgtgacattggtctttttcctgctttcagactga

SEQ ID NO: 3808 - DNA, 201 bp, Homo sapiens
gtcagctcgtgctaatctttacaatggattgagcatttagttgtgcttttctcccattggggtgaggcttgtaaagtcaggttagttacaaaaggaatcarattttccctgcacgtctgatctgtggtcagactagaaggaaaagaccaattgggccatcggggaggggctcttggaggcagcagcagggcttcccctggg

SEQ ID NO: 3809 - DNA, 201 bp, Homo sapiens
atggatgcagacgcaactggcataatattttaccaacaataaagtgatgcatttcaagttcccccttaaatcaagttctgctcactaccctcccatctccragtcatgaggcttattgcccagggcaggagagagaaggcactaactctgtagcatgacccggcctttggagaggggaaagagagagaatgagaatttgct

SEQ ID NO: 3810 - DNA, 201 bp, Homo sapiens
gaagccagggagaccctggggcactgctgcactccagatgtgccattggggaagttagagaggaggaagactcagaaaacatcaacaaggctcccctcacktctggaccctctgttatgtgaactccctcttggatgcatgtttaatcttaggctggaaaaggcgctccagactcttgcagcacacacatctgaccctgtc

SEQ ID NO: 3811 - DNA, 201 bp, Homo sapiens
ggctcaggtgtccttaggagacataccaggtccaggcccaggctgaacttcctgacaaccttaagaaggcaaaggccaggtacggtggctcacacctgtartcccagcactttgggaggtcgaggcaggaggatcacttgagctcaggagtttgaggccagcctgggcaacatagcaacacccctctctacaaaaaaataa

SEQ ID NO: 3812 - DNA, 201 bp, Homo sapiens
ctgtggggagagcacctggttcttccaaggctcggggcatgtgtggtccctggctgacttgggtgtcctctggtgtgtgcggtcagtcttcttctgactgkggatgccaaaggggaggcccttatctcttagcgcatgactcatctcttcgcgcatgactcatctctttgtgcatgactgtattattctcagcgtgtcatg

SEQ ID NO: 3813 - DNA, 201 bp, Homo sapiens
gctccctcagcttgccgggaggtgtggagaggcgcgggcgggaaccggggctgtgcgaggggcttgtgggccagcgtgagtttcgggtgggcatgggctcrgcgggccccgcactcggagtggctgccagccggcaagccccgggcagtgaggggcttagcacctgggccagcagctgctgcgctggatttcttgccgggc

SEQ ID NO: 3814 - DNA, 201 bp, Homo sapiens
tgaggttacggcgacattcacttcattctagtccctcatagtgagagatgacagcatgctggcagccctcgcagcccttgctcgctctcggagcctcctcsgccttggttcccactctggccatgcttgaggagcccttcagcctgccgctgcactgtgggagcccctttctgggctggccaaggcgggaactggctccct

SEQ ID NO: 3815 - DNA, 201 bp, Homo sapiens
ggattacaggcacgtgccaccacacatggctaatttttgcattttttgtagagacagggtttcaccatgttggccaggctgggttcgaactcctggactcwagcgatccagcctcaacctcccaaagtgctgtgattataggcgtgagccagcacaccggcctcattttctcttaaatttgaaaatcttcaagtgaaaata

SEQ ID NO: 3816 - DNA, 201 bp, Homo sapiens
ccacatgaatcgcataggggcaggtcgggggagcctggtaaagcacgatgctgggctcacccccagcgtctgattcctaagatctgagatggggctggagkatgtgcatttacctaacaggttccaagggagaccctgagtcagtggtgacttggaagctctcccagaccaattcagggctaattttgaaccgaagtgcat

SEQ ID NO: 3817 - DNA, 201 bp, Homo sapiens
ggattcttcttgaagtggacagctacattttcctagagttatctggaactccctgttgttcagttaaagaaagcatcccagtactttagaatagagaagawttttcttggaaccagagcatagaacaaattggtacttatgtacaaaaggcaatggtgtggatcccgggacctgagtggggtagaatttttgtgatgcatg

SEQ ID NO: 3818 - DNA, 201 bp, Homo sapiens
atggattcttcttgaagtggacagctacattttcctagagttatctggaactccctgttgttcagttaaagaaagcatcccagtactttagaatagagaaratttttcttggaaccagagcatagaacaaattggtacttatgtacaaaaggcaatggtgtggatcccgggacctgagtggggtagaatttttgtgatgca

SEQ ID NO: 3819 - DNA, 201 bp, Homo sapiens
gatgggggagatggattcttcttgaagtggacagctacattttcctagagttatctggaactccctgttgttcagttaaagaaagcatcccagtactttaraatagagaagatttttcttggaaccagagcatagaacaaattggtacttatgtacaaaaggcaatggtgtggatcccgggacctgagtggggtagaattt

SEQ ID NO: 3820 - DNA, 201 bp, Homo sapiens
agatgtaaacatacctgcatattaaactaaactaaacacactgtccctggagatgggggagatggattcttcttgaagtggacagctacattttcctagakttatctggaactccctgttgttcagttaaagaaagcatcccagtactttagaatagagaagatttttcttggaaccagagcatagaacaaattggtactt

SEQ ID NO: 3821 - DNA, 201 bp, Homo sapiens
ataagcaatcccgggggaatcaggggcgctgggcagcctgtttctcaaaaaccagatgaagctcagctcccgccaagagtcagtcttagctccacagcatstcagtgtttggagccagcactccagcacacacctgccctgaccccatctatctcacccacagcgggaacttctcttctgtactctttcacctgacaaact

SEQ ID NO: 3822 - DNA, 201 bp, Homo sapiens
ctatctcccctttcccttcctttcttcatttcttttaaatctagaacattaagatctctgtaaattctagggtaaatatgtagaaaaatctcttttctagktttttttttttttttttttttttttttttttttttagcatgctgagaaaactggtatgctggtttaatggactatctgggcaagtttttagtgagttaga

SEQ ID NO: 3823 - DNA, 201 bp, Homo sapiens
ttctctaaaatccacccccttgttaatctcattgaaacctatggctttaaatacattctatgtgctcacaactcccaattcatacctttagcccaggcctyttccccgaactctagacttcaataaccaactgcctagctccacttggttgttcaaaatcaactcttgattttacttcttaatcctgctcattctactgaa

SEQ ID NO: 3824 - DNA, 201 bp, Homo sapiens
aaggatagatctgaacaatacaatgaaccaagtagacataattgacacatatatagaatacagtatctaacatcagaatgcacattcttttaaagtacacrtggaacatttaccaaaattggtcataaactcagtcataaaacaagcttcaataaatctcaaaggatcgatattattcagagtatgttctctggccagggg

SEQ ID NO: 3825 - DNA, 201 bp, Homo sapiens
aaaagtctgaacacagaggctaagtttttcactcaggaaccagctccagggttccttcgttcttcctgaaagtcttggaccctcagcatccttccctagastactctgtggcctagattctggtgagttggtccttcctcctaggtcatctgaggtggactttgagatcatccattatcacccctctctatctatctttgt

SEQ ID NO: 3826 - DNA, 201 bp, Homo sapiens
atggcaaaagtctgaacacagaggctaagtttttcactcaggaaccagctccagggttccttcgttcttcctgaaagtcttggaccctcagcatccttccstagactactctgtggcctagattctggtgagttggtccttcctcctaggtcatctgaggtggactttgagatcatccattatcacccctctctatctatc

SEQ ID NO: 3827 - DNA, 201 bp, Homo sapiens
cactgtcaatttgattagtttttcttaaaacttggagtgctggaactttatcactagtgaagagatgtgtcatttctcatcagtttagcctggacttgtasattccttttaatctacaggattaagtttcttcaacttgaatattttattggaaacttatttaatgtttgactccgttctaatagttatcttttctttcta

SEQ ID NO: 3828 - DNA, 201 bp, Homo sapiens
ttctagacttcccactttccatatctgtaaaaccctttcctaacagtgaaaaaccttgctcgcattatatactaaatacatttattatttgctactggttwaaaaaaaatggtgtttgaagttaaagaagttcccttctatttggttctcctagtgtaagaattttttcttacactaataaatgaatggatattagatttt

SEQ ID NO: 3829 - DNA, 201 bp, Homo sapiens
ataataaacagaaagttattggcttatagttctggactcaaggaagtcaaagaacccatcacctggaaaataaactggttgtattaaaaaaaacctgattktaaaaaaaaaaaaccaaataagtaaattgagtctcctatgaaatagtggagactccatgttaaagctaacaaatcatcctaaactatcagatgcacatta

SEQ ID NO: 3830 - DNA, 201 bp, Homo sapiens
aattagctgagcatagtggcaggtgcctatattcccagctactcaggaggctgaggcagaagaattgcttgagcctgggaggtggaggttgcattaagccragatcatacccatgcattccagcctgggcgacagagtgagactccatctcaaaaaaaaaaaaaaaaaaaaaaaaaaatatatatatatatatgcacacac

SEQ ID NO: 3831 - DNA, 201 bp, Homo sapiens
gcaggagaatggcgtgaatccgggaagcggagcttgcaatgagccgagatcgagccactgcgttccagcctgagctaaagagcaagactccgtctcaatgrtaataataataataataataataataataataataataataataaaccgttggttcagggagaacaggaggaatctctagagaagaggaacagatgaaga

SEQ ID NO: 3832 - DNA, 201 bp, Homo sapiens
gaacattatcctgaagggtcctctctgagaatgatctactttagaattcagaagaaaacgtaagagaacttcggcacctcaagagaattaaataaactgtyggggccgggcgcggtggctcatgcctgtaatcccagaactttgggaggccaaggccggtggatcacgaggtcaggagatcgagaccatcctggctaacac

SEQ ID NO: 3833 - DNA, 201 bp, Homo sapiens
gcagtgactgggaatggatcacttctttttcagtggtaagtacacgagatttaaacccaacatgaggcctggtacaaaggagtggggatagaggtgggagkagaatctgtacattgcgacaaacagaacattatcctgaagggtcctctctgagaatgatctactttagaattcagaagaaaacgtaagagaacttcggca

SEQ ID NO: 3834 - DNA, 201 bp, Homo sapiens
ggcagtaatttttgaagataaaatgttcaacaactgcgtcttttgaccttctgggattcctatcataggttttgatcaacttagtctgaattccatggggytaaactgtatgtgagaaaatgtgaaatcctgatatccctttgaagagtatgacctggtttatgtgcacatttatttcaatatgacatttaacagaagagg

SEQ ID NO: 3835 - DNA, 201 bp, Homo sapiens
agagatacacagagacagtgagagactgaaggagagtgatgaagagcgggagggagaggaggggagagacaggttgggggagaggaagaaagaaagagagmcggcagaggaggggggattgatttctctgaggaacaggagaaagggacataattgcagcaggcgttccctctcctgttctgtccttcattttctttaaaa

SEQ ID NO: 3836 - DNA, 201 bp, Homo sapiens
gaggaggacagggtacgaggggcggggagaaacagagaccaagagagggcaaggaagagagatacacagagacagtgagagactgaaggagagtgatgaaragcgggagggagaggaggggagagacaggttgggggagaggaagaaagaaagagagacggcagaggaggggggattgatttctctgaggaacaggagaaa

SEQ ID NO: 3837 - DNA, 201 bp, Homo sapiens
gccaggacttgctgctcagcagaggtcctttaaacccactttaagagaggtaaatgatttataatcagcacattccaagcaaatatgcaaatagcaggagycattgcagctgcaaacaagctgcggtcctaagtgggctggcagggcaggcaggaggcactccttcaggctgcagcaacgttcgggtcctcggcaagcact

SEQ ID NO: 3838 - DNA, 201 bp, Homo sapiens
aaattagctgggcatggtggcacgcgcctgtagtctcagctactcaggaggctgaggcaggagaatcacttgaacccgggaggcagaggttgcagtgagcygaggtcgtgccactgcactccagcctgagcaatagagcgagactccatctcaaaaaaaaaaaaaaaaaaaaaaaagtcctgcctgaggcaccaaatgata

SEQ ID NO: 3839 - DNA, 201 bp, Homo sapiens
ggctcatgcctgtaatcccagctctttgggaggccgaggcaggcggatcatgagatcaaggggtcgagaccatcccggccaacatggtgaaactccgtttytactaaaaatataaaaattagctgggcatggtggcacgcgcctgtagtctcagctactcaggaggctgaggcaggagaatcacttgaacccgggaggcag

SEQ ID NO: 3840 - DNA, 201 bp, Homo sapiens
tcctgggctcaagtaatttgccccacctcggcctcccaaagagctgggattacaggcatgagctacctggctggctgaagcttccattcttctaaataaasgttcctttcaaatgaatatgcagtattatgatgggtcacctcaagggctatgaagacaactatccaaccttcaggggtataagatggtactggacttagt

SEQ ID NO: 3841 - DNA, 201 bp, Homo sapiens
gccaatttcctttctttgaaagggacaacataatttttatcatgaccctgttttccaactcaccagtatagaatcataaataatgtgaaaatctaaatctwtctatctatctatctatctatctatctatctatctatctatctaattttaaaggtgaactgctaccttagggagcttccattcttttttttcctcttctt

SEQ ID NO: 3842 - DNA, 201 bp, Homo sapiens
ctgagtataggcaaaagggatgaaagagggaacatattaagaggagagtgaaaagaggggccaatttcctttctttgaaagggacaacataatttttatcrtgaccctgttttccaactcaccagtatagaatcataaataatgtgaaaatctaaatctatctatctatctatctatctatctatctatctatctatctat

SEQ ID NO: 3843 - DNA, 201 bp, Homo sapiens
agctctgatcacaaagtccctgagtcagcctagtggccttattacataatcaaagcaggactttgtgtattttttgttttttagtaactcaaggtcatatstaaatcagggtctataggttgaccaagatcagaaatagctctgtttaatgcagtgaacaggcactgaacttctacacgcttcccaaagaaggagaagaag

SEQ ID NO: 3844 - DNA, 201 bp, Homo sapiens
agtttccccacttgtaaaatgaggggttggacaaaacctggttgacttcccatgtggataccatgatttttactcagaaggataaaggctactacatcctyagtgaccctgggccctagccagtgtgatcctctctcagatttgactatgaatctttgccaaggccaccatgactgaacttctggggctggctaggggcca

SEQ ID NO: 3845 - DNA, 201 bp, Homo sapiens
tcaagtgatctgcccacctcggcctctcaaactgcttggattattaggtgtgagccaccgtacctggaagtgttctgttctctgcagctaaacctttaacytaggccatcctaagccctaggcccattcccattattatcatctcatttaatcactgatagaaacagtttcaatgattagaagttataatactgcaaaaac

SEQ ID NO: 3846 - DNA, 201 bp, Homo sapiens
gcagtaacaaccaaacagaaaatagcagaggaagaagaggaggcaccatggggcatattttagagccactctaattagagtatctgcctggcaggcctctyccgtttgacacctcccagcatccccacatgaaagcctacttacctggaatggacattcaaaatgtggcatcagcagaaccaacagaaatttgacatcttt

SEQ ID NO: 3847 - DNA, 201 bp, Homo sapiens
gagctaaattcttccagggccctttacctgccatacaagggccgccccggtccgcaccttgccttggttggatcacttgtcatagatgtgtctcacaatawcaacatgcttttctccttcattctacttttaaagaaaaaaatggctcagttaaaatatctaatattagcacagaaaactaccattttctaatcaggagca

SEQ ID NO: 3848 - DNA, 201 bp, Homo sapiens
cacacgtcccaaggtaactaagggtagaaattctaggcaccctcactcagctggagctacagccagaagccagtgtgctcggaactgaaggtcttgcaggraaaatgctcagaaggaaatctcagaagaaagaaaatgattttattttattttggtgtggggggaggggggcagaggcattttctctttatttaacattct

SEQ ID NO: 3849 - DNA, 201 bp, Homo sapiens
ggcccggctcatttgtcttggtagcccggcttctgcaggagcatggtccaagtgcaaacctcacctgccttcctgctcatcctgagacagggaggagggartgagctgtttcattttttttcctaactttggaaaccataaaacatggagacaagagccagtcacttttggaagagttgtcaggaagcctctagtgaaggt

SEQ ID NO: 3850 - DNA, 201 bp, Homo sapiens
tctgctgcccaggctggagtgcagtggtgtgatctcggctcactgcaacctccacctcccgggttgaagtgattctcctgcctcggcctcccgtcaagtgrttctcctgcctcggcctcccgtcaagtgattctcctgcctcagcctcctgagtagctgggattacaggcacctgccaccacgcctggctaatttttttgt

SEQ ID NO: 3851 - DNA, 201 bp, Homo sapiens
tggcaaatgatcatcagaaaccgtcctggccttggcaatgatgccggcctcactaaacaagctatatcgcagcagtgtaattgccagttaaagagcacttygtcctaattaacctcttcagggaatgagtaaaagcatcaagaattccagagttcacagaacctgtgcacaagcccttgtcatgcaaatgaagaaattgag

SEQ ID NO: 3852 - DNA, 201 bp, Homo sapiens
gtagtggtgggcgcctgtagtcccagctactcgagaggctgaggcaggagaatggcgtgaatccgggaagcggagcttgcaatgagccgagatcgagccaytgcgttccagcctgagctaaagagcaagactccgtctcaatgataataataataataataataataataataataataataataataaaccgttggttca

SEQ ID NO: 3853 - DNA, 201 bp, Homo sapiens
cattagccatggctgggcaggaagcctgctggaggatacccaaagtaagacaggggtcccaggcctgaagggaaacaggacagtagttctcccaggcaagycagcgtgctcagggtcctgtgtggtctggcttcctaggcagagttgtgtgaggacaggctcggggaagggcagcatgggtcctgaagcatggtctttggg

SEQ ID NO: 3854 - DNA, 201 bp, Homo sapiens
ggtggaaactgcttccaggagagaggaattgaaatccatgacactgacaagcagggcatttgaaattggcctccctgtcacccacccacaggccgaacatstgcctgctggggctgccaaacacacctcatcaaacttccaggtaaagggccatcagctttggagacagttttcatgtttctcccgccagggagataatgc

SEQ ID NO: 3855 - DNA, 201 bp, Homo sapiens
aaacaaagaatcgtatatccaacaaaaccacttttcaaaaacgaaggcaaaataaggacattctcagataaacaaaaacagataattcattgctacatacycactctacaaaaggtgaaagaagctttttaggctgaaagcaagtgaccccagatggtaatcacatctacaccaaaaaaaaagagcactggcaaagataac

SEQ ID NO: 3856 - DNA, 201 bp, Homo sapiens
ggaaagggaaaatgaaataggaggtgagaagatgaggaggagtacagggaaagaaagagggcacagagagagacagggagagagagagaaggggggtgggrgaaggaggaacagagcgtgcaactgcctggtggatattcaggtggctggagcaggctctgcgtgcccacatggactttactgacatgttactccttggcc

SEQ ID NO: 3857 - DNA, 201 bp, Homo sapiens
ctctgacttcggcatccaagccacatttcctttctgagtcagtggcccgctttccagacggggtggtgacagggtgcgccctgacgaagggctgacacttycccaggactgttcagggcccagcccaaatgggaaacttggctcttgtcagttgaaggatttcactcaggcctcgctgagatgacttgtacttctgcttag

SEQ ID NO: 3858 - DNA, 201 bp, Homo sapiens
ggctttgttgaatgtcctcgatgcctcctgctgggcccctgcctccagggtcactctgtcccaagggcaacacaggtgatctttctgaacaccaggcctawggtttaaaaccctagaatgctgcctccccttgcatccaggagaaagtccacactccttaacctgatggtccaggtctggccccagcttggccaaagctcc

SEQ ID NO: 3859 - DNA, 201 bp, Homo sapiens
cacccaccctgaattccttttccaagactgccatctcgggctgccccacaggctcctggtccccctagaacccaacatgggctgcacagaggctgagtccrctggcagcaaatctagttagcagctcggtcctgagcccaccctgtccactggctcctctgaggtgagccatacatagtccccggctttttgctaattttg

SEQ ID NO: 3860 - DNA, 201 bp, Homo sapiens
cttcctgatacccacagttgtttaccctgagaaccacaaaagtttttaatatggaaagtttgttcctttaaaattgctaggagaatgtttattgagacaakcctggcacataaacgagatcttcatgtcactgaaatttggcagggggcagaggtggggacactggcgagaaggaacccaggcagaagtggagagacagaa

SEQ ID NO: 3861 - DNA, 201 bp, Homo sapiens
aagtccagtaactgggaaagttatctggcttctctttgcctctcagtaaacaccaactaggaaaaggagtgcatgagatgacgtccatacagcccctggcrgtgggctggcagcctggcacattctccgtgaatgagaatgtgtatttcccatgatcctatccaccccaccctgatggccattccttcttttctgcaaggc

SEQ ID NO: 3862 - DNA, 201 bp, Homo sapiens
cacggggaggcccgaccgtaggtcgaacacgtcagtcagtggctgatccttcccatggtctctggatacaccagtgaaggcaggaggtgaagtctcccagrtcacctgggaacagccatggacacttgtctggggctgcatgaggtttgttctgggctctgatggaatattgccctcatgtatgctttttaacataccgag

SEQ ID NO: 3863 - DNA, 201 bp, Homo sapiens
tctttaagataaccaatcactattattttaaatcttttatctctgtcttacataactatcatcctctcccacagtattttttaaatcttcttctcattctyggtgtatttggggagcggttttcaagtttgttccctgtattggaacaactatgatttctgtatggttaatctttcctttgactgcttgaagtggagaagg

SEQ ID NO: 3864 - DNA, 201 bp, Homo sapiens
ttttgggtgggcctcacggagtaatgagaagggcaatatagccaagtggcaaagaacttgggcttccaatggccgacagagccctatggggagatcaaccycatcagccctccgacttgctcagtttctctctgcttacttaccctggtccagcaactctggcccccttgtgagcccccaaacacgctaggcaagctccta

SEQ ID NO: 3865 - DNA, 201 bp, Homo sapiens
ctgttttgttccctgctgtgtccccacatctccaaatagtatctgacgcatagtacatgaatattgctgaacaactggacagaagggttcgagcaggacarcaccatggtcaaagttccatcttggaaagcttactctaaatgccatatggaaagtggatttgaagaagcatctgacccggggctcagagaatagctagga

SEQ ID NO: 3866 - DNA, 201 bp, Homo sapiens
atgagtgaactgtcagttcagtgaagtcctagttgttttcacagatgctgacagaatccgcggaggagtgaggagagggtatccaacatgagagacagtcygtaaagattcccgtttgtccttgaggtcttggaggcatctctggctaaagcagctcccaaaggataacccagagggtggagatgtgtggcgtttcttttg

SEQ ID NO: 3867 - DNA, 201 bp, Homo sapiens
cgtttcttttggctataaattccttgaggtcaggcccggtgttctgatcatactggtatcctcaggtcctggcacagccttagcaccaagtgggcattcarcagatgtctgtgaaggtgagtggcttggcagaaaacagccaaaccctcttctgtggagcttaaagtgaaggccaggaagagggctggggacagagagatc

SEQ ID NO: 3868 - DNA, 201 bp, Homo sapiens
cttaaagtgaaggccaggaagagggctggggacagagagatccctttgcaaagactgaaagaacaacagcggctactggacagaaatgtgggtaggcccaraagtggaagggcaactggagggacaggaaagggagtctggagagaaagtggaggccagcttccaaggccagaccaggctgaaggtaggcttgtccccaga

SEQ ID NO: 3869 - DNA, 201 bp, Homo sapiens
aagtgaaggccaggaagagggctggggacagagagatccctttgcaaagactgaaagaacaacagcggctactggacagaaatgtgggtaggcccagaagyggaagggcaactggagggacaggaaagggagtctggagagaaagtggaggccagcttccaaggccagaccaggctgaaggtaggcttgtccccagaggct

SEQ ID NO: 3870 - DNA, 201 bp, Homo sapiens
ccaccagaaggaagaaactctgaacacgtccaaacatcagaaggaacaaactccggacacgccatctttaagaacttgtaacactcaccgcgcgggtccgyggcttcattctcgaagtcagagagaccaagaacccaccaattctggacacaacactggtcagcttgagttcagacttccctgcttggcacacaaggcctt

SEQ ID NO: 3871 - DNA, 201 bp, Homo sapiens
gagactggaggtacttcatgcctgtactcctagaaagccttccccacactctcaacctagcaaaccttcccttgctcttcaaaatccaccttgaaggtccyctctcctccagcaccttctctaaacgttctcatcttcaggcagatgaattcttaccccaggctccactggcatttcctgagagcccggaggtacattcta

SEQ ID NO: 3872 - DNA, 201 bp, Homo sapiens
cccacactctcaacctagcaaaccttcccttgctcttcaaaatccaccttgaaggtcccctctcctccagcaccttctctaaacgttctcatcttcaggcrgatgaattcttaccccaggctccactggcatttcctgagagcccggaggtacattctaggagctttgtccagactggggatcagagatacctgattctcc

SEQ ID NO: 3873 - DNA, 201 bp, Homo sapiens
catcatccctagtgctgttgacactgcgtagagaagaatgctcactgcatgccaggtgctgctcctgtcatactcacaacactctatgaggtaagtgctgktattatccccattttacagatgaagtaaatgaggcacagaaagctcacgtgccaaagcagtgcccttgagcacgtgccacattgtcccatcagcctgggc

SEQ ID NO: 3874 - DNA, 201 bp, Homo sapiens
tttcctgtttgctgggcactccctatgggaatgatcgaggagaggcagcccagctcttctgccctcccaccaggactacagctgaccctgagggtgaggcwctgaaggctttccactggagtccagacccaagaggccatctgcagaaagagaagccctggctctaggtggacattgctgggagaggccccagcaatgagt

SEQ ID NO: 3875 - DNA, 201 bp, Homo sapiens
cacccttggtctttctgggagctcacaggcaccactctccaccaaaaaggggtccttaagagaggagcactgctataccaagtgggcggcaactcacaatstgtgaaaacctcaatgagtcagaaggattcggtggataaattcaatcagcatgaagcagaactgagccctgatctgctcaaggctgcctgccccccgctc

SEQ ID NO: 3876 - DNA, 201 bp, Homo sapiens
cacaatgtgtgaaaacctcaatgagtcagaaggattcggtggataaattcaatcagcatgaagcagaactgagccctgatctgctcaaggctgcctgcccmccgctccacgccagcttgtccccatcactcctcacctcggtgggttttgtggtggctggtttttccctcccattaaatgagaaatgttgtttgaataacc

SEQ ID NO: 3877 - DNA, 201 bp, Homo sapiens
cttgtccccatcactcctcacctcggtgggttttgtggtggctggtttttccctcccattaaatgagaaatgttgtttgaataaccaatggtgagggaggstgtgcacactctgatgcagaaatagaaacctttaggaagatgcaatttgaaggatattggaaaccagagaatggaacatcagtctataaaattcaacacg

SEQ ID NO: 3878 - DNA, 201 bp, Homo sapiens
tttggcctcatttccataatgtgtctcatgatctctgaagcaccttggcattagcatcataagcacagctgtgaaagtgtccaagactattgtcatcaccsggtaaaggcacatttcccaagccctgccctgcctagcactctatgctgccacgactgctgagtggagtggcccattaggtgggtgcaggtgacacagata

SEQ ID NO: 3879 - DNA, 201 bp, Homo sapiens
ccttggcattagcatcataagcacagctgtgaaagtgtccaagactattgtcatcaccgggtaaaggcacatttcccaagccctgccctgcctagcactcyatgctgccacgactgctgagtggagtggcccattaggtgggtgcaggtgacacagatagatgtaacggaggccaacacacctttgctccaccacctcagc

SEQ ID NO: 3880 - DNA, 201 bp, Homo sapiens
cacatttcccaagccctgccctgcctagcactctatgctgccacgactgctgagtggagtggcccattaggtgggtgcaggtgacacagatagatgtaacrgaggccaacacacctttgctccaccacctcagccatgaatccgcctccgctcaggtgtgtcagcatcataccatcctcagtggggttctgtgagggtgag

SEQ ID NO: 3881 - DNA, 201 bp, Homo sapiens
gttgcaggcacttggcaggtgtctagtccaagcctcctcctctcctccctgtgcaacctaaagcacattcctgacctcacataactccaagtgggctctcstagctcaggctatgtgggcctgttcccatctgcctgcaagctgcttctgtcttctacacacttcctaattcatgtatacccattttgtacacaaatattt

SEQ ID NO: 3882 - DNA, 201 bp, Homo sapiens
cacttggcaggtgtctagtccaagcctcctcctctcctccctgtgcaacctaaagcacattcctgacctcacataactccaagtgggctctcgtagctcasgctatgtgggcctgttcccatctgcctgcaagctgcttctgtcttctacacacttcctaattcatgtatacccattttgtacacaaatatttgtatacaa

SEQ ID NO: 3883 - DNA, 201 bp, Homo sapiens
gcttttgatcaactcttggttctttcttaggcttacttttcctgcttccagttgaaaaatgaaaacacccagctattccgtgctcacaaagaagcaccttrcacagaaggacaaagcctgccactactgctcccaggctcacagtcagcctcctggactagaggcctattaaaatcaatgactttttaaaaaagtggtccc

SEQ ID NO: 3884 - DNA, 201 bp, Homo sapiens
agcctcagaagactttgctttaagtgttaattaaatctccatcaaaatactcagcaagacagaatggccctagtaatcatgaccaaacttttagccccggstcctacccatgggattaaaatgtctaagcaaaaaagaagaaaaaaaaaagaaaaaaatatatttttcttgtttttggttaagtctgcttttcatcattac

SEQ ID NO: 3885 - DNA, 201 bp, Homo sapiens
cagctccaagtcactgttgtaggcattttctctatgaagtgcttgctaccagcccaagtccaagtgtccctctctgaatcctcctaccccaaagtgcctgycctgctctggcctcaggaggtcccacaggtgctaggccttgctcctcgtgtggccccagtatactcaggttttaagaaatgcagaaattttcagaactga

SEQ ID NO: 3886 - DNA, 201 bp, Homo sapiens
agcctcacatgtgttgacccggtaggggtacattttcccttgccttctccaaagtgggcaggaaggaagtggaaggatggaggtatgaggggaagatggaygtccgtggaggtgggtcttctggagtaaagagaactagaatcctggagaagcagagttggaaggggcttcagagaccacctactccatcccaggcaggca

SEQ ID NO: 3887 - DNA, 201 bp, Homo sapiens
cagaattcaggtttgtgtgagaaccaggcagaggcccgacgctccagtcccgtgccatgtctaccctaagatggggtgggtggtaacaacggggcacttcygcagttcctgcctgccagctcctcccctatctatccacccaacaaatatttactgagcacctgctatgtgccagtcccgattccaggtgctgaggattca

SEQ ID NO: 3888 - DNA, 201 bp, Homo sapiens
catgtgtgtgttaacacccagccagagaaggccatgtgtaaagtgactattatttactgaggcaggcccaccaggcaccatgctaaactcttagaatctaygagctcatctgatgctcatttaatcctccttaaagctctattaagtagacacagaggccctactcagcacatatttgtggcatgaatatatgcccatttt

SEQ ID NO: 3889 - DNA, 201 bp, Homo sapiens
acatcagcaaccctggcctgcaggatggctgctcctcacccacctcagggacacatagcttagaggcctaagtagcaacttctctaaaggctggaggtttrcagggctgcagaaggaagccctgcttggatctgtgaacatcacaggcccaaacccactccttgtcatgcatggacacctggccattaagccccttacctc

SEQ ID NO: 3890 - DNA, 201 bp, Homo sapiens
gaggcctaagtagcaacttctctaaaggctggaggtttacagggctgcagaaggaagccctgcttggatctgtgaacatcacaggcccaaacccactcctwgtcatgcatggacacctggccattaagccccttacctcccactatgatgtttccatcttcatcacctccctgtctcctctcctgctattttgcctgaaac

SEQ ID NO: 3891 - DNA, 201 bp, Homo sapiens
acaatggtccttacgggattgccccttacaggattgctttgaggattacatgagataattcatgtagagagctaggcacttagtaagtgctcaattcggayactgaattggtgaaaggttgaataaataggactggaaaagtagtagccatttggttttactgattcaagtgcatgaacatgtggggtagttgctgtcttc

SEQ ID NO: 3892 - DNA, 201 bp, Homo sapiens
aggattacatgagataattcatgtagagagctaggcacttagtaagtgctcaattcggacactgaattggtgaaaggttgaataaataggactggaaaagwagtagccatttggttttactgattcaagtgcatgaacatgtggggtagttgctgtcttcgggaggccagccttaatggaaaggtgaacatatttatactg

SEQ ID NO: 3893 - DNA, 201 bp, Homo sapiens
gcacaaagaaggcttttgggggaactatgatttttgagccaacaagaaaatcaggagaatttcaggaaagaatttaaggagataatggtcactattgagaygtcaagtcttccaaggttaagaatatcagggcaatttaaggagacaatggtcactattaagactccagtcttccaaggtcaagaagaagacatatctcaa

SEQ ID NO: 3894 - DNA, 201 bp, Homo sapiens
acacttatccactctatggatggcttaagcattatcgtacaacaaacggatgaatccattcatttaaagaaaaagaacggtgtctttcattttgaattttsccatgtgtccctctccagttctattccctcattgccacacagagaccgtcattagcctgaattttgtgtttatcattcttttggtttatctcacctttgt

SEQ ID NO: 3895 - DNA, 201 bp, Homo sapiens
aatagctttctgttaatttggtggaactgatttttaaaaagtgaacaaataaatggggacaagagaaactcttctttacagtaaattttaacttgtaaatrtagaagaaatgatggaactgaacattttcatttggcaatcacagtactagttaattctgattacagaattgagacatgttaatattagcgggtgaaagag

SEQ ID NO: 3896 - DNA, 201 bp, Homo sapiens
ctcccagtttaagtgattctcctgcctcagcctcccgagtagctggcactacaggcacgtgccaccatgcccagctaatttttgtatttttagtagagacrgggtttcaccacattggccaggatggtctcaatatcttgacctcatgatctgcctgccttggcctcccaaaatgctgggactacaggcgtgagccaccac

SEQ ID NO: 3897 - DNA, 201 bp, Homo sapiens
cctcatgatctgcctgccttggcctcccaaaatgctgggactacaggcgtgagccaccacacccagccagttcattcctttttattgctgagtagcattcyactatatggatataccacagtttgtctattcattcaactgttaatggacatttgggttgattctaatattttacaatttcgaataaggctgctatgaaca

SEQ ID NO: 3898 - DNA, 201 bp, Homo sapiens
aaaacaaactgtgatatagtcatacaataaaatactacttagcaataacaggaacgagcaatggattttcccagctacatggataaaactcagtgttataytgagtttgagtcaaagaagccacaaagtttccttactgtatggttccacttacataaaattcaaaaatagctaaaactaatctacgatgctagaaatcag

SEQ ID NO: 3899 - DNA, 201 bp, Homo sapiens
agaaatcagaacagtgcttgcctctgtgaatgggagggttgactagaaagatcattttctaggttgatagcaatgttttatatcttgattgagtgatggtrtatacatgtgctgaatatcattgacaaaaatctatgcatttaattgtatgtaaattatacctcaattttaaaataattcatattcaggttttactttttg

SEQ ID NO: 3900 - DNA, 201 bp, Homo sapiens
ggggctctcaggcagggactactgtgcaaattccctgacctcaaatgatggtgccaccatagcagcaggagcaagaggacaacagggacctggtgtggtcyggagctgctcaaactgcagagatgcttctaacacaggagagggtcacacacccatgctggtgggccctctgttcatggctgcagccagggctggcccacg

SEQ ID NO: 3901 - DNA, 201 bp, Homo sapiens
aggacaacagggacctggtgtggtctggagctgctcaaactgcagagatgcttctaacacaggagagggtcacacacccatgctggtgggccctctgttcrtggctgcagccagggctggcccacgggtgcatggctgtagagtaatacagggtcccacactcagaagggccttgagcttggggcttactgctggggttct

SEQ ID NO: 3902 - DNA, 201 bp, Homo sapiens
ctgatagcaccatggtgcatacagtgggcctcttgctcaccttcaagtcaggttttgaacacatcctggtacaggggttgcaagctgttggatgttgtctstctgtagagggttgggcagtgggcccaaaggaaacccctagctgaggctctacatttgccttctgcagtgggtcctacaaattatgtggccagttctggc

SEQ ID NO: 3903 - DNA, 201 bp, Homo sapiens
gagcatatgggataagagtttccccattcgctgagctcttcgcttgcccttgtggtgtgcattccacggggtggccattgccctaacggtgggtaacactrgcaagctggtccaggagggggagccatttccaacgccttatgtgctgtcttcagaaatgatctctaagtgctgctctcaggaggataacaagtgagccca

SEQ ID NO: 3904 - DNA, 201 bp, Homo sapiens
gaggagacaggcgggaagtgataagtaccatgaagaaaaagaaaactaaaaaaggagatgaggagtgaagggacaagggatatttagataaggtggtcagrgagggcttcttggaggaggcagcctttcagcatggagtgagggaacaagctgaagaggatcagagtccagaccgagtgccaagtccctcgggtgggagtg

SEQ ID NO: 3905 - DNA, 201 bp, Homo sapiens
agatcccctggtatttctgtcacaacaggttggagctggcccgctggctttgttcttggactgcacgaatgaatgggcggcttgtttcctggccccttttractgctctgcactgctcacctggatgaggcgcagtcctgaactggggtcttgggacatttccagcattcgttgacatcagcagaaacttcagtcctaaat

SEQ ID NO: 3906 - DNA, 201 bp, Homo sapiens
tttgtcacaacggagtactcggtggtgcacaagactgggtgtgcacgtgccaggacaagtccctcggtgcacacagcgcacgtgagctggagcccagcatrgagctgaggaacagcgctggggtcccggcggttcaccagcttaccaccaggtgtcgctgtgtgcacgagggcaaagggcacccgcagaccagcagggccg

SEQ ID NO: 3907 - DNA, 201 bp, Homo sapiens
gaacagggacataggataaagagcctgcatttgaagttagggtgaggagaagggaagcaggaatgacgtggggggctctagtcttcctgtctaagtgctgrggaccccccctgagcaagacccttctctcttggccttggtcttctcttcttccacatatggggagctggaagtggaccagtcttgacttcctctgtagct

SEQ ID NO: 3908 - DNA, 201 bp, Homo sapiens
gatcactgggtggctggggagtggaggcaaaagtagtagaagcggtggcaatgggggctatggaggagcaatctctggctggaggcacaagcctcagtccygttatttcccagggagacagtcagccagttctgctttaataatgcactgatagaagctccagttcccttctttagtttagcaaacaccactgctactgca

SEQ ID NO: 3909 - DNA, 201 bp, Homo sapiens
caccccgaggggagacagagagttgcaaaagatgccttcagtgtgtaggaaacaatgagagcactgccagtatctgctacagtggccgagaaacgtttagwgcagataggcaaactgtgcctccagccctcacccatcacagtgacagagggatgcaagtggaaaatccaccagcacggagcacaggacaagggagggcca

SEQ ID NO: 3910 - DNA, 201 bp, Homo sapiens
gcaagcccagcttctctcttgcatggattttagtccaggctggcagggcctgggacaagtggatgttcactggtggagctcttttcatgcctctgaatggrtatgggtggccatgctgccaatcaaccagtgagttgctggcattgtacccacaatggtgagaagctgggctggtagggacagcccctgtcacatggcgaa

SEQ ID NO: 3911 - DNA, 201 bp, Homo sapiens
aaaaaaaaaaatcctcatccgtttttgaccagagtcaataaaagcatgttcagcaaaaccaatataatatagcatggtgtcattcttttatttagtttttwaaaaatgctcacgcagtggtacataatcttgagccctggtagaagtgagaattaaaaatatggaggcatctgtggtatgaccccctgggtcacagaaccc

SEQ ID NO: 3912 - DNA, 201 bp, Homo sapiens
acaacccctcacgctctcgtccactagtgggttctgctggctacctgttccacactgtggggctctcttctgctcccaacttgctgacactggcactcccsccactcctccaagtgttctctttcgagtggttcctaaccaactatcaggagagcctgcctggaacacactggggctcctccctcccggggccctccgcag

SEQ ID NO: 3913 - DNA, 201 bp, Homo sapiens
ctgtgcttttgagaagcacctggctggcagatcagaaagaatgacccgcttcataagatggtaggtctggttcctgcagctcgaattccataaagttcacmgaaacacatgataagcaaccatgtatgtgggattataatttctttttcttctctttttttttgagactgagtctcactctgtcacccaggctggaatgca

SEQ ID NO: 3914 - DNA, 201 bp, Homo sapiens
caggagatcaccaggcccagcacccacaccgtctgaaggagagaaacaggggggcccccgtatgctgccagtggcacagcccagagtgcaggtgtgtggayggctctttgtaacccatcccttccaggtgccacccttggcttttcaatgcgttccctcagagcacatgatgtcaggtgttccctgctcccggggctcaca

SEQ ID NO: 3915 - DNA, 201 bp, Homo sapiens
ttttccctgcgggtcttttaagtattggcaaatgcaggaaattttttaaaaaaatgaaatggagggcaaattggatttcatcctgagcaaaaggaatctayagaattgatccccaggacctctgctcttggggtcccactaggcctttactggggacacactgtggtcagttgtctagcagaagttacaatccaggcttct

SEQ ID NO: 3916 - DNA, 201 bp, Homo sapiens
tcccagttatggcaaagtccctagagggcaggttgaattgatttaggcaggcagggtctgcacacattgatttgttccacctgcattggctgagggtcackgtttcccttccaatcaggaagccttctgagggcctgctgtttacgaaaggaaagtttgagaatgttggccaggcacggtggctcatgcctgtaatcccag

SEQ ID NO: 3917 - DNA, 201 bp, Homo sapiens
caaagagagaaggagccatttgtcctgctgtctgcctgcctcctaatgcttccctgtcaggcactgtagatgcagatacaaaaagtatggtccctcttccyccaggagcccacacctggctggggagatagacctacagagtatctggggctgccgtggagttccacacagcaggctgttggggcacagaggatggagccc

SEQ ID NO: 3918 - DNA, 201 bp, Homo sapiens
ctgcctcctaatgcttccctgtcaggcactgtagatgcagatacaaaaagtatggtccctcttcccccaggagcccacacctggctggggagatagacctrcagagtatctggggctgccgtggagttccacacagcaggctgttggggcacagaggatggagccctcccaacttggcagaagagccttgccaggagaagg

SEQ ID NO: 3919 - DNA, 201 bp, Homo sapiens
taaacctctttttttaaaaaaataaataaattaaccagtctcaggtattcccttatagcaccagaaaattaactaagacaagaggggaagctggattacayggccaatcattaaagttacccggccaatcattaaagtgataatacctacaaaataaaatcccaataaaagccctggacacctaagctcagaagagtttcc

SEQ ID NO: 3920 - DNA, 201 bp, Homo sapiens
cagatttggcaacctgagcctctggaatcatgacccaaaataaacctctttttttaaaaaaataaataaattaaccagtctcaggtattcccttatagcascagaaaattaactaagacaagaggggaagctggattacatggccaatcattaaagttacccggccaatcattaaagtgataatacctacaaaataaaatc

SEQ ID NO: 3921 - DNA, 201 bp, Homo sapiens
ttgcatttgcccttttggcaagcactcagctcacccccatgttatgatgaagcatgagaccctcaccagaagatgatcagatttggcaacctgagcctctrgaatcatgacccaaaataaacctctttttttaaaaaaataaataaattaaccagtctcaggtattcccttatagcaccagaaaattaactaagacaagag

SEQ ID NO: 3922 - DNA, 201 bp, Homo sapiens
ccttgcatttgcccttttggcaagcactcagctcacccccatgttatgatgaagcatgagaccctcaccagaagatgatcagatttggcaacctgagcctytggaatcatgacccaaaataaacctctttttttaaaaaaataaataaattaaccagtctcaggtattcccttatagcaccagaaaattaactaagacaag

SEQ ID NO: 3923 - DNA, 201 bp, Homo sapiens
ctctctctcttagaagggaaatgtctatcttatacctgtccattcattgtatcttggaagtagataactcattttgattccacaagctgctcataggtaaractttggatttttgagtttgtgctggaacaagttaagacctttgggactattagaatggaataattgtattttgcattgtgagaagaacatgaaattctg

SEQ ID NO: 3924 - DNA, 201 bp, Homo sapiens
ctgaatagggtttctctttggtcccggactaaatcctaagctgtaggaacagcagcaagatttcaggggcctggaaatatttggggagctaagagctcaamagagattttacaggttgtatagcactgagtaggtgaaattctggcccagtcaaagtatagagagcttggtaaatactctgagcttttgggcagtggagac

SEQ ID NO: 3925 - DNA, 201 bp, Homo sapiens
tttttcattttctcccttgaattcttcctagattttttgaatatttttctcacttcatttattgtctactactaaacttgaaagttatgctttgttagtgktttccttagacatttttaccctctatacttatcaaaattaagtttataggtatcttttttctttttctcaactatacaaggatttcagtacaaaaatttg

SEQ ID NO: 3926 - DNA, 201 bp, Homo sapiens
ctttttgtagagacagggtcccactgtgttgctcaggcttgtctccaactcctggcctcaagcaatcatcccacctcagcctcccaaagagttgggattayaggcatgagccaccatgcctagcctctttcttctcttctaatggaattatttaagattatgtaatagctcccattgtgatcatgagcttatctatttctc

SEQ ID NO: 3927 - DNA, 201 bp, Homo sapiens
ggtttactctgctactcttttcctaacattgtgaggtggagatgtttaactcatcaactttggtcctgtcttattttttcttttccttgctctgccaccargctggagtgcagtggtgccatcagagctcactgcagcttcaaactccttggctcaagtgatcctcccacctcagcctcctgagtagctgggacttcaggt

SEQ ID NO: 3928 - DNA, 201 bp, Homo sapiens
gatatgtgtatttattccctcctcctccctctctcctctttcctttattactcttgacatagttttgttagatttattggttctttcaaaaatcagccttkggctttgttgaacctttctgttgtactttttttttttcaattttatccattcctttttattattgttctttattacttccttccttcaactttatttggg

SEQ ID NO: 3929 - DNA, 201 bp, Homo sapiens
cctacagcatcacttccacaaaagtccccaggttcaagacgaggggacatagaccctgcctctcaacaagaggagggtcaaagacacattgtaagaagaayatgtgaaatggaagatactgttgtggctagctttgaaacatacaatatgccacaaatccattaacatgtttttttctttttaaagctcaaattgtccaga

SEQ ID NO: 3930 - DNA, 201 bp, Homo sapiens
gtttgcacagggacctcaggacagttagacagttgacatggtggcttaggctccagcatgagtgttccagccagcatggtggaagctaccctgtcatctaygatttggcctcgaagtcctacagcatcacttccacaaaagtccccaggttcaagacgaggggacatagaccctgcctctcaacaagaggagggtcaaaga

SEQ ID NO: 3931 - DNA, 201 bp, Homo sapiens
ccccacatccagggttcttccatccaacttcttggaacattttcctcccttgactttaagtgcccactgagagcctcctcaggactctgccagcccgctcwcacagcccctgcaagctttcaccagcagtctcaatgcctcctgccaccaaaaccaaagtcaggtgttttgaggttttgtcatggtgtcatctcatatttt

SEQ ID NO: 3932 - DNA, 201 bp, Homo sapiens
gagtcttggctcctttatatttaacagtttgtcctccagctcacctctccctctcatgttttaacataggcaaaaaaaaaaaaaaaaaaagaaagaaaaawacaaacaaaaaaactaatctggtggtactttctaagttctgtctgatagcctctttagtggaatcatcaagtttatttagcatatttcctatcttactgc

SEQ ID NO: 3933 - DNA, 201 bp, Homo sapiens
ttaatttgacaacttttcaccacctttgagaggctggaaatggaacaagtttgactttcaagcctggtgagtcttggctcctttatatttaacagtttgtyctccagctcacctctccctctcatgttttaacataggcaaaaaaaaaaaaaaaaaaagaaagaaaaaaacaaacaaaaaaactaatctggtggtactttc

SEQ ID NO: 3934 - DNA, 201 bp, Homo sapiens
actggatgtttctgtgaaggttttttttttttctttgatgaggtaaacattttaatagcgacactttgagtaaagcagattatcttccatagtgtgggtgrgtctcatccaatcagttgaaggccttaatagaacaaaaatggacctcccccaagcaagaaggaattctgctagcagacatggcctttagattcaaactgc

SEQ ID NO: 3935 - DNA, 201 bp, Homo sapiens
ctaatatccccaaatctattagtgcagcagcacaaaatccaggatcgaaatcaggttatctgttatctaaatcaggtccaggttcagacaagacttctcakgtgaggttcctaggattcagctcctcgcacaccattcctctgaatctgaagacctgtaaacactcactccacaggcccatgcataacagtggggcggcac

SEQ ID NO: 3936 - DNA, 201 bp, Homo sapiens
agtatatgtggcatataaaataacaatacagtgattatccatgtataatttatgtataataattttacttgtttttgtcattgcttctttttgccaaataktatgtgcctgagactcatcaattttattacatgtaactgtaattcattcattttcactctgggtatagtattccagatctatctctttatattctatata

SEQ ID NO: 3937 - DNA, 201 bp, Homo sapiens
acggaaaggcatgcactggtctctggttagcatcagattttacccccattataaaagtagtatctgtttattgtgggaaaatattagaaaatacagataayaacgaaggaaagaaaaattattccaactgactagtcagaaataaacctcaatttttagtctatattcttccatatttatctcatttatttatttattcag

SEQ ID NO: 3938 - DNA, 201 bp, Homo sapiens
gattgtaaaaaaaaaaaaccaaataagtaaattgagtctcctatgaaatagtggagactccatgttaaagctaacaaatcatcctaaactatcagatgcamattatttttctgtcacttgagtttaagaaaaggtcagtaagaaattccctctgctgttttccagtgagtcgaggccttctctgccttctagaatttggtt

SEQ ID NO: 3939 - DNA, 201 bp, Homo sapiens
ttcatcctgccccatcaccctttcctgccccaacttctctctccaggtgctcccacagctctggctcccccgagtccttgctcctgctgcagtgctcctcstgcagtgctcctcatctacatctcctcctgaaacctcaggcctaatactgtacattgggcctaacattctcctgcagcacctacttgtcttcatctgttt

SEQ ID NO: 3940 - DNA, 201 bp, Homo sapiens
aggaatctacagtcaccacaaaatgccccacattatcccctccatgctgtgtattttctacattcctaacatagagaattatgttcaatatcatctccagrtctgattgggaatagaaacagcttcctttttggttgtgtaggcacacggcaaagcctctattgtagaacaaggccagggagggaggtattccggttaacc

SEQ ID NO: 3941 - DNA, 201 bp, Homo sapiens
tccacactgcatttgttccctaaaagaacatttttctaagcaggcctctcagctctggggaatgaacagcgatggagtgagcaacaaattgtttcatttgmtaagactgtgagctacaacttgcaataaatcagtgtgaaatgagaaagtagaaagggaaagatgatccttctccaattgccagtcaagctttagtttaca

SEQ ID NO: 3942 - DNA, 201 bp, Homo sapiens
caagcctggaccacagtaggctgtgcccagactggacatgggccagactcacatctagaaggtgggactgaagatgaggctcggccctggatagggccgayattcttctttgccgggagagcgaatgcagaaaaggatgggctcagacacacggactgacccctccttgtgtctcactggctgatcattgatgggatgctc

SEQ ID NO: 3943 - DNA, 201 bp, Homo sapiens
ccagagttcacagaacctgtgcacaagcccttgtcatgcaaatgaagaaattgagtcttggggtgagcaggacccgaggtccctcagctgaccagtgcagsactcggaccagaatctggacttctagactgactcctgaagccctggtttactccatcagccagtgggaactgtcaatattctcctagctctttatgcctt

SEQ ID NO: 3944 - DNA, 201 bp, Homo sapiens
ctgcagtgattcaaacgtatagcgctaaagccaggaaaatcacaaccaacagacagcccccatgggcctctgcacacaaaaggcagccatcccgctgcctrgcccagctagtgagtgaggccacccactgggcacccactcagatgcactggcagatgttaggtttcaggactgaatttggcctcactgtactcagtcctc

SEQ ID NO: 3945 - DNA, 201 bp, Homo sapiens
catgtgaggacacagcaagaaggtagctgtgtgcaagcccaggagagaggcctcaccaatcctcccagtaccttggctcagacttccagcctccaggaccrtgagaaaataaacttccggtgttgaagccacccagtctgcaatactttgtcatggcagcccaagtagactaacacaggacagacataggagaaatctgaa

SEQ ID NO: 3946 - DNA, 201 bp, Homo sapiens
atattacttttgtattttaatcagttgggtataattaaggcatcggaaaaagtgtttccacagaatgtgtaagggactgaattgtgcccctgccacccccsagtcccccctaccccacattcatgttaaaatcctaaccccagtgttactatatttggagttagaattctcaaggaggtaattaacgtaaaatgaggtcag

SEQ ID NO: 3947 - DNA, 201 bp, Homo sapiens
aggagcaagaattctaccaggtgggagaggcttgagtctatgcacatgaaccattccagacaaatagctgtcaagacaggaccaccgatagtgcaattccyttgctgggaattaattcagcatttaatcacactaaaaatcaaaatgattgcttctttgccccctccacttctcttatgctggacttgagcccatgactcc

SEQ ID NO: 3948 - DNA, 201 bp, Homo sapiens
agatgccagaaggcagaattagatgatgtaaagctctctaagtgccaaagatgtggaaacttcaggagacactgtgcaaagcagaataagggtatagatcyccaggccctcagagttccccacagtgacatatagctgtggggaaaattatctatgaggagcaagaattctaccaggtgggagaggcttgagtctatgcac

SEQ ID NO: 3949 - DNA, 201 bp, Homo sapiens
gcaagaggaaacctcagagattcagctgagcagtcgggcaggctgtcacttgcttccctgctgagccctgaatccaatccagcaataatatggaaccagtkatcactagtcttcccagttacagatccttttctcctggcttaaagcactttgggttgcatttttgtcacttgcagttggaaatcctaattcatgaggact

SEQ ID NO: 3950 - DNA, 201 bp, Homo sapiens
gactctatgttaaggacaaaattaggagtatatggacaaggatataagaacagagatgctgaatgcttgtttttcttaacccgtgcataggaaaaagcttsgttgggagatacatgccaatggtaatggtttttaatgtctggatgataatttaaaaatatttttatgtgctttgctatatttccaaattggctacaatgc

SEQ ID NO: 3951 - DNA, 201 bp, Homo sapiens
aacgaatgctgataccataaaggaaaaaagttaaacatttttgactaaataaacattacaaaccttctgtttatcaggcctaccataaacaaaagacaaaygacaaattgggaaaatacttgcaaaatgtttgctgaaaagtcaatgtctttaatatataaaagtgttattttacaaatcaataataagaagaaatacatc

SEQ ID NO: 3952 - DNA, 201 bp, Homo sapiens
ggcagcaggaacaggcagatcaaaacaacagactaaaaatctaggaagatacatgtaaatagggtgtcatttcaaggaaaaaaagaaaggatatgtcattyaatttatggtgttggaacaattagttaaccacatggaagataattaaatcaaatctctgcctctctgccttgaggctgggctcctataatcccagcactt

SEQ ID NO: 3953 - DNA, 201 bp, Homo sapiens
ataactataaataggttaaatcttcctgtgataacataaataattctcagattggctcaacaaatatcacctgctttttttttttaaaaaaaagcaaaacrtacaaaaaatatagattaaatgataaaccagtaaaaattagtatttagaacatagtatgcactcaagaaatatttgttggcaaagtgaatgtcagaaaaa

SEQ ID NO: 3954 - DNA, 201 bp, Homo sapiens
taacacatattataataactataaataggttaaatcttcctgtgataacataaataattctcagattggctcaacaaatatcacctgctttttttttttawaaaaaagcaaaacatacaaaaaatatagattaaatgataaaccagtaaaaattagtatttagaacatagtatgcactcaagaaatatttgttggcaaagt

SEQ ID NO: 3955 - DNA, 201 bp, Homo sapiens
cctacccagattttatctcccactccaagagaactgggggaaaacaaaacattttaaaggcaaacaggaacaaaatgtagtgtaaatgttactgagagcgytctcttcatggagccccagggagtcctttctggaagacaggagctttgcgatcctgtcctctgcctctaccggtgagtcagcaaaatggatctgagcgca

SEQ ID NO: 3956 - DNA, 201 bp, Homo sapiens
gattcatttcataacaacagagtccttcagcgaaggactgcaatagcttctgggttgctaaacactctgaatgtttcattatggataatgggcctaacacrataacatatgtaagcaaccaggaaaggagaacagatacaaagacagccatgaagctgggcaggcagtgtgacagctctgtctctcctgctgccctgggca

SEQ ID NO: 3957 - DNA, 201 bp, Homo sapiens
taccctcacagagaagcaaatcactcagcaagcaccaatttatcccaagaaaaccttttaaggggttgagaccaatgagtgttcactctcgctatttaaayggttattgctctcagcccaggagtatggctgttggagctttcacttgttttctcctggaaatgattcatttcataacaacagagtccttcagcgaaggac

SEQ ID NO: 3958 - DNA, 201 bp, Homo sapiens
agcacccagaataccctcacagagaagcaaatcactcagcaagcaccaatttatcccaagaaaaccttttaaggggttgagaccaatgagtgttcactctygctatttaaatggttattgctctcagcccaggagtatggctgttggagctttcacttgttttctcctggaaatgattcatttcataacaacagagtcctt

SEQ ID NO: 3959 - DNA, 201 bp, Homo sapiens
acgtgaataaggattatgctgtgatgtgatgacagctatgacatcactatgtgacaggaatttttcaggttcagtgtaatcgtacaggacttccactgtayatgcggtctgttgtcaactgaaacatcattatgcagcacatgactaagtaatccagagatcatttaaagtgtatggaagaacgtgtgtaggttatatgca

SEQ ID NO: 3960 - DNA, 201 bp, Homo sapiens
tgcaaggattctaaaatagccctttcctttgaggtcaggtctcatgtgtcaaatgcttggctttctatcttgaaggtctgagctacctttgggagggtcamctatggataagctaagtactccccagcatattttgcagtaggtttgtttacaccagcattgccacaaacacgtgaataaggattatgctgtgatgtgatg

SEQ ID NO: 3961 - DNA, 201 bp, Homo sapiens
cctcatctgttaaatggggattagaatagcaccaccccctcaaagtgatgaaaattaaattgcaggtaggattggtgcctggcactcagcaagcatgcagygaatgttagctaactgttattaactattattctgccatggggatgggtgggaatcatcttaaattgcaaggattctaaaatagccctttcctttgaggtc

SEQ ID NO: 3962 - DNA, 201 bp, Homo sapiens
ttttaaaaatacagtataacaactatttatacagcacactgtgtgaggtattacagtcacagattgcttaatgatgggatctgttctgagaaatgcatcaytgggtattttgccggatgtcatcattgtgcaaaattgtattatgaaagggaacagcaatgaatttttcttttagctacactggtccctggttgcatgagt

SEQ ID NO: 3963 - DNA, 201 bp, Homo sapiens
acacacacacacacacacacacattgcactcgcaggtaattttctaaatatgtaacaacggatatagcatgagcagtgaccaatcagaatgaatccaagtmatatatgcccagttcgaccacacagttgcagactgagtgaataacaattcttctcatgaccatgtttcaaaaactacacacaggagatctgcaaagcagc

SEQ ID NO: 3964 - DNA, 201 bp, Homo sapiens
agtggcctcagcatgggtagcttaggggtctttggggctcctgctgggtttgaggatgttcagaggcagaggagggcagatgtgttgtgctgcagctctgmcgctgggagcagaaggaccaatgccacctgcagcacataacctgagattccatcctccgatcgttcacttctgactatgccactacactccacagcatgt

SEQ ID NO: 3965 - DNA, 201 bp, Homo sapiens
agcccatgctctgctccggggaccactccggggcctaacgagaaattagagggaggtttgaggcaaccttgtgtaaactagtggccttctgtccacttttkcaatttgcatttgggtggccacctgtcccctgcactgtgaccaaaatctgtctctgagagctcctttcctgcatctaaatgtccataggccatgaaatca

SEQ ID NO: 3966 - DNA, 201 bp, Homo sapiens
cagaaaccagcccccagccaatcactgcttcagactacacaaggttatgagaaagaaatcccaatagtgaattacagagcttcagcatgtgtaaaaacaayagcatatttactatgtgccagaaactgttttaagcactttagccatactaagatatctggttcctatgacagccctgtgaggtaggtattattatccatt

SEQ ID NO: 3967 - DNA, 201 bp, Homo sapiens
tgctaagaaagccaaaacaaccctggtgaccctttacagttgtgttactgcaaaaacctagaaacggccccctcttcaccctgccaaaccccagctcctgstctgaagtgatggtctcacaggggtcagtgatcccagagcaggagctggcggtgggtgggcggagcagaaggaactttgaaccacaccttcttaggcaca

SEQ ID NO: 3968 - DNA, 201 bp, Homo sapiens
cgagtgcctgggagcatcttacccactgtacatggacatgttttgttcctgatccacagttatctgacacattacttgtcacagtgggcttcttccagaaracaaactctccttcaagtggcaaatcccaattttctccagttcgggactatggagcctgtcttcccattggtaaatgggcatattcccaagggagcagga

SEQ ID NO: 3969 - DNA, 201 bp, Homo sapiens
tgctattctataaggtttaaaacaggtcatcttagaattctcatcctgcctttgccaaaacataaagagaatttctcctgctttctagacctccactgctktatctgcacttggtggaagccctttctacacgctgctcagcaacatggtctctatcgtctcttaagtaacaacataacacagtgaaaagagcctagtgtc

SEQ ID NO: 3970 - DNA, 201 bp, Homo sapiens
ctggcactaccctagcatcaatgctgcagagcaacatttactacaagcaactgaaacaataggagaatctgttaaaaataatcaggctcccatgaaacatractggcaagggtaggggctgcccagaggttagtctgggctcagccatggttgttgcaggccctcaagagttcacagaaatggactgcttccagagaatgc

SEQ ID NO: 3971 - DNA, 201 bp, Homo sapiens
taccgaggccgtaagacttctctaggatgcagttctttttccatctaaagagggtaatacaatagccaaagagtggaagcaaccaagatgttcatcagccratgaacggatgcacaaaatgtggcacatgtgatggaatatgattcagcaaccaaaagacatgcaacaacatggaagaacctcaagaacactgtgcccagt

SEQ ID NO: 3972 - DNA, 201 bp, Homo sapiens
attttcaatagccctgctactctcttctctatgaaatatttagcacttaactcgttatttctgctgctggcaaagtctcaggtgcaggtggctttgtagasatggcagaatgtcacaccaaggtaattgtttctctttatttcctctagataaagaataagtaataggcaagtcggaattatcgggtggtgcttccatcat

SEQ ID NO: 3973 - DNA, 201 bp, Homo sapiens
ttatgccagggatatatgaccagaatacatgaaggtcttttgaatttattttcaatagccctgctactctcttctctatgaaatatttagcacttaactckttatttctgctgctggcaaagtctcaggtgcaggtggctttgtagacatggcagaatgtcacaccaaggtaattgtttctctttatttcctctagataaa

SEQ ID NO: 3974 - DNA, 201 bp, Homo sapiens
aaaaatggttgatgcaatgagagaaaactccgagcaccagggtcagtggaaaggactggctcaccaatgattactcttaaattatctctcctctgtcttascagcttcctttaaacgcagtaaacaaacagcaactgctttgcagttttgactgataagtatctcatgaacgaggcccgtaattttaattgatggcaccca

SEQ ID NO: 3975 - DNA, 201 bp, Homo sapiens
tggtcgtgactggacaaagtggctcctagctgcatgcagtgtgtccctcccatggtctgagatcagcaccgaccagtcatgcttgaccccgtaaccacttsgacagccatcagcacacgctgcagcaccacacatgcagtgtgtggtgagggctgcccaactgcttagggggtcaagaggttattaggccagacctctgcc

SEQ ID NO: 3976 - DNA, 201 bp, Homo sapiens
acagtcatactaatgtaaatgcgatttatttgtcttcaactttcagaatcagcttatagacaaatgatagaagaccatccaaatgctgacatggcaaggayatcttggtcatcaagtctaaccccagccttgaaagatgaatacaccagggtttgaacagggatgtgattttcccaaggtccctgagtgtgtagcaggggt

SEQ ID NO: 3977 - DNA, 201 bp, Homo sapiens
agaaatagcatttaatccaggccctaaaggaagggcagtatttgaaaggcaggtataattactcttaattgcaaaaaccacaattacttttgcactgacckcacagaagtcagtgcatctcaagctgaacaaatgcacagacatgtgaaagcagaagatgtgtctgagaggggactgctggtctcacttggccagagggca

SEQ ID NO: 3978 - DNA, 201 bp, Homo sapiens
ctgagctagaaccagaccctgggtgccacagtccaggatgggtgggaatgataagctggatgtggtttgtggctgtctgtattttggttcatttccaagasaggtgatcagcagtattagggtgagttaagaatggaagaaggtgactgtggcttcatctcttcctctgttttcttatgaaggccgactcgaagtttctct

SEQ ID NO: 3979 - DNA, 201 bp, Homo sapiens
agatagttacttcccaccatggggaaggctgggggaggcaggcagggggaggcctgcccacccagcacaggacctctgggcaccaacaagggctctgtggstcttgtcttagtgccctgtgggtgtccctgccccagggcatcgctctcctggtttgcagatgactccatcccactgagctagaaccagaccctgggtgcc

SEQ ID NO: 3980 - DNA, 201 bp, Homo sapiens
gtgtgcatgtgtatgtgtgagtgtaagagtgtgtgtgtatatatgtctgaatatgtatgtgggtgtgtgtgtgtatatgtgtatgtgtgtgagagtgagtrtatgagtgtgggagtatgcgtgtatgtgagtatatgagtgtgtgagtatatgagggtgtatatgagcatgtgtgagaatgagtatatgtgagtgtgtgtg

SEQ ID NO: 3981 - DNA, 201 bp, Homo sapiens
ctacaccaaactaagccctcttggtaattttccatcctttcccttactccaccagctgtaaatccctacctgtccctgtcgtatttggacttgagttcaaycaagtgttagagcaatttctcttcaccactggccatccattttccccttgtacctgtgctttgtgtttcttctctggggtgcaaacccagacagcaaggc

SEQ ID NO: 3982 - DNA, 201 bp, Homo sapiens
gccggtagactaccctggccagtgaaatgtgaggagtgctaagaaggattctgaagagatagtctttttccttggatgtgggtctgtgagtgactctgcasggtccagctggaaggctaagctggcccacgaaggatgatagagtggaaggaagccggcgcttgatactgatgatggttctgagcctggggcctgccctat

SEQ ID NO: 3983 - DNA, 201 bp, Homo sapiens
cagcataggaacgagcccccaactatctgtgacatgaatggttctgagttgagaagagctgggagcacacacagcctggctgcacccagaggatgccccargaaacctgtctgcttcctacctctggtccatttgtgccctgctgactttttgaatttttgcccttcagatctctacacagtacaggaacttgctgaaaga

SEQ ID NO: 3984 - DNA, 201 bp, Homo sapiens
ttttcttcactatggttttgccccagcataggaacgagcccccaactatctgtgacatgaatggttctgagttgagaagagctgggagcacacacagcctsgctgcacccagaggatgccccaggaaacctgtctgcttcctacctctggtccatttgtgccctgctgactttttgaatttttgcccttcagatctctaca

SEQ ID NO: 3985 - DNA, 201 bp, Homo sapiens
taataattttacttgtttttgtcattgcttctttttgccaaatattatgtgcctgagactcatcaattttattacatgtaactgtaattcattcattttcmctctgggtatagtattccagatctatctctttatattctatatattattataggataattgctatattctttatcactgtagactatatcacaatttaga

SEQ ID NO: 3986 - DNA, 201 bp, Homo sapiens
caagattccagcgtgagatctggtccctggtgtggcagtgttgggggtagagtctttaagaggcgattaggtcactaagagggattcatgccactctcgcrggactggattaattctcgaggaagtgagtgagtccttgctctcacaggactgaattagttacaagagtgtgttattataaagcaaggcttctccctgagt

SEQ ID NO: 3987 - DNA, 201 bp, Homo sapiens
tataagtctctcataagtaatctgttttttctctctagctactttgagggttatcattttgtccttagtattctgcaagtttttgttgtagatagccttaygtttctttttgtttatcctatttgggatttactgggcttcctgtatctgaggatagctgtcttcctttagttttgcaaacttttttcaaccattatccct

SEQ ID NO: 3988 - DNA, 201 bp, Homo sapiens
aacaatgatggctaatatagagcctactcagaaggtgggccagtgctatgctaagctttttaatatgcatttaatccatacaactgccataggaggtagayagaactatcaccactattttagatgtgagaaaaccaaagcacagaagtttaaataacttgttcaaagtaatataaccagtacattggatcatactcagaa

SEQ ID NO: 3989 - DNA, 201 bp, Homo sapiens
actgtgccaccctacagagaagggagaacctggactcaggggtgggaggcaaggaaaggaagcaagaaaaacaacccagagagccctgagaactaagagcrctggcttagagccccaaatccctcctctgctactcactagccccctgggacctcaggcacgtcactgtacctgttcaagcctacctcatctatacaaata

SEQ ID NO: 3990 - DNA, 201 bp, Homo sapiens
agcattcaggcaggctgcttggtggacagagtgcagtcgtgaagactggctacgcagctgacctttgggaaatccagacagagagcctggggagatggggrggaggtgcctggaccacagtggtgggcacatctagtgctctctcaagtcatctacatgggcctctgctgcgggtagcatgtttctcgctatatttcaaat

SEQ ID NO: 3991 - DNA, 201 bp, Homo sapiens
ggtgaggtccatcccccatcctgtgttcctgtctgccaccccatgcccatttagaagcagccagcccagcgagcctccaccaaccccttcccaagaaagarggtgatctcttaggaaaagtggaaaataaaagcttctgacaaacatcatcaaggaaaggactgaagccactgccaggtgaggggcttgctcattcacttt

SEQ ID NO: 3992 - DNA, 201 bp, Homo sapiens
aggtctccccactattggctgcactcttatcccggaaggctgtgggtcactgtctccatggagccagtgcccatcctacctgctcatttctgggacacacrctccctgacttcctggagagttcaaagcaacattcaacattttgtgaaaaggtttttgtttttttttttctttttaatgcaggccctgacgcatttcttg

SEQ ID NO: 3993 - DNA, 201 bp, Homo sapiens
aggcaggactctgagctgcagctgcttgtggccatcctggaaggctacctggaagaggccaatgtgccaggagaaggaaggacaggatgagtgtgagaatycttttatcagctgttcttgaagccagatccacccttagattctgcagcttcataggcctttcaggcttcagccagcacaagttgggtttctacaactcag

SEQ ID NO: 3994 - DNA, 201 bp, Homo sapiens
ctgggaggtgggcaatgcaacatgacattggtgctcatccccaaactcgcagcccctaatcacagcacaatcacggacatctggaatagcttacagatcgycctatgctcctcagagatggctgacaagggctgaattatcccagccatttgctcagcttactcaagtgttcgctcatggctgtaattcaacatgatggga

SEQ ID NO: 3995 - DNA, 201 bp, Homo sapiens
ccacccactaaagagaggttcagggcatcagagaggcaccagcccagaagcattcctcatccctactaaaaattaacatgaaaaggaaggagtctcatgtrtgcagtgctatctgctctgtgtcacaggttactcaagggaaagggaggtaaagaacgtgaacattctctgaaaacatcagaacaaccaagaagatattct

SEQ ID NO: 3996 - DNA, 201 bp, Homo sapiens
aagaaagagagttggaaaggatgaaggggaggtggatttgacaaggatgagggacaaggcatgcaggaatagtctaaggccagaggcaagaaagctagacwgcatgacatctacggctggaggggaagagggggaaatagggcagaggacaggtttaaggcacacaatgcattcactttgcccctactgtcgctagttccc

SEQ ID NO: 3997 - DNA, 201 bp, Homo sapiens
tgtggccctaaaccttcaatggaggggatgctcctgagtcaggtacagtattgaaataaggcaaaccaaaacaggaaacctcctcaggttctgtgactggragcttcctctctagacctgaagactttctagactctcctgggccttgtaagctgtgcagaaaaatcagctattactcatctgttcctctttcagtccggg

SEQ ID NO: 3998 - DNA, 201 bp, Homo sapiens
tttattgactgtttccctctagtggaatgtgggttgggatggcgccagtatctttttcactcttgcatcatcagtgctgtagcagaacagatgctcaatasatatttgttgaataaaaaataaaataaaataaatgtgttggattttatcaagtacttttctctggcatttaaggagataatcatatgatttttctcctta

SEQ ID NO: 3999 - DNA, 201 bp, Homo sapiens
ctgtattttactatgcagttaaactacacaatccttatttttgaatcaatataatatgagtgctgagcaatatttttcataatccaaaagccgattacagwttctcagctaccaaaaaacagtttgaaggctgctgaaagagtataaatgagcactctcaaattctacccctaggtccatcccatgtccatcttgggcaca

SEQ ID NO: 4000 - DNA, 201 bp, Homo sapiens
ccacttaatcgaggggtcagtgttcccctcctgcaccacagagaacagtgtcagatggctctggggttagagagaggtgtgtgtagccctggtagatgggsttactgccttaaagaacagtcaaaggtgggggaggcacagctgccaacactaaacctttaggggcttagatagctgagggagtttgataaaggccagggg

SEQ ID NO: 4001 - DNA, 201 bp, Homo sapiens
agtcaaaggtgggggaggcacagctgccaacactaaacctttaggggcttagatagctgagggagtttgataaaggccaggggtccctgcacctttcagcyagccctgcctaggagttgcccaatcagcagaggctgagcttgcctttctcatcttcccagaagaccagatgtgaaggggagagggctgggcatggccata

SEQ ID NO: 4002 - DNA, 201 bp, Homo sapiens
cacccggatacttcccactccagtttgcccatctgtaaaacgggcagacccgacagcccagccaggacaattgaggcgatatctcagaaacatgggcagartcccacagagagttctgtccagggctttctgacaggaagcaaagggtggtcagtgaaggagaaagctgtgatactctaaaaagaaatggaattaatggtg

SEQ ID NO: 4003 - DNA, 201 bp, Homo sapiens
taaaaagaaatggaattaatggtgattaccagacactagacagaaaagaaagcaaaaggataggtgcccatcttcagaaattaagatgatttggaaatatyatatgaggatttagtgattttaaattctagatatcatttaaagctttatgctaaaggttattcatttacaatttaaaaagaaaagttagccctgaattta

SEQ ID NO: 4004 - DNA, 201 bp, Homo sapiens
ccagcagtccatgatccataagaaaatcatgacagtcttgtaggtgtctgggggaggagagaggacagcaaggacaagtggctcttgagaggaaagggggmaggagttcatgtttaaattatttattacaccctccaggaaccatccaataaatgatacaacttaacatccacctgtttaacatgatattccaatctgcta

SEQ ID NO: 4005 - DNA, 201 bp, Homo sapiens
ttcactcattcagtagatatttattgtcctggagatgtagcagtgccaaggcagccccagccccagtccttatgaagcttaggatctcactggaagaaacrggcaacaaacaaacacacaaacaaaggaaatgtagagaatacctcatgctaagaagtgccacggtgcaaaatgaaacaaggaagggggatagactgccac

SEQ ID NO: 4006 - DNA, 201 bp, Homo sapiens
gtgccaaggcagccccagccccagtccttatgaagcttaggatctcactggaagaaacgggcaacaaacaaacacacaaacaaaggaaatgtagagaatayctcatgctaagaagtgccacggtgcaaaatgaaacaaggaagggggatagactgccacaggggaaaggatttgctgtgtgacatcaggcggtcaggccgt

SEQ ID NO: 4007 - DNA, 201 bp, Homo sapiens
acggtgcaaaatgaaacaaggaagggggatagactgccacaggggaaaggatttgctgtgtgacatcaggcggtcaggccgtgcccctcctgggggctggyactggagtaggtctctacttcaatacccaatctgagcacgtttgtctgctcaggactgttcaatccctcctgcccaccaggggagcctctctcttcactg

SEQ ID NO: 4008 - DNA, 201 bp, Homo sapiens
aggggaaaggatttgctgtgtgacatcaggcggtcaggccgtgcccctcctgggggctggcactggagtaggtctctacttcaatacccaatctgagcacrtttgtctgctcaggactgttcaatccctcctgcccaccaggggagcctctctcttcactgtcatctccctactttgtagctgtggcaccagcagtaagaa

SEQ ID NO: 4009 - DNA, 201 bp, Homo sapiens
aggcggtcaggccgtgcccctcctgggggctggcactggagtaggtctctacttcaatacccaatctgagcacgtttgtctgctcaggactgttcaatccytcctgcccaccaggggagcctctctcttcactgtcatctccctactttgtagctgtggcaccagcagtaagaactagcaggggaagcagcggaggtccta

SEQ ID NO: 4010 - DNA, 201 bp, Homo sapiens
tttattccctgtcctctttctgttcctcacgtaggatgcaccatgaacttcagtttcctcgtctgaagaggagattgaaaggtgctacctataagattgtygtgagaaaggaatgagggagcatgcagacggcatgcaatgtcactcctcaagtagagaaatacctgccccacacgtgccacatcaggaatcacgccagcc

SEQ ID NO: 4011 - DNA, 201 bp, Homo sapiens
aaactcttgccccagtgggcctggccagtgctctgcaccatggtgcccagctgcctcagacaaacctctgcaggtgccagtgggctggcagggttctccartgagggtgccctgttactcccacatatggggaagggtgtcccttcgtaacagagggtatcagctgggtgtcacaggcacagaaactaatgtaaacagtgg

SEQ ID NO: 4012 - DNA, 201 bp, Homo sapiens
aacccacttgaatgccaggatgccttccacttggtcttctgcaggtatagatacctcatctgtcctgggccctgtatgtccctgggctatccctgtcctgmcctttgagatgccctcctctcctcactcatgggcagctctgaccactcactagccatggccatcccatagcgcaggggtgctcatccacctagatgaaag

SEQ ID NO: 4013 - DNA, 201 bp, Homo sapiens
atctgtcctgggccctgtatgtccctgggctatccctgtcctgccctttgagatgccctcctctcctcactcatgggcagctctgaccactcactagccayggccatcccatagcgcaggggtgctcatccacctagatgaaaggggcatactctgaaggagccaccacagctcaaccaatctttagtactcagtgtgcct

SEQ ID NO: 4014 - DNA, 201 bp, Homo sapiens
tcctcaccctagagatgtccctggttccctagccctctctaactcttggctacacagaaagagatatcacaacaaaaaccaaatttttaatgcaataagastttgtatctagctgggagcaaagctgagattcagaactggggaggtggggagtgcatctatctcatcttgtcttccatgatgacaggccaaattatccca

SEQ ID NO: 4015 - DNA, 201 bp, Homo sapiens
gtgagtttgaagggtcaggcggggacacaggctgccttagtccattttctgctgctataacagaatacctgagactgggtactttataatgaacagaaatktattggctcacagttctggagtctgggaagtccaagattgaggggctggcattttgcaaaggcctccttgctgcatactcccatggtgaaaggtcaaaga

SEQ ID NO: 4016 - DNA, 201 bp, Homo sapiens
cccatggtgaaaggtcaaagacagagagcaagagatccaattcccagtctcaagcccttctgtaatcggcattcctgaggatggagcatggagccttcgtkacctaaacacccccattaggcaccatcacccaacttgtggcactggggattaagtttccaacacatgctttttggggaacacattccaaccatagtaccc

SEQ ID NO: 4017 - DNA, 201 bp, Homo sapiens
gataagttgggcttctgagctgcccagccacagacaggccgggttggtgaggtagggtatggcgagggtgctgacaagacagggagaggaaggcaggcaarcaaagcaggggagcaaagatttaacagcacaaggcaggccttactgccagggccaacccctgctctgaagatccaaaaatgcaactccataaaatgcccc

SEQ ID NO: 4018 - DNA, 201 bp, Homo sapiens
agcctcaccaactgtcctccacccacaataacctcctgccactccttcacaagagccacccagcgctgcacccacatcctcccctcagagcccctggaggscccctcacccactgggacctgcctcctggccacaggcaaatggatctgggaagatatttccccaagctgagccaataaggctctgccccttgagaacctg

SEQ ID NO: 4019 - DNA, 201 bp, Homo sapiens
tccccaagctgagccaataaggctctgccccttgagaacctgaggatacagacagaactcaaatgagacagtctggggcccagagctgcagcaagggctayactcagagctctctggaaagaccagtctctggagagaacaagcagaggagggagaaatggagaagggagacagtgtggctcagaagggagttgggagaca

SEQ ID NO: 4020 - DNA, 201 bp, Homo sapiens
gaggatacagacagaactcaaatgagacagtctggggcccagagctgcagcaagggctacactcagagctctctggaaagaccagtctctggagagaacargcagaggagggagaaatggagaagggagacagtgtggctcagaagggagttgggagacagacttccaatgcctctaagcctgagcccatgaaggcatcct

SEQ ID NO: 4021 - DNA, 201 bp, Homo sapiens
tatgctttgtgctgcattcgccgctcaccattgtgctcaccacattcttaaagctgtttgtgatgattctttcttctttctcataatcccacggtgagatmtcagataagaatttcttgtacagtgcagttcatgatcatctttacttgtaacacaagaacagtcattttgaataaattcagatttaaattatatatacca

SEQ ID NO: 4022 - DNA, 201 bp, Homo sapiens
tgctcaccacattcttaaagctgtttgtgatgattctttcttctttctcataatcccacggtgagatatcagataagaatttcttgtacagtgcagttcaygatcatctttacttgtaacacaagaacagtcattttgaataaattcagatttaaattatatataccattctcatctggaatggataacgaatcacagata

SEQ ID NO: 4023 - DNA, 201 bp, Homo sapiens
cagtgcagttcatgatcatctttacttgtaacacaagaacagtcattttgaataaattcagatttaaattatatataccattctcatctggaatggataaygaatcacagataattttgttctagtcagcatggtcataaaagtgtttctgttcctaagaattactggacaactggtgctatggtttggatgtttgtcccc

SEQ ID NO: 4024 - DNA, 201 bp, Homo sapiens
tactggacaactggtgctatggtttggatgtttgtcccccgccaaacctaatgccaaaatttgaccctcagtgttgggggtgaggcctaatggaggtgtcygagtcatggagttggatcccttaggagtggcttggtgccatccttgcagcaatgagtgagtcctaccctactagttcccaagagagctggcttttaaata

SEQ ID NO: 4025 - DNA, 201 bp, Homo sapiens
tccagcccccaacccgcactcttaaggactttagaacagctgagccaggggccaggacaaacctgtgataccagatctgctatcagccacatgcacctggrcagggaatgtctggactatgagcacaagtgtcctgggaccaggcgtggggaatccgggaggcagatggacttctttctttattaagatgtacttctttct

SEQ ID NO: 4026 - DNA, 201 bp, Homo sapiens
acaaacctgtgataccagatctgctatcagccacatgcacctggacagggaatgtctggactatgagcacaagtgtcctgggaccaggcgtggggaatccrggaggcagatggacttctttctttattaagatgtacttctttctaataaagatgtacttccttctttattacttaataaatatgcccacttttctttagg

SEQ ID NO: 4027 - DNA, 201 bp, Homo sapiens
ttcatggttttggcaagggtctggctgcctgccagtgatgctggcctctgcagaggaaacagtcagagccaagcaggccctcaaagccattctaggaaggsgatggcaactgagtcagggtcccacctgttcctacacacatcccatacgattctctgaagcctctcctggttcaagaagaaagttaagaagatttgaaac

SEQ ID NO: 4028 - DNA, 201 bp, Homo sapiens
tgcattttaacaagatcccagaccgttcacaagcacattgcatctcaagaggtgctggcacaggttacagcacaccccattctgcaattgggaatgggttmatcccaatgcccctgagaccttgggaggttctgccaccatcatttgccttgaaaattataaatgtactgataacgtctataggtgggaggttgtgccctc

SEQ ID NO: 4029 - DNA, 201 bp, Homo sapiens
gaccattctcgcctcttgctgagagaccttgcccagggtctcatcttctttgaaagcaagtcaagtactagaatttgcaatggtgagtatcacaagggtgwtgcggcagaaaagccatgagagatgcacacgtactgtaggtgaggcttaagaaaatgcgaacgtccagcttggacccccgttggttcaccgggaagaggg

SEQ ID NO: 4030 - DNA, 201 bp, Homo sapiens
cattctcgcctcttgctgagagaccttgcccagggtctcatcttctttgaaagcaagtcaagtactagaatttgcaatggtgagtatcacaagggtgatgyggcagaaaagccatgagagatgcacacgtactgtaggtgaggcttaagaaaatgcgaacgtccagcttggacccccgttggttcaccgggaagagggagt

SEQ ID NO: 4031 - DNA, 201 bp, Homo sapiens
ccacggagcatctaagggactctgcaatttgaggttgccatgcctcgcggggacaggagtgtcatgcctgccatcaacacttgtagcaaggggaaggggcmggtcagtcagggtaggatcaatgctgtcttaggctgacccctgaggttagggaggcggggaatcatgtttaagttagctgacaccactccacatatttct

SEQ ID NO: 4032 - DNA, 201 bp, Homo sapiens
gagtgtcatgcctgccatcaacacttgtagcaaggggaaggggccggtcagtcagggtaggatcaatgctgtcttaggctgacccctgaggttagggaggyggggaatcatgtttaagttagctgacaccactccacatatttcttctgcaaagactttactttgagagaatttgcaaatactgaaaacccatggtgtctg

SEQ ID NO: 4033 - DNA, 201 bp, Homo sapiens
gtaaaatgcatgaaagacgtataagaccatgtaacgcccaccattcaatctcagagcccagcaaatgggtgagatgctggtgctggaacacgacacccagrccccaaaagtgggaggctcccaccatagcacccaggccccaaaaatggggtggctccaatggcagcaccctagccccaaaaggggaggctcccgccacag

SEQ ID NO: 4034 - DNA, 201 bp, Homo sapiens
acccaggccccaaaagtgggaggctcccaccatagcacccaggccccaaaaatggggtggctccaatggcagcaccctagccccaaaaggggaggctcccrccacagcacccaggctgcaaaagtgggggggcggccactgcagcacccaggccccaaaagtggggggctcccacaaatgcctatttctcaaaagcaggta

SEQ ID NO: 4035 - DNA, 201 bp, Homo sapiens
cagacagtccctgacttaggtttggtttgacttaggatttttcaacatgagcatagtatgaaaatgatacacattcagtagaaatcgtacttttaagtgcycatacatcccttctgtttgtcactttcagtacagtattcaataaattacataagatattcaatattttattataaaataggctttgtgttagatgatttt

SEQ ID NO: 4036 - DNA, 201 bp, Homo sapiens
atatgatcaatagggcaatagttcttgtggtgcagaatctacacagtcatcacctccctttcctgaagcagcaacattcctggacttggaagacaaaagcwaccctggagcaggggttgcaggggagcaagataacaacccccaaaaagcgttacttcctcccaatgaccagcatctgctccttcttgttggcacacaaag

SEQ ID NO: 4037 - DNA, 201 bp, Homo sapiens
taggacctccacttgccagttctttctcagcctggtgctttctatctatatacctgaaaagtagtccatttcttttcaaatatattttataattaaaatayttcactaattcacatgggtgtgctccaccaattactctgcattttcagagttttattaaatatacagaaaggccattctcctgagggtctttgtagagac

SEQ ID NO: 4038 - DNA, 201 bp, Homo sapiens
ttaaaataaaatatattcatttcaactgtgattttggcaagcgccaaatcagttcataagaggatgcaccaagactgctggtttctgggttgtgtttcagraggcccaagatccaagcctggagcttggcctggagttgccactggttttatctggtttgtgtttatatttcctgtaagattgtatctggaaacaggaaaa

SEQ ID NO: 4039 - DNA, 201 bp, Homo sapiens
ctcaatcagatgaaagaggagatggggtcacagagaggttaaggactctgccaaggccatgtggcagacaagtggcaaaactgaaattccaagtcaggcaygtagacccacgacatctattctcttaactcccacctgctgccgcctgtctgttttgttttgtcctgcctgttttgttttgataaacagttgtttttagta

SEQ ID NO: 4040 - DNA, 201 bp, Homo sapiens
ccggggccgctcggggtcctgaacccaagaacggcgcctgcaggatttcggagccgggcgcgagctgcgggctcggcccgagcgcttctgcgtggcgcccsgcgtgccaaccgggtcactccggtccccaccgtagaccccggccacgagcctcggcgtcccagcctctcctcgagtcctggccttggccggggtagccct

SEQ ID NO: 4041 - DNA, 201 bp, Homo sapiens
gcggtcccttccccgcgggcaaacttggctttcccggcgcgggcagtaaggacaagcaagcgcccgcgccgggccctgcagcaagatgcggggccgcgggygccaggaccccagtggggtgcagcgggaccggctggtggcggcgccagcgacatggcaccctccccgcgcccgctgggagctgcgcccgcgtacctgaga

SEQ ID NO: 4042 - DNA, 201 bp, Homo sapiens
ccacctgtgcgcgccgcccgcccgccagccggtcagacccgcgcggcggccacggcaggtgcgcggagcaggcgggcgcgcacgcggggcgcgatgactcsggagcgctggggccatctagggcccggagggaggagggccagcgtagcgctcctgcctctggctagcgtggagctcggcaagtgacagcccctcttcacc

SEQ ID NO: 4043 - DNA, 201 bp, Homo sapiens
caccatggcttagaggctggattcggctctcctctaagacatgaggtatttggaaaagcagatttctattctcagctctgatcacaaagtccctgagtcarcctagtggccttattacataatcaaagcaggactttgtgtattttttgttttttagtaactcaaggtcatatgtaaatcagggtctataggttgaccaag

SEQ ID NO: 4044 - DNA, 201 bp, Homo sapiens
aaactactgccaaatgatgtgtgtctcttaggacatttcagattacacctgcatatcaggatactcagagatgacacatagccatgggaatcaggaggaarcaaggcactttctccagatccaaccaaaagtatctgcatcactaactgtgggtcagcttacccttgggagtccccactaggctggtcaaacagtgcctag

SEQ ID NO: 4045 - DNA, 201 bp, Homo sapiens
aactactgccaaatgatgtgtgtctcttaggacatttcagattacacctgcatatcaggatactcagagatgacacatagccatgggaatcaggaggaagyaaggcactttctccagatccaaccaaaagtatctgcatcactaactgtgggtcagcttacccttgggagtccccactaggctggtcaaacagtgcctaga

SEQ ID NO: 4046 - DNA, 201 bp, Homo sapiens
gccccaagtcttctttgaagatactgtggaggcccagcacacacacagctgcacttgttacaaggctgtggcctgctcagcatttgagctttccccttccstgcacctgcttccctaggattttccttctccttgataaagtgttagcttataaactttgcctccagttctgtattctagagaccccagactgatagaagt

SEQ ID NO: 4047 - DNA, 201 bp, Homo sapiens
acaacaacaataattcataacatataacaatatattataataaaagttatgtgaatatgatatatatatcttcctctcaaaataccttattatatgtaatrtttcagattgcgattgactgcaggtaactaaacctgtggaaagtgaaagtgaaacctcaaataagggggaaccactgaaaggactccagatctgatgtta

SEQ ID NO: 4048 - DNA, 201 bp, Homo sapiens
tcaaattcttgtcaagctggtgttagttttcttatgtcagaaacacactaatggaacacattcctacttggatatttgccatttttcaaatgatgccattsgtgaaaaaaaccctgtcaaaagctcagtaacctgcctgcacatcaatatttttgactgagcctcggagggcaaactcaggctcaggagcctgcttgggaa

SEQ ID NO: 4049 - DNA, 201 bp, Homo sapiens
aagagccaataggccggtggggaggggacaatcacacacaggaaaaatgtgactaacggtgagggaaccctcaaggaaagatgagcacccagtgatggatrcagacgcaactggcataatattttaccaacaataaagtgatgcatttcaagttcccccttaaatcaagttctgctcactaccctcccatctccgagtcat

SEQ ID NO: 4050 - DNA, 201 bp, Homo sapiens
gatggatgagaaatggagaaaatgaaataaagaagtaaaagagccaataggccggtggggaggggacaatcacacacaggaaaaatgtgactaacggtgarggaaccctcaaggaaagatgagcacccagtgatggatgcagacgcaactggcataatattttaccaacaataaagtgatgcatttcaagttcccccttaa

SEQ ID NO: 4051 - DNA, 201 bp, Homo sapiens
cagcgtgtcatgtggttcctgtgcataactgagctcaatgaatatttgctgatttcagggagtgtgttagcctaggatgctacctcctgggaagccctgaraggaaggatagttaagaattcatattacccagggaggtctggccttgccctctttggctacagggaggcaatctctaggctctggaatgtcatgcctcat

SEQ ID NO: 4052 - DNA, 201 bp, Homo sapiens
tccagggagaagcagcctatattctattcttggcttgaacgttttctctgggtcttgattttccaaactgtataatgggaaggaggctctctgaggggccmccagctctgaccatctgtgtccaccaaatatagctaaatttggcttgagttacaccaacaatcacccccgtatctaccctaccttggactgtgaactaca

SEQ ID NO: 4053 - DNA, 201 bp, Homo sapiens
tgcagtggcttcaggggcggccccttctcttggtaccactagggtgggaggtggggtaggcgtcctcctgggcccacgttgccacttctagatcattctcrtgtcacacccacctcctacctagacaccaccccagctcggacatagctcccacgcctctcactcctgcatcctggtccccttttctactggatttttcct

SEQ ID NO: 4054 - DNA, 201 bp, Homo sapiens
ttcctcctgaggacgcagcttctcctgcagtggcttcaggggcggccccttctcttggtaccactagggtgggaggtggggtaggcgtcctcctgggcccwcgttgccacttctagatcattctcatgtcacacccacctcctacctagacaccaccccagctcggacatagctcccacgcctctcactcctgcatcctgg

SEQ ID NO: 4055 - DNA, 201 bp, Homo sapiens
acaaaatgaaacctgcctgcaagtcaagggtgtggaatgaatcattcccttaaaaatacatgactaaatgcaagacacctgggtctccattagcaggggcraaaagatggctcacatgtgcttagagtgagatgcaccctctgctggtcttgaggtttttttgagccaaagcgggtaagatgactcctcactggcctccag

SEQ ID NO: 4056 - DNA, 201 bp, Homo sapiens
ctgcctagggagacaatcccatcctccaatggtccagagctgtttcaataacatgagctcagggcacccaatgccaaaccacacagagacccaaaacaatwaagtcagagtccttgcctcagtttttctttgtttgaagccctgggggagaatgccagggagtggcagaaaagcctgtcacaagtcaggccactaggggtg

SEQ ID NO: 4057 - DNA, 201 bp, Homo sapiens
agctcccgccaagagtcagtcttagctccacagcatctcagtgtttggagccagcactccagcacacacctgccctgaccccatctatctcacccacagcrggaacttctcttctgtactctttcacctgacaaactgcttccacgcaaacctaggggccagaggggtcaaagtccccactaagccacaaactccaggaac

SEQ ID NO: 4058 - DNA, 201 bp, Homo sapiens
aatggaaagaaaagcaagaagcagctgcgagggagaagatgcggtcccacgcgaggacggatgggctttcagttcgggagggaggcccctgctcctggtcrgcctctgcttccgggccactccgtcagggcaaagtctggctgggtctggcagtaagggacaatgactatgtgaaggcaactgacagaggtgtctgcttgg

SEQ ID NO: 4059 - DNA, 201 bp, Homo sapiens
agacagggtttcaccatgttggccaggctgggttcgaactcctggactcaagcgatccagcctcaacctcccaaagtgctgtgattataggcgtgagccascacaccggcctcattttctcttaaatttgaaaatcttcaagtgaaaatatttgcatccataacacaaaggcccgctgtctttgggaaacaccgaccattc

SEQ ID NO: 4060 - DNA, 201 bp, Homo sapiens
cactaggcctcttctcctcctgcgccttatcccagatcatgccaatctccactagaagcctaggcctctggggcatccctcctccccagaaccttctgtcrtgccttctggaactcatgttctgtcattagcaacatctcccacatcctcagactcttctatgagcactccttcaccttcttgctctagtggaaacctggc

SEQ ID NO: 4061 - DNA, 201 bp, Homo sapiens
tgagccaaagcgggtaagatgactcctcactggcctccagcccttcagcaggactaaagagggggcctcagatctgcctgctccacctccggtgcccctgygtctccccagttttgccccaactctctactggggatcactaggcctcttctcctcctgcgccttatcccagatcatgccaatctccactagaagcctagg

SEQ ID NO: 4062 - DNA, 201 bp, Homo sapiens
agtcaagggtgtggaatgaatcattcccttaaaaatacatgactaaatgcaagacacctgggtctccattagcaggggcaaaaagatggctcacatgtgcktagagtgagatgcaccctctgctggtcttgaggtttttttgagccaaagcgggtaagatgactcctcactggcctccagcccttcagcaggactaaagag

SEQ ID NO: 4063 - DNA, 201 bp, Homo sapiens
gacttggaagctctcccagaccaattcagggctaattttgaaccgaagtgcatgccagtgttctagaacaaaatgaaacctgcctgcaagtcaagggtgtrgaatgaatcattcccttaaaaatacatgactaaatgcaagacacctgggtctccattagcaggggcaaaaagatggctcacatgtgcttagagtgagatg

SEQ ID NO: 4064 - DNA, 201 bp, Homo sapiens
aaccatgagtgagacagtcacttccagagggagctttgggagcacagggacagtggtcccagaaaattgtcagaatagggaacagactccaccctctcacktcacccaggaagtgcttcctgatgtctatggtgcctgtccttttactggcggtgggcttgtccagtgaactggaaactcaaggaatgagcttgcctctgt

SEQ ID NO: 4065 - DNA, 201 bp, Homo sapiens
gcactccaacctgggcaactgagggagaccttgtcttaaaaaaaaaaaatcagttggtcagggcttgacaaaacaattctgaatttagaagaaaaaatatscaagaacagctgaggaaattttgaaaaaagggagtgattgtcattttgctatatcagatattacaaagttagataataccaaatgttgcaaagtggggtg

SEQ ID NO: 4066 - DNA, 201 bp, Homo sapiens
agaaatgaactctgtagctcctgtcacagctcctcaggggctgctcataattccatcaactcagtctgaatttcaaatcttttcttgatctgtgggacacrgttggaggcagaggtgaaagctaaatggacaactgcctagggagacaatcccatcctccaatggtccagagctgtttcaataacatgagctcagggcacc

SEQ ID NO: 4067 - DNA, 201 bp, Homo sapiens
gaaaaactccacggcctccctgtgagaaatgaactctgtagctcctgtcacagctcctcaggggctgctcataattccatcaactcagtctgaatttcaartcttttcttgatctgtgggacacagttggaggcagaggtgaaagctaaatggacaactgcctagggagacaatcccatcctccaatggtccagagctgtt

SEQ ID NO: 4068 - DNA, 201 bp, Homo sapiens
gggggtgaacccaagtaggtgactggagttctgtgtttaaccaaattataataatcctgtccagcaacgcaagctctaaaagaaagggctataaaatagaytgcagataataaacatgtcagactttgtaccctatgactcatggctttcatcattattctaaatacgatcagaaggccatccaaatatttaatgctgttc

SEQ ID NO: 4069 - DNA, 201 bp, Homo sapiens
gaaagccccaaaagatctgtgtgagcccagataacagggaaatttgggagccatctgttcactcctaacctgtctgacttataaacaaattatacctctcrtttccattcctggagtctcagcttgatttgaatgggaatatcgcatagacgtctaccaagggcagttcttacctaaaagggagagctgtttggacatctg

SEQ ID NO: 4070 - DNA, 201 bp, Homo sapiens
attatcctatctgttcctgccaaggtgatccatgactctattgtaccaaatccaatggtcagtcctcagtcttcataacatacacatgctcatcacagcayaactcccttgaaacacactcttcttttagcttcaagaatatctctctttatcctaattttttcctatctttcaggttattcctccttggtctcctttatt

SEQ ID NO: 4071 - DNA, 201 bp, Homo sapiens
actgtgagttatcgatacattaatagctacagttcaaataataaactacccagaaactataacacgcaaggactatcttggatattaggatgcaagcctgyccggcctgcaggctgctcacagatttgctggggaaaaccatccacgtccccactgggaatgaacctgctgtgcagggaggtatgccctgcgctgaaatac

SEQ ID NO: 4072 - DNA, 201 bp, Homo sapiens
aggggtgctcatccacctagatgaaaggggcatactctgaaggagccaccacagctcaaccaatctttagtactcagtgtgcctgggggtgcctgacactyccacctctaaggaggaggctgtccctccatggcagcacctccagcagaagtacatgagcttgcctctggcctcatctcagcagcagccctgctgctgtct

SEQ ID NO: 4073 - DNA, 201 bp, Homo sapiens
gcccattggctcatttgttccaacccacttgaatgccaggatgccttccacttggtcttctgcaggtatagatacctcatctgtcctgggccctgtatgtscctgggctatccctgtcctgccctttgagatgccctcctctcctcactcatgggcagctctgaccactcactagccatggccatcccatagcgcaggggt

SEQ ID NO: 4074 - DNA, 201 bp, Homo sapiens
ttaaaaaataaacacacacacacaaaacagaaacctcaactcattttattttccgctgaagtttctgagcaggagattagatctgaccctatcaaatcaasgtcccctctgagccacaggactcccattttgtgtccaaacatgcaggggctcacacaaatgataaaaattcaaatgaagcagccaagcagctggatggga

SEQ ID NO: 4075 - DNA, 201 bp, Homo sapiens
tagagctattctggtctactgagtactgtaaatgtatatttagatgtaacaaaatatcagttggaaatatctttggaaagtaattactctgcaatatacgyggaatgtcttaaatgcttaaagcaattgcctcattttaaagacataacttacatagagaggcacaaatattaattaccaagcttgaaccttgcttgtaaa

SEQ ID NO: 4076 - DNA, 201 bp, Homo sapiens
gggcaccctccacaggcttgcttcccagggcctcctgaggtctctgttccccacattccagcgtagcactcctctgccaacccagccacagcttcaggtayagctagtgccactgctctagaaagtacaagttgacctttgtgacattcaagtggcatcaattttgcaggcatgaagaatacaagagatatgggggcatgg

SEQ ID NO: 4077 - DNA, 201 bp, Homo sapiens
tctagacttcccactttccatatctgtaaaaccctttcctaacagtgaaaaaccttgctcgcattatatactaaatacatttattatttgctactggtttwaaaaaaatggtgtttgaagttaaagaagttcccttctatttggttctcctagtgtaagaattttttcttacactaataaatgaatggatattagattttt

SEQ ID NO: 4078 - DNA, 201 bp, Homo sapiens
ttaacatgtttttttctttttaaagctcaaattgtccagatgtggccagcatgagtcctttaagttgactattgtatcgttttgacaagtccccatgatgytttgagcgctgctttatttttctgacaccaaataaccttccagattcattgtatactttttctgctccatttccccacttctcaaggaagcttagttccc

SEQ ID NO: 4079 - DNA, 201 bp, Homo sapiens
caaatccattaacatgtttttttctttttaaagctcaaattgtccagatgtggccagcatgagtcctttaagttgactattgtatcgttttgacaagtccscatgatgttttgagcgctgctttatttttctgacaccaaataaccttccagattcattgtatactttttctgctccatttccccacttctcaaggaagct

SEQ ID NO: 4080 - DNA, 201 bp, Homo sapiens
tgtcatctacgatttggcctcgaagtcctacagcatcacttccacaaaagtccccaggttcaagacgaggggacatagaccctgcctctcaacaagaggasggtcaaagacacattgtaagaagaatatgtgaaatggaagatactgttgtggctagctttgaaacatacaatatgccacaaatccattaacatgtttttt

SEQ ID NO: 4081 - DNA, 201 bp, Homo sapiens
atttttaaacacacacatacacacacacacacacacgcactcattcattctctctctctctctgttgattctgtttctgcagagaaccctaatacatactytttccaagaaaagccaaactcacaaatctcttcaagataaaccctaccatttcctgggctccctatgggacaatgctcttaagatgctagaagccctgtt

SEQ ID NO: 4082 - DNA, 201 bp, Homo sapiens
atggcctttagattcaaactgcaacccttccctgggtctccagcctgccagcttaccccatcagattctggatttgccaagcctccacaattgcaagagayaattccttaaaataaacacatttttaaacacacacatacacacacacacacacacgcactcattcattctctctctctctctgttgattctgtttctgca

SEQ ID NO: 4083 - DNA, 201 bp, Homo sapiens
tttaatcctaaagcgtatatttcctgaggtcaacacagcctcctacagtataactgtagaaatcagcattgttatgatgcttttacctaatccacagtccrtattcaatttttgtcaattatcccaataatgtctttatatctatttttttttcctagtccaggttcgaacccaggatcacagattgcatttagttgttat

SEQ ID NO: 4084 - DNA, 201 bp, Homo sapiens
gtgtggagtgtggatccctccacactggcagcagccaagcccctccacactgcatttgttccctaaaagaacatttttctaagcaggcctctcagctctgsggaatgaacagcgatggagtgagcaacaaattgtttcatttgctaagactgtgagctacaacttgcaataaatcagtgtgaaatgagaaagtagaaaggg

SEQ ID NO: 4085 - DNA, 201 bp, Homo sapiens
tctgtggtcaccttgtcagagagggacccacatcatgagtttcaggattattcttacccatgactcatgaggccttaagcgtcctacttctgccgtggaakatcccctggaaagactgagggccagagctgagtgtggagtgtggatccctccacactggcagcagccaagcccctccacactgcatttgttccctaaaag

SEQ ID NO: 4086 - DNA, 201 bp, Homo sapiens
gtcaacatgttcctttaaagcaattgttacaaggcacctctttggaagaatgtgctgaccccgtcccccagtggtatgagtgaggcatgaaaggggaggargtgagatgtctggggccctgactttggccctaatctctgtggtcaccttgtcagagagggacccacatcatgagtttcaggattattcttacccatgact

SEQ ID NO: 4087 - DNA, 201 bp, Homo sapiens
ttccatcgaaatcttagcaaccttcttgtcaacatgttcctttaaagcaattgttacaaggcacctctttggaagaatgtgctgaccccgtcccccagtgstatgagtgaggcatgaaaggggaggaagtgagatgtctggggccctgactttggccctaatctctgtggtcaccttgtcagagagggacccacatcatga

SEQ ID NO: 4088 - DNA, 201 bp, Homo sapiens
gggccagactcacatctagaaggtgggactgaagatgaggctcggccctggatagggccgatattcttctttgccgggagagcgaatgcagaaaaggatgkgctcagacacacggactgacccctccttgtgtctcactggctgatcattgatgggatgctctcttcacacggtttctttcaacatctttccatcgaaatc

SEQ ID NO: 4089 - DNA, 201 bp, Homo sapiens
agactcagactcacacaggccctgagtgggctctccgtggtctttccctctaacacccacagactctgatatgggatcttgccccagtgccaaatgctgcrcaagcctggaccacagtaggctgtgcccagactggacatgggccagactcacatctagaaggtgggactgaagatgaggctcggccctggatagggccga

SEQ ID NO: 4090 - DNA, 201 bp, Homo sapiens
ctgggccagagactcagactcacacaggccctgagtgggctctccgtggtctttccctctaacacccacagactctgatatgggatcttgccccagtgccmaatgctgcgcaagcctggaccacagtaggctgtgcccagactggacatgggccagactcacatctagaaggtgggactgaagatgaggctcggccctgga

SEQ ID NO: 4091 - DNA, 201 bp, Homo sapiens
gattgtggtgaggaagaagataagacacaggcataatatcttgcatgtgtcctggagaacatatgagtttagctagaaagagaacctcatctcctccagcyagaaattgctgtgtggctgtgccacttttaggtggacctatggccagggaccctgccccgacaacagggacccttcaccatggagccccaagataaacaa

SEQ ID NO: 4092 - DNA, 201 bp, Homo sapiens
aggtgccttgaagacaaagacaagtaaataagcttaaatgaagcaaatctagtttctgccttcaaggagattgtggtgaggaagaagataagacacaggcrtaatatcttgcatgtgtcctggagaacatatgagtttagctagaaagagaacctcatctcctccagctagaaattgctgtgtggctgtgccacttttagg

SEQ ID NO: 4093 - DNA, 201 bp, Homo sapiens
cctcagtcacgtgacatgcattgtgtgctcaacactagcctaggtgccttgaagacaaagacaagtaaataagcttaaatgaagcaaatctagtttctgcyttcaaggagattgtggtgaggaagaagataagacacaggcataatatcttgcatgtgtcctggagaacatatgagtttagctagaaagagaacctcatct

SEQ ID NO: 4094 - DNA, 201 bp, Homo sapiens
aaaacagttcagggaaaactagcaaatcagcatcttctgaagctgcagcatgagccaagagcactgcggccctggatagcaccgttaggagccgcagaaaygcctccccactcatgctggaattcaaggttacagcaggttaaaaacaccttgctggactccaggtgcccacctcagcaccttcgctgcctgctcagggac

SEQ ID NO: 4095 - DNA, 201 bp, Homo sapiens
ataattagacaacactgcctccctggtgcctgatcaaggagctaaaagatccccaacccagacagggcatttctggttctaaaccctctcctaaacagagrctcagcaaatggtaaagttctgcttcgttgaagactcacccttcagagttgctggttcagaactctgttgaatggttttttgtatattgctattcatctg

SEQ ID NO: 4096 - DNA, 201 bp, Homo sapiens
gtcagcccaggaacctaccaagctagcaccaggcctggtacattgcaggctcccaatgctttcttgagcacacactgacataatgcttactatgcaccaayctctgttttaagattttcataaattttaatttattgaattctcctaactttatgaggtatgattattatcatctccattttatagatgaggataattaga

SEQ ID NO: 4097 - DNA, 201 bp, Homo sapiens
agcattcatcacaaggtattttattcaggtgtctccttctctgtcttccctatgagacaaaaaccaacccagacacaaacagtcagcccaggaacctaccragctagcaccaggcctggtacattgcaggctcccaatgctttcttgagcacacactgacataatgcttactatgcaccaacctctgttttaagattttca

SEQ ID NO: 4098 - DNA, 201 bp, Homo sapiens
ccacaggcatgggggagcctccatgctcttgctccggctgcctgggatgctgatccccagggtaatcttggaagccattgtcagcctggatccacgaatgrccatgtggaagacagctgccttgacaatctgaacacctgctcagaattgttcctggagcaagaagtaaatgtccattgtgtgaagccactgaaatcatgg

SEQ ID NO: 4099 - DNA, 201 bp, Homo sapiens
atggcagtgagcagtgccacctccaggtctggcccatgagaacgtcccacaggcatgggggagcctccatgctcttgctccggctgcctgggatgctgatycccagggtaatcttggaagccattgtcagcctggatccacgaatggccatgtggaagacagctgccttgacaatctgaacacctgctcagaattgttcct

SEQ ID NO: 4100 - DNA, 201 bp, Homo sapiens
taagtctcctccatgagaatgtgcatggcagtgagcagtgccacctccaggtctggcccatgagaacgtcccacaggcatgggggagcctccatgctcttkctccggctgcctgggatgctgatccccagggtaatcttggaagccattgtcagcctggatccacgaatggccatgtggaagacagctgccttgacaatct

SEQ ID NO: 4101 - DNA, 201 bp, Homo sapiens
ccgtgtaagtcagcatggcagggataccacctcatattttagaaataaacaaattgagatgtctagtaaaacctgttcttgtttggacacagagctgttcrctatctccagcctctcttgccattagatgtggccatgtgattaagtctcctccatgagaatgtgcatggcagtgagcagtgccacctccaggtctggccc

SEQ ID NO: 4102 - DNA, 201 bp, Homo sapiens
tgcaagctctcatgctacatgtcacgctgaactgtgattcctcctccctgagcttgtcatgggatgactacatccctagcacccagggcagagcctggcaygctcctctgtgaacactttttgaattgagttgtgctgctgagacaccagcagaacccctgccccactcttctgcaggccaaggccactgttcccagccaa

SEQ ID NO: 4103 - DNA, 201 bp, Homo sapiens
ttcgacaccacatgcaagctctcatgctacatgtcacgctgaactgtgattcctcctccctgagcttgtcatgggatgactacatccctagcacccagggmagagcctggcacgctcctctgtgaacactttttgaattgagttgtgctgctgagacaccagcagaacccctgccccactcttctgcaggccaaggccact

SEQ ID NO: 4104 - DNA, 201 bp, Homo sapiens
cacatggcagccttggccttgcttggcttcccacccccaaggaacactgggcactcacctgcaagttattaagacacaaatcttattaatttagctcctcyaagccagatgcctatgttgggaaggagggtgaacctggtcatcagggttagcccaagcaccacagaataaccttgataagtgttatcatttcagggattt

SEQ ID NO: 4105 - DNA, 201 bp, Homo sapiens
aatgcaggcctgaactgatcctataagaattataaactgaacagctgagggaactcagagtagcaagagtcattcacattatagaaatattctccccttcyctccattgcacttttccttatttggaaacatgaaggtgaaggtgcaaaagacacatcacacacagactgagctatggagtgataaccagcagggtgcctg

SEQ ID NO: 4106 - DNA, 201 bp, Homo sapiens
gctagccagtgtctgttctctcagcctctcagttgtgatctcttttgctctgagatgtgcacgtgtacacacacacacacacacacacacacacacccatragtgcattcactgcataactgaccgatgttataagcattccagacataaaatgctgttaaacagccaagcatcatccctggaaatgcaggcctgaactga

SEQ ID NO: 4107 - DNA, 201 bp, Homo sapiens
caggcagggctagccagtgtctgttctctcagcctctcagttgtgatctcttttgctctgagatgtgcacgtgtacacacacacacacacacacacacacmcacccataagtgcattcactgcataactgaccgatgttataagcattccagacataaaatgctgttaaacagccaagcatcatccctggaaatgcaggcc

SEQ ID NO: 4108 - DNA, 201 bp, Homo sapiens
attcacaaatagggaaagcccaaatgtacagccagaacgaaggggacttgctgggttagggtgcgactcctattggagaggtagggtaaggatcccccacrgatggtcttgaaatttgggcagaaaaaaagtgagggttcctaatgacccctggaggccatttagatctccacgtggattagcttatcacacacactccaa

SEQ ID NO: 4109 - DNA, 201 bp, Homo sapiens
aggtcagcgtgtctggagcatgggaagctggagagagagatggacgggcttgaacggagacaggcaggcagaggtgagatcacacaagcccttggaggcckgggaagaaattggattttatcctaagcctaatgggagatcactgacaatttaggaagataaatcattttcatgactgtgggttttccaaggtctgacatg

SEQ ID NO: 4110 - DNA, 201 bp, Homo sapiens
gttccagaagaaaaaatggtaagaaatcgatactacacttacccaaataaacatttggataatgaagacaaaggacaagtggttctagcattttagccagmaaaccacaaaacaatttattttttaaacaaaggaaacaaaccaggcctcccttagacttttattctggaatacaaaatactggaagataatggaccaatg

SEQ ID NO: 4111 - DNA, 201 bp, Homo sapiens
tagaaatgatcacagatcatgcttactcccagattccaagggaaagaacccacaaagttgcactagaagcaaagatgagttggttagaaacggagatatgmtggtaaatgttaaacaaccagcactccaggaagagggaaaaataaatttaaaaccttgattagtagaatttgacaatttccatgtgtgattgctcctaac

SEQ ID NO: 4112 - DNA, 201 bp, Homo sapiens
agttctactctcacacagcactgaattctttcgattgattttaactttgtaagtccctaagcagagaacctcattaagccctcatgaggactcctaatctmcagaaactttaagacaataaatttgtgttaagttgctatgtttgtggtaatttgttacagcagcaatagaaaacttatacagagactgaggaggttcact

SEQ ID NO: 4113 - DNA, 201 bp, Homo sapiens
taaaataaaataaaataaaataaaataaaataaaataaaaataaataaataaaaacatgagtcttgaaacaaaaagttcaatactcagatcagatgataargccaagagaattttccagaatatagaataaaatatatagaacagacactttaagagaaaagtaacagaaaatattgatacaggaggtctcacatgcaatt

SEQ ID NO: 4114 - DNA, 201 bp, Homo sapiens
tttctttcgcctgctgagactcaattacaatgtctttaaaagagtaaattacaacagtaaagatagtggaagaggcacccttggtgagcaagggatttaartacatttccagaacattcactggcgcacaggacagaggacacctcagtccacagcccacagcccagaacatatgcagaagaggcagccgccgtacaggga

SEQ ID NO: 4115 - DNA, 201 bp, Homo sapiens
gatttcctcctctttattccttcatctacccaggctcctcttcttggtacttcctagccttcctgctttagaaaaaggacaaactcatcctatgaaaatgmtgggcaattatcttgagaggtatttttatttcccaagaaaataataggcaaggaaacgctgaacccataagaatgaatgagagcatttctggcatagtaa

SEQ ID NO: 4116 - DNA, 201 bp, Homo sapiens
tatccaagtacacacaccataccttcttcaaagcaacaacaggtatcctgtatatcttaataagtttaataaatgtgagcaaagcacaataagtcaaatckggtgatttttaaagaatacttctgaagattccatttatcagaaaattgttacctctaaatacacctgcagaaatatcattcttgttccatatggaccacc

SEQ ID NO: 4117 - DNA, 201 bp, Homo sapiens
atgctactgacactactgagtaaccccagtcaatgccacctgaagcagaaaaatcacccagctgagccctgtcttaattccttattcacacaatcatgaamtaaaatacaatggtagttgttttaagctgctagggtttgggggtaatttgttacacatcagtaaataacctgaataccacacaaaacaaaacgcattggc

SEQ ID NO: 4118 - DNA, 201 bp, Homo sapiens
tagacacacactgcatactatgagtatttgagacgtgagctgtaaataaatgctcataattagtacttgagaaagattggacagccataagatatacaaascacttggaaaatgtgaggtgcaatttttccttgtccaagcaattttcaaactctagatagaaagctgcttgggtgtggaatgtaagttgaaagtgagact

SEQ ID NO: 4119 - DNA, 201 bp, Homo sapiens
tcactccacctcaagatgtaactcaattagaggataaagtcccttctctcctatttcaggttaattgggtctgtgccagagttcacatattcttgttttcrcatctctattgattaatgggcaaatcattggtaatagacacacactgcatactatgagtatttgagacgtgagctgtaaataaatgctcataattagtac

SEQ ID NO: 4120 - DNA, 201 bp, Homo sapiens
ggctactgccttctccagacctcccaagcccaggaaactgttggtaagtgaaagggtgagtgagtgtgtgttgcgggggtgggagttctacacaacacagscggctctcctcatgagtgcttccagcaattagtgcacgcaatggcggggggaagggcgggaatggcgggggcgataggggtaaaaatgcagattcctgga

SEQ ID NO: 4121 - DNA, 201 bp, Homo sapiens
aggacttgatgtagattttgttacagatttttgacaacactttattataaagtttttagtttgtaaatctttttaacattaagatttcttcaaagtgaccyaaaaaaaaaggtaccttagctaagtccgaggtttgtcttaagagctgctctcaagctgtttgaatggcctgtcccagcctggtcttgtctcccagcagga

SEQ ID NO: 4122 - DNA, 201 bp, Homo sapiens
tgatcaagaagaaaaaagatggatattataaattaccgatatcaggagtgaaagaaagagtatttctatagctattacagacatcagaaattattaggtgrtattagaaattttacaccaataatttgacaaattagataaaatgaaaaattctgtaaaaagcataattcatgaaacaggtcaatatgctcacggattaga

SEQ ID NO: 4123 - DNA, 201 bp, Homo sapiens
ttgccaccctctttttcccttattcccaagttttggataattttctcaataccacccaaatccctgcagtaaccaacgtcacctgagggagctgccaaggwctctcatctctttcttctgcctggggcatcttccttcagagcccccagcctcacaaaaagaccccagaaaggcaggaacgtgaggctccaagccacttaa

SEQ ID NO: 4124 - DNA, 201 bp, Homo sapiens
ccctgtctctcctgaccaggccttgggagctccctgctcccatctcagccagatgttctgcctaggcctgctcctgaaggctgtcagtgcccccagcacaygacctagcactgaattccacaacctcaccccaactcactatgaggcctcaatgaggtgatggcttggctctgaggaggcagtcactggaaagcccaaaac

SEQ ID NO: 4125 - DNA, 201 bp, Homo sapiens
ccaaggaaatgggggtttaagtgaatgtgtgtcaattccaggctctaccttggggttttactccctcttcacatccccttccccctcctgcacttcctccyggtcatctcagagcccagaccatggtgggctcagcagggtctgcccagataccccctgaagaggtggggagagacaccctctcacggaggaggtttgctc

SEQ ID NO: 4126 - DNA, 201 bp, Homo sapiens
ctcaccccagtttactcataggacagagatttcatgctgggagaagtgaactgagagaccagagtctaccatgacaaccaggctagaattacaactaaggktgtcattctaagagaactgggccattatgcccacaccaaactctggagcagtggcttggagattttggccatggggcgagacaggccattaaaatggaga

SEQ ID NO: 4127 - DNA, 201 bp, Homo sapiens
ataaacattgggtcccgcttttagaattatggcataacgaactctgtagacatgctcttcagagaaataaatataaatggtgaaatgatgattttgatttwaaaaaaaacacacacactccaaacccaaccggttaaagtatctggaaattttcctaagtacctatagcacatgaagaaacatttattcaagaaaatctac

SEQ ID NO: 4128 - DNA, 201 bp, Homo sapiens
tcaccccctttgccccgggtttggcaaaggcattccaaggatgcacctctgctgtcaattgtagattctgtttactattttatcaagaatcattcaccatyttggagaatcccatctctaaagcgacaacacttgaatattcaagttgtcaacataacagacgtgtaacaggttctgtttgcagctgttgtattcttaggg

SEQ ID NO: 4129 - DNA, 201 bp, Homo sapiens
agccttcatatgtaaaggcaaaaacctgggacctccagaaccccaccaaatcctgtgtgagctaaatgagaactcggggctctgaacatatggccgttacrtgtgcccccttctacatagactcagaacatctgctcctccatccacggggaagatctcccattggtttatttccaggctgcacttgtgatgacctttctc

SEQ ID NO: 4130 - DNA, 201 bp, Homo sapiens
tactgaaggaattatattcttgaatccccactcctaatccttcttctgagcctttctcttgccttgaagtagagccctttccttctctatctgtccaaatmtatcccaccttcattcttcaagatccagcctaagcccatcttcttccaggaagcccagatggttccacagcacctatcatcccaaccctgtggtttaaca

SEQ ID NO: 4131 - DNA, 201 bp, Homo sapiens
aggcaagatgttatctccacagatgtgggagggggctgcccagcactgtcccttctctcacgctgatccagccccaacctcagagagaccatctgcaaatytggaactccaagcacatcataaggagcaattctcacaagtccatgctcccaggtcagactgctgctaatcaaagtgttgcttcctctaattagagtgagt

SEQ ID NO: 4132 - DNA, 201 bp, Homo sapiens
atcactgaagatgtgtttcagaaactgagacacacctgggaaggaactgcctgccatgctgtcagtcattaacacacaggcagaagagactgctagatagkttccaagtgggggaggtgtgatttgcttggggcagaggtcagggtccagagaacaggaagaaggtcatgagacataggaggcaaaccctcctgacctcca

SEQ ID NO: 4133 - DNA, 201 bp, Homo sapiens
cacagcttcccccttgtgggctcctcactcagtgtcctcagctttgggagggtcctgacgtttctggatctcccccatgggaaccagaaaaggatgtgcaygtcgctgcccccagtgccttctaagagcacaaaggtccccacaagtcacacaggtggagggtctggcctgccagttgggcagggtgggctcctgtgctgt

SEQ ID NO: 4134 - DNA, 201 bp, Homo sapiens
agtttataagacagtgagcttcaaaatggcatcataaggtctaatatcttagtttcaagaccaaccattttttgtggcagaatccaagcatccaatgatawcagaatttcaataacctttgaggtgtttcctgaggctcacttgataacattactgtatacagtcctaaaagacaagaagtgagcaattcaaggtaatcaa

SEQ ID NO: 4135 - DNA, 201 bp, Homo sapiens
cagtttataagacagtgagcttcaaaatggcatcataaggtctaatatcttagtttcaagaccaaccattttttgtggcagaatccaagcatccaatgataacagaatttcaataacctttgaggtgtttcctgaggctcacttgataacattactgtatacagtcctaaaagacaagaagtgagcaattcaaggtaatca

SEQ ID NO: 4136 - DNA, 201 bp, Homo sapiens
atacattttcgacctatgatattttcaacttacagtgggtttatttggatgtaatcccgtcataagtcaaaatgcatctgtgtaggataaaggggggggggatataacaacatttcattatttcaataaattgtacctctcagaattgtttcctctgaattcagaattccattagtattctagggcacgttctgccactcc

SEQ ID NO: 4137 - DNA, 201 bp, Homo sapiens
acgtcccctctgagccacaggactcccattttgtgtccaaacatgcaggggctcacacaaatgataaaaattcaaatgaagcagccaagcagctggatgggaatgttgcttccagcaaaaagggagagcaaataactgctaaaattagtaaagcgaatagactgaaatatatttttaccccccacaacgcattgcccagac

SEQ ID NO: 4138 - DNA, 201 bp, Homo sapiens
aagtgcctgggagatgtggtaggattcccctagtaagtaacacaaggggaatacacacacacacacacacacacacacacacacacacacacacacacacmgagtgtgtgagtgtggatctaagcaaaagtcagacatctatgaatctgtgatccgggctctgagggtggcgcgtctagtatcagcttgcacaaattggaa

SEQ ID NO: 4139 - DNA, 201 bp, Homo sapiens
cacaggttagtgaaggaggtaaatttggaatccagatgtgacaagtccaggaccaatggtctttttgtatgtcacaatgcctctctaaacattagctaatrgagagaaattctcttcataatgacatttctgcctctcccacaatatctacccaatgccatgaacatcagacaataacctgcaaaggaaataaactttcaa

SEQ ID NO: 4140 - DNA, 201 bp, Homo sapiens
ggcttcccacaggacgtgagttgggctcagcggctggctctcataccccagaacacggcttctcctggcatttcccttgcacgtggtcctaggaattcccrccaagcccctgtgtgagtgcatgtgaaggaagcagcagaggatgagggacaggccggtggagacctctcagacaggaacccttccccctctctgtctggt

SEQ ID NO: 4141 - DNA, 201 bp, Homo sapiens
gttgagtcagcccactggcctcctggggtgtgccatcatgattcatcacagtggtgccacagctaggcctgaggcccacctgtgaatcaaaaaaaaaaaaagaaagtgtgaagtagcaaactcatcatttgagactctcatgcttcctgagatgagatgattcccattaaaaaaaaccttcattttcagaaaatccatgtt

SEQ ID NO: 4142 - DNA, 201 bp, Homo sapiens
aattgcttgaacctgagaggcagaggctgcagtgagccgagattgtgccattgcactccagactgggcaacagagcaagactcggtctcaaaaaaaaaaaagaaaagaaaagtgggatgataattgtgtcaggtaggaggacgggtatggggattgggtgcaggcaggaaggagggcgtctgaggtgctggcggcactgta

SEQ ID NO: 4143 - DNA, 201 bp, Homo sapiens
ccacccacacgatgggggattgtcaaatggctccaaccaaaaggtactctccctagaggctggtggcagccctacaagtcctggtcatgttgtccgcacccaggcccacatagagtggctaagccctcgctaagggtgagcacaccatgactacacagctggcagccccgaatcccactgcctgagcctgagcactcccag

SEQ ID NO: 4144 - DNA, 201 bp, Homo sapiens
aagaatggcgtgaacccgggaggcagagcttgtagtaagcccagattgcgccactgcactccagcctgggagacagagtaaggctctgtctcaaaaaaaamcaaaaacaaaacaaaacaaaaaaaataaataaaaaataaaacacacaaggattggcataatagagaaaacaatatccaactatatgctgcctacaagaga

SEQ ID NO: 4145 - DNA, 201 bp, Homo sapiens
ggccaatttcctttctttgaaagggacaacataatttttatcatgaccctgttttccaactcaccagtatagaatcataaataatgtgaaaatctaaatcwatctatctatctatctatctatctatctatctatctatctaattttaaaggtgaactgctaccttagggagcttccattctttcttttcctcttcttttc

SEQ ID NO: 4146 - DNA, 201 bp, Homo sapiens
aagaatcgcttgaacccggaaggcggtggttccagggtgccgagatcgtgccactgcactctagcctgggcaacaagagaaaaactctgtcttaaaaaaamaaaaaaaaaaggaatttcaagatgtcgacagcagagcattaaagcaagcatgggccccttctgagtgtggacccctgtgtgactacacatgtctcaagcc

SEQ ID NO: 4147 - DNA, 201 bp, Homo sapiens
gggatgagctgatgcttatgacctcacaaccggcacggagcctgcaccgtgtatgaatggtaacaacactggcaacaacacttgtgatggttcaacccaasagccattacctgtgacttttgagatgccctgtccctgtttctgcccgttcctgtctcctggccctcaggatcataaaggacagtgaggaagacagttatg

SEQ ID NO: 4148 - DNA, 201 bp, Homo sapiens
taaaggacagtgaggaagacagttatgagatgaagggtgggtgacattgttgaggcaggatgtgccgactaggtttggggacagtcacttcaccctccgaktggccgctgtgcaggctgggtggtcagagaagcagagggctgaggcccagaatgggtttgcatgttctgtttctgcagaaagtgaggcagcaccccatcc

SEQ ID NO: 4149 - DNA, 201 bp, Homo sapiens
gtgccattggggaagttagagaggaggaagactcagaaaacatcaacaaggctcccctcacttctggaccctctgttatgtgaactccctcttggatgcakgtttaatcttaggctggaaaaggcgctccagactcttgcagcacacacatctgaccctgtcactcccccatcaaacatctgcgcttccccactgcccaca

SEQ ID NO: 4150 - DNA, 201 bp, Homo sapiens
cagttgttagtggttacttcgcctccctggaggctgcggacagtgtctttgttctctactctggtacggagcttgtgactctcaggcacttagcaagtgartcaacccaaatgatgactccccatgtacgccacctggatgggccacacacgattgggtgactcataagtgcttctgagagcaacattactcgctgcaaaa

SEQ ID NO: 4151 - DNA, 201 bp, Homo sapiens
tccggtcctctgctggctgggataactggctgctgcatcctccctgagttattcccagccatttgcatgtagaagatgtgcactttgcgcaggaaaaactmgtgcaaaattagaatgtgtgaatactgatagaaccatcgtagttctgctcctgtcagctacatgaatattaaccaaacagcaaatatttggatcacttaa

SEQ ID NO: 4152 - DNA, 201 bp, Homo sapiens
tggatttaatttgtgtcaatattccccagctcctttcacagttctgaagggatttatggctactgagccctctccttccaccctcactccccgttatttcstggtcaacaagcctccccctggcgggtcctccttccttgctaaatggaaagagtaggactaagtggcttcccagggtgacttccagggagagtaaaaaat

SEQ ID NO: 4153 - DNA, 201 bp, Homo sapiens
ctccttccaccctcactccccgttatttcctggtcaacaagcctccccctggcgggtcctccttccttgctaaatggaaagagtaggactaagtggcttcycagggtgacttccagggagagtaaaaaatgagacagcatcatgtgctaggccccgagtgagcagggcaggccacctggcccccaggcctggctctgctgc

SEQ ID NO: 4154 - DNA, 201 bp, Homo sapiens
gagggccccctcccttccccctatctgcatcacaactgcatcgggaagcctgggcatcgtgcgtgatcagggcagatagccgcagtcatacagtgaagacrgtaagaatcgtcagaactgaaacctgatttaggctactacagtcttgcctccaccctgcgccttctctggagagtgatgggggcagctttcacagggagg

SEQ ID NO: 4155 - DNA, 201 bp, Homo sapiens
cccaacatggctgctgactattttcaaggtcctgaccttggcagcttctacagacggattaggaagttgtgggcagaacggctttgtgctgtcctgaaacracactctggtttaatgagctccttgtacacgcagggcaattgtcagtgaaatctgcccattaaaatgcatgtggtttggaaggaggcttggccctctccc

SEQ ID NO: 4156 - DNA, 201 bp, Homo sapiens
aggtggagggtctggcctgccagttgggcagggtgggctcctgtgctgtgtctccacacgtggagtcttcccaatcccatgtctcaggaccacttttcccrggaggaggaacggtagtaggaaaaactgggtgatgattcaacaggttctggggataggggaagaaaagggaggagatggggtctgggaggaggaggtgca

SEQ ID NO: 4157 - DNA, 201 bp, Homo sapiens
acactttgtcccattaaattaatgttgttaatttgaagtttattggttttgcagtttgcttttatttcatttataaatttgttttagctttatggctgtgrgagagctccctgcataaggaacgtgtacctggttttatgtttgtacatatttaagtaacattatactaaatataactcaagtcaacagagagcaatcaca

SEQ ID NO: 4158 - DNA, 201 bp, Homo sapiens
cctgcccgggcagtctcctccctctacatccttgccattatcctcttcctcttcccactcaacctgtgcagacacagcccctggcatgtgctgctctggamccactccttggactctgccttggacactcgctctttttcttaagtccttgggcaaccctcctggagaagattcaggcatccaagatttggatgaaccccc

SEQ ID NO: 4159 - DNA, 201 bp, Homo sapiens
gcgagactccatctcaaaaaaaaaaaaaaaaatgctttgtaggtgactattctaccgaggaggtgaacactattgctgggagtctgtgaatgacagctgcrtgcacatctcttaaatcagcagtggctcaggatgctacctgggtgctggcctatgatggaggccgcagttgggtcatttcatttcctaagatgcaggcat

SEQ ID NO: 4160 - DNA, 201 bp, Homo sapiens
gagtggccaagatcaagaattcagcctcagaacaaaccttcggcagccaatctgttaggcagctgcccaggtgcagcaccagcagggtgtggcccctcgcmaaagcagcctgatgattaattactgtgtcttgccatccaggactgtgaggaggagagtgaataaacaacagggaattttatgtacccatgatgagcagga

SEQ ID NO: 4161 - DNA, 201 bp, Homo sapiens
gccctgtggcgaactctcggaatggtcttcactgttcagctccttctctcccaaccgccaccccacgcaagggccacaagagcctcccagaatcatctttstttttgtgcccttttctgttcccacttttgcatctgtgttcaggtcttctacagtctctggagtttcctagtcctcactcttccctgtgggtgtctacag

SEQ ID NO: 4162 - DNA, 201 bp, Homo sapiens
ctcaacacaaggtgggtgtgaggattggctgagatagcatgtgtggaagtctggtatggggccaggcactattagttccaaaggatagtggtgtggtaaaygaaactgcaccatcccttcactttgcaacagagatggtgaaaaaacagatgtaaattcaccaggtgaccatatcatctgtttcatagagttgccctggct

SEQ ID NO: 4163 - DNA, 201 bp, Homo sapiens
tgcttgcttctctcctcttatgtcatccaagtacctctctatttgccacaagagcccttcttgccaacaaatcacaaggatccctcttcaggccttgtgarggtgtggaatagcaacagcccaaagagatgtcactctgaagcaggaatactttgctggaaaacgggagtccaggtaaaggctggggttgagggaggatac

SEQ ID NO: 4164 - DNA, 201 bp, Homo sapiens
tggaatgggaaattcttccagcggaatatatagcggcagccccacagaggctttaggaaagctacccccaattccattttgtaatcactggtttttgcctyaatcctaccttaaaggctgcttttgaatacttggcctcctagattagggagttttagttaacaggactaataagccctgcttatgttaattaggcaccct

SEQ ID NO: 4165 - DNA, 201 bp, Homo sapiens
tgtacccccagcacctggcccagcatccacacatagaaggggctcattcagtgtctgttaccggtatgactgtggaagacaggtggcaggtgggcttggaragtggctacggccctgccctgaagaggagacaatcccagccaccctgcaccatggtgacgggtctggatctctgaagggggctagtgcctgtgtcaccca

SEQ ID NO: 4166 - DNA, 201 bp, Homo sapiens
cagctgagcgccctgtgcttgaaacagccacccaggtaaggaggcctgtggatgaatttggctatggcatagcttcaggaaagaccctgttttttgccccrgctctgatcagtaaatgaacagagccgaccctgtggaccatctgtgttcttggggacagctttatacacaggcagaatgtggggtcaaggtgggtggggg

SEQ ID NO: 4167 - DNA, 201 bp, Homo sapiens
tgagcttgagctactgtggcctttgagtggccactagactgagtggtgggcacatccatagagacacggccgggtctgaggctgtcgcttcctccgcgagygatcaagatgagggttactggctccagactgaggctgatgggtcaggcaaagggagcacttagctcccacatggactcatcgcacatgcaaggagtctct

SEQ ID NO: 4168 - DNA, 201 bp, Homo sapiens
tatatgtcatatttgatgacatgtatccatttcaagataataaaggggggctttacaaaagatttgctataaaaaggtggctttaggtctgacagggggtraagacaagtgatttacaagagcaacccaaatctgtggccttacttcttttcacactcccaggtactgtgatttttaaagaacagcgggaacagtgtggga

SEQ ID NO: 4169 - DNA, 201 bp, Homo sapiens
acgtctgggctggtcatctatctcatccagggctgagaaatgtagggaacacaaagatgggatttccaggtcttttaactgacaggaatgacctgtagccrattcccagagcaaggtaccctttggagcaagcagagtcacacccagcgagggcatctccacgtcaggcagaggctgacctgcactgcgcagggcctcctg

SEQ ID NO: 4170 - DNA, 201 bp, Homo sapiens
gcagccgagttccaaactgataaagcatctgaatccattaccatgacgacaagttcctaggtgattgcttcaagttctacatgcagcttccagtcacagtyggcgagggtcctgccacgctcactgggtcgttctcttccacactcacatgaagcttttctttacctcatggcctctgctctcttccctgtttcccctcta

SEQ ID NO: 4171 - DNA, 201 bp, Homo sapiens
tggcagagataggcaacccatagcttaccctgctctgtgaattcatgagcatgtgaattactaccgggacttactgtaactctagatcccagattgaacayagaccaaataggcacaaggtgaagagctccaaaccataaccacgggacagcagccctcatcattttgaggccctggaactgtccctgacccttgccgcat

SEQ ID NO: 4172 - DNA, 201 bp, Homo sapiens
ctccctgacttgccctgttatgtctccagcctcatccttccccactcacacacccgttctggcgaccctgcgccacctcagttccttaaacatgcctaccrtcaccttggggctacaacaccacagctagaatcttgcccccgcccctttccaagcctcttcagatcggtggggctgtgcagagggctggcttgcagcatc

SEQ ID NO: 4173 - DNA, 201 bp, Homo sapiens
cccatttctttgaagcttaattgatgggaaaacttctggccctagagaacttaaaggcctatcgtacagatatttgattaagtgtcctcatatcacagacyaagctaaactggaaatcattatgcaataattggaaatacactaataaaatgaggatgtgggtttgctcaggacataaaaaggaataaaataattcactca

SEQ ID NO: 4174 - DNA, 201 bp, Homo sapiens
aattgatgggaaaacttctggccctagagaacttaaaggcctatcgtacagatatttgattaagtgtcctcatatcacagaccaagctaaactggaaatcrttatgcaataattggaaatacactaataaaatgaggatgtgggtttgctcaggacataaaaaggaataaaataattcactcagataactcaacaaaaatg

SEQ ID NO: 4175 - DNA, 201 bp, Homo sapiens
aacttctggccctagagaacttaaaggcctatcgtacagatatttgattaagtgtcctcatatcacagaccaagctaaactggaaatcattatgcaataaytggaaatacactaataaaatgaggatgtgggtttgctcaggacataaaaaggaataaaataattcactcagataactcaacaaaaatgagcaggctgccc

SEQ ID NO: 4176 - DNA, 201 bp, Homo sapiens
tgcaataattggaaatacactaataaaatgaggatgtgggtttgctcaggacataaaaaggaataaaataattcactcagataactcaacaaaaatgagcrggctgcccccgagacagctagaagagagcctcctgagacagtgcctggccctctattgtcaaaagcttttagggtaagtggatgcatagctaggcttcaa

SEQ ID NO: 4177 - DNA, 201 bp, Homo sapiens
acgtggaatacagaggacttttcaaaacactgcggcatccttctgaaccctggggcttgagaatcttaggtcttccaaaaccacacatatcagaaatacaygttttggtcaaactgcttagcgcagttgaaagaagactctgaccttataattgaaaaaaagttttttatagccgggggctgtggtttggtgatgtttggt

SEQ ID NO: 4178 - DNA, 201 bp, Homo sapiens
ttttacctcattacattctgtaactataagtaataagtgtaagtttctattcattgactctaaaagtgaaaatgaataaagaacattatcaacattctgawgatgtaaccctcatccatggcagaaagatacagtgaacctcacggcaggggagatgtcagcccaggtgactcacctgtgctgtttgaaggagattatttt

SEQ ID NO: 4179 - DNA, 201 bp, Homo sapiens
gtgatccacccaccttggatttccaaagtgctgcgattataggcatgagccactgagctcagccttgactttcaatcccttgaggtcagatgaacaccacrtattttccttttcttagtcctcaagaggaccttgaataagacaatgattaataaaaacaaaaacaaacaaaacctcccttactattcattaatggcccac

SEQ ID NO: 4180 - DNA, 201 bp, Homo sapiens
gagaaactgcctggaaaatgcagctcttataagaccaggtttaaaatctacccgcctgaaccagcagaactagggtactcctgcatggaggccaattaaawcagctaagtcatcaccatcttttcaataactgccacttagagtcctgacaccagggcttgtgtggtttctaatcgtattcagtgagatctcagaatagtt

SEQ ID NO: 4181 - DNA, 201 bp, Homo sapiens
tcaataactgccacttagagtcctgacaccagggcttgtgtggtttctaatcgtattcagtgagatctcagaatagttctctcaagtacacagaccccgtstcctcgtgaaaataaataaaacacatcttgtgacaacttcagtcctctttgcagagggaaggctgggatatggacccctgcctatgtgtgagacccacaa

SEQ ID NO: 4182 - DNA, 201 bp, Homo sapiens
gcagcaggccctctcttgctctgcctgagctccaatctttcctcttttcatccttatctgcccaaggatctcagggctccctggagcatcagaccagcacrtcttggccaaaacgcataggtatctctttcagagtcttctgctcttgcttccaaatgtccctttttaccccaaaaatttccctaaaaattttgagactgg

SEQ ID NO: 4183 - DNA, 201 bp, Homo sapiens
aataattcccttctcactgaacagggcagcctggctaaggcaggacacgcctgacattccagcatcagcaggcgattgacaactcagaaatatggaaccargagtgcccatggggtcaacagtttccaacactgctcagcaagggacatgttcaaagtgcatcttgagctaggctctgtttctgaaagtccaggtctccag

SEQ ID NO: 4184 - DNA, 201 bp, Homo sapiens
aagcacccaaatccacctgcaaccgcccgcaggctgaggaagctgaaggggccccttaaaacagaacctctaacagtcccctttcttccataatttcatgrtttgtttggaaaactgcccaactatgacattgtatcatctggtataatacaacgctggcttggtgagtgattgctgaaagggaagctcatcttcgtgaac

SEQ ID NO: 4185 - DNA, 201 bp, Homo sapiens
caatttgaaggatattggaaaccagagaatggaacatcagtctataaaattcaacacggccaataaagctggagcaactggtcaagtgttttagtgtgcayggttgcagaggaactggcggcacgtggctgggcagtgcttccagaatggggacgtttttcctaggctcattttggcctcatttccataatgtgtctcatg

SEQ ID NO: 4186 - DNA, 201 bp, Homo sapiens
cataaaacctcccatcagagccgcacacaggcacgtagctgggcctgcatgcctccaggcactggcattcgggctcccctgtcttcctgctgagcacgcaycggctccctcggctgcagaacttcttcccgcaggaggccagcagctcgttgtggctggaaagccctgccagacacacaaacacagagggtcagctgtaaa

SEQ ID NO: 4187 - DNA, 201 bp, Homo sapiens
tgcatgttaaaagcaagtttaaactctcctgccaccaggaatttaaacaataaagagaagcctattaatgggatacaatggaggaaaaaaatggacacatytgttaccaataacctatgcacctctcttccacctccaaacccaacttagaagcccttagcatcagtactttctttcttcgatatgtagatgtggctggct

SEQ ID NO: 4188 - DNA, 201 bp, Homo sapiens
ccacacagaaccctttggggttgtgagagggaggctggcatgacactgtcagctgaaagctagcaaggccaaggtaaaccatggccaaatagtctaacacrcgcgggcctctgaaaggcaggagctgtggctggggttggggcctggagacaagcccgtggtttgggacccaataaagcaaccaggagtgatctccatgtg

SEQ ID NO: 4189 - DNA, 201 bp, Homo sapiens
cttcagaaatgtgaaagggcttttgtgttggcagcccctgtacaagtggctttggaatagccacttaccagctggctttgaaagaattctttttgctaagrgctttacttaggttcctcaccaaacacaaatactagtctttcctccatctccatgcccaaggaaaaaacagcccatgatgcaaacccacagcaagcaaga

SEQ ID NO: 4190 - DNA, 201 bp, Homo sapiens
aaaataaattgaataaaaactccaaaaaattagaaaagacggggacactctaccctccctataaggatccaatgggacaatgtttgtgacaggacctaacmccgaatgcaagggagaaaggcagatgtggaccccaggcgaagttgaccctgctggtcataccacccccgcatgcagtaggcagatggggagggactcaca

SEQ ID NO: 4191 - DNA, 201 bp, Homo sapiens
gggggattgatttctctgaggaacaggagaaagggacataattgcagcaggcgttccctctcctgttctgtccttcattttctttaaaactagcttaatcmtcaaccacatctgaaagcgcatttgaggagataagttgaagaaaaacgtgtttccctatgaaaaatccatcacccgacacaagctactctcatctcttgt

SEQ ID NO: 4192 - DNA, 201 bp, Homo sapiens
tatccaactctttttttccagactcttctgttagaggttatattctatttcttttcttttacaggttacccttaaattttcaatatacattctgacttaaygcctaaagttttttaaggcctagtatcttctcaaataacacaagaagcataaaattctttagtactgaccatcatcaccatctcttgtttcatattttaa

SEQ ID NO: 4193 - DNA, 201 bp, Homo sapiens
atggggatgggtgggaatcatcttaaattgcaaggattctaaaatagccctttcctttgaggtcaggtctcatgtgtcaaatgcttggctttctatcttgraggtctgagctacctttgggagggtcaactatggataagctaagtactccccagcatattttgcagtaggtttgtttacaccagcattgccacaaacacg

SEQ ID NO: 4194 - DNA, 201 bp, Homo sapiens
ccctccttctacatccttcactgaggaagattctacaggacatgcatgcaggcccacactgggcaaggccattcctccctcctccaaagcccaaagcccasgcatcaccctgcctcgccacagcgtcactctttccctggggctgtaggcggcagaccgtgcttctcacctgtgtcctacccacctctctctctgccacat

SEQ ID NO: 4195 - DNA, 201 bp, Homo sapiens
gtccagtgaatttttccagtttgttttttaacaagagatttgacatagaataatgtgggtaattctttaaagaattttacacattagacttttatagtacwtgtccttcaattatactgctacatatcccaagcagtattttaggcacttgaatgtgtttttcaatctcttttcactctgcatcataaattatgtagtata

SEQ ID NO: 4196 - DNA, 201 bp, Homo sapiens
cctagcactgtgattttctaactacaatgagacattgatacttatcacacacagttattggacatactaaatgccatgatatttatgaggcctacggtaartgatcaatacactgtggctatttttattctcttcactatacagctggggagatgaagcaattcatgaaaccaagggggtagcctcattatcaagcactgg

SEQ ID NO: 4197 - DNA, 201 bp, Homo sapiens
tcgctgcctgctcagggacattcacaatggagcagttctcagggcccacgtgtaatcctcagtcacgtgacatgcattgtgtgctcaacactagcctaggygccttgaagacaaagacaagtaaataagcttaaatgaagcaaatctagtttctgccttcaaggagattgtggtgaggaagaagataagacacaggcataa

SEQ ID NO: 4198 - DNA, 201 bp, Homo sapiens
aataaatcagtgtgaaatgagaaagtagaaagggaaagatgatccttctccaattgccagtcaagctttagtttacagcaccacaggtttggtgatagggyggaaatcatcagactcctcgctcacagtcatattctcaaaggaaccatactgaaagcattccagtgagctcattcctggcatccatccccgtaggacaca

SEQ ID NO: 4199 - DNA, 201 bp, Homo sapiens
ccagccacagacaggccgggttggtgaggtagggtatggcgagggtgctgacaagacagggagaggaaggcaggcaaacaaagcaggggagcaaagatttracagcacaaggcaggccttactgccagggccaacccctgctctgaagatccaaaaatgcaactccataaaatgccccatgtttatacaaacttggctcac

SEQ ID NO: 4200 - DNA, 201 bp, Homo sapiens
catgagcatgttagcaggcgattctgctcctggccaccaaagcgtccctgatgaatcccctggctcacagacccagatacccaccttaaccaatctgttcygttttcccctcctgacagatatggccctattccaccctacacctagactctgagggttactcctccttaaatactctaatactctgcccacccagatcct

SEQ ID NO: 4201 - DNA, 201 bp, Homo sapiens
tgttagcaggcgattctgctcctggccaccaaagcgtccctgatgaatcccctggctcacagacccagatacccaccttaaccaatctgttccgttttccsctcctgacagatatggccctattccaccctacacctagactctgagggttactcctccttaaatactctaatactctgcccacccagatcctggtcttcc

SEQ ID NO: 4202 - DNA, 201 bp, Homo sapiens
ctccccaaagattaaggctggtaggtttgggattgcattacaattaagtaataatgaaagagaaatcatgtcttttgatcaaataatgcattaatcctacyctacactgagtaaccttattcactctctgggaatgttgactttttgaggtaatttttatttctcattccgcaggacaggaaacagggacaaagaaaaaga

SEQ ID NO: 4203 - DNA, 201 bp, Homo sapiens
gggcactcgcaatgcctgcacctctgctgatgccctctgccgccagcactgggcgaatgaggaaaatggagctgggggcagagctcctgtgagggccatcrgggagtccttgagcctctgtggcatggagataaggcaaagcttccagcctgggtcttccctcttcatctggcatccctgcttcccagcaggccagcagcc

SEQ ID NO: 4204 - DNA, 201 bp, Homo sapiens
cttctacagtctctggagtttcctagtcctcactcttccctgtgggtgtctacaggtcggtcctcctcaaactgactttgaccacaccctccatgcttccytggcttccttgacatgcccaaactctgtggcctgcatgtctttggcagagaatgctctgtgttcacctcaacctgcatccattccctcctgtggacacag

SEQ ID NO: 4205 - DNA, 201 bp, Homo sapiens
aggagccatcagctaaataagccaatcacactctcacctccatttttgtttttaccacgaatggtgctctgtgtttggtgaggataacactctggtaagartttcacaaggctggggtgagaaactctttcatttcttttggaggctcatggcacccagtataggctcaggtgcagagaggacactggagaataggtcctt

SEQ ID NO: 4206 - DNA, 201 bp, Homo sapiens
tggttctaaaaggggttccatgaatgttttcaaagatggatggagatgactgggtaggcctggaagctcctccagctcagccctcgtggttgagtgtgcaytgaagttttgacatgcagaggacatcctggagagccttggtggcccaggcccaggtctcactgaggaagtaaagtgaatccacacccagcagtaactggc

SEQ ID NO: 4207 - DNA, 201 bp, Homo sapiens
ggctgatttcagctaaggcttaaagctgacatcatcccttgtaaagcaaaatggaattcttcccaagtaacttaaccgtgagaacggccatttgcttccaracctacagggccctttcattgcttcattggcttctgcaggctctgcagacccaggtttcttgcctacctcatttcttaagatttactccttctggcctct

SEQ ID NO: 4208 - DNA, 201 bp, Homo sapiens
aaactttttatattgtccaattatgctcagtaaaaataaaaataagctcatagaagggctatgttttcaacgtccactttaatttcagacagttaagagcrgcaatgcattacccttcaaaaataataaataaagttccagagtaattgaaaagcctcttcgtctcttctgagatggcgcgtcccattctctgtcatgttt

SEQ ID NO: 4209 - DNA, 201 bp, Homo sapiens
cctcgaaattctgctctgagcaagaaacccattttagaaatgagttaaatgacccagagtcaggagaacatcagattaactttttctgagcccttgaagcygagagcaagtctgaaacatgattcccgacctcttctcgctctaataaacttttcaaggaggggtcgcattccgaccctgcagtgctggcttctttccaga

SEQ ID NO: 4210 - DNA, 201 bp, Homo sapiens
cgcctcttccccaacagcctcggctgctgcttgtccactcccagggacgggaagcccacttcatcaccgggaggcccattgcaaaggcagccccagctgtyggaaggctcaccattttatggtggaaactgcttccaggagagaggaattgaaatccatgacactgacaagcagggcatttgaaattggcctccctgtcac

SEQ ID NO: 4211 - DNA, 201 bp, Homo sapiens
ctgctctacccctgagtacagaagagcatgtggagaccaggggtctccactggggcctgacaacctgtctacttctatgagaagctcacagggtcagcaaytgccctatcaggtactctctgtgagaccaccactgccttaaggtacttcagtgttgccttcaaacaggctatggaaaagaaccatatacactgggagctc

SEQ ID NO: 4212 - DNA, 201 bp, Homo sapiens
atttgagacacagtcttgctctgtcgctctgtcaccaggctagagtgcagtggcatgatcttcctctttattcttataagagaaggataagaggagccatkcagacttccagcccagagctccagatgacactgccccctttcatcctcaccctagagatgtccctggttccctagccctctctaactcttggctacacag

SEQ ID NO: 4213 - DNA, 201 bp, Homo sapiens
acacttttgctgggcgaggagccaagacttaggtcaaatgcccaaaaggctatgtgagtccaaacaggtcaaaaaccataagtaatgtgctgaggacaatytgggccatagatttgtgtcaagccaagaatgtgggctgcgaaggccagggggcccaccacagagagaccggggggcaggggtgcagcgccctgctcacag

SEQ ID NO: 4214 - DNA, 201 bp, Homo sapiens
ctccagggctgcctttaaggtgtggccactattgctccttttccaaagccccaccttcctcacagctggcccttctgccacggaacattccatattttctstgttttcccaaactcagaagcccttagctttaccaggaagctctgtccatcgcttggccaccattcacaggacaggcattctgtaagtgccctaagccct

SEQ ID NO: 4215 - DNA, 201 bp, Homo sapiens
ctctcactagactcacacactgcgcaatgactccagcctgctctctgcctccatatttatcagttcccagagcctgagaatggcctcctggctgccttgtytgtcatggtaatggattcagatgctttgagaggttcaggatccacagttgatgggagtgacagggaccctcttggattctccaaagaaaagtgtacacag

SEQ ID NO: 4216 - DNA, 201 bp, Homo sapiens
tctgttaaggaagcccaaatggactattctaatccctgccaggaaggcctgcggctattacgaagagcccccagggctctgcagccaacaagagctgacaygacaccaccagcccactgccttttggggtgatgcaggaggtgggcggtcagcaccttgaatcttggactgtgggaattatagggattggaagagtttttt

SEQ ID NO: 4217 - DNA, 201 bp, Homo sapiens
gcacagaggctgagtccactggcagcaaatctagttagcagctcggtcctgagcccaccctgtccactggctcctctgaggtgagccatacatagtccccrgctttttgctaattttgaaaaagggagagactgcgcaggtgctcactgcaaggcctccttccttttttaattacaggaatcattatatacatagacagtg

SEQ ID NO: 4218 - DNA, 201 bp, Homo sapiens
cacgtggcattggcggggactttcttcctttgtaatgtgctcactggggttgtcacgtcacatagccacgtggagacagccactgaagttcaaagacaagrtgggtgtaaatgtgattcatttcattaaaacaactggatatacaatatttgatgtctgcggtaactctaacttctcctcatttccctttaggggagtgag

SEQ ID NO: 4219 - DNA, 201 bp, Homo sapiens
gggctggcagcctggcacattctccgtgaatgagaatgtgtatttcccatgatcctatccaccccaccctgatggccattccttcttttctgcaaggctgygtcccatggtggccctttattgccttgggggttgaacttctacctctatctcttaacagggcagctcttctaccttctttgccttttcttggcaacagaa

SEQ ID NO: 4220 - DNA, 201 bp, Homo sapiens
gtggagacagccagtgcagaaaatgctctgcggcctgacagggaagagatgaaaggctacctaggaggatgctgggacaacagcttgctcctctgggcttyaggatgagagagactaggccgccagcaaccaacgggactgaggagtgcacagcaaaggaggggttggagaaagaaggacaggatgccagaaaacagcagg

SEQ ID NO: 4221 - DNA, 201 bp, Homo sapiens
gatctcctgaaggctaattcagtgcagttaagaagccaggctaggggctcggatggggagggtggtgaagcctcacatgtgttgacccggtaggggtacaktttcccttgccttctccaaagtgggcaggaaggaagtggaaggatggaggtatgaggggaagatggatgtccgtggaggtgggtcttctggagtaaagag

SEQ ID NO: 4222 - DNA, 201 bp, Homo sapiens
ccattttttgtgttgttcacgttgctttgctgggtaaaactaataattattccaaacttcactcaagaatgaggcttctcttaagagaccaaaaacatgaytgcgaatgagccagttcttcaagtatcccacctctggtacttgaaggtagaagtcatagttttcacaagcaaacctggccttcagtccatgcagtcccta

SEQ ID NO: 4223 - DNA, 201 bp, Homo sapiens
ctgtatgtccctgggctatccctgtcctgccctttgagatgccctcctctcctcactcatgggcagctctgaccactcactagccatggccatcccatagygcaggggtgctcatccacctagatgaaaggggcatactctgaaggagccaccacagctcaaccaatctttagtactcagtgtgcctgggggtgcctgaca

SEQ ID NO: 4224 - DNA, 201 bp, Homo sapiens
ttctcataatcccacggtgagatatcagataagaatttcttgtacagtgcagttcatgatcatctttacttgtaacacaagaacagtcattttgaataaaytcagatttaaattatatataccattctcatctggaatggataacgaatcacagataattttgttctagtcagcatggtcataaaagtgtttctgttccta

SEQ ID NO: 4225 - DNA, 201 bp, Homo sapiens
aggtgatctgaccgccttggcctcccaaagtgttgggattacaggcatgagctactgcacccggccagaagcctgctcttcactcttcaaatgctaatatragaacagcagtaacaaccaaacagaaaatagcagaggaagaagaggaggcaccatggggcatattttagagccactctaattagagtatctgcctggcag

SEQ ID NO: 4226 - DNA, 201 bp, Homo sapiens
tatatttcctgtaagattgtatctggaaacaggaaaactctggaaacaggaaaacacatgagccaggccaactactgaaatactcctgggcagcttgtttktaaagtttagctcagtctgtctaccactagctgtgatttcatttgcactgtggatgtgttttagatgtcattttatacttaacggtgattgacaattcat

SEQ ID NO: 4227 - DNA, 201 bp, Homo sapiens
ggtggcaaaattagacaatcttaaaaatcaaaatattcttctgagcaggtcacattaaccaaaactaaattatttttgattcttgttaatatacttagatytcaactctaaacacataagaatgactttcacctttttttaattccaaggagaggagattctaactatgttttatcttcaaaaagtcatagtaaagaggag

SEQ ID NO: 4228 - DNA, 201 bp, Homo sapiens
caaggccactgttcccagccaacaactcccttgtccacacagctccttccatcccaggtgacttgatatccattatagtgcatggttcccccaacaacccrtgtaagtcagcatggcagggataccacctcatattttagaaataaacaaattgagatgtctagtaaaacctgttcttgtttggacacagagctgttcgct

SEQ ID NO: 4229 - DNA, 201 bp, Homo sapiens
agctcaaaagtctgaaaatagttggataaagggaatagccactttggatgtttgcaggcagaactgaagaactgtattacatgtggtacctaaattgccawaatactgaattattcaatcataaaactagatgggtatctaaagctctctacccagtaggggaaaaaaccgaaaaaccgtttgggaatccttcagagagaa

SEQ ID NO: 4230 - DNA, 201 bp, Homo sapiens
ccctgcgaggccccggggcccgcgctcgccgccagccacgcctgctccaaggctcctcctcgccagtctggccctggaacgggagaaaccaggagaggagscttggacctctgagccgcgatggccttccaaatgcccttccgttctttggcaaaaaccaagagcaaaaagccgaaacccacacagggagttcccaaggtc

SEQ ID NO: 4231 - DNA, 201 bp, Homo sapiens
caaagagacagcaagaggagccttccgcagtactttaagtaactaaggggactgctccaccacccatgagcccatctgtgcatatccctgcacacatacayatgcatgcatgcattcctccctgtatgccgatggatgctagagctgacccttttctacagaagtcctggctaccttgacatcctactcaggtgagtgctg

SEQ ID NO: 4232 - DNA, 201 bp, Homo sapiens
ggccaggtatgtagcaaagagacagcaagaggagccttccgcagtactttaagtaactaaggggactgctccaccacccatgagcccatctgtgcatatcyctgcacacatacacatgcatgcatgcattcctccctgtatgccgatggatgctagagctgacccttttctacagaagtcctggctaccttgacatcctac

SEQ ID NO: 4233 - DNA, 201 bp, Homo sapiens
tcctctcccaatggaatcacacaggatgcacttaattcccctagcagtgatttgttacgacatgtgaatgagttgtctactggacaaggtcactacagacycagtgcccaaagtttttactgaggacaggtcatctaggcaggctttccctggcagatagcaaaattcaagactctcaaaaggaaagcaggtgttcagcat

SEQ ID NO: 4234 - DNA, 201 bp, Homo sapiens
acccccgaaaagacaaaaatagaactgtatcatacatatttttggcaacttgcaacttttacttgactgtctattcaaaagacagcatctttccatgtctrtgttaagaggatgagatgttccttatcctttttgttactagatgtacaagtgttactttcagaagtatgcaatttttttttttttgagatggagtcttgc

SEQ ID NO: 4235 - DNA, 201 bp, Homo sapiens; identical to SEQ ID NO: 352

SEQ ID NO: 4236 - DNA, 201 bp, Homo sapiens
attacctgttatccggtctatcctaacacatgtgtaacaggccttctgcaattcatcttacactgattttaattgagtattgctagagctggggttctcarctttggttgcacattggaatcacccagggagcttttaaattgattgatatctacacagagattctgatttacttttttcggagtgtgccctgggtattag

SEQ ID NO: 4237 - DNA, 201 bp, Homo sapiens
ggtggaacagggattgtggccaaagatacatacatcaacaaaatttaatcctaggtcatgaagcttgaacctagaatcccagtcaccctaggataaaggcycaatattttaggaagaactggctccttcccttttaccttaccccctcagcctttaggctcctgaaggctttagtaccctacttttgtgggaaatgatggc

SEQ ID NO: 4238 - DNA, 201 bp, Homo sapiens
tgccacacagggtcattctcaggttatacttaagttaccgctgtcaggtgcatctgccatacaggcatgatctccagagtcatattgcctgggtttgtacsctactctgcctcctactaaccgtgtcatcttgggaaagccttgactgctccatgactcagtttctcacctgtaaaatggagataacaataggtcccatcc

SEQ ID NO: 4239 - DNA, 201 bp, Homo sapiens
cgcttggaacactagacacacattcaggtgtgtctgccacacagggtcattctcaggttatacttaagttaccgctgtcaggtgcatctgccatacaggcrtgatctccagagtcatattgcctgggtttgtaccctactctgcctcctactaaccgtgtcatcttgggaaagccttgactgctccatgactcagtttctc

SEQ ID NO: 4240 - DNA, 201 bp, Homo sapiens
ggactacaggcgcccgccaccacgcccagctaattttttctatttttcagtagagacgggatttcaccatgttagccaggatggtctcgatctcctgaccrcgtgatccgcctgccttggcctccgaaagtgctgggattacaggcgtgagccaccgcgcccaaccgaactgtatttcatactctgatgtttagttgactc

SEQ ID NO: 4241 - DNA, 201 bp, Homo sapiens; identical to SEQ ID NO: 1050

SEQ ID NO: 4242 - DNA, 201 bp, Homo sapiens
taattttcaaagagcctcccggcacgatgtcctcgggatctggggggcgctctcgggcggtctctggtgaaagtcgacttagtacaaactggactcgaagrggcatgtctcggcactcaggggcccaggcgccgcgggaggtgggtgggcctcccggggctgcacgggtcccacctccctctgccccgtaggactactttg

SEQ ID NO: 4243 - DNA, 201 bp, Homo sapiens
tattaagcccaggaagtcaaggctgcagtgagcaatgatcatgccgctgcactccagcctgaacaacagagtgagaccctgtctcaaatatacatatttgtctcatgtatatatatatatatatatatatatatatatatatatatatatggcttcagaatgcattgtgacttttggttaggaggttgaaaggcagcaaac

SEQ ID NO: 4244 - DNA, 201 bp, Homo sapiens
attaagcccaggaagtcaaggctgcagtgagcaatgatcatgccgctgcactccagcctgaacaacagagtgagaccctgtctcaaatatacatatttgtctcatgtatatatatatatatatatatatatatatatatatatatatatggcttcagaatgcattgtgacttttggttaggaggttgaaaggcagcaaacc

SEQ ID NO: 4245 - DNA, 201 bp, Homo sapiens
aagcccaggaagtcaaggctgcagtgagcaatgatcatgccgctgcactccagcctgaacaacagagtgagaccctgtctcaaatatacatatttgtctcatgtatatatatatatatatatatatatatatatatatatatatatggcttcagaatgcattgtgacttttggttaggaggttgaaaggcagcaaacctat

SEQ ID NO: 4246 - DNA, 201 bp, Homo sapiens
gcccaggaagtcaaggctgcagtgagcaatgatcatgccgctgcactccagcctgaacaacagagtgagaccctgtctcaaatatacatatttgtctcatgtatatatatatatatatatatatatatatatatatatatatatggcttcagaatgcattgtgacttttggttaggaggttgaaaggcagcaaacctattc

SEQ ID NO: 4247 - DNA, 201 bp, Homo sapiens
cccaggaagtcaaggctgcagtgagcaatgatcatgccgctgcactccagcctgaacaacagagtgagaccctgtctcaaatatacatatttgtctcatgwatatatatatatatatatatatatatatatatatatatatatggcttcagaatgcattgtgacttttggttaggaggttgaaaggcagcaaacctattct

SEQ ID NO: 4248 - DNA, 201 bp, Homo sapiens
tactttaagtaactaaggggactgctccaccacccatgagcccatctgtgcatatccctgcacacatacacatgcatgcatgcattcctccctgtatgccsatggatgctagagctgacccttttctacagaagtcctggctaccttgacatcctactcaggtgagtgctgaaagctgatcctctgcattgtccaaaactt

SEQ ID NO: 4249 - DNA, 201 bp, Homo sapiens
aaagtttatctcagaactccatgtcagaactggaccggactgtagagttcttcagtcctagtctctttctttcctttcccttcctccccttcctcttcctycttttcttttctttaatttcttctttttttttttaactgtggttctagaggttaaagtgatttgcccacactcttatggctagtctctctagggacagag

SEQ ID NO: 4250 - DNA, 201 bp, Homo sapiens
tgtgtgtgtgtgtgtgtatgtgtgtgtgtttgtatatgtatgcatatctgtgtcctaatcccttctaaggataacagtcatattgtgtgtgtgtgtgtgtrtgtgtatgtgtttgtatatgtatgcatatctgtgtcctaatcccttctaaggataacagtcatagtgtgtgtgtgtgtgtgtgtgtgtgtgtgtgtgtgt

SEQ ID NO: 4251 - DNA, 201 bp, Homo sapiens
tgtgtgtgtgtatgtgtgtgtgtttgtatatgtatgcatatctgtgtcctaatcccttctaaggataacagtcatattgtgtgtgtgtgtgtgtatgtgtrtgtgtttgtatatgtatgcatatctgtgtcctaatcccttctaaggataacagtcatagtgtgtgtgtgtgtgtgtgtgtgtgtgtgtgtgtgtatgttt

SEQ ID NO: 4252 - DNA, 201 bp, Homo sapiens
tatgtgtgtgtgtttgtatatgtatgcatatctgtgtcctaatcccttctaaggataacagtcatattgtgtgtgtgtgtgtgtatgtgtatgtgtttgtwtatgtatgcatatctgtgtcctaatcccttctaaggataacagtcatagtgtgtgtgtgtgtgtgtgtgtgtgtgtgtgtgtgtatgtttatgtatgcat

SEQ ID NO: 4253 - DNA, 201 bp, Homo sapiens
ttgtatatgtatgcatatctgtgtcctaatcccttctaaggataacagtcatattgtgtgtgtgtgtgtgtatgtgtatgtgtttgtatatgtatgcatayctgtgtcctaatcccttctaaggataacagtcatagtgtgtgtgtgtgtgtgtgtgtgtgtgtgtgtgtgtatgtttatgtatgcatacctgtgtcctaa

SEQ ID NO: 4254 - DNA, 201 bp, Homo sapiens
ctgtgtcctaatcccttctaaggataacagtcatattgtgtgtgtgtgtgtgtatgtgtatgtgtttgtatatgtatgcatatctgtgtcctaatcccttstaaggataacagtcatagtgtgtgtgtgtgtgtgtgtgtgtgtgtgtgtgtgtatgtttatgtatgcatacctgtgtcctaatcccttgtaaggataaca

SEQ ID NO: 4255 - DNA, 201 bp, Homo sapiens
cctaaaagtaatatttataccgagaaaccctggctgcagtccccagctgctctcccgcagccctgcgcctccggctcatgcagcgctctccccccggagcyggcaggtgcccaggtgagcggggcctgcggaggcagcgaggggcgccggccgggaaccggcagaacgcgtgcagccagaagacaggagagataatacatt

SEQ ID NO: 4256 - DNA, 201 bp, Homo sapiens
gtctttatatttatgtggtggttttgccaagaagttaaaaaaagccttttgacctgtagaaatgttgacctgtattcatacttactagtgaatatctctartctgctgttcattatccatcattccccctatttttttttattttggggggtaacagttgacatacacaaaacagtttgccaaaagagagaggaagaacct

SEQ ID NO: 4257 - DNA, 201 bp, Homo sapiens
atttggttaaagagttttgctgggcattgagataatctgacagcatctccacttcctgttttttttcttaatctccactttttttttttctatgatgagcrcccctaaaatgctggtaagcttctttccaacaaaattgcggtcaaagtaggatgctggggaatgctgattttagcaaaagcttgtagaaaagagtggcct

SEQ ID NO: 4258 - DNA, 201 bp, Homo sapiens
aagtaaaacaactttttataaacccagagtctgtctttatatttatgtggtggttttgccaagaagttaaaaaaagccttttgacctgtagaaatgttgayctgtattcatacttactagtgaatatctctaatctgctgttcattatccatcattccccctatttttttttattttggggggtaacagttgacatacaca

SEQ ID NO: 4259 - DNA, 201 bp, Homo sapiens
tccaaaaataaacattacaaaattagttggctgtgccttgaacctaaaaaatcgagcaataaagagtcgtctctggtctctgtttatcttttccttttttycccccccgttctaactaacgtcagcgtgagctcatgcctctattcggggataatgatcctttcatgaactgttgcggaatgactttttgcaacagcattg

SEQ ID NO: 4260 - DNA, 201 bp, Homo sapiens
aaatactgaattattcaatcataaaactagatgggtatctaaagctctctacccagtaggggaaaaaaccgaaaaaccgtttgggaatccttcagagagamccgtaatgctatttactggataaatatacttcattttcttctcccagttctttccacaacacgcttgttaagtcgccatggaaagcaccatgctttatca

SEQ ID NO: 4261 - DNA, 201 bp, Homo sapiens
ccagactggcttgactttctgaaggcatcctatagttacagcctttagaacagttgagctatcggcagctttaaagaggctttcagttttttttttttttwaaatcattaatgctttgtaggtgactatagagattttcatcatttaaaaaaattagttctggaatgaataaccactggcttaattcaatcttttgcttac

SEQ ID NO: 4262 - DNA, 201 bp, Homo sapiens
gaggaaaaaaaaaagattgttgttgctacatttcaaattgtatttttttttttttttgacatggtgtctcactctgtcacccaggctggagtgcagtggcwcgatctcggctcactgcaatctccgccccccagattcacgccattctcctgcctcagcctcctgagtagctgggactacaggcgcccgccaccacgccca

SEQ ID NO: 4263 - DNA, 201 bp, Homo sapiens
gaactgtatttcatactctgatgtttagttgactcaaaacgggtgggcccagctctgccctcctaagacaaagtaagaacttttggtctgactcagagacygagtttattaaccctaggactcaaagcaggaaccctggccggagctcccaggttgccagggttcctcttgtgctctgtgtggccccaccatagctcacct

SEQ ID NO: 4264 - DNA, 201 bp, Homo sapiens
cctgtcccctgctctccttaacagcccagaatttctgggggatgctaccggtgacaaggatctgatttggtggaacagggattgtggccaaagatacatayatcaacaaaatttaatcctaggtcatgaagcttgaacctagaatcccagtcaccctaggataaaggcccaatattttaggaagaactggctccttccctt

SEQ ID NO: 4265 - DNA, 201 bp, Homo sapiens
catcatgagcttccacataataagctctctcagcctggcatcttaggctggcatcagaggcatttaaggactctaacagcaatggttatcaaatgtgatcrtctgaatgactcctgggcaggttttaaaaaatacagatccctggaccccataccagacctaataaatcataatattcaaggtacagcctgcacagggtat

SEQ ID NO: 4266 - DNA, 201 bp, Homo sapiens
gcactttcctgctcatcaattcctgtttcacgacttaaattcaagcacgagggcaagaacgatgtcttacatcccccacaatgcctagtaagggtgcaagyacttagtaggtactcgataaattgattggatgagctgtcccattgaggggaggggagaagtggataatgatttaaacaaacaacaacagctaaacaagag

SEQ ID NO: 4267 - DNA, 201 bp, Homo sapiens
aactctctacttttaaaacagattttaaattgcttgttacaatttaattggaaatacaaaaactataaagccagtatcaacatcttccactaccacccccraaaagacaaaaatagaactgtatcatacatatttttggcaacttgcaacttttacttgactgtctattcaaaagacagcatctttccatgtctatgttaa

SEQ ID NO: 4268 - DNA, 201 bp, Homo sapiens
tggggtttcactgtgttagtcaggatggtctcgatctcctgacctcgtgatccacccgccttggcctcccaaagtgctgggattacaggtgtgagccaccrcacccggccaagtatgcaaaaattttacccccttgtattaattggttggggctgccataacacagtaccacagagtgggtggcttaaccagatgttcatt

SEQ ID NO: 4269 - DNA, 201 bp, Homo sapiens
agcaggtttggtttcttctgaggcctctgtccttggcttgcacatggccgctctcccactgtgtccttccatggtctcccctctgtgtgtgtgtgtgtgtrtgtgtgtgtgtttgtatatgtatgcatatctgtgtcctaatcccttctaaggataacagtcatattgtgtgtgtgtgtgtgtatgtgtatgtgtttgtat

SEQ ID NO: 4270 - DNA, 201 bp, Homo sapiens
ttcttctgaggcctctgtccttggcttgcacatggccgctctcccactgtgtccttccatggtctcccctctgtgtgtgtgtgtgtgtatgtgtgtgtgtwtgtatatgtatgcatatctgtgtcctaatcccttctaaggataacagtcatattgtgtgtgtgtgtgtgtatgtgtatgtgtttgtatatgtatgcatat

SEQ ID NO: 4271 - DNA, 201 bp, Homo sapiens
tctgaggcctctgtccttggcttgcacatggccgctctcccactgtgtccttccatggtctcccctctgtgtgtgtgtgtgtgtatgtgtgtgtgtttgtwtatgtatgcatatctgtgtcctaatcccttctaaggataacagtcatattgtgtgtgtgtgtgtgtatgtgtatgtgtttgtatatgtatgcatatctgt

SEQ ID NO: 4272 - DNA, 201 bp, Homo sapiens
tccttggcttgcacatggccgctctcccactgtgtccttccatggtctcccctctgtgtgtgtgtgtgtgtatgtgtgtgtgtttgtatatgtatgcatayctgtgtcctaatcccttctaaggataacagtcatattgtgtgtgtgtgtgtgtatgtgtatgtgtttgtatatgtatgcatatctgtgtcctaatccctt

SEQ ID NO: 4273 - DNA, 201 bp, Homo sapiens
ccttccatggtctcccctctgtgtgtgtgtgtgtgtatgtgtgtgtgtttgtatatgtatgcatatctgtgtcctaatcccttctaaggataacagtcatwttgtgtgtgtgtgtgtgtatgtgtatgtgtttgtatatgtatgcatatctgtgtcctaatcccttctaaggataacagtcatagtgtgtgtgtgtgtgtg

SEQ ID NO: 4274 - DNA, 201 bp, Homo sapiens
gtgtgtgtgtgtgtgtatgtgtatgtgtttgtatatgtatgcatatctgtgtcctaatcccttctaaggataacagtcatagtgtgtgtgtgtgtgtgtgygtgtgtgtgtgtgtgtatgtttatgtatgcatacctgtgtcctaatcccttgtaaggataacagtcattttgtgtgtgtgtgtgtgtgcgtgtatgtttg

SEQ ID NO: 4275 - DNA, 201 bp, Homo sapiens
tgtatgtttatgtatgcatacctgtgtcctaatcccttgtaaggataacagtcatattgtgtgtgtgtgtgtgtgtgcgcgtgtgcgcgtgtatgtttgtwtatgtatgcatatctgtgtcctaatcccttctaaggataacagtcatagtgtgtgtgtgtgtgtgtgtatgtttatgtatgcatatctgtgtcctaatcc

SEQ ID NO: 4276 - DNA, 201 bp, Homo sapiens
tctaaggataacagtcatattgtgtgtgtgtgtgtgcgcgtgtatgtttgtatatgtatgcatatctgtgtcctaatcccttctaaggataacagtcataktgtgtgtgtgtgtgtgtgtgtatgtttatgtatgcatatctgtgtcctaatcccttctaaggataacagtcatagtgtgtgtgtgtgtgtgtgtgtgtgt

SEQ ID NO: 4277 - DNA, 201 bp, Homo sapiens
tgtgtgtgtgtgtgcgcgtgtatgtttgtatatgtatgcatatctgtgtcctaatcccttctaaggataacagtcatagtgtgtgtgtgtgtgtgtgtgtwtgtttatgtatgcatatctgtgtcctaatcccttctaaggataacagtcatagtgtgtgtgtgtgtgtgtgtgtgtgtgtttgtgtatgtttatgtatgc

SEQ ID NO: 4278 - DNA, 201 bp, Homo sapiens
tgtgtgtgtgcgcgtgtatgtttgtatatgtatgcatatctgtgtcctaatcccttctaaggataacagtcatagtgtgtgtgtgtgtgtgtgtgtatgtwtatgtatgcatatctgtgtcctaatcccttctaaggataacagtcatagtgtgtgtgtgtgtgtgtgtgtgtgtgtttgtgtatgtttatgtatgcatat

SEQ ID NO: 4279 - DNA, 201 bp, Homo sapiens
cgcgtgtatgtttgtatatgtatgcatatctgtgtcctaatcccttctaaggataacagtcatagtgtgtgtgtgtgtgtgtgtgtatgtttatgtatgcrtatctgtgtcctaatcccttctaaggataacagtcatagtgtgtgtgtgtgtgtgtgtgtgtgtgtttgtgtatgtttatgtatgcatatctgtgtccta

SEQ ID NO: 4280 - DNA, 201 bp, Homo sapiens
tcctaatcccttctaaggataacagtcatagtgtgtgtgtgtgtgtgtgtgtatgtttatgtatgcatatctgtgtcctaatcccttctaaggataacagwcatagtgtgtgtgtgtgtgtgtgtgtgtgtgtttgtgtatgtttatgtatgcatatctgtgtcctaatcccttctaaggataacagtcatagtgtgtgtg

SEQ ID NO: 4281 - DNA, 201 bp, Homo sapiens
atcccttctaaggataacagtcatagtgtgtgtgtgtgtgtgtgtgtatgtttatgtatgcatatctgtgtcctaatcccttctaaggataacagtcataktgtgtgtgtgtgtgtgtgtgtgtgtgtttgtgtatgtttatgtatgcatatctgtgtcctaatcccttctaaggataacagtcatagtgtgtgtgtgtgt

SEQ ID NO: 4282 - DNA, 201 bp, Homo sapiens
agtcatagtgtgtgtgtgtgtgtgtgtgtatgtttatgtatgcatatctgtgtcctaatcccttctaaggataacagtcatagtgtgtgtgtgtgtgtgtrtgtgtgtgtttgtgtatgtttatgtatgcatatctgtgtcctaatcccttctaaggataacagtcatagtgtgtgtgtgtgtgtatgtgtttgtatatgt

SEQ ID NO: 4283 - DNA, 201 bp, Homo sapiens
agtgtgtgtgtgtgtgtgtgtgtatgtttatgtatgcatatctgtgtcctaatcccttctaaggataacagtcatagtgtgtgtgtgtgtgtgtgtgtgtrtgtttgtgtatgtttatgtatgcatatctgtgtcctaatcccttctaaggataacagtcatagtgtgtgtgtgtgtgtatgtgtttgtatatgtatgcgt

SEQ ID NO: 4284 - DNA, 201 bp, Homo sapiens
tgtgtgtgtgtgtgtgtatgtttatgtatgcatatctgtgtcctaatcccttctaaggataacagtcatagtgtgtgtgtgtgtgtgtgtgtgtgtgtttktgtatgtttatgtatgcatatctgtgtcctaatcccttctaaggataacagtcatagtgtgtgtgtgtgtgtatgtgtttgtatatgtatgcgtatctgt

SEQ ID NO: 4285 - DNA, 201 bp, Homo sapiens
tgtgtgtgtgtatgtttatgtatgcatatctgtgtcctaatcccttctaaggataacagtcatagtgtgtgtgtgtgtgtgtgtgtgtgtgtttgtgtatrtttatgtatgcatatctgtgtcctaatcccttctaaggataacagtcatagtgtgtgtgtgtgtgtatgtgtttgtatatgtatgcgtatctgtgtcctt

SEQ ID NO: 4286 - DNA, 201 bp, Homo sapiens
gacattcaggaaacaatgattcaagagtctggaaataaacctttagcagagtaaaaaaaaaaaataaagtttaggattttaattgaaggaacaaaataatkggattttatgctgttccgcggagaggatactgagattattgcctgtgttcattgaaggatgcaaactcattgaagtctgattcatcagaacagcatttcc

SEQ ID NO: 4287 - DNA, 201 bp, Homo sapiens
atttttaccatgttattgaagtcaatggtgtttgattagctcagtgggtgagcaagcatatggtgctactggagtcaaggctggtcagtaggaagcatcartccattccatggccactggtaatctaacgtaatgaatggtgtcttttgttgttgttgttgttgttgttgttgtttgagacagagtcttgctctgtcgccc

SEQ ID NO: 4288 - DNA, 201 bp, Homo sapiens
ccgtgcccagccatgagcggtcttgaaaatgaaaaatggtcttggccacagaaaccaggtatgagggagtggttggaatggtataaagtcatcactgttarggaaacagtaactttaaatgcatgttaacagtgggtctttaaaaatgaatgtcatttggttaaagagttttgctgggcattgagataatctgacagcatc

SEQ ID NO: 4289 - DNA, 201 bp, Homo sapiens
gaaaatgaaaaatggtcttggccacagaaaccaggtatgagggagtggttggaatggtataaagtcatcactgttagggaaacagtaactttaaatgcatkttaacagtgggtctttaaaaatgaatgtcatttggttaaagagttttgctgggcattgagataatctgacagcatctccacttcctgttttttttcttaa

SEQ ID NO: 4290 - DNA, 201 bp, Homo sapiens
ctgccacctgtttggacacttgtcttgaaaatgttgatgtcaagtgagttgacatcagagacatcatctgaagacagctggaggccctgtcttgaggactrtactaccaatgcctaaaacagtctgggatgcatagtagatacttagtaagcatgttgaaagaatggacaagaggatgagaatgtggtttagaatcatccc

SEQ ID NO: 4291 - DNA, 201 bp, Homo sapiens
tgtaacattattaggataggggaaaataagatatttagtacttttaagaaagatttattaagtttggggataaggtttgcattttggtcagtatatatatrtgtatatatgtgtgtatatatatgtgtatatatatgtatatatatgtgtatatatgtatatatgtgtgtatatgtgtatatatgtgtgtgtgtgtgtata

SEQ ID NO: 4292 - DNA, 201 bp, Homo sapiens
acattattaggataggggaaaataagatatttagtacttttaagaaagatttattaagtttggggataaggtttgcattttggtcagtatatatatatgtrtatatgtgtgtatatatatgtgtatatatatgtatatatatgtgtatatatgtatatatgtgtgtatatgtgtatatatgtgtgtgtgtgtgtatatata

SEQ ID NO: 4293 - DNA, 201 bp, Homo sapiens
ttaggataggggaaaataagatatttagtacttttaagaaagatttattaagtttggggataaggtttgcattttggtcagtatatatatatgtatatatrtgtgtatatatatgtgtatatatatgtatatatatgtgtatatatgtatatatgtgtgtatatgtgtatatatgtgtgtgtgtgtgtatatatatatata

SEQ ID NO: 4294 - DNA, 201 bp, Homo sapiens
aggataggggaaaataagatatttagtacttttaagaaagatttattaagtttggggataaggtttgcattttggtcagtatatatatatgtatatatgtrtgtatatatatgtgtatatatatgtatatatatgtgtatatatgtatatatgtgtgtatatgtgtatatatgtgtgtgtgtgtgtatatatatatatata

SEQ ID NO: 4295 - DNA, 201 bp, Homo sapiens
aataagatatttagtacttttaagaaagatttattaagtttggggataaggtttgcattttggtcagtatatatatatgtatatatgtgtgtatatatatrtgtatatatatgtatatatatgtgtatatatgtatatatgtgtgtatatgtgtatatatgtgtgtgtgtgtgtatatatatatatatatatatatatgaa

SEQ ID NO: 4296 - DNA, 201 bp, Homo sapiens
ttattaagtttggggataaggtttgcattttggtcagtatatatatatgtatatatgtgtgtatatatatgtgtatatatatgtatatatatgtgtatatrtgtatatatgtgtgtatatgtgtatatatgtgtgtgtgtgtgtatatatatatatatatatatatatgaatgggattccttccggttgcatgtaaacact

SEQ ID NO: 4297 - DNA, 201 bp, Homo sapiens
gggataaggtttgcattttggtcagtatatatatatgtatatatgtgtgtatatatatgtgtatatatatgtatatatatgtgtatatatgtatatatgtrtgtatatgtgtatatatgtgtgtgtgtgtgtatatatatatatatatatatatatgaatgggattccttccggttgcatgtaaacactcaatttaagagt

SEQ ID NO: 4298 - DNA, 201 bp, Homo sapiens
aggtttgcattttggtcagtatatatatatgtatatatgtgtgtatatatatgtgtatatatatgtatatatatgtgtatatatgtatatatgtgtgtatrtgtgtatatatgtgtgtgtgtgtgtatatatatatatatatatatatatgaatgggattccttccggttgcatgtaaacactcaatttaagagtcttcag

SEQ ID NO: 4299 - DNA, 201 bp, Homo sapiens
tctttccaacaaaattgcggtcaaagtaggatgctggggaatgctgattttagcaaaagcttgtagaaaagagtggcctggcacatgagcttaaaaaaaaraaaaaaagctggctcttgaattttggcacagtgcaacctgttccataccagacaaatgaacaggcttaatctggtaccaattctttttctctcttactcc

SEQ ID NO: 4300 - DNA, 201 bp, Homo sapiens
atctctgggagtaactggacagagaagaaatgcctcaggtgctgcactgctccttggacagactgattagatacaaagcagaaatagaaacagggaagagsgggcatggttacctcagctaacaaggagcagggagacgtaggaaattgtttatccatttccccagagctctactactattattactccacttttctgctg

SEQ ID NO: 4301 - DNA, 201 bp, Homo sapiens
tctctatgtccacgtgtacccatcctgtgagttttataagcttgcagccagacacattgttacctgcattcccctgtctgaggggtctttctttcagccakctctgggagtaactggacagagaagaaatgcctcaggtgctgcactgctccttggacagactgattagatacaaagcagaaatagaaacagggaagaggg

SEQ ID NO: 4302 - DNA, 201 bp, Homo sapiens
gagcagtaaggttaaattaacctagcacatgcttgatacagactaggtgtgaaatttcactttgattcctttggctttaaagaatgcataaattagtgtgkgtggaggcgggagaagggggggaatgccaagtcccccgttttgttgtgctgggtagacacaatatacctcttcccctttaagtgaaataagtcttcaaat

SEQ ID NO: 4303 - DNA, 201 bp, Homo sapiens
cttgaattcttgggctcaagtgatcttcctgccccaagcctcccaagtagctgggaccacaggcacgtgccaccatgcctggctgatttttttttttttttaatgttttgtagagacaggatctcagtatgttgcgcaggctggtctttaattcctgggctcaagtgatcctcccatagatttgtctgtgttttctctaaa

SEQ ID NO: 4304 - DNA, 201 bp, Homo sapiens
gtgggaccagggcggtgcgctacgagactccgggccgtcctctgcctcctcagacttttcgagagaaaagttttcaaagtctctccaccttttttttttttcaggggctcgggagaatcctctccacagccagggatcagcgtctatctgggcgagggcagtgatttatacagtagaatccaggggttaccgggctccgcc

SEQ ID NO: 4305 - DNA, 201 bp, Homo sapiens
caatgagaacacatggacacagggaggggaacatcacacactggagcctgttgggggtggggggctaggggagagatagcattaggagaaatacctaatgyaggtgacggattgacgggtgcagcaaaccaccatggcacgtgtatacctatgtaacaaacctgcacattctgcacatgtgccccagaacttaaagtaaaa

SEQ ID NO: 4306 - DNA, 201 bp, Homo sapiens
aatagaaacagggaagagggggcatggttacctcagctaacaaggagcagggagacgtaggaaattgtttatccatttccccagagctctactactattaktactccacttttctgctgctttgttgataccagggcagaaagaaaaaccttggaaaaagttactggtgtgggtcatgcttcctactcccattcctcttga

SEQ ID NO: 4307 - DNA, 201 bp, Homo sapiens
tataatactttatccccaacaatattaaatgtgattacaattttacagaatattcaaatcaaaatgttatataagacaaattattattcttgcttttacawctccttagaaggagaaacattcaattgttttaaaaatgttctatttatttttcagaaatgaggtgttgccttcttgcccaggctagtatgcagtggcaca

SEQ ID NO: 4308 - DNA, 201 bp, Homo sapiens
aagaggagtgaaacagatcctggacaatacttgacatattcttgtaaaaagttcaattgactcaaaatagtcaggaaagttatgaagtaacatcatataayactttatccccaacaatattaaatgtgattacaattttacagaatattcaaatcaaaatgttatataagacaaattattattcttgcttttacaactcct

SEQ ID NO: 4309 - DNA, 201 bp, Homo sapiens
aacgaatttttaagtcgaacgaggcaaacaaaaacttagaaaacatgcatctccgggcgctgaaaatttgcatctctgggctactaaggagcccatctcgrtcagattgttcttgggcacttgtgatttatggagttcagaaaaaaggttaattcccaactgtggaacctacgggtgtaggggcagtgaaaattgcagttg

SEQ ID NO: 4310 - DNA, 201 bp, Homo sapiens
aaacttttacaacagtaatgcaagggcagaagcgtcctgtcctgagcttgtcacgcaggcagatctgaccaagtccgcctctcagcctcacgttcttaagyagcatctaagcaaaagaaaagggtgggcaaagtgctagtaatgagatttgaggcctctgagtcgactcccaagcagaatgtgagagaagggtgccggctc

SEQ ID NO: 4311 - DNA, 201 bp, Homo sapiens; identical to SEQ ID NO: 4310

SEQ ID NO: 4312 - DNA, 201 bp, Homo sapiens
ataataaaagatggaggtggtggatgggtgaagcattttctctgtagtgtagggaattctcacaggtatgtagctccttaatcctcacaatgaaagaggcmaatatcattatttcattttacagatgaggacactgaggttcaaggaagttaaaagaacttgcctaaagtcacatagcttagaactggcaatatcaaggct

SEQ ID NO: 4313 - DNA, 201 bp, Homo sapiens
agctttatcaacttttaaacattaataaactgatttttttaaagatccctttgtgaagagcattcttaaaaataattattgagtcatctactggattgtgyagctctttggaatcaaagtgaaggacaaatttctattattctttaaaggatttttaccttaactagggtgtgaaaaaagtgtggtttgtttagaaaccac

SEQ ID NO: 4314 - DNA, 201 bp, Homo sapiens; identical to SEQ ID NO: 357

SEQ ID NO: 4315 - DNA, 201 bp, Homo sapiens; identical to SEQ ID NO: 358

SEQ ID NO: 4316 - DNA, 201 bp, Homo sapiens; identical to SEQ ID NO: 359

SEQ ID NO: 4317 - DNA, 201 bp, Homo sapiens; identical to SEQ ID NO: 356

SEQ ID NO: 4318 - DNA, 201 bp, Homo sapiens
gcggcgagcgggactggccattggagtgctccgctgcggagggaggggaccccgactcgagtaagtttgcgagagcactacgcagtcagtcgggggcagcrgcaagatgcgaagcgagccgtacagatcccgggctctccgaacgcaacttcgccctgcttgagcgaggtagggggcggcgaatggcgggggtcgcgggcg

SEQ ID NO: 4319 - DNA, 201 bp, Homo sapiens
gtgtgaaatttcactttgattcctttggctttaaagaatgcataaattagtgtgggtggaggcgggagaagggggggaatgccaagtcccccgttttgttktgctgggtagacacaatatacctcttcccctttaagtgaaataagtcttcaaatccaattaggatctactctggagtcttagaggaccgttatcttggtt

SEQ ID NO: 4320 - DNA, 201 bp, Homo sapiens
atttccttgtggacacagtaaatgtatgatgatgagaaatcataataaactacaacattttctccaaccttccttcctgctcttttgatgtgtacttcacrtggtccaagaaaagggactcaaaatactttttaacatacaccattgccttcactgcaatactaagtggaactagagttgtctctcagaacattcaagcaa

SEQ ID NO: 4321 - DNA, 201 bp, Homo sapiens
ccaagtagctgggaccacaggcacgtgccaccatgcctggctgatttttttttttttttaatgttttgtagagacaggatctcagtatgttgcgcaggctrgtctttaattcctgggctcaagtgatcctcccatagatttgtctgtgttttctctaaataggttataaataccttgagggaggaatcacaaataactaaa

SEQ ID NO: 4322 - DNA, 201 bp, Homo sapiens
ttgagtgaatgtggccatagagtttctccctctctttttcttccccctcttccttttttgaaaaaagaaaaaaaaggaagaaaaaagataatttgattttwaaaaaaaatctctctccctgagctctccccaagtttctttaaaacaaatcaacaacaacacaattggagcagtgccttagctagaatgaattatgccagt

SEQ ID NO: 4323 - DNA, 201 bp, Homo sapiens
accatggcacgtgtatacctatgtaacaaacctgcacattctgcacatgtgccccagaacttaaagtaaaataataataataataataataataataataaaagatggaggtggtggatgggtgaagcattttctctgtagtgtagggaattctcacaggtatgtagctccttaatcctcacaatgaaagaggcaaatatc

SEQ ID NO: 4324 - DNA, 201 bp, Homo sapiens
caccatggcacgtgtatacctatgtaacaaacctgcacattctgcacatgtgccccagaacttaaagtaaaataataataataataataataataataataaaagatggaggtggtggatgggtgaagcattttctctgtagtgtagggaattctcacaggtatgtagctccttaatcctcacaatgaaagaggcaaatat

SEQ ID NO: 4325 - DNA, 201 bp, Homo sapiens
ccaccatggcacgtgtatacctatgtaacaaacctgcacattctgcacatgtgccccagaacttaaagtaaaataataataataataataataataataataaaagatggaggtggtggatgggtgaagcattttctctgtagtgtagggaattctcacaggtatgtagctccttaatcctcacaatgaaagaggcaaata

SEQ ID NO: 4326 - DNA, 201 bp, Homo sapiens
aaggaaataaaagaagacacaaacaaatggaaaagcattccatgctcatggataggaagaatcaatatcatgaaaatagccatactgcccaaagtaatttrtagattcaatgctatccccatcaagctatcattgactttcttcacagaattgcgaaaaactactttaaatttcatatggaatcaaaaaagagcccacata

SEQ ID NO: 4327 - DNA, 201 bp, Homo sapiens
aggccttatatggattatctataaagaggattttaaaccggtggtttaaaaagctgggagagataggaggaagagcatagtgaggggttagacctgcattyatttcagtctttcacaatctttgacaagaaccaggacccagagtagtttgggttcatgttgaatatatctctcctaatacatccgatctcttgttcccta

SEQ ID NO: 4328 - DNA, 201 bp, Homo sapiens; identical to SEQ ID NO: 361

SEQ ID NO: 4329 - DNA, 201 bp, Homo sapiens
gtttgggttcatgttgaatatatctctcctaatacatccgatctcttgttccctacactttcttcttggattcagactctcaagtaatttctgtttttccygtgctctcttttttatccctttgaggactaaaggattaaaaaattagacttagctctggttatagtcattagcaagagccaagtgtggactgtggacttg

SEQ ID NO: 4330 - DNA, 201 bp, Homo sapiens
caccccctcaacgacctctccattggccagaatctgggacacacagcctgactttgtgctcagctgagggaaacccctcgcccaacaccaaaaccggcgckggttcatttctctgtgcactctgggaaagccactgcccctcagaccgcagttgcgagtagcacgaggatctggggtggcggggggagtacaggaacctcc

SEQ ID NO: 4331 - DNA, 201 bp, Homo sapiens; identical to SEQ ID NO: 4330

SEQ ID NO: 4332 - DNA, 201 bp, Homo sapiens
gtcacgcaggcagatctgaccaagtccgcctctcagcctcacgttcttaagtagcatctaagcaaaagaaaagggtgggcaaagtgctagtaatgagattygaggcctctgagtcgactcccaagcagaatgtgagagaagggtgccggctcctgctgggcagctgcagttgctccgcagctcctggccgagaatctcccc

SEQ ID NO: 4333 - DNA, 201 bp, Homo sapiens; identical to SEQ ID NO: 4332

SEQ ID NO: 4334 - DNA, 201 bp, Homo sapiens
tacagatcccgggctctccgaacgcaacttcgccctgcttgagcgaggtagggggcggcgaatggcgggggtcgcgggcgcggggagcccggttgtggtarggcttaggtgtcagaaacgaatttttaagtcgaacgaggcaaacaaaaacttagaaaacatgcatctccgggcgctgaaaatttgcatctctgggctact

SEQ ID NO: 4335 - DNA, 201 bp, Homo sapiens; identical to SEQ ID NO: 354

SEQ ID NO: 4336 - DNA, 201 bp, Homo sapiens
ctggttcatttctctgtgcactctgggaaagccactgcccctcagaccgcagttgcgagtagcacgaggatctggggtggcggggggagtacaggaacctyccggttcattctccctcccgggctgcttgtctcctccgtacctctcgcagccccttcccagcctctcctccccagagcgccgccgacactcgccgggccg

SEQ ID NO: 4337 - DNA, 201 bp, Homo sapiens; identical to SEQ ID NO: 4336

SEQ ID NO: 4338 - DNA, 201 bp, Homo sapiens; identical to SEQ ID NO: 355

SEQ ID NO: 4339 - DNA, 201 bp, Homo sapiens
tttatatctctaaattacttaaaattaaataatgaagaataaactcatatttggaatggagagaagttccttgtgttattgggtggtgttgtaaatatcartatttgtattctatttttcagcatctagtccccatgtgatcaagaagcaactccgtaaaataaaagcattcaacattgtcttcagtttctatctctcctt

SEQ ID NO: 4340 - DNA, 201 bp, Homo sapiens
cctataaaaggcattcattcagataataacactcgccctgggtgtaagcactgcattgttagaagagatagcagagcacaaaggatatggaagacaagctwatgttcctgtggatctattttttaataatttcagcttttatattagattcaaggggaacatgtgcaggtttgttacataggcatattgctgtgatgttga

SEQ ID NO: 4341 - DNA, 201 bp, Homo sapiens
caagaaaagggactcaaaatactttttaacatacaccattgccttcactgcaatactaagtggaactagagttgtctctcagaacattcaagcaagcaagktttacttgaataactaaaggccttatatggattatctataaagaggattttaaaccggtggtttaaaaagctgggagagataggaggaagagcatagtga

SEQ ID NO: 4342 - DNA, 201 bp, Homo sapiens
atcattcaaaacccatcaaaaaagcatacattcttggcctttcaccaacatgttggggaagtggggatatggatatgggtattaaatcatgtgtttttttkttttttttttcaggacactgtcttggcttctcccagcctatcttctgaaccacatagaagtatacagtatcagtgaagcagctagctgtaaaatgtgggc

SEQ ID NO: 4343 - DNA, 201 bp, Homo sapiens
acatagctttatcaacttttaaacattaataaactgatttttttaaagatccctttgtgaagagcattcttaaaaataattattgagtcatctactggatygtgtagctctttggaatcaaagtgaaggacaaatttctattattctttaaaggatttttaccttaactagggtgtgaaaaaagtgtggtttgtttagaaa

SEQ ID NO: 4344 - DNA, 201 bp, Homo sapiens
tgagtgaatgtggccatagagtttctccctctctttttcttccccctcttccttttttgaaaaaagaaaaaaaaggaagaaaaaagataatttgatttttwaaaaaaatctctctccctgagctctccccaagtttctttaaaacaaatcaacaacaacacaattggagcagtgccttagctagaatgaattatgccagta

SEQ ID NO: 4345 - DNA, 201 bp, Homo sapiens
gctgtgaattaactgtcacttcttttttttttttttttggcaaactcacaaaatcccagaagtcaggggtctgttgtttgttcattctgcctccttctgartcattcaggtacagggtgtgtctgccaattgaaactgcacagcggaggaagtttttgagttcacatctgccgggatgggaacgcagtgcgaccagggact

SEQ ID NO: 4346 - DNA, 201 bp, Homo sapiens
ggttaaattaacctagcacatgcttgatacagactaggtgtgaaatttcactttgattcctttggctttaaagaatgcataaattagtgtgggtggaggcrggagaagggggggaatgccaagtcccccgttttgttgtgctgggtagacacaatatacctcttcccctttaagtgaaataagtcttcaaatccaattagg

SEQ ID NO: 4347 - DNA, 201 bp, Homo sapiens
gactgatagcgtttgagccacaaggcaaggcatttgcaatatttaggttttggaacccagctctgccactcactagctgggaaatctacaagtcaccttarttgtctgaatgacacttctctcaacaataaaatggccagcaatgcttacttacttcacagagcagtaaggttaaattaacctagcacatgcttgatacag

SEQ ID NO: 4348 - DNA, 201 bp, Homo sapiens
ctattaagctggagcttggagaggagggaaattgagatggtcatactatttcctccttgaaataagaggctagttattctcctgtgaatagacaagtaagrgaaagcctggatttttaccagtgactgggtcaggggagggaagaggggagaaaagggagttggaaagtgactggagcaattaggaaagagagtaaggctc

SEQ ID NO: 4349 - DNA, 201 bp, Homo sapiens; identical to SEQ ID NO: 363

SEQ ID NO: 4350 - DNA, 201 bp, Homo sapiens; identical to SEQ ID NO: 362

SEQ ID NO: 4351 - DNA, 201 bp, Homo sapiens
aaggcgttaaattttggaaatcctatagacaaagaatatggtgggtggtgtggagcgtgggtaatggcttaaattagtactgcccaggagcagggtataamattagttgggggaaaatgcggagcttcttggcttgagcagcctctgctgttcgcggagttgctgggattgttctcatctctattacctcattttattgca

SEQ ID NO: 4352 - DNA, 201 bp, Homo sapiens
tgcattaccttgaaatatttaagcaacttagaagtagacttctgctgaccagtgccgtcttagaaagtttctttgtaactttctagtcctaggagaggagycaacgtgttgggggactgcagtaaataaaactgcccacgcaaatttagcaatgcaccagggagcagtttaatgtgagtttctgaagagtagttttgcaat

SEQ ID NO: 4353 - DNA, 100 bp, Homo sapiens
cacagctaacctgctcttgtctggggccaccacctacaagctcactcccrcccagtggtttctgcgggaagggagtatgtttgtggccctgtcagcctcc

SEQ ID NO: 4354 - DNA, 201 bp, Homo sapiens
aattagaaatgtggtagcatgtattatggctgtcatgagtagtttgatttctctcttttgtgtatgttttggctaaactaaacaaagcaaaaaatatttaygcaatcaactaatgtacgaaacttctgggatttgctgcaatctgttatgaatggttttaactgaatacctttaaatttacttgccctggcttggggtggg

SEQ ID NO: 4355 - DNA, 201 bp, Homo sapiens
gtgcagctaagctggtgactgcttcagagaatctcatggctggaaatccgggggtgagggggtgtggggtggtgagagggcaggagtggagttaaaatggrgtgtagttctctaggtttcccattcctcccactccttgttttccttttcatcatctttttttttttgtcaacccacagccaacatcgtaattcccatttc

SEQ ID NO: 4356 - DNA, 201 bp, Homo sapiens
tggattatctataaagaggattttaaaccggtggtttaaaaagctgggagagataggaggaagagcatagtgaggggttagacctgcatttatttcagtcyttcacaatctttgacaagaaccaggacccagagtagtttgggttcatgttgaatatatctctcctaatacatccgatctcttgttccctacactttcttc

SEQ ID NO: 4357 - DNA, 201 bp, Homo sapiens
ctttttaacatacaccattgccttcactgcaatactaagtggaactagagttgtctctcagaacattcaagcaagcaaggtttacttgaataactaaaggmcttatatggattatctataaagaggattttaaaccggtggtttaaaaagctgggagagataggaggaagagcatagtgaggggttagacctgcatttatt

SEQ ID NO: 4358 - DNA, 201 bp, Homo sapiens
gctgaacagagacactggggcagtgccaggcataaatgaggcctttgtttgtttgtttatttagagacagagtctcgctctgttgcccaggcagtggcgcratctcggctcactgcaacctccacctcctgggctcaagcaattctcctgcttcggcgtcccaagtagctaggactacaggtgcgcagcaccacgcccggc

SEQ ID NO: 4359 - DNA, 201 bp, Homo sapiens
gatcactctggctagggtgcaaatcatacacttagtggccaaggagggatgcagagagaccagttgggaggctactgcagagagtctcgtgagctgtgttkgtgcggtccacctgagcctctctctctcatgcctcagtatctctgtccccttgcccagaggccttctgcagcctcgcctggggtactgagtgcccatccc

SEQ ID NO: 4360 - DNA, 201 bp, Homo sapiens
aagtggaaaaaagggggaaggagagggatgaggtgagcaagagtgttccaggcagaaggaatcatgcatacaaaggccccccaacacagcaggttccgggraagtagaataagagaggccacggtgttgagtgtgaatgggatgttgagagataaggctagagatgctttgttaagggtcctgtgagcagggtaaagagtt

SEQ ID NO: 4361 - DNA, 201 bp, Homo sapiens
gaagagccatccttccaaccacccaggccaggacaaaacgctccgggtgggtcctctcactgccaccctcccgttagaaacttgcttcatgactttgctgyatcttccctcgtctgcaaaacagaaatggtcacccacatcctgcctgcaccaatggatcagagaggcccgggggtttctggaaacatggctctgagctct

SEQ ID NO: 4362 - DNA, 201 bp, Homo sapiens
tagaggtctgtctgtccacctcccgacatatggggtctcctgtccctcctggtcacccagcccagagcctggcactgtgtaggtgctcatggaatatttgytgaataaagtaaccagtgaacaaaagagttcctggagtacggaggtgggagagacccctgtagaggaaactccctgaagcccaccctttagccaggttct

SEQ ID NO: 4363 - DNA, 201 bp, Homo sapiens
caggcctctgttttctcatctgttgaatggggataacaatggtacgtacttcagagagagtttttatgaaaatgaatggaatgatgcaaataaatacataytaataacaatacaatacaaagaagaggaaaaggaagaggaagaagtcactgtcacctatggaatacttactgtgtaccgggcattgtgctaaagactttt

SEQ ID NO: 4364 - DNA, 201 bp, Homo sapiens
ctctgggagtcccagtgaggtactcgattcagcctgcaggagtctggagacatctaaattgagctgtaatggatgcaagtggaaaaaagggggaaggagarggatgaggtgagcaagagtgttccaggcagaaggaatcatgcatacaaaggccccccaacacagcaggttccgggaaagtagaataagagaggccacggt

SEQ ID NO: 4365 - DNA, 201 bp, Homo sapiens
aggattgggactgggatgcacaaggggctctgggagtcccagtgaggtactcgattcagcctgcaggagtctggagacatctaaattgagctgtaatggakgcaagtggaaaaaagggggaaggagagggatgaggtgagcaagagtgttccaggcagaaggaatcatgcatacaaaggccccccaacacagcaggttccg

SEQ ID NO: 4366 - DNA, 201 bp, Homo sapiens
ggcaagccctgaagatcttcctcacctccttttatttttctataaccttgtctcctccagcaccacagggaagacaatcacagtgggtcaagagcgacccwctttcacgtgggctctgccatgacctctgagacctgcttatgatcagtgcaatgaagttagaagtaactgatgattgggagcctttgcagatagctgggc

SEQ ID NO: 4367 - DNA, 201 bp, Homo sapiens
gggcaagccctgaagatcttcctcacctccttttatttttctataaccttgtctcctccagcaccacagggaagacaatcacagtgggtcaagagcgaccstctttcacgtgggctctgccatgacctctgagacctgcttatgatcagtgcaatgaagttagaagtaactgatgattgggagcctttgcagatagctggg

SEQ ID NO: 4368 - DNA, 201 bp, Homo sapiens
agggcaagccctgaagatcttcctcacctccttttatttttctataaccttgtctcctccagcaccacagggaagacaatcacagtgggtcaagagcgacmctctttcacgtgggctctgccatgacctctgagacctgcttatgatcagtgcaatgaagttagaagtaactgatgattgggagcctttgcagatagctgg

SEQ ID NO: 4369 - DNA, 201 bp, Homo sapiens
caagccctgaagatcttcctcacctccttttatttttctataaccttgtctcctccagcaccacagggaagacaatcacagtgggtcaagagcgaccctcyttcacgtgggctctgccatgacctctgagacctgcttatgatcagtgcaatgaagttagaagtaactgatgattgggagcctttgcagatagctgggcaa

SEQ ID NO: 4370 - DNA, 201 bp, Homo sapiens
gcaagccctgaagatcttcctcacctccttttatttttctataaccttgtctcctccagcaccacagggaagacaatcacagtgggtcaagagcgaccctstttcacgtgggctctgccatgacctctgagacctgcttatgatcagtgcaatgaagttagaagtaactgatgattgggagcctttgcagatagctgggca

SEQ ID NO: 4371 - DNA, 201 bp, Homo sapiens
tagggcaagccctgaagatcttcctcacctccttttatttttctataaccttgtctcctccagcaccacagggaagacaatcacagtgggtcaagagcgamcctctttcacgtgggctctgccatgacctctgagacctgcttatgatcagtgcaatgaagttagaagtaactgatgattgggagcctttgcagatagctg

SEQ ID NO: 4372 - DNA, 201 bp, Homo sapiens
ctagggcaagccctgaagatcttcctcacctccttttatttttctataaccttgtctcctccagcaccacagggaagacaatcacagtgggtcaagagcgmccctctttcacgtgggctctgccatgacctctgagacctgcttatgatcagtgcaatgaagttagaagtaactgatgattgggagcctttgcagatagct

SEQ ID NO: 4373 - DNA, 201 bp, Homo sapiens
gtgacctgttgattctttccggcatctggagcctccttgacctctgttctggatatgggagcagccgctcaccccacgatattgccctcaggatagtccasatcacaagctgcatctgtttgagaacccagctttcagtggccgcaagatggagatagtggatgatgacgtgcccagcctgtgggctcatggcttccagga

SEQ ID NO: 4374 - DNA, 201 bp, Homo sapiens
agggccttccgcggggagcagtttgttctggagaagggggattatcctcgctgggatgcctggtccaacagccgtgatagtgacagccttctgtccctccrgcctctgaatattgtgagtgtggttcctgctcacttctgggtgttcctggaagcagggtgcactgagagctggtcaggcagctcattgcacaagctgggc

SEQ ID NO: 4375 - DNA, 201 bp, Homo sapiens
tgcagaatggaaaatcctctatatgtacaatctctctccccctcatttctcttcctcctcacctccaccacccctttgcacatcagcattttaacagctgrtcttttgagaagcctgtatctttttcctcttcagtagatacccttcttcatggtcctttgcctaatcaaacagaggcctttggcctttgaaaatccatga

SEQ ID NO: 4376 - DNA, 201 bp, Homo sapiens
cacatcagcattttaacagctgatcttttgagaagcctgtatctttttcctcttcagtagatacccttcttcatggtcctttgcctaatcaaacagaggcytttggcctttgaaaatccatgacaaggcctcagaaatcagtgttgtggaggattactccatgccaccggagaaactctggtgaaagagaaacctcgtggt

SEQ ID NO: 4377 - DNA, 201 bp, Homo sapiens
aaagatgttgcattcagactatgaaaatagcaaataaagctttggtgcaagttgcattggagaagtcggtgcgtccatgtgtgaatgaatagagtctcccrtgcatgcaggccctgactggggctggctgagtcagtctgtcctgtgctgagctgtgggccagccagcgagagggcagagctggggtcctgggagagggtg

SEQ ID NO: 4378 - DNA, 201 bp, Homo sapiens
gcagaatgggaggccatggaaacaaggcaggatttccattcagactgacaaggggttgagtcctcctcctgccaccctctggctgtgggatttcttttaarcattggttctccttagctatacaatgggagtagtgatcaggacatttttgcaggtaacagtttaaggtggtggttctcagctgggtggattgtgccctcc

SEQ ID NO: 4379 - DNA, 201 bp, Homo sapiens
tttccattcagactgacaaggggttgagtcctcctcctgccaccctctggctgtgggatttcttttaagcattggttctccttagctatacaatgggagtrgtgatcaggacatttttgcaggtaacagtttaaggtggtggttctcagctgggtggattgtgccctccagagcatgtctggtaatgaaaggaggcattat

SEQ ID NO: 4380 - DNA, 201 bp, Homo sapiens
tacagccacgccccatgggcagcaaggctctgtagctcatcctggactccagtcacatcaacacctggcttctcccgggtggatccagtgaaccattttcytttggtttgaagccagaggtgttcctggggagatggcggaacagcacggagcacccgaacaggctgcagctggcaagagccatggagaccttgggggcag

SEQ ID NO: 4381 - DNA, 201 bp, Homo sapiens
aggatgggtcgaatcccagtgcctcctcttaacttgctgtgcagcccgaggcaagtatcttaccctttctgagcttctttgatcccttctgtaaaatgackagaacagatgttccctggggatcttctacaaagtcagtttgtgtttccaggtgggtgagagaggcaaaaccttggtctgcctttgcagcccttctcttcc

SEQ ID NO: 4382 - DNA, 201 bp, Homo sapiens
ggtcttgaacttctggcctcaagtgatctgcctgcctcggcctcccaaagtactgggattacaggcctgagccaccacgcccggcccacagtgacactttraacaccacccttctccctcccctgcttcactcacaccccgcagctgctccagccctttctctttgtcacataactgagtcctccttagagggcagtggaa

SEQ ID NO: 4383 - DNA, 201 bp, Homo sapiens
cactgcactccagcctgagcaacaagagcgaaactccatctaaaaaaagaaaaattacatagtttgatggagagacagacaaagtaacaggtattcacaaygtattgtgatcaggattgggactgggatgcacaaggggctctgggagtcccagtgaggtactcgattcagcctgcaggagtctggagacatctaaattga

SEQ ID NO: 4384 - DNA, 201 bp, Homo sapiens
aaaaaagggggaaggagagggatgaggtgagcaagagtgttccaggcagaaggaatcatgcatacaaaggccccccaacacagcaggttccgggaaagtaraataagagaggccacggtgttgagtgtgaatgggatgttgagagataaggctagagatgctttgttaagggtcctgtgagcagggtaaagagtttggatt

SEQ ID NO: 4385 - DNA, 201 bp, Homo sapiens
ggagctaaagaggaatgtaggcaggcagagtgcatggtcagatgctggctggaggcagggtgactggaagcagaccgtccacatctcaaccttggtctccyggcaggtgggttggctatgagttccccggctaccgtgggcgccagtacgtgtttgagcggggcgagtaccgccactggaatgagtgggacgccagccagc

SEQ ID NO: 4386 - DNA, 201 bp, Homo sapiens
tcctaggctctaatcctttcaggcagagccatgtgcccctactgccctgatcttgtgtttgtctgctgctgcatgtttccatctgaatgtctgtcagtctrcccatccactcacccatccatccatcatccttccacccacccacccacccattcatccacccattcacccactcatgtgcccatccattcgtctactcac

SEQ ID NO: 4387 - DNA, 201 bp, Homo sapiens
attttcaattaatttaacctgcatattttacaaatgaggtgagaaatcaccttgacttttccgagtgtatgggagacctgggctgggcatcaggatcagakggggcaggggtggcccagccatgagacagatggaaggcaggggcttgacatccccagtgcggagatacagcacccctattgctcacccctttctccccgc

SEQ ID NO: 4388 - DNA, 201 bp, Homo sapiens
agggtcttgctgtattgcccaggcttgtctcaaactcctggcctcaagtgatcttcccgcctcagtctcccaaagtgttgggattataggcatgaacgagrtgccatccagtctgttgtgctttttttttttttgaagcagagtctcactctgtcacccaggctggagtgcaatggctcgatctcggctcatggcaacctc

SEQ ID NO: 4389 - DNA, 201 bp, Homo sapiens
tgccccaagtgccacagctcttaagtgatgggaccaggactcatattcaggtctgtctccaaagcccgtttctctatattcatcagctgttgatgctgtgstcggccaacctaatgccactgctggtgtgggcagtgacttcatttattgagcatgtactatagtctaggcaccaggccacaagctgtccatgcctgatct

SEQ ID NO: 4390 - DNA, 201 bp, Homo sapiens
ggaaactctctcctgtgcctggagaggtgggaggcagctataatcttggcggaatgaatacctactaggagcaaccttcatccaatgactaacaggagctkgggtatcaattccccagctcccagtgctcaggtgagaactttaccaagcattctttaccattttggaagttaatgtcacccatggcaatgctacatgagt

SEQ ID NO: 4391 - DNA, 201 bp, Homo sapiens
gcacgtagatgggttacattatcaattttatttcaagagagtaaaagggctgttacaaaaaattgtcgtaagaagggagtgttgtttctgatagctatgaraacaccttttgatgatctcagagcctccttccagctctgactcttttgtatctaaaagttaaatattgtttgtccaaggggaacaccaagacctattctc

SEQ ID NO: 4392 - DNA, 201 bp, Homo sapiens
tcctacagtgaatttgggggtggaggcatctcctgaggcccttccctcctgcagcaggtttgggggtgggtgttattttgtggtgacctgttgattctttycggcatctggagcctccttgacctctgttctggatatgggagcagccgctcaccccacgatattgccctcaggatagtccagatcacaagctgcatctgt

SEQ ID NO: 4393 - DNA, 201 bp, Homo sapiens
tcctaaatcaaccagctttggaggaatctccccgtccctcctacagtgaatttgggggtggaggcatctcctgaggcccttccctcctgcagcaggtttgkgggtgggtgttattttgtggtgacctgttgattctttccggcatctggagcctccttgacctctgttctggatatgggagcagccgctcaccccacgata

SEQ ID NO: 4394 - DNA, 201 bp, Homo sapiens
cagtttctctatcatttaaatgatgggattgaacaagatctggaaattccttttcagttttataatctacggctctaggttcctaaatcaaccagctttgraggaatctccccgtccctcctacagtgaatttgggggtggaggcatctcctgaggcccttccctcctgcagcaggtttgggggtgggtgttattttgtgg

SEQ ID NO: 4395 - DNA, 201 bp, Homo sapiens
aataacataccctaggatggttttctggcccagagtctcagacagttcccggtatgtcctagcagctcctttaattacaggtccaggaattagcagtaggkttggagggagggtacaaggttcaaggtcagcagctcttggacacttctctcactaaacttgaatccttcctcagctgcagcaaaggtgacccagccaagc

SEQ ID NO: 4396 - DNA, 201 bp, Homo sapiens
ctggggagatggcggaacagcacggagcacccgaacaggctgcagctggcaagagccatggagaccttgggggcagctacaaggtactgggcagggagggrgtcagagggcccaggctactcctgggcctcagggtcatcttcccagccaagcagcacctctgcaggaaggaagagccatccttccaaccacccaggccag

SEQ ID NO: 4397 - DNA, 201 bp, Homo sapiens
tgggttcaagtgattctcctgcctcagcctcctgagtagctgggactgaaggcacatgccaccacgctgggctaatttttgtatttttagtagaggtggcrttttgccatgttggcaaagctggtcttgaacttctggcctcaagtgatctgcctgcctcggcctcccaaagtactgggattacaggcctgagccaccacg

SEQ ID NO: 4398 - DNA, 201 bp, Homo sapiens
ccacctatccctgataataatttattcaacaattttttactgaacatctactatatgctggtgtgctgatacagagaacaacaagaatggcacatcctctggccctcaaaaaatttgcgtagtctggggctcacgcctgtaatcccagcactttgggaggccgaagtgggcggatcacctgaggtcaggagttcatgacca

SEQ ID NO: 4399 - DNA, 201 bp, Homo sapiens
attgcaaactgtaaaaatccctcctccccagtgtagatatttaaaccagagtaagtgatggggagacattctgtggtctctgaatgtgccttccccctcaycgtgtgttaaaacacaaaagccgaagttccatggcatcatgattccgaggggctggagggataggacccactccacatctaaaggggatctgctttgggc

SEQ ID NO: 4400 - DNA, 201 bp, Homo sapiens
atatttaaaccagagtaagtgatggggagacattctgtggtctctgaatgtgccttccccctcaccgtgtgttaaaacacaaaagccgaagttccatggcrtcatgattccgaggggctggagggataggacccactccacatctaaaggggatctgctttgggctcggtcccattagcgagtgggggactcttgctgtgt

SEQ ID NO: 4401 - DNA, 201 bp, Homo sapiens
aacggttgggtggatttgcgcccaagttggagagtatggttagcgtgatctgacttaaaacttaggccacatggcacatggaaactggagagtgtctgggktccctcactttaagaactagaatttttccaaaggttgcgtgtgactcaataggaaatggtgaccccaagaaaccaaagaaagggagttggtggttgtggg

SEQ ID NO: 4402 - DNA, 201 bp, Homo sapiens
agtgtctggggtccctcactttaagaactagaatttttccaaaggttgcgtgtgactcaataggaaatggtgaccccaagaaaccaaagaaagggagttgktggttgtggggagacacgggagagctgcacaccgtgccccttgcctggcgctgctgggcttcccacaaagccagtgaggttcatctgtccccaggaagtc

SEQ ID NO: 4403 - DNA, 201 bp, Homo sapiens
aaaaggagctcgagttctttgtgtaggaaagttaagcttcctgcctgcggtgttcttgcaattgccttaggaattcacaagctctaggagttctgaacggmaggcagacgagaggcactttatccagtcccagaaagaatctctaaccgtgtgactgagaagtcatctagaaaaacttatatttttaatgtaaaaacaaat

SEQ ID NO: 4404 - DNA, 201 bp, Homo sapiens
aggaatgtaggcaggcagagtgcatggtcagatgctggctggaggcagggtgactggaagcagaccgtccacatctcaaccttggtctcccggcaggtggrttggctatgagttccccggctaccgtgggcgccagtacgtgtttgagcggggcgagtaccgccactggaatgagtgggacgccagccagccgcagctgca

SEQ ID NO: 4405 - DNA, 201 bp, Homo sapiens
attagggggcctcagcaaatgcatccccaagtcttggctctcttgggaggaccttctggccatttcctgttgctagcttcctctttcccttgcctttccgycggacatctttgatctgctgtctggattgtaaaagatgctggctgtgcttttcctactctgtagacgttacaatgttgctgtgtgagggccacttccacc

SEQ ID NO: 4406 - DNA, 201 bp, Homo sapiens
ccggaccttttgtagtttctgtgggacgcgcatggctgaccgcctgcaaagaaaaacagcgcctcccttaagggtcaggtcccagtgagaggaccctgacrgcccagctgggggtggaacgagggacccttgtctgcagtggccagggtccaagcccctggacatgtgcttagggcaggggaccttccaaaacagctcctc

SEQ ID NO: 4407 - DNA, 201 bp, Homo sapiens
tgaatgtgccttccccctcaccgtgtgttaaaacacaaaagccgaagttccatggcatcatgattccgaggggctggagggataggacccactccacatcyaaaggggatctgctttgggctcggtcccattagcgagtgggggactcttgctgtgtgctaagaggctgctaggactcacccagttggaattctgggtggg

SEQ ID NO: 4408 - DNA, 201 bp, Homo sapiens
agaatgacccgaccccaaatggcagtagtgtcaaggttgaaaagtctagattggggagatgtggtacatcaaagtgctgagcgtgcagtaggtctgcaagrtcctcaaagatgtgatgggagggggagccacgccatccccacctctgccttcctccttctgtcccagctggtggcaactacatcccaactcagggggtcc

SEQ ID NO: 4409 - DNA, 201 bp, Homo sapiens
accagggagatatagatgaaaataacataagcagttgcagcagaaacaacggtaataatagctgccactgtagagctgcggctaaaccccaagcacattaytgagtgctctagagtttcatctcgactctacagacaggcaatagtgatcctcatatgcagggagagaaactgaggcccagagagctgaagcaaattgccc

SEQ ID NO: 4410 - DNA, 201 bp, Homo sapiens
tgccactgctggtgtgggcagtgacttcatttattgagcatgtactatagtctaggcaccaggccacaagctgtccatgcctgatctcagttaacaccaasaggccccttgactggctcctgggtaacaggaaggattacagggaggctggctcaagtgtgagtcagtgtgcccactcaccatgcccactcccaggccaaa

SEQ ID NO: 4411 - DNA, 201 bp, Homo sapiens
actgatgtccaagtgactctttctgaagcctcacacccataataaccatttgtgccaggaagctcttgttatttgcaagtactcccatacattgtcttgtycagtcctcagctccaagaggctcagagcggggaagccaactgctgaggtcacacagccagcgaggggcagaactgggatttgaccgcaggcctaactcca

SEQ ID NO: 4412 - DNA, 201 bp, Homo sapiens
gagaggtgggaggcagctataatcttggcggaatgaatacctactaggagcaaccttcatccaatgactaacaggagcttgggtatcaattccccagctcmcagtgctcaggtgagaactttaccaagcattctttaccattttggaagttaatgtcacccatggcaatgctacatgagtgaatgaaaatgtctaacgcat

SEQ ID NO: 4413 - DNA, 201 bp, Homo sapiens
cctcgccacagccctgagccttctgggagtgtggaggccccagtctgagctctagatctgttgtggggcttttgacagctcccctgccttctctggcctcrttttccgcatctgtaaaatgagagttgaagaattctctagaatcctagatgtctgcagaaaatcccaggatacctgaggttggaagaacagcaaggtcaa

SEQ ID NO: 4414 - DNA, 201 bp, Homo sapiens
gtgtgagccacggcgcccggccatcggtgcctatagtttcttgcatgattcatgttccctgcactcctgtactgttgagatttctaggcagccttgacttraaacaagtaaaatctgttctctccacctgttcccatctgagtccttcctgcttttttaaacatccccacacccttgaactgattcttgaaatgttcttcc

SEQ ID NO: 4415 - DNA, 201 bp, Homo sapiens
aggcagagaaataacaggtgcaaaggccctaggcaggagtatgctggcctaatgggaaacagccaggggcccagcaggtctggaatggagtaaaagactgrggatagggttcagagggaacagggtcaggtcatttagggctttgcagaacctagtggactttgcttgttctctgagggaggtgggagccatggagcattt

SEQ ID NO: 4416 - DNA, 201 bp, Homo sapiens
ttcaccgtgttagccaggatggtctcgagctcctgacttcgtgatccgcctgcctcggcctcccagagtgttgggattacaggcgtgagccaccgcgcccrgcctgtaactgggttttatgctgacttgaggattttagccaaaaacaaataccaacaacaacaaaagaaaaccttgttaactcactcctttgctccaata

SEQ ID NO: 4417 - DNA, 201 bp, Homo sapiens
tcagcctggtgtcttgcccactctggggaaaagggcacagggtttggaggctctctgggcctcaacagccccatgtttgaaatgaggatggtgcccagatrttgtgcccagagttggtgtaaaggctgaaagacatgagtgaagccagctagcagagggaggcacactagaaatctgagagaaggtttgaatgtgttggct

SEQ ID NO: 4418 - DNA, 201 bp, Homo sapiens
aattttgtcttctatggggcagaacctgagagtgacagtgaagcaagaatatccctcagttataagcgaatgaggtttagcgccaagagatcattttaccmgcttaattgagaggcagtattgctcagtgattgcaggcagtagagtcaagtgataggaggcagagtggctgagttaggctcttgatttacaccacctggt

SEQ ID NO: 4419 - DNA, 201 bp, Homo sapiens
aaggacgtgcaatatgagtgttcatcatcctcttctcttgatcattttttgacaagaaggagggcaacagacaggcttccagagctccgttccagacacargatgctgaagacatgctccgtagttgtatggagcagagagactttgcagttcctcaataatgggggtttattctaaagacatctgtagaaacagggaaat

SEQ ID NO: 4420 - DNA, 201 bp, Homo sapiens
cacgggagagctgcacaccgtgccccttgcctggcgctgctgggcttcccacaaagccagtgaggttcatctgtccccaggaagtcatcagagacggtggytgaggagacaggcactgggggcctccgtggacccgctattggagtgaagtggcctggatggaattgggtggacagggtgctgcctcagcaggctgggatg

SEQ ID NO: 4421 - DNA, 201 bp, Homo sapiens
tttttttttttttgagatggagtcttgctctgtcacccaggctggagcacagtggtgcaatctcggctcactgcaacctctgcctccatggttcaagcgawtctcctgcctcagcctcctgagtagatgggactacaggtgtgctccaccacaccctgctaattttttagtagagatggggtttcactatgttggccaagt

SEQ ID NO: 4422 - DNA, 201 bp, Homo sapiens
tgccataacatcatcttccatgacttggacgggcacttccttgacaattcctattggcatcacacgggctacaaattatgctgttttctaaagaatttgarcttttttttttttcttttcttgagacacggtcttgctctgttggccaggctggaatgcagtggcacaatcatagctcactccagcctccaactcctgggc

SEQ ID NO: 4423 - DNA, 201 bp, Homo sapiens
ggccaacctaatgccactgctggtgtgggcagtgacttcatttattgagcatgtactatagtctaggcaccaggccacaagctgtccatgcctgatctcakttaacaccaacaggccccttgactggctcctgggtaacaggaaggattacagggaggctggctcaagtgtgagtcagtgtgcccactcaccatgcccact

SEQ ID NO: 4424 - DNA, 201 bp, Homo sapiens
cctctgcctccatggttcaagcgattctcctgcctcagcctcctgagtagatgggactacaggtgtgctccaccacaccctgctaattttttagtagagayggggtttcactatgttggccaagttggtctggaactcctgatctcatgatccacccacctcagcctcccaaattgctaggattacaggcatgagccactg

SEQ ID NO: 4425 - DNA, 201 bp, Homo sapiens
tgtgggacgcgcatggctgaccgcctgcaaagaaaaacagcgcctcccttaagggtcaggtcccagtgagaggaccctgacagcccagctgggggtggaaygagggacccttgtctgcagtggccagggtccaagcccctggacatgtgcttagggcaggggaccttccaaaacagctcctctgagggaggggagtgggca

SEQ ID NO: 4426 - DNA, 201 bp, Homo sapiens
cattaatgtattcagcaaatgccatgccctgttcagtgtattcagcaaatgccatgccctgttcaaggcctaaggacagggcacaatgtcctgccctccargttctcaccttctgtgggagagacagaaagtaaataaacaggtcgatgagggctataatgttgggaggcggtaaataccaagaacaataaagctggataa

SEQ ID NO: 4427 - DNA, 201 bp, Homo sapiens
atccatccatccacccacccacccatctacccattcattcatccatccaactacctaccacccattcatccatccatgcatccatccatccatccattcayccacccacttacccatccatccattcattcttccttccatcttcctatatttgttctttccattaattcatccatttttccttccactcacgcatctttc

SEQ ID NO: 4428 - DNA, 201 bp, Homo sapiens
cccaggatctggagttgggttgattccagaggtggggttcagctgcactgccagattcatggcagccccaggcagtcactgatgtccaagtgactctttcygaagcctcacacccataataaccatttgtgccaggaagctcttgttatttgcaagtactcccatacattgtcttgttcagtcctcagctccaagaggctc

SEQ ID NO: 4429 - DNA, 201 bp, Homo sapiens
gcagtagagtcaagtgataggaggcagagtggctgagttaggctcttgatttacaccacctggtttcctctcctagctctaccactcactgtttgcctttrggcaagtcacttaacctctctgtgcttctgttgcctcatctgtaacatggagataataatgctacctatctcataaggttgttgccggtagtaaccggag

SEQ ID NO: 4430 - DNA, 201 bp, Homo sapiens
tccattcatccacccacttacccatccatccattcattcttccttccatcttcctatatttgttctttccattaattcatccatttttccttccactcacscatctttctatctatccttttatccacttatccatcaatttttctttcaatctacttgtccatcaatgtgtccatctgatcttccttccttccttccttt

SEQ ID NO: 4431 - DNA, 201 bp, Homo sapiens
tacaccacctggtttcctctcctagctctaccactcactgtttgcctttgggcaagtcacttaacctctctgtgcttctgttgcctcatctgtaacatggwgataataatgctacctatctcataaggttgttgccggtagtaaccggagtttactttgcagaaagggcttagaacaatgagtaaaaccaaggacgtgcaa

SEQ ID NO: 4432 - DNA, 201 bp, Homo sapiens
aggcaccaggccacaagctgtccatgcctgatctcagttaacaccaacaggccccttgactggctcctgggtaacaggaaggattacagggaggctggctyaagtgtgagtcagtgtgcccactcaccatgcccactcccaggccaaacgcagccccaggatctggagttgggttgattccagaggtggggttcagctgca

SEQ ID NO: 4433 - DNA, 201 bp, Homo sapiens
aacagatgttccctggggatcttctacaaagtcagtttgtgtttccaggtgggtgagagaggcaaaaccttggtctgcctttgcagcccttctcttcctasgcttggggcaggcagaggtcttccccgagactgcaaacaggtgttttcatttttttaagggggaaatttcctattaaggaaaatacagatttctgacctc

SEQ ID NO: 4434 - DNA, 201 bp, Homo sapiens
tttaaaaataccctgctagtgttttgttttgttttgtttttctgagacaaggtcttactctgttgctcaagctggagtggagtggcacgatcatagctcamtaacacctgggctcaagtgattctcccacctcagcctcccaagtagctgggactacaggtgtatgctaccatgaccagctaatttttaaatatttttgta

SEQ ID NO: 4435 - DNA, 201 bp, Homo sapiens
ggggctggagggataggacccactccacatctaaaggggatctgctttgggctcggtcccattagcgagtgggggactcttgctgtgtgctaagaggctgstaggactcacccagttggaattctgggtgggctcaggaagtttagagccacgtaaaaagctggtaggcatgagtgtgccaggtctttgccagcctgcgtc

SEQ ID NO: 4436 - DNA, 201 bp, Homo sapiens
ctgggttcacaccattctcctgcctcagcctcccatgtagctgggactacaggcacccgccaccacacctggctaattttttgtgtttttagtagagacarggtttcaccgtgttagccaggatggtctcgagctcctgacttcgtgatccgcctgcctcggcctcccagagtgttgggattacaggcgtgagccaccgcg

SEQ ID NO: 4437 - DNA, 201 bp, Homo sapiens
gctgggactgaaggcacatgccaccacgctgggctaatttttgtatttttagtagaggtggcgttttgccatgttggcaaagctggtcttgaacttctggyctcaagtgatctgcctgcctcggcctcccaaagtactgggattacaggcctgagccaccacgcccggcccacagtgacactttgaacaccacccttctcc

SEQ ID NO: 4438 - DNA, 201 bp, Homo sapiens
tgtcagtctgcccatccactcacccatccatccatcatccttccacccacccacccacccattcatccacccattcacccactcatgtgcccatccattcrtctactcacccatccatccatccatccacccacccattcatccacccattcacccacccatgtgcccatccattcatctactcacccatccatccatcca

SEQ ID NO: 4439 - DNA, 201 bp, Homo sapiens
ccacccatgtgcccatccattcatctactcacccatccatccatccacccacccacccatctacccattcattcatccatccaactacctaccacccattyatccatccatgcatccatccatccatccattcatccacccacttacccatccatccattcattcttccttccatcttcctatatttgttctttccattaa

SEQ ID NO: 4440 - DNA, 201 bp, Homo sapiens
attcatctactcacccatccatccatccacccacccacccatctacccattcattcatccatccaactacctaccacccattcatccatccatgcatccayccatccatccattcatccacccacttacccatccatccattcattcttccttccatcttcctatatttgttctttccattaattcatccatttttccttc

SEQ ID NO: 4441 - DNA, 201 bp, Homo sapiens
cacccatctacccattcattcatccatccaactacctaccacccattcatccatccatgcatccatccatccatccattcatccacccacttacccatccmtccattcattcttccttccatcttcctatatttgttctttccattaattcatccatttttccttccactcacgcatctttctatctatccttttatccac

SEQ ID NO: 4442 - DNA, 201 bp, Homo sapiens
ctacccattcattcatccatccaactacctaccacccattcatccatccatgcatccatccatccatccattcatccacccacttacccatccatccattmattcttccttccatcttcctatatttgttctttccattaattcatccatttttccttccactcacgcatctttctatctatccttttatccacttatcca

SEQ ID NO: 4443 - DNA, 201 bp, Homo sapiens
tacccattcattcatccatccaactacctaccacccattcatccatccatgcatccatccatccatccattcatccacccacttacccatccatccattcwttcttccttccatcttcctatatttgttctttccattaattcatccatttttccttccactcacgcatctttctatctatccttttatccacttatccat

SEQ ID NO: 4444 - DNA, 201 bp, Homo sapiens
ctgggcagtgggagttgctgaagagctgaacagagacactggggcagtgccaggcataaatgaggcctttgtttgtttgtttatttagagacagagtctcrctctgttgcccaggcagtggcgcaatctcggctcactgcaacctccacctcctgggctcaagcaattctcctgcttcggcgtcccaagtagctaggacta

SEQ ID NO: 4445 - DNA, 201 bp, Homo sapiens
ggcataaatgaggcctttgtttgtttgtttatttagagacagagtctcgctctgttgcccaggcagtggcgcaatctcggctcactgcaacctccacctcytgggctcaagcaattctcctgcttcggcgtcccaagtagctaggactacaggtgcgcagcaccacgcccggctaatttttgtgtttttagaagagatggg

SEQ ID NO: 4446 - DNA, 201 bp, Homo sapiens
cagagagactttgcagttcctcaataatgggggtttattctaaagacatctgtagaaacagggaaattagaaaactaggctacatggccacactcagagartccaagtgaaagccctacaaagaggttcatggcaggggcagggggccaggacccagacagtgaacaggcatcatggagagagaaactggagcctgagagc

SEQ ID NO: 4447 - DNA, 201 bp, Homo sapiens
aggggcagggggccaggacccagacagtgaacaggcatcatggagagagaaactggagcctgagagctcctgggagctggagagctggctctgtggtcacygcccccaggaatccaccattagggggcctcagcaaatgcatccccaagtcttggctctcttgggaggaccttctggccatttcctgttgctagcttcctc

SEQ ID NO: 4448 - DNA, 201 bp, Homo sapiens
tgttgctagcttcctctttcccttgcctttccgccggacatctttgatctgctgtctggattgtaaaagatgctggctgtgcttttcctactctgtagacsttacaatgttgctgtgtgagggccacttccaccagccagcatccacatgcctatgtgcctggaaactctctcctgtgcctggagaggtgggaggcagcta

SEQ ID NO: 4449 - DNA, 201 bp, Homo sapiens
gtttggccctgctgatgatagtttgttttctcttcattccctgaattagtcatcagttctccgtggccatttggggattcatgcctgcaactgcttcagtygaattcttttttaaagatccagtttatgttttataataattttgatcttatggctttcaacgtcaataggatcccctttaaaaataccctgctagtgttt

SEQ ID NO: 4450 - DNA, 201 bp, Homo sapiens
ctcatgcatctgggtttgggagtttggccctgctgatgatagtttgttttctcttcattccctgaattagtcatcagttctccgtggccatttggggattsatgcctgcaactgcttcagtcgaattcttttttaaagatccagtttatgttttataataattttgatcttatggctttcaacgtcaataggatccccttt

SEQ ID NO: 4451 - DNA, 201 bp, Homo sapiens
gttcctggaagcagggtgcactgagagctggtcaggcagctcattgcacaagctgggctgagggtttggcccatatggacctggcctgggaagggccctcrtgtttctgatttgaacaattgtgtgggacaagaagtgggatattgaagggacattcggttggggattgagacaccaggactcacatcttgaattaaacca

SEQ ID NO: 4452 - DNA, 201 bp, Homo sapiens
ccagcgtccagacaaagggacagtggattctggtgtccagacaaggggaaggtagtggcgcccaagcaggggtgcttacaaccctgaagcccaagaggggktgttgcagagtgtcagcagccctgttactcccattgccctgctccaggctatagctctggggctggctccgtccccgctgcttccctttgctgcctcctg

SEQ ID NO: 4453 - DNA, 201 bp, Homo sapiens
caggatggccaggaagggtctcactctgaaggtttaagttttgacgaagacttaaagcagtgtaggaggaagggcaggtagcaagagcctggtgtggctcrggtgcagcgggtggcggtgggagaagcaggagctgaggatagaaaggtgacttaggctcagtgtagtggggccttgccagctcatagtgaggactcggtg

SEQ ID NO: 4454 - DNA, 201 bp, Homo sapiens
aggtcagggaggtctttgtaccgttctgatgcctcagtccatggctcctcattgtgtcttcctcttcagctggagctgcgagggtgtccaggaggggtgarttctgctcggagggcctgccgagggcattccttcctgtcctccagcatgagagggacagtgtggggcccctagagtacagggaagacctcctcataactg

SEQ ID NO: 4455 - DNA, 201 bp, Homo sapiens
cgttatgttggattcagtgttagtaaagagactcatgtttggttgggtctctgttgaccttgtactctgtgctgcacctctgcttacagaatacctcccawccatgccggttcgtgactgctcacccgtttcagtgatctgagagggctggccctgaaagagtggttactgctcccgtgcagtttagagcttttcctgcac

SEQ ID NO: 4456 - DNA, 201 bp, Homo sapiens
gggtctctgttgaccttgtactctgtgctgcacctctgcttacagaatacctcccatccatgccggttcgtgactgctcacccgtttcagtgatctgagarggctggccctgaaagagtggttactgctcccgtgcagtttagagcttttcctgcaccttgacttgtccgtttcacagtgaggacaccaagtcacaagaag

SEQ ID NO: 4457 - DNA, 201 bp, Homo sapiens
gctgagtttgcccaactgtaggctaatgtaagtgttctgagcacatttaaggcaggctaggctaagctatgatgttaggtagattacgtgtattcaatgctttttttttttttttttgagacagagtttcactctcccacctgggctggaatgcagtggcgcgatctcaggtcactgcagcctccgcctcctgggtttaag

SEQ ID NO: 4458 - DNA, 201 bp, Homo sapiens
gccgaggcgggaggatcatgaggtcaggagattgagaccatcctggctaacacagtgaaaccccgtctctactaaaaaaaatacaaaaaattagccaggcrtggtggcgggcgcttgtagtcccagctactcaggaggctgaggcaggagaatggcatgagccgggaggcagagcttgcagtgagccgagatcgcgctact

SEQ ID NO: 4459 - DNA, 201 bp, Homo sapiens
tgggccggatgctgtggctcacgcctgtaatcccagcactttgggaggccgaggtgggtggatcacttgaggtcaggagatcgagaccagcctggctaacrcagtgaaaccctgtctctactaaaaatacaaaaattagccgggcatggtggcagatgtctgtaatcccagctactcgggaggatgaggcaggagaatttc

SEQ ID NO: 4460 - DNA, 201 bp, Homo sapiens
tgagaccggagaattgattgagcctgggagtttgaggctgcagtaagctgtgattacaccactgtactccagcctgggtgacaaaatgagtcccggtctcaaaaaaaaaaaagaaaaaaaaacaggagcagagctcttggacaaagccctgctgtggaaagcttgcttcatctggctgcagccgctccacaacgcccgtca

SEQ ID NO: 4461 - DNA, 201 bp, Homo sapiens
agtaaaacagagtaagatggcatgcagggctaatcattagcccagcaggtaagcaccatggctctgcagccagctgcctccttagaaagtggggtgttgcsccatggaagtggtggcatgctcttctggtagcattgttgaaatgaaaacaggttcagtccttgatcactaggctttttgtacccgggtacctctggggac

SEQ ID NO: 4462 - DNA, 201 bp, Homo sapiens
cgaggcgggtgggtcacgaggtcaggagatcaagaccatcctggccagcatggtgaaaccccatctctactaaaaacacaaaaattagctaggcttggtgrcatgtgcctgtagtcccagctactcgggaggctgaagcaggagaatcgcttgaacccgggaggtggaggttgcagtgagccgagatcacgccattgcact

SEQ ID NO: 4463 - DNA, 201 bp, Homo sapiens
tggccaggactcctctcttttttctttttttttgagacagtctagctcagtagcctgggctggagtgcagtggtgcaatcttgggctcactgcttcctccrcctcctgggtcccggttcaagcagttctcctgcctcagcctccccagtacctggaattacaggcacccgccaccatgcccagctaattttttcaattttt

SEQ ID NO: 4464 - DNA, 201 bp, Homo sapiens
ggtcttgaactcctgacctcgtgatccacctgccttcgcctcccagagtgctgggattacaggcgtgagccaccgcgcctggccaggactcctctctttcttttttttttttttattttttttccgagacagagtctagctctgtagtccaggctggagtgcagtggtgcaatcttgggctcactgctacctccgcctccc

SEQ ID NO: 4465 - DNA, 201 bp, Homo sapiens
catctgcataaaacatattggccactgctctgccttgaaccgccctggctcttcactgctgactcaggcggggctctacccgacctccctggcatgacacsttgtgctcctgggacacaccagcctcagggcctttgcatgtgtggtgcctggcacttggaccctgttcccccgacacctgcctgggttgcgccccatgtc

SEQ ID NO: 4466 - DNA, 201 bp, Homo sapiens
ctgcaccatctcgagcaaaggcacgtcgtgaaggcagagctcttttcagctttctggaagaaaggtctgctgcaaccctgaaggaacctgggcgtggcaayatttacatctaggaggaaaactgtggctcagttttaacaaatgggctcattgagtgagttccaaattcatgtttcaccttccatgatgtagccaagctga

SEQ ID NO: 4467 - DNA, 201 bp, Homo sapiens
gtcagtctggcagtgaggacaaatgactccaatgaaagaaaagtaaataccagagcaagcacagtcagaaacagagtggggaggagaatcacaatagctgraactcaactctctgagaggcagtgcagccaaatagaggcagctgagagcagagtatgtggattagaacttttcgggagagttggccactgaaggagtagg

SEQ ID NO: 4468 - DNA, 201 bp, Homo sapiens
ttaaatttattagaactaacacatactagaactggctctttgaagcaataacatatatgttttaaaaaaatcaaagttaaaatccctcccttggctaagcrctgtggctcccgcctgtaatcctagcactttgggaggtggaggcaggcagattgcttgagtccaggagtttgagaccagccgcctaggtaacatggtaaa

SEQ ID NO: 4469 - DNA, 201 bp, Homo sapiens
ttgggcttgggttgagcctgtggctgagagtagcctctgggtggcagtgtcctctgctctcccatccggggcctgcagtgggacactatgtcagatccccrgagatggtgtcttttttcctttgtaattaatgaataatccagtggtgacactgagcatgtcctggtgagctgtgtgactcctgcctgataatggtggttt

SEQ ID NO: 4470 - DNA, 201 bp, Homo sapiens
actgtccatctttttgatgcttgacggttccacctttggccggtggccacctcagtctggtggtgtcttttgccgtgttctggcgtttttcgtttatgttwtgagccctcccttatgttctgggttaagcagatgctgcaggcacctctgaacattccctgcctggccctggaatcagcctggctcctctgagtggggagt

SEQ ID NO: 4471 - DNA, 201 bp, Homo sapiens
agaaacctcgatctagacgccgggcatgctccatgctcccggagtgtcttctcccatcaccgcaccctccggttgatgtgtcctccggaccattgactcaygggtgtgtgtaggcagaaggggtggaagcgaggaaaggcgttgctgaggaggcccggagggagcgggttctggctgtgctggcactagccaggctggcag

SEQ ID NO: 4472 - DNA, 201 bp, Homo sapiens
gcaggagaatctcttgaacccaggaggcggagcttgcagtgacccgagatcatgccattgcactccatcctgggtgacagagtgagactccatctcaaatwaaaaaaaaaaaaaagcaagcagaagggaaaaccatcctttcttcaggtaactcaaattttagaccaaggagtcacatttgtatggaactgaaatgtggct

SEQ ID NO: 4473 - DNA, 201 bp, Homo sapiens
tgggatgtcctgtggtctttcctggacagtaagctctttggtaccatgtcccctcctgtcccctcttgtgtcacccagttgggcctcagcaggcccttggkccccctatggcagtgggtggggggaccgtctgctcccacctgggacctgtgctcagtcccccgcccctccacagcactgcttcatgatgccccagtccct

SEQ ID NO: 4474 - DNA, 201 bp, Homo sapiens
gggatgtcctgtggtctttcctggacagtaagctctttggtaccatgtcccctcctgtcccctcttgtgtcacccagttgggcctcagcaggcccttgggycccctatggcagtgggtggggggaccgtctgctcccacctgggacctgtgctcagtcccccgcccctccacagcactgcttcatgatgccccagtccctg

SEQ ID NO: 4475 - DNA, 201 bp, Homo sapiens
ttttgagacggagtctcactctgtcgcccaggctggagtgcagtggcgcgatctcggctcactgcaagctccgcctcccaggttcacgccattctcctgcytcagcctctggattagctgggactacaggcacccgccaccacgcctggctaattttctgtatttttaatagagacgggttttcactgtgttagccaggat

SEQ ID NO: 4476 - DNA, 201 bp, Homo sapiens
gccgcagcaagcactggggtgaggctgcacctaacggccatgtctcactaacagctgtctctgcttggaggtgccctgcccatgtttgagctggtggagcwgcagccttcacatctggcctgccccgacgtcctgaacctgtccctaggtgagagctgccaagtccaggtggggtccctcggaggtacgatctgtgccctt

SEQ ID NO: 4477 - DNA, 201 bp, Homo sapiens; identical to SEQ ID NO: 413

SEQ ID NO: 4478 - DNA, 201 bp, Homo sapiens; identical to SEQ ID NO: 390

SEQ ID NO: 4479 - DNA, 201 bp, Homo sapiens; identical to SEQ ID NO: 394

SEQ ID NO: 4480 - DNA, 201 bp, Homo sapiens
actgggcccacctggatagtccaggaaagtctcatctgaaggttcctcacccaggcccatcccacagcccctggcaatgcttacccaagagtgaaatcctyttgttttgcctgggtttgtctcttggccacagaagggtgctgagacccacagctgctgcccccacagatgggggaccctgcctgccttctactccagcac

SEQ ID NO: 4481 - DNA, 201 bp, Homo sapiens
ccccagtgcaccccagctccggggcagaagaggcagcctgcagatctctgctgccgggaaagagctcctgaagttgtggggtctggactccgctggggacrgggccttccgcgagtctcccacctctcgggggactgcagggagaggcgtctccagtgggcagccttgggtcacttccatagctcccccagcggcttctct

SEQ ID NO: 4482 - DNA, 201 bp, Homo sapiens
gaaagagctcctgaagttgtggggtctggactccgctggggacggggccttccgcgagtctcccacctctcgggggactgcagggagaggcgtctccagtgggcagccttgggtcacttccatagctcccccagcggcttctctgtggcagtgcggatggcgtcctcagagagcacgcggatgtcctcatggacagcttcg

SEQ ID NO: 4483 - DNA, 201 bp, Homo sapiens
acccacctcggcctcccaaagtgctgggattacaggcgtgagccactgcgcgcagcctggcgcacacttcttaccagaacctagtcacgaattcctcgtckaactagaattaggtatgtttgttactgtaaacgcagcttggtggcttacagtgattggcactctaacagtcaggtcaggctagagagccagccaccgcag

SEQ ID NO: 4484 - DNA, 201 bp, Homo sapiens
ggcgcacacttcttaccagaacctagtcacgaattcctcgtcgaactagaattaggtatgtttgttactgtaaacgcagcttggtggcttacagtgattgrcactctaacagtcaggtcaggctagagagccagccaccgcagacagaggagtggacgcgtgaacgttgagttgagaccaaaggggccacctggtgggata

SEQ ID NO: 4485 - DNA, 201 bp, Homo sapiens
aagactgaagatgacttcaatgattggtgccagcaagtcaaaaaggtttgtagccgccccacacccacagccgagctgagccacccagggagacaggcagyggggcgtgcaggggtcgaaggcctgcgtccaggtctcaggcagcctcactgggccgtggggagctttgtcccgcctggcacagctatgtagctgagcagg

SEQ ID NO: 4486 - DNA, 201 bp, Homo sapiens
gtcccaggctgctcccactgcagcttggttccacatctttcttcagcctcttgcggtcaatgggctctcgggggacagatggcctttctcgggtgtgcttrgaggagaaactgtacgaatgaagtgagccgataaatttgcacgccccagatcctgggggcgtaaagtcatccatagaaatgccactcttatctgtcacgc

SEQ ID NO: 4487 - DNA, 201 bp, Homo sapiens
tctcgtgggcgaatcaaggcacagcaacgcagtggagcctgaggggagccgggcactggtgcaggggaccatgcacagggcaccctcggagctccgttccyggccacaggagccaaggcaggctggaatgtccagcacctgcatgctgggggcctctgctgcgccactggcagtgggaatggaagcccccacctcttagcc

SEQ ID NO: 4488 - DNA, 201 bp, Homo sapiens
taacatctcgtgggcgaatcaaggcacagcaacgcagtggagcctgaggggagccgggcactggtgcaggggaccatgcacagggcaccctcggagctccrttcctggccacaggagccaaggcaggctggaatgtccagcacctgcatgctgggggcctctgctgcgccactggcagtgggaatggaagcccccacctct

SEQ ID NO: 4489 - DNA, 201 bp, Homo sapiens
cctggggaacagagtgaaacccggtcttctcccctcaaaaaaaatcaaccaactcagatgatccttgaggacattatactgaatgaaatagggcaggtgcmaaaaaacaaacactgcatgataccactcacatgaggtactcagagtaatcaaattcatagagacaggagaatgcgggttcccagagcctagggagaggag

SEQ ID NO: 4490 - DNA, 201 bp, Homo sapiens; identical to SEQ ID NO: 392

SEQ ID NO: 4491 - DNA, 201 bp, Homo sapiens; identical to SEQ ID NO: 391

SEQ ID NO: 4492 - DNA, 201 bp, Homo sapiens; identical to SEQ ID NO: 399

SEQ ID NO: 4493 - DNA, 201 bp, Homo sapiens
agtaaatgtggcccttggcgttactgagtcctaagaggtgtgtgttgccccaggtggagctgatggaggagggagtcggtgcctgtggtgtgggactgacyggctgcctcctgccagtgggcttgtggcctgtggggccatctggccatgagcacttctctctctgtctgccacgacaggggggacaggccccacctcgga

SEQ ID NO: 4494 - DNA, 201 bp, Homo sapiens
gtatctttagtgtgaaagtgaaaacttgtttctcatatttatggtagagctgacctgtaattttttttccaatagattggaggtggacacaaaggaagagrcagccagacagctacttcagcgtcctcaacgcattcatcgacaggaaggacagttactactccattcaccagataggtgggaggctgcagaatgtgccag

SEQ ID NO: 4495 - DNA, 201 bp, Homo sapiens
ttcccctcagagcttttctggtgtcgtgggatgtggagcaggaggctgtaaacctgtaaacactgacctctgaccatctgtgcgctgctgtcacatcaccyccgtgtcatcccacatcacccccgtcccacccaggcccagaccctgggccttgcccttcctgctgtccatgcggcttgcagtgcctggtgctcggcacag

SEQ ID NO: 4496 - DNA, 201 bp, Homo sapiens
ttttaagggcattccatgagcaggtaccacaccccaggtgaccacttgaggccactggtggaaaagcagcatgccctggggttcattttcagcctggtcgmgggcggcctcctgtgtgcccctttccctgatggtctggtgccctcggctccctccccacctcctgcccactgcttctcagtgtgatgtgggtgcagtggg

SEQ ID NO: 4497 - DNA, 201 bp, Homo sapiens
acaggtttgtccgctggctgtggccggctggcccctttctcttggccgcagcaagcactggggtgaggctgcacctaacggccatgtctcactaacagctrtctctgcttggaggtgccctgcccatgtttgagctggtggagcagcagccttcacatctggcctgccccgacgtcctgaacctgtccctaggtgagagct

SEQ ID NO: 4498 - DNA, 201 bp, Homo sapiens
tccgctggctgtggccggctggcccctttctcttggccgcagcaagcactggggtgaggctgcacctaacggccatgtctcactaacagctgtctctgctyggaggtgccctgcccatgtttgagctggtggagcagcagccttcacatctggcctgccccgacgtcctgaacctgtccctaggtgagagctgccaagtcc

SEQ ID NO: 4499 - DNA, 201 bp, Homo sapiens; identical to SEQ ID NO: 409

SEQ ID NO: 4500 - DNA, 201 bp, Homo sapiens
gtaagtggctcagagtttccatggacaagaaagttgaaatcacgggcaacatacacacttcctcgcctgagtccccacgggagcctcggcgagtgttgtcrgtcgccccatgccgtgcaggtgctccgtggggcctgtgcgccaagccagatgcacggtggcctcgctctcctatcccggcggtcataccaagagaggaga

SEQ ID NO: 4501 - DNA, 201 bp, Homo sapiens
cagtcatcatttgcttgcttgttgtgggagcacttttgcacaggtctgcttggttagtgaaagcatgtctccctttctaggaaggttgtgcaggaccagcrttccctgtgcaggcgccactgcgtttcctgcagattccgaccggcactgcaacggattccctgccggagctgaggtcaccaacaggccgtcgccatggag

SEQ ID NO: 4502 - DNA, 201 bp, Homo sapiens
ttagtgaaagcatgtctccctttctaggaaggttgtgcaggaccagcgttccctgtgcaggcgccactgcgtttcctgcagattccgaccggcactgcaayggattccctgccggagctgaggtcaccaacaggccgtcgccatggagacccctggtacttctcattcccctgcgcctggggctcacggacatcaacgagg

SEQ ID NO: 4503 - DNA, 201 bp, Homo sapiens
cgtggcggccacctgagcacacaggcatttggtgctgaatgctgtttgggaatgacgaggaaaactttcggatttttgcgttttttttttcagcatgttgsgataagtactgtgttcacgtggttgggaatctgaagggtataagagccggaactgtgtccttgcaccctcacgtccctcccccaggcaccacctcctgtg

SEQ ID NO: 4504 - DNA, 201 bp, Homo sapiens
ggctccctccccacctcctgcccactgcttctcagtgtgatgtgggtgcagtgggtctgaaatgcggcctcctctgtccctttcctctgccggctcggccrcccacctgcccacctgcctcatcctcccaggtgaggagctcatctacctggacccccacaccacgcagccagccgtggagcccactgatggctgcttcat

SEQ ID NO: 4505 - DNA, 201 bp, Homo sapiens
ggaagcccccacctcttagccgactgcagatgggggtgtcgtgttctgctcatcgtcatttcgttttaggggtttttctgtaagactgaagatgacttcartgattggtgccagcaagtcaaaaaggtttgtagccgccccacacccacagccgagctgagccacccagggagacaggcagtggggcgtgcaggggtcgaa

SEQ ID NO: 4506 - DNA, 201 bp, Homo sapiens
tctaacctggattccctcatccacaaggtatggttacgaccagagcttcctcctgagagcgcagggagcttgtgacacctcccagaaatgctcaggggacrctggccaccttgcagagaaacccctcctaacgggaagggaacatgggtacgcgaggctccggtactgaccgcggctgggcgacagcaggctacttggata

SEQ ID NO: 4507 - DNA, 201 bp, Homo sapiens
caggagttcaagaccagcctgggctacacagggacaccccgtctctacaaaaaatgtggcaccactctactccagcctgggtgacacagtaacaccctgtytcaaaacaacaccatgtttcgttctgtcctctgtgctcgtggggatttcacacaggccgggctctggaaggccaacctgaacctcctggcacactgtggt

SEQ ID NO: 4508 - DNA, 201 bp, Homo sapiens
caatgaaggctcttctctcctgggatggaggttcccattcaaagccagctccgtcctcagtctaagaaaagtgaagcgttccacaaacaattttcaggtckttttttactagtgtctggaagacatttaggagaattccaactgattaccatttacagtgatcacaatgaaactgctcagagttatcactgaacttcagta

SEQ ID NO: 4509 - DNA, 201 bp, Homo sapiens
agagagcacgcggatgtcctcatggacagcttcgatgcttttggaagcatccaccatctgttcccaccggggtttcaggagaaaaagaggctcatcagcaygttccaggctggtcacgggagcccacgcctgtaatcccagcactttgggaggcccacgagggaggactgcttgtacccaggagttcaagaccagcctggg

SEQ ID NO: 4510 - DNA, 201 bp, Homo sapiens
ctgatgtggagaattgctagaacccaggagatggaggctgcagtgagctgagatcgcaccactgcgctccagcctctgcaacagagttagaccctatctgaaaaaaaaaaaaaaaaaaaaagaagaagaagaatgctaataaatgttttaaattactgaaactgttttctgtacagatttgttttgataacttggcgtata

SEQ ID NO: 4511 - DNA, 201 bp, Homo sapiens
tgatgtggagaattgctagaacccaggagatggaggctgcagtgagctgagatcgcaccactgcgctccagcctctgcaacagagttagaccctatctgaaaaaaaaaaaaaaaaaaaaagaagaagaagaatgctaataaatgttttaaattactgaaactgttttctgtacagatttgttttgataacttggcgtatat

SEQ ID NO: 4512 - DNA, 201 bp, Homo sapiens
acccaggagatggaggctgcagtgagctgagatcgcaccactgcgctccagcctctgcaacagagttagaccctatctgaaaaaaaaaaaaaaaaaaaaagaagaagaagaatgctaataaatgttttaaattactgaaactgttttctgtacagatttgttttgataacttggcgtatatgtatttgaaatcctggagaa

SEQ ID NO: 4513 - DNA, 201 bp, Homo sapiens
tgtaatcccagcactttgggatgccgaggcgggtgggtcacgaggtcaggagatcaagaccatcctggccagcatggtgaaaccccatctctactaaaaayacaaaaattagctaggcttggtgacatgtgcctgtagtcccagctactcgggaggctgaagcaggagaatcgcttgaacccgggaggtggaggttgcagt

SEQ ID NO: 4514 - DNA, 201 bp, Homo sapiens
ctgaagcaggagaatcgcttgaacccgggaggtggaggttgcagtgagccgagatcacgccattgcactccatcctgggtgagagagcgagactctgtttaaaaaaaaaaaaaaaaaaaaagattctgaaaaaggtttggatgccatctgtatctttagtgtgaaagtgaaaacttgtttctcatatttatggtagagctg

SEQ ID NO: 4515 - DNA, 201 bp, Homo sapiens
atatatgtataaatatatatatacgtgtgtgtgtgtgtgtgtgtatgtatatatttttccccccccccgtcgtccaggctggagtgcagtggcgtgatctyggctcactgcaacggggttttgccatgttggccaggctggtcttgaacccttgacctcaggtgatccacccaccttggcctcctaaagtgctgggattac

SEQ ID NO: 4516 - DNA, 201 bp, Homo sapiens
caaagagatacttgccagtgttcatttagctctgctgtactttaaataaaagatatgtgtatctttagttcaaagctggtgccttggaacggtgtcaaacatgagaagaatgttccaacagcaagatggaatcattgtcttgcagtgttgaaattagaccggtggtggccaggcgcagtggctcacgcctgtaatcccagc

SEQ ID NO: 4517 - DNA, 201 bp, Homo sapiens
aaagagatacttgccagtgttcatttagctctgctgtactttaaataaaagatatgtgtatctttagttcaaagctggtgccttggaacggtgtcaaacatgagaagaatgttccaacagcaagatggaatcattgtcttgcagtgttgaaattagaccggtggtggccaggcgcagtggctcacgcctgtaatcccagca

SEQ ID NO: 4518 - DNA, 201 bp, Homo sapiens
aagagatacttgccagtgttcatttagctctgctgtactttaaataaaagatatgtgtatctttagttcaaagctggtgccttggaacggtgtcaaacatgagaagaatgttccaacagcaagatggaatcattgtcttgcagtgttgaaattagaccggtggtggccaggcgcagtggctcacgcctgtaatcccagcac

SEQ ID NO: 4519 - DNA, 201 bp, Homo sapiens
catgagccgggaggcagagcttgcagtgagccgagatcgcgctactgcactccagcctggtgggcgacagagtgagactccgtctcaaaaaaaaaaaaaaraaaagaaaagaaattagaccggtggtgttttcatcctttttccttgagaataagttttctggattttagtctatatattgaataaagcctacaggtcaaa

SEQ ID NO: 4520 - DNA, 201 bp, Homo sapiens
tgtgagccactgcacccggcgagtggatattttttccgaagtttgactccttttctatcaggagctacatgaattaccttataaatcacatgatgtggcaygggaagatgatgaaattatgacaggggctatgaaataagacaagggaacctctccatggcgaattgctgaggcagctggtgtcaggcctaagtggatctc

SEQ ID NO: 4521 - DNA, 201 bp, Homo sapiens
gaagatgatgaaattatgacaggggctatgaaataagacaagggaacctctccatggcgaattgctgaggcagctggtgtcaggcctaagtggatctcatwcatctgagagtcagtgaaggaacaagtgtggtggctcacacttgtagtcccagcactttgggaggctgaggtgggtggatcactggagcccaagagtttg

SEQ ID NO: 4522 - DNA, 201 bp, Homo sapiens
atctcatacatctgagagtcagtgaaggaacaagtgtggtggctcacacttgtagtcccagcactttgggaggctgaggtgggtggatcactggagcccargagtttgagaccagcctgcttaacatagggaaaccccacctctacaaaaaatacaaaaattaggcatgacggtgcatgcctgtagtcccagctactcagg

SEQ ID NO: 4523 - DNA, 201 bp, Homo sapiens
gtggcttcaccttgcagagcagcttgcttcaacctgcgggactctggcttggccatcgggtttccactcgaggacggtgaccaacctgcagctcctctgcyggtggcggcactcgagtgtcccctcacaccccctgtggccttgctggcatcttttctccgggtgcggccatggcctccagcccccctcttcttctcggtc

SEQ ID NO: 4524 - DNA, 201 bp, Homo sapiens
gtttcattctagaggaggagtcacatgatagactgtgttcaacaggcttgctctggcatctcttttgagaatgtactgcagaggggcaagggcagaggcarcgagaccagctaagagactgttgaacaagccagcaaggagatgccagtggattagctcagggtgggtaagaggttgacttctgcatgtgttttggaggtt

SEQ ID NO: 4525 - DNA, 201 bp, Homo sapiens
agcacttaaatagccacactgcccattccttgaggacagagctggtgtcttgtgcttgcatttctagtgcatcacttgtgtctggcatgtggttggtaataaaaaaaaaacagaacttgaattaataataacctacacattcccctactatcaaagctttcagtttgtagagtttaacataaatccagtatgttagcataa

SEQ ID NO: 4526 - DNA, 201 bp, Homo sapiens
agctgtggcgcagccccagagtgcacaccacgctccatgcacctcctgggcagggtggcagtagtggggaacatgggctggagctctgtggctcacactttttgtttgtttgtttgtttttgagacggagtctcactctgtcgcccaggctggagtgcagtggcgcgatctcggctcactgcaagctccgcctcccaggtt

SEQ ID NO: 4527 - DNA, 201 bp, Homo sapiens
gctgtggcgcagccccagagtgcacaccacgctccatgcacctcctgggcagggtggcagtagtggggaacatgggctggagctctgtggctcacactttttgtttgtttgtttgtttttgagacggagtctcactctgtcgcccaggctggagtgcagtggcgcgatctcggctcactgcaagctccgcctcccaggttc

SEQ ID NO: 4528 - DNA, 201 bp, Homo sapiens
ctgtggcgcagccccagagtgcacaccacgctccatgcacctcctgggcagggtggcagtagtggggaacatgggctggagctctgtggctcacactttttgtttgtttgtttgtttttgagacggagtctcactctgtcgcccaggctggagtgcagtggcgcgatctcggctcactgcaagctccgcctcccaggttca

SEQ ID NO: 4529 - DNA, 201 bp, Homo sapiens
tgtggcgcagccccagagtgcacaccacgctccatgcacctcctgggcagggtggcagtagtggggaacatgggctggagctctgtggctcacactttttgtttgtttgtttgtttttgagacggagtctcactctgtcgcccaggctggagtgcagtggcgcgatctcggctcactgcaagctccgcctcccaggttcac

SEQ ID NO: 4530 - DNA, 201 bp, Homo sapiens
tggggaacatgggctggagctctgtggctcacactttttgtttgtttgtttgtttttgagacggagtctcactctgtcgcccaggctggagtgcagtggcrcgatctcggctcactgcaagctccgcctcccaggttcacgccattctcctgcctcagcctctggattagctgggactacaggcacccgccaccacgcctg

SEQ ID NO: 4531 - DNA, 201 bp, Homo sapiens; identical to SEQ ID NO: 403

SEQ ID NO: 4532 - DNA, 201 bp, Homo sapiens
gaaaagctgcgtgaccagcatcatctgcaggcacagccagtcgggctggggcgagaccctcggccctgctctggaggaggagctcaagggactgaagctcygcgggccgtggccacaagcgacagtgctggcgcccgacgtgccagaagccctggctgccgcctggaaagaggccacgtgggcagcggtgggcacgggcga

SEQ ID NO: 4533 - DNA, 201 bp, Homo sapiens
tcggccctgctctggaggaggagctcaagggactgaagctccgcgggccgtggccacaagcgacagtgctggcgcccgacgtgccagaagccctggctgcygcctggaaagaggccacgtgggcagcggtgggcacgggcgactggagtctgggagagaggtaggggctgcggtcgggaggagcagaggcggccagcctgc

SEQ ID NO: 4534 - DNA, 201 bp, Homo sapiens
ggccgggcgcggtggctcacgcctataatcccagcacttcgggaggccaaggtgggtagatcacatgaggtcaggagttaaagaccagcctggtcaacatygtaaaaccccatgtctactaaaaaaaaagttagctgggcatggtggcacgccctcgtaatcccagctgctcgggaagctgaggcacgagaattgcttgaa

SEQ ID NO: 4535 - DNA, 201 bp, Homo sapiens
cactgaaggagtaggagaaaattcccctgagttggtgagagttgagtctttagagctaaagacccccaaatttttttatcagaagtacttaaacatacatrttcctgataatatttccaaattgcagaagtaaagggaaacttctctaaacatccaaataatagtatcactactaagctgctttgaagaaaggcagtctca

SEQ ID NO: 4536 - DNA, 201 bp, Homo sapiens
cctgggaatttctatgaaactaatgcggaataaaatgaaaaaaggacaaaaccctgctgcctggaaatgtgaaacctcaaaaaagtcaagtgtagagaccstaactatgtatctgaacctgatgtgtacagaactcagaagaaaacctgtgtatcttcagtactagtatatgggttctttacaaagtgaaaattaatgaaa

SEQ ID NO: 4537 - DNA, 201 bp, Homo sapiens
tttggtgaaatgctcactacagagaaatgaatacttagtgggagtccagttatccctctgaacagcttttaaccattggattagacgttttgagtcctttrgggggaacctacaggacaaatgacaaaaagtaattagaaataattaaatgtctccccttaaaataatcaactgtaaaagcaaaacaagtatttttgcacg

SEQ ID NO: 4538 - DNA, 201 bp, Homo sapiens
cattttctggatgacttacgggggtcagtgtcttcatatgtttgtcagacattccttttgctccgtgactgacttgttcatgtgttttgcccattttgagraggttgtcgggacatttcactctccagtaaatgtggcccttggcgttactgagtcctaagaggtgtgtgttgccccaggtggagctgatggaggagggag

SEQ ID NO: 4539 - DNA, 201 bp, Homo sapiens
gttccagagcttgctgggcctgctcctggctggcggcctcctgggccgccctgggtgtggcttcaccttgcagagcagcttgcttcaacctgcgggactcyggcttggccatcgggtttccactcgaggacggtgaccaacctgcagctcctctgccggtggcggcactcgagtgtcccctcacaccccctgtggccttgc

SEQ ID NO: 4540 - DNA, 201 bp, Homo sapiens
ttttcctttgtaaacagacaagtggacagaaaagtaggtagatagaacggctgccagtccccgccacccacagcccaggccccatggaggccctcccagcrcagctacaggcctgctggccaggagcaaacagtctatgtacagaacccctggagacccccggcctagaacgcctgcagcacagagcagctgggtccggac

SEQ ID NO: 4541 - DNA, 201 bp, Homo sapiens
caccccctgtggccttgctggcatcttttctccgggtgcggccatggcctccagcccccctcttcttctcggtcaggtggaagatggatggcacggccgtrggcttcagcaggcgatgctggtcctccagcctcttggagaagctgtctttggtgaaatgctcactacagagaaatgaatacttagtgggagtccagttat

SEQ ID NO: 4542 - DNA, 201 bp, Homo sapiens
gagaagctgtctttggtgaaatgctcactacagagaaatgaatacttagtgggagtccagttatccctctgaacagcttttaaccattggattagacgttktgagtcctttagggggaacctacaggacaaatgacaaaaagtaattagaaataattaaatgtctccccttaaaataatcaactgtaaaagcaaaacaagt

SEQ ID NO: 4543 - DNA, 201 bp, Homo sapiens
gaacctcaaacgtgtcggtttctccagtgtcacctttgtttttcctttgtaaacagacaagtggacagaaaagtaggtagatagaacggctgccagtcccygccacccacagcccaggccccatggaggccctcccagcgcagctacaggcctgctggccaggagcaaacagtctatgtacagaacccctggagacccccg

SEQ ID NO: 4544 - DNA, 201 bp, Homo sapiens
tcagcagcactggatgtcatcaagcgtttgaatttctgcctttctgataattggaaaatgcgttgttttgtttaactttgcattttctggatgacttacgrgggtcagtgtcttcatatgtttgtcagacattccttttgctccgtgactgacttgttcatgtgttttgcccattttgaggaggttgtcgggacatttcac

SEQ ID NO: 4545 - DNA, 201 bp, Homo sapiens
ccatgccgcccgcagggcgccccggggctcgcgtcggcccggccgtacgccaaaatggcggctcccgcgtatttccgctcgcgcgccgtatcgtcttcgcygcctgcgccggcacacctattggcccccgcggcgtcccgtcgccgcgtcgcgttgctggcccgtcggagcgacgccgctcgggtcagtcggcggccggac

SEQ ID NO: 4546 - DNA, 201 bp, Homo sapiens
ggatgtcctcatggacagcttcgatgcttttggaagcatccaccatctgttcccaccggggtttcaggagaaaaagaggctcatcagcacgttccaggctrgtcacgggagcccacgcctgtaatcccagcactttgggaggcccacgagggaggactgcttgtacccaggagttcaagaccagcctgggctacacaggga

SEQ ID NO: 4547 - DNA, 201 bp, Homo sapiens
tggcgtgaacggtgcgaggagcgtggggagggcataagcccgcaggacagccttctctccaccagaaggcaggcagtgagagggactcagaagcgctggcrtctcagcggcatcccggcttctgctgtcgggtggcaccggacccttctcaagcttctgggacagcaaattctagaaaatctgccaggggcgtagaaggca

SEQ ID NO: 4548 - DNA, 201 bp, Homo sapiens
tatttcttttttctctgggtggcaagattatgaaaaaattttcttacgcttttctatattttccaagtttgaatttcactgtaagcacctggctttgtacygccctttttctgttacacagtcatcatttgcttgcttgttgtgggagcacttttgcacaggtctgcttggttagtgaaagcatgtctccctttctaggaa

SEQ ID NO: 4549 - DNA, 201 bp, Homo sapiens
tgtggctcagttttaacaaatgggctcattgagtgagttccaaattcatgtttcaccttccatgatgtagccaagctgagaactcttaaaaatgcctcacygcctttttcactcagggccacctttttcccaaggaacttctcaaaactccctcaattccaattttattgaagttctacatgtaggctattgccttgaatc

SEQ ID NO: 4550 - DNA, 201 bp, Homo sapiens
aggtaacaaagcaccagtcagcaggaaactcaccaccgggaagcctttctatcaaaacataacttcaaaatcagtaaagtgggccgggcatggtggctcaygcctataatcccaacttcaaaatcaataaagcgggccgggcgcggtggctcacgcctataatcccaacttcaaaaccaataaagtgggccgggcgcggtg

SEQ ID NO: 4551 - DNA, 201 bp, Homo sapiens
gcccacagcacagccaggcccacccagcccaccaggtcgaggtgactgtccctccagctcgcaagcggcgagtcggaagcacagagggcagaccctgcccygcccacgctcctgtggctcctgggccctgcctggaaggtgaggaagttccgcagcagaagccagacagcaggaccagtgcaacactgggcctgactcgtc

SEQ ID NO: 4552 - DNA, 201 bp, Homo sapiens
aggacagccttctctccaccagaaggcaggcagtgagagggactcagaagcgctggcatctcagcggcatcccggcttctgctgtcgggtggcaccggacmcttctcaagcttctgggacagcaaattctagaaaatctgccaggggcgtagaaggcacttggaagaatctaaccatttcatgaggtgtgaccgtgacgga

SEQ ID NO: 4553 - DNA, 201 bp, Homo sapiens
gggctgcggtcgggaggagcagaggcggccagcctgcgagtccactgggaggggagagtccagcgtcctgggagcagagccagacctgggactgctgagaytgaaggaggcaggactgaagggagaggcagcacacagcaccctcctgaacttagatggccaggtgctgctgcagggcccatgcccagcgagaggccgcac

SEQ ID NO: 4554 - DNA, 201 bp, Homo sapiens
gtggctcgtttaatttttagaacctcaaacgtgtcggtttctccagtgtcacctttgtttttcctttgtaaacagacaagtggacagaaaagtaggtagayagaacggctgccagtccccgccacccacagcccaggccccatggaggccctcccagcgcagctacaggcctgctggccaggagcaaacagtctatgtaca

SEQ ID NO: 4555 - DNA, 201 bp, Homo sapiens
tgcccaccttagcctcccaaagtactgggattacaggtgtgagccaccgagtccagcctcaacagatgttttaattgaatagatgttaaaataattattamtgttcatgatgatttaacttcaaggatattccttaaaacgtgaacagaaagaacctcctcatgattttaacagtttctgatatttgctttttctgagagt

SEQ ID NO: 4556 - DNA, 201 bp, Homo sapiens
agaaggcaggcagtgagagggactcagaagcgctggcatctcagcggcatcccggcttctgctgtcgggtggcaccggacccttctcaagcttctgggacrgcaaattctagaaaatctgccaggggcgtagaaggcacttggaagaatctaaccatttcatgaggtgtgaccgtgacggaaggagagtgactccctacac

SEQ ID NO: 4557 - DNA, 201 bp, Homo sapiens
cgaaagtcgtaaaaacaggaaaaaatgaggggacatttggtgaggtaccaagatgtgagactgtttatattgtggctcgtttaatttttagaacctcaaaygtgtcggtttctccagtgtcacctttgtttttcctttgtaaacagacaagtggacagaaaagtaggtagatagaacggctgccagtccccgccacccaca

SEQ ID NO: 4558 - DNA, 201 bp, Homo sapiens
tcgtaaaaacaggaaaaaatgaggggacatttggtgaggtaccaagatgtgagactgtttatattgtggctcgtttaatttttagaacctcaaacgtgtcsgtttctccagtgtcacctttgtttttcctttgtaaacagacaagtggacagaaaagtaggtagatagaacggctgccagtccccgccacccacagcccag

SEQ ID NO: 4559 - DNA, 201 bp, Homo sapiens
ctgtggctcagttttaacaaatgggctcattgagtgagttccaaattcatgtttcaccttccatgatgtagccaagctgagaactcttaaaaatgcctcaycgcctttttcactcagggccacctttttcccaaggaacttctcaaaactccctcaattccaattttattgaagttctacatgtaggctattgccttgaat

SEQ ID NO: 4560 - DNA, 201 bp, Homo sapiens
ggggtgagttctgctcggagggcctgccgagggcattccttcctgtcctccagcatgagagggacagtgtggggcccctagagtacagggaagacctcctyataactgaagagatgcgagtctgagagtctttattggctcttttgtaggaatcgctgcaggtctctttggtccttggagccagcccgtgaggccgggggc

SEQ ID NO: 4561 - DNA, 201 bp, Homo sapiens
acctaggccgaggtgagtcacagccctggggagggcgcatggccacggtgttctcaggaagcaaaggggactgtggggtcagggctctttagagcagaccrcaggtaaaacagtaagtagaacttgggggtttcttgagtaatgagccacttgtttttcttgatttaaaaaactgactttaaagaatgctaataaatccgc

SEQ ID NO: 4562 - DNA, 201 bp, Homo sapiens
acatgtaggctattgccttgaatccaattttccataagaaagagctcatttaggccgggcgcggtggctcatgcctgtaatcccagcaccttgggaggccraggtgggtggatcatgaggtcaggagttcaagaccagcctggccaacatggtgaaaccccgtctctactaaaaatacagaaactagctgggcatggtggc

SEQ ID NO: 4563 - DNA, 201 bp, Homo sapiens
agtgggtcctgccctgtgactgtgggtgtgccaggtcaccacacaggtgtgtgctgggtcacagacacgccccttccctgcctctccattctgtttcttcrtcgtctggccatcctcgggggcattgtgacacagcggagggagtgaggcaggactttataagggagagtgaggctggcttctgcagcattgagagctttg

SEQ ID NO: 4564 - DNA, 201 bp, Homo sapiens
ggctggcgtcgctgtgctcgctctgcacggcttccgtggctggctttggggtgacgtcggcaggaggggcagaggggctctgggaaggcttctgcggtgtygcggtaagtgatgagctgggagggctctgggccaggcccttgtcgggtcccaggctgctcccactgcagcttggttccacatctttcttcagcctcttgc

SEQ ID NO: 4565 - DNA, 201 bp, Homo sapiens
gggctacacagggacaccccgtctctacaaaaaatgtggcaccactctactccagcctgggtgacacagtaacaccctgtttcaaaacaacaccatgtttygttctgtcctctgtgctcgtggggatttcacacaggccgggctctggaaggccaacctgaacctcctggcacactgtggtgacctccgggataccccaca

SEQ ID NO: 4566 - DNA, 201 bp, Homo sapiens
agagtgttcctgagagccacacagcctcatcaccacaaaagaggtgacgccacgactcaccagggtccgtcttggccccttgctgtccagggaacaacccrtgccgctgatttgtgttcctggttgagggtccggtgctgtgtgtatatagttgtgatgtctttctagtctttaattgagaaggttctgcctctttgttgt

SEQ ID NO: 4567 - DNA, 201 bp, Homo sapiens
acagcaggaccagtgcaacactgggcctgactcgtccttgcggggaagatgaatttggtcctaacagctgtgctgcacaatggcgtgaacggtgcgaggarcgtggggagggcataagcccgcaggacagccttctctccaccagaaggcaggcagtgagagggactcagaagcgctggcatctcagcggcatcccggctt

SEQ ID NO: 4568 - DNA, 201 bp, Homo sapiens
gtcaggagttggagaccagcctgaccaacgtggagaaaccccatctctacaaaaaaaattagccaggcatgatggcacgtgcctgtaatcccagctactcrggaggctgaggcaggagaatcacttgaacccaagaagcggaggttgcagtgagctgagatcgtgccattgcactccagcctgggttggcacccagagcaa

SEQ ID NO: 4569 - DNA, 201 bp, Homo sapiens
tggcaagattatgaaaaaattttcttacgcttttctatattttccaagtttgaatttcactgtaagcacctggctttgtaccgccctttttctgttacacrgtcatcatttgcttgcttgttgtgggagcacttttgcacaggtctgcttggttagtgaaagcatgtctccctttctaggaaggttgtgcaggaccagcgt

SEQ ID NO: 4570 - DNA, 201 bp, Homo sapiens
ggcgtgaggcacgtccatcagtaggcacgtgctgctttcgttctgcaagtgtcaaggcgagtgtcgaggatgaaagcatgaggcgcttgcagggggtcctyggaaccaggtgccactcctcggcctgacggggagccccgccccctcccgggtctccactgtgccccaggcatgcccaccccactcccccacagccctctt

SEQ ID NO: 4571 - DNA, 201 bp, Homo sapiens
ggccgtggggagctttgtcccgcctggcacagctatgtagctgagcagggtggggcgtcctggattgcccatctggcaacacagttaacaaccctggggayggatgttgcgtgttgactttagaatgggatttccagtgtcctcatccgtctcctgttgagatgggggtggtgatggggtgctgagctacgccggccgagt

SEQ ID NO: 4572 - DNA, 201 bp, Homo sapiens
ggacggatgttgcgtgttgactttagaatgggatttccagtgtcctcatccgtctcctgttgagatgggggtggtgatggggtgctgagctacgccggcckagtgcgtgtggcccacccccctctgccgtggtggtcagactgtgctgtgtgttgatcaccacactgggttctcgtgtagcctttagtgtggagctgcctc

SEQ ID NO: 4573 - DNA, 201 bp, Homo sapiens
cagctacgcatcagcccttgagccgattcatgtgttcgatcatattcctgagacagtagggtctgtgcaggtaacaaagcaccagtcagcaggaaactcamcaccgggaagcctttctatcaaaacataacttcaaaatcagtaaagtgggccgggcatggtggctcatgcctataatcccaacttcaaaatcaataaagc

SEQ ID NO: 4574 - DNA, 201 bp, Homo sapiens
atgagccgggaggcagagcttgcagtgagccgagatcgcgctactgcactccagcctggtgggcgacagagtgagactccgtctcaaaaaaaaaaaaaagraaagaaaagaaattagaccggtggtgttttcatcctttttccttgagaataagttttctggattttagtctatatattgaataaagcctacaggtcaaag

SEQ ID NO: 4575 - DNA, 201 bp, Homo sapiens
gtcactgtcacctgtcactgtccatctttttgatgcttgacggttccacctttggccggtggccacctcagtctggtggtgtcttttgccgtgttctggcrtttttcgtttatgttttgagccctcccttatgttctgggttaagcagatgctgcaggcacctctgaacattccctgcctggccctggaatcagcctggct

SEQ ID NO: 4576 - DNA, 201 bp, Homo sapiens
ttcactgtaagcacctggctttgtaccgccctttttctgttacacagtcatcatttgcttgcttgttgtgggagcacttttgcacaggtctgcttggttastgaaagcatgtctccctttctaggaaggttgtgcaggaccagcgttccctgtgcaggcgccactgcgtttcctgcagattccgaccggcactgcaacgga

SEQ ID NO: 4577 - DNA, 201 bp, Homo sapiens
ggaatcatgagtcttgtcctccttattatacaacgtaatacttcagaggggaaggactcaagctaacacatgaagaaatggcagaattaaaaagtgagggygtggccgggcacggtggctcgcgcctgtaatcccagcactttgggaggctgaagcgggaggatcacttgggcccaagagttgttatagcgagctttgctt

SEQ ID NO: 4578 - DNA, 201 bp, Homo sapiens
gaagggatggaagctctttaacttttatgaagttattggtaggttggaggagagaaacgtgacgtgttcatcacagtatacgtatcttttttgtttttgtyttcaatttagtaaccagtagattctccaagctgcttttccgtgacgagaaagagaaacagtgaatttgtatcatcgggtcttagtttcttggggtcctaa

SEQ ID NO: 4579 - DNA, 201 bp, Homo sapiens
aaaaatacaaaaattaggcatgacggtgcatgcctgtagtcccagctactcaggaggctgaggtgggaggatcccttgaggccggaagggggaggttgcartgagctgagatcacaccactgcactccaccttgggtgacagagccagacccttgggtgacagagccagaaggaacgtttgggaatggaatcatcgtgttg

SEQ ID NO: 4580 - DNA, 201 bp, Homo sapiens
atgcctgtagtcccagctactcaggaggctgaggtgggaggatcccttgaggccggaagggggaggttgcaatgagctgagatcacaccactgcactccascttgggtgacagagccagacccttgggtgacagagccagaaggaacgtttgggaatggaatcatcgtgttggtcgatctgcagatgttagtgattgtgag

SEQ ID NO: 4581 - DNA, 201 bp, Homo sapiens
ggttctcaccccacttggaaaactggtggctgtgccccatttcatgggtgaggagactgaggctggaagaagtccaggcctgtgtctgtcctgtagctatygaccaggctctcagactccagaaacaaacctcagtaggaatcagaagtgttggccgggcgcggtctgcctgtagctatcgagcaggctgtcagactccag

SEQ ID NO: 4582 - DNA, 201 bp, Homo sapiens
tcagtagaaatcagaagtgtcggccggttgcggtggctcatgcctgtaatcccagcactttcggaagctgatgtgggcggatcatctgagatgaggagttygagaccagcctgaccaacatgggagaaacccatctctactaaaaatacaaaattagccaggcgtggtggcacacacctgtaatcccagctactcgggagg

SEQ ID NO: 4583 - DNA, 201 bp, Homo sapiens
cacagcccaggccccatggaggccctcccagcgcagctacaggcctgctggccaggagcaaacagtctatgtacagaacccctggagacccccggcctagracgcctgcagcacagagcagctgggtccggacacaggcacgaggtccttggcagtgtcttttctgccacacacacgccagggtctcctctcccgtggaag

SEQ ID NO: 4584 - DNA, 201 bp, Homo sapiens
aacggctgccagtccccgccacccacagcccaggccccatggaggccctcccagcgcagctacaggcctgctggccaggagcaaacagtctatgtacagarcccctggagacccccggcctagaacgcctgcagcacagagcagctgggtccggacacaggcacgaggtccttggcagtgtcttttctgccacacacacgc

SEQ ID NO: 4585 - DNA, 201 bp, Homo sapiens
agaaagaacccaacagttaaagcttagtgtagtctaggtttttgtttcgaaagtcgtaaaaacaggaaaaaatgaggggacatttggtgaggtaccaagaygtgagactgtttatattgtggctcgtttaatttttagaacctcaaacgtgtcggtttctccagtgtcacctttgtttttcctttgtaaacagacaagtgg

SEQ ID NO: 4586 - DNA, 201 bp, Homo sapiens
catggccaaacgctccccgcttggcagcatccgccagctgtaactggaggaacaggaccaggtcgggtttgggaaggcccacgtctggctgtttacaccartctagggaaaaattctgccaagaaagaacccaacagttaaagcttagtgtagtctaggtttttgtttcgaaagtcgtaaaaacaggaaaaaatgagggga

SEQ ID NO: 4587 - DNA, 201 bp, Homo sapiens
cccaaccccgctgagtgcccacttgcaggagtgaggcacagcccacagcacagccaggcccacccagcccaccaggtcgaggtgactgtccctccagctcrcaagcggcgagtcggaagcacagagggcagaccctgccctgcccacgctcctgtggctcctgggccctgcctggaaggtgaggaagttccgcagcagaag

SEQ ID NO: 4588 - DNA, 201 bp, Homo sapiens
ccaactgcccactcctgctttaagccgacctcagcctcgtgaccccaaccccgctgagtgcccacttgcaggagtgaggcacagcccacagcacagccagrcccacccagcccaccaggtcgaggtgactgtccctccagctcgcaagcggcgagtcggaagcacagagggcagaccctgccctgcccacgctcctgtggc

SEQ ID NO: 4589 - DNA, 201 bp, Homo sapiens
tccgggataccccacacctttctctgaacctcaaccttgacaagtgtctacggtagtcacccggcattcctgccacagccctgatgcaggagaaacatgaygtgccaactgcccactcctgctttaagccgacctcagcctcgtgaccccaaccccgctgagtgcccacttgcaggagtgaggcacagcccacagcacagc

SEQ ID NO: 4590 - DNA, 201 bp, Homo sapiens
cgtggggatttcacacaggccgggctctggaaggccaacctgaacctcctggcacactgtggtgacctccgggataccccacacctttctctgaacctcarccttgacaagtgtctacggtagtcacccggcattcctgccacagccctgatgcaggagaaacatgatgtgccaactgcccactcctgctttaagccgacc

SEQ ID NO: 4591 - DNA, 201 bp, Homo sapiens
gcactttggggaggccaaggcaggtagatcacttgagcccaggagtttaagacaagcctggctggcaacatagcgaaatcctgtctccacaaaaaaattasccaggcacagtgaaggcctgtaggcctagctactcaggaggctgaagtaggaggatcacctgagcccaggaggtcaaggctgcagtgagccacgatcgtg

SEQ ID NO: 4592 - DNA, 201 bp, Homo sapiens
ccgatgctcgtattcgcttcttgtggctgctctaaaagatgatcacattcagtgcctggaacagcacagcctcttccagacccggagggcagacagccatrtcgtgctgtgggctctaggggagaacgttgctgtgcctttctagcttctggatgccagaaactgcttggctcatggctctttcctccaaccacacagcca

SEQ ID NO: 4593 - DNA, 201 bp, Homo sapiens
gcctggggcacagcagggggcttggtgaggacattgctcactctggccagtgcatccctgtgggcagccctggtataggtgtgaagggcccaaagccagaycggagggggccctgctgggtccccggtgaggtggctgaggacttgtggcctctccgatgctcgtattcgcttcttgtggctgctctaaaagatgatcaca

SEQ ID NO: 4594 - DNA, 201 bp, Homo sapiens
ttaagttctaattgaatgtgagttccagaaaaaaaataagtgaatgtttcagcccgttcacacgtaaaggatgtggctgcctgcgtggcgggctgtggggscctgagcaggtgtgtccccagccctggcagggggcctgtcctgcctgcagcctggctctctaccagccgtggcatcagccacctcatacaaccctagaag

SEQ ID NO: 4595 - DNA, 201 bp, Homo sapiens; identical to SEQ ID NO: 398

SEQ ID NO: 4596 - DNA, 201 bp, Homo sapiens; identical to SEQ ID NO: 395

SEQ ID NO: 4597 - DNA, 201 bp, Homo sapiens; identical to SEQ ID NO: 393

SEQ ID NO: 4598 - DNA, 201 bp, Homo sapiens; identical to SEQ ID NO: 389

SEQ ID NO: 4599 - DNA, 201 bp, Homo sapiens; identical to SEQ ID NO: 416

SEQ ID NO: 4600 - DNA, 201 bp, Homo sapiens; identical to SEQ ID NO: 415

SEQ ID NO: 4601 - DNA, 201 bp, Homo sapiens; identical to SEQ ID NO: 414

SEQ ID NO: 4602 - DNA, 201 bp, Homo sapiens
caaagaatagtagggacttctgaagattcaggagtggctttagagaggtagcagggacatcatgatgtttttcagctctttaaaaagataggagtgggccrgatgctgtggctcacgcctgtaatcccagcactttgggaggccgaggtgggtggatcacttgaggtcaggagatcgagaccagcctggctaacacagtga

SEQ ID NO: 4603 - DNA, 201 bp, Homo sapiens
agaggggcctgggtctcccacagctgagaatcctttaaacagtgcctgtagggccctctattgtggatttggtagttctgcctgcaccgagggagatgctwgcaggtgcttctgaaccctgtgtttgggaattagctgcgcatacaattaaggcttttgggtatagtaaaatttgtgtgcctttgaccctgtggttctgag

SEQ ID NO: 4604 - DNA, 201 bp, Homo sapiens
ctgagagtagcaccccatgcttctccagcacctgctcctaaccaggaaattggggtagaccagaaccccagtcttcccagcagctcagtgtttcttgcccyggagcatctgccttcatcacagtgactctgaacacgctgccatggtgacatctggtaaaccttaggatggccatggaaaacgactctttgccctgtttct

SEQ ID NO: 4605 - DNA, 201 bp, Homo sapiens
tttaactttatttttgtcctttactttttaagtctaaagtaagtgcttgaatcgggtgggttttcatttttttgctttctcacccctcaggttggcccctracttggcctctcaccctcgtgtcagctgttagacactgactcagtggctcagaatatgaaaggctcaggaagtagcatgctggccccacctccctgtccc

SEQ ID NO: 4606 - DNA, 201 bp, Homo sapiens
gactcagtggctcagaatatgaaaggctcaggaagtagcatgctggccccacctccctgtccccataccttagcagagcagctgcccagcagggcctcctyctctttcctaagagtttactccatccatggtgggtgtcttggtaggcccgagatacgagagggagtgctgctgttacaagaatttacagttgttctcttc

SEQ ID NO: 4607 - DNA, 201 bp, Homo sapiens
ctctttcctaagagtttactccatccatggtgggtgtcttggtaggcccgagatacgagagggagtgctgctgttacaagaatttacagttgttctcttcrgcacagaaatgctgtaaatggcctctttcgatactagtttatgaaattataagtgtctgatgattgtgcatctttggtttcaacagctactctgacctac

SEQ ID NO: 4608 - DNA, 201 bp, Homo sapiens
gctgagcctgcagattgggtttcttgtgcctgtgggatgtcctgtggtctttcctggacagtaagctctttggtaccatgtcccctcctgtcccctcttgygtcacccagttgggcctcagcaggcccttgggccccctatggcagtgggtggggggaccgtctgctcccacctgggacctgtgctcagtcccccgcccct

SEQ ID NO: 4609 - DNA, 201 bp, Homo sapiens
caccccaggtgaccacttgaggccactggtggaaaagcagcatgccctggggttcattttcagcctggtcgcgggcggcctcctgtgtgcccctttccctsatggtctggtgccctcggctccctccccacctcctgcccactgcttctcagtgtgatgtgggtgcagtgggtctgaaatgcggcctcctctgtccctttc

SEQ ID NO: 4610 - DNA, 201 bp, Homo sapiens
cgtgtgtctggatgtgagcgtgtgtgggcgcgtgctgagtgtgcatggatgagtgtgagccatggtgagtgtgtccccctcacacctacatttaaacacaygggcggcccctccacccacccctgcaccaccttcgtcacacccacatttaaacacgggcggcccctccacccacccactcctgcaccaccttttgttttc

SEQ ID NO: 4611 - DNA, 201 bp, Homo sapiens
actcctgacctcaagtgatctgcccaccttagcctcccaaagtactgggattacaggtgtgagccaccgagtccagcctcaacagatgttttaattgaatrgatgttaaaataattattaatgttcatgatgatttaacttcaaggatattccttaaaacgtgaacagaaagaacctcctcatgattttaacagtttctga

SEQ ID NO: 4612 - DNA, 201 bp, Homo sapiens
gtgctgggattacaggcgtgagccaccgtgcctggccaggactcctctcttttttctttttttttgagacagtctagctcagtagcctgggctggagtgcrgtggtgcaatcttgggctcactgcttcctccgcctcctgggtcccggttcaagcagttctcctgcctcagcctccccagtacctggaattacaggcaccc

SEQ ID NO: 4613 - DNA, 201 bp, Homo sapiens
cccttcagagtcctctgtccagcagctccccagcccccaccacacccttccactcacacttctcttgctgctgcctggagtggccccaccaagtcagcgcygtttctctggaagcaccaggccactcgccatgctcgctgtttctcctggtcccctgcctgctccccaccagcccccgcccctgttgctggatgatcctcc

SEQ ID NO: 4614 - DNA, 201 bp, Homo sapiens
tgaagcctctccttctgcatctgcctgttctgtatcccactcaaggccctcaggcatcccacgttccacattcctgaaatggccctgtctcccctcacccwcagcctgctcctcagcatggcagtcactgtctccacccagcttttctgtcaggttccctggggtcctgcacaagtccgtctctgccacatcccacgtcac

SEQ ID NO: 4615 - DNA, 201 bp, Homo sapiens
tgccccctcatgcctcccccgatcttgttggggcatccttccgtctggaggctgggtcgggtgctgtccaggccttcctgtgacgtgtctcctggcaccaygtgccaccagaggtcagggctgggggcgggtgtgtgttgctaatgtgtatctgttccctgcagcgcaaatgggagttggcgaaggcaagtccataggcca

SEQ ID NO: 4616 - DNA, 201 bp, Homo sapiens
gcctgcctcaaagttggcaaaacccacagcgtctcagagctgcgttcatgttctagttcctgcctctgtgccagtgagaccagaaaaccaggccactcaamagcctcttgcgtgtgctctctatgaatggaggctggggcaagggcaggacccctgggcctcaggcgagaagaagcagatttaccctcagctttcttcctg

SEQ ID NO: 4617 - DNA, 201 bp, Homo sapiens
ggtgtatttgaacttaatggaacacctcttattcccttcactctgaagttggcttccttgcctataaagtttggtgataaacctaagaaatacacctgctrtgcattttactgcgtccgtgatgaaaatccctcaacttcacagccgctcaggcctcgtgaccctgctttcagagggagcctttttccttttcttccttat

SEQ ID NO: 4618 - DNA, 201 bp, Homo sapiens
ggggagggccggagtgcgtttctctggacggaggagcagagcagcttggggcacggtgtgggagccctccttagggacctcatgggtcacgttcgccgtgrctgcgccactcctgttcactgccaagcaccgtgattgctccttggatttgctcccctggggtttcctggtctccttgatggtttatacagtgagcaatct

SEQ ID NO: 4619 - DNA, 201 bp, Homo sapiens
gcgcccgctcctggaaagccccgttctcatagcgctcatggccaaacgctccccgcttggcagcatccgccagctgtaactggaggaacaggaccaggtcrggtttgggaaggcccacgtctggctgtttacaccagtctagggaaaaattctgccaagaaagaacccaacagttaaagcttagtgtagtctaggtttttg

SEQ ID NO: 4620 - DNA, 201 bp, Homo sapiens
caaagtcgtgtctttcatgagctggtggaaacaccggagcgcccgctcctggaaagccccgttctcatagcgctcatggccaaacgctccccgcttggcakcatccgccagctgtaactggaggaacaggaccaggtcgggtttgggaaggcccacgtctggctgtttacaccagtctagggaaaaattctgccaagaaag

SEQ ID NO: 4621 - DNA, 201 bp, Homo sapiens
accccagctccggggcagaagaggcagcctgcagatctctgctgccgggaaagagctcctgaagttgtggggtctggactccgctggggacggggccttcygcgagtctcccacctctcgggggactgcagggagaggcgtctccagtgggcagccttgggtcacttccatagctcccccagcggcttctctgtggcagtg

SEQ ID NO: 4622 - DNA, 201 bp, Homo sapiens
ccacgggggtccccagtgcaccccagctccggggcagaagaggcagcctgcagatctctgctgccgggaaagagctcctgaagttgtggggtctggactcygctggggacggggccttccgcgagtctcccacctctcgggggactgcagggagaggcgtctccagtgggcagccttgggtcacttccatagctcccccag

SEQ ID NO: 4623 - DNA, 201 bp, Homo sapiens
gacaggggagagggcaggagactgctccatcgctctgctcatgtccacactgccaaggtccccaccacgggggtccccagtgcaccccagctccggggcaraagaggcagcctgcagatctctgctgccgggaaagagctcctgaagttgtggggtctggactccgctggggacggggccttccgcgagtctcccacctct

SEQ ID NO: 4624 - DNA, 201 bp, Homo sapiens; identical to SEQ ID NO: 402

SEQ ID NO: 4625 - DNA, 201 bp, Homo sapiens; identical to SEQ ID NO: 401

SEQ ID NO: 4626 - DNA, 201 bp, Homo sapiens; identical to SEQ ID NO: 400

SEQ ID NO: 4627 - DNA, 201 bp, Homo sapiens; identical to SEQ ID NO: 397

SEQ ID NO: 4628 - DNA, 201 bp, Homo sapiens; identical to SEQ ID NO: 396

SEQ ID NO: 4629 - DNA, 201 bp, Homo sapiens
ttattatacaacgtaatacttcagaggggaaggactcaagctaacacatgaagaaatggcagaattaaaaagtgagggcgtggccgggcacggtggctcghgcctgtaatcccagcactttgggaggctgaagcgggaggatcacttgggcccaagagttgttatagcgagctttgcttgttccactgtactccagcctgg

SEQ ID NO: 4630 - DNA, 201 bp, Homo sapiens
tctcctctcccgtggaagagcaggaagaagacaggcactcctagagcctgttatgtgccagcctagtctcatccactggcccttcttgccagggctgtgcsagcaccctctctccctcccttactcatcccatctccctccaaatgctgtcctgtttccggaggaaaggtaggaccagaaaggctgtgactgcaggccaca

SEQ ID NO: 4631 - DNA, 100 bp, Homo sapiens
ccagccccgtgttagcacctgggcctcagtcccacttgctcccaggcgcyggttctgtggttggtttggaattaaagtcctgtttgaagttgtcagacac

SEQ ID NO: 4632 - DNA, 100 bp, Homo sapiens
ggcgcaggggaatgagaagtaccaggggtctccatggcgacggcctgttrgtgacctcagctccggcagggaatccgttgcagtgccggtcggaatctgc

SEQ ID NO: 4633 - DNA, 201 bp, Homo sapiens
  misc_feature 140: n = A,T,C or G
ctgtgtaaaaatatttctagggctactgggctagcgatgggtttggcgctgacttaaaataatcttgctagcaaaaatggagcggaagcatgaaaggatargaaaaaaaccaacactccctatacacacacacacacacntccttctctttctctctctcttaggaccccaagaaactaagacccgatgatacaaattcac

SEQ ID NO: 4634 - DNA, 201 bp, Homo sapiens
tcattgatggacatttgagctgtttccacctttggctatggtgaatagtgctgctgtgaatatgcatgtacatgtgtttgtttgagaaacctggttttaatttttttttttttttaatgagacagggtcttgttctgccacccaggctgaagtgcagtggcacaatcactgctcactgcagccttgaactcccgggcccaa

SEQ ID NO: 4635 - DNA, 201 bp, Homo sapiens
actgcttcctatcaactaggcaggaagttatcatcaaagaggataggcccttccccctagccagagaaagggatgtgagctcctgaccctggagcatactcccccatctcctaaaaaataatggcacagagatcaggtgagcccagaggcacgggaaacatggtctgtgaccctcgggtggagcctgctcacctcttctta

SEQ ID NO: 4636 - DNA, 201 bp, Homo sapiens
cgtctccaggctggcacgctgaagggcaaagaacagagagaccatcagaacagaaaattacatttagctcataccagttaagtagaacaatgccctcattytgcagatggggccctaggtgacaaggagtaaaagctgcaaagccaacaccagaactttgtctcttctattttctattgcagaggagtattcaaagctgtt

SEQ ID NO: 4637 - DNA, 201 bp, Homo sapiens
atcccagcactttgggaggccaaggagggcagattgcctgaggtcaggagtttgagtccagcctggctaacatggtgaaaccccgcctctactaaaaatayaaaaatcagccgagcgcagtggtgcatgcctgtagtcgcagctactcaaaagactgaagtagaagaatcacttgaacctgggaggcagaggttgcagtga

SEQ ID NO: 4638 - DNA, 201 bp, Homo sapiens
gtggctcacacctgtaatcccagcactttgggtggccgaggtgggcagatcacttgaggccaggaattccagaccagcctggccaacatggtgaaaccccrtctctaataaaaatacaaaaattagctgggagtggtggcactgcctgtaatcccagctacttgggaggctgaggcaggagaatcgtgtgaacccaggagg

SEQ ID NO: 4639 - DNA, 201 bp, Homo sapiens
gcctgggtggtggtgaccttgacattgccttacaaccatgagaacctttccagtcagctgcatttcctccagttggattttctctcctggataagattatytgtcctactctaggaagtcaggcaggagctgggatattagcccctgcactccctggggaaacaccctatggctgaagtcaccaaggaacaggaccccctg

SEQ ID NO: 4640 - DNA, 201 bp, Homo sapiens
tcattacaaagggtgcccctgtgggctgggccctgtgctggaggctggccagtaagggttgctgacagcggtggtaatgatggtggcagagtggctgtgayggagaaggaaaaggtagaggcagagtagaatttcctgacaacagtgttgtgattgtggccacacagaagcaatcctcctaattggttcctagggagctta

SEQ ID NO: 4641 - DNA, 201 bp, Homo sapiens
caaatacaggcatgctggctatagtctgtgcccttagcctccacaccaccctggctttcttgagtacaaatgtctagtgcccctgcgtgtcctattcccakgtgagcatgcccacctctaaccctcaccagctctggtctctgctctctcctgtccctccaacacttgaaccacagtgtgaaaagctgagctcatcacttt

SEQ ID NO: 4642 - DNA, 201 bp, Homo sapiens
gagcatgcccacctctaaccctcaccagctctggtctctgctctctcctgtccctccaacacttgaaccacagtgtgaaaagctgagctcatcactttctstccctaatataccctcccaccccatcagtgcccacgccctcactcacccaggtgctccgcactctcaagaagtcacctgccatctcttaaggcagttgct

SEQ ID NO: 4643 - DNA, 201 bp, Homo sapiens
ctggttgtccatggctgacatctctgattggttagtgcctgcttgtaccagctgttaaatgttttgcatcttccatagacatcagctttgtgagcctgcarcctcatgtctatgcatgcgtacatgggtttctgatgacattgcacctgataattgctcccatcttctattagctgttgctttcagacccctgagtctcca

SEQ ID NO: 4644 - DNA, 201 bp, Homo sapiens
gcatcttttcctgtgcttcttggccattgtgtatcttctaaagaaagtttattaaaattacttgctcattttttaactgagttgtttgttttttttattgktgagttgcaagagtactttatatattctggatactagacccttatcagctctatgattttccaatattttctttcatttggcaggttgtcttttcacttt

SEQ ID NO: 4645 - DNA, 201 bp, Homo sapiens
gccattgtgtatcttctaaagaaagtttattaaaattacttgctcattttttaactgagttgtttgttttttttattgttgagttgcaagagtactttatrtattctggatactagacccttatcagctctatgattttccaatattttctttcatttggcaggttgtcttttcactttcttgataatgtcccttactgta

SEQ ID NO: 4646 - DNA, 201 bp, Homo sapiens
tgttttttttattgttgagttgcaagagtactttatatattctggatactagacccttatcagctctatgattttccaatattttctttcatttggcaggktgtcttttcactttcttgataatgtcccttactgtaaagaagttttttaactttgaggaagtccaatttatctagtttctcttgtgttgcttatgctttt

SEQ ID NO: 4647 - DNA, 201 bp, Homo sapiens
caggggactctgagtccaaaagcaagagcacagtcactcctgtgcacctctcagcatcttcataatcccagatggcagagaatctctccatttctcaggtrgataagctgcagccagagaggctgctccttctgcccacctcagcactctagtagaggacacactgtatcacatctgcttagcccttcatccctgcatcca

SEQ ID NO: 4648 - DNA, 201 bp, Homo sapiens
tccctgatttacatgagtgtgtatctgtctcttccagcagcctgagattgcctccagagcagcctcatctgagttggcctgcagcttcccagcaagagtcytgcacgcttgctggggagaaatggagggtggcacatcatcactagagggtggaacatttggaaagattaacagactgacagaagcatacctctgacacca

SEQ ID NO: 4649 - DNA, 201 bp, Homo sapiens
gtgtcgagattccactaaacatcaatgggctcctgcttttatacgtgcatcatttaaactcatccttataacaacttacgaaactgacactatcgccttcwtcttacagatgagaaaacaagagtcctggagatactagatgatttaccgagaccacaccactagcataggataaagccaataattagcccctgctgaaga

SEQ ID NO: 4650 - DNA, 201 bp, Homo sapiens
cttttatacgtgcatcatttaaactcatccttataacaacttacgaaactgacactatcgccttcatcttacagatgagaaaacaagagtcctggagataytagatgatttaccgagaccacaccactagcataggataaagccaataattagcccctgctgaagagccagtcattagccccaggtctgtctgagcccccg

SEQ ID NO: 4651 - DNA, 201 bp, Homo sapiens
cacaggaaggatcctccagcctccaatatcatctccccactgacgcagtgtttaaaatttgctgctgtcaggtaagacaggccccccacccccaccccccsgcccactaacatggaagtagtaccatggcacagggcaagggaacccaggagggcttcatcgacagctgtgtccctcagtcaacagaccatgccccactcc

SEQ ID NO: 4652 - DNA, 201 bp, Homo sapiens
cctccaaggaccagcatcctgcacttccatggtctcctggtgcagggttttgtacctttctaccaaaacatctttcattttgttgatcctaaatctctccytttggtatctccctggaagagtcgggaaggaggcagggtgagggtggggggacaggagtgtccttactgcatcatacagacacttgaggaacttgatgtc

SEQ ID NO: 4653 - DNA, 201 bp, Homo sapiens
cttccatggtctcctggtgcagggttttgtacctttctaccaaaacatctttcattttgttgatcctaaatctctccttttggtatctccctggaagagtygggaaggaggcagggtgagggtggggggacaggagtgtccttactgcatcatacagacacttgaggaacttgatgtctttgtccagtgagtccactttgg

SEQ ID NO: 4654 - DNA, 201 bp, Homo sapiens
gattttctattttctacccacaaaggaaagctcactcaatatcaatttcttctcaggctgcctgaagctttgggaatagggaaaggaggatggggcagctstgttatgcctggagaaaacaaagcccagagaggtagtaggtttcctcaggtcacacagcaaggttgagctggacccgagtttcacagttcccagaccaga

SEQ ID NO: 4655 - DNA, 201 bp, Homo sapiens
tccacctcatatctgccagcagggagagtagatggccttagcccccttagccaaggaactttctcttcctgctggccaggcaaatgtttgggatacagggkccctgcagggtctctggggtgagcagtaagaggctagtgacaggagtaagatatccctgagttgcttcacttgtctcctagtttttgcatgttaggaaaa

SEQ ID NO: 4656 - DNA, 201 bp, Homo sapiens
tggagaaaagcagtctccaaggggtagagaacacactgatggggcacccagagtgctgcctccttttatccctgttgagcccaggacaccggaaaagggcrtctctccactatctcctttcccctgctgatgggccaggggccatgggcaatttgtagaacagagatctccaagccctttgcagcaacaaagctcttctga

SEQ ID NO: 4657 - DNA, 201 bp, Homo sapiens
gataagattatttgtcctactctaggaagtcaggcaggagctgggatattagcccctgcactccctggggaaacaccctatggctgaagtcaccaaggaamaggaccccctgagtttcactcccaggttcagggtgggctgttctgccagtttcctggcaacttcagggagcactcaattttcaaacaggaagtatcactg

SEQ ID NO: 4658 - DNA, 201 bp, Homo sapiens
cttagtgctcagcacaacctgcacgcccctccagggctgccctggtagcttgcctaagtcttggggatgggctcacgttccacagatgagttggagcctcyggtcagagctgtcctcctgcacaaagggtcatgggagcctcctggcttccccgagtacttgcctccttctccagggctgcctgagatctgtctgccagtt

SEQ ID NO: 4659 - DNA, 201 bp, Homo sapiens
ggatttcagcctctacttcccccgcactgagacttagtgctcagcacaacctgcacgcccctccagggctgccctggtagcttgcctaagtcttggggatrggctcacgttccacagatgagttggagcctctggtcagagctgtcctcctgcacaaagggtcatgggagcctcctggcttccccgagtacttgcctcctt

SEQ ID NO: 4660 - DNA, 201 bp, Homo sapiens
tctccctcctctctgctgcagcccagctcaggaggggcatgctccacccttcccacctggagagagaaacatcagagcagtttaaccaagtggttgcaggrccatatggtgcctttatgccaatcagaaaaaggcaccccttcctctgggcagacgcagccctttcccagggtgcatggctggatttcagcctctacttcc

SEQ ID NO: 4661 - DNA, 201 bp, Homo sapiens
tatgagaagaaagcaggtggctggatggcatcaatttttttttaattccaatccctctcactcaatgcctattctgctacaggcactgtgctgagtgaaawcccagacaggcagtcagcatggtcaaaattcccatttcttggtgtcatattagtgtagagcatattgtgcagtaagcctctatttattaaacacttagca

SEQ ID NO: 4662 - DNA, 201 bp, Homo sapiens
ttgggccataatctctcatcatcttcctggaggataagaatccccttctgcagagcacctcaccagagggaaataaaaagcagccccgtgaaaaatcccartggccgtaaccatcatgtctgtagtttgaagatgaatagtgaatgtcatttttctctagccctttggcctttgactgctcctgggcacagaacaacagtt

SEQ ID NO: 4663 - DNA, 201 bp, Homo sapiens
tggaagacacaggtaccccagggaacccaagggagctgagtcaattgggccataatctctcatcatcttcctggaggataagaatccccttctgcagagcrcctcaccagagggaaataaaaagcagccccgtgaaaaatcccaatggccgtaaccatcatgtctgtagtttgaagatgaatagtgaatgtcatttttctc

SEQ ID NO: 4664 - DNA, 201 bp, Homo sapiens
tttccgttaaggaataggctctgtgttgcaagaggagggctgtggaagacacaggtaccccagggaacccaagggagctgagtcaattgggccataatctstcatcatcttcctggaggataagaatccccttctgcagagcacctcaccagagggaaataaaaagcagccccgtgaaaaatcccaatggccgtaaccatc

SEQ ID NO: 4665 - DNA, 201 bp, Homo sapiens
ggaggcagagatggcggcgcaggcctagacagttcccttctccctgtagacagtgtggcatcatgcgagggtcctgaggggaagcagtttcacagggccartgctttccgttaaggaataggctctgtgttgcaagaggagggctgtggaagacacaggtaccccagggaacccaagggagctgagtcaattgggccataa

SEQ ID NO: 4666 - DNA, 201 bp, Homo sapiens
ctgaggtaggggttgctaactggaaggtcggccagattgggcaggtgcatggggcatccctgagacaccgagaggcccaggcggattataaaggaaggctygacttgggaagcagagatggaggcagagatggcggcgcaggcctagacagttcccttctccctgtagacagtgtggcatcatgcgagggtcctgagggga

SEQ ID NO: 4667 - DNA, 201 bp, Homo sapiens
aaatggcgtgagttccttaacctgggggtgactgtcctagggccccagccaccaagaagcctgcagaccaatgagaggaatctacacaaagaacttaaagyagagccaaagctctggaatgacagaaaagcattatgaaccacgaatcagaggtgcactgaggaatggctcatcttgattagggtttttggggatctccag

SEQ ID NO: 4668 - DNA, 201 bp, Homo sapiens
ttatagctcaggtagtgtgggtacagtgcaatgttaaaaaattatttcagggctgggcatggtggctcacacctgtaatcccagcactttgggaggccaargagggcagattgcctgaggtcaggagtttgagtccagcctggctaacatggtgaaaccccgcctctactaaaaatataaaaatcagccgagcgcagtggt

SEQ ID NO: 4669 - DNA, 201 bp, Homo sapiens
agccctttgcagcaacaaagctcttctgatagcaagtggaatatgctgcccttgcagagtggagtggtctaatttggagtttatctgtgctccctaattarggacctgaagagttatcccctgaagagatctcctagctttatttttccagtgctacctccttcttgcttaaccatcagcaaggagcaggggaaatgcctg

SEQ ID NO: 4670 - DNA, 201 bp, Homo sapiens
tgaagccgtaacctccagcccgaacgccgccaccagccacattgaaagaaatacgccgattccctccaaggctatagaggctccgactgccaaagccagcrccagcccctctgccagctgcacagtaagaagccaggctacccacagccttccttggcaccactgccgaatgcacactgaagttgcccttgtcaccactgg

SEQ ID NO: 4671 - DNA, 201 bp, Homo sapiens
tcctgaggcccagctgcacctttccagccacagtgtgcagtccattcccaggcagcaggaaaactgctcaggcctcagggtgcggcctcatcctcctcctrtgagacccaccttgtcaatgaaggaggcgaacttgtcgttcagcaccttgatctgttcccgctcctgggcgcgcaccttctggatctcagggtccagctc

SEQ ID NO: 4672 - DNA, 201 bp, Homo sapiens
tggtttctagaacctggttctgctgctctaggaagcgtacctggaacccaaatcaacagacacctggaaccacaatgggtgcagtcatgccccctggacamacaccattgactccccaggtttgccatagattgttgtagtcatttttgctcatgtcttgactctccacccttgccattccacacaaactagatcctttac

SEQ ID NO: 4673 - DNA, 201 bp, Homo sapiens
gcaggttgctgatgtagccctcaaggatgggctccaggttcttcttgcagttgttcaggtccagctgctgcagcagctcccacttggtttctagaacctgsttctgctgctctaggaagcgtacctggaacccaaatcaacagacacctggaaccacaatgggtgcagtcatgccccctggacacacaccattgactcccc

SEQ ID NO: 4674 - DNA, 201 bp, Homo sapiens
cctcaccctgtccccagacagtgtctccagctgcttccgcaggttgctgatgtagccctcaaggatgggctccaggttcttcttgcagttgttcaggtccwgctgctgcagcagctcccacttggtttctagaacctggttctgctgctctaggaagcgtacctggaacccaaatcaacagacacctggaaccacaatggg

SEQ ID NO: 4675 - DNA, 201 bp, Homo sapiens
gcacaggaactgcttcctatcaactaggcaggaagttatcatcaaagaggataggcccttccccctagccagagaaagggatgtgagctcctgaccctggwgcatactcccccatctcctaaaaaataatggcacagagatcaggtgagcccagaggcacgggaaacatggtctgtgaccctcgggtggagcctgctcacc

SEQ ID NO: 4676 - DNA, 201 bp, Homo sapiens
cttgtctcctagtttttgcatgttaggaaaacacccaggtgcctattgggctcccgacaccagcaactgaacatttcagtgggtcaaggagcacaggaacygcttcctatcaactaggcaggaagttatcatcaaagaggataggcccttccccctagccagagaaagggatgtgagctcctgaccctggagcatactccc

SEQ ID NO: 4677 - DNA, 201 bp, Homo sapiens
tttgggatacagggtccctgcagggtctctggggtgagcagtaagaggctagtgacaggagtaagatatccctgagttgcttcacttgtctcctagttttygcatgttaggaaaacacccaggtgcctattgggctcccgacaccagcaactgaacatttcagtgggtcaaggagcacaggaactgcttcctatcaactag

SEQ ID NO: 4678 - DNA, 201 bp, Homo sapiens
atgggggtgcgagagaccctaataaggaggctcctccctcccttaccttcttaagcaccacaaactcattctctgctgttgtgcgccggttaatctccacytcatatctgccagcagggagagtagatggccttagcccccttagccaaggaactttctcttcctgctggccaggcaaatgtttgggatacagggtccctg

SEQ ID NO: 4679 - DNA, 201 bp, Homo sapiens
gtcctgagcagagttgttaagatgggggtgcgagagaccctaataaggaggctcctccctcccttaccttcttaagcaccacaaactcattctctgctgtygtgcgccggttaatctccacctcatatctgccagcagggagagtagatggccttagcccccttagccaaggaactttctcttcctgctggccaggcaaat

SEQ ID NO: 4680 - DNA, 201 bp, Homo sapiens
caccaggcaccagccccctccccagcctcctgggctgaagtcctgagcagagttgttaagatgggggtgcgagagaccctaataaggaggctcctccctcycttaccttcttaagcaccacaaactcattctctgctgttgtgcgccggttaatctccacctcatatctgccagcagggagagtagatggccttagccccc

SEQ ID NO: 4681 - DNA, 201 bp, Homo sapiens
tgcagacgggtgaataatgcattttccacaatttcacagaatccaaggctctgtgctttgtaagacctcactgggttatcttttcctgcctgtgggcaagkccactattgtatcaagatcaatttcctcctgtatgtatggcctccaaggaccagcatcctgcacttccatggtctcctggtgcagggttttgtacctttc

SEQ ID NO: 4682 - DNA, 201 bp, Homo sapiens
cgctggcacatgcagacgggtgaataatgcattttccacaatttcacagaatccaaggctctgtgctttgtaagacctcactgggttatcttttcctgccygtgggcaaggccactattgtatcaagatcaatttcctcctgtatgtatggcctccaaggaccagcatcctgcacttccatggtctcctggtgcagggttt

SEQ ID NO: 4683 - DNA, 201 bp, Homo sapiens
ctgcattgagagaggaagacagattcagcaaccccctggcttccctcttctgccccatcagtcttctgggcccatggtccctggcccaataggctgctagratccacggggacaaagtagggggaagaagtgccctctgggatgtgtctgcagagctgagggagagcagctaacagcagcaggaacccctgcatatggcag

SEQ ID NO: 4684 - DNA, 201 bp, Homo sapiens
ttttttccttgaagccttggttggaacctttctttcattcagcatgcccacaaaagtattcctcacattcactgtgcaggtgacccctcccaggaagcgargggctgctgtgggaggagacccattcggtgaccaccttggtctggtacagggcctcggcctcggccttgctcttcagggcgatctcctcataatgcatgc

SEQ ID NO: 4685 - DNA, 201 bp, Homo sapiens
catggctacactcccgcaagtctgtgattctccctctgccctgtggcaacatgcccccattcctataagtgtgtttgttttaccacctcacttctttcacmtgcaacagagaggaacaggcagttcgtggatggaggaaagaagtgagggatcctctctgttgcatatattcaatccataccagtttcatgatttatcttt

SEQ ID NO: 4686 - DNA, 201 bp, Homo sapiens
ctggggccagttcagcagcctcttgggatcaggctcccagtctgttccaaggatgctcattgcatcttctttgcaggaatggatgagaacaggaggcaatrtgtgtagggtgtctggcatctagtaggtgcttgacaaatgatggtagctattgctgataatgaaggaggtgggtgggtgacacaggctggcagagaatcc

SEQ ID NO: 4687 - DNA, 201 bp, Homo sapiens
taggtgggtgactggggccagttcagcagcctcttgggatcaggctcccagtctgttccaaggatgctcattgcatcttctttgcaggaatggatgagaayaggaggcaatatgtgtagggtgtctggcatctagtaggtgcttgacaaatgatggtagctattgctgataatgaaggaggtgggtgggtgacacaggctg

SEQ ID NO: 4688 - DNA, 201 bp, Homo sapiens
gcagaaattcagagtctttaattcaaacaaaagaggaaatagatgctgccattcttaggaatatttacaccctgagccacgacatctggactaggcagtascactcagcgacagaaaagccagctccactcactgagctcagctcatggcaccaaaaattgagagtcagaagctatgtaggacacagccccagagagactg

SEQ ID NO: 4689 - DNA, 201 bp, Homo sapiens
tcctgcacgcttgctggggagaaatggagggtggcacatcatcactagagggtggaacatttggaaagattaacagactgacagaagcatacctctgacamcactcaaggacaacttaatgaatatacagcagaaattcagagtctttaattcaaacaaaagaggaaatagatgctgccattcttaggaatatttacaccc

SEQ ID NO: 4690 - DNA, 201 bp, Homo sapiens
gaaagcctgtgtccaaactactatgttgctgtgatttaaattccctctccaggagcccatgtgtccatctttctggttatttaattaaactctcctcctcytccaggaagccttccttgcttagcctctctattccagtcccttactagcattgctgccttaggctgcccttccctgatttacatgagtgtgtatctgtct

SEQ ID NO: 4691 - DNA, 201 bp, Homo sapiens
aatggtcttggtacccgtgtcaaaatggccataactgtaaataattgaaattaacaatcacctctggtcctgccttcatgatttctcctcttgggcttcargggactctgagtccaaaagcaagagcacagtcactcctgtgcacctctcagcatcttcataatcccagatggcagagaatctctccatttctcaggtgga

SEQ ID NO: 4692 - DNA, 201 bp, Homo sapiens
gttgtgcaaccataacctcaatctagttctaaaacattgtcattaccccgaaagaaagccctgtgcctactagcagtcacccccatttccccttccccaaytcctgcaaccaccaatttgctttccatctgtatgaatttacctattctagacctttcatataaatgaaattatataatgtgtggctttttttgtttggct

SEQ ID NO: 4693 - DNA, 201 bp, Homo sapiens
gcatcagcaagagctatgagagccacttgagggcactgagttgctcttcataaccaaagtctgagactcaggtggttagttaagcaagcacttaattagcygagagagagccagtggttgccctcagctgggtgtagcggccaagtgtcagagacatggtcagctcttggctatcagaagtccagctcccccaggcttgcc

SEQ ID NO: 4694 - DNA, 201 bp, Homo sapiens
aagcagcctctctgtgccaagcgtttaccacatacagggatagaggaagacaccagcctgcctttgaggacttctcagtccagcagataggtctgccattrcagagccttgtaggtttcattaaatcccaggtggagagaagattccagtagcaattgggttttgtgctcacttcaactaatgaaccaagatacagtgagt

SEQ ID NO: 4695 - DNA, 201 bp, Homo sapiens
tctaacagggagctgattgtccctttttcatatattttcaatatattctttttcaataatagccatgacgggagggagcaatgcagtgactcccagctggygaccaagtgagggaatcaaattcattcattcattcattcaacagctctgagaccatgaaagcaggagaagtcatgacagtttagacctgaaagaacatcc

SEQ ID NO: 4696 - DNA, 201 bp, Homo sapiens
cctgagtctccattattctccattagtggtttctaacagggagctgattgtccctttttcatatattttcaatatattctttttcaataatagccatgacrggagggagcaatgcagtgactcccagctggtgaccaagtgagggaatcaaattcattcattcattcattcaacagctctgagaccatgaaagcaggagaa

SEQ ID NO: 4697 - DNA, 201 bp, Homo sapiens
cagggtcaggctgcagctttctcctgctgctcaggttctgggcgcatccctccaccccaaaatgaccaaaggctccagggcttaatgcatgaactgtgagmactgcatgtcttaccagctgacagacatgttccaaggcatatcagaagatgtgtgtgcacatctgtatgtgaatggctgggagcagaacaggtgtccagc

SEQ ID NO: 4698 - DNA, 201 bp, Homo sapiens
ggcattgcgatgcctgttgctaacagagagggaggaactatgctcatggaatttgtgaatcggccaaatgtagagtcgtagagttgtccctgtgtttgccygcagagcatggagggttgtgggggcaccagaaggagaacaggctcagatctttccgctgggcaattctatcactagcagagcagacctggttctcagaga

SEQ ID NO: 4699 - DNA, 201 bp, Homo sapiens
ccacatctggccttcccttagagcaggaggataaggccctaaattataggcacaacctcagaagctggactctgatgaacatctggggggcattgcgatgyctgttgctaacagagagggaggaactatgctcatggaatttgtgaatcggccaaatgtagagtcgtagagttgtccctgtgtttgcctgcagagcatgga

SEQ ID NO: 4700 - DNA, 201 bp, Homo sapiens
ttacgggccggacttcgtgtgaggtgaagaccccataggatagatacagtccctgccctcctggaaatgctaggaaaatccatgtccaccaaccctttctscaaatgacaacgtcccaggggagaaacaggaagggaaaagggtgggcatgacctcagtcaccatttcacaggatgaaaagggagaacatttcctttgaag

SEQ ID NO: 4701 - DNA, 201 bp, Homo sapiens
catttaatccgcagaaccaccctcagtagtcaagaagcactacagagatgaactgagagcctattacgggccggacttcgtgtgaggtgaagaccccatargatagatacagtccctgccctcctggaaatgctaggaaaatccatgtccaccaaccctttctccaaatgacaacgtcccaggggagaaacaggaagggaa

SEQ ID NO: 4702 - DNA, 201 bp, Homo sapiens
tcatttaatccgcagaaccaccctcagtagtcaagaagcactacagagatgaactgagagcctattacgggccggacttcgtgtgaggtgaagaccccatmggatagatacagtccctgccctcctggaaatgctaggaaaatccatgtccaccaaccctttctccaaatgacaacgtcccaggggagaaacaggaaggga

SEQ ID NO: 4703 - DNA, 201 bp, Homo sapiens
gtgctccaaaacttttggagcattttatttaaaatttgtacaaaattatctttagcctacgcagaaggtatatatgaaacataaatgaagttcatgttttratttgggttccatccccgaagtatctcattatgcacatgcaaacatttcaaaatccaaagtcaggaatgtttctggtcccaagaattttggataaggtat

SEQ ID NO: 4704 - DNA, 201 bp, Homo sapiens
tggtttctaacagggagctgattgtccctttttcatatattttcaatatattctttttcaataatagccatgacgggagggagcaatgcagtgactcccarctggtgaccaagtgagggaatcaaattcattcattcattcattcaacagctctgagaccatgaaagcaggagaagtcatgacagtttagacctgaaagaa

SEQ ID NO: 4705 - DNA, 201 bp, Homo sapiens
gatagggattatctagatactattttgtagagtactcaactatcccagttttcctagggctgagaggttttccagaatgtccgactttcagtgctacagargttctggaaagttctgcactgttctggaaaaaactggacccttgaaaaccagaacgtcattcaccatattggagagctctgagtacccgactctccagtg

SEQ ID NO: 4706 - DNA, 201 bp, Homo sapiens
aaccctctttaactaacttcatttacagttgaagaaacagaggaacttacccatctcactcaactagtaagtcagagctgggccggaattcaagtgcgtcyggtttcaaagtgcatgttcctgaccatcgtgttatgtgatagagatggaagttagtggcaaagatgcaaagacattgtggtacatgtggcaggcatggca

SEQ ID NO: 4707 - DNA, 201 bp, Homo sapiens
gatctccagaagccaggcttatattcccaacaacgcccactacaggtgctggctcagagtagtggctcagaggtagtggggctggaagtattccttatggyagtagtagcaatagtggtagtaacatcattgtataatagtgatggtagtaacagaaagtgttaacacttattcttcacttcacatgtgccaggcatggga

SEQ ID NO: 4708 - DNA, 201 bp, Homo sapiens
ccttttggtatctccctggaagagtcgggaaggaggcagggtgagggtggggggacaggagtgtccttactgcatcatacagacacttgaggaacttgatktctttgtccagtgagtccactttggcctgaagctccaccttgactgcgtaggctgcatctgcatcctgccaagaggccccagagtcattgggggatgcaa

SEQ ID NO: 4709 - DNA, 201 bp, Homo sapiens
tctgctaagaattccttttttccttgaagccttggttggaacctttctttcattcagcatgcccacaaaagtattcctcacattcactgtgcaggtgaccmctcccaggaagcgaggggctgctgtgggaggagacccattcggtgaccaccttggtctggtacagggcctcggcctcggccttgctcttcagggcgatct

SEQ ID NO: 4710 - DNA, 201 bp, Homo sapiens
ggccaaatgtagagtcgtagagttgtccctgtgtttgcctgcagagcatggagggttgtgggggcaccagaaggagaacaggctcagatctttccgctggkcaattctatcactagcagagcagacctggttctcagagaggtcacaggaaggatcctccagcctccaatatcatctccccactgacgcagtgtttaaaat

SEQ ID NO: 4711 - DNA, 201 bp, Homo sapiens
aaagttagatagtgcctgagaccggaggccaccagtatctacagattcaaaatactacaggttcaggaaaatcatgcccgatcccctagcaaggccagccmtgaggatgagacagtatgccacggtcccactgtgatcagattcctgctgcaggacctctccccattggggatccttctgatctgttagcatccagatgag

SEQ ID NO: 4712 - DNA, 201 bp, Homo sapiens
gatgtcatatctaagaattcattgccaaatcaaggtcacaaagatttccctctacattttttctaagagttttatggttttagctcttatatttaggttgwtgattcattttgattaatttttgtatatgatgtaaaatagagattcaacctcattctctggcatgtggatacctcgctgtctcagcaccatttgttgaag

SEQ ID NO: 4713 - DNA, 201 bp, Homo sapiens
tttcaggaggtcaggaagaaatgtcgatgtttgcaaagttagatagtgcctgagaccggaggccaccagtatctacagattcaaaatactacaggttcagraaaatcatgcccgatcccctagcaaggccagccctgaggatgagacagtatgccacggtcccactgtgatcagattcctgctgcaggacctctccccatt

SEQ ID NO: 4714 - DNA, 201 bp, Homo sapiens
atcctgcacttccatggtctcctggtgcagggttttgtacctttctaccaaaacatctttcattttgttgatcctaaatctctccttttggtatctccctrgaagagtcgggaaggaggcagggtgagggtggggggacaggagtgtccttactgcatcatacagacacttgaggaacttgatttctttgtccagtgagtc

SEQ ID NO: 4715 - DNA, 201 bp, Homo sapiens
gttcttggaagatccagctgtcctcaagaaactcatcacttttttgtcaaggaagggctgctctttacccagcttcccatccttccctgcaaaatcgccaragaagccgatatattcatgtattcctttgtcctccgtggctcacagacctactctccttccctaatggtgaggaagcccttcctgaggcccagctgcacc

SEQ ID NO: 4716 - DNA, 201 bp, Homo sapiens
aagctggaatttttacctcagggaaaagaagacatggaaagatgattcttcttggaaagatgtcctcaaagatctggatctgggtaagaagctccagggtycgtccttgggccatgctaaggaccacagctgtctagcagtgaagtggaccccaggaaggaagaggaatgactctgcagcatctgcatgcccccctagcag

SEQ ID NO: 4717 - DNA, 201 bp, Homo sapiens
aagggtagctgctcaagataagacatcactctaggttcagagagaaaatcagccacagcaaggatgggcagggggaaggaagagacttgctttcatgagcrgctgttttattctagaatcaccagcagctggcccttcattgcccggctccgaggggaaataatcatagttctggctagctgagtctttgcgccaccactg

SEQ ID NO: 4718 - DNA, 201 bp, Homo sapiens
cattacaaagggtgcccctgtgggctgggccctgtgctggaggctggccagtaagggttgctgacagcggtggtaatgatggtggcagagtggctgtgacrgagaaggaaaaggtagaggcagagtagaatttcctgacaacagtgttgtgattgtggccacacagaagcaatcctcctaattggttcctagggagcttaa

SEQ ID NO: 4719 - DNA, 201 bp, Homo sapiens
ccatcacccctttctttgacttggaccccttgcgcttcccaggtgaggcaatgcctcgccctgcttcggctcgcgcacggtgcgcgcacccactggcctgygcccactgtctggcactccctagtgagatgaacccggtacctcagatggaaatgcagaaatcacccgtcttctgcgtcgctcacgctgggagctgtagac

SEQ ID NO: 4720 - DNA, 201 bp, Homo sapiens; identical to SEQ ID NO: 481

SEQ ID NO: 4721 - DNA, 201 bp, Homo sapiens
tctttttatcctgtattctgtgagttccttgatgatagtaattgggtcttattcatcactctgtatcctgtggctcacacagaatctggcaaattgcatayattcaataaatgttgaatatctaataacctccttattaatataacaaatattatcaacattctgtgcacatcaatgtcccatgctgctactgtagtcagg

SEQ ID NO: 4722 - DNA, 201 bp, Homo sapiens
ctggtagaaccacagagactcacacaaagttctgaccctaccactctggtctgggctgagaccaccccaaaaaatcatctagagaatcaaaggggctcacrtctcagttgcattctatttaaaagataaaggggccatactctccactgcaaagaagcattagtaaaacttcccgcacccaaattataatccggcaaccct

SEQ ID NO: 4723 - DNA, 201 bp, Homo sapiens
ttcaaataccactccaacccagcacctgaggtcgggcaaactcacaaaatagagtttctaggtagcaggtgtttgctttggttttgcaatagcatttctcrtaacagaactgaaactgtatagattacaacactccaaagttatttttttttaacctaaagaaccctacttctagcacctcctctgaaagaatattttgct

SEQ ID NO: 4724 - DNA, 201 bp, Homo sapiens
tgcatgttatcaagtagaagatagctttccaggagatagtcgtgttaccagtccttacaaggaacggatgtcttacttttttgatcctgtctcaaagaggyaatatagtgtgaattgatttacattggttttatcccttctccaggttggcattgctcattttagtaagacttaaatggctggtatcaccttaaagttgcg

SEQ ID NO: 4725 - DNA, 201 bp, Homo sapiens; identical to SEQ ID NO: 479

SEQ ID NO: 4726 - DNA, 201 bp, Homo sapiens; identical to SEQ ID NO: 480

SEQ ID NO: 4727 - DNA, 201 bp, Homo sapiens
tgtctgtctgccctagactccacttatttaaaataagagaatgaacttgatgtttggcttcatagagattcagcaccctgtaataggccttccatgtcttytaacgtatgtaatgcaaagaacaaacaaataaaggcagaaatttttctaactctgtctcttctctctttcccccagactatgtcagagagtcacaatgac

SEQ ID NO: 4728 - DNA, 201 bp, Homo sapiens
aaatggttttatcacccagatgtgaaagaagctgcctgtttactgatccattgaataaacccattttaatagaaaaagtcaataccaattcagcaaaaagaaaaaaaaaacatactactgaatataaagaaatttattctgaaatagactttacgtgtttttttcttaaagaggagaaaaatattgcttgacggcaattat

SEQ ID NO: 4729 - DNA, 201 bp, Homo sapiens
taaaaatacttaagtatatatatatgtgtgagttctgcacgcacacacatagtgtatataatatcatgggaaacactgaactggcaaattattcctgcaayatacgctttcagtactttggtaactgaagttctctaggatcctaatgcaacattaacgtgaaataagcccagtgtaatgtttttgaaaccagggctgttt

SEQ ID NO: 4730 - DNA, 201 bp, Homo sapiens
acaaaatagagtttctaggtagcaggtgtttgctttggttttgcaatagcatttctcataacagaactgaaactgtatagattacaacactccaaagttatttttttttaacctaaagaaccctacttctagcacctcctctgaaagaatattttgctccaataccacgtgcaacaaacttatttagacagtatcaactct

SEQ ID NO: 4731 - DNA, 201 bp, Homo sapiens
attgcagacctgagaaaggtttctagaatggtaacccaatgttctttagaactggagaattccattttccttttctggctttagtgttaatgtctgggaarggaggctcatgataagaaaataaaaatgagaaaagaagatctagttcataaaatgactataccccacgtaagtttgtaactgcacagtgttttgttgtac

SEQ ID NO: 4732 - DNA, 201 bp, Homo sapiens
gaactggagaattccattttccttttctggctttagtgttaatgtctgggaagggaggctcatgataagaaaataaaaatgagaaaagaagatctagttcrtaaaatgactataccccacgtaagtttgtaactgcacagtgttttgttgtacggctcagaaatgagcaagtgttagtattattaggcacacatcacgttc

SEQ ID NO: 4733 - DNA, 201 bp, Homo sapiens
cacaatgttcagtgcatgccaccaattatataatactatctcaaacaaatcgatgtctgtctgccctagactccacttatttaaaataagagaatgaactygatgtttggcttcatagagattcagcaccctgtaataggccttccatgtcttttaacgtatgtaatgcaaagaacaaacaaataaaggcagaaatttttc

SEQ ID NO: 4734 - DNA, 201 bp, Homo sapiens
ggtgcgcgcacccactggcctgtgcccactgtctggcactccctagtgagatgaacccggtacctcagatggaaatgcagaaatcacccgtcttctgcgtygctcacgctgggagctgtagaccggagctgttcctattcggccatcttggctcctccgaccccatctccctcaattttttagaatagtttctgtaggaat

SEQ ID NO: 4735 - DNA, 201 bp, Homo sapiens
gacacctggaaggagctggtggagaggcagcacagcctcacagttacacatggaggctgtgggttcagattgtctggatggaactctttaggtcctcccasacatcaccttgttagctaaattccctgcacagattatttaaatgtgtcttcctttctgtaaagtgaggttatttaaggattaaatgagataatacactgg

SEQ ID NO: 4736 - DNA, 201 bp, Homo sapiens
catcactctgtatcctgtggctcacacagaatctggcaaattgcatatattcaataaatgttgaatatctaataacctccttattaatataacaaatattrtcaacattctgtgcacatcaatgtcccatgctgctactgtagtcaggagttatttggctgggaagtggaaagtgttcacaaacatgatgcttatctaata

SEQ ID NO: 4737 - DNA, 201 bp, Homo sapiens
actttgtttacctaagcgagcctgggcaatggcgggcgcccctcccccagcctcgctgccgccttgcagtttgatctcagactgctgtgctagcaatcagygagactccgtgggcgtaggaccctccgagccaggtgcgggacataatctcctggtgtgccgttttttaagcccctcggaaaagcgcagtattcgggtggg

SEQ ID NO: 4738 - DNA, 201 bp, Homo sapiens
ataccactgctaatatatgatttgcatgtaaatctttctatccttctatgacaattttaattatattaatatactaaaggtggtatctgtctatatgtctrtatacaacctttagtatacaggcatgtacaatctttagtatactattgctgtgttttattgtaaactaaattttatcgtgttgtatttgtcatcccacaa

SEQ ID NO: 4739 - DNA, 201 bp, Homo sapiens
aaaggagaaaccctgaaatttaacagaactttgagagtcacttccaatctccttaaacatgattatctccttatccttgtccttttgtgatgctaataatrgcagaaaaggaacaaatccaagactctaggtctcccttttttgttttactggttttattatagaattgtttttaagcctcttatggatgaaagctgcatt

SEQ ID NO: 4740 - DNA, 201 bp, Homo sapiens
aatctgaatgtttcagaacaaaatttctgctatctaaactgcttgaaactcaataatagtgtcacgtttgaatgtcatacacagcaatatatatatatgtrtatatatatatatatggcaaagcaaaaaaaaaaacatggtaagagagaatgaaggagaacattgtgtttgattcttgctgaatggcaccttctcaaagaa

SEQ ID NO: 4741 - DNA, 201 bp, Homo sapiens
ttacctaagcaagcctgggcaatggcgggcgcccctcccccagcctcgctgccgccttgcagtttgatctcagactgctgtgctagcaatcagcgagactycgtgggcgtaggaccctccaagccacgtgcaggatataatgtcctggtgcaccgttttttaagcccgtcggaaaagtgcagtattcaggtgggagtgacc

SEQ ID NO: 4742 - DNA, 201 bp, Homo sapiens
attgctcaaactaagcaacaacaccgaagcttctctaatttgccttctgatgccaaatcggtcaaaactgaggtcagcagctaccatgacgaaagtaaaakggtatattgggtgaatgtttgaaaatttcagattttatattctgtaaagttatttacttactctatttcaacaccacaaaatcttgaaatttggaaggta

SEQ ID NO: 4743 - DNA, 201 bp, Homo sapiens
gggtgatttctgcatttccatctgaggtaccgggttcatctcactagggagtgccagacagtgggcgcaggccagtgtgtgtgcgcaccgtgcgcgagccsaagcagggcgaggcattgcctcacctgggaagcgcaaggggtcagggagttccctttccgagtcaaagaaaggggtgacggacgcacctggaaaatcggg

SEQ ID NO: 4744 - DNA, 201 bp, Homo sapiens
tgcccactgtctggcactccctagtgagatgaacccggtacctcagatggaaatgcagaaatcacccgtcttctgcgtcgctcacgctgggagctgtagascggagctgttcctattcggccatcttggctcctccgaccccatctccctcaattttttagaatagtttctgtaggaatggtcgtggtttaaccttacata

SEQ ID NO: 4745 - DNA, 201 bp, Homo sapiens
atccctagaactcagaaactttactggattggtcaacaaagacaaactttttattgtataaaacagtagaattcatggaagggataattcttttggaacakgcttctcggttacttgccttagtaaaagaagtatctggagggcctggagagttcataaacatagttttctgtgcaagtgaagatctgtagtttggcttaa

SEQ ID NO: 4746 - DNA, 201 bp, Homo sapiens
ggtgcgcgcacacactggcctgcgcccactgtctggcactccctagtgagatgaacccggtacctcagatggaaatgcagaaatcacccgtcttctgcgtsgctcacgctgggagctgtagaccggagctgttcctattcggccatcttggctcctccccctacattagccccttttcataacttttcttacaactttcac

SEQ ID NO: 4747 - DNA, 201 bp, Homo sapiens
gtggtagaggagcgaggaccatctgattgatgcctgtcccaaactacatactgtgggtgacaggctatttccaaaaagacagctgaaagaaagacaaatartagatacccactgcatggctttaaccaacaaagatgaaagaagaaagaagtatcatcagcacaaatatgaatatagcatcgggatgattgggcattacat

SEQ ID NO: 4748 - DNA, 201 bp, Homo sapiens
gcccttatctttaaatcccttctctctaccagagtatttaaaatctactttaaaaagcaaaaaatgaggaaacactggtttctttctccctgtgtttctamagtaacaacacaaccctgagaacacaaaaagttagcattgggagaagggaggcaagatccccgttaatacttcagagtattagcctacaacaccacaatg

SEQ ID NO: 4749 - DNA, 201 bp, Homo sapiens
tacttcagagtattagcctacaacaccacaatgcttcttatcttctccataatctacagatcaggcgatagtattctagttttatagatgaagaaaggtcrtctcaaaatagtcaagtaatttggtaagtttatacatctcctgggccaacccagaactcagacccaaatcagcaaaactccaaagaaagaccacagcttt

SEQ ID NO: 4750 - DNA, 201 bp, Homo sapiens
agtattagcctacaacaccacaatgcttcttatcttctccataatctacagatcaggcgatagtattctagttttatagatgaagaaaggtcgtctcaaartagtcaagtaatttggtaagtttatacatctcctgggccaacccagaactcagacccaaatcagcaaaactccaaagaaagaccacagcttttcaactct

SEQ ID NO: 4751 - DNA, 201 bp, Homo sapiens
cgatgagaacatcatctttattaatagagtggtattaatgtatctcatcacatcagaaccccaaatgagtacccacgacttcctaaacatttctgtcttcrtagctagaagtcacagtgggttttagtagtgtgctttgcttaaaatttctgcttcccattcaaaaggctttattttcctcaaagttatgttcatatacca

SEQ ID NO: 4752 - DNA, 201 bp, Homo sapiens
gggttttagtagtgtgctttgcttaaaatttctgcttcccattcaaaaggctttattttcctcaaagttatgttcatataccacattcccttcttttctcrttgctttaatatctgaggttcttagaaggaaacccaagggtagcattaggactgccatggttattgactattaactcgttaacttattaactcttgtcct

SEQ ID NO: 4753 - DNA, 201 bp, Homo sapiens
aaaatttttgctcatctcatactgcacatctattgcatgacagaaaaggactggaacatttttaaataaggaaaagcacatctctgagaatttcagaaacrtattagatattgaatgaatgtcaaagtgtaagaagaatgatggccaatggtagatatgacaaagagtacaggtcaaagataaacaggtatttaattaacc

SEQ ID NO: 4754 - DNA, 201 bp, Homo sapiens
tgttttccacagagagcagccaggccttcccagcaggtctgtgcagagcggacaggctcgtgagtcagctgagcgccgtggcttcgccagacttggtgttmagcaacctcctttgttgatgtctcaacagagctaaatcggggcccctctgagctcaaagaatgaaccacatccacacgtttgaatttaatcatctaaatc

SEQ ID NO: 4755 - DNA, 201 bp, Homo sapiens
aagcgttagaccctgctgtggctaaagatctagaaggcatatcagttttctctgtcaggcttcctacgttgccctcgtgcagggctcattgctctgcagarcgctggaagccccttcatgtatcgagagagaagctggagcacagagctctgatgcacagttggctgtttcagctctgactcagggaggaaagaaggatgc

SEQ ID NO: 4756 - DNA, 201 bp, Homo sapiens
agtgtatttggatatatggaagtcatccaaatgcgttgctagaatatcaggcctatgtttgttctggtagaaccacagagactcacacaaagttctgaccstaccactctggtctgggctgagaccaccccaaaaaatcatctagagaatcaaaggggctcacatctcagttgcattctatttaaaagataaaggggccat

SEQ ID NO: 4757 - DNA, 201 bp, Homo sapiens
tggagctttcctgtggctaagaagaagaaacatgtcatcctgttggcatcaccaagcacctaactctttctaggtaataaaaagtcaacggtcacttcaaygtaaatgtttaaaaccactctttagttaaatctgatgggaactgaacaaagctccaccattgtgtctgaaatcattttacacagggaaaaaaaaaaacaa

SEQ ID NO: 4758 - DNA, 201 bp, Homo sapiens
aaatttctgcttcccattcaaaaggctttattttcctcaaagttatgttcatataccacattcccttcttttctcgttgctttaatatctgaggttcttakaaggaaacccaagggtagcattaggactgccatggttattgactattaactcgttaacttattaactcttgtcctttggatgttgtatcacatgggtaag

SEQ ID NO: 4759 - DNA, 201 bp, Homo sapiens
cttcccggctgctttgtttacctaagcaagcctgggcaatggcgggcgcccctcccccagcctcgttgccgccttgcagtttgatctcagactgctgtgcyagcaatcagcgagattccgtgggcgtaggaccctctgagccaggtgtgggatatagtctcgtggtgcgccgtttcttaagccggtctgaaaagcgcaata

SEQ ID NO: 4760 - DNA, 201 bp, Homo sapiens
tttctggaccagtttggtcactgcttagttacatgtccttaggaatgcttgtcacttaacctaaactttctgggttttatcctcattgctcaaactaagcmacaacaccgaagcttctctaatttgccttctgatgccaaatcggtcaaaactgaggtcagcagctaccatgacgaaagtaaaatggtatattgggtgaat

SEQ ID NO: 4761 - DNA, 201 bp, Homo sapiens
ataaacaggtatttaattaacctaatatagagagctaaactcacctatagctgactttcctcaattctggcttctttcattttctgtattcaaacaaagcrtaattggactagaatactattcatttgggggggctcttcagattcacaggatgaaatgaactaaaagaaaacaactgaccttaggctaatttcgaaaatt

SEQ ID NO: 4762 - DNA, 201 bp, Homo sapiens
attgtttcaggtgataaagagtatctcattaattttaacatgcacatcaattccaccttaaggaggcgtgtgatgatttttaaccagctaggaggtgctarttgtataggacacctggaaggagctggtggagaggcagcacagcctcacagttacacatggaggctgtgggttcagattgtctggatggaactctttagg

SEQ ID NO: 4763 - DNA, 201 bp, Homo sapiens
tgccattgcattccagcctgggtgacagagtgagtgagactctgcgtcaagaaacaaacaaaaataaaaataaagagcaactaacctccttttcctaaaamcctaatacaaatgcttcttatgatggggttacttccagataaacccatcataagttgaaaatattctaagttaaaaatgcatttaaggccagacgcggtg

SEQ ID NO: 4764 - DNA, 201 bp, Homo sapiens
ggctcaaactcctgacctcaggttacccaccctcctcggcctcccaaagtgctgggattacaggcatgagccaccgtgcctggccagtttcgctttttccraatgagactccatcatagaaatgtgctcacacatgccagggactccactggtgtctcctccatccatgtggctgtcaggttggtctcagtaatgaagtga

SEQ ID NO: 4765 - DNA, 201 bp, Homo sapiens
ggcctaattggtccaaggcctaattgggctggctgctgagagggtctaaaatgatgaatgagacacagctgctgccttcaaggggtggataatctattacwgcaaaggaagaccgtgacaggaagtagtgtgtgataggctgagagagaaaacaaaaggggccttcaaagagagtgcgcctctagccttgggaacaaccaa

SEQ ID NO: 4766 - DNA, 201 bp, Homo sapiens
tcagtggttcctaattagcgaatctcaattccaatggctccagctacctaatctgcatcactcaccatgtcttggacttaaatattactcaaaatggtttygctcccaggatttcagagtctgaggacaccctctctgagcacagcctcctgcctctcacttccccagtgccctcactgccgcagatgctggaccccttct

SEQ ID NO: 4767 - DNA, 201 bp, Homo sapiens
ctcgtgtggacatctgcatttaactctgggtcttccaggaacagaagcattcttacccaattctgcatgataaccttgcttcatctaaacccacaactctytttctctgtcacttatggtcaggaatccttgaaacattttatttttgcctaatcctttatccaatgtaaacatatttttaagctgacctatttttttctg

SEQ ID NO: 4768 - DNA, 201 bp, Homo sapiens
aggaacagaagcattcttacccaattctgcatgataaccttgcttcatctaaacccacaactctctttctctgtcacttatggtcaggaatccttgaaacmttttatttttgcctaatcctttatccaatgtaaacatatttttaagctgacctatttttttctgtgcctagaacaaggaaaaaaaatagtcacacgagtc

SEQ ID NO: 4769 - DNA, 201 bp, Homo sapiens
atgatgactggggagaaaaatgggtaaatggaatgactagcaggttgatgtggcctttaagagtggagttttaattttcagcgatggaagtggaattcatrtgaagccttgggttgttaagattttgcaactaatctgagaacatttagtattctttgcaactgcctaccttttaagagcaattaaccaccaggtatagtg

SEQ ID NO: 4770 - DNA, 201 bp, Homo sapiens
actctacaggcatcttcataaataaccatgttctgcctagccaacaccacacctacctaatgttaaagggctcacccaacccgcttcccagcacccccttscctgaacctcatctctgttatatgggattattgcctacgtgaaaatccctcacttcttttgtcctcgatcaggttagccctccccagccctactccattc

SEQ ID NO: 4771 - DNA, 201 bp, Homo sapiens
attatgctctgataaagtagtagcagtgcgccagtttgtttgagagagatccctgacctcattctgatagtcatctctggcaagttcattgacccggccawattgattccttgaagagtataaaacacaaaaacaaaagcaaaaatcaaatccactagactggtgtcatccaggcagaagtctgagatgagaaagtttaaa

SEQ ID NO: 4772 - DNA, 201 bp, Homo sapiens
ctgataaagtagtagcagtgcgccagtttgtttgagagagatccctgacctcattctgatagtcatctctggcaagttcattgacccggccaaattgattscttgaagagtataaaacacaaaaacaaaagcaaaaatcaaatccactagactggtgtcatccaggcagaagtctgagatgagaaagtttaaaaaacattc

SEQ ID NO: 4773 - DNA, 201 bp, Homo sapiens
gcagggcaaggctccatattcaaggaaaaccccaatggaacacttcaacaccaatgcaacgcttccgggtccaggagctgttttgtttggatgatggaatygcatcaggaaatgaactgtacagcatttccaaaaaaactgggtcctcagtttgaaaaacctgtgatttcagttgtacacaaacccctttccaaatgagga

SEQ ID NO: 4774 - DNA, 201 bp, Homo sapiens
ccaatggaacacttcaacaccaatgcaacgcttccgggtccaggagctgttttgtttggatgatggaatcgcatcaggaaatgaactgtacagcatttccraaaaaactgggtcctcagtttgaaaaacctgtgatttcagttgtacacaaacccctttccaaatgaggaccgtgaagaaagggcccaaagtatctgcaca

SEQ ID NO: 4775 - DNA, 201 bp, Homo sapiens
atgcaacgcttccgggtccaggagctgttttgtttggatgatggaatcgcatcaggaaatgaactgtacagcatttccaaaaaaactgggtcctcagtttraaaaacctgtgatttcagttgtacacaaacccctttccaaatgaggaccgtgaagaaagggcccaaagtatctgcacacacacagaagatgcccagacag

SEQ ID NO: 4776 - DNA, 201 bp, Homo sapiens
tcctctgtcacccaggctagagtgcaatggcatgatcacgactccctgcagccttgacctactgggctcaagcgatcctctcacctcagccttccaagtasctgggaccacagatatgcaccaccatgcctggctaatttttctttttctttctttctttcttttttttttttttagagatggggagtctcactttattgc

SEQ ID NO: 4777 - DNA, 201 bp, Homo sapiens
cagatatgcaccaccatgcctggctaatttttctttttctttctttctttcttttttttttttttagagatggggagtctcactttattgctcaggatggrctcaaactcctggcctcaagtgctcctcctgcctcagcctcccaaagtgctggaattacaagtgtgagccactgtgcctggccactggtacaaatcttgc

SEQ ID NO: 4778 - DNA, 201 bp, Homo sapiens
ccatgatcagattctgaaggagacgcgtaatcactgccagcttatttctcaccaagtttcttgtcactctcctgaaaacaaacaaccctgttttaattccytttcagaattgttattgggggatggctaaagacctctaacaggcatttctcacatttgtgagcctcttacctcaggagaacacccagtttagagaaaact

SEQ ID NO: 4779 - DNA, 201 bp, Homo sapiens
ctgcttagccacacagaaactctgaagacagtatttctagaaaataagtcctaagcataatcatttacaaaataattggcaagaaatatttagaatgatamtgctactaaggattcattgatatatctaaaaaatgagaaggcagttttaaggtgcctccttgaattagtaaagttgatttttcttaaagtgatacatatt

SEQ ID NO: 4780 - DNA, 201 bp, Homo sapiens
gtacataattttgtctgaaagtttaataaattcatctctgagtgctgcttagccacacagaaactctgaagacagtatttctagaaaataagtcctaagcrtaatcatttacaaaataattggcaagaaatatttagaatgataatgctactaaggattcattgatatatctaaaaaatgagaaggcagttttaaggtgcc

SEQ ID NO: 4781 - DNA, 201 bp, Homo sapiens
gtgatacatatttttgttttaggaactggaacagtacaaaagaagttcttccaagtcttggaaacaaatcgagcttgattcttgaacctatttcaattatygtatatttatttcttcttttccaaatacaaataagattatactgtgaattaactattgtggcaatatgtgaagaaagttaaactgtataatttgttaaag

SEQ ID NO: 4782 - DNA, 201 bp, Homo sapiens
caaaataattggcaagaaatatttagaatgataatgctactaaggattcattgatatatctaaaaaatgagaaggcagttttaaggtgcctccttgaattrgtaaagttgatttttcttaaagtgatacatatttttgttttaggaactggaacagtacaaaagaagttcttccaagtcttggaaacaaatcgagcttgat

SEQ ID NO: 4783 - DNA, 201 bp, Homo sapiens
gtatgttatttgttattttcacgtaaggcataagtcatgttagtttcacctacagcatgtgcgtgcattgtgtacatagtgaaaataaaccctggtcagaygcttgaggtcagcctccctctctgcctggtctgtctcgctccatcgtaatcacctgtctcatctgccaaaatctaagcttttcaacggccttttcattgt

SEQ ID NO: 4784 - DNA, 201 bp, Homo sapiens
tccccgcactcctactgtgtcccctttctcctttcatctctccccgctccccagagataacccctctcctgaattaggtgtttatctttcccattttttttctgtataattttgggtctttatggtgataattcaaacattaagcaatggaagtcactttcgtctgctgtttttcatactctcccagaactctaagggttc

SEQ ID NO: 4785 - DNA, 201 bp, Homo sapiens
agtagaagcagccaggtggcaggaggtggaggtatgtttccttcctcattttacctgagaagtgtttactcaagaaatagcctttgactgaattcgggatrtggcaggatttgaagcaggaggctaaactggaagacaagcgagaagcagatccccactcccaccacctcaccccatcctacctttccatctttgcctgtt

SEQ ID NO: 4786 - DNA, 201 bp, Homo sapiens
tgggtctaagagagctgcagcccagggtcacagacctgtgggccccatggccgggaaggcggcagaggagagagggctgccgaaaggggccactccccagsatacctcggtgagtgagcaatgggaagtcggcccaggcctggtgggcgggtaggagaaatcaaacctttctctcttccctcaggagccttctgtcctagc

SEQ ID NO: 4787 - DNA, 201 bp, Homo sapiens
gcccagggcaggaggccgaggtgtccctgctccaggaaacagagtgaagacactggccctggcaggcagcagctgggtctaagagagctgcagcccagggkcacagacctgtgggccccatggccgggaaggcggcagaggagagagggctgccgaaaggggccactccccaggatacctcggtgagtgagcaatgggaag

SEQ ID NO: 4788 - DNA, 201 bp, Homo sapiens
acttgagctcaggaggttaaggatgcagtgagccaagatcgcaccactgcactccagcctaagtgacagagtgagactctgtctcaaaaaagaaaaaaaaagaaaagaaaaacgaccagataagatctgataaggcccgatgttaatacatgaacttttaaatattattctccagtcttttttttttttttttgagacagg

SEQ ID NO: 4789 - DNA, 201 bp, Homo sapiens
tgggaggatcacttgagctcaggaggttaaggatgcagtgagccaagatcgcaccactgcactccagcctaagtgacagagtgagactctgtctcaaaaamgaaaaaaaaagaaaagaaaaacgaccagataagatctgataaggcccgatgttaatacatgaacttttaaatattattctccagtctttttttttttttt

SEQ ID NO: 4790 - DNA, 201 bp, Homo sapiens
tgtctctacaaaaaaagataaaaataaaaataaattagccggacatggtggtgtgcacctgtagtcccagctgaggtgggaggatcacttgagctcaggargttaaggatgcagtgagccaagatcgcaccactgcactccagcctaagtgacagagtgagactctgtctcaaaaaagaaaaaaaaagaaaagaaaaacga

SEQ ID NO: 4791 - DNA, 201 bp, Homo sapiens
aaagaaaaagagtctgggaaacatagcaagaacgctgtctctacaaaaaaagataaaaataaaaataaattagccggacatggtggtgtgcacctgtagtyccagctgaggtgggaggatcacttgagctcaggaggttaaggatgcagtgagccaagatcgcaccactgcactccagcctaagtgacagagtgagactct

SEQ ID NO: 4792 - DNA, 201 bp, Homo sapiens
aaagaaagctcttctcttgccatcagggtagaaggatcctagaattaagctttgcttgacacagtgagatttctgtgctgaccagccagggtagattcccragcctccttctcatctctgtaacatcataaggagtaagcttgcccctcctggcttggaagagatggacagagaagacatttacttaatttgtctcagagg

SEQ ID NO: 4793 - DNA, 201 bp, Homo sapiens
cggcatagatgtagctttgacccacccaaagaatggacatatctgaaataggtacaaaggaataatgagaaggtaaaaatgcataaataaactagatataratatattctggaacaaaagaaagctcttctcttgccatcagggtagaaggatcctagaattaagctttgcttgacacagtgagatttctgtgctgaccag

SEQ ID NO: 4794 - DNA, 201 bp, Homo sapiens
taagctagattgcagaagaagagggaatgacttgtggaccaacattcaagaggagtcagggagtggggttgacggcatagatgtagctttgacccacccaragaatggacatatctgaaataggtacaaaggaataatgagaaggtaaaaatgcataaataaactagatatagatatattctggaacaaaagaaagctctt

SEQ ID NO: 4795 - DNA, 201 bp, Homo sapiens
ctgttcacaaatctgtttctgtccccctgtactgattacctctaactgcagaaaccccagggggaaagcagaaagagacagaagatactcatatggtaatragttttgtttccagacacccctaataaggccgtgttatgaaaatggaaacaaaaccattgcattaaaaaacaataagctagattgcagaagaagagggaa

SEQ ID NO: 4796 - DNA, 201 bp, Homo sapiens
ggcttttttcctccctcactgtctttccttcctcagcttatctcctctccagagacctgttcacaaatctgtttctgtccccctgtactgattacctctawctgcagaaaccccagggggaaagcagaaagagacagaagatactcatatggtaataagttttgtttccagacacccctaataaggccgtgttatgaaaat

SEQ ID NO: 4797 - DNA, 201 bp, Homo sapiens
agttcacatcaaagacatataatccagccttcagaagtaattaaaaataattccaatctttacttgaatttctttaaggactttaatggggacccaatttrtaacccccagccacatttaaaattccctttcttccaattctcttcgctctacttaaagcctgtaactccctgaaaccgtttttcctcctcattctcaact

SEQ ID NO: 4798 - DNA, 201 bp, Homo sapiens
ccgcccaagaatccaagggccacttccagactcaccacaccctggggaaagcatgtctttgataataatatgatccaattcggcttaaatcgtaatacatrtgtcagatttaaataaataatatgaattttttaaaacgtccccagaggctgggtgcagtggctcatgcctgtaatcccaatactttggaaggctgaggag

SEQ ID NO: 4799 - DNA, 201 bp, Homo sapiens
aacctgggaggtggaggttgcagtgagccaagatcgcaccactgcactccagcctgggcaacaagagcgaaactctgtctcaaaaaaaaaaaaaaaaagtracaagagctgttaaaaacatctctcttatttgccttctagtgaccaagcaccatttgaagaacaggccgtcctggtctaccacagtgcaaagaaaggatc

SEQ ID NO: 4800 - DNA, 201 bp, Homo sapiens
tcaacctgggaggtggaggttgcagtgagccaagatcgcaccactgcactccagcctgggcaacaagagcgaaactctgtctcaaaaaaaaaaaaaaaaaktgacaagagctgttaaaaacatctctcttatttgccttctagtgaccaagcaccatttgaagaacaggccgtcctggtctaccacagtgcaaagaaagga

SEQ ID NO: 4801 - DNA, 201 bp, Homo sapiens
gcctgtaatcccagctactcaggaggctgaggcaggagaatcgcttcaacctgggaggtggaggttgcagtgagccaagatcgcaccactgcactccagcmtgggcaacaagagcgaaactctgtctcaaaaaaaaaaaaaaaaagtgacaagagctgttaaaaacatctctcttatttgccttctagtgaccaagcacca

SEQ ID NO: 4802 - DNA, 201 bp, Homo sapiens
caaccccatttcatgtctgtaacactttccaacaccagcagggtctttgcacagaaaagaaaaaaatctgacgaataaaacaaggcctgaagtgtggcagrcatttgggttctttagagggtttaaagtaacttatttcttcctaaaaagtgacaagggggccgggcgcggtggctcacgcctgtaatgccaacactttgg

SEQ ID NO: 4803 - DNA, 201 bp, Homo sapiens
cagaaagtatttggaacatggtaggtgctgaaagaagtgagttttcatcctttgctcttcccctctcaggagctgttggctccaattctctagcactaacsgttttttgtttgtttgtttgagatgaggtcttcctctgtcacccaggctagagtgcaatggcatgatcacgactccctgcagccttgacctactgggctc

SEQ ID NO: 4804 - DNA, 201 bp, Homo sapiens
tctcttcccgcaccccatctttgaaagtgtgaccctagctgcttgcatccttgatcccatgttattctgattcccctatccctaccttggtctactctggraacttcctctttgacttatccaaattttggctgcattttcatctactctcaatctgatgttttttgatggtcttatttaccacatcctaaaataaccatt

SEQ ID NO: 4805 - DNA, 201 bp, Homo sapiens
ccccagtgctcagcagctgaattcacctcccattttatgaatttcttgatatcttcatcatctctatttttcattctctctctctccccctctcttcccgmaccccatctttgaaagtgtgaccctagctgcttgcatccttgatcccatgttattctgattcccctatccctaccttggtctactctggaaacttcctct

SEQ ID NO: 4806 - DNA, 201 bp, Homo sapiens
tgataggctgagagagaaaacaaaaggggccttcaaagagagtgcgcctctagccttgggaacaaccaacagactttgtgcaggtggcggagagagagaaatggatcagtgaaaggcacagacagaaggagaagcagcgggaggaaccatagatctggatgtattgacatgacattgtccacattaggttggtttgtgctt

SEQ ID NO: 4807 - DNA, 201 bp, Homo sapiens
gtgtgataggctgagagagaaaacaaaaggggccttcaaagagagtgcgcctctagccttgggaacaaccaacagactttgtgcaggtggcggagagagagaaatggatcagtgaaaggcacagacagaaggagaagcagcgggaggaaccatagatctggatgtattgacatgacattgtccacattaggttggtttgtg

SEQ ID NO: 4808 - DNA, 201 bp, Homo sapiens
ctacctgaaaagttatgctgtcctaagtttgcctctaaaccacttttatttgtgtggttttagacgaattgattccagattgcacacacaggaccttaacrtaattttatgctttagctgtaaagataccctaacaattaccagtgttgttgctgttatttcattgataatccgaatctaaattttgacattctactatat

SEQ ID NO: 4809 - DNA, 201 bp, Homo sapiens
tttatattgtataatgatcacttttattaagttcatatacatcagtattattaaaggattagggtatttgtgagcatcatgagttttcacattcaaatctrtcttctctaaatgacttaaaaccataagaattttgtgtggaaaaggaaggcagccccacagtacccatatcacccttcattcatctcttgtatctcactg

SEQ ID NO: 4810 - DNA, 201 bp, Homo sapiens
tttaaattttagtaacttagggtataggtatgaaaggtacgctctgcaatttttctgaaaattagaatggattttcttttcatagcaactgtgaacttcarttatgttagccaaagggcattgattgcctcatcttgcagagtaaccacgttttatttgaagtagtgacaacctttgtacagttatttagacattgaacaa

SEQ ID NO: 4811 - DNA, 201 bp, Homo sapiens
caggagaaatgcattcttattgtattttttatagaggagaaaacaaagttccataacttgcccaagataatgccattagcaaatggcagggccaggattgmgaggactctctgggctctctgaagtggtccaggaagcctgagccttagccaacagccccgcagacatagcctgctcacattggccttgctttatttccag

SEQ ID NO: 4812 - DNA, 201 bp, Homo sapiens
tgcacattcccaggtccccacacctagagtgtcgccatcagtggtctggaatggggcatttttaatcagcaccaatttcaccctgctgtgagactgacacrtttattttaaataccactttttgaagaacaggcacatctaaggagatatcctatcaagaagcaggacaaaacatcatgtgttgcggataaccaggattat

SEQ ID NO: 4813 - DNA, 201 bp, Homo sapiens
gttacagttttaaatgcaaggttaagtgcccacgttagacacattctttctaaaaggcattctcagctgtagctgggaggaaaccggaattgggttcacaratgtcaaaattttactcttaacagtgaggcgcaagaagcacctgaaataggagatgcacattcccaggtccccacacctagagtgtcgccatcagtggtc

SEQ ID NO: 4814 - DNA, 201 bp, Homo sapiens
aattcaatcatttcttccttcattaactcagtccagtttggatgaggcacattcaagatgcctccaagcaagctgagaaaaatcagtggcaaaaataactrtgtctgttcaaacagggaacttgtagaacagcatggtcccagagaagggtaatgcaagccacagacagaagtgaaattttagtagccaaattttgaaaag

SEQ ID NO: 4815 - DNA, 201 bp, Homo sapiens
cttccaaactggagacaattaagaaagagattggaacctagaaggagttgacaattcaatcatttcttccttcattaactcagtccagtttggatgaggcrcattcaagatgcctccaagcaagctgagaaaaatcagtggcaaaaataactatgtctgttcaaacagggaacttgtagaacagcatggtcccagagaagg

SEQ ID NO: 4816 - DNA, 201 bp, Homo sapiens
gagacctacgcggtcctggatagcaccctttagcacattgcttcggacccgcagaacgaagaaaaggaggaacaaacccatgatcagattctgaaggagaygcgtaatcactgccagcttatttctcaccaagtttcttgtcactctcctgaaaacaaacaaccctgttttaattccttttcagaattgttattgggggat

SEQ ID NO: 4817 - DNA, 201 bp, Homo sapiens
aagaggtgcacctccagcacgtgggcacttacacagattcacagcgttcagcatgcctgtgtacggggtggcgcccacaaactggtaaaggagacctacgyggtcctggatagcaccctttagcacattgcttcggacccgcagaacgaagaaaaggaggaacaaacccatgatcagattctgaaggagacgcgtaatcac

SEQ ID NO: 4818 - DNA, 201 bp, Homo sapiens
cagtttgccctctgtgagcggggggctgcacccaccttcttctggaaggagccgggattgccgcggcggatggccagcagcgcggtgtagtgcagcgtctsgcgcacggtgaggctgctcagcagggtgtcgctctgcaggagactcgggcgtcagtgtagcctaagcccccggggcgggcgggggggccaggggtgtggg

SEQ ID NO: 4819 - DNA, 201 bp, Homo sapiens
gattcccagctcaacacaccatagacccggcctttacgagttgaacctcttacctgaaaaagctcagaacggggctggtgaatggtgagaaccacaattcrgttcctgcgagccagttccaccaggaggacgacaatctgattagcagtcatgcagtccaggcctgtggttggctcatcaaacagcatgacctctgccagc

SEQ ID NO: 4820 - DNA, 201 bp, Homo sapiens
agattcacagcgttcagcatgcctgtgtacggggtggcgcccacaaactggtaaaggagacctacgcggtcctggatagcaccctttagcacattgcttcrgacccgcagaacgaagaaaaggaggaacaaacccatgatcagattctgaaggagacgcgtaatcactgccagcttatttctcaccaagtttcttgtcact

SEQ ID NO: 4821 - DNA, 201 bp, Homo sapiens
tataatggtagacttttgtaaggttacagctggagaagggaggtatttagggagaaagaggtgcacctccagcacgtgggcacttacacagattcacagcsttcagcatgcctgtgtacggggtggcgcccacaaactggtaaaggagacctacgcggtcctggatagcaccctttagcacattgcttcggacccgcagaa

SEQ ID NO: 4822 - DNA, 201 bp, Homo sapiens
aagaaaggatccagatgcagtttgtcctctccagctgcatgagtggcgaggtttccccaggtgatggggaaaatgaccaaacctggcagaggactgactamtctgttttgatactcccttccccacaacatatacacttttgagtttatcattcaaattcctattttaattcctgccatttcatgaacacctgtggtcata

SEQ ID NO: 4823 - DNA, 201 bp, Homo sapiens
ctgcacgagtcccactagctccatgactccatgggagcccggccctgggtgaactgaacaacccctcaccagtagcacacactgctgaaaatcatggtggyaacaacgctgaaggggaggacgtgcagtgcataggccagcatcatctgccacttctggtagaggccgtcctgactctcctggtcgctgacagctcgcagc

SEQ ID NO: 4824 - DNA, 201 bp, Homo sapiens
taaaattaatgtcctggaagatacgacattgcactagacactgatgggcaaagtgtagatcctccagagcagagaacttcaccctggagctctccctgcaygagtcccactagctccatgactccatgggagcccggccctgggtgaactgaacaacccctcaccagtagcacacactgctgaaaatcatggtggcaacaa

SEQ ID NO: 4825 - DNA, 201 bp, Homo sapiens
tgggcctcaatggtttaaatgattgaattgtcaaaataggaggaattgagatctgcagatggttaataccattcaaaggtatcagccgacaccatgaaacrttgattttttaatgtacattcaaatataccaccacttcgacaataacaacaacatgatgatgatgatgagagggacttcctctcaaagctcccagcagca

SEQ ID NO: 4826 - DNA, 201 bp, Homo sapiens
gtggtggggaggctgaggtgggaggattgcttgagcctgagaggttgaggatgcagtgagctgtgatcatgtcactgcactccatcctgggtgatagagcragacccaatccaaagaaaaagaaatgatgggggacttcctgttgcttctttgtttgggcctcaatggtttaaatgattgaattgtcaaaataggaggaat

SEQ ID NO: 4827 - DNA, 201 bp, Homo sapiens
aaatggaggtcagacgaggtggttcacccttgtaatcacagcactttgggatgctgaggtgggtggatcacttgagcccaggagtttgagaccaacatggygaaaccctgtctctacaaaaaatacaaaaattagctgggtgtggtggggaggctgaggtgggaggattgcttgagcctgagaggttgaggatgcagtgag

SEQ ID NO: 4828 - DNA, 201 bp, Homo sapiens
cacatgatctgcccgctctccacgtacaaggagacatctttgaggatctgcctggtccactgctgccggcaagatgtgatgtcccaccagggcctcacgcrgtggctttaaaggaaaccccaggaaggcaaaggcagcttggggccctggaaggggccacacccaggtccccagcattgatcctacctgtgccccacccca

SEQ ID NO: 4829 - DNA, 201 bp, Homo sapiens
cagtggcacaatctcagcacactgcaacctccgcctctcaggttcaagccattctcctgcctcagcctcctgagtagctgggattacaggcatgcaccacyacacccggctaattttcgtatttttagtagagatgaggtttcaccatgttggccaggctggtctcgacctcctgacctcaggtgatcctcccgcctcagc

SEQ ID NO: 4830 - DNA, 201 bp, Homo sapiens
ggtgcaatcatggctcgctgcagcctcgacctcctgggttcaagagatcctcctgcctcagcctccttagcagctgggagtgcaggcgcacatcaccacgyccaactaatttttgtattttttatagagactgagtctcgctatgttgcccaggctggtctcaaacttctagactcaagcaatcctcccatcttggccttc

SEQ ID NO: 4831 - DNA, 201 bp, Homo sapiens
tttgctcagaaatgactctcaattggagagaactctgctatcgggagttctcctgctcccagggagctgtgccccttgaaggaggcatgtccacctgtcaytggttccctgggtgcttgtgggccttcccagtctagagagaaatgaagcagtttccaggtaaggtccccggtgggtttacctgtggctacttccaaactg

SEQ ID NO: 4832 - DNA, 201 bp, Homo sapiens
tgtgtttacaaaaatccaacctgatttgaactaaacctgtttcccactgtataacccaaataagtgctggggtcccatgtggtacaatctcagtgtgagtycacatcaaagacatataatccagccttcagaagtaattaaaaataattccaatctttacttgaatttctttaaggactttaatggggacccaatttataa

SEQ ID NO: 4833 - DNA, 201 bp, Homo sapiens
aaaactcctcaaactctccccaccagtacattgtcacttcatgtttccctggatccttagccctcagagagatccacctggtgagctcattcatattaacrtgttggtaactcaatagttgcctttccccagagagggaacctggagagggctgggtttagctcagagaaaaacccttataatggtagacttttgtaaggt

SEQ ID NO: 4834 - DNA, 201 bp, Homo sapiens
tccctctaacacctgcttcctgcaacgttaggcaaccaggttttgtctctggaattccactgaatttgaaaattaggtgctggctgtcctaaaatcagctycaaagagaagctaacggtacaaagttggcctggtcgctgagcaccccatgggctgtgcatctgagatggccaagatgagataggaggaatgatcttttga

SEQ ID NO: 4835 - DNA, 201 bp, Homo sapiens
aggatgacaagagctggaataaatgaatacaaaatcagaaagttcattgtgaatctagatgttgcacctgggcaggttttctcaatgaattgaattccttsagtgaaggcacacattggattagttgtcacagaaacatttgagctgcctgtcaaggaaaagattgacagtgtcaggtgtggtttatctcaggtaatttaa

SEQ ID NO: 4836 - DNA, 201 bp, Homo sapiens
tgaactaggacttcataaattatttgcagtacgtatggttctgacacccttgagaacagaattttcagcatgtttccaaggaacctcagtctttagcacasgtttcttgctgagtgctatggaaaaagaaatccctttaaatttacagtgaacattatgatctcagaaacatcactgacttggtgggaagaaacagcctat

SEQ ID NO: 4837 - DNA, 201 bp, Homo sapiens
ttaactgttgttgttgataagaatatctgtttatattgtataatgatcacttttattaagttcatatacatcagtattattaaaggattagggtatttgtsagcatcatgagttttcacattcaaatctgtcttctctaaatgacttaaaaccataagaattttgtgtggaaaaggaaggcagccccacagtacccatatc

SEQ ID NO: 4838 - DNA, 201 bp, Homo sapiens
agaacagttaaataaaatagtttctatcctcttatcttgacatatcttcctcacaacctgaaaggccatgtgtaaattgagaaattctaaggcaacttggytagaatgcgctggtacgggggagccacttccagcccgagccacaacctgtcccccttttctggccccctcagctccatcccactccatggggccctcaac

SEQ ID NO: 4839 - DNA, 201 bp, Homo sapiens
cagggcctccaggatagattgttctcctctgaaagtgacaacagcctgtacttcacctacagtggccagcccaacaccctggaggtcagagacctcaactrccaggtagaggcacgcctgggttcaaggggagaggagcaggcagggacagccaggaaattccccgggtggaaataaaagggtgggcccaacttgcaggcc

SEQ ID NO: 4840 - DNA, 201 bp, Homo sapiens
gccgggtgtggtggcaggcgcctgtaatcccagctactcaggaggctgaggcaggagaatcgcttcaacctgggaggtggaggttgcagtgagccaagatygcaccactgcactccagcctgggcaacaagagcgaaactctgtctcaaaaaaaaaaaaaaaaagtgacaagagctgttaaaaacatctctcttatttgcc

SEQ ID NO: 4841 - DNA, 201 bp, Homo sapiens
gcaaggaggtgatattgggagatgattaggttatggagagctcttacaattcagatgaatgcctcagagacccctccccacttctgccatgcaaggttagkgtgagaaaatggctgtctaggaggaagtctccctcaccagacactgaatctgttgacccccttgatctcggacttcccagcccctagaactgtgagaaaa

SEQ ID NO: 4842 - DNA, 201 bp, Homo sapiens
tcttttttagagacagggtcttgctctgtctctgttgcccaggctggagtgcagtggttccatcatagctcactgcagcccctgcctcctaggtttaagcsatccttccacatcagcctcctgagcagctgggattacagatgtgagacaccatgtctagctatgtcagcatttttttctatatggactttaaataacagc

SEQ ID NO: 4843 - DNA, 201 bp, Homo sapiens
gacctcaactaccaggtagaggcacgcctgggttcaaggggagaggagcaggcagggacagccaggaaattccccgggtggaaataaaagggtgggcccamcttgcaggccctctgcccgcaaggacagagtccagtccacattgatgcctcacgtgtcaggtgcaataggtgtcatcaatggcatatatcagagctggag

SEQ ID NO: 4844 - DNA, 201 bp, Homo sapiens
ttgttttgttgttattgttgttgttgttgttgtttctgagaccgaatctcactctgtcacccaggctggagtgcagtggcacaatcccagctctctgcaamctcctgggttcaagcgattctcctgcctcagcttcccgaatagctgggattacaggcgcacaccaccacgcccaactatcaattttgaatcattgctaag

SEQ ID NO: 4845 - DNA, 201 bp, Homo sapiens
tacagataggggaaattgtgtttcctgagtacttttatatgccatggaactgtgggggctttttatattttgaaatatgaattcacgtacatgttaggcaraattttatactctttcaaggatctttctaaagatttcacattggtagcagttccattcacagtcagatatcaatagaattcattctaatatcaaacctgt

SEQ ID NO: 4846 - DNA, 201 bp, Homo sapiens
gagaaaccctggcagcaggcagagctgtgtgtgacctaggctgaatgtttcgataaaatttcttcagccaggaacaagtcctgcgtgtcctcttgccaacyctccagccgtgagtgtcagcacatcactccccccggggcataggctcctcatctcagaactagaaacatgtgctctgtgagtttccttcttgcctaggca

SEQ ID NO: 4847 - DNA, 201 bp, Homo sapiens
gtcagtgaacaagttcatgcgctctctaccatattctcacccaaagttaccatagtaacactgagacagtttcatttcaggtttgtacatggaattacttsaagatcaatcagaaagagaatcagtaattttaatacagaacctttttttttttttgagacagagtcttgctctgtcgccaggctggagtgcagtggtgca

SEQ ID NO: 4848 - DNA, 201 bp, Homo sapiens
acaggtatgccaagggctgcatatgggactgactggaccagaaacactggaagagaggatgtgaaggaacagtgggaggggagctcggaacaatagccagmaacagccatttcagggccttgctgtgagttgaggttgaatgaccatgaatgagacaggtcacgttgaaatcagcattctgagaaaattaacgtgactcca

SEQ ID NO: 4849 - DNA, 201 bp, Homo sapiens
cccagcctcccaaagtgctgggactataggaatgagccaccgcacccagcctgggtatgtattttttaaatattttgctaacttcaaccaagtttttgatwagagctgaacagcaaacaattaaaataagatcacttttgaatacttgaaggatgacagatgtctagttcattagttgaaagacaattcatatgtattatg

SEQ ID NO: 4850 - DNA, 201 bp, Homo sapiens
atcgtaatcacctgtctcatctgccaaaatctaagcttttcaacggccttttcattgtcacatcccaaattccaagcctgaagggtgttctgggctccccrtaagtgtttgttgggtgcatggttgattgaaggaatgtatagtgtgagaatggtagcttgaggaggaaagtctatgggaacttgttaatgaaagtgtact

SEQ ID NO: 4851 - DNA, 201 bp, Homo sapiens
agaattgcttgaggccaggagtttgagaccagcttgggcaacaaagagagaccctgtctctacaaaaaaaaaaaaaaaaaaaaagaaagaaaaaaacaatmaattagccgggtatgctggcacgtgcctgtagtcccagctactcaggatgcttaggcaggaggatcgcttgatcccaggacgttgagaccacagttagcc

SEQ ID NO: 4852 - DNA, 201 bp, Homo sapiens
ccaggctggtctcaaattcctgggctcaagcaattctcctgccccagcctcccaaagtgctgggactataggaatgagccaccgcacccagcctgggtatrtattttttaaatattttgctaacttcaaccaagtttttgattagagctgaacagcaaacaattaaaataagatcacttttgaatacttgaaggatgacag

SEQ ID NO: 4853 - DNA, 201 bp, Homo sapiens
ccaccatgcccagctaatttttgtattttttagtagagacggggtttcaccatgttggccaggatggtctcaatctcttgacctcgtgatccacccgcctyggcctcccaaagtgctgggattacaggcatgagccaccgcgcctggccagaacccatttttaataacctatttacattattttatccttgaaaatatgta

SEQ ID NO: 4854 - DNA, 201 bp, Homo sapiens
attggaggaggagatttgtgattaaacagaaagttgaaggtaccaacgtagaaagttagaactaacctagaatacaaaggaaaaaggaaggagagaccgarccaacattcattgtgaaaatgaaatatgtctcctctccaatctatttcaggtgaaactgtgtgctgacactgtggtcttcttagtccactgtatattttc

SEQ ID NO: 4855 - DNA, 201 bp, Homo sapiens
ccacgtcggctctaagaagttgctctcacctgttggtttccttcttgtcttctcctatgttctcagcagcttctaaaggagcccctcatctctcctgtctyccacagggcctccaggatagattgttctcctctgaaagtgacaacagcctgtacttcacctacagtggccagcccaacaccctggaggtcagagacctca

SEQ ID NO: 4856 - DNA, 201 bp, Homo sapiens
tgttggcatgtcttatactcgcccctccttaccacttactcttcaaggccatctacttttcctctgtacaaatcatgaagtttgcttatgctatcaatgcygttcctcattgttgtcttctgtgatgtttaaaacatcctcttgcctttgatgattttatagcatctggaccagagtcattctttttgctcctctccccta

SEQ ID NO: 4857 - DNA, 201 bp, Homo sapiens
taaaattatttaaaacactactaaattcagccatattctttggttgtctttggagtggccctgagatttttttggttgttttttttttgttttttttgggkttttttttttcgttttttttttttttttttttttttttgagacacagtttcactctgccgcccaggctggagtgcagtggctcgatctgggctcactgca

SEQ ID NO: 4858 - DNA, 201 bp, Homo sapiens
tcagcactttttttctttcttttttagagacagggtcttgctctgtctctgttgcccaggctggagtgcagtggttccatcatagctcactgcagcccctrcctcctaggtttaagcgatccttccacatcagcctcctgagcagctgggattacagatgtgagacaccatgtctagctatgtcagcatttttttctatat

SEQ ID NO: 4859 - DNA, 201 bp, Homo sapiens
taagaacaggaaaagaaaaaaaaaaaaaaaaaggaccagactacaaaaaaagttcaactatgagatgacaaaggcctggagtaggatgatggccatgagakggtggctgcctagtggctagggtgctatctttctgaggtaggaactgtgaacctttgtttctccctgtaccacacagagtcaaacacaaaatgttccaca

SEQ ID NO: 4860 - DNA, 201 bp, Homo sapiens
aatttgagatttaaccacgtcggctctaagaagttgctctcacctgttggtttccttcttgtcttctcctatgttctcagcagcttctaaaggagcccctmatctctcctgtctcccacagggcctccaggatagattgttctcctctgaaagtgacaacagcctgtacttcacctacagtggccagcccaacaccctgga

SEQ ID NO: 4861 - DNA, 201 bp, Homo sapiens
tggtaagcactactgatataaacgtacaagaaaatacagacctaacacataccaattggaggaggagatttgtgattaaacagaaagttgaaggtaccaaygtagaaagttagaactaacctagaatacaaaggaaaaaggaaggagagaccgaaccaacattcattgtgaaaatgaaatatgtctcctctccaatctatt

SEQ ID NO: 4862 - DNA, 201 bp, Homo sapiens
tcttttttttttttaagatggagtctcactgctgcccaggctagagtgcagtggcacaatcttggctcactacaacctccacctcccaggttcaagggatkctcctgcctcagcctcccgagtagctgggattacaggcacctgccaccaggcctggctaattttttttttgcatttttagtagagacgggttttgccatg

SEQ ID NO: 4863 - DNA, 201 bp, Homo sapiens
cagaaatatgaagaaaaaaattaaaatcaatatcactattgatattgattttagagatagagataattactgctatcatttggtgcatatcctttaagccytgatactctttggagcagtcttttatcctgcaggcttttttttttttgtctgactagtcttaattcctaagaataactgggaattgagaactgcagttca

SEQ ID NO: 4864 - DNA, 201 bp, Homo sapiens
ccattggctgcaactcattgggagccaccttttccctttcacggctccttcagctctcataggaaaacattaaattacttagacaatggtcacaactaacygcagtaagcaggcttgttgaactctacaggcatcttcataaataaccatgttctgcctagccaacaccacacctacctaatgttaaagggctcacccaac

SEQ ID NO: 4865 - DNA, 201 bp, Homo sapiens
ggcttaaatcgtaatacatgtgtcagatttaaataaataatatgaattttttaaaacgtccccagaggctgggtgcagtggctcatgcctgtaatcccaayactttggaaggctgaggagggagaattgcttgaggccaggagtttgagaccagcttgggcaacaaagagagaccctgtctctacaaaaaaaaaaaaaaaa

SEQ ID NO: 4866 - DNA, 201 bp, Homo sapiens
gagaattgcttgaacccgggaggccaaggttgcagtgaggcaagatggcaccactgcactccaacctgggtgacagagcgagactccgattcaaaaaaaawaataataaataaataaacaaataaaataaaataagattccctagaacacaaactgcttacacttgcttcaggaaaattaaccaggaaacaacagatactt

SEQ ID NO: 4867 - DNA, 201 bp, Homo sapiens
tgtgtatacagttcaaagacagagtcatttacttattcactcaacaaataatgtttgcaggcctaattggtccaaggcctaattgggctggctgctgagarggtctaaaatgatgaatgagacacagctgctgccttcaaggggtggataatctattacagcaaaggaagaccgtgacaggaagtagtgtgtgataggctg

SEQ ID NO: 4868 - DNA, 201 bp, Homo sapiens
tagtatgtaccctgttctttgtaaacaatatgtcagcactttttttctttcttttttagagacagggtcttgctctgtctctgttgcccaggctggagtgyagtggttccatcatagctcactgcagcccctgcctcctaggtttaagcgatccttccacatcagcctcctgagcagctgggattacagatgtgagacacc

SEQ ID NO: 4869 - DNA, 201 bp, Homo sapiens
aaagtgctgggactataggaatgagccaccgcacccagcctgggtatgtattttttaaatattttgctaacttcaaccaagtttttgattagagctgaacrgcaaacaattaaaataagatcacttttgaatacttgaaggatgacagatgtctagttcattagttgaaagacaattcatatgtattatgtagtttatgta

SEQ ID NO: 4870 - DNA, 201 bp, Homo sapiens
aggcacgcctgggttcaaggggagaggagcaggcagggacagccaggaaattccccgggtggaaataaaagggtgggcccaacttgcaggccctctgcccscaaggacagagtccagtccacattgatgcctcacgtgtcaggtgcaataggtgtcatcaatggcatatatcagagctggaggttgagaggcttgaaaaga

SEQ ID NO: 4871 - DNA, 201 bp, Homo sapiens
tgggcccaacttgcaggccctctgcccgcaaggacagagtccagtccacattgatgcctcacgtgtcaggtgcaataggtgtcatcaatggcatatatcaragctggaggttgagaggcttgaaaagagaataaaactgttgtataaacataaaacaaaatgcgtgaacctatagaaaaatgtctctgggactctttttaa

SEQ ID NO: 4872 - DNA, 201 bp, Homo sapiens
ttctccagtcttttttttttttttttgagacagggtcttgctctgttgcccaggctagagtgcagtggcactatctcagctcactgaagtcttaatctccygggctcaagcaatcctcccacctcagcctcccaagtagctgggaccgcagacatgcaccaccatgcctggctaacttttgtatgtttttgtagagatggg

SEQ ID NO: 4873 - DNA, 201 bp, Homo sapiens
tcaatcaagaggcttctgtggagccaatttgtcagaagcttttaaccttaaaatgtagatggtaatccagtgtagcagacactgtggtgtgccacacagawcccctcttcagggccaatgcagccatcccccagctgctgagaacgtcagctgcagaagattcaccacagggaccctcccagggaattgccctcggccaca

SEQ ID NO: 4874 - DNA, 201 bp, Homo sapiens
ttttagtagagacgggttttgccatgttagccaggctggtctcgaattcctgacctcaagtgatccgcccgcctctgcctcccaaagtgctgggattacargcatgagccaccgtgcccggcctgggaattcctcttaacaacactactgttggcatctggttgtgcacctgctgtagcaggtgaatagccatggattcaa

SEQ ID NO: 4875 - DNA, 201 bp, Homo sapiens
gcatttttagtagagacgggttttgccatgttagccaggctggtctcgaattcctgacctcaagtgatccgcccgcctctgcctcccaaagtgctgggatyacaagcatgagccaccgtgcccggcctgggaattcctcttaacaacactactgttggcatctggttgtgcacctgctgtagcaggtgaatagccatggat

SEQ ID NO: 4876 - DNA, 201 bp, Homo sapiens
acaggcacctgccaccaggcctggctaattttttttttgcatttttagtagagacgggttttgccatgttagccaggctggtctcgaattcctgacctcargtgatccgcccgcctctgcctcccaaagtgctgggattacaagcatgagccaccgtgcccggcctgggaattcctcttaacaacactactgttggcatct

SEQ ID NO: 4877 - DNA, 201 bp, Homo sapiens
tggagtctcactgctgcccaggctagagtgcagtggcacaatcttggctcactacaacctccacctcccaggttcaagggattctcctgcctcagcctccygagtagctgggattacaggcacctgccaccaggcctggctaattttttttttgcatttttagtagagacgggttttgccatgttagccaggctggtctcg

SEQ ID NO: 4878 - DNA, 201 bp, Homo sapiens
taggtgataaggatacagtagaatacagtccctgcccttgtagaacttgcagcccactgtggattcatttcagtataaagtgtaggcattgtcccaaagcygtaattaggcatctcatcagaaatcagcccactcccccaccccaatcaagagcccctcctgctgtcctgctgtatgtgcatgaaacacaacattggcctt

SEQ ID NO: 4879 - DNA, 201 bp, Homo sapiens
caccgggcccagccctttatttatttatttattgagatggagtctcactctattgcccaggctggagtacagtggcaagatctcagctcactgcaaccgcygtctcccaggttcaaacaattatcttgcctcagtctcccgaatagctggaattacaggcgtgtgccaccacacctggctaatttttgtatttttgtagag

SEQ ID NO: 4880 - DNA, 201 bp, Homo sapiens
tcctgacctcgtgatctgcccgcctcaacctcccaaagtgctgggattacaggcgtgagccaccgggcccagccctttatttatttatttattgagatggmgtctcactctattgcccaggctggagtacagtggcaagatctcagctcactgcaaccgctgtctcccaggttcaaacaattatcttgcctcagtctcccg

SEQ ID NO: 4881 - DNA, 201 bp, Homo sapiens
ccaggatggtcacaatctcctgacctcgtgatctgcccgcctcaacctcccaaagtgctgggattacaggcgtgagccaccgggcccagccctttatttayttatttattgagatggagtctcactctattgcccaggctggagtacagtggcaagatctcagctcactgcaaccgctgtctcccaggttcaaacaattat

SEQ ID NO: 4882 - DNA, 201 bp, Homo sapiens
ggagtgcagtggcgcagtctcggctcactgcaacctccacctcccaggttcatgccattatcctgcctcagcttcctgagtagctgggactgcaggcgcckgccaccatgcccaactaattttttttgtatttttagtagagatggggtttcactgcattagccaggatggtcacaatctcctgacctcgtgatctgcccg

SEQ ID NO: 4883 - DNA, 201 bp, Homo sapiens
tcaagccattctcctgcctcagcctcctgagtagctgggattacaggcatgcaccactacacccggctaattttcgtatttttagtagagatgaggtttcmccatgttggccaggctggtctcgacctcctgacctcaggtgatcctcccgcctcagcctcccaaagtgctgggattacaggcgtgagccactgctttttt

SEQ ID NO: 4884 - DNA, 201 bp, Homo sapiens
gaacacaaactgcttacacttgcttcaggaaaattaaccaggaaacaacagatacttcattaaactcctatttgcaggagccatagtcactgcagcccatrcagaaaaatcccccaaattcatgattacaatatcgcttactttcataagtgtttgggttttgaaattttattatcataaatgctttatgtgtttacaaaa

SEQ ID NO: 4885 - DNA, 201 bp, Homo sapiens
tgtctcaaaaaaaaaaaaaaaaagtgacaagagctgttaaaaacatctctcttatttgccttctagtgaccaagcaccatttgaagaacaggccgtcctgstctaccacagtgcaaagaaaggatccagatgcagtttgtcctctccagctgcatgagtggcgaggtttccccaggtgatggggaaaatgaccaaacctgg

SEQ ID NO: 4886 - DNA, 201 bp, Homo sapiens
atcaccctctgcctcctctgttggttgctgtcctcttcccaccctctgaatgtgtctgttttaaggttttacattcaggctgctttctcccctcccccagscccccccccatgcacctgggtcctagctacttcagagtcctctcttctctggcccaggccctgccgtgaatgtgggacaggtcattcccaggcacatgtc

SEQ ID NO: 4887 - DNA, 201 bp, Homo sapiens
aaatattactcaaaatggtttcgctcccaggatttcagagtctgaggacaccctctctgagcacagcctcctgcctctcacttccccagtgccctcactgscgcagatgctggaccccttctgccattctttgccttatcagttcccacatctggggaccctattctcccttaagcaatggaaggtgtgctggacaatgcc

SEQ ID NO: 4888 - DNA, 201 bp, Homo sapiens
aaatattctaagttaaaaatgcatttaaggccagacgcggtggctcacgtctataatcccagcactttgggaggccaaggcaggcagatcacctgaggtcrggagtttgagaccaacctggccaaaatggtgaaaccacgtctctactaaaaatacaaaaattagccaggtgtaatggcaggcacctgtaatcccagctac

SEQ ID NO: 4889 - DNA, 201 bp, Homo sapiens
tgaaaatgaaatatgtctcctctccaatctatttcaggtgaaactgtgtgctgacactgtggtcttcttagtccactgtatattttctgtcaatcaaaagrtataaaattctttctgtttgcaaggcactagttctaggagcttgagaacttcaaaagatgtatcctatccctaaagaactcataatgtagttggagatat

SEQ ID NO: 4890 - DNA, 201 bp, Homo sapiens
ctgagatttttttggttgttttttttttgttttttttggggttttttttttcgttttttttttttttttttttttttttgagacacagtttcactctgccscccaggctggagtgcagtggctcgatctgggctcactgcaacctcagcctcccagattcaagtgattctcatgcttcagcctcctgtgtagctgggattt

SEQ ID NO: 4891 - DNA, 201 bp, Homo sapiens
aacactactaaattcagccatattctttggttgtctttggagtggccctgagatttttttggttgttttttttttgttttttttggggttttttttttcgktttttttttttttttttttttttttgagacacagtttcactctgccgcccaggctggagtgcagtggctcgatctgggctcactgcaacctcagcctccc

SEQ ID NO: 4892 - DNA, 201 bp, Homo sapiens
ctgtgtcttgctctggcatccaggctggagtgcaatggggagatcatggctcactgcaaccttgaactccagggctcaagggatcctcccatctcagcctstcaagtagctgggactacaggcacacatcaccatgcccgggtaatttttttgttttttgttgcccaggctggtcttcaactcctcgcctaaagcaatcct

SEQ ID NO: 4893 - DNA, 201 bp, Homo sapiens
aggtcagacgaggtggttcacccttgtaatcacagcactttgggatgctgaggtgggtggatcacttgagcccaggagtttgagaccaacatggtgaaacyctgtctctacaaaaaatacaaaaattagctgggtgtggtggggaggctgaggtgggaggattgcttgagcctgagaggttgaggatgcagtgagctgtga

SEQ ID NO: 4894 - DNA, 201 bp, Homo sapiens
ttatcttgacatatcttcctcacaacctgaaaggccatgtgtaaattgagaaattctaaggcaacttggctagaatgcgctggtacgggggagccacttcyagcccgagccacaacctgtcccccttttctggccccctcagctccatcccactccatggggccctcaacaccctggatggtcaccctcctgcctacctgc

SEQ ID NO: 4895 - DNA, 201 bp, Homo sapiens
ccagcagcgcggtgtagtgcagcgtctcgcgcacggtgaggctgctcagcagggtgtcgctctgcaggagactcgggcgtcagtgtagcctaagcccccgkggcgggcgggggggccaggggtgtgggggacgcgcccacctgcaggacgtaggagaagcagtcctggaactgctcccggcgcagcgcccggccgttcaca

SEQ ID NO: 4896 - DNA, 201 bp, Homo sapiens
atttccaggttcttccaaggacagaagcagatctgccatgctatctcctttattatcatcagcacttccttcccactgaattacttatcaggattttacaygctgtgggctggatttgctcagaaatgactctcaattggagagaactctgctatcgggagttctcctgctcccagggagctgtgccccttgaaggaggca

SEQ ID NO: 4897 - DNA, 201 bp, Homo sapiens
ccttgctttatttccaggttcttccaaggacagaagcagatctgccatgctatctcctttattatcatcagcacttccttcccactgaattacttatcagkattttacacgctgtgggctggatttgctcagaaatgactctcaattggagagaactctgctatcgggagttctcctgctcccagggagctgtgccccttg

SEQ ID NO: 4898 - DNA, 201 bp, Homo sapiens
gcgtgccacagaaaatcagctctccgaagctcaggatggcaattttgtcaaagagctgaccagacaacagacgtagttagtgtgtgatcacaagggtagcratgcactttgaatgtctctgggaacactgatgcagggccaaggtcaggtattccttatggtcaccaagtccttatgggaaatgcatttcccataagcagt

SEQ ID NO: 4899 - DNA, 201 bp, Homo sapiens
agtcaacatgagactatttattatatcaaattgttcccattggctgcaactcattgggagccaccttttccctttcacggctccttcagctctcataggamaacattaaattacttagacaatggtcacaactaaccgcagtaagcaggcttgttgaactctacaggcatcttcataaataaccatgttctgcctagccaa

SEQ ID NO: 4900 - DNA, 201 bp, Homo sapiens
aagtaaactcagctgaaagtgaaaaatagcaaacgaatctttaaaaacataaccagaggtttgtctggtgtgctttgttcactgttgagcccattcctacrgttttttattttaatcctcagtaaaatcactgggtgctctgtagcagtggtgctcaccatccatctgcccagcactctctcgatgtgatcaggtaactcc

SEQ ID NO: 4901 - DNA, 201 bp, Homo sapiens
ggggttgaggtgggaatggaaatctggagttctactcactggcttgctctctcaatttgacaacatattgtgaaatatcgtacacaaatcagcttaaagawctctcatgtacacaccaccaattaccaaaagctttgaagcttgatccccgcactcctactgtgtcccctttctcctttcatctctccccgctccccagag

SEQ ID NO: 4902 - DNA, 201 bp, Homo sapiens
ctagatatataaaagtcatcagtcaagctataagaacagttaaataaaatagtttctatcctcttatcttgacatatcttcctcacaacctgaaaggccakgtgtaaattgagaaattctaaggcaacttggctagaatgcgctggtacgggggagccacttccagcccgagccacaacctgtcccccttttctggccccc

SEQ ID NO: 4903 - DNA, 201 bp, Homo sapiens
gctgggattacaggcatgagccactgcgcacagctggcaatggctaagattttttgatgattcaacaacaacaacaaaaatgggacaatgaagcaatgtgyacagtgacagcggagagggcgagtgaggggcaaggccgaagggctgatctgccaggagtccagcatctgtccgagctgctttcaatctcctcaggagctt

SEQ ID NO: 4904 - DNA, 201 bp, Homo sapiens
cctatttgcaggagccatagtcactgcagcccatacagaaaaatcccccaaattcatgattacaatatcgcttactttcataagtgtttgggttttgaaaytttattatcataaatgctttatgtgtttacaaaaatccaacctgatttgaactaaacctgtttcccactgtataacccaaataagtgctggggtcccatg

SEQ ID NO: 4905 - DNA, 201 bp, Homo sapiens
attccaatctttacttgaatttctttaaggactttaatggggacccaatttataacccccagccacatttaaaattccctttcttccaattctcttcgctstacttaaagcctgtaactccctgaaaccgtttttcctcctcattctcaactctcccaaaacaataacgactaaaaaaaattctttaccgaatttctaatc

SEQ ID NO: 4906 - DNA, 201 bp, Homo sapiens
attctcttcgctctacttaaagcctgtaactccctgaaaccgtttttcctcctcattctcaactctcccaaaacaataacgactaaaaaaaattctttacygaatttctaatcaagaagcttggcttttttcctccctcactgtctttccttcctcagcttatctcctctccagagacctgttcacaaatctgtttctgtc

SEQ ID NO: 4907 - DNA, 201 bp, Homo sapiens
tttcttaaagtgatacatatttttgttttaggaactggaacagtacaaaagaagttcttccaagtcttggaaacaaatcgagcttgattcttgaacctatytcaattattgtatatttatttcttcttttccaaatacaaataagattatactgtgaattaactattgtggcaatatgtgaagaaagttaaactgtataat

SEQ ID NO: 4908 - DNA, 201 bp, Homo sapiens
atctcctcaggagcttggggcacagaccttcttacctcctctccctcaacctccctcctgcttgggggctttggcaactggggttgaggtgggaatggaamtctggagttctactcactggcttgctctctcaatttgacaacatattgtgaaatatcgtacacaaatcagcttaaagaactctcatgtacacaccaccaa

SEQ ID NO: 4909 - DNA, 201 bp, Homo sapiens
ctaatatccctcctgcagatatttgttttaaaaacaacaacagcaagatgcatgttagcccacatgagtctcttagaaatggataagatttttttttttttgacagagtctcacgctgtggcccaggctggagtgcagaggcacgatctcggctccctgcacctccacctgccggttcaagtgattctcctgcctcaacct

SEQ ID NO: 4910 - DNA, 100 bp, Homo sapiens
agcttcaagatatacagggagatgcactagtccaagaaatccagcttgtyctttaacaaattatacagtttaactttcttcacatattgccacaatagtt

SEQ ID NO: 4911 - DNA, 100 bp, Homo sapiens
aaagttaaactgtataatttgttaaaggacaagctggatttcttggactrgtgcatctccctgtatatcttgaagctttttaaaaggaaaaattattgta

SEQ ID NO: 4912 - DNA, 201 bp, Homo sapiens
cctgaggaatccagatccaacaagcacccccgcaatggacagcagagccactacactgttgactatatttggattttggacgataccaagtagcacaagasttagaaattcaccaattaagtggggggccaagagagcagcagaaaaatatccaaatcgggcaacctcaggatgtaagcccagcgtcctagaaaagcataa

SEQ ID NO: 4913 - DNA, 201 bp, Homo sapiens
atgaccttatgtaacccttattatgtttgcagcctggctataaggattagttggaagtcatccctgattaatatttatctaggagtcaatgattaactgtygttgttgataagaatatctgtttatattgtataatgatcacttttattaagttcatatacatcagtattattaaaggattagggtatttgtgagcatcat

SEQ ID NO: 4914 - DNA, 201 bp, Homo sapiens
gtgtggaaaaggaaggcagccccacagtacccatatcacccttcattcatctcttgtatctcactgccagcagatcaccaattcctgtcatctcttggttygagatttttttttaacctacctgaaaagttatgctgtcctaagtttgcctctaaaccacttttatttgtgtggttttagacgaattgattccagattgca

SEQ ID NO: 4915 - DNA, 201 bp, Homo sapiens
tatgttagccaaagggcattgattgcctcatcttgcagagtaaccacgttttatttgaagtagtgacaacctttgtacagttatttagacattgaacaacrtgtaggaggccaagaggcatccccttagatggtcccttttacatgtcagttgccttgtgcaggatagccacctccactaaaatttatttatgaattgtaa

SEQ ID NO: 4916 - DNA, 201 bp, Homo sapiens
agttatttagacattgaacaacatgtaggaggccaagaggcatccccttagatggtcccttttacatgtcagttgccttgtgcaggatagccacctccacyaaaatttatttatgaattgtaaaggtaagatatactccttgtgaaaaaattcaagagctatagatagatgtatataaaatagaaaatggaagtatcctgc

SEQ ID NO: 4917 - DNA, 201 bp, Homo sapiens
atacaaataagattatactgtgaattaactattgtggcaatatgtgaagaaagttaaactgtataatttgttaaaggacaagctggatttcttggactagkgcatctccctgtatatcttgaagctttttaaaaggaaaaattattgtagaaccacgtgtaattttttttaaaataaaagaatcttctactacctacctct

SEQ ID NO: 4918 - DNA, 201 bp, Homo sapiens
gattgacagtgtcaggtgtggtttatctcaggtaatttaatcaacaagtatttaccaagcgcttgctaagtacccttaatgaaaaatacaggacactttascaagcccagagtttacaatttgatgaagcaagagtgagcagttctggcctttggcttcatttgaagatggacatgcttttgtttctattttgggtataga

SEQ ID NO: 4919 - DNA, 201 bp, Homo sapiens
tttagcaagcccagagtttacaatttgatgaagcaagagtgagcagttctggcctttggcttcatttgaagatggacatgcttttgtttctattttgggtrtagattcattaccatatttgtgataaaaatcatgatcccttagcacagactatcctaaagttactgacattatcacttaaaattatttaaaacactacta

SEQ ID NO: 4920 - DNA, 201 bp, Homo sapiens
tagttctaggagcttgagaacttcaaaagatgtatcctatccctaaagaactcataatgtagttggagatatagaatatatccttaaaactataaaaatayacagtagtgaactatttgtgccaagaaagtataaaaaaatgtgtaccacacatccatgatgttcttgtatttagtatttatggtttcacctatttgcaag

SEQ ID NO: 4921 - DNA, 201 bp, Homo sapiens
gtatgagtacaggtatgccaagggctgcatatgggactgactggaccagaaacactggaagagaggatgtgaaggaacagtgggaggggagctcggaacartagccagcaacagccatttcagggccttgctgtgagttgaggttgaatgaccatgaatgagacaggtcacgttgaaatcagcattctgagaaaattaacg

SEQ ID NO: 4922 - DNA, 201 bp, Homo sapiens
atggctagaatgagggcagagtaagaacaggaaaagaaaaaaaaaaaaaaaaaggaccagactacaaaaaaagttcaactatgagatgacaaaggcctggmgtaggatgatggccatgagatggtggctgcctagtggctagggtgctatctttctgaggtaggaactgtgaacctttgtttctccctgtaccacacagag

SEQ ID NO: 4923 - DNA, 201 bp, Homo sapiens
agccacactcccctttgaaaggccgttttggaaaggagtcaacatgagactatttattatatcaaattgttcccattggctgcaactcattgggagccacyttttccctttcacggctccttcagctctcataggaaaacattaaattacttagacaatggtcacaactaaccgcagtaagcaggcttgttgaactctaca

SEQ ID NO: 4924 - DNA, 201 bp, Homo sapiens
ccacatcagtggttcctaattagcgaatctcaattccaatggctccagctacctaatctgcatcactcaccatgtcttggacttaaatattactcaaaatrgtttcgctcccaggatttcagagtctgaggacaccctctctgagcacagcctcctgcctctcacttccccagtgccctcactgccgcagatgctggaccc

SEQ ID NO: 4925 - DNA, 201 bp, Homo sapiens
agtctctgtggctgctatttcaattcatgggctggggaggacatgaaagaggcagcacaccgcccaagaatccaagggccacttccagactcaccacaccytggggaaagcatgtctttgataataatatgatccaattcggcttaaatcgtaatacatgtgtcagatttaaataaataatatgaattttttaaaacgtcc

SEQ ID NO: 4926 - DNA, 201 bp, Homo sapiens
gattacaatatcgcttactttcataagtgtttgggttttgaaattttattatcataaatgctttatgtgtttacaaaaatccaacctgatttgaactaaayctgtttcccactgtataacccaaataagtgctggggtcccatgtggtacaatctcagtgtgagtccacatcaaagacatataatccagccttcagaagta

SEQ ID NO: 4927 - DNA, 201 bp, Homo sapiens
aataacacaagtagagagtggcagtgaatgtcaacaatttgcaagcaatagctcaatcaagaggcttctgtggagccaatttgtcagaagcttttaacctyaaaatgtagatggtaatccagtgtagcagacactgtggtgtgccacacagaacccctcttcagggccaatgcagccatcccccagctgctgagaacgtca

SEQ ID NO: 4928 - DNA, 201 bp, Homo sapiens
aagaaaaagaaatgatgggggacttcctgttgcttctttgtttgggcctcaatggtttaaatgattgaattgtcaaaataggaggaattgagatctgcagwtggttaataccattcaaaggtatcagccgacaccatgaaacattgattttttaatgtacattcaaatataccaccacttcgacaataacaacaacatgat

SEQ ID NO: 4929 - DNA, 201 bp, Homo sapiens
aaacattgattttttaatgtacattcaaatataccaccacttcgacaataacaacaacatgatgatgatgatgagagggacttcctctcaaagctcccagyagcattttccatcactttgttgcatgaactcttcatcaaaatcagatatgaggagaagtatgccagatgttagtgaggactaagatgttggttagaattt

SEQ ID NO: 4930 - DNA, 201 bp, Homo sapiens
agaaagttaaaggcaaagagtttgcccactccagtcaggtcttctcagagcacagaggtttttttatagaactctctccggtccagagtctgggtctcttwaccagaagctgcttggcttcaggctccaccagcctgaggttgaggttctctgggaaggtgccccgggagaagccccaaacctctctctgaagggaagagg

SEQ ID NO: 4931 - DNA, 201 bp, Homo sapiens
tgactcaattctctaattgtaatggctcaatgaataaagaaaaaagacccaactctatgctgcctacaggaaacccacctcacctataaagacacacatamcctgaaagtgaagaggtatttcatgcaacctgaaaccaaaaacagagcacgaatagctatacttatatcaggtaaaatacattacaaatcatgactgcac

SEQ ID NO: 4932 - DNA, 201 bp, Homo sapiens
ccctaaagaaatacctgaggctggattatttataaagagaagaggtttaattgactgacagttctgtaggctgtacaggaagtagggtgctggcatctgckcagcttctagggaggcctcaggaaactcacagtcaactgtgggagtagacacttcacatggtgaaggcaggagcaagatgggagtgtggggaggtgccac

SEQ ID NO: 4933 - DNA, 201 bp, Homo sapiens
ccataaaaagttgttatgtgtttctctttattcatgttgtctccctaataaagttcacctctgcctgaagcattgtcacagaagtaatctagttgaagtaktttttgacttttgtttttaagcaagcatcatatttatttataaccttgggatgaattaggtgttactaaaatgttctgacatgttgcttttctcccccct

SEQ ID NO: 4934 - DNA, 201 bp, Homo sapiens
tataacatgtgcaaagggcttagttctgtgccaaatagtcaataatgatagctaactataattattagctgctataatcatagcttttccatattttaaartactactgtatgttaaagatgtatgtttctttgcatttttcctgaagtctgtaaaaagttttcattaattaaaagcaagccaattaggaaaggactactc

SEQ ID NO: 4935 - DNA, 201 bp, Homo sapiens
cgggtgttgtggcacgcgtgcctgtattcccagctacttgggagtctgaggcaggagaatcacttgaacctgggaggcagaggttgcagtgagccgagatygtgccactgtactccagcctgggcaacagagtgaaactctgtctcaaaataataataataataataataataataataatgcatatacatattcatgtat

SEQ ID NO: 4936 - DNA, 201 bp, Homo sapiens
tatagcactgtttttaatgctagtctacaatgacagtaatagcctgagccataagtgggagaggaggggaaatgatgttcactgagcattgattttgaacsaagctctgtactggacatttcattctgttttgcagatgaatgtttataatttttagcacacaatcacaataactgtgtaacactaatgatgaaagtttta

SEQ ID NO: 4937 - DNA, 201 bp, Homo sapiens
aacatccagttgtgttctggctttgttcttgccctgctggttaatgctgtgcttttttgttgcccatatgatctatgtttctgtgctgaaaaggcaatgcytgaaaggcatgttttgtgcctccagaaaggtgtttgtgtccataattctaaatctgtgcctacctagaaaaattatactaagctctttgaaaagaaccta

SEQ ID NO: 4938 - DNA, 201 bp, Homo sapiens
aggtgtgaatgacaatgttcacaatttgaagtagcaaaagtcattcagccaaaaaaggaccctgccaagaacagaaaaaaagcattaccatctgtcatacrtttatgcttttttggtataataaattgtttcccccactaaatataagttgaaactttataagcatatactttactacataaattttcccatatgtcagtg

SEQ ID NO: 4939 - DNA, 201 bp, Homo sapiens
aataattctagtatgaagcccaaaacacaaatctattaaaaacaataatagctatagcaacctggtaagagataggcaatattaaaaatatgcaaattgaracaacataaagtcaaaatggggggtgagttaaagtgtgaaggttttttaaattgtttgtttctatacttttctaagctaagtgatcatctctttaaaata

SEQ ID NO: 4940 - DNA, 201 bp, Homo sapiens
tcttttttctaaaaacacaaaaatatcttctataaacactttcacttacctcataatataaaggagcattaccacctacaggtttttttgcctttttagaygaagcagatccaacaagtgtatttatttcattaatctgtaagaaaattaaatttacttatgatgaaaaaagccttatttgaagaatacttagatatatgt

SEQ ID NO: 4941 - DNA, 201 bp, Homo sapiens
ccaaaatggaggtttctaaaaagttaccatgtaacaaaaggaatttgttagattatcttttatctcttctcccacagtgcagagtttcctttgagaaatgrgatgttgcaagactttcgctcctcaggagtttaccactatcaagtgtcctagtgtgtctggagttgattccttccagtgggttcctcgtctcactgactt

SEQ ID NO: 4942 - DNA, 201 bp, Homo sapiens
tttatagttttagatcttacatttaagtctttaatccattttgagttggtttttgtgtatggtgagagaaagaggtctactttcattcttctgcatatggrtatccagtttcccagcaccatttattgaagaagtttcctttccctattgtatgttcttggcacttttgtcaaaaatcagttgactgtaactatggattta

SEQ ID NO: 4943 - DNA, 201 bp, Homo sapiens
tttcctgtagaaagttctgcaaaaatgggttaaaagaggtgactgctgcagtaattttgaattttgaatttagatatgtcctggggatcttctttgtaccrtgtagcctctggcttaggctgtttgattgtttttctttcgtttttcacagagttcttggcccatcccaccaatctagcacatgagcttaattcggttttg

SEQ ID NO: 4944 - DNA, 201 bp, Homo sapiens
gaaatgcttaggtgggaaaaatatgagtgtcatataggatactaaatttgagatggatactaaatttgatcagaaattcaggtagaattttgagtaaggtwtaataatgtgaatctctagagagagataatttaaaagatatgggcatcagcattagatagtatataacagatgagatcatcaaagaagggtgtttacaga

SEQ ID NO: 4945 - DNA, 201 bp, Homo sapiens
agtaatttccaatgaggcataattggaaaaacagctgaaaggataagggtagcagtgagagggggctatggagagaaacagaaaaaaagagaagaaaaagracaggaatgactgaaacatattttctcactttgagaagaggaaaagaaaataagcaatattaaactgtctatacataaatttaaaggtgactgaagatat

SEQ ID NO: 4946 - DNA, 201 bp, Homo sapiens
gctttgcccttagctgttcacctttttcagaccctgacttcattcatattggtcgagtatcaccttctcaagagtcttctgcctcatcctctgctttgttkgttttttttatcatagcatgtatctatgcctaatgctacttacttgtttatggtctgtctctccacctcatatgtaaattcctggagaatagaaacttca

SEQ ID NO: 4947 - DNA, 201 bp, Homo sapiens
aattttgagtaaggtataataatgtgaatctctagagagagataatttaaaagatatgggcatcagcattagatagtatataacagatgagatcatcaaaraagggtgtttacagaggcaagaagatgctctagggcttcctggaggctccagagccttgaggcacttccatattagatgctgggtaaaggaggaaaagtc

SEQ ID NO: 4948 - DNA, 201 bp, Homo sapiens
taggtcaaatgcttccttgtcaagtaaagatgtctgtggaagttaatgtcctttcttataggtagtatctacatattcccttaagtgggaatgagaatttsctttgggaaatgactgcctatatcacaaaatcccagtgaactcagatgagacgtgattctagatattgtatcttaatgacccctcttcccactgtcttca

SEQ ID NO: 4949 - DNA, 201 bp, Homo sapiens
ttttagaattgtgatgtgggctaactgatgtaatatatgtaaaagatcaaaactatcaggacctttcctttcaaatggcaatgtttccacaaaaatgtctytgggtctcacccctccctgccaactaccccagctaatgataatctcatcttcctttgaattcttatacactttacctgtctctcaagaacttcactattt

SEQ ID NO: 4950 - DNA, 201 bp, Homo sapiens
aaggaaatatggacgacttatttgaattcataaattaaaagcacagttggaatatatttggatcttctcccaaaacctgtacaaacattctgaactaaacmcaaaggaacctaagactagattttatttggccaattatttaaatagttaatgactttttgtatcgaagcttttttttcatttttttaattatcaagtgtt

SEQ ID NO: 4951 - DNA, 201 bp, Homo sapiens
ttataaggttttaatgaaaatttagtggtggtaacaattaattgaattgttaattagacctcaataatcaggcaaatttcctcggctgacatcatttttcyctgtatctaggtccattttccaggtcctactttgtatgcaagtatctattttgtacattacattttaattagtgttgatgaagttatctaattagcttct

SEQ ID NO: 4952 - DNA, 201 bp, Homo sapiens
tgcatcaaataattttaaaaaattagttactaaagaattacatgcagtacttttttctctttgtttattgtaattgtaatttctgttgggagattaagagyggcgctcactggattacctcacattaccaactgtgagatgctggggaaagctactcacgcaaatcagtattcctgcttttgaacactaacaattttaggg

SEQ ID NO: 4953 - DNA, 201 bp, Homo sapiens
agtttccttatctgtaagatgggtgatacggtttggctctgtatctccacctaaatctcatctcaaactgtaatccccacgtgtcgagggagggaggtgaygggagaatgagggtggtttcccccatgctgttcttatgataatgatggaattctcatgagacttgatggttttaaaagtggtagtttgttcctgctgtct

SEQ ID NO: 4954 - DNA, 201 bp, Homo sapiens
cctctgtttagcgatgtgttgaagccgattgctcatggctcttcccaactctcttcagtgtgattgccttaataatttgaaatatgctacagtaggagtaytcaaactaaggagatgacaaacactacaaatcagagatgttcacttggagaaggttactaaacatttaccagcatatcacagctgccatcccaggaagag

SEQ ID NO: 4955 - DNA, 201 bp, Homo sapiens
agcacctcttaaatcacatcacacggcaactgccttctccacctacacacagggcgggcctgcatgcataaaacaggatgctggcccagggtgaaacggaraaactcttttccccatctgatgactaatacttgtctctgctttcagaaagggaaagcaccacatacaaacctcaccaatgcattttcctttgcttgtttt

SEQ ID NO: 4956 - DNA, 201 bp, Homo sapiens
ctccttcatctttaattagctattatgttcttaaatatcttcaagagttgtatctaatacacagtgatttccatgctcatttgaccaggagccattttttyttttttaaatggagaactaggtctaagtggccatagggctcactttgaacatacaaggttatgggaacatttttaaacattaatccaatttaataaatct

SEQ ID NO: 4957 - DNA, 201 bp, Homo sapiens
ctccatgcagtgtacctgctttctgcttggcctcttgagtattcattttcatgacatattgctgccttatctgtttagcaaatctggcagggttgtcccayggtatgttgaacatttcagaatctgacccacacatcatcccagaaggtttcagtttccctttttcatcaacctcagagagcttcaggctctcaaaagtaa

SEQ ID NO: 4958 - DNA, 201 bp, Homo sapiens
gcattaacactgttcattttagaaatatctttcttgtatttcttataatatgaattacccagcaagctttcttgcaaagcagaaagcaaaagcaatgttamccatagcccagtttaaaatgttattaaaagtagtggagttgaaaataatgatatttcttcactgtatttggcaattaaaactatattatttatctttttt

SEQ ID NO: 4959 - DNA, 201 bp, Homo sapiens
cttttcttttaaaacaacacacacacacacacacacacacacacacacacacacacacacacacaaatggcattaccttggctggtttccagtgtttcggwgtttggactggaggaagctggaaggtgtctgtgaaaactactctcatttctctttgtctctcttttggaggaggctctgggttgcttgtggcttcatcat

SEQ ID NO: 4960 - DNA, 201 bp, Homo sapiens
atgtgaatctctagagagagataatttaaaagatatgggcatcagcattagatagtatataacagatgagatcatcaaagaagggtgtttacagaggcaaraagatgctctagggcttcctggaggctccagagccttgaggcacttccatattagatgctgggtaaaggaggaaaagtcaacaaaattccaaatacaaca

SEQ ID NO: 4961 - DNA, 201 bp, Homo sapiens
tgaatctctagagagagataatttaaaagatatgggcatcagcattagatagtatataacagatgagatcatcaaagaagggtgtttacagaggcaagaaratgctctagggcttcctggaggctccagagccttgaggcacttccatattagatgctgggtaaaggaggaaaagtcaacaaaattccaaatacaacactg

SEQ ID NO: 4962 - DNA, 201 bp, Homo sapiens
atactcagtaagaaagtttaattaaccaaataacttaaattcaaataatgcatcttaaacattttttgatttatgtgtactataatagtgtcttacacacacacacacacacacacacacacacacactttaacttacccagagactcatgttggggctgagccttcatgatgctctcctgctctaacagctgtctattat

SEQ ID NO: 4963 - DNA, 201 bp, Homo sapiens
tactcagtaagaaagtttaattaaccaaataacttaaattcaaataatgcatcttaaacattttttgatttatgtgtactataatagtgtcttacacacacacacacacacacacacacacacacactttaacttacccagagactcatgttggggctgagccttcatgatgctctcctgctctaacagctgtctattatc

SEQ ID NO: 4964 - DNA, 201 bp, Homo sapiens
catcagtcatgaggaaaggtacatgaccagatacagaggaaattttaaaacatatttaagtgaatagtgtaaagcacattgtatcagatttaaaactccartaaaatacttattaagacatattcattaagaaaaaagctgatgacaaaaattggcctcagaaatacaaaaatctagttaaatctacaagcatgaaagaaa

SEQ ID NO: 4965 - DNA, 201 bp, Homo sapiens
ttagaaccaaaggaaaagagttttgcttgatgaaggaaagaaggtaatggtatagacattattcagtttttcctaccagaacccactgagcaattgtggaraaagtgatggggtgatggggcactgagcatcaaacaggtttttcttttttcccctgggtgactcagagtcatcccattctccctctcccaatccttcagc

SEQ ID NO: 4966 - DNA, 201 bp, Homo sapiens
cactttcataagtaggtgatgaaggactctctgtggaagtgacatttgagcgaagatctcaaaggcaagagtcatacacatgagaagcagggaaaatgtaktgtgtgtgtgtgtgtgtgtgtgtgtgtgtgtgtgtgtgtgtgaagatcctaaggcataagaggctgcgtgtgttccaagaactgaaaggagatgagccca

SEQ ID NO: 4967 - DNA, 201 bp, Homo sapiens
ttaaaatagtttctgaagattttaaccacaactgaatcaaaactaaccagcctgtaatttcctggtatgtccgtatggcttttcttttaaaacaacacacacacacacacacacacacacacacacacacacacacacacacaaatggcattaccttggctggtttccagtgtttcggtgtttggactggaggaagctgga

SEQ ID NO: 4968 - DNA, 201 bp, Homo sapiens
taaaatagtttctgaagattttaaccacaactgaatcaaaactaaccagcctgtaatttcctggtatgtccgtatggcttttcttttaaaacaacacacacacacacacacacacacacacacacacacacacacacacacaaatggcattaccttggctggtttccagtgtttcggtgtttggactggaggaagctggaa

SEQ ID NO: 4969 - DNA, 201 bp, Homo sapiens
cctctgggcatgcaggcagtgccatccttgccttgcaaagcaggggaataggcaaagcgtgaacattttcttttcttttcttttcttttagatggaatctygctctgttgccaggctggagtgcagtggtgcaatctcagctcactgcaacctctgcctcctgggttcaagcaattctcctgcctcagcctcctgagtagc

SEQ ID NO: 4970 - DNA, 201 bp, Homo sapiens
gtggtgcaatctcagctcactgcaacctctgcctcctgggttcaagcaattctcctgcctcagcctcctgagtagctgggactacaggtgcgtgccaccayacccagctatttttttgtatttttagtagagatagggtttcactatgttggccaggatggtctcgatctcttgccgtcgtgatctgcccacctcagcctc

SEQ ID NO: 4971 - DNA, 201 bp, Homo sapiens
gaggctgacatgggcagatcacaaggtcaggagatcgagaccattctggctaacatgatgaaaccccatctctactaaaagatacaaaaatttagccgggygtggtggagggtgcctgtagtcccagctacttgtgaggctgaggcaggagaatggcatgaacccaggaggcagtgcagtgagctgagatcgcaccactgc

SEQ ID NO: 4972 - DNA, 201 bp, Homo sapiens
cttggatctccatcagcaaggagtgttggtatgggcttttggccagcagaagaaatatttttattacatagaactggctgctacaatcatatttgtgtgaytctaactgtaaaataggttgaaaatgtatgtttaaaatgggcatacgttgttatataataaacaagaatactattaacgaccatgctatgcactaatctt

SEQ ID NO: 4973 - DNA, 201 bp, Homo sapiens
gagctcttcatatctctccaaaccctaacataacaaaacaatcaaacaaaaaaacctccctatcacaaacaataaaaactaagttcattctactaaatttgtcagtcagtctgaagttggccatttctcccagtcatcataacttaaaatcctcccccattattctctcagatatgcaatcacagttgccctcttccaaga

SEQ ID NO: 4974 - DNA, 201 bp, Homo sapiens
agctcttcatatctctccaaaccctaacataacaaaacaatcaaacaaaaaaacctccctatcacaaacaataaaaactaagttcattctactaaatttgtcagtcagtctgaagttggccatttctcccagtcatcataacttaaaatcctcccccattattctctcagatatgcaatcacagttgccctcttccaagag

SEQ ID NO: 4975 - DNA, 201 bp, Homo sapiens
gctcttcatatctctccaaaccctaacataacaaaacaatcaaacaaaaaaacctccctatcacaaacaataaaaactaagttcattctactaaatttgtcagtcagtctgaagttggccatttctcccagtcatcataacttaaaatcctcccccattattctctcagatatgcaatcacagttgccctcttccaagagc

SEQ ID NO: 4976 - DNA, 201 bp, Homo sapiens
ctcttcatatctctccaaaccctaacataacaaaacaatcaaacaaaaaaacctccctatcacaaacaataaaaactaagttcattctactaaatttgtcagtcagtctgaagttggccatttctcccagtcatcataacttaaaatcctcccccattattctctcagatatgcaatcacagttgccctcttccaagagct

SEQ ID NO: 4977 - DNA, 201 bp, Homo sapiens
taagatatgcatggcaagttaaacaataggctttttagagggtgctttgacttgacagttacagtaacaacaagtgtaaattaaaaaaaaaaaaactttcttttttttttttttttttgagacggagtctcgctctgtcacccaggttggactgcagtggcgcgatctcggctcactgcaagctccgcctcccgggttcac

SEQ ID NO: 4978 - DNA, 201 bp, Homo sapiens
ctgacttgggaagattgcttgagcctgggaggtcaaggctgcagtgagccaacactgtgcaattgcactgcagcctgggtgacagagcgagaccctgtctaaaaaaaaaaaaaaaaaaagtacacacacagagccaggaagaatgcatgcatgcccagaaaagacctgggaagattttaagcctttatcctgggctgttgc

SEQ ID NO: 4979 - DNA, 201 bp, Homo sapiens
gaaaacttacaatcatggtggaagatgaaggagaagcaaaggcacatcttacatggcagcaggtgggaaagcatatgagccagttcaggggaacagccttytataaaaccataagatcttgcgagattccctcactatcacaagaacaccatggggaaaaccacccctatgattcaattatcttcatctggtctctcttga

SEQ ID NO: 4980 - DNA, 201 bp, Homo sapiens
gtgctctgtagctaacaaggggattgtaaaatgcaccaatcagtgctctgtaaaaatgcaccaatcagtgctctgtaaaatgcaccaatcagcactctgtraaatgcagcaatcagcaggatcctaaaagtagccaatcgtagtgacgattgaaaaaagggcgctctgataggacaaaaacaaaacatgggcggagacaat

SEQ ID NO: 4981 - DNA, 201 bp, Homo sapiens
caatcagcaggatcctaaaagtagccaatcgtagtgacgattgaaaaaagggcgctctgataggacaaaaacaaaacatgggcggagacaataagggaatraaagctgtccaccaccaaccagcagcggcaacctgttgggtccccttcaatgctgtggaagctttgtgcttttgctgtttcactcttcacaaaaatcctt

SEQ ID NO: 4982 - DNA, 201 bp, Homo sapiens
atcgtagtgacgattgaaaaaagggcgctctgataggacaaaaacaaaacatgggcggagacaataagggaataaaagctgtccaccaccaaccagcagcrgcaacctgttgggtccccttcaatgctgtggaagctttgtgcttttgctgtttcactcttcacaaaaatccttgctaccactcactctttgggtctgtgc

SEQ ID NO: 4983 - DNA, 201 bp, Homo sapiens
tagagatggggtttcactgtgttagccaggatgatctccatctcctgacctcgtgatcctctcacttcagcctcccaaagtgctgggattacagtcgtgarccaccgcacccggacagggtccatgccatctttaagagctataacaccgtggaagcctgggcttcatgctcgaagtcagcgataccatgaacccaccggc

SEQ ID NO: 4984 - DNA, 201 bp, Homo sapiens
actgtgttagccaggatgatctccatctcctgacctcgtgatcctctcacttcagcctcccaaagtgctgggattacagtcgtgaaccaccgcacccggamagggtccatgccatctttaagagctataacaccgtggaagcctgggcttcatgctcgaagtcagcgataccatgaacccaccggcaggaaccaaatgcag

SEQ ID NO: 4985 - DNA, 201 bp, Homo sapiens
atcctacatccaagaacacctctcggtatacatatgtcttgttcacaccatgatctttgcatttctaaccttcaaaatagagtgctataatgccctgtctttgagtttttattgtgtgtgatacaaagggctaggtgtctttcagctacagggtccaaaacatatggagaatattatacctgcattctatggtcagcatta

SEQ ID NO: 4986 - DNA, 201 bp, Homo sapiens
tcctacatccaagaacacctctcggtatacatatgtcttgttcacaccatgatctttgcatttctaaccttcaaaatagagtgctataatgccctgtctttgagtttttattgtgtgtgatacaaagggctaggtgtctttcagctacagggtccaaaacatatggagaatattatacctgcattctatggtcagcattag

SEQ ID NO: 4987 - DNA, 201 bp, Homo sapiens
cctacatccaagaacacctctcggtatacatatgtcttgttcacaccatgatctttgcatttctaaccttcaaaatagagtgctataatgccctgtctttgagtttttattgtgtgtgatacaaagggctaggtgtctttcagctacagggtccaaaacatatggagaatattatacctgcattctatggtcagcattagc

SEQ ID NO: 4988 - DNA, 201 bp, Homo sapiens
ctacatccaagaacacctctcggtatacatatgtcttgttcacaccatgatctttgcatttctaaccttcaaaatagagtgctataatgccctgtctttgagtttttattgtgtgtgatacaaagggctaggtgtctttcagctacagggtccaaaacatatggagaatattatacctgcattctatggtcagcattagct

SEQ ID NO: 4989 - DNA, 201 bp, Homo sapiens
tacatccaagaacacctctcggtatacatatgtcttgttcacaccatgatctttgcatttctaaccttcaaaatagagtgctataatgccctgtctttgagtttttattgtgtgtgatacaaagggctaggtgtctttcagctacagggtccaaaacatatggagaatattatacctgcattctatggtcagcattagctt

SEQ ID NO: 4990 - DNA, 201 bp, Homo sapiens
cagccctggtataagatgacattcagtaaatacctgcaaattgactaatagatcagtctgggaagctgggcaacacagacctaattggctctgtagagacytgaatgttttcattgttgacagttaccttcatggcccaactagagaccctttacattaatgtttcaattctgaagtcaggaatgttctaccataactaga

SEQ ID NO: 4991 - DNA, 201 bp, Homo sapiens
ccactctgtgaaaaaattgtcttccacaaaaccagcccctggtgccaaaaaggttggggatcactggtgtacatgagtgcatgtccatgtgtgcacaaaakatgtgtgtttgcacagctgcctttgatgtttattcagattattaaaatatactcaatatctaaaaacactgtcaaaactgatttgcacatattgaagagc

SEQ ID NO: 4992 - DNA, 201 bp, Homo sapiens
atatattgtgagggaaaggtaccacagagattgaaaagagcaggctgtgcagagtaaataggcctaattctgttgggctagaacacagagtgtgtgagcarcagcaaaaagatggaaaaaggttttgggaaaagtaatttgatactactggagaagtaggccaaggaattgtgttctattttgcagatagtaggaagcctt

SEQ ID NO: 4993 - DNA, 201 bp, Homo sapiens
gagggctggagccaaacaaaggggaggcagcaattctgtattgcgggagaggagtaaaggcaaaagaaatctgctctggcaagtaagatctgggacctatstatgcgtgcctgtataggtgtgtgggcatgtggtgtgtgactttagtgatatatatcagggggtcccatcccctggttagggccagttcctaatctgtcc

SEQ ID NO: 4994 - DNA, 201 bp, Homo sapiens
caggcagaagacagaaggacagcattgtcctggaaattatatgcgtgcatgcgtgcgtgcatacgcgtgcgcgcgcgcacacacacacacacacacacagscctttacttctctgtaagtaggatgggattaccacatcatctccaatgacgtcaatgggagtatttgggacagagatgggggaaaacgaggaaaaaaggg

SEQ ID NO: 4995 - DNA, 201 bp, Homo sapiens
cacctacaggtttttttgcctttttagatgaagcagatccaacaagtgtatttatttcattaatctgtaagaaaattaaatttacttatgatgaaaaaagycttatttgaagaatacttagatatatgtaactttcaaatatctaggtgatctgaagggttggggaacctagcaagaaagaggtacccatgaattaggtaa

SEQ ID NO: 4996 - DNA, 201 bp, Homo sapiens
tcaataataaaccatttagtattataactatcctttgagatcatcaggaatagcctaggtttgaacctcaactttttaacttaatagctgcctctagactragagtccatttttgtaaaatggaaacaataaaacatacttcctaggcttgttgtgaaaaccacatgaatcaatgtacttaatgtccttagcattgagcct

SEQ ID NO: 4997 - DNA, 201 bp, Homo sapiens
tccacctaaatctcatctcaaactgtaatccccacgtgtcgagggagggaggtgacgggagaatgagggtggtttcccccatgctgttcttatgataatgmtggaattctcatgagacttgatggttttaaaagtggtagtttgttcctgctgtcttgtgaagaaggtgcctgctttcccttctactatgactgtaagttt

SEQ ID NO: 4998 - DNA, 201 bp, Homo sapiens
agaatgaggcatggttttctggggctgcttgatctggtttccttggtcatgacaaagctctgggaagagtcttaagggatgagattgctgcagccactttmccttcttcgggaagctgaagctcctacacagatgaaggaaggggtaagagcacagcagggaagtgggctggagcccctgaactaagctgaccttgaagcc

SEQ ID NO: 4999 - DNA, 201 bp, Homo sapiens
atttgataggggttactatccaaaatatataaaaggcccagacaactcaataacaagaaaacaaaaaagtcaattaaaaaatggacaagaaaaaaaatttwaaaaaaatgggcaagagacctggggtggatagacatttctcaaaagaagacatgcagatagacaacagatatatgaacaatgctcaacattgctaattat

SEQ ID NO: 5000 - DNA, 201 bp, Homo sapiens
gatgttcacttggagaaggttactaaacatttaccagcatatcacagctgccatcccaggaagagctgcatgtctaagactgacttagttatgattttcaytgggaagaccaaagctgtctcagagaaaatattaaggagggcaaagcagatttattccctctattgcatacaaaccccacccccatcccaaagacacact

SEQ ID NO: 5001 - DNA, 201 bp, Homo sapiens
aaatcatcacggtcgtcctggggtttctgattcagtaaatctaggttggggcctaaggattttcatctcttacaagttcccaagtgatgccgaaacttctrgtgcaagggcgccagaagtcccacttgggcgcccctctctcttgcaggagagagctgttctcctttctgtttcttttaccagttaaacctccactcttaa

SEQ ID NO: 5002 - DNA, 201 bp, Homo sapiens
acattactaatattctttcttcttgaatgtgaacgcacacttcaaaataaaccattacctgcaatcagttttgccagatcactagcagatgattaataaartacgttgcagataagaagaggaaaaaatagaataagcagaaaaaaagtaaaattaagtgttatttaaaaattgcagagatagtgtcactagccatttttt

SEQ ID NO: 5003 - DNA, 201 bp, Homo sapiens
ggaatgtaattttgataaatttttgaagtcggagtatacaattgtgaaatcagagaactttatttctgagattcattttaaatatgaacttatctcatgcyttcattttatagttgaggcccaggaagattatgactacgtcacacattttgggagctaaatatgttcaagatttccatcactcttagatgacaatctaca

SEQ ID NO: 5004 - DNA, 201 bp, Homo sapiens
tgctgtcatgttccataatctgggagagggctataacctgacatctgcctcctgcagcaactactgcttgattcaccctaatcttttgacctctgtttagsgatgtgttgaagccgattgctcatggctcttcccaactctcttcagtgtgattgccttaataatttgaaatatgctacagtaggagtattcaaactaagg

SEQ ID NO: 5005 - DNA, 201 bp, Homo sapiens
ctcttcctcctcctcctcttcctcttcttcttccatttagacttactaagctgcccctttcagaggacagcctggagtcctggagtgggatttctgctaawgtcctgctagacaaagaatgtattcagtgtatcagccctgtcttcatttaccctaagttcttggtttctccacaattatcaaaaagttgtagtgtttctc

SEQ ID NO: 5006 - DNA, 201 bp, Homo sapiens
ctggagatactacaaaactgtggtttatcagctcaagcaatgtgtgtgtgtgtgtgtgtgtgtgtgtgtgtgtgtgtgtatgtgtgtgtgtgtgtgtgtgkggtatggtgtgttcaattatggagcaaagcacatctgttttgataaagaaatcctaggcttcgcagtcacttcaggtcctaaccccactctcaaaatcac

SEQ ID NO: 5007 - DNA, 201 bp, Homo sapiens
ttcagttaatgctgatgggtctgtcccacaaaactgacagtaatatttactgtagtaaattagcaaggggctattctaatcatggctgtcattgtcactaytattatcatccttatcattatcaatattacatttctatttattacattcttactatagtccaaatattctatctcgtcaagtcttcacaataactacaat

SEQ ID NO: 5008 - DNA, 201 bp, Homo sapiens
ttcgggaagctgaagctcctacacagatgaaggaaggggtaagagcacagcagggaagtgggctggagcccctgaactaagctgaccttgaagcctgcctrgacttctacgtctgcatgccagtacatttcctaattgtttaagccaactttaatttttgttgttgttaacttagaagatgaacaaattgatactgatatg

SEQ ID NO: 5009 - DNA, 201 bp, Homo sapiens
ggctgggttaagaggtgcatgggttgccataaacttttttctgtgcatttaatgtttcctgtagtgtcacagcaaaggaatggaataactgtcatgccaayagttggtctcacaagtatagatgcccttttgctacatgtaaaaatgtgacttcaaatgttaggaagaaaaaaaataccagcttcagataatctgcaaata

SEQ ID NO: 5010 - DNA, 201 bp, Homo sapiens
ttctgtcccagccttcctcagcagcagagggaaacatcagtaaaggctgcaggtatcactcacaaacactgggtagaggcagcaacgagagcacaggtaargtacagaagagtgaaagggtcctagcatttctctctgcaccaggtataaattggtgcctaaaatggggctcggctctgccccttgagctcacagcctatg

SEQ ID NO: 5011 - DNA, 201 bp, Homo sapiens
gatgtttccaaatattttaaaatatgtagatatttatactacagaagaattaaaagctttatcataaagtaaattcttgataaaaattaggcaaatactawtaggagttttcaatcccttgagtattaggaaactgaaatcatcattgcagaatgaaattaatgaatactggagtagtgggtcgggctgggttaagaggtg

SEQ ID NO: 5012 - DNA, 201 bp, Homo sapiens
agcagatccaacaagtgtatttatttcattaatctgtaagaaaattaaatttacttatgatgaaaaaagccttatttgaagaatacttagatatatgtaaytttcaaatatctaggtgatctgaagggttggggaacctagcaagaaagaggtacccatgaattaggtaaaatatttatagttacttcgtaagctgtcagt

SEQ ID NO: 5013 - DNA, 201 bp, Homo sapiens
tgtgtgctttaaaattgcatctatgtggcaaaacaggactcataactttgtcagagttatggtttagtgtctaatcacatggccagaacctgagcaaacaygacagggaccagtcagacaataataacacaaactgagaatgcctacagagaaggatgcactcattgtgagctgcagcaggggggcagtaagatgctagca

SEQ ID NO: 5014 - DNA, 201 bp, Homo sapiens
gaaggaagagaaacagtgggttagggttgctaggaaagcttgctgcaagacatgctttaagagagcctcaaagattggatggatgagcaaggagtggaaasgtagaagttcatgtcaagcaaggagactgggtgagagagcagaaaagagagagataagtcatctattgaaggtgtattagatgccatgttttatggaaat

SEQ ID NO: 5015 - DNA, 201 bp, Homo sapiens
tcacagtgaggccagtgtagatgagggagaatggaacatgacagcttgataggtgatggctcaaaaagtaggtggcagacagtttaggttcttattgttgytttttgttttgttttgttttttgagacaggttcacccaggctggagtgcaggtgattctcccacctcagcttcccaagtagctgggtctgcaggcacgtg

SEQ ID NO: 5016 - DNA, 201 bp, Homo sapiens
atacaaggttgttggtgggatcaaaatttgacatactgtgaaagtattttggactctaaaaaccatcttccaaatgtgtgttatttatcattcttaaattstttttaggggttccagcaaagagcattgcctgtttgagaaaatgtcatgttccagaaaatattgattcaaaaaagactgatggaccatctgaatgaatat

SEQ ID NO: 5017 - DNA, 201 bp, Homo sapiens
ttaaaaatgtttaaagtttttatagatgagtctcactctgtggcccagactggactcaaactcctgggctcaagaaatcctcctacctcagactcccgagwagctgggacaacagctgcatgccaccatgcccagctaaaagtatttttaaagaggacccttataaatccttatttacttctgtaaataactttttcttat

SEQ ID NO: 5018 - DNA, 201 bp, Homo sapiens
gtgtggatgaaggctcatttcctggttggtaggcatggtgaccaccatcatgaaatgaaaagaaacatgaagtggaatttaaaaacttttaggatggttgrttctgatttcagataaattggataagtaaacccctatcaactagtagctttttctgatttaccaaagtgataatgtcaaacctaaaatttgcacatttat

SEQ ID NO: 5019 - DNA, 201 bp, Homo sapiens
tttattttagaaatggttactactgctgtttgtttcttaaggtgttccgtcatattgaccccttacatgacataacaaagaagaataatgtatattagtckccatcacggccatgaggactagtataatgggacactgcaaatatcctttgaccactgattaacttcttttcttcccttacttgcttaattaaatgtctac

SEQ ID NO: 5020 - DNA, 201 bp, Homo sapiens
tagagtctttgcttcttgaggttagagtctttataatattaatattccttcctctctcttcatcgtctgatagtgcctggcactagtgctttaacgagtaygtttgttaatattcggtaaaaccggctactatataatgcaggcaataagcgtatattttcaaatgtgtccatatcctcaagtaggattcacatgtgggaa

SEQ ID NO: 5021 - DNA, 201 bp, Homo sapiens
tatagctgctctcaatcaatatgtaaagttttcatatcttattttccccttttttactaattggtgcttgtcttttattctgtattaatattattggttaygttagttatttagttaagtttttcattaaaaatgagtacctattgtgtggcaggcactgtgcaggtactaggaaaacaaaaataaacaaaatagataaga

SEQ ID NO: 5022 - DNA, 201 bp, Homo sapiens
atagctgctctcaatcaatatgtaaagttttcatatcttattttccccttttttactaattggtgcttgtcttttattctgtattaatattattggttackttagttatttagttaagtttttcattaaaaatgagtacctattgtgtggcaggcactgtgcaggtactaggaaaacaaaaataaacaaaatagataagat

SEQ ID NO: 5023 - DNA, 201 bp, Homo sapiens
aggtaatcaggaggatattgtggtggaattagagggtggtagtcatataaaagtaggccgggtgtggtggctcacgcctgtaatcccagcactttgagagkccaaggtgggtggatcatgaggtcaggagattgagaccatcctcaccaacatggtgaaaccctgtctctactaaaaatacaaaaaatcagccagatatgg

SEQ ID NO: 5024 - DNA, 201 bp, Homo sapiens
gcccctggattccattaaaattctgagcaactgggctattgcctatctcccactctagcagaggggaagagggtaactacagatggtagatgaatgggttytaagaacagtggacccaacgcacactgacagagaagtacattctagaaaaaaagggaattgtgtaaaagcctaaatcagcactgctcaatagaaatataa

SEQ ID NO: 5025 - DNA, 201 bp, Homo sapiens
gtactctgagcacccagcatctggcaggaactcagtaaatatttccttttgattgaatgagaagaatctacatcatatattaaacgtggaaattaacctasagccatatagagaaattagaaatgtgggaaaaaacctacaacaaagccttattctgtggcaagcataagacaactttttattctgtggcaaagagtacca

SEQ ID NO: 5026 - DNA, 201 bp, Homo sapiens
tttgggcttctagagggagaagctgattgtgcctatgaaggacaggccagtgtttttctttctttcaggagcacagctacttacatttttgctactagttycatcttgccttgggctggtgaaggtgacagcatgaacgttccattttgatttaggggaaaaccatacagccaattcagttcagcatttatataaatacat

SEQ ID NO: 5027 - DNA, 201 bp, Homo sapiens
agctcagtataaatttagaccaatatccttcttttgcacctcctcatatagcactaatatagcactgtttttaatgctagtctacaatgacagtaatagcytgagccataagtgggagaggaggggaaatgatgttcactgagcattgattttgaaccaagctctgtactggacatttcattctgttttgcagatgaatgt

SEQ ID NO: 5028 - DNA, 201 bp, Homo sapiens
ctcgttctacttcattccagctcaagacatctgtaagaaagcagaaccagtgctgctggaaatgttcttattagcacatggtacagggttgacagagggayaaccagggagtctgtctaccagaaagacaagagagtcacgccacaatggctgttgagctgattttaaacattggctccccagtctgccgcaaatatcaaa

SEQ ID NO: 5029 - DNA, 201 bp, Homo sapiens
agtccacttgaggggtggtgggggactgggctgggatggtagtgaggagtatggtgggattgattgcagtgtgtgagaaaacagagacagcggtggggcgyggtggctcgctcctgtaatcccagcactttgggaaaccgaggtgggtatatcacgaggtcaggagttcgagaccagcctgaccaacatggtgaaagccca

SEQ ID NO: 5030 - DNA, 201 bp, Homo sapiens
tggtagtgaggagtatggtgggattgattgcagtgtgtgagaaaacagagacagcggtggggcgcggtggctcgctcctgtaatcccagcactttgggaarccgaggtgggtatatcacgaggtcaggagttcgagaccagcctgaccaacatggtgaaagcccatctctactaaaaatacaaaaattagctgcgcatgat

SEQ ID NO: 5031 - DNA, 201 bp, Homo sapiens
catatggagaaggctaaacatgataccttcaccctcattatttgggaacaggggaaatcaatggtaattgggaaagacaaacttttgggattttgctgaargtcaaaaagctagttcctatgttgccaggatttcctggtgcacaaaaatgactgattcttcattcacagtgacaaactgccaaagtctcatatatattca

SEQ ID NO: 5032 - DNA, 201 bp, Homo sapiens
tctccctctctgagagacagagtgagggcagaagggacacaatgtgagctgcgattctgtggtctagcccgtctgctctgggggatggctcccgcagactrggtgggacgagatcttcttcagttgcaacaacctgttgaaatcaacaatgagaggaattggtgtaagggtccgctctttagtgatactcactgctcattg

SEQ ID NO: 5033 - DNA, 201 bp, Homo sapiens
aaatcaacaatgagaggaattggtgtaagggtccgctctttagtgatactcactgctcattgctgcattcccactgcttagtaagaaccagtccatttctrggacccaagtaccactgatgacacaaaatggcaggaaactatcagtgatcaccaagtaaaaggaaaagtgttcgcaatccatgcattaaggtagatataa

SEQ ID NO: 5034 - DNA, 201 bp, Homo sapiens
tgttgctttaagtttagtaaaataaaacaagaaaggataagataaataaaataatgatactgcaagttctagagagcttttgtacttttatcatttattgwtataataaaactattgatcttctaaaaacttcatggagcaattaaaggcaaatattagtgtgattatctaattggttagaaaactaagacaatcaaaaac

SEQ ID NO: 5035 - DNA, 201 bp, Homo sapiens
gagtctgaaaaggactttaaaataaaccttttatgtattaacagaaaaaatgtgtcacatccatgcactaaaaacaagaataggcaattgtaaaaaaaaaktagagaatttacaaattaaaaacattactgccaaaacaaaacttcaatagcagactggactccctgaagaaagcattagtaggaagttaagctggaattc

SEQ ID NO: 5036 - DNA, 201 bp, Homo sapiens
aaaaaagtatcagattgacatcagacttcttaacagcaacattaaaaggaagacgacaatgcagaaatggcatccaaatacttttctgtgcagattcactrggttttaagtcatttctgctacttattacttgaacaaacttgaaaaactttttgtgcctcagtttccttatctgtaagatgggtgatacggtttggctct

SEQ ID NO: 5037 - DNA, 201 bp, Homo sapiens
tcaggatgcaaacaaagaaacactcgaaaagaaatgtatagccttaaataaagcaaaaagactaaaaataaatgaagtaagctttcaattaaaatgaaatmcaaaataaatccaaagaaagtagaaagatggaaatgacagagatgagccagacacggtggttcatgattataatcccagtgctttaggaggcttaggtgg

SEQ ID NO: 5038 - DNA, 201 bp, Homo sapiens
tttcctttcacctgttctacctctacagcaaaacactaagaaatcctaatagactattgcttctataatacccacaagttttatgagctgacaagcaaatkgtagctcagatacctctattacttgggcttttgtttccagaagtaggaaagcattgtgatggctgggtctgtctgcctggaagcaaagaagaatgaaata

SEQ ID NO: 5039 - DNA, 201 bp, Homo sapiens
tggggaggggcaaggacaaagggagtttggagtctctagtctttcccagaaccagctctgccttctatcacagcttttctacattcagcttcattttccaygcagagaacaaggctgagattcaccaggatatcagacttaagtgtggtgtttctacatagtgacatctaatgccttgtgctgagagtctttataactcaa

SEQ ID NO: 5040 - DNA, 201 bp, Homo sapiens
ttcagagcactcacttgatatggtccttccctaggactttgctttcatttcagctcccttaacgctgaaatatatcgtcctgcagggtattcaacactccraggcccctgttagttgggataagggtcaactagaaagagacctgagagattttctgtagcagagggatgcctgaatactttccacaacatcttcgataag

SEQ ID NO: 5041 - DNA, 201 bp, Homo sapiens
agtcaagtcatcctattaggatagaccttcttggccaaatatattaaaaataagattttggggccaggcatggtggctcacgcctgtaatcctagcacttygggaggccaaggcaggtggatcacctgaggtcaggagttcgagaccagcctggccaacatggcgaaaccccatctctactaaaaatacaaaaattagctg

SEQ ID NO: 5042 - DNA, 201 bp, Homo sapiens
caggaagattatgactacgtcacacattttgggagctaaatatgttcaagatttccatcactcttagatgacaatctacataggaccagtttttctgccawatcactttttaaatcaacttagtgtctgctacataactgattacaaatgcagtttatctggttctccttcttatattgctgaaaacagagtggatcaatg

SEQ ID NO: 5043 - DNA, 201 bp, Homo sapiens
agtgttataaaaattgggatgtggctgcataagatacaaaacactgtgcaaatgatattattaataaataacaataaaagcaacagcatatggcagaaaamacttgggcatctggtaacacaatcttacaccaaattctagttctatttcctaaagtatacagtggctttttgcttcccttcaacagaagtcatctaggat

SEQ ID NO: 5044 - DNA, 201 bp, Homo sapiens
aatcttacaccaaattctagttctatttcctaaagtatacagtggctttttgcttcccttcaacagaagtcatctaggataatcttcttagatgaagaccycaaggctcaaaatggctaaatggtagcatgattggaacttcatcccacaacttgctagtctaaggctaggaagatagcaccccagtgatttctcataata

SEQ ID NO: 5045 - DNA, 201 bp, Homo sapiens
tgctcccttaaaaagtgttgtatgcacttatgtcaatgggtgtgaatcccgagtatggattatgtagtaactatgtatttattgcattaaaaatttaaaawacatagtgtgcacttactttcctaacatttttctcctttatttggccctggttatactattttattaatattaagacatgatcttattttagaatgtgac

SEQ ID NO: 5046 - DNA, 201 bp, Homo sapiens
acttatgtcaatgggtgtgaatcccgagtatggattatgtagtaactatgtatttattgcattaaaaatttaaaatacatagtgtgcacttactttcctamcatttttctcctttatttggccctggttatactattttattaatattaagacatgatcttattttagaatgtgacattctgcagggtaagaataattgtt

SEQ ID NO: 5047 - DNA, 201 bp, Homo sapiens
cttatgtcaatgggtgtgaatcccgagtatggattatgtagtaactatgtatttattgcattaaaaatttaaaatacatagtgtgcacttactttcctaayatttttctcctttatttggccctggttatactattttattaatattaagacatgatcttattttagaatgtgacattctgcagggtaagaataattgtta

SEQ ID NO: 5048 - DNA, 201 bp, Homo sapiens
gtatggattatgtagtaactatgtatttattgcattaaaaatttaaaatacatagtgtgcacttactttcctaacatttttctcctttatttggccctggktatactattttattaatattaagacatgatcttattttagaatgtgacattctgcagggtaagaataattgttatactttaatactgatagcacatggta

SEQ ID NO: 5049 - DNA, 201 bp, Homo sapiens
attgcattaaaaatttaaaatacatagtgtgcacttactttcctaacatttttctcctttatttggccctggttatactattttattaatattaagacatkatcttattttagaatgtgacattctgcagggtaagaataattgttatactttaatactgatagcacatggtacaaaaaagcactacatttcacaaaagcc

SEQ ID NO: 5050 - DNA, 201 bp, Homo sapiens
aaatttaaaatacatagtgtgcacttactttcctaacatttttctcctttatttggccctggttatactattttattaatattaagacatgatcttatttwagaatgtgacattctgcagggtaagaataattgttatactttaatactgatagcacatggtacaaaaaagcactacatttcacaaaagcccattaagatc

SEQ ID NO: 5051 - DNA, 201 bp, Homo sapiens
ttaaaatacatagtgtgcacttactttcctaacatttttctcctttatttggccctggttatactattttattaatattaagacatgatcttattttagartgtgacattctgcagggtaagaataattgttatactttaatactgatagcacatggtacaaaaaagcactacatttcacaaaagcccattaagatcaata

SEQ ID NO: 5052 - DNA, 201 bp, Homo sapiens
tgaattacttacagctgcctaggatgaatcatttttatattaagaaactaaaatgaaagaaaaattctagtgtctctatccagggcaaaatgattgtgggsgagttggggtaggaaactatgtgctctatgtgagtcaccaaattaactgatctgattttattaccactgtgtttcactcatgaccataatcactttttat

SEQ ID NO: 5053 - DNA, 201 bp, Homo sapiens
gaaaggcaccgccggcagcagcaccttactgaccaatgtaacgattggtgtggtcgtcttctcctctccgctttaactgggtggtctttttcactggtgcrtttgcctcaggctgatcctttccctttcctttggcaggcttggcacttggagcctttttctccttgggagattttgctttccctttatccttttctaact

SEQ ID NO: 5054 - DNA, 201 bp, Homo sapiens
tggctctagtggtgatgaaactgccaccctttgtacctgctcctcagcagaaggggacatcatcagcaggggcttcaagtgtcactcacagcctggggtgsaggcaggtacagactatgaaatggcctcacccatttctagaaagtgaagaaaaatccaactggctagagcatatgtaaatggtaaaattaactcctttga

SEQ ID NO: 5055 - DNA, 201 bp, Homo sapiens
tgggtgaagtttcttgagaaatatgagaattgagtccgagatcatgctagagactccaatgcttaccaatgggtatagggagagatgccagcagaaagagrcagcgaagtggataaaaagatagggaaaaatatatagtgtgaagctagagaactaagaaaccaaaaaggtcaaaaagacaagaattggcagttgtaggta

SEQ ID NO: 5056 - DNA, 201 bp, Homo sapiens
aaggtatgtatatatgtaaagtcaagagatgttatgcttgcaggctgatggaatgatccagtagagaaggagacagtgaagatacggggctgaggagactraagttctctagaagtcaacatgggataagaacaaaagaatgtgccaatgactggaccttgatagaaggagagggaatttcttagtttcataactaagaac

SEQ ID NO: 5057 - DNA, 201 bp, Homo sapiens
ttaattaacatttgaaagacaacatctacacagatatgttgatgttaaaaagttgaggagtcagtcactaaccttgtagaaatttcggaatctcactgtgkgttcaggaaagatgaaaagattagctaaagtcctcttttctttttttcatattctaatccacagcatggtgtcagttttacatactttctgcttgttttc

SEQ ID NO: 5058 - DNA, 201 bp, Homo sapiens
agcacatggatgtgaacctggtagtagtttgctaacagcattttaaaatatttttcatatgcaaatatgagtctttggaaagcacacagattgatttctayaagcaaattaaatgaaaaatccaggtatgaagaaattatcagatgtgcaatataggagtagaagtgatggattgctgctgaaatattcagattattatga

SEQ ID NO: 5059 - DNA, 201 bp, Homo sapiens
gaggaagtgcccctggagaaacctggctccatttcattcaccacttgccctctttagaaaacccaccagatcgtacagtaccttcttttcattttcccgtygctgttggtccttaaatttaatctggagaagttgaaatttcaagagtttccctatcagtggtaaggttaatttctctccactatccataattgcttttgc

SEQ ID NO: 5060 - DNA, 201 bp, Homo sapiens
agatcgtacagtaccttcttttcattttcccgtcgctgttggtccttaaatttaatctggagaagttgaaatttcaagagtttccctatcagtggtaaggktaatttctctccactatccataattgcttttgctgccgttaacacctatacagaaacacaattattagaaaaagtgatgttttataacctttggcacagt

SEQ ID NO: 5061 - DNA, 201 bp, Homo sapiens
caaaacattcaaatgtgggtttttaaaggtcatggcagtctagtgtttccctctaatacaaagataatgacagcgctgaagggaagtcaacactgaaaagkgttaccccagagtggttgtggagtctcttttcctgacgacctgtgaaaacaggatattcacctatgtctggggggtttgggtgaagcctgcctggtgtca

SEQ ID NO: 5062 - DNA, 201 bp, Homo sapiens
caaatgagacttattaaaatggagaaaaatgttgccaggcaaggcctgtgtctcctgacctcttcaggtcagctctccaggcagagaggcctgccaggacyggagagaggctctacgctgaaagaccaaaggtcactcagttccaggaatgattggtgaatgaggaaattaagcttcaaagagtgcagctgaggcagaagc

SEQ ID NO: 5063 - DNA, 201 bp, Homo sapiens
tattcaacctattttggggaggtgaataacttaggattgctttggatatatgaagacctcagcaaacagaagcagaatccataagctagagcttgactcamtttaggctagcacaaggctgggcaaacaggctttcagcacacattcttttgggtagctcatttctctaatatatgattgatcaaatttacttaaagtaag

SEQ ID NO: 5064 - DNA, 201 bp, Homo sapiens
ctatgttgccatatattctatctttaaagtttattgcttaggtagcatgatatacattctgcttttatcttacatcttgttatatttgcttatatcattakaaagtcagaggaactattgccccaatgtgtgtctgtgtgtctgtgtgtgtgtgtgtgtgtgtgtgtgtttacagaattttctgtttagagtgaaaggctg

SEQ ID NO: 5065 - DNA, 201 bp, Homo sapiens
gttccaggcacttcacatattccaatccatttaattttcacctacacttttgaggtgagtattcctatcacctattttattagatacagaaactgaggccyggtgatcacacagccggtaattagtagagatgggatttgaacccaggctatctggttccagaatcctgtttctagtcaacatattgtgtggcctcacagt

SEQ ID NO: 5066 - DNA, 201 bp, Homo sapiens
tcacatattccaatccatttaattttcacctacacttttgaggtgagtattcctatcacctattttattagatacagaaactgaggcctggtgatcacacmgccggtaattagtagagatgggatttgaacccaggctatctggttccagaatcctgtttctagtcaacatattgtgtggcctcacagtgggccttttcac

SEQ ID NO: 5067 - DNA, 201 bp, Homo sapiens
cacatattccaatccatttaattttcacctacacttttgaggtgagtattcctatcacctattttattagatacagaaactgaggcctggtgatcacacarccggtaattagtagagatgggatttgaacccaggctatctggttccagaatcctgtttctagtcaacatattgtgtggcctcacagtgggccttttcacc

SEQ ID NO: 5068 - DNA, 201 bp, Homo sapiens
gagacagagtctcgctctgttgcccaggctggagtgcagtggcgcgatctcggctcactgcaagctccacctcctgggttcatgccattctcctgctttartctcccgagtagctggaactacaggcgcccgccactacacccagctaatttttttgtattttttttttttagtagagacggggtttcaccgtgttagcca

SEQ ID NO: 5069 - DNA, 201 bp, Homo sapiens
cagaggacagcctggagtcctggagtgggatttctgctaatgtcctgctagacaaagaatgtattcagtgtatcagccctgtcttcatttaccctaagttmttggtttctccacaattatcaaaaagttgtagtgtttctccagcttgatgtggatgatgttctaggctgttgttaatttctaagtattaatctgaatgaa

SEQ ID NO: 5070 - DNA, 201 bp, Homo sapiens
attcagtgtatcagccctgtcttcatttaccctaagttcttggtttctccacaattatcaaaaagttgtagtgtttctccagcttgatgtggatgatgttmtaggctgttgttaatttctaagtattaatctgaatgaaatctgcttataaaagggcttattccttgaatttccttgtcctcccccttaatctctttgact

SEQ ID NO: 5071 - DNA, 201 bp, Homo sapiens
cttttgcagtttcccctgctcgggaggctcttccccagatgaccacatagctccatcccctccttcagatttttattcaagtgtcaccatccagttttgcycccctggctactcagattagtaactcttctacttctcaccctttcctcccttttgctctgtagttcttattaccatctaacataatacatactttattta

SEQ ID NO: 5072 - DNA, 201 bp, Homo sapiens
ccctgcaggtgtcactcctgagttgaaatgtgaaggatcagtgggggtggctatgactgaggtcaggtggtatgagactggggaagagtgacgagaggagrgcagtgacccaggaagaaggactgaggccagagaaaggcagtgacccaggaagaaggactgaggccagagaaagtagcatattcaggaaactggaaagtg

SEQ ID NO: 5073 - DNA, 201 bp, Homo sapiens
gtgccagaaccaaaggaggaatgagctggagatactacaaaactgtggtttatcagctcaagcaatgtgtgtgtgtgtgtgtgtgtgtgtgtgtgtgtgtrtgtatgtgtgtgtgtgtgtgtgtggggtatggtgtgttcaattatggagcaaagcacatctgttttgataaagaaatcctaggcttcgcagtcacttcag

SEQ ID NO: 5074 - DNA, 201 bp, Homo sapiens
gccagaaccaaaggaggaatgagctggagatactacaaaactgtggtttatcagctcaagcaatgtgtgtgtgtgtgtgtgtgtgtgtgtgtgtgtgtgtrtatgtgtgtgtgtgtgtgtgtggggtatggtgtgttcaattatggagcaaagcacatctgttttgataaagaaatcctaggcttcgcagtcacttcaggt

SEQ ID NO: 5075 - DNA, 201 bp, Homo sapiens
cagaaccaaaggaggaatgagctggagatactacaaaactgtggtttatcagctcaagcaatgtgtgtgtgtgtgtgtgtgtgtgtgtgtgtgtgtgtgtrtgtgtgtgtgtgtgtgtgtggggtatggtgtgttcaattatggagcaaagcacatctgttttgataaagaaatcctaggcttcgcagtcacttcaggtcc

SEQ ID NO: 5076 - DNA, 201 bp, Homo sapiens
ctgaatgaatatggaagaagtttaattttaacaaatgcactcgtggtatgcagaaattgcttccagtgacttgcatcattactcttagccttagactttgytaaccgcttcctcactctccccgaatgcatgtacatcccctcaggatccagcttttatctctgataaataaatgcatactgaaaggataacgaatataat

SEQ ID NO: 5077 - DNA, 201 bp, Homo sapiens
actatagttaataatagagaattgtacatttcaaaattgttaaatttcaaatgttctcaccacaaaaaatgttaaatgtttgaggtaatggatatgttaastagcttgatttaattattccacattgtattcataaattataacaccactttttaccccataaatgtattcaattataaatgtcaatttacaataaaaagg

SEQ ID NO: 5078 - DNA, 201 bp, Homo sapiens
tttaccccataaatgtattcaattataaatgtcaatttacaataaaaaggaatgaaactataaaacataaagaaagaaaaaaaggatatttttattcagtytctcaggccagaactatgggattcactcttgatagcttcttcttcacccctcacatctcacaagggcaccgatctgccaaattcttccttctaaatattc

SEQ ID NO: 5079 - DNA, 201 bp, Homo sapiens
aggcacaacaagacaaatactatatgattccatttatatgaggtatccagagtcgtcaaattcgtagaaacagaaaatcgaacagtggtcatcaggggccrgggtgcaggagaaatcagcagttgtcatttaatggatatagagcttcagttttgcaagatgaaaaagttgtgaacgttggttgcacaacaaagtgaatat

SEQ ID NO: 5080 - DNA, 201 bp, Homo sapiens
tggttaaatccaaattcttcattttgctagtgagcagacttcctaccttctctatgcctccatttccccgtgcacacaatggagattttatctttcctttyagaattgtgatgtgggctaactgatgtaatatatgtaaaagatcaaaactatcaggacctttcctttcaaatggcaatgtttccacaaaaatgtctctgg

SEQ ID NO: 5081 - DNA, 201 bp, Homo sapiens
cagatccaaacactgagcaacagcaagagttgtcacaaagagcgaaaaaacaaatcctccacactcggcaagggtacacgaacctgctgcaaggtgctagytcaggtggccagcttttattcccttatttggccctgcccacatcctgctgattggtccactttacagagcgctgattggtccattttacagactgctgat

SEQ ID NO: 5082 - DNA, 201 bp, Homo sapiens
gtgtatttatttcattaatctgtaagaaaattaaatttacttatgatgaaaaaagccttatttgaagaatacttagatatatgtaactttcaaatatctargtgatctgaagggttggggaacctagcaagaaagaggtacccatgaattaggtaaaatatttatagttacttcgtaagctgtcagtaattgtatgggtat

SEQ ID NO: 5083 - DNA, 201 bp, Homo sapiens
ttacttatgatgaaaaaagccttatttgaagaatacttagatatatgtaactttcaaatatctaggtgatctgaagggttggggaacctagcaagaaagargtacccatgaattaggtaaaatatttatagttacttcgtaagctgtcagtaattgtatgggtatgtgccacctggcagatcttttctatattattgctgt

SEQ ID NO: 5084 - DNA, 201 bp, Homo sapiens
atttccactgagaagcagaataattttcctgtaaatcttacttgaaagacagaggtgaccttgtaatgtatgtggttttctgattgaagtagccgcaaggyggcagtattgtgccaaatttcatgcaacttgaccaaaaaacaattttctggagaaactagtccttttattttgaggaagacaattttttaaaacgacact

SEQ ID NO: 5085 - DNA, 201 bp, Homo sapiens
atgacctggaggcatgtattgtacatgatcattgctgagtctcacccctcctagtgattgataaagccattcaaaggatggaatgaagtcatgtatggacmcaatccatttccttttatttactttaccagtctcacctaatttgaggcctagcaggagggcttcttaacccagacacttacatagtagtctcctaaggca

SEQ ID NO: 5086 - DNA, 201 bp, Homo sapiens
tatggacacaatccatttccttttatttactttaccagtctcacctaatttgaggcctagcaggagggcttcttaacccagacacttacatagtagtctcytaaggcaggaaagtattcatgtaaatgcagagaaactggctgtctcatataagcctactgtcccagagacacagggtaaatttacaactgtttttctttc

SEQ ID NO: 5087 - DNA, 201 bp, Homo sapiens
tcagtgtgattgccttaataatttgaaatatgctacagtaggagtattcaaactaaggagatgacaaacactacaaatcagagatgttcacttggagaagkttactaaacatttaccagcatatcacagctgccatcccaggaagagctgcatgtctaagactgacttagttatgattttcattgggaagaccaaagctgt

SEQ ID NO: 5088 - DNA, 201 bp, Homo sapiens
gtgctaggaccattttgaagtatttcttctaatatctgcatttccaaaaaggaatcccagtgactcctggactaactcaaagtgatgccctgctaatggcrgtatttaaggctgtggactggtccagtggaaaaggctcccctagaattataccagaacagacccctagacaacttcctgcttcacccatgtgcctagcat

SEQ ID NO: 5089 - DNA, 201 bp, Homo sapiens
ataataatacttagagcagaaagtccttcattcattcagctaatatttactgaggggttacaaaaattgaaatgggcatggcattgggaataggcataagkcataatcacttcccttaaacagcatcagcctgggaagagaaatacacaaaaaaggtgaaaagagattacatgtaaacgtatttcgcagctatgaagcact

SEQ ID NO: 5090 - DNA, 201 bp, Homo sapiens
ccccgttctcattctgtctttattcctttggctgttccttctctgaccatcaggctctttctcttcttctgtcccataaacaaggaccttttaggtatccyacagaattctgttctcttggcacatattagctatggatattataactactcccatgctattgcctctgctctgacaattccctagtctacatctccaact

SEQ ID NO: 5091 - DNA, 201 bp, Homo sapiens
aaacaataggctttttagagggtgctttgacttgacagttacagtaacaacaagtgtaaattaaaaaaaaaaaaactttcttttttttttttttttttgaracggagtctcgctctgtcacccaggttggactgcagtggcgcgatctcggctcactgcaagctccgcctcccgggttcacgccattctcctgcttcagcc

SEQ ID NO: 5092 - DNA, 201 bp, Homo sapiens
agaattcactcaaacattttgaaagcattttacaagtttctgtatgaaaaatattgagttaccatggaagtataggaaatgttttgtcatggctagaaaaytggcttaaagacaaaggtaaggttaattgggcacttctctggacagagaaatgttaacagtggggatccctggaaatcatccatagatggatcttattta

SEQ ID NO: 5093 - DNA, 201 bp, Homo sapiens
actgattaatatggcttggttctatgtccccacccaaatctcatgctcagttgtaatctccggtgttggaggtggggcctggtgggaggtgactgggtcaygggggtggatttttcatgaatggtttagaaccatcctctgggtactattctcacaatagtgagtgggttctcgtgacatgtggtcatttaaaagtgtgtg

SEQ ID NO: 5094 - DNA, 201 bp, Homo sapiens
gaactgggagctactgatggtttctatggctagagctgaaacatggtcaatagtcaccatttcttaactaacattttcctaggatgttgccaaactcataytggcaacacttatattttacttatatttaatatttttcacttgcaatacaaatgatcacatataacatctaggtggatattttgacatactaattccctt

SEQ ID NO: 5095 - DNA, 201 bp, Homo sapiens
cttcagcctcccaaagtgctgggatcacaggcgtgagccactgcgcccagctggaaatgaagacattcccagaaaaccaaaagctgagggagttcattgcrttaggcaacacaaataagactaccccaaggcatagaataatcaaactctcaaaggtcaaggacaaggagatgatcctaaaagcagcaagaaaaaaaagaa

SEQ ID NO: 5096 - DNA, 201 bp, Homo sapiens
taaagatgtaatttgtgacatcataagtcatgcagaaggtgaagctgtaaagtgaatttatataagcaattgatattaagttagtatcaatttaagacagrttattataattttatgatatatgtaatccccatggtaaccacaaagaaaatatctatagaatatacacagaagaaaatgaaaaggcattctaaacatgtc

SEQ ID NO: 5097 - DNA, 201 bp, Homo sapiens
aagtaaggaaattctgagacatgttacaatatgaatgaaccttgaagacattatgttaagtaaaaataagagtcacaaaaagacaaatactacatgattcsacttacatgaagtacctaaagtagtcaaatttggagagaaagaaagtacaatggcagcttccagggggtgaggagagggaaggatggggaattaatattg

SEQ ID NO: 5098 - DNA, 201 bp, Homo sapiens
ccaacccctcattgctctgatctcccacaccttaaaaatatgtcaaaactttaatatagtgggatcagggcattacattaaaaaatcatcttttcctatcyatacaaggctcgcttgtactaaatacagtgtaattctaggcactccgtgtctgttttcactcagcatttattaaagccctattatgggccaggccacaga

SEQ ID NO: 5099 - DNA, 201 bp, Homo sapiens
cacagttcttcatccctggatttaaccaactttggatccaaaatattaaaacataaataaatatacaaataaaaatacagcataacaactattttacagcwtttacataatattagatattataaataatctagatatgatttaaagtgtaggagaggatgtgcgtaggttatgtgcaaatactaggccattttattgaga

SEQ ID NO: 5100 - DNA, 201 bp, Homo sapiens
gagaggtgaagccagctggacttcctgggttgagtggggacttggagaacttttcttacaacaggattgtaaaatgcaccaatcagcactctgtagctagsattgtaaaatgcaccaatcagtgctctgtagctaacaaggggattgtaaaatgcaccaatcagtgctctgtaaaaatgcaccaatcagtgctctgtaaaa

SEQ ID NO: 5101 - DNA, 201 bp, Homo sapiens
acatcattaagggacttgaatatcagacatttttctatctgagaacgtgaagggtcctggaactaattccctgtggataccaagggaccattgtattaaaraaaaataatttctagaaacagtctttcacagaaactttacagaaaaatacgagtttttatttcttgctggaataaatacagttcatcttcttgggaggga

SEQ ID NO: 5102 - DNA, 201 bp, Homo sapiens
ttaaactgggggaaaaaaagtcctgcctttttatttaaaacgtagtaaaaagtttgttggcattccgggatattttattaaaaaatttagctgtttgtgcrtgtctcgctacattactaatattctttcttcttgaatgtgaacgcacacttcaaaataaaccattacctgcaatcagttttgccagatcactagcagatg

SEQ ID NO: 5103 - DNA, 201 bp, Homo sapiens
aaatctaacaccagccagcctttctgaaactgcctgagagaaaaaccttgttactttcaaggaggcaatacacaatgctggccactgtgagaggcaggaakatctaatccctacctccccactaccccatgcatctagtgagatctcgatctcaccctttaccttgctttccatttgcatatacagtacattctttcgctt

SEQ ID NO: 5104 - DNA, 201 bp, Homo sapiens
gcctgagagaaaaaccttgttactttcaaggaggcaatacacaatgctggccactgtgagaggcaggaagatctaatccctacctccccactaccccatgyatctagtgagatctcgatctcaccctttaccttgctttccatttgcatatacagtacattctttcgcttctttatctagtaaataaatttcttactttaa

SEQ ID NO: 5105 - DNA, 201 bp, Homo sapiens
agtcttatatcacctatacttaggaaaaaatgttcctatttttcggaagataaaccaactagatccatcacctagctatccatatacatcatttataattytgaaaatgatttaaaggagttgaacattttaaaagccaaaaataaatatttcagaatggaagagtgtatttctaatataatcttttatagtttccttggt

SEQ ID NO: 5106 - DNA, 201 bp, Homo sapiens
aaaatgttcctatttttcggaagataaaccaactagatccatcacctagctatccatatacatcatttataattttgaaaatgatttaaaggagttgaacwttttaaaagccaaaaataaatatttcagaatggaagagtgtatttctaatataatcttttatagtttccttggtaaagtcctaccagaaaacatttaaat

SEQ ID NO: 5107 - DNA, 201 bp, Homo sapiens
tttaaaagccaaaaataaatatttcagaatggaagagtgtatttctaatataatcttttatagtttccttggtaaagtcctaccagaaaacatttaaatakaaaaggttttccaaaattgatttaaggagtttaaaataaaggttttattacagaatgctttttgcccagttttggccttttccattattctagggaaagt

SEQ ID NO: 5108 - DNA, 201 bp, Homo sapiens
ctcttttccccatctgatgactaatacttgtctctgctttcagaaagggaaagcaccacatacaaacctcaccaatgcattttcctttgcttgttttaaasaaaggggtaaagtgtgtgtgtgtgtatgtgtgtgtgtgtgtgtgtgtgtgtgtgtgtttttaatgatggaggaatcatgaaatgaacctccataggaaag

SEQ ID NO: 5109 - DNA, 201 bp, Homo sapiens
tcctcccccttaatctctttgacttgttagttagctctaggaggcatacagggtatgtctcctggctgactactgggaaagcccttaatgagcagatggawgctgcatagtttcccataggacagttttcctccagtgtatgctgtgtgccacctaccccagaacctctgggaacctagttaaagatatgggttacctggg

SEQ ID NO: 5110 - DNA, 201 bp, Homo sapiens
gccttccaactctggccctttctaaaacataccatcctcagcatgcactgcggtggtagctaccagtagagagacacagtgggcagctgcttatcctgttycctttgccaatcaacaataaggaaattgtcaataggaaaaataaattagacagctgtgggctttcgtttttgttttcaatatcaatttgctgaggcagct

SEQ ID NO: 5111 - DNA, 201 bp, Homo sapiens
aaatgattatagaaaatttcccaaaatataaatacaggaatttctggattgcaccggcttgccagaacaatacatagaaacagaaccacacaaaggcatakcaacaggaaatcaagagcattggaacaaagagaagatcttaaaatcttccagggagaggatcacaacatactcaaacaactgattaggaatcagaattgt

SEQ ID NO: 5112 - DNA, 201 bp, Homo sapiens
atcagcctttgtgactgcatcatctttgatctcattgtttgtggtctgctctgcaaatcaaagacaccaacatccagttgtgttctggctttgttcttgcyctgctggttaatgctgtgcttttttgttgcccatatgatctatgtttctgtgctgaaaaggcaatgcctgaaaggcatgttttgtgcctccagaaaggtg

SEQ ID NO: 5113 - DNA, 201 bp, Homo sapiens
gccctgctggttaatgctgtgcttttttgttgcccatatgatctatgtttctgtgctgaaaaggcaatgcctgaaaggcatgttttgtgcctccagaaagrtgtttgtgtccataattctaaatctgtgcctacctagaaaaattatactaagctctttgaaaagaacctagcttcttgtgtgatatatcttaaatcatac

SEQ ID NO: 5114 - DNA, 201 bp, Homo sapiens
cctggcttattctgactctatattaacccagagtgacttccctgtcattcatttgtagtcccataggatacactatcgccataagaactcaggttaatttwttggcttaaattttttgagaggtaggctaataggtaagggtacttaggacaaagaaatagggaatctaccctagttagaaggaaggaaatcccaaaggca

SEQ ID NO: 5115 - DNA, 201 bp, Homo sapiens
gaaatatttcccaatttctattgtaatttttccttgacctaggtgttaaatttggtgttgtttaatatgttaaatttggtgttgtttaatgtttgacctargtgttaaatttaggtgttgtttaatatgttaaaataaacctataatcactaagacgctatggtataatggaggccttaatataggcatatacataattat

SEQ ID NO: 5116 - DNA, 201 bp, Homo sapiens
gttcaagtctggccaccctcttcagcgttttcacttacttcattaagtgcatatccatctcaaggtaatagaaccagggacactcagagtcagaagtgtcyatgccccatagcctaccctcagctgtagaaacagttccaggctttgatctcactcttcttttagacagtcggctttttttttttttcttgtcagctaccc

SEQ ID NO: 5117 - DNA, 201 bp, Homo sapiens
ttgtctcagcaataaccaaaaaaagtgttggcatttcacatattcagttgaatataaagtgacacctatctagaacacttaatcttaagttattctcactktttaaagggaaaaataaaaaattctccttctctataatagggcaacctagttattggatgcttcaaaatattttagatcatattttatttctaaatgact

SEQ ID NO: 5118 - DNA, 201 bp, Homo sapiens
tcatggaacctaagccaaacaaatagcaggagaggacaatgaatagaaagtgttgggatttatggactgggatttataatgtggttgaagaaattatgtargaggatattggattatgagtaagagacaaggataggaaatttccaaggttagagaacaggacatctcaagactttggaggtgatgagggcttcagtgatg

SEQ ID NO: 5119 - DNA, 201 bp, Homo sapiens
tagtgtccagagctggagctgtgcagtaatcctgacttctccagctgctcaggacatagcaattgtgctaggaaagtaaaaggcagtggagacctgtcatrgggtaaggaaaatgaggtcagaccttaaacagacaagtggagggtaaaagtattaatcaagatcaatcaatcctagtgggagggaagataaaattgtgga

SEQ ID NO: 5120 - DNA, 201 bp, Homo sapiens
ccaggattccaggtattcaaaatccatttagctgcagcaaccaacttgccttgggttaagaaggcctcacagatgtctactgatttctccagttggtatcytacatccaagaacacctctcggtatacatatgtcttgttcacaccatgatctttgcatttctaaccttcaaaatagagtgctataatgccctgtctttga

SEQ ID NO: 5121 - DNA, 201 bp, Homo sapiens
ttataaattaatacagagtttgtccgaagacacacaactgtggtagagagtgctggtctgacttcaaaccctaaactcattttatttccatgatactcttktctgtctttgatgctctcctgatttctccatacctgtctgcctccctctactctgtcttcccaggggctgaatcacacttgcttgatgcccttttctttc

SEQ ID NO: 5122 - DNA, 201 bp, Homo sapiens
agcagacttcctaccttctctatgcctccatttccccgtgcacacaatggagattttatctttccttttagaattgtgatgtgggctaactgatgtaatayatgtaaaagatcaaaactatcaggacctttcctttcaaatggcaatgtttccacaaaaatgtctctgggtctcacccctccctgccaactaccccagcta

SEQ ID NO: 5123 - DNA, 201 bp, Homo sapiens
cttaaatgttttcacatattatttgtacctatctctgaagcatgagttttccatttttcattctgacaagggccacccccaatataagggcttacaattckattaaattgactattaattcaaggcactgtttaaaaaatgagtttcatatcaggaatctgaaaaagagtggcaaaatagattataattaagcctgtgttc

SEQ ID NO: 5124 - DNA, 201 bp, Homo sapiens
acatagtatataaagatgtaatttgtgacatcataagtcatgcagaaggtgaagctgtaaagtgaatttatataagcaattgatattaagttagtatcaayttaagacagattattataattttatgatatatgtaatccccatggtaaccacaaagaaaatatctatagaatatacacagaagaaaatgaaaaggcattc

SEQ ID NO: 5125 - DNA, 201 bp, Homo sapiens
tcagacattttttggccttccttattcttagatgtgaacatgtgactgagttctagccaagcctggccttgaaaaatgtcccccagcattcttcatacccyttttgcttgatattggggtggcattgaaaaccttgaatctctgaatgattgctgtgacacagaggtctctccttcccctgaagatcatcttgctcctccc

SEQ ID NO: 5126 - DNA, 201 bp, Homo sapiens
ttttcaatatctgtaagagaggtatgactaacactcctgatttatagatgcagtaactaagatttggagatattgaatttaagttactgtgaccaatgagytggctgattctggagctcaaaaaagaaaacaggccatgaggctacggtagtaacaaataatcagtgaatttaatccagtagatatttttcaaagaccact

SEQ ID NO: 5127 - DNA, 201 bp, Homo sapiens
ccatgcttcacttaacattaataattgtgtgatttttttttcttgtgttggcacagaaattctgaccataacacagagttctaactgaaatatatagcttwgccatctctgaacatttgcattattcagagataggctttgtgtgcaatccataagcttctagagggaatggctatactatttaaacaagtctggaaattt

SEQ ID NO: 5128 - DNA, 201 bp, Homo sapiens
aaccatggttttatggacactgtgcctgaattcaacaggcgggtgtgggggctatttttggacaggcagaacttccagcacctcttaaatcacatcacacrgcaactgccttctccacctacacacagggcgggcctgcatgcataaaacaggatgctggcccagggtgaaacggagaaactcttttccccatctgatgac

SEQ ID NO: 5129 - DNA, 201 bp, Homo sapiens
tggtgcatttgcctcaggctgatcctttccctttcctttggcaggcttggcacttggagcctttttctccttgggagattttgctttccctttatcctttwctaacttaggtttgtcttctattacctggaatgagagaacacttttttctccaaatcaaacagtgagcaagcaatggcttttctactgccaggtgaatta

SEQ ID NO: 5130 - DNA, 201 bp, Homo sapiens
gaatgtttataatttttagcacacaatcacaataactgtgtaacactaatgatgaaagttttaatgatgtttgctgtgctaaatttactaaggttaagtgyggactaagaggaattaagatatttttaaaaacaagggttgaaataaagagaacttatggaacaacaatactcagtaagaaagtttaattaaccaaataac

SEQ ID NO: 5131 - DNA, 201 bp, Homo sapiens
tttacagcatttattcacttgctcactctttcattggttattattttctacgtattaggctttgtcacaggtgcctgggatttgaaagaatcaagatttgsctcttacactttagaagttccaaggtagaggaaggagaagtagaattaacaaataaacatggaattcaatcagaaaaaaataaaatgatgcagatcaata

SEQ ID NO: 5132 - DNA, 201 bp, Homo sapiens
aaagggaaaagaggaagaggggaggagcaccaagggtccaggatggggcatgtaagcagcatatgtgtgaggtttcaatggtggcagcaggaacaaaaatsctgtgctgcgtagagagctgagctgaagggagaatggagtcacatcttaagccagaaggagaagtggagggtggcaggacacagaaaaaggacagaagtt

SEQ ID NO: 5133 - DNA, 201 bp, Homo sapiens
ttctgaggtggctttcttcctgactcctgctcagtaatgtaaggaaattgtgttctactgggtatccagagaccagaatgttttctttttttttccaccaytgttataatcctaaaacaaataatttaaccctgctaggatctcagctttcttatctgaaaatagatttcgattagattaattccaaggtttctttcagtt

SEQ ID NO: 5134 - DNA, 201 bp, Homo sapiens
attgggaaagacaaacttttgggattttgctgaaggtcaaaaagctagttcctatgttgccaggatttcctggtgcacaaaaatgactgattcttcattcrcagtgacaaactgccaaagtctcatatatattcatctctctcttttgagatccttttctggcttctactagtttttcatagcagcagatatttgaagcaa

SEQ ID NO: 5135 - DNA, 201 bp, Homo sapiens
atggtccttccctaggactttgctttcatttcagctcccttaacgctgaaatatatcgtcctgcagggtattcaacactccgaggcccctgttagttgggrtaagggtcaactagaaagagacctgagagattttctgtagcagagggatgcctgaatactttccacaacatcttcgataagtagtcatttgaccttccgt

SEQ ID NO: 5136 - DNA, 201 bp, Homo sapiens
gctcactttgaacatacaaggttatgggaacatttttaaacattaatccaatttaataaatctatgctaagaatattatccaaaatatggagacttctatrctgcaaagtacatggtttattatgaaaagaaattgaaataacttaaatgctcaatgatagagaaatggttaagaaaattatgatagtcaataaaacatca

SEQ ID NO: 5137 - DNA, 201 bp, Homo sapiens
tgtatgtgtgtgtgcatacatatatacatatgcacatttatacatatatgcatatatgtgcatatataagatagagagagagagatagaatggactcccaygaagcctgctgtatgatttcccttgtgtgttgacaagaagtcatatgaagcagcttgaatcattgcttaacctgctgcatattcaatctcgagtgaattc

SEQ ID NO: 5138 - DNA, 201 bp, Homo sapiens
agatctatgctttaacagacatgtataatttaaaatgtaatgaatttcctacgggaggtgtacattttgaacaaccaatatgtgcatgtcaaaaagcacasgactattttagaaatgtttgctggaattactcttcaaagaaggaaaaagcaaagcttcctttttattaaggagtgtttttgtttttgtatacttgcaaaa

SEQ ID NO: 5139 - DNA, 201 bp, Homo sapiens
acagcctggagtcctggagtgggatttctgctaatgtcctgctagacaaagaatgtattcagtgtatcagccctgtcttcatttaccctaagttcttggtktctccacaattatcaaaaagttgtagtgtttctccagcttgatgtggatgatgttctaggctgttgttaatttctaagtattaatctgaatgaaatctgc

SEQ ID NO: 5140 - DNA, 201 bp, Homo sapiens
aaaaagttaccatgtaacaaaaggaatttgttagattatcttttatctcttctcccacagtgcagagtttcctttgagaaatgggatgttgcaagactttygctcctcaggagtttaccactatcaagtgtcctagtgtgtctggagttgattccttccagtgggttcctcgtctcactgacttcaaagaatgaagccact

SEQ ID NO: 5141 - DNA, 201 bp, Homo sapiens
gacaataataacacaaactgagaatgcctacagagaaggatgcactcattgtgagctgcagcaggggggcagtaagatgctagcaaatgtgcaatattcarctaatgaagaacaagtcatttccccatgtctaattggacagcatagttaaataagcaattctctgcaaatacaatttctgagtgtttctcttagtatttc

SEQ ID NO: 5142 - DNA, 201 bp, Homo sapiens
ccaatggtgaaggaagagggtctgggtctgtcacaccgaaagcaccttaggaaatcaagtcggctgcttaggaaatcaagtcagctgtctatgacctggargcatgtattgtacatgatcattgctgagtctcacccctcctagtgattgataaagccattcaaaggatggaatgaagtcatgtatggacacaatccattt

SEQ ID NO: 5143 - DNA, 201 bp, Homo sapiens
ttgcttcaagtgtgacctagccttaagtaatatccttcaaaatgggctctatgaaaagcaggtgacaaggcaagtatagagaccactgacaggagcagggrcaaaccactccagggctctcctttcctcctgaccatttccctacttccccactcaggcatctgcacaatggggccaatgatctgggagatccctaagcac

SEQ ID NO: 5144 - DNA, 201 bp, Homo sapiens
atcccttgtttactacaaagccatggatataatttaatttctacatccatcttgagtggggcatatccagggctacttctacaaacacaagattgccctgrttacactaactctatcttattcttccccaaattcaataaaatgtccaagcaatgggaatattttggcagcccaattacatatctcataatatccctaata

SEQ ID NO: 5145 - DNA, 201 bp, Homo sapiens
tatggttgccttgcctattctcccaaggtgtttgtatgttggggacttgaattgccattttgtgaccttctctctaacttgactcttatgacaccaccccrttctcattctgtctttattcctttggctgttccttctctgaccatcaggctctttctcttcttctgtcccataaacaaggaccttttaggtatcccacag

SEQ ID NO: 5146 - DNA, 201 bp, Homo sapiens
cacacaaaaaattgaattgcattataattaaaataaaagtaaaactaaacatcagaagtaataatttgaggatgataattaacttgaatagattttagatrcaggagtagagattttaggtacatttcaaaggcagagtcaacaggatttactgattaatatggcttggttctatgtccccacccaaatctcatgctcagt

SEQ ID NO: 5147 - DNA, 201 bp, Homo sapiens
tccttgacggaattaatttaggagcaacgtagacccagaagtggtctaacgtacatttttctcccaatctaaatgtatcagatttacttggtgcacatatkagtctccctacttaaaataatcatgcttcttcattctacctgttcaaattccacccattatttagagcccaggtgaaggcaaatattttacaaatcattt

SEQ ID NO: 5148 - DNA, 201 bp, Homo sapiens
ctactgatttctccagttggtatcctacatccaagaacacctctcggtatacatatgtcttgttcacaccatgatctttgcatttctaaccttcaaaataragtgctataatgccctgtctttgagtttttattgtgtgtgatacaaagggctaggtgtctttcagctacagggtccaaaacatatggagaatattatacc

SEQ ID NO: 5149 - DNA, 201 bp, Homo sapiens
tctgcaagaacagattattaacagtgattcatccagcgcatcctttaggtaaaacttatagatcaaatactccagaaaaggcagttggataaccaagtctyctgaactgcagtctgttttctgtggctataaatacagggtatgatacaggggatataaatacagggtatgattttaatttgcaaaatttacaacacttgg

SEQ ID NO: 5150 - DNA, 201 bp, Homo sapiens
ttgattcaaaaaagactgatggaccatctgaatgaatatggaagaagtttaattttaacaaatgcactcgtggtatgcagaaattgcttccagtgacttgyatcattactcttagccttagactttgctaaccgcttcctcactctccccgaatgcatgtacatcccctcaggatccagcttttatctctgataaataaat

SEQ ID NO: 5151 - DNA, 201 bp, Homo sapiens
ctgctctagatgtagtctttcagagtagtattttccaaactagtctggtcagtgaagtcatcttagcagtttagaaaaatactcatgccagagccccacaygcacagattctgattcagttcttttcaggtagggcctgagcacaggaatttttaaaagctctccagtggctttaattttcagaaaagattgagaaccact

SEQ ID NO: 5152 - DNA, 201 bp, Homo sapiens
gggaaagttgaatatctaaacctctgagcaaatctttcttaatttagaaaataaaatagagcatcattgtaatacttttcagtttcctggacattcaactycacatcatggataaataaaatagttatttgtccattcactcattcatttgtacattaatcaacagagagagtggtgaaaaacactaatgctttgtattat

SEQ ID NO: 5153 - DNA, 201 bp, Homo sapiens
cccgcacccctccgagattcgtgccccactggacggtttgcgaaggctgaggctgccttggggactcacaaaagaccacaggggtgattcgaagtgtaaakagggaaacaatcatcagcacacaatccggctaaagggataacatatgagtttgcttgttgtccttcatgggattcttctctttttatagctggacgccct

SEQ ID NO: 5154 - DNA, 201 bp, Homo sapiens; identical to SEQ ID NO: 5153

SEQ ID NO: 5155 - DNA, 201 bp, Homo sapiens
aggtggacccagccgaactccgcagcagcccaggccagcgccccacctccgggtcaccggcatgatccgcctctccccgggcccccgcggccctggcaccsgaggtcagcgggccgtgggtacagctcagccgcggaccctgctccgcgagtgcgggagctttggacttgaacgcgacgtgctcgcccggctcccaacaaa

SEQ ID NO: 5156 - DNA, 201 bp, Homo sapiens; identical to SEQ ID NO: 512

SEQ ID NO: 5157 - DNA, 201 bp, Homo sapiens; identical to SEQ ID NO: 512

SEQ ID NO: 5158 - DNA, 201 bp, Homo sapiens; identical to SEQ ID NO: 513

SEQ ID NO: 5159 - DNA, 201 bp, Homo sapiens; identical to SEQ ID NO: 513

SEQ ID NO: 5160 - DNA, 201 bp, Homo sapiens
ttaaggcatggcattcactaagtcaaaattcacacatttttcagataagaaataccccagattcccaatcaggctgatggccgttgctgaattccgaattmtcccatgaaatcttccagggttgtgtgggtaaatgtgactttgcaccctccccctacccgatctcccccaggaataggtactgtttccttccactaaaaa

SEQ ID NO: 5161 - DNA, 201 bp, Homo sapiens
gccttacccatttatgttttctgtgtcgcctgtatacacatttgtaatctctagattagaaattagtcagagaatgaacagagaaaataacacttaagccragagaagagcatgaaccgagtcggagaggcttcaaaaacaaagaaaagtttggaaacaaccagatcaattgagtatttgctataatttttaaggtgttga

SEQ ID NO: 5162 - DNA, 201 bp, Homo sapiens
cttttgaatatgcctgtctctattaatgtgtttgatactgattataggctcctagagagaaggggcagaatctctttgaacctgactttgaatctcttcartaggatatatgaccccatgtatcatcagttccttaaatattactctttgcaagaagatgacctcttctgaattgtgtctctcccaaattcaattcacctg

SEQ ID NO: 5163 - DNA, 201 bp, Homo sapiens
aaaccgtttccaaaaatgcctcctccagagtttattaactgaaaaatgtaagtagcattttggcaatctatagagcagcagtgccggaaagtgtcagcagrgtaaaacaatcacattttagtttagaaagcttcaggaagagaatattcattttctccattagagtctcttctgacattgaaaaaaatgtcaccgggaaac

SEQ ID NO: 5164 - DNA, 201 bp, Homo sapiens
gaatctcttcaataggatatatgaccccatgtatcatcagttccttaaatattactctttgcaagaagatgacctcttctgaattgtgtctctcccaaatkcaattcacctgttgaggctccaactctgacgtgatagtatctggagacgggtctttgataattaggtatagacgaggtcatgaagatgaggccgccaggc

SEQ ID NO: 5165 - DNA, 201 bp, Homo sapiens; identical to SEQ ID NO: 511

SEQ ID NO: 5166 - DNA, 201 bp, Homo sapiens
cccgggcccccgcggccctggcacccgaggtcagcgggccgtgggtacagctcagccgcggaccctgctccgcgagtgcgggagctttggacttgaacgckacgtgctcgcccggctcccaacaaacttgcaatttccgcgcgcaccccttaaacaggaactgttccccaaaccttgacccagctaccccgctgtgctctg

SEQ ID NO: 5167 - DNA, 201 bp, Homo sapiens
gatgtctgtttgatggcctcgtgaacatcaggaagatgaaatgaaatggttcaagactggaacaataccattatctgcatcttgactcctgggagataatratatctcctgctttcctctacagacctaccagttttctctgctttaagggaaaatccaaatgcatgagacctgtgcattcttctacataatcaagagtct

SEQ ID NO: 5168 - DNA, 201 bp, Homo sapiens
ctccgcgacccccactcctcctcggctgttccccaaccctgtcactgtgctcccctccctactcccggcccgtagtggaggtgactttcctgcgcagcgcsgcttctgagggcggagaacccacagggagtgcgacccctttgcacgctgtgagtgggcaactgtccgagggactcgagccgatcgaagggtgaggaccag

SEQ ID NO: 5169 - DNA, 201 bp, Homo sapiens; identical to SEQ ID NO: 5168

SEQ ID NO: 5170 - DNA, 201 bp, Homo sapiens
agagaggccatctcagtgtaatctgaaaaaatgctcactttataatgctgtatccaaggcccatcaaaaactaaatggatgtatttgtactaaaagttggrgaaagttgaatatctaaacctctgagcaaatctttcttaatttagaaaataaaatagagcatcattgtaatacttttcagtttcctggacattcaactcc

SEQ ID NO: 5171 - DNA, 201 bp, Homo sapiens
gcaggcaaaatttaagatatgacataaaactaaaaatcaaaataacacatttctagagtgttacattagtaaaaggatagtctcacatgatagggatggtsttttaggatgacctcagagccaaaaacaaaaggagtcctcctgccttactatcatatattttaaggcatggcattcactaagtcaaaattcacacatttt

SEQ ID NO: 5172 - DNA, 201 bp, Homo sapiens
agagcagatactactttttccaaaattctataaatctgttttagtagctattgaatgtaaatatacctagaaaaatattgagtattgttaccctctgtaawatacctatctcttttttttttttttttttttttttttttttttttttttttgagacggagtctcgctctgtcgcccaggccggactgtggactgcggtgg

SEQ ID NO: 5173 - DNA, 201 bp, Homo sapiens
ctttttccaaaattctataaatctgttttagtagctattgaatgtaaatatacctagaaaaatattgagtattgttaccctctgtaatatacctatctctyttttttttttttttttttttttttttttttttttttttgagacggagtctcgctctgtcgcccaggccggactgtggactgcggtggcgcaatctcggct

SEQ ID NO: 5174 - DNA, 201 bp, Homo sapiens
tgctctggcccgcggacctgtgtccgaacccgggctcggctgccggaaccggtttgagaaaacaaaagagttgtggggcagttttccctgtggggggcagrggcgcctcccaggtccctgcaccccgactcccggctgctcccctggcaactaatccggagaagggaagtggtgccacgagcccccactgcccggggaggg

SEQ ID NO: 5175 - DNA, 201 bp, Homo sapiens
gagaaacatttccatgaagtcttcttccactattagaaacatgtcttatgactttggattttaaaaaatctattattctctggataagttaaatagaagaytcgcaactagtctacagaaagggtgcctaatttgcatttaaaaagaacagtttgcttcttatacacggggtgacttaaaaggaacttcaatgagctagta

SEQ ID NO: 5176 - DNA, 201 bp, Homo sapiens
ggagaaacatttccatgaagtcttcttccactattagaaacatgtcttatgactttggattttaaaaaatctattattctctggataagttaaatagaagrctcgcaactagtctacagaaagggtgcctaatttgcatttaaaaagaacagtttgcttcttatacacggggtgacttaaaaggaacttcaatgagctagt

SEQ ID NO: 5177 - DNA, 201 bp, Homo sapiens
ttcctttttcttacatttactgttcaaaataggaataatgactccttcttaatgtgcttacaaatcctgtatttttgatgagtattgccacattaaagtayaatacataatacattttaaatagaaaataagctcaaaggagattttgcagagactgtaatgaatctcgttattcttaaaagttatcaaatgtctaatgtt

SEQ ID NO: 5178 - DNA, 201 bp, Homo sapiens
gatgaagaactaatcaagcatgatgctctaaactgcttataaccctcccttctttaccttctttcttcccatactcctccttgacctactcttcctcccawcttttcctttttcttacatttactgttcaaaataggaataatgactccttcttaatgtgcttacaaatcctgtatttttgatgagtattgccacattaaa

SEQ ID NO: 5179 - DNA, 201 bp, Homo sapiens; identical to SEQ ID NO: 514

SEQ ID NO: 5180 - DNA, 201 bp, Homo sapiens; identical to SEQ ID NO: 514

SEQ ID NO: 5181 - DNA, 201 bp, Homo sapiens
atatcgtggacctggtcctaatttctttacattgaatttcgcagtcttatttaattttccagattactttggaaagcctcatcagtaattacaaaccacayggagcatttgattttgttccctcaacattgcccatcttcactttaattatagtttcacaaattgttacgttttcaaatttatacttgttttcagtgacca

SEQ ID NO: 5182 - DNA, 201 bp, Homo sapiens
ttggggaaaatagcttttagacagttaatcctatctgtgatttacaagagtcttataaaaattattcaacaaaccatggtacttcctggcaggcattcttygctagattttggagttagtttttcttcaagggttgaagccctctatagatgcacatgagaatgaaatgtcatatagaggggttgattttgaaatgccaga

SEQ ID NO: 5183 - DNA, 201 bp, Homo sapiens
taggaaaagtccctatttcgtacatggaagcaaaaatgattcctcttattaacagctgctcaaaaagtcaatggacttaaaaaatgaatattctaaactgmaaatctggtaaattatactactattaaaagtggtttccctttcctctgcaggacaaggtccatactacttagcagagcatacaagccactccatgcgttc

SEQ ID NO: 5184 - DNA, 201 bp, Homo sapiens
ctaatattaacatagaaaaggttttaactattacaaaagttttacagctattaattaatttaatgtatatctaggaattaatcctgtatttatgaattttygtcagttatcaaaaaataaacacataggaaatctcattaaaattgatttcgaagagaatatcttagaaaatattcatacagcaaaaaccgatggtctaga

SEQ ID NO: 5185 - DNA, 201 bp, Homo sapiens
taattaatttaatgtatatctaggaattaatcctgtatttatgaattttcgtcagttatcaaaaaataaacacataggaaatctcattaaaattgatttcraagagaatatcttagaaaatattcatacagcaaaaaccgatggtctagaatctagattctatcagagacgaacaaattctagaagccagtctagctgccc

SEQ ID NO: 5186 - DNA, 201 bp, Homo sapiens
ttggattaatttaataacactaaatcaacaatttcggaaaaccagacttctatgctcaaacgtgcattttttcttgacatggccatgaattctatggagtwtcaggttttaaaaggccaaagacgaacaataaaagtatcttaatttgtattgtggtcctttatgactaaaagaccacattatcattgtaaggaaaaggaa

SEQ ID NO: 5187 - DNA, 201 bp, Homo sapiens
caaagatagtattctataaacaaagctctcttatatttggtaaactctgaagtccatatttttcttaaatccaaacatatttctctgaggtctgataaaamgtttgttggattaatttaataacactaaatcaacaatttcggaaaaccagacttctatgctcaaacgtgcattttttcttgacatggccatgaattctat

SEQ ID NO: 5188 - DNA, 201 bp, Homo sapiens
gcagtatggctttcttttatatttatttaaaatgcttctgtctacaaagatagtattctataaacaaagctctcttatatttggtaaactctgaagtccayatttttcttaaatccaaacatatttctctgaggtctgataaaacgtttgttggattaatttaataacactaaatcaacaatttcggaaaaccagacttct

SEQ ID NO: 5189 - DNA, 201 bp, Homo sapiens
taaataaaagcaaataaaaataaaaccactgatctagagggtttaaggtatgttgcttaaaaagagaagcttgaatatatttgaataagatgcttatatamgatcagcagtatggctttcttttatatttatttaaaatgcttctgtctacaaagatagtattctataaacaaagctctcttatatttggtaaactctgaa

SEQ ID NO: 5190 - DNA, 201 bp, Homo sapiens
tgtggccaacaaacatgaaagaaagctccatatcactgatcgttagagaaatgcaaagcaaaaccacaatgagataccatctcatgccagtcagaatggcrattaaaaagtcaagaaacgacagatgctggcgaagctatgaagaaataggaatgcttttacactgttggtggaaatgtaaactagttcaactattgtgga

SEQ ID NO: 5191 - DNA, 201 bp, Homo sapiens
cttctcaaaagaagatatttatgtggccaacaaacatgaaagaaagctccatatcactgatcgttagagaaatgcaaagcaaaaccacaatgagataccayctcatgccagtcagaatggcgattaaaaagtcaagaaacgacagatgctggcgaagctatgaagaaataggaatgcttttacactgttggtggaaatgta

SEQ ID NO: 5192 - DNA, 201 bp, Homo sapiens
agaagtaagttaatcatactctaatattaacatagaaaaggttttaactattacaaaagttttacagctattaattaatttaatgtatatctaggaattawtcctgtatttatgaattttcgtcagttatcaaaaaataaacacataggaaatctcattaaaattgatttcgaagagaatatcttagaaaatattcataca

SEQ ID NO: 5193 - DNA, 201 bp, Homo sapiens
atgtattgtccaaataggaagttttctttttttgtttgtttgttcgtttgttttttgagatgagttttgctcttgttgcccaggctggagaataatggcgygatctcagctcactgaaacctctgtctcctgggatcaagtgattctcctgcctcagcctcccgagtagctgggattacaggcatgcgctactatgcccag

SEQ ID NO: 5194 - DNA, 201 bp, Homo sapiens
ttcaatgtgtcctctccaaaattcagatgttcaaacttaatggccaatatgatagcattaagaggtggggcctttaagatttagtcatgagggctcctccyttcatgaatgagattaaggcccttgcaaaagaggcttcacagtcttccattctcttgcccttccaccttctgcccagtaaggacacagcattactcccct

SEQ ID NO: 5195 - DNA, 201 bp, Homo sapiens
ttctatctaaagcatcatcaaattttactccttctcccttgctacagccatctcctaacacctgggccactgtgtcacccaatcctaatttctttcagaatttttttttttaagacagtatctcactctgtcgcccagcctggaacgcagtggcacaatcttggctcactgcaacctccgcctcccgggttcgagcgattc

SEQ ID NO: 5196 - DNA, 201 bp, Homo sapiens
aatttctttcagaatttttttttttaagacagtatctcactctgtcgcccagcctggaacgcagtggcacaatcttggctcactgcaacctccgcctcccrggttcgagcgattctcctgcttcagtctcccgagtagctgggattacaggcacctgatgccaccactggctaatttttgtatttttagtagagacgaggt

SEQ ID NO: 5197 - DNA, 201 bp, Homo sapiens
aaggctacagcaattatgcagaggaaagatagtgagcacagtgagaatgggctagatttgggatttattctgaaaatagattatatatgatataagaaagragggacatgaattaagaagaactactgcctgtaatcccggcactttgggaggccaaggctggcagattacttgaggccaggagtttgtgaccagcccggc

SEQ ID NO: 5198 - DNA, 201 bp, Homo sapiens
acatcctttcatgataaaaaccctcaaaaaactgggaatagaaggaacatacatcaacataataaaaactatatatgacaaacctcacagctagtatcatwctgaatgggaaaaaactgaaagtctttcctataagctctggaacacgacaaggttgcccactgtcatctctgttattcaacataccactggaagtcctag

SEQ ID NO: 5199 - DNA, 201 bp, Homo sapiens
caggagcatttctatatgccaacagtgaacaaggtgaaaaagaaattttaaaagtaatcccatttacactagccacacacaaaattaaatacccaggaatwaacttaaccaaagaagtgaactatctctatagtgaaaactataaaacactgaagaaggaaattgaaaaggacaccaaaaaatggaaaaatattctgtgtt

SEQ ID NO: 5200 - DNA, 201 bp, Homo sapiens
acaggcatattaaaagatgctgaacatcactgatcatcaaagaaatgcaaatctaaactataatgagttatcatctcaccccagttaaaatggcttatacycaaaagaaagacaggcaacaacaaatgctggtgaggatgtggagaaaagggaacccctgcacactgttggtgggaatataaattagtacaaccactatgg

SEQ ID NO: 5201 - DNA, 201 bp, Homo sapiens
tcggcctcccaaagtgctgggattacaggcatgagccaccggttgttgttgttttttgagacgcggtctcactctgccacccaagctggagtgcagtggcrtgatcttggctcgctgcaacctctgcctcctgggttcaagcaattctcctgcctcagcctcccgagcagctgggattacaggcacccaccaccacacctg

SEQ ID NO: 5202 - DNA, 201 bp, Homo sapiens
cagaaaaaaaatgtaaacatcgaatttttaaaattacaaaaagaaaagaaaattccctaaaataaaaggaagaagtgaacctggagatcatatggaataaytcacgttgagatgtaacctgattaattctcaaagactttttaaacaggtttttttagcatgcagaaaaaaaaaatcaagtcacctgcaaaggagaaaaat

SEQ ID NO: 5203 - DNA, 201 bp, Homo sapiens
taaaattacaaaaagaaaagaaaattccctaaaataaaaggaagaagtgaacctggagatcatatggaataactcacgttgagatgtaacctgattaattytcaaagactttttaaacaggtttttttagcatgcagaaaaaaaaaatcaagtcacctgcaaaggagaaaaatctttggctatcttcagatttcttcacag

SEQ ID NO: 5204 - DNA, 201 bp, Homo sapiens
cctacttcctcttttctcttttccttagaaaatttttagtatttcatatttttatattaactttctgcctatatctttttatataatttactggttcctcrtaaaaatgcatcataggcataatctatagcaatagcggtttaaatgaatctcctttgtgctcaaacagcatatctttaacttatcggattatcagataca

SEQ ID NO: 5205 - DNA, 201 bp, Homo sapiens
ccaatctctttctcctctccttctgctgttctaatgatgcatacgttagacctttagaatgaaccaacaaaactccaaggctctgttcttttcaatctctrttcttcagaatgatttttttctttttctttttttttttttttttttttgagacagagtcttgctgtgtggcacaggctagacggcaatggtgccatgttg

SEQ ID NO: 5206 - DNA, 201 bp, Homo sapiens
ggcgttaagggactatgggggtactctggcagtactctttgtggcctggggtggtggtggctacaggttgaggctcctctgccttcagaaaggggaggaaragtgggaagcattgcaccttgtggtttgagtgccagctcggctgcaatacaacagaacactaggtagacttctaaggtttctgactctagtccctgactc

SEQ ID NO: 5207 - DNA, 201 bp, Homo sapiens
ttgggcttggggcccaagttcctatgaatactagaaagccttcccaagaaagataagcataaacaagcccaggcagtgatgactacaataaatacctaackctccaatgcccaaaaactgatgaacatctacaaacatcaagaccatccaggaaaatacgacctcaccaatcaaactaaataaggcaccaagcaccaattc

SEQ ID NO: 5208 - DNA, 201 bp, Homo sapiens
gtatgaagttacttatctaagaaaaattggtgtttctgaaggacatcaacccaagaaaacttatttttaactaacattttttaacagagttctttaaagcrtttcacaaaggtcagtatgagctgattttttttaatgtgaacatttccacaacaaattttaaaaattggaatgaatcagcaacttagatgacacagcctg

SEQ ID NO: 5209 - DNA, 201 bp, Homo sapiens
gcaaatcacttaagttttatgtgattattttaaagtatgctatcacttaaaaacaattctcggccgggcgcagtggctcgcgcctgtaattccagcacttygggaggccaaggcaggtggatcacctgaggtcagcagctcgagaccatcctgaccaatacggcaaaaccgtatctctactaaaagcacaaaattagccgg

SEQ ID NO: 5210 - DNA, 201 bp, Homo sapiens
cagtggctcgcgcctgtaattccagcactttgggaggccaaggcaggtggatcacctgaggtcagcagctcgagaccatcctgaccaatacggcaaaaccstatctctactaaaagcacaaaattagccgggcatggtggtgcatgcctgtaatcccagccactcaagaagctgaggcaggagaatcgcttgaacctagga

SEQ ID NO: 5211 - DNA, 201 bp, Homo sapiens
ggtggatcacctgaggtcagcagctcgagaccatcctgaccaatacggcaaaaccgtatctctactaaaagcacaaaattagccgggcatggtggtgcatrcctgtaatcccagccactcaagaagctgaggcaggagaatcgcttgaacctaggaagcagagattgcagtgagccgagatcgtgccactgcactccagcc

SEQ ID NO: 5212 - DNA, 201 bp, Homo sapiens
aattagccgggcatggtggtgcatgcctgtaatcccagccactcaagaagctgaggcaggagaatcgcttgaacctaggaagcagagattgcagtgagccragatcgtgccactgcactccagcctgggcaacaagaccaaaactctgcctcaaaaaaaaaaaaaaaaaaaaaacagttctcatctatagttaattatccc

SEQ ID NO: 5213 - DNA, 201 bp, Homo sapiens
agggcttattaatttcatttatttttatgtggtgcacattaaaggtactttgtattaagctggtgcaaaagtaactgcagtttttgccattaaaagtaaayatatttagttgtttcaaacacttgtgaaatataattcagaaaaactgaagtttgatgaaaatttgaaaattaaaaacataaagcaatggttaatgttaaa

SEQ ID NO: 5214 - DNA, 201 bp, Homo sapiens
gtaaacatatttagttgtttcaaacacttgtgaaatataattcagaaaaactgaagtttgatgaaaatttgaaaattaaaaacataaagcaatggttaatrttaaaattaacaataattctaaaattataatagcttaaaaagtacatcatattaaaaataaaacaggccaggcatggtggctcatgcctgtactcctagc

SEQ ID NO: 5215 - DNA, 201 bp, Homo sapiens
aattaagtttcgccctttccttataccttaaacacaattcaaaaacttgtacaatcaactttcatggtttccccaaactgaattctcccttcttagttttstaagtaagttccaattctcctactctcttcaatgtagactttactaagattcctcactggccttctcttcacatgccgcacacacactttccactcaatg

SEQ ID NO: 5216 - DNA, 201 bp, Homo sapiens
aatgtgactagagtggtggagaaattaaatttaattaaattaaatttaaatagctacatttggctagttgctactatattgaacattacagctctaaaccyaggtatatgctattctgtctgcctggtatacacaggtatgtgtggaaagtcctcatcagtgctactatctaacatcattagtattcattcttttgcaagg

SEQ ID NO: 5217 - DNA, 201 bp, Homo sapiens
ctgagctttgacaagatcagaatgatctgcttacattctatttgcttggctggaaaaaaaaacaaaaacaaaaacccagccctgtatggaagaagctatcwcccaaagcttcatcaatcatttttatcctaaatacctagcatctgatcaaaacttacgagacatactaaaaacaggatgaaattacccccgcccaaaaaa

SEQ ID NO: 5218 - DNA, 201 bp, Homo sapiens
agggtaacaaacaacgtcttaatttaaaaatccaaggtaaaatctcatgaatagtttcagattattcctctgtacttgtgaggactaaactctgacttttytctctcttgcccaaattcctaaggggcctgaggagtcctgccctacaaaccataaattctcatcagatggattttaatttaaccctacgtaacgtggctt

SEQ ID NO: 5219 - DNA, 201 bp, Homo sapiens
gccattgccctccagcctgggcaacaagagcaacattccatcttaaaaaaaaaaaaaaaaaaaaggccaggcacagtggctcacgcctgtaatcccagcaytttgggaagccgaggtgggtggatcacgagatcaggagttagagaccagcctggccaacatggtgaaactccatctctactaaaaatacaaaaattagcc

SEQ ID NO: 5220 - DNA, 201 bp, Homo sapiens
ctcgagaggctgaggcaggagaattgcttgagctcatgaggcggaggttgcagtgagccaagatcgcgccattgccctccagcctgggcaacaagagcaamattccatcttaaaaaaaaaaaaaaaaaaaaggccaggcacagtggctcacgcctgtaatcccagcactttgggaagccgaggtgggtggatcacgagatc

SEQ ID NO: 5221 - DNA, 201 bp, Homo sapiens
ggaatacaattcaaaaccaacttaaaagaaaatgtggtacactaaaccatgtaattaatttgctggaaaaacctgggaaatccacttaatcattagttttctcaaatgtggagttagaatttacaacttggttaactctaaagtccatttgagtgctgagattttaaatctgcaactaaaataaagaaagagtctcttaat

SEQ ID NO: 5222 - DNA, 201 bp, Homo sapiens
taagataatttgagatgataattttataatccaaactatttctcaattcataagtacaaatgaaaacttaatgagcaaacaaactttgtacatcttcatcrttgataaatatgttaaacacaaccattttaagttgatatcaatccatctatactatacgggtagagttataaatgaaatgaaaaaacctttttccaatta

SEQ ID NO: 5223 - DNA, 201 bp, Homo sapiens
ctccagatgaggtacttccacagatatgactaattcttgattaaaaccatacaccttttccaaatgtactgctgaccaaatcaaaatccaactgtcctcayggaatttttttaaaattattttaaatgaaaggcaaaatcttccatttatctacagaaattgtcaacaatttagattcaacacatcttggcaccctgttaa

SEQ ID NO: 5224 - DNA, 201 bp, Homo sapiens
agataagaacttgctccagatgaggtacttccacagatatgactaattcttgattaaaaccatacaccttttccaaatgtactgctgaccaaatcaaaatycaactgtcctcacggaatttttttaaaattattttaaatgaaaggcaaaatcttccatttatctacagaaattgtcaacaatttagattcaacacatctt

SEQ ID NO: 5225 - DNA, 201 bp, Homo sapiens
ccagtcatactaaccaatctggactactttagagacaactgtcatgaccttccttccttgtaccctaatttctcgtgaaacataacagctttagttcctcyaccatcctgtttgctccttcctaaactcactccaatttttttcagcgtgacactacaaactacaaataaagtctaaacagaacaaactagataagaactt

SEQ ID NO: 5226 - DNA, 201 bp, Homo sapiens
taatcccagcactttgggaggctgaggcaggcagattgcctgagttcaggagttcaggaccagcctgggcaacatggtgaaatcccatttctagtaaaacaaaaaaaaaaaaaattagccaggcacagtggcatgcacctgtagtcccagctacctgggaggctgagatgggagagtcacctgagcctgggaggtcgaagc

SEQ ID NO: 5227 - DNA, 201 bp, Homo sapiens
gaagaaacacataacgatctaaaactccaaatgcagtctttctcattacatgaaaatttttgttctttaaaaatagtcctgtgtgccattaatatttatascattttgaaatcaataaatacaactatataaaatatataatggtaaatgatactatgtaaataaagtacatttttatgtcaaagacgtaaaaagacatta

SEQ ID NO: 5228 - DNA, 201 bp, Homo sapiens
aaattaaatgatctactcagattttaaaaccaaaaatactggtttccaaaaaacagacagttaacttccatctcactgtgtcaatagtagcttttcatatmagggaaaaaataaatcactccaacaaaaccagcaatgagctcatcaaattcaaatgcagttttccatttatgtattttttatattaaagcaataaacatg

SEQ ID NO: 5229 - DNA, 201 bp, Homo sapiens
gtgtgccacgacacccagctgtgacattacttttcaaagcatctttttctcatttcagtctcacaatatccagtgaacaaggcagaacaaatattaatccrtaaagttaacaacaaatatttattctgaaaggtagcaagtgagagacaaaaaagttcaagatcctcaagtaacaaaacctaattaagaaaaagagataca

SEQ ID NO: 5230 - DNA, 201 bp, Homo sapiens
tggattttaccttcttactggacatctctaacttgatgttccaaaagcacctcagagtaacatgttccaaagaaaatttcaatgtcattgtcctttcctcytccttattttctatcttggttaactgggtaccactatccagataatcattccggtgcaaatctcagttatctacctaaaagttaccaaattcttcctttg

SEQ ID NO: 5231 - DNA, 201 bp, Homo sapiens
tacgacacctataaaagcttggatcaatgaggttaaagtgtacatcaaataaaaaataaacaggatctgcataaaatatagtactgagcttaatttttttwaaaaatgataaaatatgtaaacataataaagttgaaaatgacacttgtcaactttctaattaacactaggtggaaaaggagttttaggaatacgttctat

SEQ ID NO: 5232 - DNA, 201 bp, Homo sapiens
gtggtggtctgtatcatgaccttacatccattttcttattttatcaccatcctatgtgagatagatagagcttgtcaaaaactaagaaatgaaagacaccrggcgcggtggctcatgcctgtaatcccagcactttgggaggccgagacgggtggatcatgaggtcaggagatcgagaccatcctggctaacacagtgaaa

SEQ ID NO: 5233 - DNA, 201 bp, Homo sapiens
ctgactctgattcagaatcggaagaactgtcttctattgaactagattcgtcatttgaagaatctgaagttttagatttttcattttccttctccccatcwtcagaatcactacacataatagtaaattttgaaatatgaactttaactcctttatataagcagtttataaaaaaattgtttttaaattccagaatacatt

SEQ ID NO: 5234 - DNA, 201 bp, Homo sapiens
tggaacttaaaataaataaaataaaaataaataaacactcaaacaccaatggagttctttaaactgacagcagtgttaatgggttctatactgatgactctggaaaataggaagggttaattcattccaaacacatttgatgagcacctattatgtattaagcactgggaataaaaaaaggtcctgttctatcttccagaa

SEQ ID NO: 5235 - DNA, 201 bp, Homo sapiens
tcagcctcccaaatagctgggactacaggcacatgccaccatgcctagctaatttaatttttttttttttttttttttttgagacagagtctcactctgtygcccaggctggagtgcagtggtgcaatctcggctcactgcaacctccacctcttgggttcaagcaattctcctgcctcagcctccctagtagccgggatt

SEQ ID NO: 5236 - DNA, 201 bp, Homo sapiens
tctctgtctgaagggtcacgtatctctctgtttctctagtattggcccctgacgccttatgtagtttgtttggtgaggccatattttcctggatggtcttsatgcttacagatgttcatcagtctctgggcattgaagttaggtatttattgtagtcttcacagtctgggcttgtttgtgcttattgtatttgggaaggct

SEQ ID NO: 5237 - DNA, 201 bp, Homo sapiens
tctcagtgtctccccacagataatttgaaaaaaaaaaaaaaaaaaaacagaaatgacaccacagagaaactggacaaccctgtgactaggaaaattaacaycatgaagatggacaacctatgcctccaaatgtaatagttcaagaagcatgcatcacctatggtagtatcccagccaaggatacataacctgaatctaaac

SEQ ID NO: 5238 - DNA, 201 bp, Homo sapiens
aagattaaattcagaaaacaaaaattgccgataatactatgactaggaagtacctaggcatcattgagatggttagtgaaggatcagtgaacacagagctytaggccaagaagccaaagagcagaacagcagagggagttgcagctgaaacattaccattttgcagccattgtggaaaagacaggttcaggagattgatca

SEQ ID NO: 5239 - DNA, 201 bp, Homo sapiens
gacatgtctcaaaaaataaaaaataagagtacaaaaataagttctttacattttaaataaagaaattgaaaatcttgaagccaataatctaatacacaggmctttttagccaataaattaggtataggatctactttcataaagccatctaattctgcttctgtttgaagagaggagaagataaataatattgataaataa

SEQ ID NO: 5240 - DNA, 201 bp, Homo sapiens
aaagaagtttttttttaaatgaagaaaaacaacttagaaaaaaacagaaaataaaagttgagaatattttaaaaagaaggaaggggccaagcacagtggtrcacgcctccaattccagcaccttgggaggatgaggcaggcggattgcttgagcctaggagttcaagactagcctgggcaacatggcaagaccccatctct

SEQ ID NO: 5241 - DNA, 201 bp, Homo sapiens
atctgatacccatgaccactactctttcatcttgaaattccctcctccttttgattctgtagctctattctcatctggttctccattcgcatttgtgacayagcaatgaacaaaaatgacagaaaaacccttgccctcatagggatttcattctattaagtaaaagaaacaacaaacataataagtaagaaatttttaagt

SEQ ID NO: 5242 - DNA, 201 bp, Homo sapiens
ccaggaaatcatggactggaaaagtgataaggaatagcaatttccaatcagagatacatgcccaaaaaaggatgtataaaaatattcaacgaagggaaggytggacctttatggagccctaccaaaaaattccaaaacacaggcacctctttaggcatagagaaccactccaataaaagatgctactatccaagtggtgcg

SEQ ID NO: 5243 - DNA, 201 bp, Homo sapiens
ttacatccaggaaatcatggactggaaaagtgataaggaatagcaatttccaatcagagatacatgcccaaaaaaggatgtataaaaatattcaacgaagkgaaggctggacctttatggagccctaccaaaaaattccaaaacacaggcacctctttaggcatagagaaccactccaataaaagatgctactatccaagt

SEQ ID NO: 5244 - DNA, 201 bp, Homo sapiens
aaaggctacagaatacaggagacagcactggttagcaatatgcatttggaaagggatgagatcactacaggagggcatacagacagagaagtagactgagygacaagacatagtacaatcctaaaagtagaaattgtggccaggtgcggtggctcacgcctgtcatcccagcactttgggaggccgaggagcgtggatcac

SEQ ID NO: 5245 - DNA, 201 bp, Homo sapiens
gtattagataggttgactaacatttgcctctcacctgtttggagttggttaaatacaattttgctcccagatttaatatctgcagttttaccagatcatcytcactagtgaagcttttagccatcttcctcaaaacatcaggggcaattttaggaactcgttcacagttttctccaattagccaaagaatacttgctctag

SEQ ID NO: 5246 - DNA, 201 bp, Homo sapiens
tatcacataacattatcactaacatttatcacccagtaatctccctaaaaaagtaaagaaacattttttttccagactatcataagaataacaaccgcttycaagagaatgctgcagtggaattagaagtcttgaaagatgttcaaatcctatatctattttattctccactctaatcaggctacctaattcccttgtaat

SEQ ID NO: 5247 - DNA, 201 bp, Homo sapiens
gaatctttacgataaatgcttcataaccaatgggaagagaggagacattatttcaatattagatcatggtccttagtttcaccttaaattatatgttgaaycctttgtcaacagttacttaaaacagtgcacaaaaaactgctcttattgcattgtaaagaatgtattctaccacaacttctcagtattttgtttttttaa

SEQ ID NO: 5248 - DNA, 201 bp, Homo sapiens
ttaagacaggatctggatgtggagttcatgaagtacttccctgaagtacctctgtacctacagaaaattgctcatcaaaaaactacatttataaattttgsattttgataagttattttatggctaccactgaaaaacttaagaacttaccttaaaaatactttaaacaaaattctaaatttggactttgttaaacttatg

SEQ ID NO: 5249 - DNA, 201 bp, Homo sapiens
tcatattctaaaaaataatggtaaatatttagagttttaacttccaaatcactgaagtaaaatattttgataattcttgaaaacctctcatctcccagagmaagttcagttgtaaaaagctagattcatgcaattaaaaacattcctagcaggccccagtgtcagagtttcctttcagtttacaattgatgccactaacag

SEQ ID NO: 5250 - DNA, 201 bp, Homo sapiens
gaaaataaaaatgcaaatgtgcattttagcagtctcttgaatttattaacctaaaaggtttaatttccattttcctgcatcagctttatttataaaatgtygtgccctataaatacgccgttattttctatagtcaagcaccctcttaacaaatcttctcattaatatgtaaatttaaagtcaatcggtcttctccctgac

SEQ ID NO: 5251 - DNA, 201 bp, Homo sapiens
ttttcactgcatatagttaccctcaacctttagtttgatttttttatagtatatagagacttaataattttagctttatctctatagaggttcacagaaaragataagtataaaatgaaagagaaaaagactcttcaaggtataaaataaactttacgtttttgtaaaagaaagttacttttaaagaccccactaaaagtt

SEQ ID NO: 5252 - DNA, 201 bp, Homo sapiens
attgttcctttcactcttatccatgatttatttcacaccacatgccaaatttactttatccccaagaatctttcaaataaaagatctttattgccaaaatmttttattaaggcaaatcttaacatttactgacattcagacaccagtcaaatcctagtgactgatcgttagagcacctaagagattcactcagtttctttg

SEQ ID NO: 5253 - DNA, 201 bp, Homo sapiens
gggatctccccatgttgtccaggctggtcgctaactcctaggctcaggcaatcttcctaccttggcctcccaaactgctgggattacaggcgtgtgccacracacccagctgtgacattacttttcaaagcatctttttctcatttcagtctcacaatatccagtgaacaaggcagaacaaatattaatccgtaaagttaa

SEQ ID NO: 5254 - DNA, 201 bp, Homo sapiens
ggcacgaagggatgaaggatgtcagagagatatctaggcagaaagagttttggggaaggggacaaaaacaaagagaggggaggtggagaaaaaaaatcacmaaggcaaaagtaagagtcagaggaaaagtgaaaattagagaaaaatagataggacacagagcataaagcttcccaagaagcctagctgcaaatgagcaag

SEQ ID NO: 5255 - DNA, 201 bp, Homo sapiens
gtggtagatatacacatatgtatttatgctattatgtacttttccataggtttgcaatatttcataactaaaaatcaaaatgagctaagaaaaacattaayttatagcacttatcactacatttaaaagatgacatactattagagtttaaaatcaaaagcatcttttattcattaacttttaaattgttattaatttgtt

SEQ ID NO: 5256 - DNA, 201 bp, Homo sapiens
attcagccactatacaaaattaaataaatctgtatgacattgaaaatatatccttgtggccaggcacggtggctcacacctgtaatcccagcactttgggmggctgagacgagcggatcacctgaggtccggagttggagaccagtatggccaacatggtgaaactccatctctactaaaaatacaaaaaaattagccagg

SEQ ID NO: 5257 - DNA, 201 bp, Homo sapiens
tatttaaataagtgggaggggtagaactgacattgggtagacaagaagtatcacaacaactgcacataaaataatatttggagaatatttaatattccaayggagaacttggaatgcttcatatagtgacatgataaagtaagcaaatttaaaatgaagcaatttttgattccaaaaagaaccaaaagttccacaagagat

SEQ ID NO: 5258 - DNA, 201 bp, Homo sapiens
aagtctgtcagaaaaacaatagcttccccagaatcccaatttccagatgtggacccatttctgactctaaaggaatttagtacgttgattatttttcattrggcatataactactctgaacaaaatcaggatcctgttatttaaataagtgggaggggtagaactgacattgggtagacaagaagtatcacaacaactgca

SEQ ID NO: 5259 - DNA, 201 bp, Homo sapiens
aatatacatatgtcaaataagtctgtcagaaaaacaatagcttccccagaatcccaatttccagatgtggacccatttctgactctaaaggaatttagtaygttgattatttttcattaggcatataactactctgaacaaaatcaggatcctgttatttaaataagtgggaggggtagaactgacattgggtagacaaga

SEQ ID NO: 5260 - DNA, 201 bp, Homo sapiens
gccaggaaaaccaaaagaaaggagagagacagacagagacagagacagagagacagagagagaaagagagagagaagaagaaagcctaagaaataggattyaacacagaagagacatgaaattaagttctagaaaaacagattggaactgtgcaggcctagtaagcaatcagattagaacagagggtgaagactccaggaa

SEQ ID NO: 5261 - DNA, 201 bp, Homo sapiens
cgcaccactgcaccccagcctgggtgacagagacagactctatcccaaaaaaggaaaacaaagaagaaaagaaagtacagcaaaaatgataagccattaartataaagcatcacagtattatttttcacattttctcttagtatctgagagaaaactgctggatttaaatgaattcggtattacaggcaggtttttttaat

SEQ ID NO: 5262 - DNA, 201 bp, Homo sapiens
cttcaaggtaaaatggcccttaattcatcataaaatggtgcttatatagcatttatgtaagtgacttctgcctgtaggtaaaagggaatggagggctagartgaagacatttctacttggatgattccatgaaacaacacattcaagtgttgatggtaaaaggataaaaaagagaggtaaactctcaggaatgcctctgct

SEQ ID NO: 5263 - DNA, 201 bp, Homo sapiens
aagcccgcctcagcctcccaaagtgctgggattacaggcgtgagccaccgcgcccggcctcgtctgccaacttctaaagctaaaactaccatgtgtagtcrctaaaaagttggaagcaacatcaagcctagatcagaaagcactgaagactataaatggctacactgctcactccaaagtttctcagtaaaacaaaatcat

SEQ ID NO: 5264 - DNA, 201 bp, Homo sapiens
agaccctcaaatagcacttacacaatcgatgaataatttttccttgaattgaggtcaactgatatcaacttaaattaataaataaagcaaaatgttttatycaaagtaaaatttataaccaccagagtaactgaaattaaacagttaccaataattgcctctaaggcgtcaaccaagaggttacgagaagggaacatgtac

SEQ ID NO: 5265 - DNA, 201 bp, Homo sapiens
aattaactttataaaattaaagttgacaaggatagtaaaatttcatcaatttaagagcattatgtaacataagacttacatattaataattcaaaacatayttcaatttttaagatggataacataatcatcattttgttaatattaaaagtgagatgaaaatcagtattactgtcttgtggataaagaagtattaaaatt

SEQ ID NO: 5266 - DNA, 201 bp, Homo sapiens
ccaactagaaaagaaagaaatagtaacttattaaaaaatgtttctcccctacatcaaaggtcttactcaggcattatagtaatcagtttcatgccaatcartattaaagtattcagtcattcaattaaaatgaatgttcatgtttgaataacaaactttatggtgactattcgtcaaagaataattttaatagttctaata

SEQ ID NO: 5267 - DNA, 201 bp, Homo sapiens
cattatagtaatcagtttcatgccaatcagtattaaagtattcagtcattcaattaaaatgaatgttcatgtttgaataacaaactttatggtgactattygtcaaagaataattttaatagttctaatatgtctagaaaatactattctgaagagaagtaaattctgatgtgtttatttcaccaggttaaatttcaacac

SEQ ID NO: 5268 - DNA, 201 bp, Homo sapiens
acctaaattctaatctaaaaattcagtactttgttcataatattcagaaaaagaatcaagacaataacaaagctcacattgtgtcagtttaaaatgagaasgacaatcattctaaaatgaacttatgttaaaaagtatatgagaaattcataaattttaatagaagaacactttcaaatcatatacatcttaatccaccgg

SEQ ID NO: 5269 - DNA, 201 bp, Homo sapiens
tagaataatggggtgacaaatgatgacaaaaataaacttttactgcactgaactgctcctttatttatgaaatttggccaagtagtgaaatcttttatctrcaagttgtaacatggagtgggagcaagcgattatggtgtggtaatagtaatccagcgatggaggccgagtcggttggaaatggattgaggtaaaataact

SEQ ID NO: 5270 - DNA, 201 bp, Homo sapiens
attgacaaaatgaaataagcattcgaaagatgaactcattagaaacgacgtttaaatgtagcttgaagggcctaccttcatacgacctttcttaactactytgcaaaagcagaatttaagttttcttttcataggtcatggtcttaacaattccttaccatccatggagttggttgaccctatcatgacataaaacttctc

SEQ ID NO: 5271 - DNA, 201 bp, Homo sapiens
tattagaaaagttctctgattatagaacaaccttgaaaacagtaacttaaggtagcaaataaaacaaatactctaggaaaagatgctaataggttgatcayataactagttttaaacatttctataagtttatgctagttagtttccaaagttgggcataaggaaaaatgagattcaaagaatttattcagcaggccacat

SEQ ID NO: 5272 - DNA, 201 bp, Homo sapiens
taattttagtgcacatttaaaacagaacagaaaaaggaagtctattttacttattagtttaaacaatagatgcatgtgaataattctccattacaatatakttgagaaccattcatccacttggtatttaacatttcaccatgcatagggacattttaaataagccattgtatttttatttttaaaacatgttaagaaaag

SEQ ID NO: 5273 - DNA, 201 bp, Homo sapiens
taattatgtaaacaatagtcttattagtccctttatttacttaacacttgtgccttgggaccatagagaaggagattatgcctgaataggaacacaaaagyactgttgtttgaatttcagggtggcacagccccaaggcacattttgtctcttttctattaaaaaacttagagttaatgttacaattaatataaagttggc

SEQ ID NO: 5274 - DNA, 201 bp, Homo sapiens
cattctctttgattccttacaaaattgtcaaaccagaaggaaaagcatcaagaatacctttctttcatttttacgtgaaacagttacagattcccattagyaaaattgttgcattagaggacattaaatggtgaacttaaataaaacttaaatagagaatgttttaaagtaaaaatcagctgtgcagtttggttacttctg

SEQ ID NO: 5275 - DNA, 201 bp, Homo sapiens
gaaaaaccttagcgatttcggagctacatgttttttgttttctgctttttggccactgcacttactcataagtgctgttatcagaggacatgcaatgtaayaaaagcaaggcacctcagtttccacgacattgaacacaaacctccttcctaaacccttcctggatatttcacagagaatcacatgaaagttttcctggcc

SEQ ID NO: 5276 - DNA, 201 bp, Homo sapiens
acataaaatcgacttttattttatgctattatgtattgtattcttgtaagtggccttatattttttccatatgtggattgttgaaggcaaaccaataaatmcaatttatttatcaattcaataaacactgaatacaaccttgatcctatgtagtgtgtgaatatctggggatttaaagccaagtgagattggcccttgaag

SEQ ID NO: 5277 - DNA, 201 bp, Homo sapiens
catatatatacacacacatatataattacaaataaacttctacagagtacatactcaaaatatttttactaatagaggtaaacaatttcaaaagttagggraccactgagttacatcattatttacaacacttttgaattacttgtttattctttttaatagaaactcttcttcccaacactcctgaaggacaccacatac

SEQ ID NO: 5278 - DNA, 201 bp, Homo sapiens
cacaggaagtactcaaaacctacatatgtaatagggatatatcattatttcattattcccccacagattatcatttccaatttttctccattataaacaaygcttatacttggctagatctatttccgtacaagcacaaatacttctctaggcttgatacactaaaagtgaaattgctgaattgaaaagtatgaatatttt

SEQ ID NO: 5279 - DNA, 201 bp, Homo sapiens
agattatcatttccaatttttctccattataaacaacgcttatacttggctagatctatttccgtacaagcacaaatacttctctaggcttgatacactawaagtgaaattgctgaattgaaaagtatgaatattttacagatattgccaatttaagatcccacaaacagcatacaagagtacatgtttttctctaccttc

SEQ ID NO: 5280 - DNA, 201 bp, Homo sapiens
ccctgtctctactgaaaatactacaattagtcgggcatggtggtgcgtgcctgtagtcccagctactcgggaggctgaggcaggcaagagaatcgcttgawccaaggaggcggaggttgcagtgagctgagagcgcctgggcaacagagcgagactccatctcaaaaaaaaaaaaaaattataattttgtctcttcttttc

SEQ ID NO: 5281 - DNA, 201 bp, Homo sapiens
ttcatctatctaatctcaacttttctgtgccattctctcttagggaggtttctcataaatagcatatgttaaattttgttttttacctgtttagtaaaagyaggatttaatctctgacgtgaattgtgaaaactagtatgtgtggtgtgcatggcctctccagccacctttttttgttttatatttgccatgctttttcct

SEQ ID NO: 5282 - DNA, 201 bp, Homo sapiens
taatctcaacttttctgtgccattctctcttagggaggtttctcataaatagcatatgttaaattttgttttttacctgtttagtaaaagtaggatttaatctctgacgtgaattgtgaaaactagtatgtgtggtgtgcatggcctctccagccacctttttttgttttatatttgccatgctttttcctcttcctcttg

SEQ ID NO: 5283 - DNA, 201 bp, Homo sapiens
taataattaaaatgctatttgctcagtggtatgtatgttagtttgctgattctagtttgaatttcatttgtttacaaacctaacattttccaggatgccaytcaaatactagaagacttgctccctaaatctctagcaaacaggctttactgtagggtaaataactataatgatacatatgtttttttcatttctcataaa

SEQ ID NO: 5284 - DNA, 201 bp, Homo sapiens
tggacaccatttctagatttgctcctatatatttgagatggctatgtagaagtggctgaaaaacactggctctgttacgccacaacattaatatcaacacrtgaaatcatataggatgccatttactttgatgtaacagttgtacagtaactggtaaaatcttagctgaactcaaatttgtcaaccactaacataaagcca

SEQ ID NO: 5285 - DNA, 201 bp, Homo sapiens
ttgcatattagaaataaaacttttgttttaaaaaatattaatctaaaatgtaatactctgttagaaccacttttatttaatactgtacacttttcagttacgtatatctttagaatgaaaatagaaccatattccccatgttccttatttataattttttcagttaaatttaattaacacatttaacatacttcttgagtt

SEQ ID NO: 5286 - DNA, 201 bp, Homo sapiens
agctggtgtaacacacacacacacacacacacacacacaccccttaaatttacttgcattttaccttccagaattttgcattgataaaatctgaggaaacrgatttttattctgatttaggcttttccgttagtgagagatttctaggtatcttttgtggaaataagctaagctcttactagagtagtataacaaatacat

SEQ ID NO: 5287 - DNA, 201 bp, Homo sapiens
ccacagataatacagaaaaagaaacagatcaattaggtactatgattccaaatcaaaactgtttttgctctttatgtattagcatctacaacactggaaayatatcaaactgataagatcatcaaggtctgcttataaaatcatgaatcccagtctattatttggtcaacaaaagaaacagggataaatttgtccaatatt

SEQ ID NO: 5288 - DNA, 201 bp, Homo sapiens
gatttcgaagagaatatcttagaaaatattcatacagcaaaaaccgatggtctagaatctagattctatcagagacgaacaaattctagaagccagtctasctgcccatacctatttgtttctccattatctgttgctgcttttgtgctataatggcagaaatagttacagtgaagaccatatggtcctcaaagccaaaaa

SEQ ID NO: 5289 - DNA, 201 bp, Homo sapiens
cttctcactgtgtcctcacatggcagaagcagcaagctagctctcagggatctcttttctaagagcataaagttcatttataaaggctccacccttatgayctaatcacctcccaaaggtcctacctcctaataccatcacatgggtgatcaggtttcaccacatgaactttgggggatataaactttcagaccattgtac

SEQ ID NO: 5290 - DNA, 201 bp, Homo sapiens
attgtctcagagtccaatagactgaagctgttttctgcatggcatcaacagacagtgacagttttatcaaaccatgttcaatcagttataatgattctctstaagttaccaattattaatttcataaatataatcagcaaaatgaaaaagaaattaatttgtctctgttgaattggacaggtgaaacgaacataatatgtt

SEQ ID NO: 5291 - DNA, 201 bp, Homo sapiens
ttctttatcctgtcacctctcacctttattaccttggcatttagagtagtcacataaaagacactgaatatacccacttgccttctgaattccaaggcagcctgaagggtgctagtgccatctcaagatttacaccaggatgaaacaatctctgcaacctgctgtggcctgagactcttgcaaaatgtttaaaagtgactt

SEQ ID NO: 5292 - DNA, 201 bp, Homo sapiens
ccacataatctaagacactgcactagtcaactcaggctgttataacaaaataccacagggtaggtgcctgaaacaagagacatttatttctcacagttctmggggctgaaaagtccaagatcaaggggcaggtgattcaattcatggtgaaggccctcctcctggtgtgtggacagctacctcatatggtggaagagagga

SEQ ID NO: 5293 - DNA, 201 bp, Homo sapiens
aatatgcggacacagtgagaagatggccacctgtaagcaaaggacagaggcctcaagagaaaccaaacctgccaacaccttgagatcttgcacttctagayatcagaactgtgagaaaataaatttctgttgtttaagccacccaatctgtggtattttgtcatggcaactgtagcaaactaaaacaataatacaactact

SEQ ID NO: 5294 - DNA, 201 bp, Homo sapiens
gttgtttaagccacccaatctgtggtattttgtcatggcaactgtagcaaactaaaacaataatacaactactttgggaaaaagactgacaggttcttgcrgaaccaaaatatatccaccttatgatccaataattctatatctaggtattgacccaacatatacaaaaacataaaaagatttgtgcaagaatgttcctaa

SEQ ID NO: 5295 - DNA, 201 bp, Homo sapiens
tgcctcaaaatcaacagaggttaaatgaagaaagtttaatagatcaacatctttcaaatgtatatgtatcagcagcaacaccaatgtcatcatcgtaatartgatcccaaaaaactgctgctggcaacaaataaattccttttcaaaatgtggaaataaattagacctggtacatttaactgggagattttttaaatgaaa

SEQ ID NO: 5296 - DNA, 201 bp, Homo sapiens
tataaatataaattataaattttttaaagttataaattaacaaaagaaatcaggattgattgacaacaggaaagaaatcaagagagcaaaaataatcagaygtgaagactaaattgcaaggtgcccttcgaataaaattactgaatgaaaattttaaaaggggtattaaagaaaggtagaaaaagaaccaaaagaataaaa

SEQ ID NO: 5297 - DNA, 201 bp, Homo sapiens
aaataggaatccctgaaaaagaaaaaaaataacagaattaatatttaaaattataatcttaaaaaaaaacactttgccagagataataaaaattctgaatstacattttgaaaggactcactgagtaccaaggcaaaacaattgacccatatcaagtaatcctgaagtaccttgcaaaagtactatatttcaaagataaaa

SEQ ID NO: 5298 - DNA, 201 bp, Homo sapiens
tttgcagatatgattcattctctaaaaaaaaaaagagagagagatttaggctgcttgcttctgcctcagagttggtgctgtcatggccagtcagtctcagsggatccagtagctgctgcaggttgctgaaaagggtgtctgagacctgcagtgaaagaaccggagggagaagcaggccaaagcagcagttcaaggtgaaat

SEQ ID NO: 5299 - DNA, 201 bp, Homo sapiens
ggaaggctgaaatatatttaggtattacttctcagacattaggtctctaaatctatagcttacattccacactgtacttccaactatccattacatgtcayttggtgtgtaaacaaacaaatgctccattagcacacacagactcacttactaaattgagatatttttaattgctgttttttaaaaaccagtgaattattt

SEQ ID NO: 5300 - DNA, 201 bp, Homo sapiens
tcattaagtttgagataaatgcataaagacttttataataatccccttaagtatgaaatcttactgatcgattgattaaaatatagtcagagttatatatkaaatgcctgaaagattacatttgttcaaacattacttttgaaggaatacaaaagaaaaaatatatataaaatcatgacctacctattgctacgaagtaaa

SEQ ID NO: 5301 - DNA, 201 bp, Homo sapiens
gtcagagttatatattaaatgcctgaaagattacatttgttcaaacattacttttgaaggaatacaaaagaaaaaatatatataaaatcatgacctacctrttgctacgaagtaaacgcactagtgatttagaaattatgccagcttcagattttggtgatatgtgccaatacagctgagcaactgccataaccacctaca

SEQ ID NO: 5302 - DNA, 201 bp, Homo sapiens
tacaataatgacaaagaattagcaataatttcaagtgaatgagactcttaaatgtaataatgaaaagtttttagtaaatcttagatgtgtgtctttttaaygcacttttcctataaaataccaataaattagacgtgattcatcatgaagaatagttaaaacaaattttataataaagtgctcctaaaatatgaagttaac

SEQ ID NO: 5303 - DNA, 201 bp, Homo sapiens
ctgctgcaaattgtttatcctggcttttcacataggtctaaaagatattatttcaattagtttacacactggtattattgagttaaccaaaactccgattrtattaaactttgtcaatatataagaattccagaatacataaacttctcataagcacaatatgaggaccaagtgatgatgtagattaatttcattttgttt

SEQ ID NO: 5304 - DNA, 201 bp, Homo sapiens
atgtttaataatttcaccatgttgtgcaggttgcatttgcagtaatttctttataacaaccacactttcagcaacaactatttctgaaaaagatagaaatyattcatactaaatatgtataattcaattcaaatgcaatatgcttcgtaaaatgtaaacttaaattagaaaaacattctatttaatacaagccttaaaaga

SEQ ID NO: 5305 - DNA, 201 bp, Homo sapiens
cagtaatttctttataacaaccacactttcagcaacaactatttctgaaaaagatagaaattattcatactaaatatgtataattcaattcaaatgcaatrtgcttcgtaaaatgtaaacttaaattagaaaaacattctatttaatacaagccttaaaagactatgtgaaagcataaccatgagtgcgcttccaaatttg

SEQ ID NO: 5306 - DNA, 201 bp, Homo sapiens
taatattaacatagaaaaggttttaactattacaaaagttttacagctattaattaatttaatgtatatctaggaattaatcctgtatttatgaattttcrtcagttatcaaaaaataaacacataggaaatctcattaaaattgatttcgaagagaatatcttagaaaatattcatacagcaaaaaccgatggtctagaa

SEQ ID NO: 5307 - DNA, 201 bp, Homo sapiens
ttatattctgataatacctttaaaaggagactcaagcagtggtgcaggcttttgtgctaggaatatttttttggcatatttacttaaagctccactctttwcattcggaacaataagctgcctaataaatcttgtacggtctctgatgtcgtagttttgatcatacttgccgagatttaatatgtactgggtaagcaattt

SEQ ID NO: 5308 - DNA, 201 bp, Homo sapiens
tggcatatttacttaaagctccactcttttcattcggaacaataagctgcctaataaatcttgtacggtctctgatgtcgtagttttgatcatacttgccragatttaatatgtactgggtaagcaattttgtctgttggaaaaaaacagatcaagatgagaatacagttatttatgattatcgataactctggataaaca

SEQ ID NO: 5309 - DNA, 201 bp, Homo sapiens
ggccaattagataattccaggtacccagtagctttaatgttgagagtatgagataaggtgccaagctggaaatgatctctatctattaaaaatagggaaamatataaaataaacaatatgagctgtatataacagagaacaatcataatcagagctcaaggtaattggcatattacctcaaatgtcaaggaataaatatag

SEQ ID NO: 5310 - DNA, 201 bp, Homo sapiens
cagaagagtcctcctcttcctcagattcagaataaaacttcttagcagaattctcttgctttgcttttcctgctggggtccattcttttgcctgtttaaayaaataaagtaaatataaatgaattctcattcagagatttagagttctggcaaacttaatcattaacaacataactgaattcaaaagcaagcttaaggcct

SEQ ID NO: 5311 - DNA, 201 bp, Homo sapiens
taaatgaaagggattattttgataatacaaacttcacttaaaactacctgctgaatattatggattaggccttgtttctgagatatagaatgtaatctacyatgtaaataatatatgccaataaattataaaacccaccactgtcactgctactatcagaagagtcctcctcttcctcagattcagaataaaacttcttag

SEQ ID NO: 5312 - DNA, 201 bp, Homo sapiens
gattattttgataatacaaacttcacttaaaactacctgctgaatattatggattaggccttgtttctgagatatagaatgtaatctactatgtaaataayatatgccaataaattataaaacccaccactgtcactgctactatcagaagagtcctcctcttcctcagattcagaataaaacttcttagcagaattctct

SEQ ID NO: 5313 - DNA, 201 bp, Homo sapiens
aattacaacaaatgtataatctcttaccttagtgactcttctggattcagattcactttcaggttctgactctgattcagaatcggaagaactgtcttctwttgaactagattcgtcatttgaagaatctgaagttttagatttttcattttccttctccccatcttcagaatcactacacataatagtaaattttgaaat

SEQ ID NO: 5314 - DNA, 201 bp, Homo sapiens
attcagaatcggaagaactgtcttctattgaactagattcgtcatttgaagaatctgaagttttagatttttcattttccttctccccatcttcagaatcrctacacataatagtaaattttgaaatatgaactttaactcctttatataagcagtttataaaaaaattgtttttaaattccagaatacattaatgaggta

SEQ ID NO: 5315 - DNA, 201 bp, Homo sapiens
tttagatttttcattttccttctccccatcttcagaatcactacacataatagtaaattttgaaatatgaactttaactcctttatataagcagtttatamaaaaattgtttttaaattccagaatacattaatgaggtaataaaaaaggtattacccataaccaaataaattagaacccattcaaattcaattctatcct

SEQ ID NO: 5316 - DNA, 201 bp, Homo sapiens
tattactgggacctgattcactaagagcaaagaaatgtatttatcttatatgataaattcagtttaacaagaaaaagcaaatataaactgaatatgctaaytgtcaatacaatcatattctactttactattttactaaaaagtattctactttacttttaaaatgaacatatttagtgatcaaatatagttaaggtttta

SEQ ID NO: 5317 - DNA, 201 bp, Homo sapiens
agtttaacaagaaaaagcaaatataaactgaatatgctaattgtcaatacaatcatattctactttactattttactaaaaagtattctactttacttttwaaatgaacatatttagtgatcaaatatagttaaggttttaaatgagaattaatatttacctattggattaaaaacatgcattttcatgcctataggaagt

SEQ ID NO: 5318 - DNA, 201 bp, Homo sapiens
aattgaacttaccacaactggaaactggcagtctgagtagaatcacaaaagtcaatacccattgaaactgtaatggatccctcaggctcaagagagtctargaaataagataatttagacatgaaaacacagaggatgtgaaaaagaggcaaactaaacactgaaaatttaggtaatgtttgtagcttggttgaaactgtg

SEQ ID NO: 5319 - DNA, 201 bp, Homo sapiens
acacacacaaaagctgttgaaagcttagtttttgatctgctatcctttacaggttatataaaaaatagaagaacaattgaacttaccacaactggaaactrgcagtctgagtagaatcacaaaagtcaatacccattgaaactgtaatggatccctcaggctcaagagagtctaggaaataagataatttagacatgaaaa

SEQ ID NO: 5320 - DNA, 201 bp, Homo sapiens
ctaaagtccagatgtaagcaggttacccctgagacaggacaggcttcagttcccgcagcagaacagagccaatcacagttttctcagtgtttatgataagytgggctgtagagccttccttcagttccactgtgactagcatcaatgacccactgtgcacagttttagctgcaaacctggaagagaaaaaagagagacctt

SEQ ID NO: 5321 - DNA, 201 bp, Homo sapiens
aaagcaggagacaagaatgtcaagagtgtattctacccccactgccagatggaagggctattattataaatgaaaggcagcagtagtggatgccaggcacytttgttgtgtgccagattctaaagtccagatgtaagcaggttacccctgagacaggacaggcttcagttcccgcagcagaacagagccaatcacagtttt

SEQ ID NO: 5322 - DNA, 201 bp, Homo sapiens
ttttgttttctaggcctgactcccgtccactctcactgtcctgctcactggaggagtcctcactgctgtcctcattgctgtctccttcctccccactttcrccttgttctccactttcacttccagattcactctctgaaaaacagaaccagatgttcttagatttatagtcatttaattagacacacggacacctgtaac

SEQ ID NO: 5323 - DNA, 201 bp, Homo sapiens
actgacacactttcaactctgcagaaaccttgtagctatttgcctactcactccattatttaccttcagagctcgctgaaaagtgcttatggacaggagtrcaagatcctgctgttcttcagcatatcgaaccaggtaaacatataccaacttcttgatctgttaaaaaaaaaatcatttattcatagccagagtgaaaat

SEQ ID NO: 5324 - DNA, 201 bp, Homo sapiens
aactgacacactttcaactctgcagaaaccttgtagctatttgcctactcactccattatttaccttcagagctcgctgaaaagtgcttatggacaggagkgcaagatcctgctgttcttcagcatatcgaaccaggtaaacatataccaacttcttgatctgttaaaaaaaaaatcatttattcatagccagagtgaaaa

SEQ ID NO: 5325 - DNA, 201 bp, Homo sapiens
aagccatcacaacactgccagctaccaactagaaaagaaagaaatagtaacttattaaaaaatgtttctcccctacatcaaaggtcttactcaggcattayagtaatcagtttcatgccaatcagtattaaagtattcagtcattcaattaaaatgaatgttcatgtttgaataacaaactttatggtgactattcgtcaa

SEQ ID NO: 5326 - DNA, 201 bp, Homo sapiens
cctctttccaagggctgacaaactgtgtccgagcatatcgagttagcatgtggattatgacaacctgcccccactcttcaacatccactagtaagttacayagcttgcggtaatttttatgaatcagatctattctgtccgggcatacttcttcaaaagccatcacaacactgccagctaccaactagaaaagaaagaaat

SEQ ID NO: 5327 - DNA, 201 bp, Homo sapiens
tggcaatgtcactgtaaacactgtgtcatgctgctcctcctaacaagggcctcttgccagtatcaaactaaaagtgtatatacttacaccaataaatatgyatcaatcagtgccaaaataatggataattatgcttgcatttatattggttgcctgctttagtaaaagaacaagagacaaatgagtcttccttaaatatgc

SEQ ID NO: 5328 - DNA, 201 bp, Homo sapiens
ataaatgagggagaaatgacagatcttccttacaaaataattctaagtgactatgctaaatcatgtgaatgagtactcaaagtctgaaacatatttctatkacagcattgtatccatattccaaggtaatgtgtatctccaaaaatccagacagaagtaaagatgctttccaatggaaaactattaaatgaaaatgactca

SEQ ID NO: 5329 - DNA, 201 bp, Homo sapiens
cctcaaatatatacatatttatatatatttatatatttacatatatatttttaaatatttatatatttacatatttttaaatatttgtatatatttttatatatatatatatatatatatatatttttttttttagacagagtctcgctctgtcaccctggctggagtgcagtggcgtgatctcgctcactgcaagctccc

SEQ ID NO: 5330 - DNA, 201 bp, Homo sapiens
atcctcaaatatatacatatttatatatatttatatatttacatatatatttttaaatatttatatatttacatatttttaaatatttgtatatatttttwtatatatatatatatatatatatatttttttttttagacagagtctcgctctgtcaccctggctggagtgcagtggcgtgatctcgctcactgcaagctc

SEQ ID NO: 5331 - DNA, 201 bp, Homo sapiens
aaaatatgtacatgtatgaaatgaaatactaccatagaatactttttttagtttctttaaaaatatacatttaagctggaccaaaccaaaaaaaaaaaaaatttaaaaaaatggggaccaatttatactggagaaggctttgcagtttctttaaagcaaagataatgttttataaatacactctcaatagaaatgaaatta

SEQ ID NO: 5332 - DNA, 201 bp, Homo sapiens
agcactttggttagacattcctagtctattgctatacatttattaggttggtgcaaaggaattgaggtttttgccattgtggtaaaaaccacaattatttytgcaccaacctcataatcatgtgtaaatatacagtcacctatatatctctcttctttgtcttcttccatctagagttctctgtgctagttcattagctat

SEQ ID NO: 5333 - DNA, 201 bp, Homo sapiens
ttttatttttatttatttatttatttatttttttgagacacccaggctggagtgcagtggtgcgatctcggctcactgcaagctctgcctcctgggttcaygccattctcctgcctcagcctcccaagtagctgggactacaggtgcccgccaccgtgcccggctaattttttttgtatttttagtagagatggggtttca

SEQ ID NO: 5334 - DNA, 201 bp, Homo sapiens
tacagaccactttgatataacaggagctttttaaaaatcttttttttttttacacaaattggtttttaaaatctataatactgtattttaaaaagataagmcatcaaaagactagaatgaatgtgctattcttacaacatttaaggatttatttaaactggtttaaaattaccttaaatcttaaatgtatacatcctaagg

SEQ ID NO: 5335 - DNA, 201 bp, Homo sapiens
tacaacatttaaggatttatttaaactggtttaaaattaccttaaatcttaaatgtatacatcctaaggatcttaattacaagttatatgataaaattttytaaattgtcaatatgatgaaaagaataaggcatacttaaaaaaaagaataaggcgtacttctaatgttaatctgcacaaagaaaacaaatagcttcactt

SEQ ID NO: 5336 - DNA, 201 bp, Homo sapiens
ccctaaaattatccctcagaaagaagttgcctcatacttgaggatttataaatgtattatgaggctcttacacaactgcttcattttgaaccataatgtaktgtttggggaactcattacactgaaacaacttcaatcaatgctagttatggatgcttaaaaggagtcacaaatcacagtgataaaagatgtcatttttaa

SEQ ID NO: 5337 - DNA, 201 bp, Homo sapiens
gaaagattacttaaggccaaggtagaaagattacttaaggccaggagttctagaccagcctgggcaacagagcaaaaccttgcctctactacaagtaaaawaataaaacaaaactcagccattcatgggggtatgtacccatagtcttagctgctcaggaggctgaggtgggaggatcactggagcccaatactttgaggc

SEQ ID NO: 5338 - DNA, 201 bp, Homo sapiens
ttatgcagacaagacccagaagaagtagtaaatctagaaacctagaattctgattggcttttggaattgcttttccccaaaaaaaaaaaaaaaaaaaaaaaggatgtgttaattagacaagaggaagctgagaggcctaaaagctcagtagagctttcagcaggttaacaaaaatgcagtaacaaaaggtgaggccaggat

SEQ ID NO: 5339 - DNA, 201 bp, Homo sapiens
gaggcgggtggatcacgaggtcaggagattgagaccatcctggctaacacggtgaaaccccgcctctactaaaaaaatacaaaaaagtagccaggcatggtggtgggtgcctgtagtcccagctactcgggaggctgaggcaggagaatggcgtgaacctgggaggcagagattgcagtaagccgagattggccactgcac

SEQ ID NO: 5340 - DNA, 201 bp, Homo sapiens
ccacaacttattgtcccatatttttatggccagtttatacagacaccccacaagcccttttcccaacatgaagaaaggaagaaaccagcaaagaagctctwagactccttgaacctcagtttgaaagcgggcagtccttctcagtattcctccttatccactcaaataacatacttctcccaccctctctcccttctgctt

SEQ ID NO: 5341 - DNA, 201 bp, Homo sapiens
ggagcataggaattgaggggagccacatttgggccctgagggaaaagtaaggttcataggtggaaagcataggagaatatgtcctttttcattttatttgrttgaagttcctgatatttgaaaaagctgcagtaccagcgattctgccctttgaaggtgactctctagataaaaggtgagaaaggaagacaagttttcagg

SEQ ID NO: 5342 - DNA, 201 bp, Homo sapiens
ttcagagctcgctgaaaagtgcttatggacaggagtgcaagatcctgctgttcttcagcatatcgaaccaggtaaacatataccaacttcttgatctgttaaaaaaaaaatcatttattcatagccagagtgaaaatttaaaactcagtatttgctataccaaaatccatgctcaattcttctcaagtaaataactgaatc

SEQ ID NO: 5343 - DNA, 201 bp, Homo sapiens
agagtcacctgagcctgggaggtcgaagctgcagtgaggcaggattgtgccactgcactccagcctgggcaactggaaagagactctgtctcaaaaatttwaaaaatttaaaattaaaaaaaaagttatatactcaaagaacacaagaaatgaggggaaaaagttggagatagctggaattggtgctggaaatataaaaac

SEQ ID NO: 5344 - DNA, 201 bp, Homo sapiens
ttcataagtacaaatgaaaacttaatgagcaaacaaactttgtacatcttcatcattgataaatatgttaaacacaaccattttaagttgatatcaatcchtctatactatacgggtagagttataaatgaaatgaaaaaacctttttccaattactcttcaatgttgaatggctccacaaaaccttaaaaacaaaatcta

SEQ ID NO: 5345 - DNA, 201 bp, Homo sapiens
tgagtaccaaggcaaaacaattgacccatatcaagtaatcctgaagtaccttgcaaaagtactatatttcaaagataaaatcttcagggccagcatctttyttaatgcaaacacaatgtaagcatttcctttagactgaaacaaggcaagaatgcccaccatctccactactattgaacacaactgtagtgatggcactaa

SEQ ID NO: 5346 - DNA, 201 bp, Homo sapiens
tgaacactgagcatgaaaccactgcaggggggtgagggagacattaaaaacgatactacacacttaattactatcaccaagaatgtaacaaattaattcaacagtcattcaacaaatattaaatacctgtgatgaacaagtattcaatattttttactttctggtgtattttggaaacagacattccaattttacacagat

SEQ ID NO: 5347 - DNA, 201 bp, Homo sapiens
gaacactgagcatgaaaccactgcaggggggtgagggagacattaaaaacgatactacacacttaattactatcaccaagaatgtaacaaattaattcaacagtcattcaacaaatattaaatacctgtgatgaacaagtattcaatattttttactttctggtgtattttggaaacagacattccaattttacacagata

SEQ ID NO: 5348 - DNA, 201 bp, Homo sapiens
gaaactacaagtataatctccatgtataagacaatattttcaaaaatatatagtaaaaaaaccatgaaaagaattaaaatgttcactagaacatattcacytaatctaagaaaaagcaataaaggagaaataaggaacaaaaaaggcatgaaacatataaaagcaagtaaaatgacagcttaaaatccaactatattaata

SEQ ID NO: 5349 - DNA, 201 bp, Homo sapiens
tgatgatagcatcctaagatgagctggaatccttttcctcagtagttttgagaaatataaagtgggtacaaaagccccatctaagatactagtacactagyaactcacatcccccataggtcacctctattccttgatcttaccatgttaaccacttagccacaggttaaagatttttttctcaacttgccttttttcaga

SEQ ID NO: 5350 - DNA, 201 bp, Homo sapiens
acatttgagatagaatactaacagactataagctcaaggcaaggagaggcaagcattgaggctggaatatactggtgcccaatgatagaaggacttttaarccgttagagtgagcatggatcttatcccataagtttctaaggagaaaaggtgagtgagaagcatgataaaaccttgtctggcagttaacataggaatatg

SEQ ID NO: 5351 - DNA, 201 bp, Homo sapiens
tgagatacattccatcaatacctagtttattgcgtgtttttagcatgaagggctgttgaattttgccaaaggccttttctgcatctattgagataatcatrtggtttttgtcgttggttctgtttatgtgatagattacatttattgatttgcatatgttgaaccagccttgcatcccagggaagaatccatcttgactgt

SEQ ID NO: 5352 - DNA, 201 bp, Homo sapiens
tcatctgcaaacagggacaatttgacttcctcttttcctaattgaatacccgttatttctttctcttgcctgattgccctggccagaactgccaacaccaygttgagtaggagtggtgagagagggcataattgtcttgtgccagttttcaaagggaatgtttccagtttttgcccattcagtatgatattggcagtgggt

SEQ ID NO: 5353 - DNA, 201 bp, Homo sapiens
taaggagattttgggctgagacgatggggttttctaaatgtacaatcatgtcatctgcaaacagggacaatttgacttcctcttttcctaattgaataccygttatttctttctcttgcctgattgccctggccagaactgccaacaccacgttgagtaggagtggtgagagagggcataattgtcttgtgccagttttca

SEQ ID NO: 5354 - DNA, 201 bp, Homo sapiens
aggtattttattctcttcatagcaattgtgaatgggagttcactcattaatttggctttctgtttgtctgttcttggtctataggaatgcttctgattttygcacattgagtttttatcctgagacactttgctgaagttgtttatcaacttaaggagattttgggctgagacgatggggttttctaaatgtacaatcatg

SEQ ID NO: 5355 - DNA, 201 bp, Homo sapiens
ttctttataacaaccacactttcagcaacaactatttctgaaaaagatagaaattattcatactaaatatgtataattcaattcaaatgcaatatgcttcrtaaaatgtaaacttaaattagaaaaacattctatttaatacaagccttaaaagactatgtgaaagcataaccatgagtgcgcttccaaatttgaggtgtg

SEQ ID NO: 5356 - DNA, 201 bp, Homo sapiens
atgaccatactatgcatggaaaataaaatcataactacaaaattagcgaaccctctgaaatcacacacccatcctccttacgctctcacacttgcccgtgyaagaatgcttgtgcactttctctgtcaccataaccatgttccctggattagaatgtttctgttatttgttaatgagcttcatcatctgccaataaaatgg

SEQ ID NO: 5357 - DNA, 201 bp, Homo sapiens
tataattatttcatcatatattacaatgtaataataatagaaataaagtgcaccataaatgtaatgcttttgaatcatcctgaagccatcctacccacccygggtccagagaaaaattgtcttccacagtactggtccctggtgccaaaaacgttggggactactgatatagcctattgctcctaggctacaaatctgtac

SEQ ID NO: 5358 - DNA, 201 bp, Homo sapiens
gacacaataaacaagaaatatttagtaacttaagatatatatttaaatattttactagttttctctggctaactgggttataagtaattttttttttttttagacagatcctactctgtctcccaggctagagtccagtggctcaatcatagctcacggcagcttcgacctcccaggtttaagtgatcccccacctcagct

SEQ ID NO: 5359 - DNA, 201 bp, Homo sapiens
ggaatggtttttctatgtactttatatgaaaatgtatgaagttacttatctaagaaaaattggtgtttctgaaggacatcaacccaagaaaacttatttttaactaacattttttaacagagttctttaaagcgtttcacaaaggtcagtatgagctgattttttttaatgtgaacatttccacaacaaattttaaaaatt

SEQ ID NO: 5360 - DNA, 201 bp, Homo sapiens
ctagacaagtacatgaattttcagcaggacatacacagaatcatggggatggagggtgaagaggaaaggggatttattttgtctaaaaaaattttttttttcagaatatagctctactatactaggaatggtttttctatgtactttatatgaaaatgtatgaagttacttatctaagaaaaattggtgtttctgaaggac

SEQ ID NO: 5361 - DNA, 201 bp, Homo sapiens
agatgccaatctgatgctacattatccccaaaaacttctatgtatatttcctataaacaaggacatgttccacagactacagtacaacgaagaaaatcagrtcattaaactgatgcattactttcacacaattgtcactatgcacgtaagtttcaataactgtctcaatgatgtataataaaaggatccagttcaatatca

SEQ ID NO: 5362 - DNA, 201 bp, Homo sapiens
cttgggtgacgggtgcaccgaaatctcagaaatcaccactaaagaacttatgcatgtaaccaaacaccacctgttcaccaaaaacctactgaaaaaaaaamaaaaacaaaaaaaataaaacagcaaatgatctaaacgctccaattagaaggcaaagactgtaggaggagttctttacatattctgagtacaaatcattta

SEQ ID NO: 5363 - DNA, 201 bp, Homo sapiens
tgcaatggcaaaaatatggaaccagcccaaatgcccatcaatcaacatgtggataaagaacatgttatatatatacacacacacacacacacacacacacmtacacaccatggaatactgctcagctataaaaaaggaacaaaataatggcattcacagaaactagatagaattggagactattattctaagtgaagtaac

SEQ ID NO: 5364 - DNA, 201 bp, Homo sapiens
tgcacacacgtttatagcagcacaatttgcaatggcaaaaatatggaaccagcccaaatgcccatcaatcaacatgtggataaagaacatgttatatatayacacacacacacacacacacacacacatacacaccatggaatactgctcagctataaaaaaggaacaaaataatggcattcacagaaactagatagaatt

SEQ ID NO: 5365 - DNA, 201 bp, Homo sapiens
gcatttctctgatgaccaatgaggatgagcattttttcatgtgtctgttgactgcacagatgtcttcttttgagaagtgtctgttcatatactttgcccaktttctgatggggttgctcttttcttgttttttctggatattagccctttgtcagatgggtagattgcaaaatttttctcccattctgtaggtggcctgtt

SEQ ID NO: 5366 - DNA, 201 bp, Homo sapiens
cgggcatggtggtgcatggtggtgcatgcctgtaattccagctacttgggaggctgaggcaggagaattgctggaacccaggaggcagaggttgcagtgarcaggagaattgctggaacccaggaggcagaggttgcagtgagccgagatcgcgccattgcactccagcctgggaaacaagactgaaactctgtcacacac

SEQ ID NO: 5367 - DNA, 201 bp, Homo sapiens
agacatttaattgaaagtttatttctacttttaaaaatcacattgtcagccgggcacagtggctcatgcctgtaatcccagcactttgggaagccgaggcrggcggatcacctgaggctgggagtgcaagaccagcctgaccaacatggagaaaccctgtctctactaaaaatacaaaattagccgggcatggtggtgcat

SEQ ID NO: 5368 - DNA, 201 bp, Homo sapiens
tcttgaggaatcaccacactgtcttccacaatggttgaactagtttacagtcccaccaacagtgtaaaagtgtttctatttctccacatcctctccagcayctgttgtttcctgactttttaatgatcgccatactaactggtgtgagatggtatttcattgtggttttgatttgcatttctctgatgaccaatgaggatg

SEQ ID NO: 5369 - DNA, 201 bp, Homo sapiens
cattaaaaaaataatcatatatggcaaacccgctgaaggggtctacgtgagaataatgaatgtggaaatacaactaaaaacatggcactcaaaacttaatyggaaaaatatgcaggacatcaaaacatcagaaagtattagggggctggcaaactgcttctcctgaggtgtgttttatgaagagatactgtccctggcata

SEQ ID NO: 5370 - DNA, 201 bp, Homo sapiens
tagtcccagccactcgggaggctgaggcaggagaatggcgtgaacccgggaggcggagcttgcagtgagccgagatcgcgccactgcgctccagcctgggygacagagtaagactgtctcaacaacaacaaaaaagaaatgaaagcatgagacctcttgagcaacttaaaaaaaaaaaaaacagtacaaggtaaatctatt

SEQ ID NO: 5371 - DNA, 201 bp, Homo sapiens
taacatacttcttgagttttaaaatgtgtcatatgaaataagatattaattatgtaaatccactttattcaaggtagaaaaatcggttaaagctggtgtaacacacacacacacacacacacacacacaccccttaaatttacttgcattttaccttccagaattttgcattgataaaatctgaggaaacggatttttatt

SEQ ID NO: 5372 - DNA, 201 bp, Homo sapiens
aacatacttcttgagttttaaaatgtgtcatatgaaataagatattaattatgtaaatccactttattcaaggtagaaaaatcggttaaagctggtgtaacacacacacacacacacacacacacacaccccttaaatttacttgcattttaccttccagaattttgcattgataaaatctgaggaaacggatttttattc

SEQ ID NO: 5373 - DNA, 201 bp, Homo sapiens
acatacttcttgagttttaaaatgtgtcatatgaaataagatattaattatgtaaatccactttattcaaggtagaaaaatcggttaaagctggtgtaacmcacacacacacacacacacacacacaccccttaaatttacttgcattttaccttccagaattttgcattgataaaatctgaggaaacggatttttattct

SEQ ID NO: 5374 - DNA, 201 bp, Homo sapiens
agtggcagtatgtaaggtggagtaagggagaaatcaaaggcagatacatcagttaggagtctaaattaatagtctaggcaggattttgattttttttaagsatttactgtgtgttttttacttaaataaagcctaaaaaggatcttaagagacagcttctgttatttcaaatttactgatgagaaaactgaaaagaagttg

SEQ ID NO: 5375 - DNA, 201 bp, Homo sapiens
atgttggccaggctagtctcgaactcctgacctcaagttatctacccgccttggcctcctaaagtgctgggattacaggtgtgagtcactgcgcctggccttttttttttttttttgtaaagacagagtcttactatgttgcccaggctgatcttgaactcctggcctcaagtgatcctcctgccttggcctcccaaagtt

SEQ ID NO: 5376 - DNA, 201 bp, Homo sapiens
agtcaatacccattgaaactgtaatggatccctcaggctcaagagagtctaggaaataagataatttagacatgaaaacacagaggatgtgaaaaagaggyaaactaaacactgaaaatttaggtaatgtttgtagcttggttgaaactgtgaaatgtaatgatggcttaaaaatttcaaactaagaatattaaagcaaat

SEQ ID NO: 5377 - DNA, 201 bp, Homo sapiens
tttcaaactaagaatattaaagcaaattacaaagtaacctaactattctgtttcaaggttttctttttcacaaattaattctgcgcatacaccaatgaacrcattatacccatttgtttcagaaatacatatcttcctgagaaatgtcatgttttctaatattatctctataggtactgaaaatgagaaggaaataaatgt

SEQ ID NO: 5378 - DNA, 201 bp, Homo sapiens
gcgtgaacccaggaggcggagcttgcagtgagccgagatcgcgccactgcactccagcctgggcgacagagcgagactccgtctcaaaaaaaaaaaaaaaraaaagaaaagaaaaaaaaaagaaatttttctgtaacctccaagcatatattaatattacaaacatactcattttttttttttttgctggggggcagggat

SEQ ID NO: 5379 - DNA, 201 bp, Homo sapiens
ccaggctggagtgcggtggtgtgatatgagctcactgcaacctccacctcctggtggatcctcccacttcagccccacaagtagctgggacctaaggtgcrcaccaccatgaccgcctaattttttgtatcttttaaagagttggggtttcaccatgttggctaggctggtctcaaactcctgagttcaatcgatctgcca

SEQ ID NO: 5380 - DNA, 201 bp, Homo sapiens; identical to SEQ ID NO: 5379

SEQ ID NO: 5381 - DNA, 201 bp, Homo sapiens
gaacccaggaagtggaggttgcagtgacctgagatagtgccactgtcctcaagtctgggtgatgaagcaaggctctgtctcaaaaaaaaaaaaaaaaaaamcacaaagaaaaagaaaatgtttgattacttttttaaccttgtttcctaagtttatacaagtcatattacgccaaacttctccagcatctagataaaatac

SEQ ID NO: 5382 - DNA, 201 bp, Homo sapiens
atctttttttttttaaaatactttaagttctgggatacatgtgcagaatgtgcaggtttgttacataggtatacacgtgccaaggtggttttgctacaccmatcaccctgtcatctatattaggtatttctcctaatgctagccctcccctactcccccaacccccaacaggccctggtgtgtgatgttcccctccctgtg

SEQ ID NO: 5383 - DNA, 201 bp, Homo sapiens
ctttatccagtctatcattgatggacatttgggttacttccaagtctttgttattgtaaatagtgctgcaataaacatacgtgcacatatgtctttatagyagaatgatttataatcctttgggtatatacccagtaatgggattgctgggtcaaatggtatttctggttctggatccttgaggaattgccgcactgtctt

SEQ ID NO: 5384 - DNA, 201 bp, Homo sapiens
ggaggctgagacaggagaatcacttgaacctgggaggcggaggttacagtgagccgagattgcaccattgtactccagcctggtgatagagcaagactccrtctcaaaaaaaaaaaaaaaaaaagaaagaaaagaaaagtccccctcaggtaaccataacaatttggtgtcccttccgatcttttgctcccttatgacttc

SEQ ID NO: 5385 - DNA, 201 bp, Homo sapiens
ggccccataagaggaaggaaaatgaggatgaaaacagaatggcctaaaaggaacaggtgagcttcacacaaacaatcttggtagtaacaatgatttcgtcaagacagaattatcagccattatgaatggggccatgctgaacagatttacaacaggacttcaagatccaaatggagattcccagagaaaagctaggccatg

SEQ ID NO: 5386 - DNA, 201 bp, Homo sapiens
ccccatctctactaaaaatacaaaaattagccaggcgtggtggcaggcacctgtaaccccagctactccggaggctgaggcaggagaatcgcttgaacccrggaggcggaggttgcagtgagccgagaccgcgccattgcactgcagcctggacgacagagtgagactccatctcaaaaaaaaaaatgttattataattct

SEQ ID NO: 5387 - DNA, 201 bp, Homo sapiens
tctactaaaaatacaaaaattagccaggcgtggtggcaggcacctgtaaccccagctactccggaggctgaggcaggagaatcgcttgaacccgggaggcrgaggttgcagtgagccgagaccgcgccattgcactgcagcctggacgacagagtgagactccatctcaaaaaaaaaaatgttattataattctgattcta

SEQ ID NO: 5388 - DNA, 201 bp, Homo sapiens
ctcctcactgagctgggcctccctgcaggaatttcagcaactccagccaggggtttagggacagaactctgatctccctggaacaaagccactctggggargggcagccatggtcttggtggatcagtgcacttagtccttcccctcgctagctctgaggaatccgggcagtctggatgagtgggattcccgcccccgcac

SEQ ID NO: 5389 - DNA, 201 bp, Homo sapiens
tagacagatcatcgagacacaaaatttaagaagataattcagaacttgaactcagctccggatcaagtggatctgatggatatctacagaactctccaccscaaaacaacagaatatacattcttctcagtgccacatggcacttactctaaaatcgatcacatcatcggaagtaaaacactcctcagcaaatgcaaaata

SEQ ID NO: 5390 - DNA, 201 bp, Homo sapiens
gcccgtatagccaagacaatcctaagcaaaaagaacaaagctggcggtatcactctacctgacttcaaactatactacaaggctacagtaacccaaatagmctggtactggtacaaaaacagacacatagaccaatggaacaaaatggagaactcagaaataagaccataaatctacaaccatctgatctttgacaaaacg

SEQ ID NO: 5391 - DNA, 201 bp, Homo sapiens
atctttgacaaaacggacaaaaacaagcaatagggaaagattccctatttaataaaaggtgctgggaaaactggctagccatatccagaaaattgatactrgaccccttccttacaccttatacaaaaattaactcaagatggaataaaaacttaaatgtgattgggcaccgtggctcacacctgcaatcccagcactttg

SEQ ID NO: 5392 - DNA, 201 bp, Homo sapiens
ttacaggcacacgccaccaccccaggctaattttttatatttttagtagaaacggggtttcaccatgttagccaggctggtctcgaactcctgacctcagytgacccacctgcctcggcctcccaaagtgttgggattacaggtgtgagccaccgcgcccggccacgttgagaacctattaacctaggaaggtcagactct

SEQ ID NO: 5393 - DNA, 201 bp, Homo sapiens
cagacaatcattatttctggtagtagcaagctctttccctcctccataactttattctgcctagtataccctcccctcatgcctctaacagcttgactgaytctttttttctttcttttttctttttttgtagtggaatatcactctgtcacccaggctggagtgcagtggtgtgatcttggctcactggaacctccgcct

SEQ ID NO: 5394 - DNA, 201 bp, Homo sapiens
catttcaattcttaaaaacttgatttttttaaaaagcttgtgtccctgtccctctccctttccctctccctctccccacggtctccctctgatgccgagcygaagctggactgtactgctgccatctcggctcactgcaacctccctgcctgattctcctgcctcagcctgccgagtgcctgcgatggcaggcgcgcgccg

SEQ ID NO: 5395 - DNA, 201 bp, Homo sapiens
tgcctcagcctgccgagtgcctgcgatggcaggcgcgcgccgccatgcctggctggttttcgtatttttttggtggagacggggtttcgctgtgttggccrggctgatctccagctcctaaccgcgagtgatccgccagccttggcctccagaggtgccgggattgcagacagtgtctggttcacttagtgctcaatggtg

SEQ ID NO: 5396 - DNA, 201 bp, Homo sapiens
ggtggagacggggtttcgctgtgttggccgggctgatctccagctcctaaccgcgagtgatccgccagccttggcctccagaggtgccgggattgcagacrgtgtctggttcacttagtgctcaatggtgcccaggctggagtgcagtggcatgatcttggctcgctacaacctccacctcccagccacctgccttggcct

SEQ ID NO: 5397 - DNA, 201 bp, Homo sapiens
gatccgccagccttggcctccagaggtgccgggattgcagacagtgtctggttcacttagtgctcaatggtgcccaggctggagtgcagtggcatgatctyggctcgctacaacctccacctcccagccacctgccttggcctcccaaagcgtccagagtgcagcctctgcccggccgccaccccgtctaggaagtgagga

SEQ ID NO: 5398 - DNA, 201 bp, Homo sapiens
cgggattgcagacagtgtctggttcacttagtgctcaatggtgcccaggctggagtgcagtggcatgatcttggctcgctacaacctccacctcccagccrcctgccttggcctcccaaagcgtccagagtgcagcctctgcccggccgccaccccgtctaggaagtgaggagcgtctctgcctggccgcccatcgtctgg

SEQ ID NO: 5399 - DNA, 201 bp, Homo sapiens
gccgaggtgggtggatcacgaggtcaggaaatcaagatcatcctggctaacacagtgaaacccgcctctactaaaaaaaaatacaaaaaattagctgggcrtgatggtagtcccagctactcaggaggctgaggcaggagaactgctcgaacccagaaggtggaggttgcagtgagccgaggtagtgccactacactccag

SEQ ID NO: 5400 - DNA, 201 bp, Homo sapiens
ggtgatttctgcatttccatctgaggtaccaccaggttcatctcactagagagtgccagacagtgggtgcagcgcactgtgcgcaagccggagcaggatgwggcattgcctcactcaggaagcgcaaggggtcagggagttccctttcctagtcaaagaaaggggtgacagacggcacctggaaaatcgggtcactcccac

SEQ ID NO: 5401 - DNA, 201 bp, Homo sapiens
aaacagaaaggacatccacaccaaaaacccatctgtacatcaccatcatcaaagatcaaaagtagataaaaccacaaagatggggaaaaaacagagcagaraaactggaaactctaaaaagcagagtgcctctcctcctccaaaggaacgcagctcctcaccagcaacagaacaaagctggacggagaatgacgttgacga

SEQ ID NO: 5402 - DNA, 201 bp, Homo sapiens
aactggaaactctaaaaagcagagtgcctctcctcctccaaaggaacgcagctcctcaccagcaacagaacaaagctggacggagaatgacgttgacgagytgagagaagaaggcttcagatgatcaaactactccaagctacaggaggaaatacaaaccaatggcaaataagttaaaaactttaaaaaaaaattagacga

SEQ ID NO: 5403 - DNA, 201 bp, Homo sapiens
ttagagaaaaaagaacaaaaagaaacgaacaaagcctccaagaaatgtgggactatgtgaaaagaccaaatctacgtctcattggtgtacctgaaagtgaygggtagaatggaaccaagtgggaaaacactctgcaggatattatccaggagaacttccccaatctagcaagaaaggccaacattcggattcaggaaatac

SEQ ID NO: 5404 - DNA, 201 bp, Homo sapiens
attcaggaaatacagagaacgccacaaagatactccttgagaagagcaactccaagacacataattgtcagattcaccaaacttgaaatgaaggaaaaaaygttaagggcagccagagagaaaggtcgggttacctacaaagggaagcccatcagactaacagctgatctcttggcagaaactctacaagccagaggagag

SEQ ID NO: 5405 - DNA, 201 bp, Homo sapiens
aaggtcgggttacctacaaagggaagcccatcagactaacagctgatctcttggcagaaactctacaagccagaggagagtgggggccaatattccacatkcttaaagaaaagaattttcaacccagaatttcatatccagccaaactaagcttcctaagtgaaggagaaataaaatactttacagacaagcaaatgctga

SEQ ID NO: 5406 - DNA, 201 bp, Homo sapiens
agaaactctacaagccagaggagagtgggggccaatattccacatgcttaaagaaaagaattttcaacccagaatttcatatccagccaaactaagcttcmtaagtgaaggagaaataaaatactttacagacaagcaaatgctgagagagttttgtcaccacccggcctgccctaaaagagctcctaaaggaagcactaa

SEQ ID NO: 5407 - DNA, 201 bp, Homo sapiens
aagcactaaatatggaaaagaacaaccagtaccagccactgcaaaaaacatgccaaaatgtaaagaccatcaaggctaggaagaaactgcatcaactaacragcaaaataaccagctaacatcataatgacaggaccaaattcacacataacaatattaactttaaatgtaaatgggctaaatgctccaattaaaagacac

SEQ ID NO: 5408 - DNA, 201 bp, Homo sapiens
ccactgcaaaaaacatgccaaaatgtaaagaccatcaaggctaggaagaaactgcatcaactaacgagcaaaataaccagctaacatcataatgacaggaycaaattcacacataacaatattaactttaaatgtaaatgggctaaatgctccaattaaaagacacagactggcaaattggataaagagtcaagacccatc

SEQ ID NO: 5409 - DNA, 201 bp, Homo sapiens
ctaaatgctccaattaaaagacacagactggcaaattggataaagagtcaagacccatcagtgtgttgtattcaggaaacccatctcacgtggagagtcayacataaactcaaaataaagggatggaggaagatctaccaagcaaatggaaaacaaaaaaaggcaggggttgcaatcctagtctcagataaaacagacttt

SEQ ID NO: 5410 - DNA, 201 bp, Homo sapiens
ataaagggatggaggaagatctaccaagcaaatggaaaacaaaaaaaggcaggggttgcaatcctagtctcagataaaacagactttaaaccaacaaagaycaaaagagacaaagaaggccattacataatggtaaagggatcaattcaacaagaagagctaactatcctaaatatatatgcacccaatacaggagcaccc

SEQ ID NO: 5411 - DNA, 201 bp, Homo sapiens
tctaccaagcaaatggaaaacaaaaaaaggcaggggttgcaatcctagtctcagataaaacagactttaaaccaacaaagatcaaaagagacaaagaaggycattacataatggtaaagggatcaattcaacaagaagagctaactatcctaaatatatatgcacccaatacaggagcacccagattcataaagcaagtcc

SEQ ID NO: 5412 - DNA, 201 bp, Homo sapiens
catggaaactgaacaacctgctcctgaatgactactgggtacataacaaaatgagggcagaaataaagatgttctttgaaaccaacgagaacaaagacacmacataccagaatctctgggacacattcaaagcagtgtgtagagggaaatttatagcactgaatgcccacaagagaaagcaggaaagatccaaaattgaca

SEQ ID NO: 5413 - DNA, 201 bp, Homo sapiens
tcagagcagaactgaaggaaatagagacagaaaaaacccttcaaaaaaatcaatgaatccaggagctgcttttttgaaaagatcaacaaaattgatagacygctagcaagactaataaagaagaaaagagagaagaatcaaatagatgcaataaaaaatgataaaagggatatcaccactgatcccacagaaatacaaact

SEQ ID NO: 5414 - DNA, 201 bp, Homo sapiens
ccatccccatcaagctaccaatgactttcttcacagaattggaaaaaactactttaaagttcatatggaaccaagaaagagtccgcatcgccaagtcaatyctaagccaaaagaacaaagctggaggcatcatgccatctgacttcaaactatactacaagtctacagtaaccaaaacagcatggtactggtaccaaaaca

SEQ ID NO: 5415 - DNA, 201 bp, Homo sapiens
tttgcaacctactcatctgacaaagggctaatatccagaatctacaatgaactcaaacaaatttacaagaaaaaaacaaacaaccccatcaaaaagtgggygaaggatgtgaacagacacttctcaaaagaagacatttatgcagccaaaaaacacatgaaaaaatgctcgtcatcactgaccatcagagaaatgcaaatc

SEQ ID NO: 5416 - DNA, 201 bp, Homo sapiens
aaacaaccccatcaaaaagtgggcgaaggatgtgaacagacacttctcaaaagaagacatttatgcagccaaaaaacacatgaaaaaatgctcgtcatcamtgaccatcagagaaatgcaaatcaaaaccacaatgagataccatctcacaccagttagaatggcaatcattaaaaagtcaggaaacaacaggtgctggag

SEQ ID NO: 5417 - DNA, 201 bp, Homo sapiens
cactgttggtgggactgtaaactagttcaaccattgtggaagtcagtgtggcgattcctcagggatctagaactagaaataccatttgacccagccatccsattactgggtatatacccaaaggattataaatcatgctgctataaagacacaggcacatgtatgtttattgcggcactattcacaatagcaaagacttgg

SEQ ID NO: 5418 - DNA, 201 bp, Homo sapiens
aagatcatgcccctgcactgcagcctgggtgacagagcaagactctgtctcaaaaaaaaaaaaaaaaaaaaaaaattgcacaaataaggcaactcttttgragagtacttaagagtatgcagatttgagtaaaaatcaacaaactcagctgcaaggagggatagacatgtaattgcttctcatatttttacatattactac

SEQ ID NO: 5419 - DNA, 201 bp, Homo sapiens
caaattatttgcagtgcatttagctgttactttttcataaaagcaagctgctgatgccctctgaaaactaggataaaagacttcttccatttttcccccawgctgcttatagcctctagtaatattggtcatttatttatttatgtaagggaacaacttattatagtagcttttacaccataataagacttcctaagtcaa

SEQ ID NO: 5420 - DNA, 201 bp, Homo sapiens
gttattttattgaaaaagcatagttttaacaagaaggctacatgtgtacaattttaactataagccaaatagaattcataatatatgggaaaaataaaccragaaacactaaatcatttactttagattagaagattttatgcacattagaagcagataaaaaataaaatcaatcaagttaggcagagctaaagacaattc

SEQ ID NO: 5421 - DNA, 201 bp, Homo sapiens
cagttcaatttaaaagctattgtgtttcaacaccagcccactgcacagtgcaacagtccaaagtaaaccctacaaaaacatcaatttcatttatttaaatytgtcaaaggcaaaatcagtagacatctaagcaaactgcataccaacagcaaatcagatctaatactctgtatctggactcaatatgcattaaagcctaag

SEQ ID NO: 5422 - DNA, 201 bp, Homo sapiens
agtttttacagaataacatctttcagttgttaagatatgaaatcccatctgtcccattaaacattatgtgaaatcctgtcagagcaatccacaggtagtaygggttgttttgttgttgttgttgttttttaaagacagggtcttactctgtcatccaggctggagtgcggtggtgcaatcattgctcactacaacctcaaa

SEQ ID NO: 5423 - DNA, 201 bp, Homo sapiens
aataacatctttcagttgttaagatatgaaatcccatctgtcccattaaacattatgtgaaatcctgtcagagcaatccacaggtagtatgggttgttttkttgttgttgttgttttttaaagacagggtcttactctgtcatccaggctggagtgcggtggtgcaatcattgctcactacaacctcaaactcctgggctc

SEQ ID NO: 5424 - DNA, 201 bp, Homo sapiens
ggtaaggtggccaggtgggaagaggtcttgctatcacttctgttctctctccttccagaagaaagatggacccaggattctgccctaataaagtggctcargcactgaaggaaaacatgctcaatattgacccattgtccttagatattggacagactggcttttcctaaaattgcagtgttttagaatgacactcctggg

SEQ ID NO: 5425 - DNA, 201 bp, Homo sapiens
gccaggtgggaagaggtcttgctatcacttctgttctctctccttccagaagaaagatggacccaggattctgccctaataaagtggctcaggcactgaargaaaacatgctcaatattgacccattgtccttagatattggacagactggcttttcctaaaattgcagtgttttagaatgacactcctgggtttgatggt

SEQ ID NO: 5426 - DNA, 201 bp, Homo sapiens
cattcatattcaagatgagaaatatttgattttatttcttccatctttattacttttaaatacttattatttattttacatttgttttctttctttcttawtttttttctggctttgtaaaactgctatttgttcctttattttcctttgtgaatactgaattctcaccatatttttgtatctattaatggttatcttctg

SEQ ID NO: 5427 - DNA, 201 bp, Homo sapiens
tgagctcagcagttcaagaccagcctaggcaacataacaaagacactatctccacaaaaaatccaaaaattagttggacttggtggcatacacctacagtmctagttactcaagaggctgaggtgggaggattgcttgagcccaggagttcaagaccagcctgggcaacacggcaagaccctttcaccacaaaaaaaccaa

SEQ ID NO: 5428 - DNA, 201 bp, Homo sapiens
cagcctgggcaacacggcaagaccctttcaccacaaaaaaaccaaaaaattagtcaggcatggtggcatgcacctttagtcccagctactcaggaggctgwggtaggaggaccacttgagtctgggaagctgaggcggcagtgagccaagatcgcaccatttcacttcaacatgagtgacagagcaagaccctgtccctaa

SEQ ID NO: 5429 - DNA, 201 bp, Homo sapiens
ctacttgggaggctgaggcagaagaattgcttgaacccagaaggcggaggttgcagtgagctgagatcacaccactgcactccagcctgggccacggagcragactccatctcaaaaataaaaaatagaaaataaaaaaagaatgaggaggaatgtaagtttaaaaaaaaaagtgaaagcataatgagtgggacagcgctc

SEQ ID NO: 5430 - DNA, 201 bp, Homo sapiens
ctcgctttccccctagctgctggcaaccaccattccactttttgtctctatgagtttgattattctaggtacctgataaaagtggaatcatacaattttttgtgtgtgtgtgtctggcttatttgactcagcataatgacttaagtaaggttcatccatgttgtagcatgcatcagaattccattccttcttaaagctgaa

SEQ ID NO: 5431 - DNA, 201 bp, Homo sapiens
tcgctttccccctagctgctggcaaccaccattccactttttgtctctatgagtttgattattctaggtacctgataaaagtggaatcatacaattttttgtgtgtgtgtgtctggcttatttgactcagcataatgacttaagtaaggttcatccatgttgtagcatgcatcagaattccattccttcttaaagctgaat

SEQ ID NO: 5432 - DNA, 201 bp, Homo sapiens
ggtttcactgtgttgaccaggctggtctcgaactcctgacctcacgtgatctgcccacctcggcctcccaaagtgctgggattacaggcatgagccaccggttgttgttgttttttgagacgcggtctcactctgccacccaagctggagtgcagtggcatgatcttggctcgctgcaacctctgcctcctgggttcaagc

SEQ ID NO: 5433 - DNA, 201 bp, Homo sapiens
gtttcactgtgttgaccaggctggtctcgaactcctgacctcacgtgatctgcccacctcggcctcccaaagtgctgggattacaggcatgagccaccggttgttgttgttttttgagacgcggtctcactctgccacccaagctggagtgcagtggcatgatcttggctcgctgcaacctctgcctcctgggttcaagca

SEQ ID NO: 5434 - DNA, 201 bp, Homo sapiens
tttcactgtgttgaccaggctggtctcgaactcctgacctcacgtgatctgcccacctcggcctcccaaagtgctgggattacaggcatgagccaccggttgttgttgttttttgagacgcggtctcactctgccacccaagctggagtgcagtggcatgatcttggctcgctgcaacctctgcctcctgggttcaagcaa

SEQ ID NO: 5435 - DNA, 201 bp, Homo sapiens
gtattactgcataaatcttagatactattttgttaaatatcaatatttgagtcaaaataatgctgaattagcaatattttcctcaactctttgctgaaaacaatagttgtttcaaatatattcatttttaatttacctgtgtcttcatttacctagttacctgtagctttctagctttgagtattaggataccaactttat

SEQ ID NO: 5436 - DNA, 201 bp, Homo sapiens
cattcagaatatactgtagggacttccatatctgtccatgacactgtagcttacaaaaaactaaacctgccatagaaaataactataaaagctgaaatacwtacatatacacacatatatgtatgcatatacatatacacacacacaagtactcttaaggggccatgatccttgaaagaagagaagcacaaaaagtgagcc

SEQ ID NO: 5437 - DNA, 201 bp, Homo sapiens
catcaatcatttttatcctaaatacctagcatctgatcaaaacttacgagacatactaaaaacaggatgaaattacccccgcccaaaaaagaaaaaaaggaaaaaaaaaaaaaaaaaaccaggagcagatccatgagtgactcagataccagagttatcacacagggattttaaaataattacaattaacatggtcaggaa

SEQ ID NO: 5438 - DNA, 201 bp, Homo sapiens
cctaaaaaaaaaaaaagaagcaaatttatatttctaattacaatacaaaatcagaaagattaaaaatcaatgatctaagtttccatctcagaatgctaggaaaaaaaaaacagcaaattgaactcaaagtacaagtaataaaataataaagatacaagaagaatttaataaaacagactaacatgttttgcatttatagta

SEQ ID NO: 5439 - DNA, 201 bp, Homo sapiens
agcaaggcagagaaggaagaaagcagggaggaacaaaaacataaagaaagatcagataagtagtacacaaacaattaaaataaggaatgcaataaagtaaractgggtgatcacaaaagacctccacggataagtgatctgaggtctcgaagtacaaggagacaaccaaagaaatcatacaagataacagagcaagaacaa

SEQ ID NO: 5440 - DNA, 201 bp, Homo sapiens
tgtgagaaattctaaaatcacatgccttttatgtatatcatcataaaaccagggatggcaaagcaaggaattaaatttcaatcttgttttgaaattcaacrttcttcctattcaccatactacgctgtcaatttctgctataaagctgactatattaagaatatatttcaatggccgggcactgtgactcatgcctgcaat

SEQ ID NO: 5441 - DNA, 201 bp, Homo sapiens
aatttctgctataaagctgactatattaagaatatatttcaatggccgggcactgtgactcatgcctgcaatcccaagactttgggatgcggaggcaggargatcgcttcagcccaggagttcaagaacagcctgggcaacatagggagacctaatctctacaaaagaaaaatatatattttttaacatattatataaaat

SEQ ID NO: 5442 - DNA, 201 bp, Homo sapiens
gagacctaatctctacaaaagaaaaatatatattttttaacatattatataaaatttatatatattatatattaagtcctatatatgtatatataggtgtrtatatatatataggacttaaatatatataggacttaaatatatatatatatgacttaaatatatatatatgacttaaatatatatatataaatatatata

SEQ ID NO: 5443 - DNA, 201 bp, Homo sapiens
taggtgtgtatatatatataggacttaaatatatataggacttaaatatatatatatatgacttaaatatatatatatgacttaaatatatatatataaatatatatatatatatatatatattagccaggcatggtggtgtacacctgtgggcccagctactcaggaggctgaagtgggaggatcagaccaggaggttga

SEQ ID NO: 5444 - DNA, 201 bp, Homo sapiens
ggaattcaggaaaccaatatgcaatgtctgcctttgtccctgatgcacttggaaatctcaataaaaaaattagtttttaaaaagtcacagggcagtattgyagatgaaacagttctagacatctgtagcacaacaatgtgaatatagttaacactactgaattgtacactcaaaaatggttaagatagtaaatttaatgtt

SEQ ID NO: 5445 - DNA, 201 bp, Homo sapiens
ttgcagatgaaacagttctagacatctgtagcacaacaatgtgaatatagttaacactactgaattgtacactcaaaaatggttaagatagtaaatttaaygttatgtgttttttaccacaattttttaaagtcacatggtcccaccaagtttcctgatgaaggctatgtagaaccagaaacagaaaaaaagtcctacaaa

SEQ ID NO: 5446 - DNA, 201 bp, Homo sapiens
catctgtagcacaacaatgtgaatatagttaacactactgaattgtacactcaaaaatggttaagatagtaaatttaatgttatgtgttttttaccacaattttttaaagtcacatggtcccaccaagtttcctgatgaaggctatgtagaaccagaaacagaaaaaaagtcctacaaatttgtacttgacaggaatagaa

SEQ ID NO: 5447 - DNA, 201 bp, Homo sapiens
tgcctgtactcctagcactttgggaggccaaggcaggaggacggcttgagcccaggagttcaagaccagcgtggacaacatagtaagacttgtctctaccaaaaaaaaaaaaaaaaaaatagctaggcatggtgatacatgtctgcagtcccagctactcaggaggctgaggcagaaggatcactagagcccaggagtaag

SEQ ID NO: 5448 - DNA, 201 bp, Homo sapiens
tgatattaaaggttaagaatgaatgtaatagaattttcatgtttgatattgtaaagttgacaatgaataagatttaagttaaaaaataagtcaggctttawtgatgcaatccaaatacactgggttgtattactgactacaggaaagcatgcagtactttgcttggatctaaattagctctttgaatctaaacaaatgaaa

SEQ ID NO: 5449 - DNA, 201 bp, Homo sapiens
tgttcttaaaaattacacattaagattttcattgtaaaagaacatgatgtgtacaactgagtctccaatggttcagaagacataataacatgaatacgtayatgtgcctgaatatgcatggggagagtgagtggcagagagagtaagcaagcaatgtagcattttttttttaattggtaaatctgcaaaagggtagctctc

SEQ ID NO: 5450 - DNA, 201 bp, Homo sapiens
gtggcagagagagtaagcaagcaatgtagcattttttttttaattggtaaatctgcaaaagggtagctctctgtgtcattgttgcaacttttttgtaaacytgaaactatttcatcagagtaaaccattaaaaaccagaggtgaggaatagggtaagctttaagttttttatataaactttgtcattcgattttttaaaag

SEQ ID NO: 5451 - DNA, 201 bp, Homo sapiens
tatataaactttgtcattcgattttttaaaaggcaagtaatattacggttttataaatgagaaaatgtggactcaagagagatttaatgaccacttccagmacaggggtctccttgtttctgtacaattccattagactgcaggtcaatagccaaatgtttctaatccctggaagcttctctggtggtactacttggagct

SEQ ID NO: 5452 - DNA, 201 bp, Homo sapiens
agccaccacgcccggctaatttttgtatttttagtagagacggggtttcaccatgttggccaggctggtctcgaactcctggcctcaagcgatccgcccamctcaccctcccaaagtgctgggattacaggcgtgagccgcagtgcctggccccaaatctgacaaaaatctaagagaaaacatcgtagatgttcacaaacc

SEQ ID NO: 5453 - DNA, 201 bp, Homo sapiens
ggattacaggcgtgagccgcagtgcctggccccaaatctgacaaaaatctaagagaaaacatcgtagatgttcacaaaccataaaagtaaattaatttgcraaacagattgatgccgatatacaggttaattcagtctaaacattttgctaatagtagaggcaacaagctccgtacttgttctagaacaatggatcatcaa

SEQ ID NO: 5454 - DNA, 201 bp, Homo sapiens
aaaagaggtataggtaactttctttttctctggaatattacgtataagatacaaagcatatattcctggatgaaataggtaaaactttatttttatcactaaaaaaaaaataaaaaaatgagagcattgacaagaagggacttgaggcccttactgccttagaattctaacactgtatattcttacagaaagataaaaagt

SEQ ID NO: 5455 - DNA, 201 bp, Homo sapiens
gggaggcagaggatgcagtgagctgagatggtgcattgcactccagcctgggcgaagaagcgagactctgtctcaaaaaaaaaaaaaaaaaaaaaaaaaawattgattcaaaaagttgcaggaaacctgaataaactaaataactatagaagagaattggaaacgttgccaaaagtctaccaccaaaaaaggactacacta

SEQ ID NO: 5456 - DNA, 201 bp, Homo sapiens
ggaggcagaggatgcagtgagctgagatggtgcattgcactccagcctgggcgaagaagcgagactctgtctcaaaaaaaaaaaaaaaaaaaaaaaaaaawttgattcaaaaagttgcaggaaacctgaataaactaaataactatagaagagaattggaaacgttgccaaaagtctaccaccaaaaaaggactacactaa

SEQ ID NO: 5457 - DNA, 201 bp, Homo sapiens
ttgggagggtgaggcaggagaatggcatgaacccgggaggcggagcttgcagatcatgccactgcactccagcctgggcgacagagcaagactccacctcaaaaaaaaaaaaaaagaattctatcagataaatttaacaaagagattgaaacagttaaaaagaatcaatcagaaattctagagttaaaaaatgcagttgat

SEQ ID NO: 5458 - DNA, 201 bp, Homo sapiens
aaaaacatatatcagctgaaaacaaaggtatggaaaatgacattccatcccaatggaaatgaaaaaagagcaggagttgctatacaataccaaacaaaataagacttcaagacaaaaactataagaagagacaaagaaggtcactatatgataaaggagtcaattcagcaagaggatataacaattttaaatatatatgta

SEQ ID NO: 5459 - DNA, 201 bp, Homo sapiens
tttcctcaacacataaatctttctcaaggatggaccatatgttaggtcacaaaacaagtcttaaaagcgttcaaaaaattgaaataattgcatcttctctratcacaatagaataaaactagaaattaataacaaaaggaattttggaaactatacaaacacatggaaattaaacaatatgctcctgaatgaccagtgggt

SEQ ID NO: 5460 - DNA, 201 bp, Homo sapiens
agaaacttcaaggaccacataataatatacattattaatacacttaaaaaggcactaattttattcttcaaagtaattatttttatcactgaacactccayatcatctagttgttttaattttcattccttatttaaaaatgaacgaaacagtatttgtccctctctccatttctcaaatgagtaaacaatgtctaagatg

SEQ ID NO: 5461 - DNA, 201 bp, Homo sapiens
taaatggctacgcaaattcttactaactaaagaatgtatactctttaattgaagccttaaaacacactctattatgcaaaatgcccaatatttttaaaaartgaatagtctcaatttcttatgatgtatgtacacttataattctttgctcaatactatttttgtgacttcctttcacttccccttcagcaaaaccccccc

SEQ ID NO: 5462 - DNA, 201 bp, Homo sapiens
cacatataacacagaacagagctgcatgtgaaattggcataatctcttattagaagcctagaacagagagaaaaaaggctttcaaaaggacagaatttcaytgactttctgagaacagcaaataaccagtgactgaaatataacattagcaatagataatggtcatttctactgaattggaaaacccttgcattctgaatc

SEQ ID NO: 5463 - DNA, 201 bp, Homo sapiens
atgctgttttattgttataggcaatttgtaccactcagcatgacagtgtaaactgaatcaagattaatttacatgcaaaagaacacttaggagagcagcayggtaagcaaatgtattgtctcgattgctgaggtggaaaaagaacctggaaagaaaaaaaggtgctctaattaaggggcatcaaatatgattgcttatggt

SEQ ID NO: 5464 - DNA, 201 bp, Homo sapiens
aaggataaagcgcaaatctggtgaagacctgtatttaagtaaaaacagaagaaaagcaacttgcagaagagactggaggaagagtggtcaggaaaaaaggygtgtgccaaatactgcagggaggcagaataagataagggataaaaagaagtataactgttaatcttagcaaggctgttcagattgcaggaagactacaca

SEQ ID NO: 5465 - DNA, 201 bp, Homo sapiens
tcttttaaagaattacgtaaggattgatgtaaggctaaagaaataattttgaattcttctgcttgtaatgggaaattctatttagagtaaaagaaggcaayagttgaatcttcttaggaacaaattttgagaggaaaatgagccattcaaatcacttggaaagacctccaaattcaaagacaataggcaaaatgactaatt

SEQ ID NO: 5466 - DNA, 201 bp, Homo sapiens
aggatcattttactctattctttttattctaactaataaaagagtatctgacaggcttttggtccatgttcccagcatttctgaaggcttcttatcaaatrtgctgttattacccataattttatgtatcgatttgtataatgtatttcaaggaaaaaattcaatatcagccattcttgtttctttttttctttttattga

SEQ ID NO: 5467 - DNA, 201 bp, Homo sapiens
tttgctcccagatttaatatctgcagttttaccagatcatcttcactagtgaagcttttagccatcttcctcaaaacatcaggggcaattttaggaactcrttcacagttttctccaattagccaaagaatacttgctctagcaacaggaacctaatatgagaagcagattacatagttagaagtaagttaatcatactct

SEQ ID NO: 5468 - DNA, 201 bp, Homo sapiens
acctttaaaaggagactcaagcagtggtgcaggcttttgtgctaggaatatttttttggcatatttacttaaagctccactcttttcattcggaacaatamgctgcctaataaatcttgtacggtctctgatgtcgtagttttgatcatacttgccgagatttaatatgtactgggtaagcaattttgtctgttggaaaaa

SEQ ID NO: 5469 - DNA, 201 bp, Homo sapiens
ctctcgacacaaacagcaaatgtataaattagatattataaaccctacaaatctggagcctaaaactcataaagaattggtacatatactatgtggcagaygctcagacattaagccagttctatctgattcaaacgctattgtttttacctatgatatgctgtatcctgtctgggaagacatgcacatattatacagaga

SEQ ID NO: 5470 - DNA, 201 bp, Homo sapiens
gtctgtcggcccctagtgggaggtgtctcccagttaggctacacgggggtcagggactcacttgaggaggccatctgtctgttctcagagctcaaacaccragctgggagaaccactgctctcttcagagctgtcagacaggtacactgatgtctgcagttgtctgctgccttgtgttcagctatgccttgcccagagtgg

SEQ ID NO: 5471 - DNA, 201 bp, Homo sapiens
acaaactgagacagggccttattcattcttctctcatttgtccagctaccatgccaactcactcagctgaattaaagacagtggacttctaattaggctgkttcctatcagcaatataaataatcagtccatcaataaacagatattggctataaactgttcacttttgtagatctattaagtctttccagctgataggct

SEQ ID NO: 5472 - DNA, 201 bp, Homo sapiens
ttggtgaggatgtggagcaaacaaaatctccatatgtcactgtaaggtttacagcttggttgttatgggccaaactgtgccccccaaccctaaattcttaygttgaagccttaacctccaaatatgactatatttggagacagggcctttaaagaggtgtttacattaaaatgaggccattagggtgggccctaatacaat

SEQ ID NO: 5473 - DNA, 201 bp, Homo sapiens
gagctgcaatcctttgtaggagaagaggtcctctggtctttagaattttcagcttttctgctctggtttctccctatctttgtggttttatactacctttsgtctttgatgttggtgacctagagatggggttttggtgtggatatccttttagttgatgttgatgctattcctttctgtttgttagttttccttgtaaca

SEQ ID NO: 5474 - DNA, 201 bp, Homo sapiens
atatgggatctagcttacatattttactggatattacctatccagttttaccgaacacttagatattgtttggcttaaaaacacaaagctgctccaagttkatggcttttaaatctagttaattttgaatataattaggtgaatttctgaggaaaaagaatgttgaaggtatacagttaacatattttttgatctagccac

SEQ ID NO: 5475 - DNA, 201 bp, Homo sapiens
taaaagtgggtattatctgttcaagagatataaggttttagctatatttactaaataagtttttgattacttaattttcttacttatatctgtctactagraatatctaatatgagagaaatacattacagtcacacattgtaactattttatcaatttctcctcacattttgaatagatttttcctttacatatttattt

SEQ ID NO: 5476 - DNA, 201 bp, Homo sapiens
tagagtggtggagaaattaaatttaattaaattaaatttaaatagctacatttggctagttgctactatattgaacattacagctctaaacctaggtataygctattctgtctgcctggtatacacaggtatgtgtggaaagtcctcatcagtgctactatctaacatcattagtattcattcttttgcaaggttattcta

SEQ ID NO: 5477 - DNA, 201 bp, Homo sapiens
tgtatcaatcagtgccaaaataatggataattatgcttgcatttatattggttgcctgctttagtaaaagaacaagagacaaatgagtcttccttaaataygcagatttctctagtttactactcctaattttttgcccaagttttaaaaagctcatccattctcttagtatacttgaaagtggaagactgttcaacactt

SEQ ID NO: 5478 - DNA, 201 bp, Homo sapiens
tccctagatgccaaatatgaaaaaaagtttcccccctaaaattatccctcagaaagaagttgcctcatacttgaggatttataaatgtattatgaggctcktacacaactgcttcattttgaaccataatgtattgtttggggaactcattacactgaaacaacttcaatcaatgctagttatggatgcttaaaaggagtc

SEQ ID NO: 5479 - DNA, 201 bp, Homo sapiens
agagcaaacagacaacctacagaatgggagaacatttttgtaatctgtccatctgacaaagggctaatatccagaacctacaagaaacttaagcaaatttwcaagaaactaacaaccccattaaaaagtgggcaaatggtatgaacagacacttctcaaaaaaagatatacatgcagccaagaaacatatgaaaaatagct

SEQ ID NO: 5480 - DNA, 201 bp, Homo sapiens
agagcttctgcaccgcaaacaaaactatcatcagagcaaacagacaacctacagaatgggagaacatttttgtaatctgtccatctgacaaagggctaatwtccagaacctacaagaaacttaagcaaatttacaagaaactaacaaccccattaaaaagtgggcaaatggtatgaacagacacttctcaaaaaaagatat

SEQ ID NO: 5481 - DNA, 201 bp, Homo sapiens
atctggtcacatgttagattgtaaaataaaaataatattttgtgggataataagtacaacaggaaaagcttttaaagtaagcattttaatagtccagttcmcaatagcaatagcctatcaaagtgtcccttcctcttgaagggaataaaaaatccctgagcagatctcatataagaatattaactaaattgtaaaaatatt

SEQ ID NO: 5482 - DNA, 201 bp, Homo sapiens
tcaatattttttactttctggtgtattttggaaacagacattccaattttacacagatattgtatctttacatctttttgagtacttatttcttatttggratttttaatcacatcccatgtggtgttaggcactgtgctaagggttttatatacaatagttctttctctcgacacaaacagcaaatgtataaattagata

SEQ ID NO: 5483 - DNA, 201 bp, Homo sapiens
tcaagaaagcgactgtaagtagataaaccacaaactcttttcaactgggaggaaaaaaataactagatagcagtcattattttactatgcatacatacttsccaaaaacaaatatggagaatttccaaataagaattttatatcatactagttcactgatagagacatgcattataaaatctgccaactaaaactaggaaa

SEQ ID NO: 5484 - DNA, 201 bp, Homo sapiens
acttcccaaaaacaaatatggagaatttccaaataagaattttatatcatactagttcactgatagagacatgcattataaaatctgccaactaaaactargaaaaataagaggtagtaataagcttaaaacatttgagatagaatactaacagactataagctcaaggcaaggagaggcaagcattgaggctggaatata

SEQ ID NO: 5485 - DNA, 201 bp, Homo sapiens
gcgaacagaatctactctgttccatccagcccctgtcactgaggcagagaagggaggatagagtgagggtaagtttaaatgccacaaatcttttctcctgrgtttcaggccccattttcttaaatgtttgaatggttgctgtaaacctttgactattttctgaattcaaaaagctgattggactgtttttacagattttct

SEQ ID NO: 5486 - DNA, 201 bp, Homo sapiens
accagttgttaagttaaatcccaactgcagaaactttaaaatagcaaacatatgtcttagaatggacataatatggtaataatagcaaatccttataggtwgcattaactacatgtcagacactgttctaaatgtcttacataaattaactcattttatcctcacaactcaataaacaagtatttattcttattttacaga

SEQ ID NO: 5487 - DNA, 201 bp, Homo sapiens
ctaaactaccacaggccattgaggtggagacatggggaatggctttgagagaaagggactgtgtgagaggggaaagagaagtgagggcaaggagggggagkggaagcatcgctttcttaggtgtggccagtgttgctttctgtacaaaggtattttcaaaacattttaaaagatacagcctcagctgagaatcacatattt

SEQ ID NO: 5488 - DNA, 201 bp, Homo sapiens
aaacgaggaggccaaaagaagcagcaggacagagaaaacgccacatggattcaagagttgagacaactgacagtaaaatatatgctctttggttagcaaarcaaaaagggggaaagtattgcatacatgatagatacacactagcattctaaagcaggagacaagaatgtcaagagtgtattctacccccactgccagatg

SEQ ID NO: 5489 - DNA, 201 bp, Homo sapiens
aacttaaaaaaatgttttttaaggtctgcaggccttccctttgatgctaaatttgttttctatgattgataattatataagaaagggcacactaaatatayagtgtgtagatatttttaatggcagaagtatgcctgccatgagatggtttgcaacgaattcccttaagctcacagaggactgtgcaatcaccaaatggat

SEQ ID NO: 5490 - DNA, 201 bp, Homo sapiens
ctgttcatatataataaaggtaaaatcactgggaaaatatttaaaaactgtaggctaaataatttgtggctttattagaatctatctaaattttggtgaargcagtagatagcacttactttaggctaatcagctgtaattaactactaaaaggcaaaccaaataacataaaaaaattcagaaaaatttctaagttttaga

SEQ ID NO: 5491 - DNA, 201 bp, Homo sapiens
aactgtaggctaaataatttgtggctttattagaatctatctaaattttggtgaaggcagtagatagcacttactttaggctaatcagctgtaattaactrctaaaaggcaaaccaaataacataaaaaaattcagaaaaatttctaagttttagatttgtaatttaattcacaagaagaaaatgaataaaaattcaaaaa

SEQ ID NO: 5492 - DNA, 201 bp, Homo sapiens
ctaattctgcaatgcttgaaactcatagcaatgaataaatcatgcttctgatggaggcttatatacataaccgtcaatacgtagaataatctaatctttcrtttaccactttgactaccaatcttattatatatatataaaaaagtttagccatgaaaccctaaacacaactgagaaaaagtgatagatcatgttgcatat

SEQ ID NO: 5493 - DNA, 201 bp, Homo sapiens
aataagataagggataaaaagaagtataactgttaatcttagcaaggctgttcagattgcaggaagactacacaatgcagtgagttgaagggtgaagggargattggcaatggaagaaggaacagaaagcagaagcttcctgagaatgaagaagcaaaggaataacacctaaagaaacctgagcatgcttagaggctgagg

SEQ ID NO: 5494 - DNA, 201 bp, Homo sapiens
ataataaatccacatggaacttgttttggtataatttgtgggaggaagctaccttgattttttccaaataatggtcctcacaccatttactgcatggtctrttctttccccacggatttgaaatgtcacctttatgacatacaaaatttctacatttctaaattctctggtttcattggttcttgtgtcaatatcaattat

SEQ ID NO: 5495 - DNA, 201 bp, Homo sapiens
gttctttccccacggatttgaaatgtcacctttatgacatacaaaatttctacatttctaaattctctggtttcattggttcttgtgtcaatatcaattayacagaataaaaatattcttgtggctttaaggaatatttttaaattattatagagaaagacttttttcactaaaaatgttgacttttcttgtgcatttttt

SEQ ID NO: 5496 - DNA, 201 bp, Homo sapiens
agacataacaagaaccctagtataccatcactcctccttgcacttgtctctgtggggattttggttccaatttattgttaatatttatttttcacattatrtcaacaattatttttatacgttgataaatttcgtagaatgctttgctcactactgttttattaattctatgtttttctctgtctctgatttttttttgag

SEQ ID NO: 5497 - DNA, 201 bp, Homo sapiens
ctagtattgacctagaataggatttaaaaaagtaaacggcaaatttggttaactcttacatataagcacagactcgaagaaatatatttgaatcttccagsaaatattacttcaaataaatggtttttaatactaaagataacttcttccttatgtatataaattttgatatacaaatttatgataatttctcatatttta

SEQ ID NO: 5498 - DNA, 201 bp, Homo sapiens
gtaataatatatattaaaaatatatttgtggaaatacttgaacacataatgaacaaatatttaatgagcatcttatttcatgctcggtattaagcaggcamcagcaaaccatgcttagaggccaaatctggtccactgtctatttttgcaatgcctgttcactaataatgactttcacatttctaaatggttgaaaaatca

SEQ ID NO: 5499 - DNA, 201 bp, Homo sapiens
acacataatgaacaaatatttaatgagcatcttatttcatgctcggtattaagcaggcaccagcaaaccatgcttagaggccaaatctggtccactgtctrtttttgcaatgcctgttcactaataatgactttcacatttctaaatggttgaaaaatcaaaagtaatatgattgtaacattaaaatgatatgaaattcat

SEQ ID NO: 5500 - DNA, 201 bp, Homo sapiens
tcacacaaaattccatcaaatttgtgtgactatgaactgccttttttaaatgcataatttcagactatgaactgttttttaaaagatagaatttcagaaaytcatttatttacatattttcaccgaagatgacaaaactgccataaaagatgaatcttttaaaaacatattacatttttaaataaattatattttaaaaat

SEQ ID NO: 5501 - DNA, 201 bp, Homo sapiens
gatctgtgtgcatgtttcctttgtttttttgggtgacctgggttttttgccacaaataattgctagttcattaataactataattagcatctgattcagcrgatttgtcactgtggggaattttactaaaatactaacaactaacattatgagtactatccgccagttaggacaaactggcacatatttgcttaagccaat

SEQ ID NO: 5502 - DNA, 201 bp, Homo sapiens
gtgatggtcctcaatggtaattcaaggaaagcaaacggcgaagagtacggactatgaaaatcatccttctacttcttgctaaaggagaagagtagttcagrtatctaaatcttaagctgtgtcaaatattgaaagtaactcttttaggttttaagttataatggtacagaggaaaaaaggtggaaatgtggaatttagcaa

SEQ ID NO: 5503 - DNA, 201 bp, Homo sapiens
atctttcacacaactttataaaacaaagatctgatcactatcaataacctgctctaaaatcttcagaactcctttcaactgtttcacaatatggctttcarccagtagctacttctctctcccccaaaacatacattttgtacactagctatatctagctacagaatttggcaaaaacataatatacattttatcttctct

SEQ ID NO: 5504 - DNA, 201 bp, Homo sapiens
ctgaactctaattgagaatttaagaaaattaagcatggaatgaaggatggactaagtttgcaccatctaagaagcaaaagacctaccatggagcaaataasattttacaggacatataaatgcagttcattaattaaataattctaaggagtttaccacatacggtatatacaaagattgatttagtatataattctaaag

SEQ ID NO: 5505 - DNA, 201 bp, Homo sapiens
tcccaagtagctgggattacaggcacacgccaccaccccaggctaattttttatatttttagtagaaacggggtttcaccatgttagccaggctggtctcraactcctgacctcagctgacccacctgcctcggcctcccaaagtgttgggattacaggtgtgagccaccgcgcccggccacgttgagaacctattaacct

SEQ ID NO: 5506 - DNA, 201 bp, Homo sapiens
acttctgtatggttatataaaatgttttcctgaatcaacatttgtctcaattagcatatagtatttcttacccactatgcaaactcttaaactattttgtrtttaaaaattataaatgtcagaacaaaatttaaaggtatgtaattattctacaatcggacaacttcttgctaacataaaaacgtaaagtggctctttggt

SEQ ID NO: 5507 - DNA, 201 bp, Homo sapiens
tggtcaaaaacaggataaagtgatataaatgtgaatctcttcctgacacaatgtggtctacatcactgaattttctctccactgtttcatataaaaaaaawtttcccctttacattgtgtaaagtatgtgaaatcacttaaaataaggaattactaaaagtaattttgttataggtgttatttggaacaaaagaattactt

SEQ ID NO: 5508 - DNA, 201 bp, Homo sapiens
gacttaataattttagctttatctctatagaggttcacagaaagagataagtataaaatgaaagagaaaaagactcttcaaggtataaaataaactttacrtttttgtaaaagaaagttacttttaaagaccccactaaaagttcatcaagtgtaaaattatgtttttcaatagatatattaggcattgtggtttagaatt

SEQ ID NO: 5509 - DNA, 201 bp, Homo sapiens
ttcttccataagcaaacctcaagtctttttcaatataaagagcagtatcattgtagtatttatttgttaaccatttaacacgtgtaaaattgtacttctgktttttttttttaggttcctttttaaaaaatatgtcaccaatatagtttttgagtgttgccactctaactgcatttttctaataatccctatggtttttat

SEQ ID NO: 5510 - DNA, 201 bp, Homo sapiens
gaatgagatgatcaaaaaagcttttaaataaaaaggtatatattttaaaacagtgtaacagcatgtctttaaattattatttagcatgtttggtgagacasaagaaatccatatacttgtgcaattagaaaaaggtctaagtgctattaaaaatctattcatgcagtgtgataaaactgatgcccttactgcatactgatt

SEQ ID NO: 5511 - DNA, 201 bp, Homo sapiens
ggtgagacacaagaaatccatatacttgtgcaattagaaaaaggtctaagtgctattaaaaatctattcatgcagtgtgataaaactgatgcccttactgyatactgatttctggaaagaaaagaggttatttctaacgttccaaaggttacactgcattaagaccttactcccaatctattattttaaattgggctaaag

SEQ ID NO: 5512 - DNA, 201 bp, Homo sapiens
gtggaaagcaagatacatagagaatagtatatatatgatcgtttaatttttttaaaaaatttctgaaaggatacataagaacttgttctttgtagttacasatgaatgggaggtatgagatatgggattggaagttatatcctttccacatcattgactaactcaccgctaacatgtcgtgtttataacatattattaact

SEQ ID NO: 5513 - DNA, 201 bp, Homo sapiens
atacatagagaatagtatatatatgatcgtttaatttttttaaaaaatttctgaaaggatacataagaacttgttctttgtagttacagatgaatgggagktatgagatatgggattggaagttatatcctttccacatcattgactaactcaccgctaacatgtcgtgtttataacatattattaacttatttagccacg

SEQ ID NO: 5514 - DNA, 201 bp, Homo sapiens
gggattggaagttatatcctttccacatcattgactaactcaccgctaacatgtcgtgtttataacatattattaacttatttagccacgtggtagtggtwttattttctgaagtttataacactgtcttattttagtatcacaaagtctctatgaagcgtgtgtagctattattgttcccatttaatagatgagtaaacc

SEQ ID NO: 5515 - DNA, 201 bp, Homo sapiens
tatcctttccacatcattgactaactcaccgctaacatgtcgtgtttataacatattattaacttatttagccacgtggtagtggtattattttctgaagyttataacactgtcttattttagtatcacaaagtctctatgaagcgtgtgtagctattattgttcccatttaatagatgagtaaaccaagtctcagaatat

SEQ ID NO: 5516 - DNA, 201 bp, Homo sapiens
ataataaacaagacagatcagttatcaaacctggaattattagaacacaagagatttaaatcttcataactaaagatgatcagatgtataacagtatgctracaaaatcatgtctgaagcatattttcatagcagcaaccctgaactcctgagcacaagagaaaggaattcacaatgaggaaggagcccgtgcctcttcat

SEQ ID NO: 5517 - DNA, 201 bp, Homo sapiens
aatttaacactaattgtatacttgaattactgacggttagttcacattagcctaatctctccaaataaagtctgagtttcttaaaaacaagataaagaccytataattgttatgcatttttatggtgaaaacacagaggaatgaaccatacatatggaataatccaagactgggaggtaaagatgcctttgaagactggga

SEQ ID NO: 5518 - DNA, 201 bp, Homo sapiens
tattaaagtctgatccggcgaacggtaaataaactagaagacgatgctcaaaattcagactcctgagcccagcccaagtccaattcaatcagtgtcttcasgggtgggatctaagctcaccaagtggtttccttttcactaaagtttgaaaactactagagacccctacacacattcgccccaaactcccacaactcccac

SEQ ID NO: 5519 - DNA, 201 bp, Homo sapiens
aagttagccagtcaggaacaactgcactcccatacacccacctctgagtgccaatcaatcaagagcagtctcacccacatgaccacgcatctacagatgayatcaacccacttaggaccctgaaagtccatcaatccctgaagactgcccttcccaataatccacaataatatcagcaatctctatgcccagagaagctgt

SEQ ID NO: 5520 - DNA, 201 bp, Homo sapiens
actgctccaaaaaataaagcttatttttatttttaagaaagcagtgagtttaatatatctgaacctatcttatataaaaataggtctctctctgctatgtktaccaaccaccctaatgctagtgaaaaaaaaaatcagaataaaatatagcttttcactttgctctaaaacattcactttcagaagagacaaacgttgtta

SEQ ID NO: 5521 - DNA, 201 bp, Homo sapiens
agtaagaatggtgtaaatggtgtagggaagagctgaagccttatgagtagataaaaatcatataggaaaagaggataccacaaaaaggataaagcgcaaawctggtgaagacctgtatttaagtaaaaacagaagaaaagcaacttgcagaagagactggaggaagagtggtcaggaaaaaaggcgtgtgccaaatactgc

SEQ ID NO: 5522 - DNA, 201 bp, Homo sapiens
cttaaagaagagaaggcaaagaacaagatgagagatggcttaacccactgatatttggcttcagttcatggcatgctaatgttttcttcagcacagaataygacacaaggaagagacatacttggatgcaagacgtgcaaattcctgccgagcctatttttcacagcattacttcattttttttttttttttttttttttt

SEQ ID NO: 5523 - DNA, 201 bp, Homo sapiens
aagttattttttaaaatatgaagataaccagtagaagacaaagccaaaagagatctgtttgcctttggagagtaaccactggaggtaagacggggaagggmacatgcttactatagaaccctacagaaatgaaaacatatgcttacacaaacacctgtggcactggaggcaaagatgacagctccatgggtgtacaggagt

SEQ ID NO: 5524 - DNA, 201 bp, Homo sapiens
ttttactaagtaagctgaatgtataaaaataaaaactaaatcattaaatcaataaatacattattttaaagatggaatcatatatatatacatatatatayacacacacacacgcacacaaatatatatttttatatatataggcactaaactttactggcccctaaataaattaacaggaataacaactagctctggaag

SEQ ID NO: 5525 - DNA, 201 bp, Homo sapiens
acaaacatctggccgggcacggtggctcatgcctgtaatcccagcactttgagaggccaaggcggacggatcatgagatcaggagatcgagaccatcctgrctaacacggtgaaaccccatctctattaaaaatacaaaaaaatacaaaaaaattagccaggcatgatggcaggtgcctgtagtcccagctacttgggagg

SEQ ID NO: 5526 - DNA, 201 bp, Homo sapiens
tttagtagagacggggtttgaccatattggtcaggctggtctcaaactcctaacctcatgatccacccgccttggcctcccaaagtgctgggattaccggygtgagccaccatgcccggcctactctttttcactgaaatgtattttttataaagctccgtttaagaatataaacaaaattcatcattctaatcattagta

SEQ ID NO: 5527 - DNA, 201 bp, Homo sapiens
ggtgggggggtcagccccccgcccggccagccgccccgtccgggagggaggttggggggtcagccccccgcccggccagccgccccgtccgggagggaggkagggggtcagccccccacccggccagccgccccgtccgggaggtgaggggcgcctctgcccagctgcccctactgggaagtgaggagcccctctgcccgg

SEQ ID NO: 5528 - DNA, 201 bp, Homo sapiens
agtcctagttactcaagaggctgaggtgggaggattgcttgagcccaggagttcaagaccagcctgggcaacacggcaagaccctttcaccacaaaaaaamcaaaaaattagtcaggcatggtggcatgcacctttagtcccagctactcaggaggctgtggtaggaggaccacttgagtctgggaagctgaggcggcagt

SEQ ID NO: 5529 - DNA, 201 bp, Homo sapiens
caacctgggcgacagagccagaccctgtcaaaaaaaaaaaaaaaaaaaaaaaaagaaaagaagagaaaaggaagaggaaaaggaaaaggaaaggaaaaagmcccaaacaaataaaaaggaatcctcgtcattcatatatgtgctttccatttctattttacaagtattgctttttgggtaatagatgtattacatcttgat

SEQ ID NO: 5530 - DNA, 201 bp, Homo sapiens
ccaggccactaactatatgttatgggaacttgtttcctcatctgttaaaagagtccagagccctaactctgatttttatggtaatactcacatttcaacaygcattacatgatattttcagtccagtaagaataatgtgtgactatgaataccaatttaacgtaataaaaattcaagaagattggatgtgtgttctggaaa

SEQ ID NO: 5531 - DNA, 201 bp, Homo sapiens
cttttttgtaaacttgaaactatttcatcagagtaaaccattaaaaaccagaggtgaggaatagggtaagctttaagttttttatataaactttgtcattygattttttaaaaggcaagtaatattacggttttataaatgagaaaatgtggactcaagagagatttaatgaccacttccagaacaggggtctccttgttt

SEQ ID NO: 5532 - DNA, 201 bp, Homo sapiens
ggatctctacagagtttccccttccaggctctaacaattctaaagagattaactgagagtccagcacttttaaagatttgaataggaaacatttgccatcyattgtctctaaaggcagccacctaagagacttcataagaatcttggtttctacagccctttatcctaacccagccacacctttctcttgatcccaggttt

SEQ ID NO: 5533 - DNA, 201 bp, Homo sapiens
tgtccctttaaagggtaaacaatcatttcacccctctgctcaaaactctccaaatggcatcccttctcactcagagtaaaatcaaagaccttaacaatgaytttacaaggccctacacaatcaggtctccgccttccactctgccccttatctctctgccctcatattttactaattaatttcccccacatccttcttgac

SEQ ID NO: 5534 - DNA, 201 bp, Homo sapiens
ccattttactcagagaaaaagccgaagtccctacaacagtctgcacagcccaatacaaccatcctttcatgactgcccctccacaactgtccccgtcgccygcctctctcacctcttgctgctcaccctcttgcctgatctgctctggccatgccttactgttcctccaaacgtcccaggcatgctcccagtttagggcct

SEQ ID NO: 5535 - DNA, 201 bp, Homo sapiens
tgtgtctaaccgtcataccacactgtctcaacaaaccacacaataaaccatttatcggctgtcttcctcctacggaagtaggaattaagtttcgccctttycttataccttaaacacaattcaaaaacttgtacaatcaactttcatggtttccccaaactgaattctcccttcttagttttctaagtaagttccaattct

SEQ ID NO: 5536 - DNA, 201 bp, Homo sapiens
ttttagatttgtggtaatatccaagttacacgcacatacatattaagtcagataactggcttatgctataaacaatgaaagaaattacaggtaatgtatcmcagattaatttatcagatactaaaaacaaagatttttgataaggaagacagagaaaagaagagtgaattaccttacagtagggtagcagataaccatgta

SEQ ID NO: 5537 - DNA, 201 bp, Homo sapiens
gagctcctaaaggaagcactaaatatggaaaagaacaaccagtaccagccactgcaaaaaacatgccaaaatgtaaagaccatcaaggctaggaagaaacwgcatcaactaacgagcaaaataaccagctaacatcataatgacaggaccaaattcacacataacaatattaactttaaatgtaaatgggctaaatgctcc

SEQ ID NO: 5538 - DNA, 201 bp, Homo sapiens
ccgaaaccccatctctactaaaaatacaaaagttagctgggtgtggtggcacatgtctgtaattccacctacttgggaggttgaggcagacgaatcgcttsaacccaggaggcaagaggttgcagtgagccaagaacgcaccactgcaccccagcctgggtgacagagacagactctatcccaaaaaaggaaaacaaagaa

SEQ ID NO: 5539 - DNA, 201 bp, Homo sapiens
aaaatccattcctacacattatttcctctaagtcctacaaattcctgtgacgtaaaatggaatgttactcttcgtagtgagttgaagaagtgtcccccacycccagtgcccaatactatcctcagaatctgatcttatttggaagtgggatctctgcagaaattattaatataagaattgaaatgacatcatgctggttaa

SEQ ID NO: 5540 - DNA, 201 bp, Homo sapiens
cggccgggcgcagtggctcgcgcctgtaattccagcactttgggaggccaaggcaggtggatcacctgaggtcagcagctcgagaccatcctgaccaatayggcaaaaccgtatctctactaaaagcacaaaattagccgggcatggtggtgcatgcctgtaatcccagccactcaagaagctgaggcaggagaatcgctt

SEQ ID NO: 5541 - DNA, 201 bp, Homo sapiens
tctaaaacattggactgtttataccaatacaggcatgtaccgatttctccatttttgaaggaaagttttgccaaagaagaacttacttgttgacttttttrtttctttcaacacttcaaacatggttcttcaactaccttctggccccatggtttctaatgagaaactagctgttgatcttattgaggaaaccttgtaaat

SEQ ID NO: 5542 - DNA, 201 bp, Homo sapiens
aaatttaggctgggggaggtgactcatgcctgtaatcccagcattttggtagaccaaggcaggaggatcacttgagctcagcagttcaagaccagcctagrcaacataacaaagacactatctccacaaaaaatccaaaaattagttggacttggtggcatacacctacagtcctagttactcaagaggctgaggtgggag

SEQ ID NO: 5543 - DNA, 201 bp, Homo sapiens
caattcaacaagaagagctaactatcctaaatatatatgcacccaatacaggagcacccagattcataaagcaagtcctgagtgacctacaaagagacttrgactcccacacattaataatgggagactttaacaccctactgtcaacattaaacagatcaacgagacagaaatttaacaaggatacccagtaattgaact

SEQ ID NO: 5544 - DNA, 201 bp, Homo sapiens
attgcgccactgcactccagccagggtgacagagcaagactccattaaaaaaaaaaagggaaagagagagaatgagcgagaaaaagaaagtttacacatcraaagtatcttctgtatccctggacatgaatatactcaaatagaagaaagttttcttccaagaaagcctagggtttgccagatacaggcctcatacactgt

SEQ ID NO: 5545 - DNA, 201 bp, Homo sapiens
ccttgcaaaagaggcttcacagtcttccattctcttgcccttccaccttctgcccagtaaggacacagcattactcccctccagaggatgtggcaacaacrgaccatcttagaagcaaagagcagccctcaccaggaaactaaacctgcctgtgactcaatcttggacttcctggcctccaaaaatgtgagaaataaaatt

SEQ ID NO: 5546 - DNA, 201 bp, Homo sapiens
taagagtgttttctactcttgatacttatttctaaccatttttttcttcacagactgaaaaaaaagaggggcggggagatttcagcatcctacttagaaartctcagtaggataaacccaaatcagtagttttttttcctaataagaatacactttttgtcagtaactagactagtttctttactgtaaatcatcatattc

SEQ ID NO: 5547 - DNA, 201 bp, Homo sapiens
ctcggccgggcgcagtggctcgcgcctgtaattccagcactttgggaggccaaggcaggtggatcacctgaggtcagcagctcgagaccatcctgaccaayacggcaaaaccgtatctctactaaaagcacaaaattagccgggcatggtggtgcatgcctgtaatcccagccactcaagaagctgaggcaggagaatcgc

SEQ ID NO: 5548 - DNA, 201 bp, Homo sapiens
gtaagatcaacagcagcattagattctcataggagcacaaaccctattgtaaactgcacacaagagggatctaggctgcgtgctccttatgagaatctaaygcctgatgatctgtcactgtctcccatcacaccccagatgggaccatctagttgtaagaaaacaagctcagggctcccactgattctacattatggtgag

SEQ ID NO: 5549 - DNA, 201 bp, Homo sapiens
tggtgcaatagaaagctccaccaatcgtccccccgaggacaaaaaagttaacaactatctacacagaaaaaaacaccttcataagaaccaaaaatcagggsagcactcacaggacttggtttgaacttcatatcactgaaagaagcacagaagagattaaaagtaacagtcctgaatcaccaatgccacccttttcctcag

SEQ ID NO: 5550 - DNA, 201 bp, Homo sapiens
aaaggtcatttcctttaccttctggcttccagaactgataagagtactgatgtgaaatttgattccattctcattcttgtccatttttaggtaaactgctkttttctctgctttggaagataataggatattcttctccttatcaaaaattcaccaggacgtgatctttttcatagtttttcatattcaccctgtttggcc

SEQ ID NO: 5551 - DNA, 201 bp, Homo sapiens
acacacgcacacaaatatatatttttatatatataggcactaaactttactggcccctaaataaattaacaggaataacaactagctctggaagcaattayttgtaatagggaatctgtcaaggtctccactgggttgaggaaggcagtagctaaccactaaaggaaatgttaaaaaagcaaaggtcaatgtctggcccta

SEQ ID NO: 5552 - DNA, 201 bp, Homo sapiens
acaaaatcaagaatgaaatctacaaaaatctaaggaaaagaaaacattgcaacccaacaatactattcttaagtaatctattttcccatggaaaaaaaaawagaaacctgttccgacaggcaaggactttgaaagaatgccatctacattctcttcctaaatgaaatgcccccatcacctgaaaataaaccaaaactctaa

SEQ ID NO: 5553 - DNA, 201 bp, Homo sapiens
tcaattcaacaagaagagctaactatcctaaatatatatgcacccaatacaggagcacccagattcataaagcaagtcctgagtgacctacaaagagactkagactcccacacattaataatgggagactttaacaccctactgtcaacattaaacagatcaacgagacagaaatttaacaaggatacccagtaattgaac

SEQ ID NO: 5554 - DNA, 201 bp, Homo sapiens
tccagacagttgaaacagattctctaaaagagaaagagaaaaagcaatctcagaggcagagcaagatggtgcaatagaaagctccaccaatcgtccccccraggacaaaaaagttaacaactatctacacagaaaaaaacaccttcataagaaccaaaaatcaggggagcactcacaggacttggtttgaacttcatatca

SEQ ID NO: 5555 - DNA, 201 bp, Homo sapiens
gcctcttgcttgtgaaagttagccagtcaggaacaactgcactcccatacacccacctctgagtgccaatcaatcaagagcagtctcacccacatgaccaygcatctacagatgacatcaacccacttaggaccctgaaagtccatcaatccctgaagactgcccttcccaataatccacaataatatcagcaatctctat

SEQ ID NO: 5556 - DNA, 201 bp, Homo sapiens
gtgggggggtcagccccccgcccggccagcagccccgtccgggagggaggtgggggggtcagccccctgcccggccagccgccctgtccgggagggaggtrgggggtcagccccccgcccggccagccgcctcgtccgggaggtgaggggtgcctctgcccggccgcccctactgggaagtgaggagcccctctgcccggc

SEQ ID NO: 5557 - DNA, 201 bp, Homo sapiens
aatcgattaattttacaaaagcaactttagtcttagagatctaggtttatgcttcaagaaatctcccataataggcttgaatgacaaataaaatacttaarcaattttatatccttgaaaattatacaaacttgacctagaataaaaaacaacccacatggactgcaaagagtaaggtaaatttaagaaaataaaaatgca

SEQ ID NO: 5558 - DNA, 201 bp, Homo sapiens
cttattttgtattccagagactacattggagcaaagctgatagaaaacccactaaagttctataggtgtcacatcaccagtaaaacctcaggcctgataaycaggaattcatcctgatgcacactaatactgcagaaaaatcttggtcttttaaacaatttccaacccaataattttttaaaagatgcaagcaacagcccc

SEQ ID NO: 5559 - DNA, 201 bp, Homo sapiens
catctctacaataaatacaaaaattagctgggcatggtagcatgcacctgtagtcccagctactcggaagcctgaggtgggaaggatcacttgagcccagrtggttgaggctgcagtgagccatgatcacaccactgcactccagcctaggcaacagagtaagacatgtctcaaaaaataaaaaataagagtacaaaaata

SEQ ID NO: 5560 - DNA, 201 bp, Homo sapiens
ctgccgagggcagatcacttgaggtcaggagttcaacaccagcctggccaacatgccgaaaccccatctctactaaaaatacaaaagttagctgggtgtgstggcacatgtctgtaattccacctacttgggaggttgaggcagacgaatcgcttcaacccaggaggcaagaggttgcagtgagccaagaacgcaccactg

SEQ ID NO: 5561 - DNA, 201 bp, Homo sapiens
ggtgaggggtgcctctgcccggccgcccctactgggaagtgaggagcccctctgcccggccagccgccccgtccgggagggaggtggggggtcagcccccygcccggccagccatcccgtcccggagggaggtggagggggtcagccccccgcctggccagcagccccgtctgggagggaggtgggggggtcagccccctg

SEQ ID NO: 5562 - DNA, 201 bp, Homo sapiens
ccgcccctactgggaagtgaggagcccctctgcccggccagccgccccgtccgggagggaggtggggggtcagccccctgcccggccagccatcccgtccsggagggaggtggagggggtcagccccccgcctggccagcagccccgtctgggagggaggtgggggggtcagccccctgcccggccagccgccccgtccgg

SEQ ID NO: 5563 - DNA, 201 bp, Homo sapiens
tccgtctggaaagatttatacaaaactatttattacagtcattaactcaaaacagtataccacctgactcagctaattttcctgttttgacaaaaattttwagcatcatagatcaattgtaatttttccagttggcttattaaaatttctttccatggtttctgcttgcattcctgcagggcatagacctgcactaccatg

SEQ ID NO: 5564 - DNA, 201 bp, Homo sapiens
tgccaggagctggtggggagggagggatgaacaagtagagcatagagaatttttagggcagcaaaactattgtgtatgataaaacacaatggtgtattcawgttatcatatatcagacaaaatccgaagaatgtacaacaccaaggatgaaccctaatgtaaactgtggactttgggtgacaacaatattaatgtaaattc

SEQ ID NO: 5565 - DNA, 201 bp, Homo sapiens
ggcaaatggaatactatgtaagaaagtacaggccaggcatggtggctcacgcctgtaatcccagcactttgggaggctgccgagggcagatcacttgaggwcaggagttcaacaccagcctggccaacatgccgaaaccccatctctactaaaaatacaaaagttagctgggtgtggtggcacatgtctgtaattccacct

SEQ ID NO: 5566 - DNA, 201 bp, Homo sapiens
ctatgtaagaaagtacaggccaggcatggtggctcacgcctgtaatcccagcactttgggaggctgccgagggcagatcacttgaggtcaggagttcaacrccagcctggccaacatgccgaaaccccatctctactaaaaatacaaaagttagctgggtgtggtggcacatgtctgtaattccacctacttgggaggttg

SEQ ID NO: 5567 - DNA, 201 bp, Homo sapiens
agcactttgggaggctgccgagggcagatcacttgaggtcaggagttcaacaccagcctggccaacatgccgaaaccccatctctactaaaaatacaaaarttagctgggtgtggtggcacatgtctgtaattccacctacttgggaggttgaggcagacgaatcgcttcaacccaggaggcaagaggttgcagtgagcca

SEQ ID NO: 5568 - DNA, 201 bp, Homo sapiens
cactttgggaggctgccgagggcagatcacttgaggtcaggagttcaacaccagcctggccaacatgccgaaaccccatctctactaaaaatacaaaagtyagctgggtgtggtggcacatgtctgtaattccacctacttgggaggttgaggcagacgaatcgcttcaacccaggaggcaagaggttgcagtgagccaag

SEQ ID NO: 5569 - DNA, 201 bp, Homo sapiens
ggaagaaaatacactaagacataagtgatttctgagtgttgagaatgtgatgttttaattttctttttagttttgctagcctgtaatttctaattttgtawtgtgcacatgtattcttctaaaatataaatggttatataaacaaaaaggtgtcgaacaaacaaaaaaaaccttatgacccaaataaagatgatttttaat

SEQ ID NO: 5570 - DNA, 201 bp, Homo sapiens
aagcctttggatataactgccagttaacaggaaacacagaatataaaagaattaaatgacactataaaagatgcaaccatcccattccagtaggtatagcraacaaaataacaaaataaaaagaagcagcagcaatcagacaaacccagaaggacattctgcaagacttgacaggctttaaaagatgcaatgcattagata

SEQ ID NO: 5571 - DNA, 201 bp, Homo sapiens
agtaaatccttttcccttacaaataaaagtccaatcctactggcaagaaagcaaactgtacttcctatacatgtcaatgtctttaaaattctagctgccayttggcatgccatctgttctaatatattagggtactccaaaatccaaaaggactaaatgagcctctttttcctcggtatttagaaatccaacagttgaaag

SEQ ID NO: 5572 - DNA, 201 bp, Homo sapiens
tgagttgaaatttatccattgcttccttctagcactatttatagcctgtatctaccttctcaaatatcttcacattcctgattacccttctaagataccarcacagtatatacctaaaagttatgtactcagccaggcacagtggctcacgcctgtaatcccagcactttgggaggctgaggcaggcagattgcctgagtt

SEQ ID NO: 5573 - DNA, 201 bp, Homo sapiens
cacctgagcctgggaggtcgaagctgcagtgaggcaggattgtgccactgcactccagcctgggcaactggaaagagactctgtctcaaaaatttaaaaawtttaaaattaaaaaaaaagttatatactcaaagaacacaagaaatgaggggaaaaagttggagatagctggaattggtgctggaaatataaaaacagtac

SEQ ID NO: 5574 - DNA, 201 bp, Homo sapiens
agccctgtttcttgtttttttgtttgtttgtttgtttctttttttttttttgtagagacaaggtttcaccatgttgcccaggatggtctcgaactcctggrctcaagcaatccatccaccttggcctcccaaagtgctaggattacaggcatgaacaatggtgcgtggccagagccacatttcttaatgttgaataggcag

SEQ ID NO: 5575 - DNA, 201 bp, Homo sapiens
atttcttatttggaatttttaatcacatcccatgtggtgttaggcactgtgctaagggttttatatacaatagttctttctctcgacacaaacagcaaatktataaattagatattataaaccctacaaatctggagcctaaaactcataaagaattggtacatatactatgtggcagatgctcagacattaagccagttc

SEQ ID NO: 5576 - DNA, 201 bp, Homo sapiens
cgttagagtgagcatggatcttatcccataagtttctaaggagaaaaggtgagtgagaagcatgataaaaccttgtctggcagttaacataggaatatgargtttcactttctacaaacatacacatttattactaaacattataattatctggacaaactttttaattctttcaaatttcagcttaagtcttccttctca

SEQ ID NO: 5577 - DNA, 201 bp, Homo sapiens
tgcttgagctcaggagttcaagaccagcctgggccacatggcgaaaccctgtctctacaaaaaaaaaaatataaaaaactagccaagcatggttgtaagcrcctgtagtcccagctacttgtggggctgaggcgggaggatcgcttgagcccaggaggtcgaggctgtagtgagccaagatcacaccactgcactccagcc

SEQ ID NO: 5578 - DNA, 201 bp, Homo sapiens
tttctgtttacaacaagaactagaagtcctcagggaactagctactttaccaccaatttctaaggacttcgtcatttctacccataactaaaacataaaaraaaaaaatatgccaatactaggtacctcccaaaggatggctaatgccagatgttgataaggagtcaaaaatattaagagacaaaacagagggaggaatca

SEQ ID NO: 5579 - DNA, 201 bp, Homo sapiens
ttaaaaaagtaaaagtagaactactgtttgatccagcaatcccaccagtaggtatctacccagaggaaaagaagacattatacaaaaaagatacttgcacrcacgtttatagcagcacaatttgcaatggcaaaaatatggaaccagcccaaatgcccatcaatcaacatgtggataaagaacatgttatatatatacaca

SEQ ID NO: 5580 - DNA, 201 bp, Homo sapiens
cttcatttgccaagtttgtcaaaatttcaagctatagtagagaaaagagaaagtaaacattttaaaacaaaggtagcaagatgaatttaatagagtacagrcatttaattgaaagtttatttctacttttaaaaatcacattgtcagccgggcacagtggctcatgcctgtaatcccagcactttgggaagccgaggcggg

SEQ ID NO: 5581 - DNA, 201 bp, Homo sapiens
ttataggtagcattaactacatgtcagacactgttctaaatgtcttacataaattaactcattttatcctcacaactcaataaacaagtatttattcttaytttacagataagaaaatgaaacacagacagggtaagtaacttgactaaagtaccgtatctattaaatagaagaactaagattcaagtcaagtaagcacaa

SEQ ID NO: 5582 - DNA, 201 bp, Homo sapiens
gatttgctatacttaatgcaacagctctaagacatgctttttcttctcttggatagtcttcctggtttctgatttttctattctgagttcaattttcttgkgctttctgttctactggttaccagaagctgtgacaatgacccactcaggctaaaacttttttttttttgtactctgtacatgaagccttcaattactgcc

SEQ ID NO: 5583 - DNA, 201 bp, Homo sapiens
gatgatggaacttctcatttttgtaatactccttatcatgcgttaactgtaatttggaaaacagcagattgacgcaatgaccataattctgtatctctctyttttttttttttttttttgagatggagtctccctctgttgcccaggatggagtgcagtggaccatcttggctcactgcaacctctccctcctgggttcaa

SEQ ID NO: 5584 - DNA, 201 bp, Homo sapiens
agaccaaacctgatggaggggaagacacagtcacattaagagaaacatgtaaacactggtgaaggactagaagaagatgtatgtatacatacatggaatayatatatataaattacaaatgaactcagtatgaaatttaaaatttcagcttcaagtcactgtatacaaagttctccaaagtcagaggcacaagacaatcaa

SEQ ID NO: 5585 - DNA, 201 bp, Homo sapiens
aagctcttctgaacagcattcagctatgaaacctttgccaactgcataaatgttctcttttgacttttatcaaagcagtttgtaaatggatgtaaaaaggraaaaaaaaatgtgtgagttttaggtactgatggcatcaataatattccacttaagaatctcaagataacatgtatgtatatctcaaaagatatcttctct

SEQ ID NO: 5586 - DNA, 201 bp, Homo sapiens
taacttccagctctttaccattgtccaacttggaagggtttgtcaggctcttacaggaaatcttgtccaatgcatcagaaacattagatcaacccctgaargaaaatctccttgttagaatagaaggtattgatgacgagagacatgagttgggcaatatctgcctgaaaggcaagtttccagctcctccgctccacgtgc

SEQ ID NO: 5587 - DNA, 201 bp, Homo sapiens; identical to SEQ ID NO: 5586

SEQ ID NO: 5588 - DNA, 201 bp, Homo sapiens
agctgcaaatttaaggaaaaacacttactgataggcttataaaagctgtatataattatattccctgaatgatttgagtaacaatgtgtctgatatattcyttttttttttttttttttttttttttgagatggagtcccactgtgtcacccaggctggagtgcaatggtgcaatctccgctcattgcaacctccacctcc

SEQ ID NO: 5589 - DNA, 201 bp, Homo sapiens
aaatggaaaaaaaaaatttttttaaagatagttcttcaccgggcacggtggctcatgcctgtaatcccaccactttgggaggctgagacaggtggatcacytgaggttaggagttcgagaccagcctgaccaacatggagaaaccccatctctactaaaaatacaaaactagccgggcgtggtggcacatgcctcaggagg

SEQ ID NO: 5590 - DNA, 201 bp, Homo sapiens
tgtaataaaaacatcttaataattgtacaaaattccttaaattgtttttgcatactttttgtaaccatcactactatcactagacatttaggtttgaacamccatgcacataaatctgtgtaattctaattatttccttagaagaagaatctagacatgagattacctggtcaaaaggtatacatattttgatggcttttt

SEQ ID NO: 5591 - DNA, 201 bp, Homo sapiens
ctctgccttgctcatcttgcaacttcgatctggcaagctaccctttaaaaggaaaacactctctggctcacctgcaaacagcttatatgtgccttctttgktccacagatatacttgaacaaacttctataactgtacttctcatgtaatacaaatttgtgtctttacatgtttgcatttctgctagtctgtgtgaacaga

SEQ ID NO: 5592 - DNA, 201 bp, Homo sapiens
ggaaaacactctctggctcacctgcaaacagcttatatgtgccttctttgttccacagatatacttgaacaaacttctataactgtacttctcatgtaatrcaaatttgtgtctttacatgtttgcatttctgctagtctgtgtgaacagacaataacattaatttttggtgtttctaaaccatttgaataaaatacatta

SEQ ID NO: 5593 - DNA, 201 bp, Homo sapiens
gagcgtctctgcccggccgcccatcgtctgagatgtggggagcgcctttgccccgccgccccatctgggatgtgaggagcgcctctgcccggccgcgactmcgtctgggaggtgaggagcgtctctgcccagccgccccatctgagaagggaggagaccctccacccggcaactgccccgtctgagaagtgaggagcccct

SEQ ID NO: 5594 - DNA, 201 bp, Homo sapiens
taaaatgaaagtcttattcttgtctgttcccaggttagtcctacatcacaaggaggccagagctaaccactgaacaatgctgcaatgaaatttttgtatawgcccttatatgttttattaattcaagcaatatttactgggtgcccactaactgccaggagccactctgtacactaggaatagcagtgagcaacacagaga

SEQ ID NO: 5595 - DNA, 201 bp, Homo sapiens
cactgtcctgctcactggaggagtcctcactgctgtcctcattgctgtctccttcctccccactttcgccttgttctccactttcacttccagattcactmtctgaaaaacagaaccagatgttcttagatttatagtcatttaattagacacacggacacctgtaactgtcaatattcatcacaaatgaaaccagatgtt

SEQ ID NO: 5596 - DNA, 201 bp, Homo sapiens
ctgtcctgctcactggaggagtcctcactgctgtcctcattgctgtctccttcctccccactttcgccttgttctccactttcacttccagattcactctstgaaaaacagaaccagatgttcttagatttatagtcatttaattagacacacggacacctgtaactgtcaatattcatcacaaatgaaaccagatgttga

SEQ ID NO: 5597 - DNA, 201 bp, Homo sapiens
ttggaagttctggccagggcagttaggcaggagaaggaaataaagggcattcaattaggaaaagatgaagtcaaattgtccctgtttgcacatgacatgaytgtttatctagaaaacccatcgtctcagcccaaaatctccttaagctgataagcaacttcagcaaagtctcaggatacaaaatcaatgtgcaaaaatcac

SEQ ID NO: 5598 - DNA, 201 bp, Homo sapiens
ttttatcgctttaaaataagaacattaaataagaaacaatatgaaaaccaaggtatgtaactatttgattccaactggaatggctacttgtaaggtggtamaatacttaattactccttttaaaaagctgggacacgtaagtcaacttccctctttgaaaaaccagtttaaatatagagggatactttttataaaataatt

SEQ ID NO: 5599 - DNA, 201 bp, Homo sapiens
tgtaatctcagagaaaatcctactgaatgaagaatagtaccaatccttgcttttatgttaaaaactgtcaatatttcaaacccaaatatttagcttttccyccatgtagtcaataaaaagtttttacaatattgacaacattttcaaataattattttatttatccttttaaaaatatgtcatcaatttagatactacaaa

SEQ ID NO: 5600 - DNA, 201 bp, Homo sapiens
agtatttatcataaatgaaggatacgccaaaggacagaatactcacaatcagaacatgtaagttgactgtattacagacataaatctatttgatttgaccraattcaaaatgtaaaatacatttaaactttagtttttatattttcaattattactaaataaccaattaaaacaaagccctcaatatgataaaatctatgt

SEQ ID NO: 5601 - DNA, 201 bp, Homo sapiens
tagacatatgaggaaactaggtaacaaatgagttaagaaacttgcccacatctcacagctggttagtggtggaactaggatcagaactccaaatctgaatmcaaaattcatactggatcactgggtagcgacaaaatgagtgtggtaaactaggaagaatactggtcagcaagctgttgagaccggttctgatcccacact

SEQ ID NO: 5602 - DNA, 201 bp, Homo sapiens
tatttaagtctcatttcattgcttaaggtcaaagaatgcaaaatctttaagcttcctttatgcctaaatacattcttgattttttgaaaatattcactggmtatactcctaaaagtgggtattatctgttcaagagatataaggttttagctatatttactaaataagtttttgattacttaattttcttacttatatctg

SEQ ID NO: 5603 - DNA, 201 bp, Homo sapiens
taattagattaaatgtaaatcagtatgctgattaaaagacaaaggctggcaaagtagattaaaacccatgactcaactatgtgctgcctataagaaattcmccataaacataaagataaaggcaggttaaaagtaaaaagatggaaaaatacatagcatgctaatattaatcaagggaaagcacaataactatattaatat

SEQ ID NO: 5604 - DNA, 201 bp, Homo sapiens
acaacagagaaggacattatagaatgacaaaatggataatctacaatgaaggttatataccatataattccatttatataacattcttgaaataacaaaaytatggaaacagaaagattagcagttgccaggggttaagggttgggagtaaggttaaacatgtggaataaagtcggtttggctatgaaacggcaacatgaa

SEQ ID NO: 5605 - DNA, 201 bp, Homo sapiens
aataacaaaattatggaaacagaaagattagcagttgccaggggttaagggttgggagtaaggttaaacatgtggaataaagtcggtttggctatgaaacrgcaacatgaagattccctgtgatggaaatgttctcagttttgactgtatcaatgtcaatatcctggttgtaatactgtattagagttttgcaagacatta

SEQ ID NO: 5606 - DNA, 201 bp, Homo sapiens
aactttggctctttctgttgacatctgatacccatgaccactactctttcatcttgaaattccctcctccttttgattctgtagctctattctcatctggktctccattcgcatttgtgacacagcaatgaacaaaaatgacagaaaaacccttgccctcatagggatttcattctattaagtaaaagaaacaacaaacat

SEQ ID NO: 5607 - DNA, 201 bp, Homo sapiens
agaaacaatgagaaaaatcttaaaagcatccagaggctgagcatggtgaatcatgcctataatcaagcactttgggaggccaatgcaagaggattgcttamggccaggagttcaagaccagcctgggcacaacatagtgaggcccagtctctacaaaaaatatttttaaaaaattagctgggcatgatagtgtgcacctat

SEQ ID NO: 5608 - DNA, 201 bp, Homo sapiens
ggcacaacatagtgaggcccagtctctacaaaaaatatttttaaaaaattagctgggcatgatagtgtgcacctataatcctagctactcagaaggctgasgcaagaggattgtttgagcccaggagttcaaggctgcagtgagctatgattacaccactgcactcagcctgggtgagaccctatctttttttaaaaaaaa

SEQ ID NO: 5609 - DNA, 201 bp, Homo sapiens
ccaacaactgcagaataaacattcttttcaattgtacataggacatttaccaaaatagactatataaggtttcaacaaatttgaaaggtataagaatcagrgtatgtggaatctaaatagaaaccaatacttaaaaaataaaataaaaactaaaaagtgctcacataatggtaattttttttttttgagatagggtcttgc

SEQ ID NO: 5610 - DNA, 201 bp, Homo sapiens
atatatattagccaggcatggtggtgtacacctgtgggcccagctactcaggaggctgaagtgggaggatcagaccaggaggttgaggctgcagtgagccragatcgtgccactgcactccagcctgggcgacagggtgagactctgtctcaaaaaaaaaaaaaaaaagaatatatttcaagaactataaagtaatacctt

SEQ ID NO: 5611 - DNA, 201 bp, Homo sapiens
catatcctattgaccaaactatattgaaactttttttatagttttgctacatgaatgaaaaaccgttttacaatactaagaatgctaagaaaaaaatcatytgcagtcactatcatccaaaattatttaagtaatatacaaagtatcaaaatagatgggactctgtgtgtatgtaggaataggagagaggagaaaataggg

SEQ ID NO: 5612 - DNA, 201 bp, Homo sapiens
tggtgcatataaaaagagttctggagagggatggtggtaacgattgcctaacaatatgactatatttaatgccactgaactgcacacttaacaatggttargttgcttgataccttgtcaaataggggaaaaaatggttaggatgataaagttattcaggtgtattttaccataattaaaaataaaagagaaactactcta

SEQ ID NO: 5613 - DNA, 201 bp, Homo sapiens
atcttatgaatttagagcctacaacagaaccaatttcaaacagaaattctggaaaaataaagataaataactctaatgctttctgaggatgacttaaggargaaaaaaataacagggcatataaaaacattccacagttcaaaagaaatggacccactggagaagtatgaataaattatatggggaaaaagttggatataa

SEQ ID NO: 5614 - DNA, 201 bp, Homo sapiens
cccacgcctgtaaatcccagcattttgggaggccgaggtgggcagatcatgaggtcaggagatggagaccatcccggctaacacggtgaaaccccgtctcwactaaaaatacaaaaaaaattagctgggcgtggtggagggcgcctgtagtcccagctactcgggaggctgaggcaggagaatggcgtgaacccgggaggc

SEQ ID NO: 5615 - DNA, 201 bp, Homo sapiens
ccagcattttgggaggccgaggtgggcagatcatgaggtcaggagatggagaccatcccggctaacacggtgaaaccccgtctctactaaaaatacaaaamaaattagctgggcgtggtggagggcgcctgtagtcccagctactcgggaggctgaggcaggagaatggcgtgaacccgggaggcggagcttgcagtgagt

SEQ ID NO: 5616 - DNA, 201 bp, Homo sapiens
aaaaaaaaaaaaaatactaaccacaattcttcttcttccttctctcttgagcccactcatgaggctttcagccccaccagtgcacctaaactgcttgtcamggtcaccaaagtccacccagtgacaaatccaaaactcccttctcagtaatcatcttacttgacctatttgtattatttgacacaattactccaggaatgt

SEQ ID NO: 5617 - DNA, 201 bp, Homo sapiens
ttccttcttgattattctactttaagctcttcattttaaattttgaatttggactgcaggcaatttgtttttgtcagtagttcatttatatacacaagtgmaatactgtcaaattatttcactgtaatacatttgtcattctatgagcatttataacttttcatgcagcaaaaaagaacatttcaaccaaccatctgtctg

SEQ ID NO: 5618 - DNA, 201 bp, Homo sapiens
aaagtaggatccagtttacatatgtagcaagcaaatatgttaacagctctagtaccagatctaatgaccataaatttcaattagctaaacataataaacawgacagatcagttatcaaacctggaattattagaacacaagagatttaaatcttcataactaaagatgatcagatgtataacagtatgctaacaaaatcat

SEQ ID NO: 5619 - DNA, 201 bp, Homo sapiens
atgttaacagctctagtaccagatctaatgaccataaatttcaattagctaaacataataaacaagacagatcagttatcaaacctggaattattagaacrcaagagatttaaatcttcataactaaagatgatcagatgtataacagtatgctaacaaaatcatgtctgaagcatattttcatagcagcaaccctgaact

SEQ ID NO: 5620 - DNA, 201 bp, Homo sapiens
acagatcagttatcaaacctggaattattagaacacaagagatttaaatcttcataactaaagatgatcagatgtataacagtatgctaacaaaatcatgwctgaagcatattttcatagcagcaaccctgaactcctgagcacaagagaaaggaattcacaatgaggaaggagcccgtgcctcttcatgtcatgcttatg

SEQ ID NO: 5621 - DNA, 201 bp, Homo sapiens
aatgtccttaacatttcaaaattccagcatttccattttcttcagtaaatcactgtttacacaaacaaaggcttataacaaataattttcaataggtatgycacactgaaaagttgaattacacaatttaacactaattgtatacttgaattactgacggttagttcacattagcctaatctctccaaataaagtctgagt

SEQ ID NO: 5622 - DNA, 201 bp, Homo sapiens
caatttaacactaattgtatacttgaattactgacggttagttcacattagcctaatctctccaaataaagtctgagtttcttaaaaacaagataaagacmttataattgttatgcatttttatggtgaaaacacagaggaatgaaccatacatatggaataatccaagactgggaggtaaagatgcctttgaagactggg

SEQ ID NO: 5623 - DNA, 201 bp, Homo sapiens
atagagacaaggtctcactatgttgcccaggctggtctggaactcctgggttcaagcaatcctcctgcctgggcctcccaaaatgctaagattacaggcarggggccaccattccgagcctcagtcttccttctaatacaccaagatgctctcaaaggaaaagagatttacaaatttagtagctttactattgtaattaag

SEQ ID NO: 5624 - DNA, 201 bp, Homo sapiens
cactatgttgcccaggctggtctggaactcctgggttcaagcaatcctcctgcctgggcctcccaaaatgctaagattacaggcaaggggccaccattccsagcctcagtcttccttctaatacaccaagatgctctcaaaggaaaagagatttacaaatttagtagctttactattgtaattaagaaaaattaattagtc

SEQ ID NO: 5625 - DNA, 201 bp, Homo sapiens
aaacaccagcaaacccaaaaactgattaacataaaataaaataataggctttgcaatccttagatatgtcaaattcatgaaagacaaaaaaggctaaggamctatcccagattaaagaagattaaagagacatggcaactaaattaaatatattatcttggactggaaactgtacttgaggaaaaaaatgcttgggaaaaa

SEQ ID NO: 5626 - DNA, 201 bp, Homo sapiens
cagcttccgcctcccgggttcaagcgattctcctgcctcagcctcccgagtagctgggattacaggcacgagccaccacgcccggctaatttttgtatttktagtagagacggggtttcaccatgttggccaggctggtctcgaactcctggcctcaagcgatccgcccacctcaccctcccaaagtgctgggattacagg

SEQ ID NO: 5627 - DNA, 201 bp, Homo sapiens
ctcgaactcctggcctcaagcgatccgcccacctcaccctcccaaagtgctgggattacaggcgtgagccgcagtgcctggccccaaatctgacaaaaatstaagagaaaacatcgtagatgttcacaaaccataaaagtaaattaatttgcgaaacagattgatgccgatatacaggttaattcagtctaaacattttgc

SEQ ID NO: 5628 - DNA, 201 bp, Homo sapiens
acggctccctgagccgacctggcagtccaccccctgcgcatgcgcagtgtgcaggcctgctagattaccacccgggccatccaggcctgcgcggactttcytgctccgggctttagaggtagctgagcggctgcgagccggactgcggaaggggaggcagcgggtggctaactgcccggctcccggcccgtttgaggtgtg

SEQ ID NO: 5629 - DNA, 201 bp, Homo sapiens
agagcattgacaagaagggacttgaggcccttactgccttagaattctaacactgtatattcttacagaaagataaaaagtaataactccatgggctgtgrtccagctttcccatatctccagaactgaaaaatcttttatatagccatgaagttttctgacagaggaaaaaaagtcacacttccaactggaagaaacatt

SEQ ID NO: 5630 - DNA, 201 bp, Homo sapiens
agaaacaacaaaaggttaaaaagtgaggagacgaagttaaagcacggagtttttattagttttctttttgcttgtttgtttatgcaaatagtgttaaattmctatcaggttaaaataatggattataagatagtatttgcaagcctcatggtaacctcaaaccaaaaacatacaagatatatagaaaaagtaaaaaacaaa

SEQ ID NO: 5631 - DNA, 201 bp, Homo sapiens
gaagacaagaatgacaagaataacaagaataacaagaaggtttgtgctatggtctgaacatttatgtccctccaaaattcgtgttgaaacctaatccagamtatggtggggcctttagtaggtaattaggttataggggttctaccctcatgaatgggattattgcccttataaaagtggtatgagggatggtgtttcctc

SEQ ID NO: 5632 - DNA, 201 bp, Homo sapiens
cagcaggaaataaaatgttccctcaatagagctatctgttggccaatggccagtctctggcaagactaaaacatgctgtgtttataaataatatttattayagagttattaaaaaaactaaagcctttccttataatgataataatgtttgtcaggcattattttttaaaatctctgtgttctgaatatataattaaaagg

SEQ ID NO: 5633 - DNA, 201 bp, Homo sapiens
ttttacttttctttgatattagggttatatactgtacttgtttttactccatactctcttgtcagtggtaatcaattcttagtgttcattggacatgtatyctacagctaaattcgtttctcttccttcgaagagaaataaaggttttgtaaatatcataacatcttccatgtttaggtcaggtttctcatgttaagagat

SEQ ID NO: 5634 - DNA, 201 bp, Homo sapiens
attttcaaatgtatacaggagcagggacactgatatgatgaacaactagatactgagcactaaatttcaaaattaccaacattagccaatcttgtttaatstaatcttttactcaacttctgaattattgaaaagcaaattccatgtattatttcatcagtaaatactttggtttgtatatgtaacagataaagattttga

SEQ ID NO: 5635 - DNA, 201 bp, Homo sapiens
tttgaagtctctccacttactttctttagatttctagaaattttagagctggaagggactctagaatcctgttccctaatttcatagctaacagcctgaamtgaatgtaaactttgatgtactagtttatatttacaagatattttgtcaggtcacatattctatgaagcatgaatgtcaaatcttcagtgaaaatatgta

SEQ ID NO: 5636 - DNA, 201 bp, Homo sapiens
cacaggaacagaaaaccaaacaccgcatgttctcacttataagtgggagctgaacaatgagaacacatggacacagggaatggaacaacacccactggggyctgtcagggggcacgggaggagggggagtatcaggataaatagctaatgcatgctgggcttaatacctaggtgatgggttgatactgcagcaaaccacca

SEQ ID NO: 5637 - DNA, 201 bp, Homo sapiens
gaataggagctaaaatccagcttacattcaagggaaactttttggaatctgcgcaatggtgccatacaggctagtggctttactaatcagaatacaacttyacaaagtagaggttacttttttcttttggatttcctttatgaaaatccatgttatgactttaattattcctgtgggtttctgaagtatcagaaatgttct

SEQ ID NO: 5638 - DNA, 201 bp, Homo sapiens
acagtcccactataggttattccctgggaccctctacctggaaggcactttctccagagacccacatggctcagctctagtatgtctgctcaaatattacyatcttagtaaggcttaacccattggcatccctcccttctgatttcctttttccttttttatagacacttaataccttctctaacacaatatataatttac

SEQ ID NO: 5639 - DNA, 201 bp, Homo sapiens
tattgtctcatttatcctataaactgtagaaagtgggtcttgattttaccttcaatccatttcattgaggctagcattaacctagtattgacctagaatargatttaaaaaagtaaacggcaaatttggttaactcttacatataagcacagactcgaagaaatatatttgaatcttccagcaaatattacttcaaataaa

SEQ ID NO: 5640 - DNA, 201 bp, Homo sapiens
tataaactgtagaaagtgggtcttgattttaccttcaatccatttcattgaggctagcattaacctagtattgacctagaataggatttaaaaaagtaaasggcaaatttggttaactcttacatataagcacagactcgaagaaatatatttgaatcttccagcaaatattacttcaaataaatggtttttaatactaaa

SEQ ID NO: 5641 - DNA, 201 bp, Homo sapiens
accttcaatccatttcattgaggctagcattaacctagtattgacctagaataggatttaaaaaagtaaacggcaaatttggttaactcttacatataagmacagactcgaagaaatatatttgaatcttccagcaaatattacttcaaataaatggtttttaatactaaagataacttcttccttatgtatataaatttt

SEQ ID NO: 5642 - DNA, 201 bp, Homo sapiens
tattttattttagtaatcactatacattataaagcacacaagactttctcacctcttattttggtaataatatatattaaaaatatatttgtggaaatacktgaacacataatgaacaaatatttaatgagcatcttatttcatgctcggtattaagcaggcaccagcaaaccatgcttagaggccaaatctggtccactg

SEQ ID NO: 5643 - DNA, 201 bp, Homo sapiens
ttggctatggcagcatttgttggatggagaatgatgcattgcttttaaaaaggtcggtgtccagaaataaatccaactcttctagaacatagtttcatttytatacaggatattgcccacccaccttatcatcaacttgtagtactttttgtttgttttccttaggagtttactgaaaaagacaccatgccaacaggaaag

SEQ ID NO: 5644 - DNA, 201 bp, Homo sapiens
ttccttaggagtttactgaaaaagacaccatgccaacaggaaagaagtcacggctaagtcattccgagatttcccacggcatgaatctagttccacaatcractgaggtttgcttcagtgaactctccatccaatttatggcaaattctaacttttagctcctcttctgtagtctttattaatctatttcttcccactgtt

SEQ ID NO: 5645 - DNA, 201 bp, Homo sapiens
tgaactctccatccaatttatggcaaattctaacttttagctcctcttctgtagtctttattaatctatttcttcccactgttcctctcattttagtttartccactaggagacagcagtggacccttagggttcctttccacacttagttcccagggaggggaaaaatgaagtcgcccgtttggtttaagacacaaagtc

SEQ ID NO: 5646 - DNA, 201 bp, Homo sapiens
aaattctaacttttagctcctcttctgtagtctttattaatctatttcttcccactgttcctctcattttagtttagtccactaggagacagcagtggacmcttagggttcctttccacacttagttcccagggaggggaaaaatgaagtcgcccgtttggtttaagacacaaagtctgatagacagtaatctttgaaaaa

SEQ ID NO: 5647 - DNA, 201 bp, Homo sapiens
cctcttctgtagtctttattaatctatttcttcccactgttcctctcattttagtttagtccactaggagacagcagtggacccttagggttcctttccayacttagttcccagggaggggaaaaatgaagtcgcccgtttggtttaagacacaaagtctgatagacagtaatctttgaaaaaaagaactagccagggaga

SEQ ID NO: 5648 - DNA, 201 bp, Homo sapiens
tcccgtctcttcttgagctgggtattttcagaaaagtgtcccttcattttaagaacaggatttcatagatccataacactttgatgaaaaaataagccttyaaaacatctaaatgtacagccctctaaacacactgtattttaatcctaaattttagtgctccccttactttttgccaatcttgcacacagaactcacttg

SEQ ID NO: 5649 - DNA, 201 bp, Homo sapiens
agatgggcatacacacaaacatgccaaagaatccgtttgtgcatcaagtttgagtattagtattagatttttctccaagaaattcataaactatagtagasgaaatataagttttctacaactgtgttaataagatatgccaactcaaagctagattaatttttaaattctttaaaaaaacaacaacaacaactttccaag

SEQ ID NO: 5650 - DNA, 201 bp, Homo sapiens
cagaaaaacccttgccctcatagggatttcattctattaagtaaaagaaacaacaaacataataagtaagaaatttttaagtcatgaggtaatataggggraaaacttttggcacaaagcctccacttaataaatgcaacagtgaatagaaacaaaaaactccattgctagtgtctttacctgctcacccatctattaact

SEQ ID NO: 5651 - DNA, 201 bp, Homo sapiens
ttcagcaggacatacacagaatcatggggatggagggtgaagaggaaaggggatttattttgtctaaaaaaattttttttttcagaatatagctctactayactaggaatggtttttctatgtactttatatgaaaatgtatgaagttacttatctaagaaaaattggtgtttctgaaggacatcaacccaagaaaactta

SEQ ID NO: 5652 - DNA, 201 bp, Homo sapiens
gtcaatgtctggccctaaatttttaattccaacaacatggctagaactgttcaaattagaaaatggtcagcatgtcaaatggataactaaccagcaccatyacctagtgcttacatacagcatactataagccccatgctagacaagtacatgaattttcagcaggacatacacagaatcatggggatggagggtgaagag

SEQ ID NO: 5653 - DNA, 201 bp, Homo sapiens
ttttcagccatttttttcttcagccattctatttgcccctttctctctctcctttcctcctggaatatgtattatgtgtgttggtgcacttgatgtcatcrcacaggcctcttaagtctcttgagctctgttcatcttcatgctttttgactttctactccctagactagataatctcaattgacttaagttcacccattc

SEQ ID NO: 5654 - DNA, 201 bp, Homo sapiens
tgcctaaaatattccctaattatcccttaaatgtcaacagggtcttgcatttctgatattgataatttgtcctgttttttcttggtcactctgtctacagrtttatcaattttatctatcttttccaaggactagtttttcatttcactgattttactctactggttttctctactcaatttcattgatttctactctacc

SEQ ID NO: 5655 - DNA, 201 bp, Homo sapiens
ttcaccatgttgcccaggatggtctcgaactcctgggctcaagcaatccatccaccttggcctcccaaagtgctaggattacaggcatgaacaatggtgcstggccagagccacatttcttaatgttgaataggcagtttcaaatataaaaaggaaggaggctggaaggaactctgtgctataccaccagaattacaggtg

SEQ ID NO: 5656 - DNA, 201 bp, Homo sapiens
tgtcctcatatataaaatacaagtaatgacagaaacagccccacagggttatttgtgaggataaaacggagtagatctatgcaaggcactaataaccttgstcagacaggtttttttaatgttagcaattattcctattgctactaagagactctattcctgataatactaagacaagcttcacctatgcctcataatttt

SEQ ID NO: 5657 - DNA, 201 bp, Homo sapiens
gagctacacattatagatctttttaggataccaaaaataatgtgtaccagtatttcccctattaacaaccttcaaacaggtatgcaataacagtgattaastgggtgagtttaaggcctagatatggaacaagttggccaggcacagtggcgcatgcttgtaatcccaacactttgggaaaccaaagtgggaggactgctt

SEQ ID NO: 5658 - DNA, 201 bp, Homo sapiens
agctgggcatggtggcacatgcctgcaatcccagctatcgggacgctaaggcaagagaatcgcttgaaccccggaggtggaggttgcagtgggtcaagatyatgccattgcactccagcctgggcaacaagggcaaaattccatctaaaagaagaagaagaagaaagcagaaagaagaagaaagaaggagaaggagaagga

SEQ ID NO: 5659 - DNA, 201 bp, Homo sapiens
tgtggccgccatactggactattcaggtccagcttatctccaatttcagcattgttatgcactagctctatgggataatagttcccaagatcttgttctaygtcttggagccttttatattctactctgtttgcctacttctctgccttgctcatcttgcaacttcgatctggcaagctaccctttaaaaggaaaacactc

SEQ ID NO: 5660 - DNA, 201 bp, Homo sapiens
atttgcataggtaaaagccagggcctctaaatccttcctattaagcattcttttcactgcatatagttaccctcaacctttagtttgatttttttatagtrtatagagacttaataattttagctttatctctatagaggttcacagaaagagataagtataaaatgaaagagaaaaagactcttcaaggtataaaataaa

SEQ ID NO: 5661 - DNA, 201 bp, Homo sapiens
cctctaaatccttcctattaagcattcttttcactgcatatagttaccctcaacctttagtttgatttttttatagtatatagagacttaataattttagmtttatctctatagaggttcacagaaagagataagtataaaatgaaagagaaaaagactcttcaaggtataaaataaactttacgtttttgtaaaagaaag

SEQ ID NO: 5662 - DNA, 201 bp, Homo sapiens
ccaaggcaggtggatcacctgaggtcagcagctcgagaccatcctgaccaatacggcaaaaccgtatctctactaaaagcacaaaattagccgggcatggyggtgcatgcctgtaatcccagccactcaagaagctgaggcaggagaatcgcttgaacctaggaagcagagattgcagtgagccgagatcgtgccactgca

SEQ ID NO: 5663 - DNA, 201 bp, Homo sapiens
agagtgaaaatttaaaactcagtatttgctataccaaaatccatgctcaattcttctcaagtaaataactgaatctggtcacatgttagattgtaaaatamaaataatattttgtgggataataagtacaacaggaaaagcttttaaagtaagcattttaatagtccagttcacaatagcaatagcctatcaaagtgtccc

SEQ ID NO: 5664 - DNA, 201 bp, Homo sapiens
tatggacaggagtgcaagatcctgctgttcttcagcatatcgaaccaggtaaacatataccaacttcttgatctgttaaaaaaaaaatcatttattcatarccagagtgaaaatttaaaactcagtatttgctataccaaaatccatgctcaattcttctcaagtaaataactgaatctggtcacatgttagattgtaaaa

SEQ ID NO: 5665 - DNA, 201 bp, Homo sapiens
acctgcatagggtctctatagccaaaacgaaattaaagatgtgtaaggaacatttgcagcagggggaaataccatcatacagtcactggatttacttagtrtaagagcagcctacctaaaagagcgaataaaacaagcctctgtggtctataacattccatgtaacatcagagatctttggtatattgttaacaatgcacc

SEQ ID NO: 5666 - DNA, 201 bp, Homo sapiens
ctacactttttaaaattacttaataaaatagctctggaaaagaattagacaacgaagggaggagcaggaacaaagatggaagaaaggaaaacacatataastgagttgagaggatcagacacttaagattctaccctaaacaggaaaaaaaaatctcaattttctaataatacaagcatatgtgtacatgagatagactat

SEQ ID NO: 5667 - DNA, 201 bp, Homo sapiens
atcacacagatatggtatagcacactatatttcaaatcactacactttttaaaattacttaataaaatagctctggaaaagaattagacaacgaagggagsagcaggaacaaagatggaagaaaggaaaacacatataactgagttgagaggatcagacacttaagattctaccctaaacaggaaaaaaaaatctcaattt

SEQ ID NO: 5668 - DNA, 201 bp, Homo sapiens
aatacacatagcacaatactgtgaatacaacaccagaaacagaagagagtctcaaaaagcttgaggaataaatgatagctgaaaataataccaaattgttrtagacaattctatttggacagtaaattttccacagagatcagggcattgtataatattgcataacatttctaaaatatcacacagatatggtatagcaca

SEQ ID NO: 5669 - DNA, 201 bp, Homo sapiens
ttccaattttacacagatattgtatctttacatctttttgagtacttatttcttatttggaatttttaatcacatcccatgtggtgttaggcactgtgctragggttttatatacaatagttctttctctcgacacaaacagcaaatgtataaattagatattataaaccctacaaatctggagcctaaaactcataaaga

SEQ ID NO: 5670 - DNA, 201 bp, Homo sapiens
caaggttggcagattgcttgagcctgggagttcgaaaccagcctgggcaacatggtgaagccctgtctctgttcaaaatatgaaaattagctggacatggyggcatgcacctgtagtcccagccactcaggaggctgaggaaggaggatcacctaaacccaagaggtcaaggctacagtaagccacgatcatgccactgca

SEQ ID NO: 5671 - DNA, 201 bp, Homo sapiens
ggaggctgaggcaggagaatcacctgaacccggcaggcagaggttgtagtgagccaagatcgtgccactgcactccaacctgggcaacacagcgagacccygtctccaaaaaaaaagtaggtttaaagtacctatccttaaaatgctataatccagtgatgcattgcttaacaatgttctgagaaatgcgtcgttggacaa

SEQ ID NO: 5672 - DNA, 201 bp, Homo sapiens
cacatagtgtttaataaatatctactaaattaatcataagtaaaattgattttactcaagaaatctacaaagaaagtatggtttatcaagtcatttaaatmcagtactaatttaatctaattcataaactggccacaagaatacaactgttttgattttggcttatccaacttagtctaattgagtttataagaactattt

SEQ ID NO: 5673 - DNA, 201 bp, Homo sapiens
gatatttggactttcttataccacaggccataaaactaataaacatatcaaattagaagctcagatatcatggccataaggtgtcaaagggagagtagttraaaattatcaattcagaattatatataacaagcacatagtgtttaataaatatctactaaattaatcataagtaaaattgattttactcaagaaatctac

SEQ ID NO: 5674 - DNA, 201 bp, Homo sapiens
atttatcccatctgcctggaagtgaacttgaggctatttagtacaacaaccatttcttattcatctgtatattgcaaggacttattacattgcttggcatrtagtaaaagctcaatatttatcagctggatcacattccagaccaactgtagactgaaaaaaattaagacatttcccattagagtgctacatctaggatct

SEQ ID NO: 5675 - DNA, 201 bp, Homo sapiens
tttaagtgtaaatataagtttttcaaattcttagatcagttttagaagcgcttctctaactatttgaggatagatgactttttcctcaactagatttaaasttcctaagaatacagcaatggtagaaagcaattaacacgtggttgactgattaacagcagtcaatatatcaaatatatatcaatatatcagcagttgatt

SEQ ID NO: 5676 - DNA, 201 bp, Homo sapiens
cttcagaatttttcaaacccaaaatacacatatttgtgaaacactgttcctttaaatgatcacttggaaccaagtgatgttacacaagaatacaaatatakgtataagatggaaaccaaatgattcaaactatacttaatgtttcagattatatttaagtgtaaatataagtttttcaaattcttagatcagttttagaag

SEQ ID NO: 5677 - DNA, 201 bp, Homo sapiens
cccgtctagaaatgaggaaactgaggtttgaagagatcagcaacttgaacaaggaagcactactacaaatggaaaacatcaacttaaatccaggtcttctractctgggcccagtgttttttgttttttcttcccattttcatttatagagacaaggtctcactatgttgcccaggctggtctggaactcctgggttcaag

SEQ ID NO: 5678 - DNA, 201 bp, Homo sapiens
gcctaaagaatccatctttcctccccctggcaaaaacctcaggctttaagatctaaagtgtcactacctcagtgaagtcttcaccaactttcccaaatagsgttagttaatatcctagtttagaaatcactttgaagtacaccatctcatgagatcctcacaaaagaggcaagtattatcacatcccgtctagaaatgagg

SEQ ID NO: 5679 - DNA, 201 bp, Homo sapiens
ttttcctgttagcatcttcttttttaaaccttcctgtgttttcccacccttctgagctcagtctctttttctagttcttccattcatactttatatcctgktgtcccctgggttttgtccaaactgccttctcgtctaacaagaaaagtcttccctgggtgatttcatccattcccatactttactacctactattcataa

SEQ ID NO: 5680 - DNA, 201 bp, Homo sapiens
tatggtacagacactagataaaattaagtattaataaaaaatggacttaaacacaaacaagtttagaacccatagtgagacacaatgactctttgaggtakgtcaaatataatgcgttactattaataaaattgtatttttaagaaagtatattcaataacatccctctaagtaaatgaatctcactcagctgcatttcta

SEQ ID NO: 5681 - DNA, 201 bp, Homo sapiens
aatggaatctaaatcactgaattgagtaaaaggatctgaaaatattttattaagcaaaattatgagccaaacactttgctaggcaccttcacacaaatcayagtctttaatatgagcagaatgtgtgaacgatttatctatataaatatttaagaaatattcactgagcaactacataaactgaaaatacacaatgagata

SEQ ID NO: 5682 - DNA, 201 bp, Homo sapiens
caaagacccaagtgaactacacaaaattagcttcagggtgatgctgtactacaatacaatggagataccagatgagggtttccttctgtatagggtccacrgaatcagtcatgcttcattttttaacaacattggctaatgagagagcaaatgttaatggaatctaaatcactgaattgagtaaaaggatctgaaaatatt

SEQ ID NO: 5683 - DNA, 201 bp, Homo sapiens
tattaagacaaaatgtagaagtcagaaccaactctccttcaaggagatatgcaagcaaagcaaaataagataaaaggttttataatctgttggaaagtaasactctgtttacaggcagtatttcatcaaatttctattcaatgtagtaaaatcttatttaatttgaaatatatttcaagaattaaatcataaatggaaccc

SEQ ID NO: 5684 - DNA, 201 bp, Homo sapiens
tcttagaagcaaagagcagccctcaccaggaaactaaacctgcctgtgactcaatcttggacttcctggcctccaaaaatgtgagaaataaaattatattmtttagaaattacccagtctcaggttttttgttatagcagcataaaacaaactgagacagggccttattcattcttctctcatttgtccagctaccatgcc

SEQ ID NO: 5685 - DNA, 201 bp, Homo sapiens
agattaaggcccttgcaaaagaggcttcacagtcttccattctcttgcccttccaccttctgcccagtaaggacacagcattactcccctccagaggatgyggcaacaacggaccatcttagaagcaaagagcagccctcaccaggaaactaaacctgcctgtgactcaatcttggacttcctggcctccaaaaatgtgag

SEQ ID NO: 5686 - DNA, 201 bp, Homo sapiens
gatattaagaatatctattcttcaaaaaagaggtataggtaactttctttttctctggaatattacgtataagatacaaagcatatattcctggatgaaayaggtaaaactttatttttatcactaaaaaaaaaataaaaaaatgagagcattgacaagaagggacttgaggcccttactgccttagaattctaacactgt

SEQ ID NO: 5687 - DNA, 201 bp, Homo sapiens
tcttaaaattaagtccctggaacaaaatttaaactaaacgggcctctaggaacaggtgaaaactcgacaacttaccatcattcactcaggggaatcaatckgttttgcttttcatattttctaccaaaaatccaaagctaggattgtgcctactttttatttgatcttacctacatttaaaattaaggacattttaatcat

SEQ ID NO: 5688 - DNA, 201 bp, Homo sapiens
attttctattttccaggatctgacattaaagatgtactgcatttgcaatgggggaattgagagagggatgaatgttactttgaaccaactaattatgtgamcctttgctttcttttcataggttaccctacttctgcaaccattgcttttcaaagttgccttcactaaacattcttcctctgcccactaaagttctgcgca

SEQ ID NO: 5689 - DNA, 201 bp, Homo sapiens
taacttttattaagttcttttaggtctaccttcttcattacgtagattcaaatatgatcagttaacatgtattactgcataaatcttagatactattttgytaaatatcaatatttgagtcaaaataatgctgaattagcaatattttcctcaactctttgctgaaaacaatagttgtttcaaatatattcatttttaatt

SEQ ID NO: 5690 - DNA, 201 bp, Homo sapiens
ctaggcactgtttcaacctgatgtaatatgcagcttctcacgtatgtcataaggatctatttaaaattctgatataaattacatgtttcttcccaaattcytctttgcctgtcaccaaaacagtaaagatttaggaaagttaataccataacacctactttaccctcaaaatacattaacttttattaagttcttttaggt

SEQ ID NO: 5691 - DNA, 201 bp, Homo sapiens
aacttggtttgctcatctaaagcccaaattcccagagtgcccagaacaagcacctgctctctgaaactaaaaacaagaaaacagaatctcaatattaaagrtaaaggttttgctcttcatggttaacagaaaagctagtcttcaacaacaaatactgcattaatataggaagagaaactaataattctgaggttcagggaa

SEQ ID NO: 5692 - DNA, 201 bp, Homo sapiens
ttttgacacttcaataatgtacttttttctttaacatttttggacaggaaattctaagttaatattaagggcaaacagaatattagacttggtatttaacrtatttttatatatatatataataatatgatcactgcttgtccatttttccaaaattgaagtaaatgagtattttacctaccccaacaatccgcttcatag

SEQ ID NO: 5693 - DNA, 201 bp, Homo sapiens
ctcattctcatagtagaaataccttgaaattagatacagggaaattaaaacagagaaaagataaaattaaaacctaagtttcttgatttttgacacttcartaatgtacttttttctttaacatttttggacaggaaattctaagttaatattaagggcaaacagaatattagacttggtatttaacgtatttttatatat

SEQ ID NO: 5694 - DNA, 201 bp, Homo sapiens
cataacttattaatcaattgtttatgttttgctttacagctgaacactggtgaatgctcttatatttaataatatttattagaagttctaggcttctaaastgaataaagtgtttctattggtagtaagagaatttaaaaaacagatgaaagtatgctcagaacatttaggctgtgaaaggacaaaaaaaatcattcttta

SEQ ID NO: 5695 - DNA, 201 bp, Homo sapiens
atttacaatggaatcctcaaaattgcccctatactgccaaatgacataaacatgaaagcaaggatcaagtcacttacagatgtcctacagatacaattagwacttgactttaatatatttgattttcataccacctcactttttaacagagcatgctgatacctgttatttggactttaatatatcaagaaaggaaaagag

SEQ ID NO: 5696 - DNA, 201 bp, Homo sapiens
agccatgcaaagcaagaactgcctgcccataaatactcctatgtatagagcataacattaacaaatcaaaaatttacaatggaatcctcaaaattgccccyatactgccaaatgacataaacatgaaagcaaggatcaagtcacttacagatgtcctacagatacaattagtacttgactttaatatatttgattttcata

SEQ ID NO: 5697 - DNA, 201 bp, Homo sapiens
aaaggataatgtcaaaaattctaaactgacttcaatgccagctcaaaaaaaatcctaaaaatgacaggaaaggttagagaggtcaatttgacaggggagawgacagaggcaaacagaggatggatccaaaaaatataatacacacataataggaaggctaagagagaactggcagactgacagaaaagggagaaaataaat

SEQ ID NO: 5698 - DNA, 201 bp, Homo sapiens
tcaaaaattctaaactgacttcaatgccagctcaaaaaaaatcctaaaaatgacaggaaaggttagagaggtcaatttgacaggggagaagacagaggcaracagaggatggatccaaaaaatataatacacacataataggaaggctaagagagaactggcagactgacagaaaagggagaaaataaatagcagacaaac

SEQ ID NO: 5699 - DNA, 201 bp, Homo sapiens
tcacctgagatcaggagttcgagaccagcctgaccaacatggtgaaaccccatctctattaaaaatacaaaaactagctgggcatggtggggctggggagsgggggcacctgtaatcccagctactcaggagactgaagcaggagaagcttgaaccccaggggcagaggttgcagtaagccgagattgcacaatgcactcc

SEQ ID NO: 5700 - DNA, 201 bp, Homo sapiens
ttagccacccatattaaaaacctctcagatagtgggataacttaagaataaaattagtcctttatacgtatttaccattttgattggtccgcctaaatatmcatctggtatcatttcccttcagcctacacaacgtctattaacatttcattaaagtaaacatgttagaaatggatactcttagtctttatttcatcttcg

SEQ ID NO: 5701 - DNA, 201 bp, Homo sapiens
agagataatggttaagaattgttctgaacctatgaaaaacataaacccacatatttaaaaatcttagaaaaaaaggacaaacataaaactacaccaggtasagcatagtcaaactgctgaaaacaagaaacaatgagaaaaatcttaaaagcatccagaggctgagcatggtgaatcatgcctataatcaagcactttggg

SEQ ID NO: 5702 - DNA, 201 bp, Homo sapiens
aaataaaagtaaattttcttattattattatatatatgtaaataggtatcaatatggtttggctctgtgtccccacccaaatctcatctgaaattttaaamcccataaaccccacaatctccaagtgtcttgggagggatctggtaggaggtcactggatcatggaggtggtttcccccatgctgttctcatgacagtgag

SEQ ID NO: 5703 - DNA, 201 bp, Homo sapiens
ctcaatactaaacaaatgctaaatgaaaaacaaaataatccaatacgttttgttatatgataaaagaatctttgaacattaagaaacataatgatagataytggaaatcatttcataatattttatcagctcttctgatttaaagaaaaaattaataatccagaaataaaagtaaattttcttattattattatatatatg

SEQ ID NO: 5704 - DNA, 201 bp, Homo sapiens
acaagcccttttcccaacatgaagaaaggaagaaaccagcaaagaagctcttagactccttgaacctcagtttgaaagcgggcagtccttctcagtattcytccttatccactcaaataacatacttctcccaccctctctcccttctgctttaggtaaaaaccctgttcctggtccccttgtactcttttacccagaaca

SEQ ID NO: 5705 - DNA, 201 bp, Homo sapiens
ctacctggtattattttctgaagcttgtatcttattttagtatcacaaagcctctatgaaacaaaactacaatagagaaaaatcaacagaactaaaagctsatgtctatttcaaataggttgtcatgaagacttaataaaatcataaagcacttatcactgggcctagcacatttatttattcaacatccattatatgcca

SEQ ID NO: 5706 - DNA, 201 bp, Homo sapiens
aaaaggagaagggagggaagtaaagagggagagagcaaggcagagaaggaagaaagcagggaggaacaaaaacataaagaaagatcagataagtagtacasaaacaattaaaataaggaatgcaataaagtaagactgggtgatcacaaaagacctccacggataagtgatctgaggtctcgaagtacaaggagacaacca

SEQ ID NO: 5707 - DNA, 201 bp, Homo sapiens
agtaaataaggtctacaaaaatataaactttaatataaaacttgcttttgagagcagatgaatgagtagaaagcatgctgttcttatatatttatatatgygaatcatttatatttcctaagagataaattttaagcacattagaaatggcaacatcttgtcataattttttagataacatatattttggagttatattct

SEQ ID NO: 5708 - DNA, 201 bp, Homo sapiens
aaaaacaatataaatcacttttaaaatcattaaatcctgacttaaattaataaagtcataattagggcattatgctgtgtttgttatggaagtggcagggmgagctgctttaattactgtctgtaataaaaggagcagagagcgtactgcgccccaatcagtgctgtcagccacgactgagccgggctgcaagctcatcaa

SEQ ID NO: 5709 - DNA, 201 bp, Homo sapiens
accacaaatattccactgggattagaatttagtgtgtgtggctgggcacggttgcccatgcctgtaatcccagcactttgggaggctgaggtgggtggatsgcttgagcccaggaggtcgagaccagcctgggcaacatggagaaacccctctctattaaaaatacaaaaaattagccaagcatggtagtgcatgcctata

SEQ ID NO: 5710 - DNA, 201 bp, Homo sapiens
caatcattatttctggtagtagcaagctctttccctcctccataactttattctgcctagtataccctcccctcatgcctctaacagcttgactgattctytttttctttcttttttctttttttgtagtggaatatcactctgtcacccaggctggagtgcagtggtgtgatcttggctcactggaacctccgcctccca

SEQ ID NO: 5711 - DNA, 201 bp, Homo sapiens
ggttgagtgtggtggctcacttgagcccaggagtttgagaccagcctgggcaacatggtgaaaccctagctctaccaacaaaaattaaaaaattagccaayaaattagccatatctaccaacaaaaatataaaaattagggtgtggtggcaggtggctgtagtcccagctactcaggaggctgaggtagaaggatggcttg

SEQ ID NO: 5712 - DNA, 201 bp, Homo sapiens
ttacaaaattgtatgagggaaaccgtaagctgttctacatatttcagagatgggactgtggcctctaaaagctggctgtgttgccttgcatttaagtgaaytgtgacttagggacatggattccccttgatgaaggatgcggatgtcacctagaagaggtcctggcgataaggaaagaagtatgtcttaggagatgtacaa

SEQ ID NO: 5713 - DNA, 201 bp, Homo sapiens
cagccattatgaatggggccatgctgaacagatttacaacaggacttcaagatccaaatggagattcccagagaaaagctaggccatgaaccttacaaaaktgtatgagggaaaccgtaagctgttctacatatttcagagatgggactgtggcctctaaaagctggctgtgttgccttgcatttaagtgaattgtgactt

SEQ ID NO: 5714 - DNA, 201 bp, Homo sapiens
gaagatggaatgggccccataagaggaaggaaaatgaggatgaaaacagaatggcctaaaaggaacaggtgagcttcacacaaacaatcttggtagtaacratgatttcgtcaagacagaattatcagccattatgaatggggccatgctgaacagatttacaacaggacttcaagatccaaatggagattcccagagaaa

SEQ ID NO: 5715 - DNA, 201 bp, Homo sapiens
tttcaagtctgtgaaatggggacactagcacctatctttcagggttgttttaatctaggctaaacataaacagctggaggcatgaagggcctgaggagcakgataggcacaagtaagggagtgagttaagatttcagaattgaaaggacgaaaaactgaagttcagtggaggtgaagttattagaattgaacagatcaaga

SEQ ID NO: 5716 - DNA, 201 bp, Homo sapiens
gtaactccttcatacactcagcagtgaggtgtggtgggaaacacagggctttgaaactatacagatttgagctgaaattggttttatacatagcacatgtyttactagccttgtaacaccagaaaagttactgaagctgaagggatctcaattttcaagtctgtgaaatggggacactagcacctatctttcagggttgtt

SEQ ID NO: 5717 - DNA, 201 bp, Homo sapiens
ccgtcattaggttcgttttactctgagctgtaccacaagctgctacacaaaataattctcttggagttgtaactccttcatacactcagcagtgaggtgtsgtgggaaacacagggctttgaaactatacagatttgagctgaaattggttttatacatagcacatgttttactagccttgtaacaccagaaaagttactg

SEQ ID NO: 5718 - DNA, 201 bp, Homo sapiens
cgaggtctctctaatttgcccccgtcattaggttcgttttactctgagctgtaccacaagctgctacacaaaataattctcttggagttgtaactccttcmtacactcagcagtgaggtgtggtgggaaacacagggctttgaaactatacagatttgagctgaaattggttttatacatagcacatgttttactagcctt

SEQ ID NO: 5719 - DNA, 201 bp, Homo sapiens
tcccgtaatggacaatacactgtcttgctggagcactctgggatatgtgtaagaaaaattaaaccaaacatctcatctactggcatcccttactgactaaycagtaaaaaataaaacatataaacataggaaaaaatattttgaaatgtgtcatgtggcattacagcttgataattccaggcagcctcaaactgtggactt

SEQ ID NO: 5720 - DNA, 201 bp, Homo sapiens
ataatcaattacaatatcaagaaattcaaagaacaaaatcttgcagagactatgcttttgtatttggatttaaaaagtatgtgatctcattttcacatacmaagctgagaggccatttagactatctctttgctaatttttgcttactgctgtagggaagaagatttccaatgaactttaaatatctcattcatgtctacc

SEQ ID NO: 5721 - DNA, 201 bp, Homo sapiens
taaattgagatgattgtgagggatttttccctttccttctgttaatgtggtatattacaatgactgaattttgtgttatttttaaattacagtcgtgccaygttttggtcaaggagggaccacatatataatcttattgtaagattataatactgtatctttactgtaactttctatgtttagatacgtttagatacacaa

SEQ ID NO: 5722 - DNA, 201 bp, Homo sapiens
ccagtgaaaatatccttcaaacatgaagaaataaactttcccaaacaaaagctgagggatttcatcaatgccagacctgtcctacaagaaatgctaaaggragtacttcaatcagaaagaaaatgacattaatgagcaataaataatcacctgaaggtacaaaactaactggtaatagtaagtacacagaaaaacatagaa

SEQ ID NO: 5723 - DNA, 201 bp, Homo sapiens
actgagaaagatgcgaagagcatacactgaggaaaagacagtctctaataaatggtgctaggaaaactggatatccatatgcaggaaaacaaaattagatmcctatctctcagcatatacaaatataaaatcaaaatggattaaagacttaaatctaagacctccaaccatgaaactactacaacaaaacattggggaaaa

SEQ ID NO: 5724 - DNA, 201 bp, Homo sapiens
agtacatttcccaaattgccatgtgggagaacagaacccaaggagaagtcacagtcttaataacttgaggagacaaatgttgaattccagggctgccacartgactgagacttgaaggacaaaattacagaggagggaaccagagacaaggtacacaaaaatctgtgtgcaaaatgttggctgcaattcctaaggcaagac

SEQ ID NO: 5725 - DNA, 201 bp, Homo sapiens
ttatttttctttaattttattatgtttttgtttgtttgttctttcttttgagacagagtctcactctgtcacccaggctggaatgcagtagtgtgatctcsgctcacgcaacctccgcctcctggattcaagtgattctcctgcctcagcctcctgagtagctgggattacaggagtgcatcaccacacccagctaatttt

SEQ ID NO: 5726 - DNA, 201 bp, Homo sapiens
ggaaagaacaagggataaacagtccgtctggaaagatttatacaaaactatttattacagtcattaactcaaaacagtataccacctgactcagctaattytcctgttttgacaaaaattttaagcatcatagatcaattgtaatttttccagttggcttattaaaatttctttccatggtttctgcttgcattcctgcag

SEQ ID NO: 5727 - DNA, 201 bp, Homo sapiens
gccaattttcgacaatagcaaaaatccgtaagactacttgctagccaatttcccatattcctttgataaggaacctgataggacaaatgataaaaactgcrgaagctacatttgctttgtggcttttctttgtaccactctgggtgcccaaattcaagtggattacaaatggggttgcttcttcctatccttcggcctata

SEQ ID NO: 5728 - DNA, 201 bp, Homo sapiens
ctatgtaaataatatatgccaataaattataaaacccaccactgtcactgctactatcagaagagtcctcctcttcctcagattcagaataaaacttcttrgcagaattctcttgctttgcttttcctgctggggtccattcttttgcctgtttaaacaaataaagtaaatataaatgaattctcattcagagatttagag

SEQ ID NO: 5729 - DNA, 201 bp, Homo sapiens
atatatgcaagaaaatgtgaaataaggcaagacaaatactagccaatttttaaaacattctttaacaataaatctctggatgggggagggcaattgtctayttcaataaattaattttcatccttgcctactcagataacatattgaagagattccagttaacagaacaaataaacgaaaacaatattggattaagaagaa

SEQ ID NO: 5730 - DNA, 201 bp, Homo sapiens
agagttaccaaaaaatttaggttacttttagcatttgatgttctccaatactgttgatcttttatggaatttttaaaaatgttaaaactgttgttttatarttacatagtgtgttacattgatctttcatattttatttttaacataacacttgaaagaagtaaggtaggtactagcatgtctgctttacagatgaggaaa

SEQ ID NO: 5731 - DNA, 201 bp, Homo sapiens
tggtcagaggatgaccaatggcaatggtctatgcaggtaatgaagagctaatctagaatagtggcagtagggaaagaagaaacagacatgagaaataacgyacagaacatataggagttggtaactatctaaacatacagaatgacagagtagtcagagataattctggggcttcagatctgggagaatgaaaagaatgct

SEQ ID NO: 5732 - DNA, 201 bp, Homo sapiens
taactagaatattgcatcatgaataaggtgcgaatagtggactaacaacgtagctgaaataactatggtgtggaggagcactctaatatactgggtagttrtaagaacactgaagcctaggtttcatgaaggataaaaatcctggaaactttaaaagcattattttaaataaattttttcaccatctgttcacataatttt

SEQ ID NO: 5733 - DNA, 201 bp, Homo sapiens
ctcttatatttcatttttcattttaaaaaatccatagtaagttcaaaacattttcatacttaaaggatctactataaaaataaaattctgaattctaaacraagaagttaagagctctattccatcaaacatttctccatttgcaattcatcttggtaatagagacagaacctgggtaaatgcatataggacttgaggcag

SEQ ID NO: 5734 - DNA, 201 bp, Homo sapiens
atgggtgtagcttcctataagctacaatggtgcatgactgtctttatggaactgtaacctccccacctgaaaaattagaaacctatcaaatcaagataaarttaaagctgaaggcaagtctataccttaatttctacttcacagccaagagtgtgtaacaatatctattaaatacatatcaggtcacatataacacagaac

SEQ ID NO: 5735 - DNA, 201 bp, Homo sapiens
ttcacagtttggttagatattcagaaaaaatttgtaaatcttttaaaaagaaaacagtattaagtgcattacaaacaactaaaggccaacaaagagtaggrcgttaaatataattgagtcaaagtttatctttctaatctatactattttttacattaaattttctcaatcacagaccaaaactaaagtttctactaaaat

SEQ ID NO: 5736 - DNA, 201 bp, Homo sapiens
attcggtctactgtacttacaaaatgtatatatccatgaactagaatacagtgcccctaagcctgaactgttcacagtttggttagatattcagaaaaaawttgtaaatcttttaaaaagaaaacagtattaagtgcattacaaacaactaaaggccaacaaagagtagggcgttaaatataattgagtcaaagtttatct

SEQ ID NO: 5737 - DNA, 201 bp, Homo sapiens
ctactgaaattgtgccaagtggaagatggtgatgtcctttccatttttatttacattccttaatcctctacctccttaagttacatgtgtcaatccccatratccacatttcacaatgtagaagttataaggtatggatgactatttagcaaacaagtataaattactaaagcaaaagattttaaaatgaattttgtgtac

SEQ ID NO: 5738 - DNA, 201 bp, Homo sapiens
ctgagaggtatagccaaactggcctccaaaggctttgtaacccatttccattcctactgaaattgtgccaagtggaagatggtgatgtcctttccattttkatttacattccttaatcctctacctccttaagttacatgtgtcaatccccataatccacatttcacaatgtagaagttataaggtatggatgactattta

SEQ ID NO: 5739 - DNA, 201 bp, Homo sapiens
attattgcccttataaaagtggtatgagggatggtgtttcctccttctgtcacatgaggaaacagaagtcactatctctgaagcagagctagccctcaccwatcatcaaatacgctggcaccttgatcttggacttcccagcctccagaactacgaacaactaatttctgctgtttataaattacccagtctaacgtattc

SEQ ID NO: 5740 - DNA, 201 bp, Homo sapiens
atacaaaatataaaatgaaagtcttattcttgtctgttcccaggttagtcctacatcacaaggaggccagagctaaccactgaacaatgctgcaatgaaayttttgtatatgcccttatatgttttattaattcaagcaatatttactgggtgcccactaactgccaggagccactctgtacactaggaatagcagtgagc

SEQ ID NO: 5741 - DNA, 201 bp, Homo sapiens
ccgcctcggcctcccaaagtgctggtattacaagtgtgagccaccaggcctggccaactgatgctttcttaaactcaactcaaaagttaaattttgatacygctaggtggattaggaaccttgatactgaacagtattttgtgcatttctcctcatttcatctataatgcggcaatctaattgccagtttatctgtttttc

SEQ ID NO: 5742 - DNA, 201 bp, Homo sapiens
acagagattttttaaatatttcactgtcagttgtactaacaatgtaatgacataggtttacatttcctataaaagaacactagaatatgatcactgatttrtgatcgtcctactgagagcacatggtatggggtcctaaaatatattgtttaatttccaggaatataaaatatgcctgaaacatagaaagcatattgatat

SEQ ID NO: 5743 - DNA, 201 bp, Homo sapiens
taatatgttgttatttaatttgtaatttgctgcatcatctgcatcattggcatcatcagcaccagcatcatcactaaacccagtaatgcctatcatgtgtyaggcacagttctaaatgcttttacgtatatcaagtcatttcatcctttgagaattaaatgactcccaaaagtatttgtaccatcccaattttatagacaa

SEQ ID NO: 5744 - DNA, 201 bp, Homo sapiens
gcttaagcaatcctcccgccttggcctccaaagtgctagattatagacatgagccaccacaccaactaagaacatgtactttaaacagaggagaaagcaartgataaaacagtttctcagtagaatccaatttggaaggggggatttgcatatgaagagaatctaaactgatatgtcagaatgttaacctggggtgtttgg

SEQ ID NO: 5745 - DNA, 201 bp, Homo sapiens
taatattgaagacactggaaactgagccacagggagattaatattgacaaggtcataaaaagtgaatggtagaaccactatagaattagaaactgcttctkctaacttggatcataatatgttgccttcccatgcaacacgtaacttttcaggtaagttctaaatgcatgtttattcattcctttgtacatctatctaccc

SEQ ID NO: 5746 - DNA, 201 bp, Homo sapiens
caagtgtcacagagtcaggggcaaaacaaggatcactggagaaggagtggaagaggaggcttcatgaacaggagggaatgaagtccaatttttaagtaagrgtgagatttgaataagaggaaagaaagaagccagttaattgttggataacagaatgctataaacaaaggctgagaggtaggaaattgaaaaactaagggg

SEQ ID NO: 5747 - DNA, 201 bp, Homo sapiens
gctagatgttcgtagtaatgaatagggcagatcctgacgatacagactgtaccatgtccctcacaaaagctctgtttcctactatgagaaaatgaaactaytaacattcaactgtctcattagacacgttaaacacgttggacaacgtgcttaaaattactcaatcctagaacatttcatataaaatacgaagtttttttt

SEQ ID NO: 5748 - DNA, 201 bp, Homo sapiens
atttttccagttcttgtccttttgctcatttttatagtaataatttgttttaaaaagttatcattatattattataaaacatttaaacattacagaaaagwaccaaaacaatcaacaagtcattctgaaaccattccatctaaagtaactgttaaccatggtgaacgtgacatttctgtaaccactgacagatacacagag

SEQ ID NO: 5749 - DNA, 201 bp, Homo sapiens
ccagaagctactcttgtatttccttataagcactaattctcctacgagtaagcactattctgatttgttataccataaattaatttttccagttcttgtcsttttgctcatttttatagtaataatttgttttaaaaagttatcattatattattataaaacatttaaacattacagaaaagaaccaaaacaatcaacaag

SEQ ID NO: 5750 - DNA, 201 bp, Homo sapiens
caccccagaagctactcttgtatttccttataagcactaattctcctacgagtaagcactattctgatttgttataccataaattaatttttccagttctwgtccttttgctcatttttatagtaataatttgttttaaaaagttatcattatattattataaaacatttaaacattacagaaaagaaccaaaacaatcaa

SEQ ID NO: 5751 - DNA, 201 bp, Homo sapiens
ttctactctttcaatttccttgtatttgaaaacagtacaattgtacaattttacaaaatttagattatatatataacattttgtatccttttttccatctkacattataccatattttatcttattaaaatatgtaataaaaacatcttaataattgtacaaaattccttaaattgtttttgcatactttttgtaaccatc

SEQ ID NO: 5752 - DNA, 201 bp, Homo sapiens
tcaatatcacccaattaattagtagtggtgatctagaaagacagatatcagatgggtcaataaaaaggaatctggttgagtgtggtggctcacttgagccyaggagtttgagaccagcctgggcaacatggtgaaaccctagctctaccaacaaaaattaaaaaattagccaataaattagccatatctaccaacaaaaat

SEQ ID NO: 5753 - DNA, 201 bp, Homo sapiens
gtaaatattttgttaattgaaaaaatctaatatacataaggaaaacaaataacatttactagaataaataaaaattatagatggactagaaagtcatcatwtaaactaaaaaagtttcatctctttattttaacaaacttattcaaattatcccagtgaaattattttcattaatttgaaattccatcttaggttcataca

SEQ ID NO: 5754 - DNA, 201 bp, Homo sapiens
atttccacagaaaacctctgacttgttattaggtgttaaagaatcacagatagtatatctccattatggtattatgacatttggggattgccttgggaacscttttttttttttagacggagtttcgctcttgttgctcaagctggagtgcagtggcgcgatcttggctcactgcaacctccgccttccgggtttaagcaa

SEQ ID NO: 5755 - DNA, 201 bp, Homo sapiens
cagatcctggtgcttcctgaggaccttatgttttttgtttcactgagtcgcttttcctgcatagttctagtatccaatttgagggcgggaggaagggaaaraaatggaataggtgacatcaaccctatgttattactgaacataaaggccttggagcctctctaccctgtcaatcccaattttgactgaatccttcctcct

SEQ ID NO: 5756 - DNA, 201 bp, Homo sapiens
acaagctttcaggtttggcgtgcagtgacttctgcctgatttagatatgcccagtacaaaaatggccaactttgctgggcagactaagcaataatcctttstgtacaataagggtttttcagtccctgattctgcagatcctggtgcttcctgaggaccttatgttttttgtttcactgagtcgcttttcctgcatagttc

SEQ ID NO: 5757 - DNA, 201 bp, Homo sapiens
tttacaaaacccaacaaccctcacatgcaaccattcaataattgtaataagcacacatattttagatttgatttaaactaggttaatacaatcaatggtaygaaaatatgatcggtggaaaaacttttgattggctggtaactggatgaagtgaaaaccagctaaacaatggtttcaccaaaggtaccgtctctctttgat

SEQ ID NO: 5758 - DNA, 201 bp, Homo sapiens
cctgtgatgtttcttactattgtttttgagatttgtctaacaggtatttccagttcattcattttaacaactggcacagtattccattgtatatgcatgcyacaatttatgtatctattctagtgatagatgtagtttccaattttcttttttttttttctttttcttttttttttgctcttacaatgtgtcggtgaacat

SEQ ID NO: 5759 - DNA, 201 bp, Homo sapiens
tatataaaataattcaggcaaagaagtataaagaatagattaaaacaaaaacaaaatccaacatccctcccccatcgagcatcatgagtaaaactttaaamatctgaatgacaatcacaagtatacccatcccagattgctttcctttttgcttctggcatcagaggtaaccagaatttggatttggtgttcgccagttgc

SEQ ID NO: 5760 - DNA, 201 bp, Homo sapiens
tttgcaccatctaagaagcaaaagacctaccatggagcaaataagattttacaggacatataaatgcagttcattaattaaataattctaaggagtttacmacatacggtatatacaaagattgatttagtatataattctaaaggaaagcagaaagatatggaagaaaaggaatagaatttggaagcacaaaacccggac

SEQ ID NO: 5761 - DNA, 201 bp, Homo sapiens
tttattgactatattcatgaatacattgcaaaatgcaagccttaagtaatacagctagtattccaccatctgaaagtcagaccatctgtgtctggctttgycaaaggcaaatcctgctttaaactcatgttagaatactgtcaattcttcttactgaatgttttttaaaaaggtaccatccacaatcaactacatggctaa

SEQ ID NO: 5762 - DNA, 201 bp, Homo sapiens
tctggttacacatgttatacttaaaccctacattgaaatactgtttcagcaatactccagttcttccacaccccaagccttcaggtatactagttcctctkctaggagcgtcattcttctactccagccacctaggcaaactcatcttccagactcagttccaaggttacatatgtatatcttctctaagagatctttgtc

SEQ ID NO: 5763 - DNA, 201 bp, Homo sapiens
aaaattgtaatcctaagcacagtgcttttctgagttctctgagttgttctagaaaattactgaactagagagtggttttgggaaatccgtaaagttacagytggtgtcagaaatcttgggccaacttagtctggaggactgtgcctttaaccttgagtttggctacctccaagaggcatacaacaacaaattaggcctttt

SEQ ID NO: 5764 - DNA, 201 bp, Homo sapiens
ataaatacatgttggatgaataaaacacttaattggcatatgtgtagtaaggaatttgacctaacctaaagaggcttaggactttctcttagctcttgagrggcgacctctaaacccttggaatttccccagtgataaaagtgtctttgttattcatggtgggccctttgggaccacacctgataatttatgccactgagg

SEQ ID NO: 5765 - DNA, 201 bp, Homo sapiens
tataacttagtaaacgtacatattcaacaaagacgtccctcaaagcaatctctccttgcagaccaacttgaaaaaagtctagcactctgccaatataagasattggaaaacaaaactaaaataccctagtagcaattaaaagagagtgaggagaactggtaggggggtggttggggaggatatatctaagataagactact

SEQ ID NO: 5766 - DNA, 201 bp, Homo sapiens
cttgacctgacatgggcaagcattaaaaaaaaaatcaatttgtaattaaacaggcttgattaagattttttcctgacaagtgttgtctcccaactagattmtctattatagttctgagagtatatatcaacctattaaacattttcactatgccgtgtacacctgatgacattacaaacgtagcaattatagtaatgattt

SEQ ID NO: 5767 - DNA, 201 bp, Homo sapiens
ttctatcatctatctcccccactctactactggttgggattagtcagatttcaggacactaattagaaggggaaataagcttgtaatgggagaatgccccsttcccccactttctctaaagtcctggtagatatggagccaggagatcacagactcaggtaaggcttttgattagactgaaccatatgtatctgccatatc

SEQ ID NO: 5768 - DNA, 201 bp, Homo sapiens
caaagtttgaaaacattagttttgatttaattgtttaacgactaacattcaaagaattaaaaacttagatgcattataagcaaatgatataggtcatcttyactatggctcgtgaggaagtaattagttcagtaactgcagtaactgtaaaataacaagcctcccccaagagttaacagaacaaaaagcatccagtaacaa

SEQ ID NO: 5769 - DNA, 201 bp, Homo sapiens
ggtttatgaaaataagcaatcaattctgcagacacaacattatttctaaaggaaatctatgtgactcatgatgcctgtagatacacagagacaaaccacayatattttatcagtttattacagtaagcaaataagcgtggaatgagagtgcacataactgtctacttagcgcttactgaaacatttataagagctgttatc

SEQ ID NO: 5770 - DNA, 201 bp, Homo sapiens
taatattcttcagtgtcatttctgtcaagcaataagctataattcctttttcaataaacacaaaatggtccttatgataaaggaaagtaaaggtcagtcaygcaagctcatggggagatttttttctctccttcaaggagagaggtggaaagaactagcatggaaacttttttgaatgtgatcttaattataatcagtatc

SEQ ID NO: 5771 - DNA, 201 bp, Homo sapiens
tcctttttcaataaacacaaaatggtccttatgataaaggaaagtaaaggtcagtcatgcaagctcatggggagatttttttctctccttcaaggagagargtggaaagaactagcatggaaacttttttgaatgtgatcttaattataatcagtatccttaacaaataacttttaaaaacaaatccataaactgagatta

SEQ ID NO: 5772 - DNA, 201 bp, Homo sapiens
acaaatccataaactgagattagaattgtctttaaaatatcagttatttaataaactgcatgtctgaaagtggatttcaagtgataatttcataagcatayatcataaggcaaaggaatctaaggggaagtctgaatgctacatcacaggggacaaccacaccttgagacaatattttacacttctttacttcctcaggat

SEQ ID NO: 5773 - DNA, 201 bp, Homo sapiens
tgtctttaaaatatcagttatttaataaactgcatgtctgaaagtggatttcaagtgataatttcataagcatacatcataaggcaaaggaatctaagggsaagtctgaatgctacatcacaggggacaaccacaccttgagacaatattttacacttctttacttcctcaggattatttgttaataaaatttctactaga

SEQ ID NO: 5774 - DNA, 201 bp, Homo sapiens
cataagcatacatcataaggcaaaggaatctaaggggaagtctgaatgctacatcacaggggacaaccacaccttgagacaatattttacacttctttacytcctcaggattatttgttaataaaatttctactagatacctaccttcagtaccaaaatgacagaatcccacttttatactaattgtaaggaattaactca

SEQ ID NO: 5775 - DNA, 201 bp, Homo sapiens
tgatctgggttatagtttgaactcagccacatattaaatggtgagaccttagctaaaccacaacctcagagcttctgttttcctcttctgtaaaatggggytaatcatacatatcctgtctgtttcactgagttgtcttgaggatcaaatgagaccatatatgtgaaactgatttttaaactgcagaaagttcaataaaag

SEQ ID NO: 5776 - DNA, 201 bp, Homo sapiens
aataaaaggcattatttggattattagtaaattgagttttcagcccacgttaaaacaccaatctgtcagataacgcagggtcctgagattaaaagtacatrtcaaaaagctgaatcaccattggaaaaatgcttttataacaacattgctgtatttattgatagtaccatccaaaggcctttacaaaagtaatcccttccc

SEQ ID NO: 5777 - DNA, 201 bp, Homo sapiens
ataataaatttgcactgttttaagccactaagtttgtggtaatgtgttacatcagtgactggaaactaataaaggtaactgcggtgcctagttgaaaaccmctgttctgaattcttatgttgtgaaacctatcttcagagtttatagtatagtttgtatgcatgcaactttttcaatggctgatctgtgatctgagaagca

SEQ ID NO: 5778 - DNA, 201 bp, Homo sapiens
agcagcactgtcagcgcgcaaggctggcatgaagcttccaactgcatattatcacccattgacaaactcgacattttatgaagagcccctctttcacactkacatcctctgtaccctgagtaaataacttacaattcatttcctaaccttgattttagagtccatccagcctttccacccttctttttcttctttccaaac

SEQ ID NO: 5779 - DNA, 201 bp, Homo sapiens
ggtttcccacaatgtatacataaagcaaattctccagcacttgtcagcttaacaacaaaataaagatcatttcatcaagtaaatctatattatacctacarctcatttccacagtaatagcagttcggtgcttatagttttgcatatcacaggctacataatcttcaaatagcactatatattttttcaggaacgatgcta

SEQ ID NO: 5780 - DNA, 201 bp, Homo sapiens
tggatcaatgaggttaaagtgtacatcaaataaaaaataaacaggatctgcataaaatatagtactgagcttaattttttttaaaaatgataaaatatgtwaacataataaagttgaaaatgacacttgtcaactttctaattaacactaggtggaaaaggagttttaggaatacgttctataagaaaaatggatttaagg

SEQ ID NO: 5781 - DNA, 201 bp, Homo sapiens
atttatctattacagcacctactaaagtaccttgcacttagcagacaatccagaaaacacaggctgaactgacttgttaacaagagagtttcaagtgtcgkttctgacaaaagcaggactatgaaagatttttaaagaaatagcacttgggtattaaaaacaaagagaaacactatatcctatattgagttaaaaaatgta

SEQ ID NO: 5782 - DNA, 100 bp, Homo sapiens
acacactagcattctaaagcaggagacaagaatgtcaagagtgtattctwcccccactgccagatggaagggctattattataaatgaaaggcagcagta

SEQ ID NO: 5783 - DNA, 201 bp, Homo sapiens
atagagacaaggtctcactatgttgcccaggctggtctggaactcctgggttcaagcaatcctcctgcctgggcctcccaaaatgctaagattacaggcargggccaccattcccagcctcagtcttccttctaatacaccaagatgctctcaaaggaaaagagatttacaaatttagtagctttactattgtaattaaga

SEQ ID NO: 5784 - DNA, 201 bp, Homo sapiens
taaatgagaattaatatttacctattggattaaaaacatgcattttcatgcctataggaagttttttttcccctatgtggatattttctatctttcgatcrgtagtgttattcagtgttatttgtatagagaccatcttatcaccaaaaatgcaaggctgtcttggaaagaaataatgggcagctagtccttttccactca

SEQ ID NO: 5785 - DNA, 201 bp, Homo sapiens
aatagtttgtgaaaatttttatcacataacattatcactaacatttatcacccagtaatctccctaaaaaagtaaagaaacattttttttccagactatcrtaagaataacaaccgcttccaagagaatgctgcagtggaattagaagtcttgaaagatgttcaaatcctatatctattttattctccactctaatcaggc

SEQ ID NO: 5786 - DNA, 201 bp, Homo sapiens
gccaagctggaaatgatctctatctattaaaaatagggaaaaatataaaataaacaatatgagctgtatataacagagaacaatcataatcagagctcaasgtaattggcatattacctcaaatgtcaaggaataaatatagactaggaagctcttcataggtcaaaaaactgatttcagtccatagattacaataatctc

SEQ ID NO: 5787 - DNA, 201 bp, Homo sapiens
ccaagaatattcaaatttaaatcacctgaaaataaaatgaaactgtaaacttaccatccctgttggacagcagacagaccaagccattgaggcacgtgtcmgtgacttccaagatgttggttgcacatctgcctatagtctgaatagtggctgctgcaaattgtttatcctggcttttcacataggtctaaaagatattat

SEQ ID NO: 5788 - DNA, 201 bp, Homo sapiens
cttgcacgaattagttggtttgggtcctaaaaatagtgcaaaaatattcaccaaaatttcaactttacaatattttaaacatatctttcagacacagttawtaggtgcttaaagggtgtaatatgacaatagcaaaagaaagctacttaatttaaaatgaacaattagtatataggaatgggaaaaaaagacagacataaa

SEQ ID NO: 5789 - DNA, 201 bp, Homo sapiens
tatatatatatataataatatgatcactgcttgtccatttttccaaaattgaagtaaatgagtattttacctaccccaacaatccgcttcatagcatccartttagcagaatctttgttgctctctaacatttgctttagatcttcattcctattacaaaagagaagaaaaaaaatccatactttgatttttatattagat

SEQ ID NO: 5790 - DNA, 201 bp, Homo sapiens
taaagtctgatccggcgaacggtaaataaactagaagacgatgctcaaaattcagactcctgagcccagcccaagtccaattcaatcagtgtcttcagggrtgggatctaagctcaccaagtggtttccttttcactaaagtttgaaaactactagagacccctacacacattcgccccaaactcccacaactcccaccac

SEQ ID NO: 5791 - DNA, 201 bp, Homo sapiens
acattggctacatttacaaccttctgaaagatcacagagggagtgaaattctgtggtgcagcaatgattacagcagaagtttcattcattcctgttagcaytcctgtaaaagcaaaagaaggctcccttttattaatttctttttgaaaattacatttacagaattttaagctcatggccaaaattttaactttttttcaa

SEQ ID NO: 5792 - DNA, 201 bp, Homo sapiens
ttttgatgagtcctgaataaaacaaagactttggggtcaaggaagagggctcttggatgatgaggatttctgtgtgatgccagtaagaggccctttcacaytggcttcattttttaagactcaaaaatcaaaccttaagttggaagggctttttgtgtccgccaaatttctacattaggccccccttatcagcatgcttga

SEQ ID NO: 5793 - DNA, 201 bp, Homo sapiens
ttcttaactactttgcaaaagcagaatttaagttttcttttcataggtcatggtcttaacaattccttaccatccatggagttggttgaccctatcatgamataaaacttctcattcatcacatcactaaagaaaaaaaatatgtggttcttacatggggtgagaaaatgctcttctggagtggcggggggaaacgggaat

SEQ ID NO: 5794 - DNA, 201 bp, Homo sapiens
aagatcttaggttctcttttagctggtccaacttttctttttttgaaatcttccatcagtctggattcttatcttgtctaacatctaaattcttaacaacrggaacacaggttataagggcaaacgttttgtaagctataaagttattcatacgtttgcaaatagttatcgagaaggacaagtatacagtattttaatttg

SEQ ID NO: 5795 - DNA, 201 bp, Homo sapiens
tgagcaataaggctaatatggaaatgccaacgacctgcgattacaaaggggcttttgggtgtgttaccacagcgcccaggctccagagggaagtggaactsgtggcttccatacattggtacagaatggtacagaatgtacacatggtacggaattggcacaaaatgtacacgtggcttctgtacattgcacttctgtaca

SEQ ID NO: 5796 - DNA, 201 bp, Homo sapiens
caaagaaaagcatagatgagagacagagaaactagctggtaactttgagctggatggttcttgatgcccagacacattactgtccttgctgaagttgtttyctctgaactgtagctgtaatttcctatttatttatttactacttaacctagttcaaattgggattctatcatctatctcccccactctactactggttgg

SEQ ID NO: 5797 - DNA, 201 bp, Homo sapiens
taagatttcagaattgaaaggacgaaaaactgaagttcagtggaggtgaagttattagaattgaacagatcaagagactgtgaggttacatgttgcacagrttatgaatatgaacactgcagttccccaagatgatggtgggccagagagattatgtatgaaatactaagatcttcactgaatatggataagtgattaaga

SEQ ID NO: 5798 - DNA, 201 bp, Homo sapiens
attctaaagtaaagtaagtaaaaatttttaaatataagtgttaaatttcctgacctgaagcatcaaagagacagtactaggaagatatgacactttatttmatatgactgatctgaaaatttcaaatttctcttaatttccttaactgtagttaagcagaactgcctcaaatacgaattgcttcattaggcagatggccat

SEQ ID NO: 5799 - DNA, 201 bp, Homo sapiens
ggaaactgagccacagggagattaatattgacaaggtcataaaaagtgaatggtagaaccactatagaattagaaactgcttcttctaacttggatcatartatgttgccttcccatgcaacacgtaacttttcaggtaagttctaaatgcatgtttattcattcctttgtacatctatctacccacccgtccaccatctg

SEQ ID NO: 5800 - DNA, 201 bp, Homo sapiens
ataaattattaactaaggatcttcaaaacttactgggatcataatataaatatatattatatcctatatcctagaaatggtggtgtgtaattcaaagtgasttctactgtcaatctgactaggttcccagtcattttgattaaaatatcagattatctaaacctaggtcatttttcttactaagttatatttcacagttac

SEQ ID NO: 5801 - DNA, 201 bp, Homo sapiens
tatttgattccaactggaatggctacttgtaaggtggtaaaatacttaattactccttttaaaaagctgggacacgtaagtcaacttccctctttgaaaarccagtttaaatatagagggatactttttataaaataattcctcctagaaaaactgatattagtgtacacagaatatttacttaataactcactattaaaa

SEQ ID NO: 5802 - DNA, 201 bp, Homo sapiens
tgaagtggaaagaaaggcatcattaaaaaaataatcatatatggcaaacccgctgaaggggtctacgtgagaataatgaatgtggaaatacaactaaaaayatggcactcaaaacttaatcggaaaaatatgcaggacatcaaaacatcagaaagtattagggggctggcaaactgcttctcctgaggtgtgttttatgaa

SEQ ID NO: 5803 - DNA, 201 bp, Homo sapiens
acatatgtatttatgctattatgtacttttccataggtttgcaatatttcataactaaaaatcaaaatgagctaagaaaaacattaacttatagcacttaycactacatttaaaagatgacatactattagagtttaaaatcaaaagcatcttttattcattaacttttaaattgttattaatttgtttaattaaatcctt

SEQ ID NO: 5804 - DNA, 201 bp, Homo sapiens
cgctgaacaagtatagcctttcttccataagcaaacctcaagtctttttcaatataaagagcagtatcattgtagtatttatttgttaaccatttaacacrtgtaaaattgtacttctggtttttttttttaggttcctttttaaaaaatatgtcaccaatatagtttttgagtgttgccactctaactgcatttttctaa

SEQ ID NO: 5805 - DNA, 201 bp, Homo sapiens
ctagctgcaaatgagcaagaatctttttccaatttactaaacaggtaagtccactcacagagaatagcaattcagatataggaaaagtccctatttcgtayatggaagcaaaaatgattcctcttattaacagctgctcaaaaagtcaatggacttaaaaaatgaatattctaaactgcaaatctggtaaattatactact

SEQ ID NO: 5806 - DNA, 201 bp, Homo sapiens
taaaaaatgaatattctaaactgcaaatctggtaaattatactactattaaaagtggtttccctttcctctgcaggacaaggtccatactacttagcagarcatacaagccactccatgcgttcaaactgcaaaatgtcttagtccatttgggctactgttagaaaataccataaactgggaagcctattaataatataat

SEQ ID NO: 5807 - DNA, 201 bp, Homo sapiens
cctttttggtttaaacatcacagctaaaaaggtttaaacattttcccaaacaaacaacattacttgcagaaaaatacatctgttatctcaatcaagatttyttaaaaaacaaaactacacaggtatagtaaattatcccatttgaaaaagaactttaaaaaattgcagtaattgtatataaccactaccaccaagagaaac

SEQ ID NO: 5808 - DNA, 201 bp, Homo sapiens
actttccctttctagaaacaggacatgttttataactcgtatcatcatagacatgctgatattaaagcagaagtacaggatttctctcaaagacaaggctrttataaaccaagtagctcctttgctgcaacaagtgaatgattctaaatatattcaacttctagcttttaagataagattttaaaagtaaaagtgttattt

SEQ ID NO: 5809 - DNA, 201 bp, Homo sapiens
attggttattcacagctacaaagaaaagagccaaagaaagaagctttacttagtttgattaagtcttgattgacatttgattttggtattactttaacaayaatccataagctagatatatttagagtggccaaaccagacagaaaaaaatcctaagagtctaggtatcatattgacttttgccataccacagggatttag

SEQ ID NO: 5810 - DNA, 201 bp, Homo sapiens
tgccatgttgcccaggctggcctcaaactcctgggctcaagtaatccacctgcctgggcctcccaaagtgctgagattacaagacatgagccaccgtgccygccttttcaggcctcttgactccatttctaaccttctgatgaggagtttggaaattgaaaaactaaacaattataataatccattctattttggatgccc

SEQ ID NO: 5811 - DNA, 201 bp, Homo sapiens
gacagggaaaagctttatcagtcccaagacctgggttctattcactttttaacaatttgttttcaagcaactgacttagcttccctgagctttttacctcaaaaaaaaaaagcctgcttagttcactgagaaccattgtgggcatcaaataaaactggatagtgtatgtgaaaacattttgaaaatcaactggaaagttct

SEQ ID NO: 5812 - DNA, 201 bp, Homo sapiens; identical to SEQ ID NO: 5811

SEQ ID NO: 5813 - DNA, 201 bp, Homo sapiens
tgaggcaagagaatcgctggaaccggggaggcagaggctacagtgagccgagatcacgccactgcactccagcctgggcaacagagtgagactctgtctcaaaaaaaaaagaattagtaaaaagataaaatgtgccacaggacaaatctagaaactactgaataaagcagtctctaggaacaaaaaagccaagaaagtaaa

SEQ ID NO: 5814 - DNA, 201 bp, Homo sapiens
attttcgatgcctgggtccttattgacaacaattaaactggaacctatggtgataagatcggggtatggttttacggattgtttaatttctggtttttggttttttttttttaaaaaaaaaaaaactgtccagagattttactgagaagccaaggttgaaaagctcatccttgccaaatcctggctttcccccttcaactc

SEQ ID NO: 5815 - DNA, 201 bp, Homo sapiens
tcggggtatggttttacggattgtttaatttctggtttttggttttttttttttaaaaaaaaaaaaactgtccagagattttactgagaagccaaggttgaaaagctcatccttgccaaatcctggctttcccccttcaactctatgtgataggatactaattcaaggcaatggctgaagtgccttccctaacccctgact

SEQ ID NO: 5816 - DNA, 201 bp, Homo sapiens
ataaatatggccctagagttaatggctaagttcccgctatgggtgatggctgagagaataaccccaaagaagaaagaaaaggaggctaagcttgagaggcttttttgttgtgcaggttttctgagttcatccttaattaaggcctgggactacctctttcctccagctttcttcaacgcccgaggcattcagaatccatgc

SEQ ID NO: 5817 - DNA, 201 bp, Homo sapiens
cggtgggatccagggaagtttttttcactaaaattcaacaagaaatgaggactttgagatctggtaatttctgcatgttcagaatttgacaggaggtatcratggatagcgtgtagcctccaagacctccagacatctcggagtgctcccagtttactcaagatgagacctctttgtccagtaaatgtatgcatttctttg

SEQ ID NO: 5818 - DNA, 201 bp, Homo sapiens
agggtaaacgggagtggggccgagcgagggaagccgcaactcccaggaagggaattggtaaatgagcgctgcacgccggggaagctgcgaggttgcgatgygggggatcaggcgtaggaagtgcacgcctttctgaacgcggatccgtgtgtgtgtgtgtgtgtgtgtgtgtgtgtgtgtgtgtgtgtgtgtgtgtgtgtg

SEQ ID NO: 5819 - DNA, 201 bp, Homo sapiens
tgaccacgtcctgagttcagagcgaatcctctgggtgtttaataggaaacagataatttctttctgaacctagcctacacaaagaaatccaaaagcgtgasgaagtgtgtgctctcccccttcccctcatggaattaactttgtaggaccacctggccagtgaggcacccagataggaaacttttaatttgcgtcaacaga

SEQ ID NO: 5820 - DNA, 201 bp, Homo sapiens
caggccgcacctgaaaatgtgctacttatactaattaaaaatcctcaggcaagagacaactgtgcccaattttcaagttttttgttttgttttgttttttygttttgttaattgttgaccacgtcctgagttcagagcgaatcctctgggtgtttaataggaaacagataatttctttctgaacctagcctacacaaagaa

SEQ ID NO: 5821 - DNA, 201 bp, Homo sapiens
gaggggtaagaaaaaatgacaaggtttatcaaaaatttataggctctttggcttaccagttttacttctaggcatttattctaaagaaataatttacaaaratgctcatcaaagtgttgttgatactgaaaaattggaaacaatttcatttccattcccgagggattaaagatattaatgtacaactatgtattttaataa

SEQ ID NO: 5822 - DNA, 201 bp, Homo sapiens
accttttttgctctaaaaagactgccaatatacactattggtgaggggtaagaaaaaatgacaaggtttatcaaaaatttataggctctttggcttaccarttttacttctaggcatttattctaaagaaataatttacaaagatgctcatcaaagtgttgttgatactgaaaaattggaaacaatttcatttccattccc

SEQ ID NO: 5823 - DNA, 201 bp, Homo sapiens
agttacgtaaattaaaaagagatcatttatttggggaccttttttgctctaaaaagactgccaatatacactattggtgaggggtaagaaaaaatgacaargtttatcaaaaatttataggctctttggcttaccagttttacttctaggcatttattctaaagaaataatttacaaagatgctcatcaaagtgttgttga

SEQ ID NO: 5824 - DNA, 201 bp, Homo sapiens
tttaaatgtgattaatttctgccccatgcccaaaagcttcaatgttccaatggtatatattgtgtttttctggtctccaaaaagatcttttgagaccccaktgttctcccctcagctcaatatctgcagcctgaggtcaggctactcgtattagatttctgttagtgagaggtattcccgtccaaagggacaacattgcat

SEQ ID NO: 5825 - DNA, 201 bp, Homo sapiens
gcgagactccatctcaaaaaaaaaaaaaaaaaaagatttgcttcatttgcttcattggaatcacctttttaagtgcaatcagagagtaagggtggggtatrgttgatggaggtacagtcttagaggtctgcccctaaagaagaaagtctaacacgtcagcaataaaaagcacggagatggaaaaagaaccagccagaatta

SEQ ID NO: 5826 - DNA, 201 bp, Homo sapiens
aaatgtaatgcaaacaacttgggcctgtgtcacttagtcttctaagaagacttcaaggctgttataaagacccagtggtgggagaaacctgatccggtatmgcggggccagaagaagctgcgggaccatgccgcggggacaaggcaaggagtttcgccaggatgttgatctcctggttatctacacttccgcctcagtatg

SEQ ID NO: 5827 - DNA, 201 bp, Homo sapiens
tcttgaatgaattaatgagaatacaagtgaatgaatgaaatgctttgttgctatagatcttgtctatagatgactacctttctggtcaaggctttggacakctcttcagtcatcagacagagtatctctgctctagacctcgctggagttcaagcttgaattattatatgcaagttaattttacaagcctggatgaggcta

SEQ ID NO: 5828 - DNA, 201 bp, Homo sapiens; identical to SEQ ID NO: 5827

SEQ ID NO: 5829 - DNA, 201 bp, Homo sapiens
ggctttgccacaggattgaccattgtgcgattctgtttcaccttaaagggttattatccttttcccataaattttcacagcattaatccatcaatttttgrtttggtattcaggaagcgaatgtagaccatgatgtattatttattcagcatagattccagacagccagttccttagaaatccatgtcataataccatatt

SEQ ID NO: 5830 - DNA, 201 bp, Homo sapiens; identical to SEQ ID NO: 5829

SEQ ID NO: 5831 - DNA, 201 bp, Homo sapiens
ccacttcagcatcctatctctcacccctggtaactcgtaagtaatgccttttttggtgaatggactttatttttatacgtaacctgctccagctttcctcrgttgtttcccattgttcatttctctcccataacactgaaaacagggtttttttttgtttttttttttttgccttttggtacacaaaagccagtcctgatc

SEQ ID NO: 5832 - DNA, 201 bp, Homo sapiens; identical to SEQ ID NO: 5831

SEQ ID NO: 5833 - DNA, 201 bp, Homo sapiens
gagaaaaaaaatcacctccctaagaaaagggttttcctacagacttgaatgcactctgctttttcagaagagatactgtaccagtcagggaaatagatgasactcagaattatctgaggagggttctataaaaagattttttgcaaaagtgcgagcacattatgtagaaaccacaagtccgccaggactagtaaaagccag

SEQ ID NO: 5834 - DNA, 201 bp, Homo sapiens; identical to SEQ ID NO: 5833

SEQ ID NO: 5835 - DNA, 201 bp, Homo sapiens
agaaaaaaaatcacctccctaagaaaagggttttcctacagacttgaatgcactctgctttttcagaagagatactgtaccagtcagggaaatagatgacwctcagaattatctgaggagggttctataaaaagattttttgcaaaagtgcgagcacattatgtagaaaccacaagtccgccaggactagtaaaagccaga

SEQ ID NO: 5836 - DNA, 201 bp, Homo sapiens; identical to SEQ ID NO: 5835

SEQ ID NO: 5837 - DNA, 201 bp, Homo sapiens
aggaagggaattggtaaatgagcgctgcacgccggggaagctgcgaggttgcgatgtgggggatcaggcgtaggaagtgcacgcctttctgaacgcggatscgtgtgtgtgtgtgtgtgtgtgtgtgtgtgtgtgtgtgtgtgtgtgtgtgtgtgtgtgtgttgagatgctttttgtttttgtctttttttttttttcact

SEQ ID NO: 5838 - DNA, 201 bp, Homo sapiens
ttatgcaacaagacttcaggacattttgccaagcgtaacaattttgtgcctcttcctcaagtaccatgaagagtcccagaaaatctgaacgtcagccattktaataggaaaggaaaatgaaataaaaggtttgtgaaaggaaggaaataacaaatccatgcaaattaaatagagtctaagaatgccattcctatttttagt

SEQ ID NO: 5839 - DNA, 201 bp, Homo sapiens
ctgaggcaggagaatcgcttgaacctgggaggcagagttgcagtgagctgagattgcaccactgcactccagcctggcaacagagcaagactctgtctttaaaaaaaaaaaaaaaaaggcaatgtgaattttaaggaagttggcaaaccatgccccaagcatcaaacataagtttttatttcttttatacaaacgcacctt

SEQ ID NO: 5840 - DNA, 201 bp, Homo sapiens
cagtactggacaaagaaaactgatatttactataaagaaaatcccagccttctgtgctctgggcccccacagcaaacactgccaaggtcacgtcgacaggyaggctatagaaaggaacacactcggtgagaatctgaggtgcagtaagtatgtttagaggcataatggtgactaactatgaactgctgaactttccccatg

SEQ ID NO: 5841 - DNA, 201 bp, Homo sapiens
ataaaaccaaaatctttgctagtccatctaaatactgaactaatatttatttgcttttccttaatatgtatataaagatacacacacacacacacacacayacacacacaatgattaacactctttttaacacaaataataattacataacttttatttcaggcttttaccttgaattgagtttccacttcattcatatct

SEQ ID NO: 5842 - DNA, 201 bp, Homo sapiens
gaggtctgcccctaaagaagaaagtctaacacgtcagcaataaaaagcacggagatggaaaaagaaccagccagaattagctgggtgaaaccatggtcacrggcatttttcctgtaatccaatacttacctctattgctctgacctcatcttttttttttgttttgagagatagggtcttgctatgttgccctggctggtc

SEQ ID NO: 5843 - DNA, 201 bp, Homo sapiens
tacatatatatatagagagagagagagagcaagagagagagggaggtgaagaaagtaaaggagtaaagagttaacatgtatctaggtaaaggatatatagkaatttgttgtgttattcttgtaacttctctataagtctgaaattgtttcaagataaaagaattttttaacggtatccatccagggtcaatcaagttgcag

SEQ ID NO: 5844 - DNA, 201 bp, Homo sapiens
cgtcacctttactgagaataaccaaggtttaaagcctccttaatcctactgggaagatgggggcagggagtataagtcaacttcataggatacacagatgmagctgaaatattttagcaatagtggtaagggcattatttcaaaagcaaggttccatcctacaaggcagatgttacctagacaacaaaacaaattttactc

SEQ ID NO: 5845 - DNA, 201 bp, Homo sapiens
taagggcattatttcaaaagcaaggttccatcctacaaggcagatgttacctagacaacaaaacaaattttactctaggagcattacccagtgtccggggygccgtcagagcccttcatgtagtgctcttgcttcatgtgtacattcctccccctcactgtgatggttattaggggaaaacccctctgcagtgtccaagtg

SEQ ID NO: 5846 - DNA, 201 bp, Homo sapiens
atttactataaagaaaatcccagccttctgtgctctgggcccccacagcaaacactgccaaggtcacgtcgacaggcaggctatagaaaggaacacactcrgtgagaatctgaggtgcagtaagtatgtttagaggcataatggtgactaactatgaactgctgaactttccccatgatcagagaagcatgcctggaaata

SEQ ID NO: 5847 - DNA, 201 bp, Homo sapiens
acccaagctggagccccaccccgtgatacctcggtaagcagcacatcttatttgggagataaatgtttttgcgcagccacaactagaaagaaaatagggcrcctgtttaaagcaaatgaaaataggcagaattattaggaagatcaggcaccttctatttcagaagagccaagactgatgatttagcgagatggcagagat

SEQ ID NO: 5848 - DNA, 201 bp, Homo sapiens; identical to SEQ ID NO: 5847

SEQ ID NO: 5849 - DNA, 201 bp, Homo sapiens
ttatagttaagtgatggcattgtgctcataattttatatacaacatgttactaataaaatttttttcaataaaagaaatttgaagatgctaaacttgctgytgccatctctgaagtggtttcccaaaccccagcttcaacgacccaagctggagccccaccccgtgatacctcggtaagcagcacatcttatttgggagat

SEQ ID NO: 5850 - DNA, 201 bp, Homo sapiens; identical to SEQ ID NO: 5849

SEQ ID NO: 5851 - DNA, 201 bp, Homo sapiens
cagtcattaagctatcgttaagagttatagttaagtgatggcattgtgctcataattttatatacaacatgttactaataaaatttttttcaataaaagaratttgaagatgctaaacttgctgctgccatctctgaagtggtttcccaaaccccagcttcaacgacccaagctggagccccaccccgtgatacctcggta

SEQ ID NO: 5852 - DNA, 201 bp, Homo sapiens; identical to SEQ ID NO: 5851

SEQ ID NO: 5853 - DNA, 201 bp, Homo sapiens
ggacaggtaaactgaggcaaattgctagatcggatttatgctaccaagatctttaaattcaaacctcccttgaaataaatagtagctatactcctttacartagcataaaacatatcatgactgactgcttctaatgtgtcaccaaagccgaccagcaggtaaatatttatttgagccaatatcattatatatgcatatgc

SEQ ID NO: 5854 - DNA, 201 bp, Homo sapiens; identical to SEQ ID NO: 5853

SEQ ID NO: 5855 - DNA, 201 bp, Homo sapiens
tgaatattaattctatctgctcactgttgatataggaaaaagctaaagctgaacatagagacaagcttggagaaagagatgacactatcccacctgaatayagacatctcctggatgataatggacaggtaaactgaggcaaattgctagatcggatttatgctaccaagatctttaaattcaaacctcccttgaaataaa

SEQ ID NO: 5856 - DNA, 201 bp, Homo sapiens; identical to SEQ ID NO: 5855

SEQ ID NO: 5857 - DNA, 201 bp, Homo sapiens
tatggaatgatctccataaagaccacgtctttcttttttcctggtatgcaacttatctgtgatacacctcagtccattgtctttcttatttctaaaccaaytctgggtcaggtctcgtaagtttcacattatcaacatataatttgcacacaatgtttaatataagaaatttgctcgaatgttaaacgttttgttttttaa

SEQ ID NO: 5858 - DNA, 201 bp, Homo sapiens
cctcatccagtgtgcagcccccgtgactcaggaatgcctggtgcttgtgagctgtttgttgccatgaactaattagagcgtattctctggtgagagaatcyttcgtgacatgatggatctaatttaaaatgtacaacagcaagtataacctgtagaccctttgtaatgtttacaaggtttcatactttggataaaatgtaa

SEQ ID NO: 5859 - DNA, 201 bp, Homo sapiens
aatgtacaacagcaagtataacctgtagaccctttgtaatgtttacaaggtttcatactttggataaaatgtaaaatgatttcatgccatgtgttttcccycccggataggataaagatggaaagccactcctgccaaaagagtctaaggaacagcttccagtaagcaaaccagttttctctgaagatatcttttcctttt

SEQ ID NO: 5860 - DNA, 201 bp, Homo sapiens
caaaatgcttcatctcttgtaagtccaaaactcttggttttatttctttagttttttttttttttttcctttgagatggagtcttgctctgtcatccaggygggagtacagtggtgccatcttcagtcaccgcaacctccaccttccagattcaagcgattctcctgccccagcctcctgagtagctgggactacaggggt

SEQ ID NO: 5861 - DNA, 201 bp, Homo sapiens
tcttggttttatttctttagttttttttttttttttcctttgagatggagtcttgctctgtcatccaggcgggagtacagtggtgccatcttcagtcaccrcaacctccaccttccagattcaagcgattctcctgccccagcctcctgagtagctgggactacaggggtgcaccaccacacccagctaatttttgtattt

SEQ ID NO: 5862 - DNA, 201 bp, Homo sapiens
gacccaagctggagccccaccccgtgatacctcggtaagcagcacatcttatttgggagataaatgtttttgcgcagccacaactagaaagaaaatagggygcctgtttaaagcaaatgaaaataggcagaattattaggaagatcaggcaccttctatttcagaagagccaagactgatgatttagcgagatggcagaga

SEQ ID NO: 5863 - DNA, 201 bp, Homo sapiens; identical to SEQ ID NO: 5862

SEQ ID NO: 5864 - DNA, 201 bp, Homo sapiens
agacctccttaacctggtgggatcttcaccaagagatgggcagggttgggtggaaggtgctggccctccaaccccagtagggtgacagatactgccgctcttctcctgatcttccattcctagccttctcttctctgaccctgtctactcccctgccccagccccagatgtctttttcttccaaggaaacaggttccctcc

SEQ ID NO: 5865 - DNA, 201 bp, Homo sapiens; identical to SEQ ID NO: 5864

SEQ ID NO: 5866 - DNA, 201 bp, Homo sapiens
acctccttaacctggtgggatcttcaccaagagatgggcagggttgggtggaaggtgctggccctccaaccccagtagggtgacagatactgccgctcttctcctgatcttccattcctagccttctcttctctgaccctgtctactcccctgccccagccccagatgtctttttcttccaaggaaacaggttccctcctg

SEQ ID NO: 5867 - DNA, 201 bp, Homo sapiens; identical to SEQ ID NO: 5866

SEQ ID NO: 5868 - DNA, 201 bp, Homo sapiens
ctccttaacctggtgggatcttcaccaagagatgggcagggttgggtggaaggtgctggccctccaaccccagtagggtgacagatactgccgctcttctcctgatcttccattcctagccttctcttctctgaccctgtctactcccctgccccagccccagatgtctttttcttccaaggaaacaggttccctcctgaa

SEQ ID NO: 5869 - DNA, 201 bp, Homo sapiens; identical to SEQ ID NO: 5868

SEQ ID NO: 5870 - DNA, 201 bp, Homo sapiens
taaccctttccatgcctgttcatcaaataagaaacaaggaagaccaaattacacccttctctttctgtactgattcattttggtgagtaagatgattcctggtttaaatagcagtgtcagcttcagggtctcctattacaggaaccaattctccttgcttgcattcagtattcctcaagatagcaattccacatcctgcta

SEQ ID NO: 5871 - DNA, 201 bp, Homo sapiens; identical to SEQ ID NO: 5870

SEQ ID NO: 5872 - DNA, 201 bp, Homo sapiens
gaatggactttatttttatacgtaacctgctccagctttcctcggttgtttcccattgttcatttctctcccataacactgaaaacagggtttttttttgtttttttttttttgccttttggtacacaaaagccagtcctgatcgagacaagctctattttgttttttaaatacattttattgtgtatatttgaggtttac

SEQ ID NO: 5873 - DNA, 201 bp, Homo sapiens; identical to SEQ ID NO: 5872

SEQ ID NO: 5874 - DNA, 201 bp, Homo sapiens
aaaagcatacaagcacttactgaccaaagcctaaaagaaatcaaagtataggttaaatcgggttcagctctctcaccatgatccatgtttatttcctaggaaaaaaggagctatattaggtagaactgctctaacatttttcccaaaattaaaaaaaattctattaatccactttcatgtttacttataggaaattccttc

SEQ ID NO: 5875 - DNA, 201 bp, Homo sapiens; identical to SEQ ID NO: 5874

SEQ ID NO: 5876 - DNA, 201 bp, Homo sapiens; identical to SEQ ID NO: 1079

SEQ ID NO: 5877 - DNA, 201 bp, Homo sapiens; identical to SEQ ID NO: 1079

SEQ ID NO: 5878 - DNA, 201 bp, Homo sapiens; identical to SEQ ID NO: 1080

SEQ ID NO: 5879 - DNA, 201 bp, Homo sapiens; identical to SEQ ID NO: 1080

SEQ ID NO: 5880 - DNA, 201 bp, Homo sapiens; identical to SEQ ID NO: 1082

SEQ ID NO: 5881 - DNA, 201 bp, Homo sapiens; identical to SEQ ID NO: 1082

SEQ ID NO: 5882 - DNA, 201 bp, Homo sapiens
agaaatatcttcgagacttgggtgtttgttaataactaataactggagtaagctacaggatctaaagcagccctttttacagtctagttaggagagagaarataattgcaaatatccacttagaggcaaagaacaattttttattatcaaaaaggtttctgcacattgttgtggcaatattgtatctgtttagaaaatggg

SEQ ID NO: 5883 - DNA, 201 bp, Homo sapiens; identical to SEQ ID NO: 5882

SEQ ID NO: 5884 - DNA, 201 bp, Homo sapiens
atttgttgtagtgaatggtttaataaatggcagatttatgtccagaagtcactctattttgtcgtgtattaggggaacacattttgacatttttcgtaccaatcatcaatcatattcccttatcttgaagtttttgccttatattcaaaaagttcagtttgaattctcctttgccaggtgtgaggatttccgcaccttaga

SEQ ID NO: 5885 - DNA, 201 bp, Homo sapiens; identical to SEQ ID NO: 5884

SEQ ID NO: 5886 - DNA, 201 bp, Homo sapiens
ttgttgtagtgaatggtttaataaatggcagatttatgtccagaagtcactctattttgtcgtgtattaggggaacacattttgacatttttcgtaccaatcatcaatcatattcccttatcttgaagtttttgccttatattcaaaaagttcagtttgaattctcctttgccaggtgtgaggatttccgcaccttagagt

SEQ ID NO: 5887 - DNA, 201 bp, Homo sapiens; identical to SEQ ID NO: 5886

SEQ ID NO: 5888 - DNA, 201 bp, Homo sapiens
tgttgtagtgaatggtttaataaatggcagatttatgtccagaagtcactctattttgtcgtgtattaggggaacacattttgacatttttcgtaccaatcatcaatcatattcccttatcttgaagtttttgccttatattcaaaaagttcagtttgaattctcctttgccaggtgtgaggatttccgcaccttagagtc

SEQ ID NO: 5889 - DNA, 201 bp, Homo sapiens; identical to SEQ ID NO: 5888

SEQ ID NO: 5890 - DNA, 201 bp, Homo sapiens
tgtccagaagtcactctattttgtcgtgtattaggggaacacattttgacatttttcgtaccaatcatcaatcatattcccttatcttgaagtttttgccytatattcaaaaagttcagtttgaattctcctttgccaggtgtgaggatttccgcaccttagagtcagcgcaaaacacgctgcaacttgaatcaagtcagc

SEQ ID NO: 5891 - DNA, 201 bp, Homo sapiens; identical to SEQ ID NO: 5890

SEQ ID NO: 5892 - DNA, 201 bp, Homo sapiens
gcagagttgttttaaaattatatgtcaatacagtgcaactttacaatgagcagaaggcatggcctcctgctgtagcaacctggaaaacacttcactctctactttaagttgtagctcaacctactgtttcatacgctctcagaatgcaagattaattcacagtcgattaaaaatcactgagcactactcaacaaagcacat

SEQ ID NO: 5893 - DNA, 201 bp, Homo sapiens; identical to SEQ ID NO: 5892

SEQ ID NO: 5894 - DNA, 201 bp, Homo sapiens
cagagttgttttaaaattatatgtcaatacagtgcaactttacaatgagcagaaggcatggcctcctgctgtagcaacctggaaaacacttcactctctactttaagttgtagctcaacctactgtttcatacgctctcagaatgcaagattaattcacagtcgattaaaaatcactgagcactactcaacaaagcacatc

SEQ ID NO: 5895 - DNA, 201 bp, Homo sapiens; identical to SEQ ID NO: 5894

SEQ ID NO: 5896 - DNA, 201 bp, Homo sapiens
agagttgttttaaaattatatgtcaatacagtgcaactttacaatgagcagaaggcatggcctcctgctgtagcaacctggaaaacacttcactctctactttaagttgtagctcaacctactgtttcatacgctctcagaatgcaagattaattcacagtcgattaaaaatcactgagcactactcaacaaagcacatca

SEQ ID NO: 5897 - DNA, 201 bp, Homo sapiens; identical to SEQ ID NO: 5896

SEQ ID NO: 5898 - DNA, 201 bp, Homo sapiens
gagttgttttaaaattatatgtcaatacagtgcaactttacaatgagcagaaggcatggcctcctgctgtagcaacctggaaaacacttcactctctactttaagttgtagctcaacctactgtttcatacgctctcagaatgcaagattaattcacagtcgattaaaaatcactgagcactactcaacaaagcacatcaa

SEQ ID NO: 5899 - DNA, 201 bp, Homo sapiens; identical to SEQ ID NO: 5898

SEQ ID NO: 5900 - DNA, 201 bp, Homo sapiens
tgagaatacaagtgaatgaatgaaatgctttgttgctatagatcttgtctatagatgactacctttctggtcaaggctttggacatctcttcagtcatcasacagagtatctctgctctagacctcgctggagttcaagcttgaattattatatgcaagttaattttacaagcctggatgaggctactgaaaactggaaaa

SEQ ID NO: 5901 - DNA, 201 bp, Homo sapiens; identical to SEQ ID NO: 5900

SEQ ID NO: 5902 - DNA, 201 bp, Homo sapiens
gctttgttgctatagatcttgtctatagatgactacctttctggtcaaggctttggacatctcttcagtcatcagacagagtatctctgctctagacctcrctggagttcaagcttgaattattatatgcaagttaattttacaagcctggatgaggctactgaaaactggaaaaaagctacgagactgtaacaacccttc

SEQ ID NO: 5903 - DNA, 201 bp, Homo sapiens; identical to SEQ ID NO: 5902

SEQ ID NO: 5904 - DNA, 201 bp, Homo sapiens
ctatagatgactacctttctggtcaaggctttggacatctcttcagtcatcagacagagtatctctgctctagacctcgctggagttcaagcttgaattaytatatgcaagttaattttacaagcctggatgaggctactgaaaactggaaaaaagctacgagactgtaacaacccttcattctttttcatttccaaagct

SEQ ID NO: 5905 - DNA, 201 bp, Homo sapiens; identical to SEQ ID NO: 5904

SEQ ID NO: 5906 - DNA, 201 bp, Homo sapiens
gagaagaggcacagttttcactagtttaattgcaactgatttatgctgctgtcaacaccatagcatccaaaaataacttctaaatgacaatccatttctaactcaccacaccctcaaagtattttgtctaccccatattaattagctaattttcatttatgtttaaaaatatatatatagattttttttttttacctcttc

SEQ ID NO: 5907 - DNA, 201 bp, Homo sapiens; identical to SEQ ID NO: 5906

SEQ ID NO: 5908 - DNA, 201 bp, Homo sapiens
agaagaggcacagttttcactagtttaattgcaactgatttatgctgctgtcaacaccatagcatccaaaaataacttctaaatgacaatccatttctaactcaccacaccctcaaagtattttgtctaccccatattaattagctaattttcatttatgtttaaaaatatatatatagattttttttttttacctcttca

SEQ ID NO: 5909 - DNA, 201 bp, Homo sapiens; identical to SEQ ID NO: 5908

SEQ ID NO: 5910 - DNA, 201 bp, Homo sapiens
gaagaggcacagttttcactagtttaattgcaactgatttatgctgctgtcaacaccatagcatccaaaaataacttctaaatgacaatccatttctaactcaccacaccctcaaagtattttgtctaccccatattaattagctaattttcatttatgtttaaaaatatatatatagattttttttttttacctcttcaa

SEQ ID NO: 5911 - DNA, 201 bp, Homo sapiens; identical to SEQ ID NO: 5910

SEQ ID NO: 5912 - DNA, 201 bp, Homo sapiens
aagaggcacagttttcactagtttaattgcaactgatttatgctgctgtcaacaccatagcatccaaaaataacttctaaatgacaatccatttctaactcaccacaccctcaaagtattttgtctaccccatattaattagctaattttcatttatgtttaaaaatatatatatagattttttttttttacctcttcaag

SEQ ID NO: 5913 - DNA, 201 bp, Homo sapiens; identical to SEQ ID NO: 5912

SEQ ID NO: 5914 - DNA, 201 bp, Homo sapiens
ggcataatggtgactaactatgaactgctgaactttccccatgatcagagaagcatgcctggaaatataaacaaaaactactgatttccttcagttacaattttttttttttttttttaggacggagtcttgctctgtcacccaggctggagtgccgtggctcgatatcggttcctgcaagctccgccctcccgggttcac

SEQ ID NO: 5915 - DNA, 201 bp, Homo sapiens
tttaggaggccaaggcaggtggatcacctgaggtcgggagttcaagaccagcctggccaacatggtgaaaccccgtctctactaaaaatacataaaatagscaggcatggtggcaggtacttggtatgtgggaggctgaggccggagaatcacttgaacccgggaggcagaggcggtgagctgagatggcaccactgcact

SEQ ID NO: 5916 - DNA, 201 bp, Homo sapiens
gcaggtggatcacctgaggtcgggagttcaagaccagcctggccaacatggtgaaaccccgtctctactaaaaatacataaaatagccaggcatggtggcmggtacttggtatgtgggaggctgaggccggagaatcacttgaacccgggaggcagaggcggtgagctgagatggcaccactgcactccagcctgggcgac

SEQ ID NO: 5917 - DNA, 201 bp, Homo sapiens
gtacttggtatgtgggaggctgaggccggagaatcacttgaacccgggaggcagaggcggtgagctgagatggcaccactgcactccagcctgggcgacaragtgagactccatctccaaaaaataaataaacagatagataactactatataagtctcttttctatcacatataacacaacatctggcatgtttacacta

SEQ ID NO: 5918 - DNA, 201 bp, Homo sapiens
taatagtattatataaagtttatttcccaattttgataattgtactgtggctatggttatataactgaatgttcttgttttttgtttgtttgttttgagayggagtttcgctcttgttgtccaggctggagtgcagtggtgcgatctcggctcactgcaacctccgcctcctgggtacaagcgattctcctgcctcactct

SEQ ID NO: 5919 - DNA, 201 bp, Homo sapiens
tattatataaagtttatttcccaattttgataattgtactgtggctatggttatataactgaatgttcttgttttttgtttgtttgttttgagatggagtytcgctcttgttgtccaggctggagtgcagtggtgcgatctcggctcactgcaacctccgcctcctgggtacaagcgattctcctgcctcactctcctgag

SEQ ID NO: 5920 - DNA, 201 bp, Homo sapiens
ggctatggttatataactgaatgttcttgttttttgtttgtttgttttgagatggagtttcgctcttgttgtccaggctggagtgcagtggtgcgatctcrgctcactgcaacctccgcctcctgggtacaagcgattctcctgcctcactctcctgagtagctgggactacaggcgcccgccaccacgcccggctaattt

SEQ ID NO: 5921 - DNA, 201 bp, Homo sapiens
tgaatgttcttgttttttgtttgtttgttttgagatggagtttcgctcttgttgtccaggctggagtgcagtggtgcgatctcggctcactgcaacctccrcctcctgggtacaagcgattctcctgcctcactctcctgagtagctgggactacaggcgcccgccaccacgcccggctaatttttgtatttttagtagag

SEQ ID NO: 5922 - DNA, 201 bp, Homo sapiens
gatggagtttcgctcttgttgtccaggctggagtgcagtggtgcgatctcggctcactgcaacctccgcctcctgggtacaagcgattctcctgcctcacyctcctgagtagctgggactacaggcgcccgccaccacgcccggctaatttttgtatttttagtagagatggcgtttcaccatgttggccaggctggtctc

SEQ ID NO: 5923 - DNA, 201 bp, Homo sapiens
gtggtgcgatctcggctcactgcaacctccgcctcctgggtacaagcgattctcctgcctcactctcctgagtagctgggactacaggcgcccgccaccaygcccggctaatttttgtatttttagtagagatggcgtttcaccatgttggccaggctggtctcgaactcctaacctcaggtgattctcctgcctcggctt

SEQ ID NO: 5924 - DNA, 201 bp, Homo sapiens
cctgggtacaagcgattctcctgcctcactctcctgagtagctgggactacaggcgcccgccaccacgcccggctaatttttgtatttttagtagagatgscgtttcaccatgttggccaggctggtctcgaactcctaacctcaggtgattctcctgcctcggcttcccaaagtcctggtattaaaggcatgagccactg

SEQ ID NO: 5925 - DNA, 201 bp, Homo sapiens
aggcgcccgccaccacgcccggctaatttttgtatttttagtagagatggcgtttcaccatgttggccaggctggtctcgaactcctaacctcaggtgatyctcctgcctcggcttcccaaagtcctggtattaaaggcatgagccactgtgacaggccataaatgttgttttgtagaaaatactatgctgaaacatttag

SEQ ID NO: 5926 - DNA, 201 bp, Homo sapiens
tcaccatgttggccaggctggtctcgaactcctaacctcaggtgattctcctgcctcggcttcccaaagtcctggtattaaaggcatgagccactgtgacmggccataaatgttgttttgtagaaaatactatgctgaaacatttaggtgtgaaggggaatcatgtcaccaacttactgtcaaacagttcagaaaaacata

SEQ ID NO: 5927 - DNA, 201 bp, Homo sapiens
atataggtatgtatgtagatagatggatatcgattaatcaagatttaaaacctccttaatccttttgggaagatgggggagggaggtgtatatatatatayatatatatgtgtgtgtatatatatacacatatatatatgtatatatacacacacacatatatccacacaaacatatacatatatatatagagagagagag

SEQ ID NO: 5928 - DNA, 201 bp, Homo sapiens
cctagacaacaaaacaaattttactctaggagcattacccagtgtccggggcgccgtcagagcccttcatgtagtgctcttgcttcatgtgtacattcctscccctcactgtgatggttattaggggaaaacccctctgcagtgtccaagtgttcatcatggttttcacatccaccccttcctgatgccaatgctggtgtg

SEQ ID NO: 5929 - DNA, 201 bp, Homo sapiens
ttttttgatactaaaaaagcttttaagaaatgatttaagaagtagtaaaggctgggcgcggtggctcatgcctgtaatcctagcactttcggagtctgagktgggtggatcacctgaggtcaggagttcaagaccagcctggcgaacatggtgaaacctcatctctactaagaatacaaaaattaaccgggtgtagtggcg

SEQ ID NO: 5930 - DNA, 201 bp, Homo sapiens
aggacaatatgtatccataatcatttttattactaaagatcatgtagaaacataagaaaatatttatgattataatgcaatattgatgtgtactttctaattatgtacacaggcagatgaaaataggcagtaataaatattcacaaatgtatattttaaataatgtatacaggcagatgaaaataggaataaatatttaca

SEQ ID NO: 5931 - DNA, 201 bp, Homo sapiens
ttgtccaggctggtctcaaacccctggcctcaagtgattcttccacctcagcctcccaaactgttgggtttatgttgggtttacacgcacgacccactgcrctcaggcagacttccagttttaaaaccagttccaagcaaaccagaacaagctggtcaccatatgtgacagtcataggctcaccttgactccactcttggt

SEQ ID NO: 5932 - DNA, 201 bp, Homo sapiens
cctaagcaacatggtgaaaccctatctctacaaaaaaaatacaaaaattagtcctgctggtggtgcgtgcctgtagtcatagctactggggaggctgaggtggaaggatggcttgagcctgggaggtggaggttgcagtgagccaagattgagccactgcactcctgcctggatgacagagccagaccctgtctaatgacg

SEQ ID NO: 5933 - DNA, 201 bp, Homo sapiens
agattgagaccatcctggctaacacggtggaaccccatctctactaaaaatatgaaaaattagccgggcgtggtggcaggtgcctgtagtcccagctactygggaggctgaggcaggagaatggcatgaacccggaaggcagagcttgcagtgagccgagatcacgccactgcactccagcctggatgacagagcgagact

SEQ ID NO: 5934 - DNA, 201 bp, Homo sapiens
acggagatggaaaaagaaccagccagaattagctgggtgaaaccatggtcacgggcatttttcctgtaatccaatacttacctctattgctctgacctcaycttttttttttgttttgagagatagggtcttgctatgttgccctggctggtcttggactcctgacctcaagaaatcctcttcttctgcctcccaaagtgt

SEQ ID NO: 5935 - DNA, 201 bp, Homo sapiens
gcctcagcctcccaaagtgccgagattacagtcatgagccaccacacctggccaaaaatttccattctcgagttgtgttaattattaggaaaataacctgattaaattaattcaaatttaaatgtgattaatttctgccccatgcccaaaagcttcaatgttccaatggtatatattgtgtttttctggtctccaaaaaga

SEQ ID NO: 5936 - DNA, 201 bp, Homo sapiens
cctcagcctcccaaagtgccgagattacagtcatgagccaccacacctggccaaaaatttccattctcgagttgtgttaattattaggaaaataacctgattaaattaattcaaatttaaatgtgattaatttctgccccatgcccaaaagcttcaatgttccaatggtatatattgtgtttttctggtctccaaaaagat

SEQ ID NO: 5937 - DNA, 201 bp, Homo sapiens
ctcagcctcccaaagtgccgagattacagtcatgagccaccacacctggccaaaaatttccattctcgagttgtgttaattattaggaaaataacctgattaaattaattcaaatttaaatgtgattaatttctgccccatgcccaaaagcttcaatgttccaatggtatatattgtgtttttctggtctccaaaaagatc

SEQ ID NO: 5938 - DNA, 201 bp, Homo sapiens
tcagcctcccaaagtgccgagattacagtcatgagccaccacacctggccaaaaatttccattctcgagttgtgttaattattaggaaaataacctgattaaattaattcaaatttaaatgtgattaatttctgccccatgcccaaaagcttcaatgttccaatggtatatattgtgtttttctggtctccaaaaagatct

SEQ ID NO: 5939 - DNA, 201 bp, Homo sapiens
cagcctcccaaagtgccgagattacagtcatgagccaccacacctggccaaaaatttccattctcgagttgtgttaattattaggaaaataacctgattaaattaattcaaatttaaatgtgattaatttctgccccatgcccaaaagcttcaatgttccaatggtatatattgtgtttttctggtctccaaaaagatctt

SEQ ID NO: 5940 - DNA, 201 bp, Homo sapiens
aatacaaaaattagctgggtgtggtggtgcgcgtctgtaatcccagctactcaggaggctgaggcaggagaattgcttgaacccgggaggcggaggttgcrgtgagccgagttcgcgccactgcactccagcctgggtgacagagcaagactccgtctcgacaaaaaaaaaaaaaaaaaaaaaaaaaaaatccccaacaac

SEQ ID NO: 5941 - DNA, 201 bp, Homo sapiens
gggcagaaacaccatcttcttgctctacctacctagcggcacaaatgtacaaaagcaaaaatatatgtcattaaaatgttattgacacagcataatttcagaatgtatccacccagcattcacagaaataggcataaacttccaaaagtactaggtcttttcctgaaagtaaaaggaccttccctatgttatggtttcata

SEQ ID NO: 5942 - DNA, 201 bp, Homo sapiens
tagccaggaagagcttaaagagcttaattttcccagtagtttgtggcaaacgtatcaatcacctggattgattttaaagacataaaagcaatgtgaatttyaggccaggcatggtggctcacgcctgtaatcccagcactttgggaggatgaggtgggcagatcacaaggtcaacagattgagaccatcctggccaacatg

SEQ ID NO: 5943 - DNA, 201 bp, Homo sapiens
acataaaagcaatgtgaatttcaggccaggcatggtggctcacgcctgtaatcccagcactttgggaggatgaggtgggcagatcacaaggtcaacagatygagaccatcctggccaacatggcgaaatcccgtctctactaaaaatacaaaaattagctgggtgtggtggtgcgcacctgtagtcctaattacttgggag

SEQ ID NO: 5944 - DNA, 201 bp, Homo sapiens
tgggtccttattgacaacaattaaactggaacctatggtgataagatcggggtatggttttacggattgtttaatttctggtttttggttttttttttttwaaaaaaaaaaaactgtccagagattttactgagaagccaaggttgaaaagctcatccttgccaaatcctggctttcccccttcaactctatgtgatagga

SEQ ID NO: 5945 - DNA, 201 bp, Homo sapiens
ctcttttttttttttttttttttgagacggagtctcgctctgtctcccaggctggagtgcagtggtgcgatcttggctcactgcaacctctgcctcccttycttttattggggcactatagtatatgaaatagatcatcaagaagtaattgaggttcttccagaatttcctgaacaatgaaattaacaagcactgttggta

SEQ ID NO: 5946 - DNA, 201 bp, Homo sapiens
ggaagggaattggtaaatgagcgctgcacgccggggaagctgcgaggttgcgatgtgggggatcaggcgtaggaagtgcacgcctttctgaacgcggatcygtgtgtgtgtgtgtgtgtgtgtgtgtgtgtgtgtgtgtgtgtgtgtgtgtgtgtgtgtgttgagatgctttttgtttttgtctttttttttttttcactg

SEQ ID NO: 5947 - DNA, 201 bp, Homo sapiens
ccagcactttgggaggccaaggcaggaagatcatgagggcaggagatcgagaccgtcctggccaacatggtgaaaccctagctctactaaaatacaaaaawttagcctggcatggtggtacgtgcctgtagtcccagttacttgggaggctgaggcaggggaatcccttgaacccaggaggcggaggttgcagtgaaccaa

SEQ ID NO: 5948 - DNA, 201 bp, Homo sapiens
ggaggccaaggcaggaagatcatgagggcaggagatcgagaccgtcctggccaacatggtgaaaccctagctctactaaaatacaaaaaattagcctggcrtggtggtacgtgcctgtagtcccagttacttgggaggctgaggcaggggaatcccttgaacccaggaggcggaggttgcagtgaaccaagattgtgccac

SEQ ID NO: 5949 - DNA, 201 bp, Homo sapiens
gcaggaagatcatgagggcaggagatcgagaccgtcctggccaacatggtgaaaccctagctctactaaaatacaaaaaattagcctggcatggtggtacrtgcctgtagtcccagttacttgggaggctgaggcaggggaatcccttgaacccaggaggcggaggttgcagtgaaccaagattgtgccactgcactccag

SEQ ID NO: 5950 - DNA, 201 bp, Homo sapiens
catgagggcaggagatcgagaccgtcctggccaacatggtgaaaccctagctctactaaaatacaaaaaattagcctggcatggtggtacgtgcctgtagwcccagttacttgggaggctgaggcaggggaatcccttgaacccaggaggcggaggttgcagtgaaccaagattgtgccactgcactccagcctggcgaca

SEQ ID NO: 5951 - DNA, 201 bp, Homo sapiens
aagtttatgtcactaatttgatctttgtaaatgcactgctaaataaaacacccaaactattaaggtgttgttgttgttgttgttgtttgttttgttttttrttttttttttttttgagatgggattttgctcttgttgcccgggctggagtgcaatggtgtgatctcggctcacagcaacctctgcctcccatgttcaagc

SEQ ID NO: 5952 - DNA, 201 bp, Homo sapiens
caactgcaggacagcacctaccccgcctctgcagctaacaggaagaaatgtggttaagaacttgcccttatgccaggatgttgctcagcagggacggtctyaacttaggcacaggtgcaacaaatcaacctaaatgtccttaatttgacccagctcactataatgccattaacataacattagcgttgtggttttaggcac

SEQ ID NO: 5953 - DNA, 201 bp, Homo sapiens
atatctgcaataaatattaaactgtactgaggttgaacaaataaaaaagaaataaagcaatcatgaggaagcctcaagtaatattgattgtaattaagaayaaaaaataataattgaggtaccaatcgtagatttagattatgaaagacacggggcacttgggagtgagatgaatatttaacattgtgacagaagcatatt

SEQ ID NO: 5954 - DNA, 201 bp, Homo sapiens
cgtctcgctctgtcaccaaggctggagtgcaatggcatgatctcagctcactgcaacctccgccttccaggttcaagcgattctcctgcctcagcctcccragtagctgggactacaggcacccaccaccacgcccggttaatttttatatttttaatagagacggggtttcaacacgttggccaggatggtctcaatctc

SEQ ID NO: 5955 - DNA, 201 bp, Homo sapiens
caggcacccaccaccacgcccggttaatttttatatttttaatagagacggggtttcaacacgttggccaggatggtctcaatctcttgacctcgtgatcygcccgcctcagcctcccaatgtgctgggattccaggcgtgagccaccacgcccggcttgaactgcattttctaaccaactgactttatttcagtgatttt

SEQ ID NO: 5956 - DNA, 201 bp, Homo sapiens
ccaccacgcccggttaatttttatatttttaatagagacggggtttcaacacgttggccaggatggtctcaatctcttgacctcgtgatccgcccgcctcrgcctcccaatgtgctgggattccaggcgtgagccaccacgcccggcttgaactgcattttctaaccaactgactttatttcagtgattttgtaacatcac

SEQ ID NO: 5957 - DNA, 201 bp, Homo sapiens
gggtttcaacacgttggccaggatggtctcaatctcttgacctcgtgatccgcccgcctcagcctcccaatgtgctgggattccaggcgtgagccaccacrcccggcttgaactgcattttctaaccaactgactttatttcagtgattttgtaacatcactcaatttcaggtaagtactctctaagaacagcttcatttg

SEQ ID NO: 5958 - DNA, 201 bp, Homo sapiens
aactgtatccttatactcaatctacttttaccttatcataagaaacatcatcaaacatctcccggatctgagcaggattttccacaggtgtagacacaggrtgtgaggaatttaaagcatctacctccattgcgtcaaaacatttgccaaagaaataatctccctattgagacagaaaaaagaaaacatcacctatgattt

SEQ ID NO: 5959 - DNA, 201 bp, Homo sapiens
ttattagttattgcaagtctacactccattttatccaagtcaagtcatgggacaatagattctctactgcctaaacctaagtaaacctttacagatatctrtgcttaaccaatagtctgccttctttttaaggacaaaccagtgaagccacctacaaagaaatcagaggattcaaaggtaaagaccataggaacatatttc

SEQ ID NO: 5960 - DNA, 201 bp, Homo sapiens; identical to SEQ ID NO: 5959

SEQ ID NO: 5961 - DNA, 201 bp, Homo sapiens
ttatagttatctaaattagtttaaataatttccaataataacatgctgaaatgaatttctgaatgttggtatctttttaatgtgcttttctccatcttttrgtaaaatttgcaattctcctttttcaaaataagctatccatagttggagtcaccaaagagttctggacttttttctggtttttcatcaacagttatacct

SEQ ID NO: 5962 - DNA, 201 bp, Homo sapiens; identical to SEQ ID NO: 5961

SEQ ID NO: 5963 - DNA, 201 bp, Homo sapiens
gagcttcctgaagatgaaaagagaggtttccccaccagttcagaaattctctgaagtctttcagggcactcatcaccagtgtggcagacaagccccttccmctctcctgaccccagattgtctctggggttttgtgctttaggaagtattaggatggcagtgccgagctccatggcttcccacaaactgcgggtcacgctg

SEQ ID NO: 5964 - DNA, 201 bp, Homo sapiens; identical to SEQ ID NO: 5963

SEQ ID NO: 5965 - DNA, 201 bp, Homo sapiens
agcttttccagacttccttgactaatcacctgtgcaataccaaattatacattaccaaggagaccacagcacatcaaattataaagggattgccctaaacyagatccccatctcctttggttgagaacagtgcctcatttgctagatggagatgaagtaactttagcgaagtcagctatgcttccattccgtttgatgtag

SEQ ID NO: 5966 - DNA, 201 bp, Homo sapiens; identical to SEQ ID NO: 5965

SEQ ID NO: 5967 - DNA, 201 bp, Homo sapiens
aaattaactgtatagtaatttcaacatttccaatcattgtctgtactgttttagagcaaagatacttacctttaaaaacataatgaaaataaatggagaamcttaaccagctttattagagcacattagctcaacaggacaatatgtatccataatcatttttattactaaagatcatgtagaaacataagaaaatattta

SEQ ID NO: 5968 - DNA, 201 bp, Homo sapiens
ttatttaaaaagaactctgaatatgccttcttttttaattagaaatatcttcgagacttgggtgtttgttaataactaataactggagtaagctacaggakctaaagcagccctttttacagtctagttaggagagagaaaataattgcaaatatccacttagaggcaaagaacaattttttattatcaaaaaggtttctg

SEQ ID NO: 5969 - DNA, 201 bp, Homo sapiens; identical to SEQ ID NO: 5968

SEQ ID NO: 5970 - DNA, 201 bp, Homo sapiens
catttaaatcctatgttggtattcaccagctatgttcccatcaggtctcctcagtgagatttggctccccgagggcaggccacaacctccccttccagacrcagaatgacgcagtgatggaaaatcgatttcagtttgagtagggagcaaaagtgctcccagagtcccaggcatcacttaggaaattttctgcctttacag

SEQ ID NO: 5971 - DNA, 201 bp, Homo sapiens
ccaccagataggtgctcatcttcacagtgacatcaaaatggtcttctatgagtccttcagcaacagtcacagatttcacctaaaatcagaataattcaaaytatcaagtaatccaattatccaatacagtgaacatgataaatttcctaattatcagacataatattaaaagtgtatcaatcccagcacttggggagtccg

SEQ ID NO: 5972 - DNA, 201 bp, Homo sapiens
ggctgactggctgtgatttctactttcgtggttccccagaaggtcagcgtggtaaggtttgcatggatcaagagatcataatgaactgggatgacgtactyaggaagtcgtattttattccaaggaaatggtgtcccatcactacgttttggagatgcttcagtgctctgacaccatgaaggagtggacacagttaagaga

SEQ ID NO: 5973 - DNA, 201 bp, Homo sapiens
ccaggcggagcgctgagggaggctcccgccggccgaacagcggggagacccgtgaagcaggcgcaccggccacgcgcccggagggacagggacagggaccsgcaggggtgggcccgccgccaacccgccgggcaccccgcggactcgggcctagccagcgactccccccgcccttcccgcgccctgtctcgcgccccgtcg

SEQ ID NO: 5974 - DNA, 201 bp, Homo sapiens
tgcctgaagttgttacttttgctgaatgaagcaataaagcccctcaaagaagagcttactaaccagagcatgttattctctgtacccctgtaaaagcaccrtgctgctcagtcacctcatcccgtgaccttcctctcatcgtcttccatacagaccacatcacagcaaagcactccagccttgatttagaaaccataagac

SEQ ID NO: 5975 - DNA, 201 bp, Homo sapiens
ggaagaatacaatgtgaggagtacgccaggaatgtggagtcatagcattacactgaggcagaacagatgaacaaatagtggggaacaagatctcaattccyttcctcctcctatcattattattattacaattgttaggggtgttttttcttttagaaattcaaagatttggaaaaagtaacaatggatttatatgccccc

SEQ ID NO: 5976 - DNA, 201 bp, Homo sapiens
aaaaactttttaaaaagtaggcaatcccctaatctgttaaagagtctttagttttcagaatcaaatattcaatatcatgctggaggcattttccttaaaakcagaaactatgaaaagtttattgtcatttctgcttattatcacatggaagaatcattaacaacacatgaaaaaaatgacaaacattaaaagggaacattt

SEQ ID NO: 5977 - DNA, 201 bp, Homo sapiens; identical to SEQ ID NO: 5976

SEQ ID NO: 5978 - DNA, 201 bp, Homo sapiens
acagatgagaaaatgtaattaatatgagatcagacttaatgtaaactataaaaggagaaatgatcagaaaaataaggacacaaaaaaattgaaggccatayattaagtcagtttaactaaatatcttaaaaagaatgatgacaattcaagtcattttatgtgttaattttttattaaatagcaataagatacttttataac

SEQ ID NO: 5979 - DNA, 201 bp, Homo sapiens; identical to SEQ ID NO: 5978

SEQ ID NO: 5980 - DNA, 201 bp, Homo sapiens
cttttatacctatttatttgttgtagtgaatggtttaataaatggcagatttatgtccagaagtcactctattttgtcgtgtattaggggaacacattttkacatttttcgtaccaatcatcaatcatattcccttatcttgaagtttttgccttatattcaaaaagttcagtttgaattctcctttgccaggtgtgagga

SEQ ID NO: 5981 - DNA, 201 bp, Homo sapiens; identical to SEQ ID NO: 5980

SEQ ID NO: 5982 - DNA, 201 bp, Homo sapiens
cacttgaacccgggaggcagaggcggtgagctgagatggcaccactgcactccagcctgggcgacaaagtgagactccatctccaaaaaataaataaacaratagataactactatataagtctcttttctatcacatataacacaacatctggcatgtttacactagggaggaagtttctcaaacagtaacgtctagggc

SEQ ID NO: 5983 - DNA, 201 bp, Homo sapiens
cactttaatcctacacattttcacattcctccttgaattaactagtagtttccaaaataaattacctgtttttgtttttagcaaaaatcgatggaccatgycggatttgctggtgatgaatgtcaatggaacatgccacaggtacctaaaagaaaggagaggtggattgttcctttgttgattcaattcaacaagcagtta

SEQ ID NO: 5984 - DNA, 201 bp, Homo sapiens
attcattcaaaacagtttgttgagcatcctctgggttcctgccaagcaggtgccagtaaagaaaaaatgtagcctcttccctctgctgtctgcccactaayaaaatcagaaggcaaaagagtccccatgccatatgcctcaagaactctatgaagatctgctttcttcactatcactagaagttactgtactcatcaaggg

SEQ ID NO: 5985 - DNA, 201 bp, Homo sapiens
gctggggtttttgtggcttgaggggctgctgaggcaactacagggatgtgccaattataatgacaaatctatgactgtgttcatcaaatgtcatgtgtaayatctgtgcaaaatctctaccttgtttgggtaggggatacggtatgctgaaataatcctcataaaattctagaagagtcaccgcagcatccagtgcataat

SEQ ID NO: 5986 - DNA, 201 bp, Homo sapiens
agagggatgggcagcgggtctggaggggtgagccgggagagctttaacccagtcatcgtccggcttagtctcagatccaggtgttcattgttcagtagtcractattcagagtctttcgaggagactgatgaaacagtttatgaatgataaacatggggtacagggttttggacacgggtgcttaagcataaactataaaa

SEQ ID NO: 5987 - DNA, 201 bp, Homo sapiens; identical to SEQ ID NO: 5986

SEQ ID NO: 5988 - DNA, 201 bp, Homo sapiens
ctaggcatggagtaccagggatccacggccaccactagatgctaggaagatataaggaaggattctacccagagtctggagggagcacgggcctgctgacrccttgatttcagacttctagcctccagacctgagagagaatacattttgttgtttatagccacccagtctgtggtactttgttacaacagccctaggaaa

SEQ ID NO: 5989 - DNA, 201 bp, Homo sapiens
agtcccagctacttgggaggcagaggtgagacgatggtttgagcccaggaggcagaggtttcagtgacctgagattgcgccattgcactccagcctgggcracagaaccagaccctgtctcgggaagaaaaaaaaaaaagttaaaaagaaaaagtaaaaaacagggaaaattcatttaagaagtatgtgaggaaaacttaa

SEQ ID NO: 5990 - DNA, 201 bp, Homo sapiens
ctttatgacctgtgtcttgtgcctaccttctatctcattctgtgacttagaatgtctaacctcctgggagtgtagcccagtaggtctcagccttattttayccagctcctattcaagatggagttgctctggttcaaacgtctctgataatttggtgagtggaccatggtcctagtgggaacaggacccttttcatgcggt

SEQ ID NO: 5991 - DNA, 201 bp, Homo sapiens
tcagttcttaatattcaggccagagattctgccctgatgaaggctatcagtaaacatttgcaatcaaaaacttttttgcctttaagaagtaggttttacartgacacttctctgatcacatttcccatcagagaggcttgtttttagttaacattttatttgaagatgtcactaaaacaaggtataaagctttatttagat

SEQ ID NO: 5992 - DNA, 201 bp, Homo sapiens; identical to SEQ ID NO: 5991

SEQ ID NO: 5993 - DNA, 201 bp, Homo sapiens
actaatgttactgcacattgaagatatttctactattataatcttaggattggcatagtctgtgtttttgaggcagggaaggagacatatatcaaaaaaayaactggtgagtggataattgggaagaaattacagaagtgactagattctagagactagaaagatttggttcttcattgagctgaaaataggaatatctcc

SEQ ID NO: 5994 - DNA, 201 bp, Homo sapiens
tgaacaaaacacatggtagcgatagcccattcatgaaaaactaacagctattcttttcacagggatagtcaaaaaatgagttgaagggaaaaaagtatctycagttggagccaaaacagccatctctagtttgaaaatacactcaacaaaatgttggtgattagagataacaggaacctggcaagggaggaatttttacat

SEQ ID NO: 5995 - DNA, 201 bp, Homo sapiens; identical to SEQ ID NO: 5994

SEQ ID NO: 5996 - DNA, 201 bp, Homo sapiens
taggtcttttcctgaaagtaaaaggaccttccctatgttatggtttcatataagaaagatgtttacagttagcaacaatcattaacacgtactagaaagcmtcatttgatgttcaaagtttaaattaactctacctgtcagggttcttggttgaaagcaaccgaacaagctctggctgatataggcagaaaaggaatcatt

SEQ ID NO: 5997 - DNA, 201 bp, Homo sapiens
cagcctgggcaacagagtgagactctgtctcaaaaaaaaaagaattagtaaaaagataaaatgtgccacaggacaaatctagaaactactgaataaagcartctctaggaacaaaaaagccaagaaagtaaacatataaaaagaaaaaagaaacataaaattctgttgtatctccagactcaccctcagcttcctctgaaa

SEQ ID NO: 5998 - DNA, 201 bp, Homo sapiens
ctgagatgcttctggaaaataaatatcattgatcaccttctccccctgcaaataagttagtcatttgttttgttttttatatttcctgtaaaacatgaccrgctggctttttctattattgtgcatatcctgtttaataagctaaacctgaataagctgcagtgttgaacccccacagtggatggtcgacatgcacagacc

SEQ ID NO: 5999 - DNA, 201 bp, Homo sapiens
agttcaagactagcctgggcaacataatgagaccctgtctctacaaaaaaatcaaaaaaattaggcatggtggcatgtgcctgtagtcccaggtacttgcraggctgaagtgggaggatcacttgagcccaggaggtagaggctgcagtgagccatgatcgtaccactgcactccagccagggtgacagagcgagacccta

SEQ ID NO: 6000 - DNA, 201 bp, Homo sapiens
tgccatgtgttttcccccccggataggataaagatggaaagccactcctgccaaaagagtctaaggaacagcttccagtaagcaaaccagttttctctgargatatcttttccttttggccctgattgcaatggtgtttgttgatacatttcctggttcttgcagcccatgagtgaagacttccttctggatgctttgtct

SEQ ID NO: 6001 - DNA, 201 bp, Homo sapiens
aatctgttaaagagtctttagttttcagaatcaaatattcaatatcatgctggaggcattttccttaaaagcagaaactatgaaaagtttattgtcatttstgcttattatcacatggaagaatcattaacaacacatgaaaaaaatgacaaacattaaaagggaacatttgaatatatttgtggatagcactacttgtag

SEQ ID NO: 6002 - DNA, 201 bp, Homo sapiens; identical to SEQ ID NO: 6001

SEQ ID NO: 6003 - DNA, 201 bp, Homo sapiens
aactcaaagcatagatcaatgaaaaaattgagaaatggacataaatgatttagtatttttaaagagagtgaaaaatcattattttatgcttttgtgtagcrttagatgaattaaataacatatgcacatatagctttgcgatacaaatttccagaccataggttgtttcatacttagtattaaaaggcttaaataataagt

SEQ ID NO: 6004 - DNA, 201 bp, Homo sapiens; identical to SEQ ID NO: 6003

SEQ ID NO: 6005 - DNA, 201 bp, Homo sapiens
gcgcagccacaactagaaagaaaatagggcgcctgtttaaagcaaatgaaaataggcagaattattaggaagatcaggcaccttctatttcagaagagccragactgatgatttagcgagatggcagagattaactttgaaatgattaaatgaaactatatatgtgaaaacattgtacacatagtcaaggaccttaatatt

SEQ ID NO: 6006 - DNA, 201 bp, Homo sapiens; identical to SEQ ID NO: 6005

SEQ ID NO: 6007 - DNA, 201 bp, Homo sapiens
cttcaccaagagatgggcagggttgggtggaaggtgctggccctccaaccccagtagggtgacagatactgccgctcttctcctgatcttccattcctagscttctcttctctgaccctgtctactcccctgccccagccccagatgtctttttcttccaaggaaacaggttccctcctgaaaagatggagttcctgggct

SEQ ID NO: 6008 - DNA, 201 bp, Homo sapiens; identical to SEQ ID NO: 6007

SEQ ID NO: 6009 - DNA, 201 bp, Homo sapiens; identical to SEQ ID NO: 5853

SEQ ID NO: 6010 - DNA, 201 bp, Homo sapiens; identical to SEQ ID NO: 5853

SEQ ID NO: 6011 - DNA, 201 bp, Homo sapiens
ggcaaattgctagatcggatttatgctaccaagatctttaaattcaaacctcccttgaaataaatagtagctatactcctttacagtagcataaaacataycatgactgactgcttctaatgtgtcaccaaagccgaccagcaggtaaatatttatttgagccaatatcattatatatgcatatgctaggctctgtggtat

SEQ ID NO: 6012 - DNA, 201 bp, Homo sapiens; identical to SEQ ID NO: 6011

SEQ ID NO: 6013 - DNA, 201 bp, Homo sapiens
ttttagaaaactaaaacatattgaatgcctactctgtgcctggtactttgtcaaagcatgcatataaatgtgtgtgactattgtttacctctcttttagtyttcacaaaagccctttagggtggaaaactgaggctcagagaatgctaagcaacgtgtattaaagagtagatggaaaaaaagccatcaagattttcttgtt

SEQ ID NO: 6014 - DNA, 201 bp, Homo sapiens; identical to SEQ ID NO: 6013

SEQ ID NO: 6015 - DNA, 201 bp, Homo sapiens
accacttcagcatcctatctctcacccctggtaactcgtaagtaatgccttttttggtgaatggactttatttttatacgtaacctgctccagctttcctyggttgtttcccattgttcatttctctcccataacactgaaaacagggtttttttttgtttttttttttttgccttttggtacacaaaagccagtcctgat

SEQ ID NO: 6016 - DNA, 201 bp, Homo sapiens; identical to SEQ ID NO: 6015

SEQ ID NO: 6017 - DNA, 201 bp, Homo sapiens
aagcttttaaaacaatatattaaaatcttcctgtagtagattcccttaagggatataggaaacagcattgataattggcagttatgccattatatctcagwttaaatacttatttgcctattatttaatttcagttatacgaagtacttaatcagccctttaacaaataatagaaagcataataaccctttatgatgagtg

SEQ ID NO: 6018 - DNA, 201 bp, Homo sapiens; identical to SEQ ID NO: 6017

SEQ ID NO: 6019 - DNA, 201 bp, Homo sapiens
ctgaggctagttgaatctttgaaatccaaatgctcattactgcaggttattgtggcaaagcaaaattagcatgttacaacttagcgaaatgtcctgaagayattggcattccccagaataccaatacatggtggggtggggagaagtaccctttagagtctggtggaaattacagggttttgggaacaagggcaaaggaaa

SEQ ID NO: 6020 - DNA, 201 bp, Homo sapiens; identical to SEQ ID NO: 6019

SEQ ID NO: 6021 - DNA, 201 bp, Homo sapiens; identical to SEQ ID NO: 1083

SEQ ID NO: 6022 - DNA, 201 bp, Homo sapiens; identical to SEQ ID NO: 1083

SEQ ID NO: 6023 - DNA, 201 bp, Homo sapiens
caaataagtataaaaattccaattccacttttatacctatttatttgttgtagtgaatggtttaataaatggcagatttatgtccagaagtcactctattktgtcgtgtattaggggaacacattttgacatttttcgtaccaatcatcaatcatattcccttatcttgaagtttttgccttatattcaaaaagttcagtt

SEQ ID NO: 6024 - DNA, 201 bp, Homo sapiens; identical to SEQ ID NO: 6023

SEQ ID NO: 6025 - DNA, 201 bp, Homo sapiens
aattccaattccacttttatacctatttatttgttgtagtgaatggtttaataaatggcagatttatgtccagaagtcactctattttgtcgtgtattagrggaacacattttgacatttttcgtaccaatcatcaatcatattcccttatcttgaagtttttgccttatattcaaaaagttcagtttgaattctcctttg

SEQ ID NO: 6026 - DNA, 201 bp, Homo sapiens; identical to SEQ ID NO: 6025

SEQ ID NO: 6027 - DNA, 201 bp, Homo sapiens
ttatttgttgtagtgaatggtttaataaatggcagatttatgtccagaagtcactctattttgtcgtgtattaggggaacacattttgacatttttcgtaycaatcatcaatcatattcccttatcttgaagtttttgccttatattcaaaaagttcagtttgaattctcctttgccaggtgtgaggatttccgcacctta

SEQ ID NO: 6028 - DNA, 201 bp, Homo sapiens; identical to SEQ ID NO: 6027

SEQ ID NO: 6029 - DNA, 201 bp, Homo sapiens
aagtttttgccttatattcaaaaagttcagtttgaattctcctttgccaggtgtgaggatttccgcaccttagagtcagcgcaaaacacgctgcaacttghatcaagtcagcaacagagcacactatgggttagataagtccctgtgtagcaagttttcagaataagaaataaaatctaattcttagggtattaactgact

SEQ ID NO: 6030 - DNA, 201 bp, Homo sapiens; identical to SEQ ID NO: 6029

SEQ ID NO: 6031 - DNA, 201 bp, Homo sapiens
aagcagagagagaaaaaaaatcacctccctaagaaaagggttttcctacagacttgaatgcactctgctttttcagaagagatactgtaccagtcagggaratagatgacactcagaattatctgaggagggttctataaaaagattttttgcaaaagtgcgagcacattatgtagaaaccacaagtccgccaggactagt

SEQ ID NO: 6032 - DNA, 201 bp, Homo sapiens; identical to SEQ ID NO: 6031

SEQ ID NO: 6033 - DNA, 201 bp, Homo sapiens
aaaagattttttgcaaaagtgcgagcacattatgtagaaaccacaagtccgccaggactagtaaaagccagactcccactgaggccactaatcctgaaggratgaggagggagcagttaccaaaatccagaggtggagaaggctgtgtggaaaagagggtcccctctcggagctaagaccctcaggggaggccagcccgag

SEQ ID NO: 6034 - DNA, 201 bp, Homo sapiens; identical to SEQ ID NO: 6033

SEQ ID NO: 6035 - DNA, 201 bp, Homo sapiens
gttgtctcaagataaaatccacataaagttccccatgattttaaagagataagaaactcttggctacctcctgaaaaatatgtttgttcttgtttcatttstgggtatcttaattcaccccttgagctcacatgacagataggctggctttgccacaggattgaccattgtgcgattctgtttcaccttaaagggttatta

SEQ ID NO: 6036 - DNA, 201 bp, Homo sapiens; identical to SEQ ID NO: 6035

SEQ ID NO: 6037 - DNA, 201 bp, Homo sapiens
gaaaaatatgtttgttcttgtttcatttgtgggtatcttaattcaccccttgagctcacatgacagataggctggctttgccacaggattgaccattgtgygattctgtttcaccttaaagggttattatccttttcccataaattttcacagcattaatccatcaatttttgatttggtattcaggaagcgaatgtagac

SEQ ID NO: 6038 - DNA, 201 bp, Homo sapiens; identical to SEQ ID NO: 6037

SEQ ID NO: 6039 - DNA, 201 bp, Homo sapiens
acagataggctggctttgccacaggattgaccattgtgcgattctgtttcaccttaaagggttattatccttttcccataaattttcacagcattaatccrtcaatttttgatttggtattcaggaagcgaatgtagaccatgatgtattatttattcagcatagattccagacagccagttccttagaaatccatgtcat

SEQ ID NO: 6040 - DNA, 201 bp, Homo sapiens; identical to SEQ ID NO: 6039

SEQ ID NO: 6041 - DNA, 201 bp, Homo sapiens
acacttcactctctactttaagttgtagctcaacctactgtttcatacgctctcagaatgcaagattaattcacagtcgattaaaaatcactgagcactaytcaacaaagcacatcaataattttactaattgttcaaatcattaatcctaaaggagctcatcatgatagctccactaaaaacagaccttctacaacagcg

SEQ ID NO: 6042 - DNA, 201 bp, Homo sapiens; identical to SEQ ID NO: 6041

SEQ ID NO: 6043 - DNA, 201 bp, Homo sapiens
aagagcagtggtgaaggatgtagttatataatgcaggtaaagtgcaaagccccaaacccagcatgtatcagggacttaacctcatccatttgttcaccaayatttactctgatatttattcatccctctgctgtaattactgtgctagacactgaggatgcagcagtgaatcaggcaagcatcctcccctcatggagctta

SEQ ID NO: 6044 - DNA, 201 bp, Homo sapiens; identical to SEQ ID NO: 6043

SEQ ID NO: 6045 - DNA, 201 bp, Homo sapiens
gcgcctgtgggaattggcaccagagaggtcctcagaagccaggtcttcaaggtcatggacacatgggaaggagggatttggaatttactgcaagaacaatmggcagggtttcaagaagccagggtcagttatgggctgacttgcagtcttcaatgtggaaaatgttttgctattggcaaagtggcaagggggaggccagtt

SEQ ID NO: 6046 - DNA, 201 bp, Homo sapiens; identical to SEQ ID NO: 6045

SEQ ID NO: 6047 - DNA, 201 bp, Homo sapiens
acactattgcaataggcaaggcaagagatgagaaaggattgaatgggggtaagagcagagagaagtgcgcaagatccagtgcatgtgctgagggaagaccrgcaggacttgcgtagttagatgtctggggaagaaaggattcaggatgactcccgtattttatatgtccgtagtttgctctccattatgataacatctcgg

SEQ ID NO: 6048 - DNA, 201 bp, Homo sapiens; identical to SEQ ID NO: 6047

SEQ ID NO: 6049 - DNA, 201 bp, Homo sapiens
atctctgctctagacctcgctggagttcaagcttgaattattatatgcaagttaattttacaagcctggatgaggctactgaaaactggaaaaaagctacragactgtaacaacccttcattctttttcatttccaaagctctctccccatctcaagctagaaaatagtgtaaccagactacacaatggaaccactcctaa

SEQ ID NO: 6050 - DNA, 201 bp, Homo sapiens; identical to SEQ ID NO: 6049

SEQ ID NO: 6051 - DNA, 201 bp, Homo sapiens
cctcagtgcccacttttaacatccttaaacaaggactaattgtctcaagtaattttcttcaagtcctaaggtttttactggcagagctaagacctcttaaygtgtctgagaagaggcacagttttcactagtttaattgcaactgatttatgctgctgtcaacaccatagcatccaaaaataacttctaaatgacaatcca

SEQ ID NO: 6052 - DNA, 201 bp, Homo sapiens; identical to SEQ ID NO: 6051

SEQ ID NO: 6053 - DNA, 201 bp, Homo sapiens
aaatgacaatccatttctaactcaccacaccctcaaagtattttgtctaccccatattaattagctaattttcatttatgtttaaaaatatatatatagattttttttttttacctcttcaagccgtgttcttgtggagaattgatttgttgtacccattaccatgtgggctatggaagatgagccaagttcaaacctaga

SEQ ID NO: 6054 - DNA, 201 bp, Homo sapiens; identical to SEQ ID NO: 6053

SEQ ID NO: 6055 - DNA, 201 bp, Homo sapiens
gtaagaatttgtggaaactcctgagtttttattttatctcccttaaagctttcatctagtagcctagaaggattaagaaaagaaatgttagcaatgaatargtgatgaaacagttatgaatcactgcaataaaattacttgtaaaagaaaaaaaagtctgccagtaacaaaggttaaaaagataaatgggtaaccacaatc

SEQ ID NO: 6056 - DNA, 201 bp, Homo sapiens; identical to SEQ ID NO: 6055

SEQ ID NO: 6057 - DNA, 201 bp, Homo sapiens
aattactatgcatccctgtcagggaatttggaagcccaaagaaactactataaaatacaatgcatgtgtttctctatggcatggctgtcaccgtttaatamgattttgcattgcctatacaaaatgagaattattcccataccatcctaactccccagatatttgacttttatgcatagaagttccctcctagcatttctt

SEQ ID NO: 6058 - DNA, 201 bp, Homo sapiens
gacctcaagtttccattggattccttccactttctgaaatagccttctgccctctgtacgcacggctgatagttgtgcacacaggcgaggagtagtagttsactccgcagcattcgctctgagactgagccctcgtctgtccatgtctgcttatcaatgaggtcccttagcagcctgatgaggaaggcctgagggcgttgt

SEQ ID NO: 6059 - DNA, 201 bp, Homo sapiens
attggattccttccactttctgaaatagccttctgccctctgtacgcacggctgatagttgtgcacacaggcgaggagtagtagttcactccgcagcattygctctgagactgagccctcgtctgtccatgtctgcttatcaatgaggtcccttagcagcctgatgaggaaggcctgagggcgttgtacagggaaacaggg

SEQ ID NO: 6060 - DNA, 201 bp, Homo sapiens
agggaaacagggaccagtattgtcacaggtcatttcatgttaatataatccattatggtctcagatgatgggggctaatttttaaagcataatctaacttytactgtataaatcatgcagcactgtttaattataaaagggccaaaaacaataaataatgatgaatgactttcatattttcataacaaacttttataagat

SEQ ID NO: 6061 - DNA, 201 bp, Homo sapiens
caggatgaattgcgacttttaaaacaaactcaaagagagtttacatgactaaattttgagagcaaattatgcaacaagacttcaggacattttgccaagcrtaacaattttgtgcctcttcctcaagtaccatgaagagtcccagaaaatctgaacgtcagccattgtaataggaaaggaaaatgaaataaaaggtttgtg

SEQ ID NO: 6062 - DNA, 201 bp, Homo sapiens
ttgagagcaaattatgcaacaagacttcaggacattttgccaagcgtaacaattttgtgcctcttcctcaagtaccatgaagagtcccagaaaatctgaamgtcagccattgtaataggaaaggaaaatgaaataaaaggtttgtgaaaggaaggaaataacaaatccatgcaaattaaatagagtctaagaatgccattc

SEQ ID NO: 6063 - DNA, 201 bp, Homo sapiens
gaatggcaactacatctctggccatacatatgatataacccagtaatgttaacaaagtaatagtgaatgttcactggtaatccctcctttttagcattatrtaattcagctataatctctatctggcaagatattggccattcttctttgaaaccagaaagcattttcaatctgatcccttttgctttaaccaagataaat

SEQ ID NO: 6064 - DNA, 201 bp, Homo sapiens
actttaatcctacacattttcacattcctccttgaattaactagtagtttccaaaataaattacctgtttttgtttttagcaaaaatcgatggaccatgtyggatttgctggtgatgaatgtcaatggaacatgccacaggtacctaaaagaaaggagaggtggattgttcctttgttgattcaattcaacaagcagttat

SEQ ID NO: 6065 - DNA, 201 bp, Homo sapiens
ccaaaataaattacctgtttttgtttttagcaaaaatcgatggaccatgtcggatttgctggtgatgaatgtcaatggaacatgccacaggtacctaaaakaaaggagaggtggattgttcctttgttgattcaattcaacaagcagttattaaatcacctatcatgtgccaggcactggttagtttagaacaagatagta

SEQ ID NO: 6066 - DNA, 201 bp, Homo sapiens
tgtttttagcaaaaatcgatggaccatgtcggatttgctggtgatgaatgtcaatggaacatgccacaggtacctaaaagaaaggagaggtggattgttcmtttgttgattcaattcaacaagcagttattaaatcacctatcatgtgccaggcactggttagtttagaacaagatagtaccaaaactgctacagccaagc

SEQ ID NO: 6067 - DNA, 201 bp, Homo sapiens
aggcactggttagtttagaacaagatagtaccaaaactgctacagccaagctctcaaaacatccccagtctgttttccagctttgtagggagtgtcagctygggcactatttccttttcttggactccttgagtagagctaagaatttggactcacgtgaaccctgaaagcctttttacagtgattggctgattgcatctc

SEQ ID NO: 6068 - DNA, 201 bp, Homo sapiens
gtaccaaaactgctacagccaagctctcaaaacatccccagtctgttttccagctttgtagggagtgtcagctcgggcactatttccttttcttggactcyttgagtagagctaagaatttggactcacgtgaaccctgaaagcctttttacagtgattggctgattgcatctcagaggcctaacttcaggactcatgtgc

SEQ ID NO: 6069 - DNA, 201 bp, Homo sapiens
tcaccaacttactgtcaaacagttcagaaaaacatatgccaagtatatacatacagacatatgtatataggtatgtatgtagatagatggatatcgattartcaagatttaaaacctccttaatccttttgggaagatgggggagggaggtgtatatatatatacatatatatgtgtgtgtatatatatacacatatatat

SEQ ID NO: 6070 - DNA, 201 bp, Homo sapiens
tatatatatacatatatatgtgtgtgtatatatatacacatatatatatgtatatatacacacacacatatatccacacaaacatatacatatatatatakagagagagagagagcaagagagagagggaggtgaagaaagtaaaggagtaaagagttaacatgtatctaggtaaaggatatatagtaatttgttgtgtta

SEQ ID NO: 6071 - DNA, 201 bp, Homo sapiens
caagataaaagaattttttaacggtatccatccagggtcaatcaagttgcagcatcttgtttctaataatattcttctatagcattaagctgacaaacagkttccaaatctaactcagaagaagacaactgagtctctcatcattctcggaaatcacctaaattcttttgtcctcagctccaaccaaatgctaggcactat

SEQ ID NO: 6072 - DNA, 201 bp, Homo sapiens
ttacccagtgtccggggcgccgtcagagcccttcatgtagtgctcttgcttcatgtgtacattcctccccctcactgtgatggttattaggggaaaacccytctgcagtgtccaagtgttcatcatggttttcacatccaccccttcctgatgccaatgctggtgtgtacacaaaaaggcagacacatcacccatttaacc

SEQ ID NO: 6073 - DNA, 201 bp, Homo sapiens
catggttttcacatccaccccttcctgatgccaatgctggtgtgtacacaaaaaggcagacacatcacccatttaacccaactctaagaaaagacagaacrccagcttatgctcaaacagccgctaccagttgccaacctcccctcttaggagcactttctgatccctttctcagtgtgatgtccccagccatcacacctc

SEQ ID NO: 6074 - DNA, 201 bp, Homo sapiens
gagagaaagtgccaggttttcaatacctacctaactatgctggttttggacaagcaaggtggaaacaatgttcagtcaagagcctgtgtttctaaagtgaraacacagagatgacccacactcaacaaatagtgggaactcaaaaggagctgttttttgatactaaaaaagcttttaagaaatgatttaagaagtagtaaa

SEQ ID NO: 6075 - DNA, 201 bp, Homo sapiens
ataaaatgtgccacaggacaaatctagaaactactgaataaagcagtctctaggaacaaaaaagccaagaaagtaaacatataaaaagaaaaaagaaacawaaaattctgttgtatctccagactcaccctcagcttcctctgaaaacatcccacaagtccagatgaacagagactcaggctgttttgtgacttgatgtta

SEQ ID NO: 6076 - DNA, 201 bp, Homo sapiens
ccacaagtccagatgaacagagactcaggctgttttgtgacttgatgttatgaatactttatagcttagcagttaaaaacatgagttagatctaaattcaratctctgctctgcaatttaccaatcagatgtctttgtatttcatgttctcaactttaaaaatagggatagtaatagtacccagctcacaggtttattatg

SEQ ID NO: 6077 - DNA, 201 bp, Homo sapiens
atccttttgactgctacaatgcagctgtaatctgctatagaaacatgtcataaatccactgctttaaaagggaagctagagaaattagtatcagtgagaakcattaccaaggaaagctctgcaaccctccagtatagatacactttaagaaaaattgaaaaagattatgagtatggaatagtttaaatgcagtcttatctg

SEQ ID NO: 6078 - DNA, 201 bp, Homo sapiens
tgatggagctggagtcacaatgagaaagggaacaagagtcttcccagacaccctgtattccttggtaaagggctcttttcccctccactcccattaccacrgatggtgagtcacaaactcaaatgcctccagtggcacatgacagggcatataaataagggaagtagtccaaggataagaagaatgctcttttacattctt

SEQ ID NO: 6079 - DNA, 201 bp, Homo sapiens
cttaaccagctttattagagcacattagctcaacaggacaatatgtatccataatcatttttattactaaagatcatgtagaaacataagaaaatatttakgattataatgcaatattgatgtgtactttctaattatgtacacaggcagatgaaaataggcagtaataaatattcacaaatgtatattttaaataatgta

SEQ ID NO: 6080 - DNA, 201 bp, Homo sapiens
agccttatatgtcccatagaagcaatataaatgtagtttatactttattaaaagtgtgaatgagcttatacctggtgggccagttcatgggccacagtcaytgtgatgccaagcttacttgatgcagaagacttttctgcatcaaacaacagagcagattctctatatgttgtcagtccccagttttccatagcaccagac

SEQ ID NO: 6081 - DNA, 201 bp, Homo sapiens
aatctctaccttgtttgggtaggggatacggtatgctgaaataatcctcataaaattctagaagagtcaccgcagcatccagtgcataatctgcttgattyatcttgtctggcacagcataaacagaaacctaaagagaaaggcacagaaaggaattcaaatatcttaactggcttctctccccacattgtgtagaagact

SEQ ID NO: 6082 - DNA, 201 bp, Homo sapiens
tataagatggcaaatgagaaagaaagatttagaagccaaagtgaaatgacagttagaccctctgatgtcaggagagcactgcagccagctttaaccctgcyggcactagcccaacacagctggacttgagctttggttcttatgtcattgaaggactcaggagttaagagaccaagtccagggcctgcccaaagtagaaag

SEQ ID NO: 6083 - DNA, 201 bp, Homo sapiens
tatgcttaatgtgtttaaagaaatgaaagaattaaaaatattaatatagattagacattactaaaataatcatttctaagagattcagataagtggcaaarcaatgggcgggtgtttttgctgatagtttcactgctgaattaagaatgttcccttcatccgagtctcaagcgtcaccttcaaatccccagttaagtaaag

SEQ ID NO: 6084 - DNA, 201 bp, Homo sapiens
cctcagaaaaacctgtttgcattctgagctacggcacacagttgaataggttgcccactatgcaacagtacccaaatgaggaacaagtgtgccttgaaacragatttttctctccagcattccagtgtacctggcccaaagcctttgggtattccaagcaggttgctctatcttccttaccatagccagaaatcccctgcc

SEQ ID NO: 6085 - DNA, 201 bp, Homo sapiens
agtccaagttataccttccaaagaagtaaatactaagtttcagagggaatagggccaaggtcagagagtcagtgaagtgactgcagtgaagccaggatcaygactcaggccaggccacactctctccacgttgttgttattagaacctcactatacaaatgagcatccgtgacaacaggctggccaaccatcccagtttgc

SEQ ID NO: 6086 - DNA, 201 bp, Homo sapiens
ccactgcactcctgcctggatgacagagccagaccctgtctaatgacgcttctatagttactttaaaagttatctttccaatgtctaattataatttagayattaacgtcaaacagttctactcaatttcttttttattgagatataattcatataccatacaacttaccattttaaagtttacaatacactgtaaatcca

SEQ ID NO: 6087 - DNA, 201 bp, Homo sapiens
ttaccattttaaagtttacaatacactgtaaatccacatttggcatatgtggattgataacacggatgagacaaagcaaaactgaaattgtgagttttgcsaagatgtggctgatccacttttccttaaatacaggtttgagaattatctggcaatgcaatgtcgagctgttgagcatatacgcaacggggaaaatatata

SEQ ID NO: 6088 - DNA, 201 bp, Homo sapiens
tgcagcctgaggtcaggctactcgtattagatttctgttagtgagaggtattcccgtccaaagggacaacattgcattagaagttttcctatcctcaaaaraaaaaaagaagttttcctatcttcactaagtggatcctggatatccatggatttagactgtagcatctttgtggcgcttccaaagctccaggcctccctt

SEQ ID NO: 6089 - DNA, 201 bp, Homo sapiens
catctttgtggcgcttccaaagctccaggcctcccttctgaaagcctacaaatttctccactaatcctgtttggtccttcagtctctctcctgtctccttyccatccctggtcctttattctcctagaactttgattcaccaattaaagaactcacttctgtcccagggagtaataccacaatactgggggagaggactat

SEQ ID NO: 6090 - DNA, 201 bp, Homo sapiens
cttccaggaggtgttatataccagctgcagaatgacggcccagctgatgcttttctaaactaccagaatcaaaggatgatggcacttactgaacagttttwttcatttggcatggtcatcttctagtcacttttaaaaatcagagggaatgctgtccacatccgcattgagattggggaataatagtttccctctggaagc

SEQ ID NO: 6091 - DNA, 201 bp, Homo sapiens
gacaaagcattacctttaaaatcattttaaaagatcatatgagaaaatgagggtgaaagtgctttgtgaagggcactaatatttaaacctgacctgaattkcttataccacttccctcctatcagcatgtataacctggaatggcactgttactgaaatcttgcatttttaggtgcaatttttactttgattacatataac

SEQ ID NO: 6092 - DNA, 201 bp, Homo sapiens
tgacctgagattgcgccattgcactccagcctgggcgacagaaccagaccctgtctcgggaagaaaaaaaaaaaagttaaaaagaaaaagtaaaaaacagrgaaaattcatttaagaagtatgtgaggaaaacttaatagccttaacagatagtgagatcctaaaaatatgtaatcctaaaaatggctcatacctgtaatc

SEQ ID NO: 6093 - DNA, 201 bp, Homo sapiens
tatttcctctaatatgttgctagtaggatttgctgaagtcctaacctgtagtatctgtgcatgtgaccttatttggacatagggtctttacaagtatcatrgagtgaagaagaggccaccaggctgggccctaatctggtatgtctggtttccttataagaagatggagactgggacataggaaaatagaatggccatgcg

SEQ ID NO: 6094 - DNA, 201 bp, Homo sapiens
aacactataaagaagatgcaaaagcaaaactgaagaaaaagttcaacagcaaagggaattttaaaagacaatcaatctgaaataatgaatttagcgtgggyagcacttgcagtttaaaagaaaaagagaaaaaaaaatacctcagttccccttccttggttctgtaggtgcttttgtaaaatccgtggaaagtctccgaaa

SEQ ID NO: 6095 - DNA, 201 bp, Homo sapiens
catggcgaaatcccgtctctactaaaaatacaaaaattagctgggtgtggtggtgcgcacctgtagtcctaattacttgggaggctgaggcaggagaatcrcttgaacctgggaggcagagttgcagtgagctgagattgcaccactgcactccagcctggcaacagagcaagactctgtctttaaaaaaaaaaaaaaaaa

SEQ ID NO: 6096 - DNA, 201 bp, Homo sapiens
tgtctttaaaaaaaaaaaaaaaaaggcaatgtgaattttaaggaagttggcaaaccatgccccaagcatcaaacataagtttttatttcttttatacaaaygcacctttctaatgggtgtttgccaagaggggcccataccaggtgaatgcaagtgattggcccaaactcctcgtgttccagttgggaaaagtagcaagct

SEQ ID NO: 6097 - DNA, 201 bp, Homo sapiens
aaagcctgctttaaagtgaagccagttcaaaggacagcagggctgacagagacagagaatacctccactaaagccctcagctccagctgtcctgagcaaawcctgtccttagaccttccattcaagaggaccaatgctttcctttttgatttagccagttggagtcagtcttcagagagagtcctgtattaccatacaaca

SEQ ID NO: 6098 - DNA, 201 bp, Homo sapiens
cagtaggtgacaggcccatctaactgctctctagccagtcttctgtattcctgttgcttttacctttgctcgtgtcaacaaggaggtaagtcaccatgacrtatttcttaaatttgtatttctttcatcactaatgagactgaacatatgcactgaacatatgttaattagccgtttttgctttgtgttttctcttttgag

SEQ ID NO: 6099 - DNA, 201 bp, Homo sapiens
tgttattttttgagggaccatggtgttatgctactaactgtcttgccttagctataatgaatatctgttgcaataactaaacatgggaaaaataacttttyaaaaccttagtttctagaaggttaatggattttattatattgaaattaaatgagctatgatacaaaggagaaaaggaaagaaacgaataactttctcaat

SEQ ID NO: 6100 - DNA, 201 bp, Homo sapiens
aaacagaagagggaagaaaggtagacagagtctggactcagctgcagtttgttgatgactatctgaatcgttcccttgcattctttcttaacgaattatamatgtgaaaattgcacacttgaaaattaaaatatgggtatgtactggagggaaagcactgagagaggagttaggggctggataggcagatagagatggagg

SEQ ID NO: 6101 - DNA, 201 bp, Homo sapiens
ataacattagcgttgtggttttaggcacctcccaccatgggtttcacttaggcattcaaccagttggagtcactttggtcaaccttaggcatgcgtagatrtagtaccccaggagggaattttatccctcccatgtgggcaaaacccacagaagacttcctggcttctgccacataaaagacacagaacacagacacctta

SEQ ID NO: 6102 - DNA, 201 bp, Homo sapiens
attcaaccagttggagtcactttggtcaaccttaggcatgcgtagatgtagtaccccaggagggaattttatccctcccatgtgggcaaaacccacagaasacttcctggcttctgccacataaaagacacagaacacagacaccttactggcaacctgctttcaggacccctctcttcgctgagagctttccttttgctt

SEQ ID NO: 6103 - DNA, 201 bp, Homo sapiens
caacctgctttcaggacccctctcttcgctgagagctttccttttgcttaataaattttactctgccctactcaccctccatgtctgtgtgcctattttgyagttgtgagataagaccccggacctcaccaaactccaggggcaaaagcagactgctacagcaccagagtggccattctgctcgtgagttttggactatac

SEQ ID NO: 6104 - DNA, 201 bp, Homo sapiens
tctgtgtgcctattttgcagttgtgagataagaccccggacctcaccaaactccaggggcaaaagcagactgctacagcaccagagtggccattctgctcrtgagttttggactatacattctcagttggcaaaacagaggaactgtatagtaaggaattaataagtgttcattgtttagagagtacaaactctaagcaga

SEQ ID NO: 6105 - DNA, 201 bp, Homo sapiens
taaccaagcatcagttagcaactgtgatcatctaattcacctgctcatcaaagcaataaataatgccaacctcatttcatgttttgtatccatgcaattayaaataagaaaaagaaaaataacacaatcaaaaagatcaatgacattttaaaaactaatttctatgttgtgtcagggttcaatggcagagcacagaatcac

SEQ ID NO: 6106 - DNA, 201 bp, Homo sapiens
ccctcaaggaaggtttaaattagggatgaatttccagtattgacatggatctttccaagcaccctgcatattcagcacagtattctagtattttgtgagtraagtcattatttcttaggacatcatcaaaagattgagcgtgtaatagacttcaagcacctatggatttaatatttacaattttgactatttgggtgtgac

SEQ ID NO: 6107 - DNA, 201 bp, Homo sapiens
ttttgtgagtgaagtcattatttcttaggacatcatcaaaagattgagcgtgtaatagacttcaagcacctatggatttaatatttacaattttgactatytgggtgtgacctgaaggtctagcacttgggtagtttataattttgccgagacgtaggttagagttacatgaacagatgcaagagaaggagtcacttcacc

SEQ ID NO: 6108 - DNA, 201 bp, Homo sapiens
tgaccccagattgtctctggggttttgtgctttaggaagtattaggatggcagtgccgagctccatggcttcccacaaactgcgggtcacgctgcactttytgaaatgcacccctcaagatcttagagttttagagaggacccacagaaccaaagaaacacttaccctctatagttgcagaatcttgcttcctaaccatct

SEQ ID NO: 6109 - DNA, 201 bp, Homo sapiens; identical to SEQ ID NO: 6108

SEQ ID NO: 6110 - DNA, 201 bp, Homo sapiens
gattgtctctggggttttgtgctttaggaagtattaggatggcagtgccgagctccatggcttcccacaaactgcgggtcacgctgcactttctgaaatgmacccctcaagatcttagagttttagagaggacccacagaaccaaagaaacacttaccctctatagttgcagaatcttgcttcctaaccatctgacaacat

SEQ ID NO: 6111 - DNA, 201 bp, Homo sapiens; identical to SEQ ID NO: 6110

SEQ ID NO: 6112 - DNA, 201 bp, Homo sapiens
caaaggtactgtgctttttcacatttcactctttgaaatgtgtgtgtgtgtatgtgtacatacatataagttttatttattgattgatctatctatcggtstgtcttgtaacagggtcttactctatagcccaggctggagtgcagtggtgtgatctcagcttactgcgatctctgcttcctgggctcaagcaatcctcct

SEQ ID NO: 6113 - DNA, 201 bp, Homo sapiens; identical to SEQ ID NO: 6112

SEQ ID NO: 6114 - DNA, 201 bp, Homo sapiens
cattttttttatcctaatctacaattcatgtattgttgtctcaagataaaatccacataaagttccccatgattttaaagagataagaaactcttggctayctcctgaaaaatatgtttgttcttgtttcatttgtgggtatcttaattcaccccttgagctcacatgacagataggctggctttgccacaggattgacca

SEQ ID NO: 6115 - DNA, 201 bp, Homo sapiens; identical to SEQ ID NO: 6114

SEQ ID NO: 6116 - DNA, 201 bp, Homo sapiens
ttctgtttcaccttaaagggttattatccttttcccataaattttcacagcattaatccatcaatttttgatttggtattcaggaagcgaatgtagaccawgatgtattatttattcagcatagattccagacagccagttccttagaaatccatgtcataataccatattattagtttgggaataaagaggggagtagga

SEQ ID NO: 6117 - DNA, 201 bp, Homo sapiens; identical to SEQ ID NO: 6116

SEQ ID NO: 6118 - DNA, 201 bp, Homo sapiens
tagtttgggaataaagaggggagtaggaatgggttttagaaagatcagaattcaattttaaatgatgcagagttgttttaaaattatatgtcaatacagtrcaactttacaatgagcagaaggcatggcctcctgctgtagcaacctggaaaacacttcactctctactttaagttgtagctcaacctactgtttcatacg

SEQ ID NO: 6119 - DNA, 201 bp, Homo sapiens; identical to SEQ ID NO: 6118

SEQ ID NO: 6120 - DNA, 201 bp, Homo sapiens
tttgctagtccatctaaatactgaactaatatttatttgcttttccttaatatgtatataaagatacacacacacacacacacacacacacacacaatgaytaacactctttttaacacaaataataattacataacttttatttcaggcttttaccttgaattgagtttccacttcattcatatctcttttctccattaa

SEQ ID NO: 6121 - DNA, 201 bp, Homo sapiens
ccaagaaatgtaatgcaaacaacttgggcctgtgtcacttagtcttctaagaagacttcaaggctgttataaagacccagtggtgggagaaacctgatccrgtatagcggggccagaagaagctgcgggaccatgccgcggggacaaggcaaggagtttcgccaggatgttgatctcctggttatctacacttccgcctca

SEQ ID NO: 6122 - DNA, 201 bp, Homo sapiens
acttagtcttctaagaagacttcaaggctgttataaagacccagtggtgggagaaacctgatccggtatagcggggccagaagaagctgcgggaccatgcygcggggacaaggcaaggagtttcgccaggatgttgatctcctggttatctacacttccgcctcagtatgatctgaattattaatgagaaagattaagata

SEQ ID NO: 6123 - DNA, 201 bp, Homo sapiens
cttagtcttctaagaagacttcaaggctgttataaagacccagtggtgggagaaacctgatccggtatagcggggccagaagaagctgcgggaccatgccrcggggacaaggcaaggagtttcgccaggatgttgatctcctggttatctacacttccgcctcagtatgatctgaattattaatgagaaagattaagatac

SEQ ID NO: 6124 - DNA, 201 bp, Homo sapiens
atccggtatagcggggccagaagaagctgcgggaccatgccgcggggacaaggcaaggagtttcgccaggatgttgatctcctggttatctacacttccgyctcagtatgatctgaattattaatgagaaagattaagatacagattccttccttcaagtgccttagtagtcacagacaggaggttaattataagactaaa

SEQ ID NO: 6125 - DNA, 201 bp, Homo sapiens
ctgggtacaagcgattctcctgcctcactctcctgagtagctgggactacaggcgcccgccaccacgcccggctaatttttgtatttttagtagagatggbgtttcaccatgttggccaggctggtctcgaactcctaacctcaggtgattctcctgcctcggcttcccaaagtcctggtattaaaggcatgagccactgt

SEQ ID NO: 6126 - DNA, 201 bp, Homo sapiens
cccactctgtcacccatactggagtgcatttgcagtggtataattacacctcactgcagcctcaacctcccaagctcaggtgatcctcccatctcagcctyccaagtagctgggactacaagagtgcacctccacactcagctaatatttttgtacttttgtggaaacagggttttgccatgttgcccaggctggcctcaa

SEQ ID NO: 6127 - DNA, 201 bp, Homo sapiens
ccactctgtcacccatactggagtgcatttgcagtggtataattacacctcactgcagcctcaacctcccaagctcaggtgatcctcccatctcagcctcscaagtagctgggactacaagagtgcacctccacactcagctaatatttttgtacttttgtggaaacagggttttgccatgttgcccaggctggcctcaaa

SEQ ID NO: 6128 - DNA, 201 bp, Homo sapiens
ttctcaaggaaactacaagtaaagtgatccctggaccagtaagtactcccagacactctgtaagagcaaatacaatttctctctggaataatccactttakactcaggcaacgtaagctcacaaacataattcataatacaaacaaggaaacaagataccataagcaagagccagcagaaacaacgaaccacaaaatcaga

SEQ ID NO: 6129 - DNA, 201 bp, Homo sapiens
gctcacaaacataattcataatacaaacaaggaaacaagataccataagcaagagccagcagaaacaacgaaccacaaaatcagatacacaaagaattcasataaaacaattaccagacacagatatataattgtatgcttaatgtgtttaaagaaatgaaagaattaaaaatattaatatagattagacattactaaaat

SEQ ID NO: 6130 - DNA, 201 bp, Homo sapiens
ttttgttttgagagatagggtcttgctatgttgccctggctggtcttggactcctgacctcaagaaatcctcttcttctgcctcccaaagtgttaggattwcaaccataagccacctcacctggccctcatccttcttaatacccatcagccaccaacttctggtcactatttggtcattcaaaccaactctgctacccag

SEQ ID NO: 6131 - DNA, 201 bp, Homo sapiens
ctgaggcaggagaattgcttgaacccgggaggcggaggttgcagtgagccgagttcgcgccactgcactccagcctgggtgacagagcaagactccgtctmgacaaaaaaaaaaaaaaaaaaaaaaaaaaaatccccaacaaccaagggaatctcaggcaaagtcaaaggtcattaacaggcaattcataaaagaagaacc

SEQ ID NO: 6132 - DNA, 201 bp, Homo sapiens
agtcaaaggtcattaacaggcaattcataaaagaagaacctataaatcattaacaaacatatcaaaagctgctcaacttccttaatcaaagttacgtaaawtaaaaagagatcatttatttggggaccttttttgctctaaaaagactgccaatatacactattggtgaggggtaagaaaaaatgacaaggtttatcaaaa

SEQ ID NO: 6133 - DNA, 201 bp, Homo sapiens
agtgtcttttgtgttccatgagaaaagtgacatttctttgctttcccatacattgaggtcaacctaaattccaatgaagccaaacctgaactgcatttatktatttatttatttatttatttatttatttatttatttatttttgagacggcgtctcgctctgtcaccaaggctggagtgcaatggcatgatctcagctca

SEQ ID NO: 6134 - DNA, 201 bp, Homo sapiens
gaactgcattttctaaccaactgactttatttcagtgattttgtaacatcactcaatttcaggtaagtactctctaagaacagcttcatttgtcagaagcmtcatggacagctgctaccaccatatcatcatgttttcatcctacagacaatcatcagcggtgtagactggtgagttccagctatttcactaacaatgggg

SEQ ID NO: 6135 - DNA, 201 bp, Homo sapiens
aggctgaggccggagaatcacttgaacccgggaggcagaggcggtgagctgagatggcaccactgcactccagcctgggcgacaaagtgagactccatctrcaaaaaataaataaacagatagataactactatataagtctcttttctatcacatataacacaacatctggcatgtttacactagggaggaagtttctca

SEQ ID NO: 6136 - DNA, 201 bp, Homo sapiens
ctggagtaagctacaggatctaaagcagccctttttacagtctagttaggagagagaaaataattgcaaatatccacttagaggcaaagaacaattttttwttatcaaaaaggtttctgcacattgttgtggcaatattgtatctgtttagaaaatgggcttttccaaaagcaaacaaagataggttcctcaggtgaccaa

SEQ ID NO: 6137 - DNA, 201 bp, Homo sapiens; identical to SEQ ID NO: 6136

SEQ ID NO: 6138 - DNA, 201 bp, Homo sapiens
aattagccgtttttgctttgtgttttctcttttgagaattatatgtttatgtttcttgtccatttatctactggagaatcacaattcagttatataaaaawtatctatgacacacaagagaaagcaatgaaatttctttaaaatgcaaagtgtcatagtcagtaaagctctactatttcaaagaaaacccacaaatgtgtc

SEQ ID NO: 6139 - DNA, 201 bp, Homo sapiens
ctaggtttattgattccctaccaactgttagatactgttaaatgctagctatgtgtgcatgtgtgtgtttataatttgatctcttcagcaaccctgtaatrtagatattatgctttatagatgagaaaaatgagacaggtcggcaacttgctcagagtcaaagagaaaacacacactaattctactcacattgcattggcc

SEQ ID NO: 6140 - DNA, 201 bp, Homo sapiens
atagaagccaaggaggaaaaagaactaatatttactaagctcctccaaagtgccaggcactttacacatgctcactctctctaatagcctattattctcaytcaaggtggggtaactgaagcaaagaaccattcatgtaactttgctaagttcacacaacttgttggaatgcaatccacatctgtgtgagtataaactccc

SEQ ID NO: 6141 - DNA, 201 bp, Homo sapiens
agtcagacttgcatctcaggccttttttttttttttttttttttttttttggaaacaaggtcccactctgtcacccatactggagtgcatttgcagtggtwtaattacacctcactgcagcctcaacctcccaagctcaggtgatcctcccatctcagcctcccaagtagctgggactacaagagtgcacctccacactca

SEQ ID NO: 6142 - DNA, 201 bp, Homo sapiens
tagtagtcacagacaggaggttaattataagactaaaagcaatcttgggttgttagaagaacttaaaaggaaaacacctttcaacttcttgttatcaatcratcatttttgtctttagaaatcaagaatttgaacaataacagctgctttcagaaataaaccgcgactttgtgcagcgtgtattacctgacgagctgaaat

SEQ ID NO: 6143 - DNA, 201 bp, Homo sapiens
ttatgagctatattccataaagatgctgcaaagttcaggtatctggtttaggaaagaaaaaaaaatcccttctttaacccaagaaatgtaatgcaaacaayttgggcctgtgtcacttagtcttctaagaagacttcaaggctgttataaagacccagtggtgggagaaacctgatccggtatagcggggccagaagaagc

SEQ ID NO: 6144 - DNA, 201 bp, Homo sapiens
agcctcccaaagtgctgggattacaggcgtgagccaccgcgcctggcctagttacactttataaaaaaaaggcaagagaaaaatatctaaaattaggtttkaagtagccttctcaaaaatgtgaaatgccatttttataaatacctacatatttaaatactttaatgatgctgggtgactccataggggatcacctttcaa

SEQ ID NO: 6145 - DNA, 201 bp, Homo sapiens
cctatcttcaatcaaaaagtacctttagactgttactgttcttttacaaacagcaaggctaaaacacagtaaggttatgaacttatccagtcacagcacawtttttggcaccacttacttttgtacaagtttgttccagtttttcctcagaaattgccaggccagtgggtatcctactgggttcctgccaatgagtgtaag

SEQ ID NO: 6146 - DNA, 201 bp, Homo sapiens; identical to SEQ ID NO: 6145

SEQ ID NO: 6147 - DNA, 201 bp, Homo sapiens
cagaaaatgacagaagcaggaaatgctataagagttagacaaagacagatgtgaacaagcaaatgtgttcatggaaggcctgggctgaactgtgaggaggwaggcttcagatatgtccatgggctcaggaaggggttatgccagatggaatggaaaacatccctgtccagattcactagttagcactgaagtccagtttta

SEQ ID NO: 6148 - DNA, 201 bp, Homo sapiens; identical to SEQ ID NO: 6147

SEQ ID NO: 6149 - DNA, 201 bp, Homo sapiens
cactttgcagccacactctgattttatcaaaattcttatccatccaaccgatgttttcttcaatggtttcaattgtctgttggacacaacggagctgagawccattttctttcaaagagctgaagaatccttttaccttgtgaggaaaaagtgggttttaaaaaattaattttatcacattaatcagatgtaactttagtt

SEQ ID NO: 6150 - DNA, 201 bp, Homo sapiens; identical to SEQ ID NO: 6149

SEQ ID NO: 6151 - DNA, 201 bp, Homo sapiens
agttgaagggaaaaaagtatctccagttggagccaaaacagccatctctagtttgaaaatacactcaacaaaatgttggtgattagagataacaggaacckggcaagggaggaatttttacatacgttcaagcttttcactttgcagccacactctgattttatcaaaattcttatccatccaaccgatgttttcttcaat

SEQ ID NO: 6152 - DNA, 201 bp, Homo sapiens; identical to SEQ ID NO: 6151

SEQ ID NO: 6153 - DNA, 201 bp, Homo sapiens
accagtgatttctatttttattaaaccattcactacaacaaataagtataaaaattccaattccacttttatacctatttatttgttgtagtgaatggttyaataaatggcagatttatgtccagaagtcactctattttgtcgtgtattaggggaacacattttgacatttttcgtaccaatcatcaatcatattccctt

SEQ ID NO: 6154 - DNA, 201 bp, Homo sapiens; identical to SEQ ID NO: 6153

SEQ ID NO: 6155 - DNA, 201 bp, Homo sapiens
acatttcctggttcttgcagcccatgagtgaagacttccttctggatgctttgtctgaggacttctctggtccacaaaatgcttcatctcttgtaagtccmaaactcttggttttatttctttagttttttttttttttttcctttgagatggagtcttgctctgtcatccaggcgggagtacagtggtgccatcttcagt

SEQ ID NO: 6156 - DNA, 201 bp, Homo sapiens
ttcaggccgcacctgaaaatgtgctacttatactaattaaaaatcctcaggcaagagacaactgtgcccaattttcaagttttttgttttgttttgttttktcgttttgttaattgttgaccacgtcctgagttcagagcgaatcctctgggtgtttaataggaaacagataatttctttctgaacctagcctacacaaag

SEQ ID NO: 6157 - DNA, 201 bp, Homo sapiens
ttatcaacatataatttgcacacaatgtttaatataagaaatttgctcgaatgttaaacgttttgttttttaaacatagattctaattcagttgataactsgagttattaaaagatagcatgtgccttttatctgaaataatgatatgcctttctgaattgatagcatatgttttaaagggagtgattaaccacctactta

SEQ ID NO: 6158 - DNA, 201 bp, Homo sapiens
acacaatgtttaatataagaaatttgctcgaatgttaaacgttttgttttttaaacatagattctaattcagttgataactcgagttattaaaagatagcrtgtgccttttatctgaaataatgatatgcctttctgaattgatagcatatgttttaaagggagtgattaaccacctacttaatatatccactaatgcact

SEQ ID NO: 6159 - DNA, 201 bp, Homo sapiens
cttctgaggtcacaagccatacctcatccagtgtgcagcccccgtgactcaggaatgcctggtgcttgtgagctgtttgttgccatgaactaattagagcrtattctctggtgagagaatccttcgtgacatgatggatctaatttaaaatgtacaacagcaagtataacctgtagaccctttgtaatgtttacaaggttt

SEQ ID NO: 6160 - DNA, 201 bp, Homo sapiens
catagcattacactgaggcagaacagatgaacaaatagtggggaacaagatctcaattcccttcctcctcctatcattattattattacaattgttagggktgttttttcttttagaaattcaaagatttggaaaaagtaacaatggatttatatgcccccttcaaagatatgtagcagtgaaatggtgagatgaaacaac

SEQ ID NO: 6161 - DNA, 201 bp, Homo sapiens
actaatcatcatgagaaccaaataatcaaaatagttatttagtggaaagtttcaagaaatttgggggagaagtatcacatatggctcataattagtgttcmtctgtaaaagagtagctcctgtacgtaccatgctctttgatataatagaacagaaatgctatataaaaagaaacacttaaaactattcccctaataatac

SEQ ID NO: 6162 - DNA, 201 bp, Homo sapiens
aataatcatgtccatgtaaaagatctatttaaaattttacatatactcatattataaataaaaactttttaaaaagtaggcaatcccctaatctgttaaaragtctttagttttcagaatcaaatattcaatatcatgctggaggcattttccttaaaagcagaaactatgaaaagtttattgtcatttctgcttattatc

SEQ ID NO: 6163 - DNA, 201 bp, Homo sapiens; identical to SEQ ID NO: 6162

SEQ ID NO: 6164 - DNA, 201 bp, Homo sapiens
ctcaataaaattattcaatgatacattcggaaaataaatgtataaaatatgaaaaagtactaaaaagcatttttcagtacttttaggtaagattaatccarctaaacactagcatatgttatacagtaataataagtggaaaatacaataatgttgagaaagcaaactcaaagcatagatcaatgaaaaaattgagaaatg

SEQ ID NO: 6165 - DNA, 201 bp, Homo sapiens; identical to SEQ ID NO: 6164

SEQ ID NO: 6166 - DNA, 201 bp, Homo sapiens
taaaataatacaatagagaagaaagaatttaaatttcttttaaaattatatgttattatgagtctatttggtcaagagaataaacagtcattaagctatckttaagagttatagttaagtgatggcattgtgctcataattttatatacaacatgttactaataaaatttttttcaataaaagaaatttgaagatgctaaa

SEQ ID NO: 6167 - DNA, 201 bp, Homo sapiens; identical to SEQ ID NO: 6166

SEQ ID NO: 6168 - DNA, 201 bp, Homo sapiens; identical to SEQ ID NO: 5849

SEQ ID NO: 6169 - DNA, 201 bp, Homo sapiens; identical to SEQ ID NO: 5849

SEQ ID NO: 6170 - DNA, 201 bp, Homo sapiens
gaatgcaatgtgttgaaaaatatggattttgctataataatactaataataatttaccatttgttgggtcctaacatacaactagtattgttttaaatgcyttttcaatcatttacttttctcagcaacttaggagtataagtactactattattcacatttcacggccaaggaaactgaagctgaaaggggttaaataag

SEQ ID NO: 6171 - DNA, 201 bp, Homo sapiens; identical to SEQ ID NO: 6170

SEQ ID NO: 6172 - DNA, 201 bp, Homo sapiens
tctaatgtgtcaccaaagccgaccagcaggtaaatatttatttgagccaatatcattatatatgcatatgctaggctctgtggtataaacagggttgaatrctgttcagtcactcacagatgcttaagagtgatccaagaaatgtgattctctctttcaagaaaaggctataaaaatgactaaggtgataggatttcaaag

SEQ ID NO: 6173 - DNA, 201 bp, Homo sapiens; identical to SEQ ID NO: 6172

SEQ ID NO: 6174 - DNA, 201 bp, Homo sapiens
gtaactttttataacactttaagtagaattataagtgataatacatgatggcagaaggttcacaaatagtgtttctttcacttccaggaccagaccctttyatatgtttcccccaagtctacacaaatgattataaagaatagtaattaagcaaagctggtaaagaaatagtggggactcaggtttattagttattgcaag

SEQ ID NO: 6175 - DNA, 201 bp, Homo sapiens; identical to SEQ ID NO: 6174

SEQ ID NO: 6176 - DNA, 201 bp, Homo sapiens
gaatgtcagtcagtttttttcttatagaaacatcttttatttgtaagtgatgtgggaaaagaccccatattgcattttgccttctgcttcttcactgatgrttatttctactcatatctcagaaacctgcagatgaccaagaccccattgatgctctctcaggagatctggacagctgtccctccactacagaaacctcac

SEQ ID NO: 6177 - DNA, 201 bp, Homo sapiens; identical to SEQ ID NO: 6176

SEQ ID NO: 6178 - DNA, 201 bp, Homo sapiens
tgtgtaattcaacaagtgtgaggcattttccctcaagctacaccctcttgtaaatcaaatagaaggaaacgtgaaatgagtacctccttgttattttcagragagttaattctgcagatctcagtttgctattgttttggctgttctaaggcactgctctcgatcactgaattgtcagcccttccatactgggtagcttaa

SEQ ID NO: 6179 - DNA, 201 bp, Homo sapiens; identical to SEQ ID NO: 6178

SEQ ID NO: 6180 - DNA, 201 bp, Homo sapiens
taaaggtgtagctttaaagacaatagtccagttacaccaaagcttttaaaacaatatattaaaatcttcctgtagtagattcccttaagggatataggaarcagcattgataattggcagttatgccattatatctcagattaaatacttatttgcctattatttaatttcagttatacgaagtacttaatcagcccttta

SEQ ID NO: 6181 - DNA, 201 bp, Homo sapiens; identical to SEQ ID NO: 6180

SEQ ID NO: 6182 - DNA, 201 bp, Homo sapiens
tttaatttcagttatacgaagtacttaatcagccctttaacaaataatagaaagcataataaccctttatgatgagtggatttactggacagccatgaccytatgtacaggaaaggaaggatcaccacagaatgaaacattgccatttaagaacacctatgcatattttataacctaccctagccttaaaaaaataaagct

SEQ ID NO: 6183 - DNA, 201 bp, Homo sapiens; identical to SEQ ID NO: 6182

SEQ ID NO: 6184 - DNA, 201 bp, Homo sapiens
ctttaacaaataatagaaagcataataaccctttatgatgagtggatttactggacagccatgaccctatgtacaggaaaggaaggatcaccacagaatgmaacattgccatttaagaacacctatgcatattttataacctaccctagccttaaaaaaataaagctgagagtgatacatttaggatcaggatcacttaag

SEQ ID NO: 6185 - DNA, 201 bp, Homo sapiens; identical to SEQ ID NO: 6184

SEQ ID NO: 6186 - DNA, 201 bp, Homo sapiens
tagccttaaaaaaataaagctgagagtgatacatttaggatcaggatcacttaaggttatttttagcttataagcttgaggaggaagaactcacaatattktggccagatgaagaagagaaactgaaaggaccatcttatttttccccactgactgccatcttttgtcccctaattctgagaaggccatctcctcatactt

SEQ ID NO: 6187 - DNA, 201 bp, Homo sapiens; identical to SEQ ID NO: 6186

SEQ ID NO: 6188 - DNA, 201 bp, Homo sapiens; identical to SEQ ID NO: 1084

SEQ ID NO: 6189 - DNA, 201 bp, Homo sapiens; identical to SEQ ID NO: 1084

SEQ ID NO: 6190 - DNA, 201 bp, Homo sapiens
tgtggcagggaacccaacacttgggtttacgttgcagggcaacacctgtgatgaacaaaacacatggtagcgatagcccattcatgaaaaactaacagctrttcttttcacagggatagtcaaaaaatgagttgaagggaaaaaagtatctccagttggagccaaaacagccatctctagtttgaaaatacactcaacaaa

SEQ ID NO: 6191 - DNA, 201 bp, Homo sapiens; identical to SEQ ID NO: 6190

SEQ ID NO: 6192 - DNA, 201 bp, Homo sapiens
ttctcacagatgcaaacttcgttttttaaaaacatgatatctaaaaagcagaatgtgcagagtcttttctttgccaagcaaaacagtttccaccacgtaartgctgtctttctccatgggcctggccttgtatgttattatagaaacactgtggggaatgggattcttagcaagttatggcggtaagacccaaaccttgcc

SEQ ID NO: 6193 - DNA, 201 bp, Homo sapiens; identical to SEQ ID NO: 6192

SEQ ID NO: 6194 - DNA, 201 bp, Homo sapiens
tcttggctacctcctgaaaaatatgtttgttcttgtttcatttgtgggtatcttaattcaccccttgagctcacatgacagataggctggctttgccacargattgaccattgtgcgattctgtttcaccttaaagggttattatccttttcccataaattttcacagcattaatccatcaatttttgatttggtattcag

SEQ ID NO: 6195 - DNA, 201 bp, Homo sapiens; identical to SEQ ID NO: 6194

SEQ ID NO: 6196 - DNA, 201 bp, Homo sapiens
cttcaatgtggaaaatgttttgctattggcaaagtggcaagggggaggccagttaggacactattgcaataggcaaggcaagagatgagaaaggattgaaygggggtaagagcagagagaagtgcgcaagatccagtgcatgtgctgagggaagaccggcaggacttgcgtagttagatgtctggggaagaaaggattcag

SEQ ID NO: 6197 - DNA, 201 bp, Homo sapiens; identical to SEQ ID NO: 6196

SEQ ID NO: 6198 - DNA, 201 bp, Homo sapiens
atcacctgtccattatgtatctttttgtccttcattttaacatttcttttatacatggatcttaaagctgcctgaaattctttctgaaggtagatggttayataataagtgacagggaaccatgaacttggatggtttataaagaacctagattccggacctgcctctttagcaacagctggatgaccacttcagtcattt

SEQ ID NO: 6199 - DNA, 201 bp, Homo sapiens; identical to SEQ ID NO: 6198

SEQ ID NO: 6200 - DNA, 201 bp, Homo sapiens
tatacacctttaaatatttttcctaacacctggttctccctaattatttgcctttctcattagatgtgtgctgacttgcagtatgttcccagcaggatagrcaattcctggccaagaaaacaaaaatagatgccagaatgatctaatctaatctaatttcccttggccacatgaacatgaatgaatgacggactcaccatt

SEQ ID NO: 6201 - DNA, 201 bp, Homo sapiens; identical to SEQ ID NO: 6200

SEQ ID NO: 6202 - DNA, 201 bp, Homo sapiens
ccagcctgggcgacaaagtgagactccatctccaaaaaataaataaacagatagataactactatataagtctcttttctatcacatataacacaacatcyggcatgtttacactagggaggaagtttctcaaacagtaacgtctagggctaacatgtggataagccggaaaggaagcacatcagcatctatccctgtgaa

SEQ ID NO: 6203 - DNA, 201 bp, Homo sapiens
gaaacactggattgagtggtgaacttctagagtaagcaagggatttccatcaaagaccctttaggaagcctggtcaaacagactatcatctggtcaaaacyatgagttcctggaggaaacacattttcttctccatttcaaagacactgcatatccttagaaacccttcattacagagggttagtgttaaaaacctcagtg

SEQ ID NO: 6204 - DNA, 201 bp, Homo sapiens
tagccattcatgcccacattaaatttgatccattccacctcttctgggaggatgagcacatctagagtaaataaaataaatcaaagttccatttgctcccytgcctgaagaaagcttttctcatccaagattgggcaaggaaattagagaagagtttaatactgaaaaatttgaaaacatcacttatttctctcagaaacc

SEQ ID NO: 6205 - DNA, 201 bp, Homo sapiens
tggtattaaaggcatgagccactgtgacaggccataaatgttgttttgtagaaaatactatgctgaaacatttaggtgtgaaggggaatcatgtcaccaayttactgtcaaacagttcagaaaaacatatgccaagtatatacatacagacatatgtatataggtatgtatgtagatagatggatatcgattaatcaagat

SEQ ID NO: 6206 - DNA, 201 bp, Homo sapiens
gttcatcatggttttcacatccaccccttcctgatgccaatgctggtgtgtacacaaaaaggcagacacatcacccatttaacccaactctaagaaaagasagaacaccagcttatgctcaaacagccgctaccagttgccaacctcccctcttaggagcactttctgatccctttctcagtgtgatgtccccagccatca

SEQ ID NO: 6207 - DNA, 201 bp, Homo sapiens
cctccagtatagatacactttaagaaaaattgaaaaagattatgagtatggaatagtttaaatgcagtcttatctggaatgagggtgatataatcaaggayctcagaaagtttggcacagagctgcctttcaaagaatatgcagtaaaagaatgtgcttgggggaacatgtacagatatagaaacttactgaggatgaaga

SEQ ID NO: 6208 - DNA, 201 bp, Homo sapiens
tcttatttctatagaaaacaatgattctcctcagagggattaacataatgcagggaaaacaaaacaagatgataagcctgtcaatcccaaatgcagagatrttcaaaaacatactcacacttgccatactatcccacaggtcctcgttttttgtatttttatagctatgcttctggagatactgtacaataccacttttaa

SEQ ID NO: 6209 - DNA, 201 bp, Homo sapiens
tactcacacttgccatactatcccacaggtcctcgttttttgtatttttatagctatgcttctggagatactgtacaataccacttttaaatgcgtcagcrctaagatactcccttagcatattcagaatacaagctccctgaaaagataatagaaataattgttatctatagtttcattgcagtctcatctgaaatcaca

SEQ ID NO: 6210 - DNA, 201 bp, Homo sapiens
ccaactctgttactaagcacactgtgcaagacaattatttgcgtctcaacaatattaaccattgctgaaggccttgaaaagtaagctacacgagggcaggratttttgtctagtacaaagttgatgctcaatcaatacctatttgttgaatgatgaataaaagcagagtttctgtaagccatgaattttcaacccaagaaa

SEQ ID NO: 6211 - DNA, 201 bp, Homo sapiens
aacccaagaaagaatatatgaagaatttcccataaaataatctttagggttatgagccaaactgcaagttagtcctaaaagagttgactccagccagcacrtgtcaagagagaaggcattcaatctgggtttaaccccacaaccttgcctataacttctccaccccagtatgtataactttagtatctaaactgtatcctt

SEQ ID NO: 6212 - DNA, 201 bp, Homo sapiens
caggattttccacaggtgtagacacagggtgtgaggaatttaaagcatctacctccattgcgtcaaaacatttgccaaagaaataatctccctattgagayagaaaaaagaaaacatcacctatgatttacatttagataaaaaatgtcaaaggtgggacattttatctgaggcaagaagtccatacttcacattttgggg

SEQ ID NO: 6213 - DNA, 201 bp, Homo sapiens
gacaaagtaaaaattatataaatagccttatatgtcccatagaagcaatataaatgtagtttatactttattaaaagtgtgaatgagcttatacctggtgrgccagttcatgggccacagtcattgtgatgccaagcttacttgatgcagaagacttttctgcatcaaacaacagagcagattctctatatgttgtcagtc

SEQ ID NO: 6214 - DNA, 201 bp, Homo sapiens
atgtcccatagaagcaatataaatgtagtttatactttattaaaagtgtgaatgagcttatacctggtgggccagttcatgggccacagtcattgtgatgycaagcttacttgatgcagaagacttttctgcatcaaacaacagagcagattctctatatgttgtcagtccccagttttccatagcaccagactgaaagtc

SEQ ID NO: 6215 - DNA, 201 bp, Homo sapiens
aggctggcctcaaactcctgggctcaagtaatccacctgcctgggcctcccaaagtgctgagattacaagacatgagccaccgtgcccgccttttcaggcytcttgactccatttctaaccttctgatgaggagtttggaaattgaaaaactaaacaattataataatccattctattttggatgcccaagacccacatat

SEQ ID NO: 6216 - DNA, 201 bp, Homo sapiens
gacattaatgtcttcatattgtgggatatggttgccaatattaaagaaaataattgggaattccatttcttgcattaatactgactgttcctgattaatcmcccttctgaaaacaacaacaaatgctggataacatgtataaagtgttcttaaatgtgtttataagatggcaaatgagaaagaaagatttagaagccaaag

SEQ ID NO: 6217 - DNA, 201 bp, Homo sapiens
ggcaaatgagaaagaaagatttagaagccaaagtgaaatgacagttagaccctctgatgtcaggagagcactgcagccagctttaaccctgccggcactakcccaacacagctggacttgagctttggttcttatgtcattgaaggactcaggagttaagagaccaagtccagggcctgcccaaagtagaaagtctaacag

SEQ ID NO: 6218 - DNA, 201 bp, Homo sapiens
tttccttaaatacaggtttgagaattatctggcaatgcaatgtcgagctgttgagcatatacgcaacggggaaaatatataaccctgtagtacctaaaagmgcttctgttctgctgtataactgaaagtaacctgggccggacacagtggctcacacctgtaatcccagcactttgggaggccgaggcgggtggatcacaa

SEQ ID NO: 6219 - DNA, 201 bp, Homo sapiens
cagaattagctgggtgaaaccatggtcacgggcatttttcctgtaatccaatacttacctctattgctctgacctcatcttttttttttgttttgagagayagggtcttgctatgttgccctggctggtcttggactcctgacctcaagaaatcctcttcttctgcctcccaaagtgttaggattacaaccataagccacc

SEQ ID NO: 6220 - DNA, 201 bp, Homo sapiens
tatgaaggcaggtaggtatagagttttaaggttgagaagcaccacactagaggttggtctgtggctctcagtatctctccatgttatgatattgcttcccyggtcagcacagggacaaagctgttcttccctcaggactctaggcaaagcctattctactctgactctgatccccagtgagtttctctgaacaaaggatgt

SEQ ID NO: 6221 - DNA, 201 bp, Homo sapiens
gttataaatgaaaagttagtaacgatctgccaggcaataaaacaaaacaggtgacccaatgttgactgtcactgggctagtgcaagtcacagagaatcagyagattttcctatagaaaatacacaggagtgcagactcaccaatggcatattggagatggctaggtgccttggctctcttctaattttgattgagaaactt

SEQ ID NO: 6222 - DNA, 201 bp, Homo sapiens
ttttacttctaggcatttattctaaagaaataatttacaaagatgctcatcaaagtgttgttgatactgaaaaattggaaacaatttcatttccattcccragggattaaagatattaatgtacaactatgtattttaataaaatcattaaaaagatgtctagtaatagtcatttatataaaacatcttcccaacatatta

SEQ ID NO: 6223 - DNA, 201 bp, Homo sapiens
atttatataaaacatcttcccaacatattaagttaaaaaatttccttgtaaaagagaaaatataagaattctatttatataaaataatatatatgcatatmcagaaagaagtctggcagaatattccagtgaaatagaagtagtggtcagttcagggggctatgagtgaaataaattttactttcttaccttgataaaata

SEQ ID NO: 6224 - DNA, 201 bp, Homo sapiens
attctacccagagtctggagggagcacgggcctgctgacaccttgatttcagacttctagcctccagacctgagagagaatacattttgttgtttatagcyacccagtctgtggtactttgttacaacagccctaggaaactaatgcacagttcaggaaaattaaacatgtttattatgtctcagaaatcgaactaaataa

SEQ ID NO: 6225 - DNA, 201 bp, Homo sapiens
atttcagacttctagcctccagacctgagagagaatacattttgttgtttatagccacccagtctgtggtactttgttacaacagccctaggaaactaatrcacagttcaggaaaattaaacatgtttattatgtctcagaaatcgaactaaataaacaaatagatatttactctgatagagctgggggaaagaaaattgg

SEQ ID NO: 6226 - DNA, 201 bp, Homo sapiens
tatagccacccagtctgtggtactttgttacaacagccctaggaaactaatgcacagttcaggaaaattaaacatgtttattatgtctcagaaatcgaacyaaataaacaaatagatatttactctgatagagctgggggaaagaaaattggttaaaatagaattttaaaatgagatttaaaaagcaagggaaaaagccat

SEQ ID NO: 6227 - DNA, 201 bp, Homo sapiens
gtggaaagtctccgaaagattgccagcatagtgaatgacaactgtgtacgggagcccgacaaggaggggctcgggagccagcagtgcaatttgctcctgasgggggtgttccaggacctgcaggggttcttccgatagcctctctccagctcccttcctgagggtggccctagatatctgcaggtggtgactatgcaggat

SEQ ID NO: 6228 - DNA, 201 bp, Homo sapiens
tggaattaactttgtaggaccacctggccagtgaggcacccagataggaaacttttaatttgcgtcaacagaggtgctttatctgaataaaacccagccaragccagagcgaaggggagagagagaattgctgaccagaagaacaggagaagcagggagggaagtgaccttaagaacacacacggcccgcgcatcccaccc

SEQ ID NO: 6229 - DNA, 201 bp, Homo sapiens
ccgccgggcaccccgcggactcgggcctagccagcgactccccccgcccttcccgcgccctgtctcgcgccccgtcgccttcctcccgcgccccgtcgccytcctcccgcgccccgtctccctcctcccgtgccccgtctccctcctcccgtgccccaggccctcagccccccacttgacgggcgcagggaaggggcgggt

SEQ ID NO: 6230 - DNA, 201 bp, Homo sapiens
actcgggcctagccagcgactccccccgcccttcccgcgccctgtctcgcgccccgtcgccttcctcccgcgccccgtcgccttcctcccgcgccccgtckccctcctcccgtgccccgtctccctcctcccgtgccccaggccctcagccccccacttgacgggcgcagggaaggggcgggtgccgcgctctcctcccgg

SEQ ID NO: 6231 - DNA, 201 bp, Homo sapiens
ccagcgactccccccgcccttcccgcgccctgtctcgcgccccgtcgccttcctcccgcgccccgtcgccttcctcccgcgccccgtctccctcctcccgygccccgtctccctcctcccgtgccccaggccctcagccccccacttgacgggcgcagggaaggggcgggtgccgcgctctcctcccggcccgcagtcccc

SEQ ID NO: 6232 - DNA, 201 bp, Homo sapiens
atctcttcagcaaccctgtaatgtagatattatgctttatagatgagaaaaatgagacaggtcggcaacttgctcagagtcaaagagaaaacacacactamttctactcacattgcattggccagaacaaggaggggttggtaaacactaatattgtataccatatagtgtaggagggctggttggccggttgagcccatc

SEQ ID NO: 6233 - DNA, 201 bp, Homo sapiens
atgtagatattatgctttatagatgagaaaaatgagacaggtcggcaacttgctcagagtcaaagagaaaacacacactaattctactcacattgcattgsccagaacaaggaggggttggtaaacactaatattgtataccatatagtgtaggagggctggttggccggttgagcccatccattgcagaggcttctcagt

SEQ ID NO: 6234 - DNA, 201 bp, Homo sapiens
gtattcctgttgcttttacctttgctcgtgtcaacaaggaggtaagtcaccatgacatatttcttaaatttgtatttctttcatcactaatgagactgaayatatgcactgaacatatgttaattagccgtttttgctttgtgttttctcttttgagaattatatgtttatgtttcttgtccatttatctactggagaatc

SEQ ID NO: 6235 - DNA, 201 bp, Homo sapiens
agactccatctcaaaaaaaaaaaaaaaaaaaaaaaaaaaagcctggactgcctgcataaggcatcttcatacacgaggaagataaacaccttaccttactkgtttaacaaactgtagttagcattctgttatatctagctaaaagaaattctaaaagatagccttacagatcaagccataaagagctaaatcatttcaaat

SEQ ID NO: 6236 - DNA, 201 bp, Homo sapiens
tttctctcacactaaaagaaaggaaattatgcaagagaatgaataccaggaggcaaggatcatgggggcaacttagattacgtctgccacactaatgttaytgcacattgaagatatttctactattataatcttaggattggcatagtctgtgtttttgaggcagggaaggagacatatatcaaaaaaataactggtgag

SEQ ID NO: 6237 - DNA, 201 bp, Homo sapiens
gtggttggatcagccaaagatgtcaaaattaaacttcagttaaattagcaagaattctgggcttttctgtttctgtagcattgtgttagatttgttttttyccttggttttccagtcctggtggtagattgctaaacttttataaaatctgtgtgagtttagcattctgactgttcccattctaaaagatgaaaatagaaa

SEQ ID NO: 6238 - DNA, 201 bp, Homo sapiens
gcctaaacttcatggcaagtataagctacttttgggaatttaggggaataaaaaattattttatcactgttgtactaggaacaaagcagattttccacackttagccagaaaatgtaggagaatcagtgaacctcaaagggccagcactaaaaactgggcagcatcagtatcagttttggatcctagaaaaactattggag

SEQ ID NO: 6239 - DNA, 201 bp, Homo sapiens
gatccaggagccatctgctaaattgggcagcctctgccacaattgctggctccagaaccataccatgtgtgccacaatctttccccacaaaatgaatagcycaagagctgcctgtctccctaccgaactcaattccaaattcaagtctcccaccagtgctactgtttggcagagcctaaagcacatctagaatctaggagc

SEQ ID NO: 6240 - DNA, 201 bp, Homo sapiens
tccaaattcaagtctcccaccagtgctactgtttggcagagcctaaagcacatctagaatctaggagcaaggagtctggaaaataaagtgtttgctttccygactctgcagtggtgtgagaaattctgaaaagcgtttggaagagatgctgagtgagccagtcccaatatctgcaataaatattaaactgtactgaggttg

SEQ ID NO: 6241 - DNA, 201 bp, Homo sapiens
tttaacattgtgacagaagcatattgccaaaaatcaagttatcatttggtatatttggaatgtctccaggggctttaaaacccttttgcctgctcaacacrcctccctttcctcctgtaaatgaataatcacactgctcaggctcagtctgagatgaacacaacacctccactctctggccaccgcgatgaggccaagggc

SEQ ID NO: 6242 - DNA, 201 bp, Homo sapiens
aagaaccaaagaaaaattgctgtgagaggaggaaggcaggagagcctgtggctccagaggggtgtgtgtgtttgtgtatgtgtgtttgtgtgtgtgtgagrgagagagagaaaataaaatgttttctaccaacaaaactcaggtgtgtttcctttacttgccttgaagcttcttcaaaacttgttatactgtaagtttgaa

SEQ ID NO: 6243 - DNA, 201 bp, Homo sapiens
gtgtgtgtgagggagagagagaaaataaaatgttttctaccaacaaaactcaggtgtgtttcctttacttgccttgaagcttcttcaaaacttgttatacygtaagtttgaaaaaccaaacacttttcctaggattgtttttttacgtactaaggaccagatcagatcagcaattagaagtatgacatacaaaataatcac

SEQ ID NO: 6244 - DNA, 201 bp, Homo sapiens
acctttttaagtgcaatcagagagtaagggtggggtatggttgatggaggtacagtcttagaggtctgcccctaaagaagaaagtctaacacgtcagcaakaaaaagcacggagatggaaaaagaaccagccagaattagctgggtgaaaccatggtcacgggcatttttcctgtaatccaatacttacctctattgctct

SEQ ID NO: 6245 - DNA, 201 bp, Homo sapiens; identical to SEQ ID NO: 1081

SEQ ID NO: 6246 - DNA, 201 bp, Homo sapiens; identical to SEQ ID NO: 1081

SEQ ID NO: 6247 - DNA, 201 bp, Homo sapiens
gcctacatgttgaagaagtttgagttttaggctttgggagcatttccttaaaaaccattgtcatgggggaggaaaaaaaaagggtagtgttaattctgtcwtcacacactcagagatcatttggttgggctacattttatgagctatattccataaagatgctgcaaagttcaggtatctggtttaggaaagaaaaaaaaa

SEQ ID NO: 6248 - DNA, 201 bp, Homo sapiens
tcagagatcatttggttgggctacattttatgagctatattccataaagatgctgcaaagttcaggtatctggtttaggaaagaaaaaaaaatcccttctytaacccaagaaatgtaatgcaaacaacttgggcctgtgtcacttagtcttctaagaagacttcaaggctgttataaagacccagtggtgggagaaacctg

SEQ ID NO: 6249 - DNA, 201 bp, Homo sapiens
aaatcaagaatttgaacaataacagctgctttcagaaataaaccgcgactttgtgcagcgtgtattacctgacgagctgaaatgcattgttaatgagactygcccgatcattactgctgactgctgtgtgtgttccttttaaaaggccagtcaaagagtcccatccatcatcctcgtaatgcacaatgtaatagccattca

SEQ ID NO: 6250 - DNA, 201 bp, Homo sapiens
atcgagaagcccaaaaaagactgaagagttgtttcagaaaaaaatggagaccaaaatgatgcaacaactaaataaaataagtgatcctgtattaaatcctmagtcagaatttattttctattttgctataaggatatttttaggacaattggaaaaagttgaatgggatttatagataatagtattatataaagtttattt

SEQ ID NO: 6251 - DNA, 201 bp, Homo sapiens
catgtaactttgctaagttcacacaacttgttggaatgcaatccacatctgtgtgagtataaactccctgctttttcagcttcaccaagatccctcttttytttttttttttttttttttgagacggagtctcgctctgtctcccaggctggagtgcagtggtgcgatcttggctcactgcaacctctgcctcccttcctt

SEQ ID NO: 6252 - DNA, 201 bp, Homo sapiens
ggctccccgagggcaggccacaacctccccttccagacgcagaatgacgcagtgatggaaaatcgatttcagtttgagtagggagcaaaagtgctcccagrgtcccaggcatcacttaggaaattttctgcctttacagctaagagatggtggagaacaagcccaggttcagctttcccctgtacctgaagaatggtcaga

SEQ ID NO: 6253 - DNA, 201 bp, Homo sapiens
tattcatatatatgtatatctttgtatttacttatttttgtgtaggtggataaatgggatttactattagtatatagatctccttttactaaagagccccrcatgctttcttcattttgtcgtgttactcaaatgtggcacttggagtcataaacagcttgacctaatctgaaccataagttgcagagcgtttcactgaca

SEQ ID NO: 6254 - DNA, 201 bp, Homo sapiens
ggaaaatatatttatatcagttggagaatagacagaatgacaactagaagaaataatgattctttggaattgcctgaagttgttacttttgctgaatgaascaataaagcccctcaaagaagagcttactaaccagagcatgttattctctgtacccctgtaaaagcaccgtgctgctcagtcacctcatcccgtgacctt

SEQ ID NO: 6255 - DNA, 201 bp, Homo sapiens
aataacatgctgaaatgaatttctgaatgttggtatctttttaatgtgcttttctccatcttttggtaaaatttgcaattctcctttttcaaaataagctrtccatagttggagtcaccaaagagttctggacttttttctggtttttcatcaacagttatacctaagtttttttgtcaaaagggagtatttgaaatgaag

SEQ ID NO: 6256 - DNA, 201 bp, Homo sapiens; identical to SEQ ID NO: 6255

SEQ ID NO: 6257 - DNA, 201 bp, Homo sapiens
tatttagaataatcaatatgagaaggaaatagaaatagcaaattgtataaaataatacaatagagaagaaagaatttaaatttcttttaaaattatatgtyattatgagtctatttggtcaagagaataaacagtcattaagctatctttaagagttatagttaagtgatggcattgtgctcataattttatatacaacat

SEQ ID NO: 6258 - DNA, 201 bp, Homo sapiens; identical to SEQ ID NO: 6257

SEQ ID NO: 6259 - DNA, 201 bp, Homo sapiens
ggccctaactacatcaggcactctcatgctcatttgctctctggagcttcctccccttttctgtctgcttagcccaactggtctactcttcattcctcagrgcacagctcaagcatcagctccttagggaagactttcttgtcttacatcttctcccttcccagtccaaagttagaggcctctcttccatgccctccttgc

SEQ ID NO: 6260 - DNA, 201 bp, Homo sapiens; identical to SEQ ID NO: 6259

SEQ ID NO: 6261 - DNA, 201 bp, Homo sapiens
  misc_feature 174: n = A,T,C or G
agcccaagaggaaagggggtaataagaaatcagaacactgaagaatgtttaaaacattgttttctaaacactaacaaaaaaaattaagggcaaactgaaartacaaatgagatttacaggcactgtgtgtagaatgtgcaaaaattcacttagcttttcttttgtttttttggngttgctttaagaaactttatcaaatat

SEQ ID NO: 6262 - DNA, 201 bp, Homo sapiens; identical to SEQ ID NO: 6261
  misc_feature 174: n = A,T,C or G

SEQ ID NO: 6263 - DNA, 201 bp, Homo sapiens
ctcgggcactatttccttttcttggactccttgagtagagctaagaatttggactcacgtgaaccctgaaagcctttttacagtgattggctgattgcatytcagaggcctaacttcaggactcatgtgcctcctgaatagtatattaggaaggacacaatatcacctccttgggattcctgtcaatgatatgtaagctga

SEQ ID NO: 6264 - DNA, 201 bp, Homo sapiens
aggcagctgacatcctgaccaacaaagagaccaagccccgataactggatttgaacatcggtgaagaagatgattaaaggtagaaagagcctttacagtcyagagaaaatagtataggcccaatggaagctcaaagttgaagagacttttaacagaaagacaaaggaaaaggtgtccttgggactaggggtccgagcaaga

SEQ ID NO: 6265 - DNA, 201 bp, Homo sapiens
tcatttaaatcctatgttggtattcaccagctatgttcccatcaggtctcctcagtgagatttggctccccgagggcaggccacaacctccccttccagaygcagaatgacgcagtgatggaaaatcgatttcagtttgagtagggagcaaaagtgctcccagagtcccaggcatcacttaggaaattttctgcctttaca

SEQ ID NO: 6266 - DNA, 201 bp, Homo sapiens
tacttatttgcctattatttaatttcagttatacgaagtacttaatcagccctttaacaaataatagaaagcataataaccctttatgatgagtggatttrctggacagccatgaccctatgtacaggaaaggaaggatcaccacagaatgaaacattgccatttaagaacacctatgcatattttataacctaccctagc

SEQ ID NO: 6267 - DNA, 201 bp, Homo sapiens; identical to SEQ ID NO: 6266

SEQ ID NO: 6268 - DNA, 201 bp, Homo sapiens
attcttagggtactcatctgacttgaactctgttggtttactgtgttagtaaactgtgctttctattatctatacataaaacctgagcagcaactgtgtcyttagagctattgccacattagcctttgcactgtatagcgtctggctttatggaacttaagtttaccaaatataaaaagaaacttctgcttttaaaaaaat

SEQ ID NO: 6269 - DNA, 201 bp, Homo sapiens; identical to SEQ ID NO: 6268

SEQ ID NO: 6270 - DNA, 201 bp, Homo sapiens
catcgtccggcttagtctcagatccaggtgttcattgttcagtagtcgactattcagagtctttcgaggagactgatgaaacagtttatgaatgataaacrtggggtacagggttttggacacgggtgcttaagcataaactataaaatgagaagaataaggtactttattcttctgtggcagggaacccaacacttgggt

SEQ ID NO: 6271 - DNA, 201 bp, Homo sapiens; identical to SEQ ID NO: 6270

SEQ ID NO: 6272 - DNA, 201 bp, Homo sapiens
atgactcccgtattttatatgtccgtagtttgctctccattatgataacatctcgggctctttacttttcatgccctgcttcaggatcttcgcacctgatrtttcctctgcacacaatactcctctagatgttggcatttccttcgatatcttctcaaatgtctcctaatcatcctataaaacagcaccaaccctctatcc

SEQ ID NO: 6273 - DNA, 201 bp, Homo sapiens; identical to SEQ ID NO: 6272

SEQ ID NO: 6274 - DNA, 201 bp, Homo sapiens
cacagtaaggttatgaacttatccagtcacagcacaatttttggcaccacttacttttgtacaagtttgttccagtttttcctcagaaattgccaggccartgggtatcctactgggttcctgccaatgagtgtaagaatttgtggaaactcctgagtttttattttatctcccttaaagctttcatctagtagcctagaa

SEQ ID NO: 6275 - DNA, 201 bp, Homo sapiens; identical to SEQ ID NO: 6274

SEQ ID NO: 6276 - DNA, 201 bp, Homo sapiens
agatatgaatgaagtggaaactcaattcaaggtaaaagcctgaaataaaagttatgtaattattatttgtgttaaaaagagtgttaatcattgtgtgtgtrtgtgtgtgtgtgtgtgtgtgtgtgtgtatctttatatacatattaaggaaaagcaaataaatattagttcagtatttagatggactagcaaagattttgg

SEQ ID NO: 6277 - DNA, 201 bp, Homo sapiens
tctatacaatttacaaataagcagaatctgtaatcattatattttgaagataaaattgatacttttcacacacacacacacacacacacacacacacacacaaagatttagcagtgggacaaactttttcatttaatttttgtttatagcaactaaaacatgagagactaaaagccacagactgcaaaagcattgtttagc

SEQ ID NO: 6278 - DNA, 201 bp, Homo sapiens
tccaaattagtgtggtgtttcttagctgtgtcagaaagtcagaggtgtccctgaggctgcagcgctttagcaaattttggaaataacttaggggaaaaaaaggtaaattacacagttaatctggtcctcactctacgaatgctacaaaacaatgacgaaaaggttcacggctagaccattctcaccaagaaagacagcata

SEQ ID NO: 6279 - DNA, 201 bp, Homo sapiens
tgatgatgagataaaagtctcaaggccattactcctcccatgaggcactcagggaggatctataagtgaaagatagcttcactcgcttgggttaaagtgaraaaatatgaacccactctagaactttgaaaatcaaagagagctttaaaaagccgtgtgtttatgttttgcctaatttttcactttttctcattagaaggc

SEQ ID NO: 6280 - DNA, 201 bp, Homo sapiens
aatccaatcacctggtagggaacagcatgtgtctccttagtccattggcagtgctaatggtgctcctaaatgaaggattttttttttctatgttcacgctsgttgaacttaattttccgttcacctgtttacctggattagttttcagcttaacattcattaagcatcaagacataacaagaggtgcagtgatgatgagat

SEQ ID NO: 6281 - DNA, 201 bp, Homo sapiens
cctctttctgttgtttaacattgattttaaaatatacgtttgatttagcaaaacgcatagtttaaaaagatgttgctacacttaagatcttcatgataaartaatttcattaaccaaagaaaactacagaacaagagagtagatatacaatatatcctgtttcattcctgaacatcccagttgttttatcattaagctttc

SEQ ID NO: 6282 - DNA, 201 bp, Homo sapiens
ggctaatgccaagcttgtgatgacacctgagatagttaaagttgtcaattgttgcagcagtcgccttatttcaggagttgtagactctgcatgagccttarcatgtttagttacagcaacttcaaaatggtgccgcaaaactcttttccatcatctgttgctaaaatttgggtccagcagagaaaagaatgaaaagtctct

SEQ ID NO: 6283 - DNA, 201 bp, Homo sapiens
cctctccatttatctgtgtcatttgccccatattattatacacttacttgcgagttgctttgtaatcttcttttattggttctagcatttaagttttgtcrccccaactaaattgcatactcctaagcagaggcagagattctgtctacttcttttgtgtcctcctcagtgtgctgttcatggctgtgaatgcactaggct

SEQ ID NO: 6284 - DNA, 201 bp, Homo sapiens
aaaacaaacaaacacatatgtcaaaactcatctaactgtacactatatatatgcaacttattgtatgctattatacctcaataaagttagcaagtgacctrtaaagagtggtttccaaattttcaaaaagtgctatttccacagcacaaaaagaatcacaagtgaatcagaaacattcagtgtaatcaggaatatttttga

SEQ ID NO: 6285 - DNA, 201 bp, Homo sapiens
atttaaaaaaataaataaaacaaatgattctctaaaaagaccaacaagacagaaaaaccacttccatgcctgattaagggaaaaagagaaagtaaaaatayacaagtatagtcatgaatggcttaacggcagggacacattctgagaaatgtgttaataggcaatttcatggttgtatgaacatcacagagtgtacttaca

SEQ ID NO: 6286 - DNA, 201 bp, Homo sapiens
aaagtcacagtgagaatttttactattaatgtatctttttaagaattgaacatgactgttagacaaagactaacttcatatcattcaaatacaaattataytttactgatatgttcatggaacttctaaaaacatcgatcatgtttttgaccaaagaggcaactttaacaaatccctaaaagtacagacttttaaggccat

SEQ ID NO: 6287 - DNA, 201 bp, Homo sapiens
atccaactgttttcaagaaacacacctaacacaaaatgataataaagagaacaaaaagttgtaaataaatgggtaggcaaagagaaatcaggcaaattcawacaaaaaggaagcagtatcagcaacggttaagagaaaacttaagctgaattacaacaaagataattataaatggataaaaggcacaattaataaagaaga

SEQ ID NO: 6288 - DNA, 201 bp, Homo sapiens
ggcagcaaaaataagaaaataggatgtaaaaatatataataatatgaagtaaaatataagggataaaataaaatacataaatcactacaataaatgtatayggactgaattttcccataaagggagtttaggtcaactgaaaaatacaaaatccaactgttttcaagaaacacacctaacacaaaatgataataaagagaa

SEQ ID NO: 6289 - DNA, 201 bp, Homo sapiens
aaattgtgctagcaggaaatttttttcctaatatcaatgagattgcatctacagtttcacaatgaaaatgttggctatgaatttatcactgatttttttttctcattatctgaaaaagtactcacttattcctagttttctcagatttttaaaaagttttctgacgagaatggctattgaatattatcaaattcttttttg

SEQ ID NO: 6290 - DNA, 201 bp, Homo sapiens
tcttttaaaactcttggtaaaaactgtcaagcagctttccacaaagttgttttgccaacttacactccttagggcaagctgtgagcatgtccatctcacartcctgctgccagacttacatattagtagggatttgtttttaattgtggcaagttgatagagaaaaaaggtcattacattaatgttacaactttcatttat

SEQ ID NO: 6291 - DNA, 201 bp, Homo sapiens
attaacattgtatctgtccttttagataaagtttttcaaaagcatgatctttatgactatatattgcatggctgtatcatactttatattaaccattccaytgtttggcattttaggttatttcccaatttttaaaatataataaacaaatagcactgtaattaacatcctcatacacaaatctttgtcagccattctcat

SEQ ID NO: 6292 - DNA, 201 bp, Homo sapiens
gcctgcttgctagctggtctatgtccaaaactagagatgagaactcccacaaacaacagtaaccctgcacccagcccaccccattctcatctatgttaagkgggtgtaatgagtgtgaggaataccttagcaggggaggttatggcctacttgcttctgtcctagggtgagaataagtttgaaaatcctcagaattgaaat

SEQ ID NO: 6293 - DNA, 201 bp, Homo sapiens
tccttttatttcaagaattagacaacttttctggcaaatggtggtgaatccaggcctctgggaatgccacatgacccttaagtcacaccggggcagggtcsacagtggccatggagcctgcttgctagctggtctatgtccaaaactagagatgagaactcccacaaacaacagtaaccctgcacccagcccaccccattc

SEQ ID NO: 6294 - DNA, 201 bp, Homo sapiens
acattgaagactccagattttacaaaactatcctcaaggtaacctgaaaataaatattaaaggaaaaatgatcaatataagcagaaagtaaaataaatgaytatacactagaatttaagtgttttaaagccaatggtttgaacaaaaaccaaatatgcttacaataaggactttaaaaaatgactcttaggaatgcaaatt

SEQ ID NO: 6295 - DNA, 201 bp, Homo sapiens
agaatctttcatgcctctggtcaaagatagagagaactttcttcaccttaagcctctaatacccaccatacaacctgggtaggacctgaaaacttgctcaycttagcaacgttcaagcttggaaatttgaggcaatcagattataatcactggttaccaatttcccgaatcctattcctcaaccttctttactcactcctt

SEQ ID NO: 6296 - DNA, 201 bp, Homo sapiens
tgttgacagagaaaactaggaagacagaatttagactgaaatttctcagtttaagctgggctctgaaggatggcaaagagtttgccagatgaagagttagmagagcattccagaggtcataacttataggaaggtcccggttgttgaattcgcaacttcaagtaaagcagtgggctcaagtgcaagcaagaggaagcagaa

SEQ ID NO: 6297 - DNA, 201 bp, Homo sapiens
aactacaaaaattagctggccatggtggcgtgcatctgtaataccagctactggggaggttagggcaggaagagttgcttgaaccagggaggtggaggtgkcagtgagccaagatcacgccactgctctccagcctgggtgacagggcgagactctgtctcaaaaaaaaaaaaaaaaaaaaaaaggaaattgaaggatatg

SEQ ID NO: 6298 - DNA, 201 bp, Homo sapiens
ttttaggtcaactttttaaaaacagtgaagatgctcacaattcatattttaattgctcctgaataaggggacatgcaaggcagccatcagcaaccagtgamccctactcaatctccaagcctctggaattcaccacacctcacagacagccggagatgagcctcacccttacagaagagcaccaaatctatgctgcttttt

SEQ ID NO: 6299 - DNA, 201 bp, Homo sapiens
cagtacacaaaaggacctcatcacactgcaaaaatagcagtacccactttggtcaattaaaacaaacaaacaaacaaaaaagcatacattattttttttttaaatctgtgtacttacctataataaccaatacagctaaaagcactacctacataggcaaaacttggtattgcataattcgtataaatttgaaacccctcc

SEQ ID NO: 6300 - DNA, 201 bp, Homo sapiens
ttgttctttcactctttgcaataaatcttgctgctgctcacaaaaaaaaaaaaaaaaaaaaaaaacaacgaaatccccagctgcatactgcaaatatattwaacatatcatattttttctcattaaatgtctattaaatgttttagaaattttacattcagacttagataaattagtgactattagaatggcagtggcaaa

SEQ ID NO: 6301 - DNA, 201 bp, Homo sapiens
caaacaaacaaaccagaaagaaaagaaagcctctcacctgctattttcagatattttctagatgggaatgcagaaatctactgcttttttcccaggttctrgcgcctgtagcacattgtctctcatctgtcagtgtatctacacacatgtataaacagtacgcaacacgcaagtaaggaaatgtacattttaacttaaact

SEQ ID NO: 6302 - DNA, 201 bp, Homo sapiens
tcagattttgcctgtgtcttagtttcagtcatgtttggtatatattgccaagtagctatattttatatccccaactagaatacaagtttttggagatcatrctctatgtcttactgactgcacaagacagtgcaacgcatataaaattgtcacctacaaatgaaaggattccagtgaggctaaatggtgattagctgtgta

SEQ ID NO: 6303 - DNA, 201 bp, Homo sapiens
ctctcctaaatgctgcaccttatgaagtttggcacagcctctcacaactccctatctgccatgtttaaaggagttttgcatttgtttgtttttgattctaygtatttaaaactaccagtattttcaacaagaagagcaaatctaagatgcagataaattacgttactttgaatattaactattatatagattgacaaatat

SEQ ID NO: 6304 - DNA, 201 bp, Homo sapiens
gctttacacgtattttatggaggagttacttttgctggcattttgttttgttttgtttcttttactaaatggtgagcaatgttagagataaatgtaactgyctacaaacactccagagcaaaatttggaaagaaagcttgagcaaataatactacatttgatgggatataagaaattaagagttcttcagatgacaagaaa

SEQ ID NO: 6305 - DNA, 201 bp, Homo sapiens
agacaaagtatgtttcccgaagtcacacagctcaagtatataagaccccaaggctcacagccacataccacactgcccctcaagcttatctgactccccarttttgcacagagctggtcctgtcttctgacctttacttaagtaatgctcatgtcctctccataacttattttaacagccagggtaagacccacattctcc

SEQ ID NO: 6306 - DNA, 201 bp, Homo sapiens
tccttacactacattcctcctcaagaagaaaataggtgctacttgggaggctgaggcaggagaatggcgtgaacccgggaggcggagcttgcagtgagccsagatcccgccactgcactccagcctgggcgacagagcgagactccgtctcaaaaaaaaaaaaaaaaaaaaaaaaaagaagaagaaaataggtaatatgat

SEQ ID NO: 6307 - DNA, 201 bp, Homo sapiens
aacgaccatcaacaaaaacaatgaggctaggcacagtggctgacccctataatctcagcactttgggaggctgaagcaggagtatcacttgagtccaggastttgagaccagcctggaaaacatagtgagatccccatctctacaaaaactaaaaaattggccgggcagggtggcatgcacctgtagtcccagttactcag

SEQ ID NO: 6308 - DNA, 201 bp, Homo sapiens
caaccaggggacaaaaaaaaatagcttcacatatgctcatttggtctttttgaacaaatgttgaataaccaaatcttttagacttttaaatcattcattaytcttgcagttcaaatgtggcaatcttaactatttagggtttcacaactggtaggtacttaataagtatatgcctatagaggataatgataactttactca

SEQ ID NO: 6309 - DNA, 201 bp, Homo sapiens
taatcagttgcttattgccaagggaaagactttttccccagaaaggcaatctgtgcacacgctaatttgaaagacagggtaggagctgcaagtgttttaayagcccattatcaaaaattatcccttggctataaaatccccagaccattggcttgagatcagctcaaagaaaaatgagattacagaatttaatctagtgaa

SEQ ID NO: 6310 - DNA, 201 bp, Homo sapiens
tcaaaaattatcccttggctataaaatccccagaccattggcttgagatcagctcaaagaaaaatgagattacagaatttaatctagtgaaggggagtgasagatgagttctaaaaagccttagatcacaaaaaaaaaaaaaaaaaaaaaaaaaaggcagaggacagaaacaacatcagcttagattaaaccttccacaca

SEQ ID NO: 6311 - DNA, 201 bp, Homo sapiens
accctccttttttctcacaaaaagtacagatagaaattacctaaagagataaaaggtcacttgagatttctgtttctcgtgacttgaaattaccatgcacracagtagacttctacatggcaaagcgctcacaaagatgtttctgtctcctgtgatgatctctgggggaagctatgtccctgccaccctgcctcatgctgt

SEQ ID NO: 6312 - DNA, 201 bp, Homo sapiens
taactgtaatgtactgtctgctgagtctgaagaaagtgaaaggagaactagtacatttataaaggaaggcaaggagtagaaaaatagagtggagagacacrtaactcaagcactctttatgtggtcatataaacacaacagacagtggtaaaatccagaaaacaaaatttaagtaacaattattgtaaaaccaaaagaatg

SEQ ID NO: 6313 - DNA, 201 bp, Homo sapiens
tattgttttaaaacatgctcttttttttgagaaataaaagtagcaaactttctcaggctgccagtttgccttattgatatcgttcagggtttcactattaygtgaattcaagtgaagcacttatttgacaaggggacatatcctccaaaaatgactgtaaattgaggtttgctgtaagtcgcatatatttctgtattaaca

SEQ ID NO: 6314 - DNA, 201 bp, Homo sapiens
acacaaacacacacccacacccctccattaatccctaaccaaatataaatagcatcgttagtcaattacttctgatggttaaaaccacaaattggttacartgatctgtcactttatatggccaaataataaaacttcaagcagaagagatgattactataagtacaatagaaaacatcattcactgttttaatttgtttt

SEQ ID NO: 6315 - DNA, 201 bp, Homo sapiens
gtaagtatacatacacacatgtgcacactcacacaaacacacacccacacccctccattaatccctaaccaaatataaatagcatcgttagtcaattactkctgatggttaaaaccacaaattggttacaatgatctgtcactttatatggccaaataataaaacttcaagcagaagagatgattactataagtacaatag

SEQ ID NO: 6316 - DNA, 201 bp, Homo sapiens
tactaagctggtatttctttaaagttcacgtaattgcactactggtaactttaggatttggaaggaaaaggatcacaatcgataagcaaatgcaatgacgrgcactgacaaagactcaacatttattagaaggcaattgctagagaatgtggctttaattgtgcatacatatttttattcattaagatgaataaccaataa

SEQ ID NO: 6317 - DNA, 201 bp, Homo sapiens
ttggaacatagagctagaaactctcctaatgaaaatgtttctttcaaaaccaaaagagctctattctgcaactatttttctttctactttaacttttactrtatgtagtttaaaagatattgttaatataaaaccaagaataaaacacacagcaatgaaaatttaagctttcatataggtaagtatattactttacccata

SEQ ID NO: 6318 - DNA, 201 bp, Homo sapiens
atttatctacatcccataatagcaatcgatttgcaaacagcaaggaaagcataaattactaggtagaaaccaacatggctttgtggagagcaaatggttgratcaatttaatttccatccatgacagatggacagactttgcaggtaaggaggaagagatcaatgtcgtatatctgaatttcctaccccatactattcctc

SEQ ID NO: 6319 - DNA, 201 bp, Homo sapiens
aagtattgatctataattttcttgggctagagcaaggtttttttgaaacaaaagatctggctacaaagccattgaagatggtttgaaggttaggcaaataytgaggcctgtcagtagcaatatgaaataaagcagatatattctcttaaaaatgcaatctaagtgtaattaaacgtgcatttaaaagcctgaaagtatgtt

SEQ ID NO: 6320 - DNA, 201 bp, Homo sapiens
tgagattgtttggggaggtggggggcatgtgtagctggttcggggtttttgtgtttggttttgtttttgttagtttattcttagagcactcttttactaamgtcaccaatataattcacattcttttaataatgaaaaactgcttgtgctagttttatctcatgagaaaaaacactgttcctaaatcaaaagcaaaatgtt

SEQ ID NO: 6321 - DNA, 201 bp, Homo sapiens
acatttgtctccaaacagtggtgagttttcctcttgtgattcttgcttccactgaacaagttcctccctctgtgatgccctcccttcaggcagctccagckcaatttgtgtagtagattcctactgatgctaatgactgggtgacctcactgcccattcagcttttcatctattctaacattactgtaactggccttgccc

SEQ ID NO: 6322 - DNA, 201 bp, Homo sapiens
acgggtctccagcttcctgtacaaacgtctgaatgcttaccctcataggagaaacgccatagatgggcaaaacatgatcacaatgacagtttaaaacaatycccccagaaactaaatggagggcggactggccaaaacagagacagaaatcatgaagaccacttcagaagacagattcatcaatacattcattccataaat

SEQ ID NO: 6323 - DNA, 201 bp, Homo sapiens
aagtgcaagcaagaggaagcagaatgtcacctgccaaggctatggcctgttggtgatatgaaaagattcccattttttcctgagagcagtgggaattgacwaaaggatctgaagtaggggaataaaatgctgttatttacattttataaagatgatttttacctactgcctgaaaaatagatttggtggggtctctcatga

SEQ ID NO: 6324 - DNA, 201 bp, Homo sapiens
aaaagattcccattttttcctgagagcagtgggaattgactaaaggatctgaagtaggggaataaaatgctgttatttacattttataaagatgatttttrcctactgcctgaaaaatagatttggtggggtctctcatgaggggagtctcagagacaaaattccgtctgaggggggggtctcacagtcaaaactctccag

SEQ ID NO: 6325 - DNA, 201 bp, Homo sapiens
agttgagtttcatatccttgcataaaatgacccttgccatctctattatttccctccatgtgcactgtgtccagccacatggcacacacagccattctcaratttgcctccccacctaacacagggttatgcttttgtctcagttcccaccaccaccctcttcagcccctcacttctttactagttaaaatctcaaggaga

SEQ ID NO: 6326 - DNA, 201 bp, Homo sapiens
tatgctcacgcctgtaaatcccagcacttttggaggctgaggcaggcagattacttgaggccaggagtttgagaccagcctggccaacgtggtgaaacccygtctctaccaaaaaatacaaaaaagtagccaggtgcggtggcacacacctgtaatcccagctacttgagaggctgagacatgagaatcacttggacctgg

SEQ ID NO: 6327 - DNA, 201 bp, Homo sapiens
acatgacatacaaatataaaaagaagacataaccatagaaatcaaatacattaaaacaattatgagagaataatacatacaacttattgactacaactttsaaaacttaaatgggcaagtattagtaaactaaaagtaaccaaaattgagcagagaagtgtaaaacctgagtggaccgattatcctagtgtagtggttgcc

SEQ ID NO: 6328 - DNA, 201 bp, Homo sapiens
cagaatacaggatatttgtgtttcttctcctacactgccaccatgtaaaaagacccatgagagaagtcttttgggcatacatttatccactctagaattayaccagaaaggataaactacttaagatcttaaacgttcatatgtatcactccctgctatacatgctatttgcactgttcactttagaaatgtgagctattt

SEQ ID NO: 6329 - DNA, 201 bp, Homo sapiens
cctcttggtagaagaaaccatatgtctaggggagtgagaaatgctcatgagtcactacacttacaaaatgaatccccaaaaccactgcacaatgtttccaraaaaaagaaagacgcttctagtaatgtcactcattattaaatgtaagtcatgtctctgcaaagaatattcaagtagtcatcaaacactgagaatgtttac

SEQ ID NO: 6330 - DNA, 201 bp, Homo sapiens
ggataattatactaacctctgttattccctagaacttgtttgctgaagagtgtatttaggcttttgggtcacatgagaaagagtaatgattagggtcggaytgtatctcttactttgttgtgtactaatgtgtaatgtcaagcatttaatacaaagtaacaaccaaagaactggaagtgtttaaatagtaagagcccaaaa

SEQ ID NO: 6331 - DNA, 201 bp, Homo sapiens
caacactgttcaactttcttttcacagagcaggaatcttttatggcattaagggtatgtatgtcacaccatgaaaaacacaatgacattgcaaacatagasaaaggaatctagtaagggcattgggaggaaaaagggggtggggtatttaagaaaatgttttttaaacttttttttttgcaaaagaaaatgcataataata

SEQ ID NO: 6332 - DNA, 201 bp, Homo sapiens
tatcttatattgcttgatgaatttttcattgttatttacttgtatccactgcgtatgctttttttaaaaaggtgactaatggcttacctcctaaggaacaygcttttaccaaaaacacaaaaagatgtagaggctggaagaatatgctacttgggaagagaatgaaaaaaaaaagtagaaatgaaagaaagaagaggtaaa

SEQ ID NO: 6333 - DNA, 201 bp, Homo sapiens
ggatgtattgcttacctctcccaaaaaaaactttttcagaagatataagaaattaagaatgtatagaatagaaaaaacataaattcaattttatagtcacractttgttctctgaacgtccagagcactgtttctgaaattctctgtattgttcttacaatgcagatcccttggtctacacacagacctaggggatcagga

SEQ ID NO: 6334 - DNA, 201 bp, Homo sapiens
cctgtgataaagggcccttttgtcatagttctttgccttaagcaggtgaagaaatagcccattgtcaatgaaagaataccatgagattttttttaaggctyagaacagtctctttctttctctctaaaacattattaattgataatataataaaacagtatatttttacaattaaatatatagcatgccagaaacaagacg

SEQ ID NO: 6335 - DNA, 201 bp, Homo sapiens
agccactcctggatattcacagcacacagtagcatattaaatattctgcatattcatttatgaatgaaaatagttgaaatttttgttacaaaaaaactttscaaatttagctgaccactcttttgtatgtagcatatcttttcacattcctaaactcacattaggaaatgctggggagcctggtgtggtgcctcacacctg

SEQ ID NO: 6336 - DNA, 201 bp, Homo sapiens
ggaaaagtctcctcccaagaggcagagctgtaggcttttggtgcccccgaaattgttcactacagtacaacataatgtgacactcaccacaattagccacrgggaaacagtctttttttcacctctgatgtcatataatagatttgagatcacatcagtgagcaatgttatctacaagtatttttggaagtcttgttaaaa

SEQ ID NO: 6337 - DNA, 201 bp, Homo sapiens
tataatagatttgagatcacatcagtgagcaatgttatctacaagtatttttggaagtcttgttaaaagagccacgatactgcaagcctaacttgaagtgyaaatggtgaatgcttctctatatctcatcttgaccactactttactgaagagtgaaaaatgacagatgcaaattatttttcagaaagtagacatttccac

SEQ ID NO: 6338 - DNA, 201 bp, Homo sapiens
ataagtcaacaatgaagaccatgatacctattcttgaacagttggattcctaagtatggctcttgacttgcttaatcctctctttaaggacattttatttkccctatgtagcctttgtggactgcacaataaacacatccaatttcaaggtctcctacataagcagcatagagcaagagaaaacaaaaaatgagaaagact

SEQ ID NO: 6339 - DNA, 201 bp, Homo sapiens
ttaccaacctttgctgcctccagaaagtggggcactatatatttttaaatatttgaaaatcataattgatgtaacaaataagcgtcccatccctccctccstctctccttctctccccccacccttccctttgaaaaatgagatcatattaactgcaatgcaagagcttagtttgccatatcggaacacagatgccaagct

SEQ ID NO: 6340 - DNA, 201 bp, Homo sapiens
ataacacttaaatattgtgacttagagacatgaactaagtcttcggttaggctcctcagaggccacattatttattctataaagaaaatggacttcctgartatcctgattattcatcatgggtaattttaagtatttaacttgatgtcaggaaaattgaccagagttttccaatatggaaacctatgggagagttacatc

SEQ ID NO: 6341 - DNA, 201 bp, Homo sapiens
aaaggcagtcatcttgttcaacaagtccactcagcacacacgactgtgtggatccagcacactgcgcataggcgccacacaggccctctcgagtcggagtyggagaggccagtcaatggttggtagtaataaggagcagcagcatttcaaagaaggttttcatcttcaaagcacgtcatggtataggtgaattcctcttta

SEQ ID NO: 6342 - DNA, 201 bp, Homo sapiens
ggctgagaaagaatgagtggtgcatgcctctgattgtctctgattcacatggaaatttcaagatcatggggattttcttgctctaagaaagaaaaaaaaaaggtttgaattgaagatatctgtataattggtgaggtgcatgctaattccaccaattcgatagctttatccattctacttcaccaatttgtacattccagc

SEQ ID NO: 6343 - DNA, 201 bp, Homo sapiens
gtaacctctgaaggaatggtatgaacaagaaaaatggtcagaataaaattgtgttgtatgtttcacatacaacacatgcaaaaaaaaacaaacaaacaaamaaaaaagatactcaagatcatcctcatatcttaaaagtcacttctagtgccaatttctgaaacccatgtttcttgatatttaatttaattagcagaagta

SEQ ID NO: 6344 - DNA, 201 bp, Homo sapiens
atggccctcaggagaacatcttgaaaggtatgttttatgttttcttgtgtttcttcatttctccagaccctcaatgaaacagatttttaaggggtgaaggytctttttgcggtggaaaacagatgcttaaaaggattaacactccaatattcatactttggattaggagaattttattttattgctaatattaattaccta

SEQ ID NO: 6345 - DNA, 201 bp, Homo sapiens
tcataaacttaaaatttatgataaactattttaaacatttctgataatgttgtggccaaagaaataggctattaagaatctttactttcccttttagactmtcgagcttctgcacacactaagtaatagtgattcaggagttttagaaagatagtttttgctcatttttctatcgatctatgaggctctaaaaatactagc

SEQ ID NO: 6346 - DNA, 201 bp, Homo sapiens
tctattatctgccttaaaagtgctagtgttacagacatttatgacttttttcaaaattctttcaatgttttaaaaataaccacaagtcataaactaaaaawgatggataaagctatcatgccaccgacaagggctatttgtattatcaaatatgaactctgttgtgtccatttttgaaaactacaacaaagcaaagcaacc

SEQ ID NO: 6347 - DNA, 201 bp, Homo sapiens
gatgtctattatctgccttaaaagtgctagtgttacagacatttatgacttttttcaaaattctttcaatgttttaaaaataaccacaagtcataaactawaaaagatggataaagctatcatgccaccgacaagggctatttgtattatcaaatatgaactctgttgtgtccatttttgaaaactacaacaaagcaaagc

SEQ ID NO: 6348 - DNA, 201 bp, Homo sapiens
gactctctcaaggtgcaagcaactcctttgcacatgtgtgtgcacacacacacagttcacaaaacagttcacaaaattttaaggtcaaaacaacaaaacaycttcagggttgtaacctaataaggctgtgaaaactttcccaaagagtcagctttggttcctaagggaatgcttaagccttggggttgcgggtggatggag

SEQ ID NO: 6349 - DNA, 201 bp, Homo sapiens
cttgaaaggggtgaagggagagaagagagaatgaaacaataaattcagtttctcttttgcataaagcactccctctaatgttttaaaatagcttatgtttrtattattcttggattgtccttcagctttctttttcattcaattatattgatctttcatatctgacagtacaggctatattctgactatcactttaagaaa

SEQ ID NO: 6350 - DNA, 201 bp, Homo sapiens
cttggctaaacactctaattttattggcaaaatattaacacacaagtattagcatttcttgtaaaatgcacaataaacagttctccttattaattgctgawaacctgttgggaaaactgtgctgccctgggttgtacatgggtgcattcggactggttgcttacttcaatataacacaaaggctgcagattacgtcttgtg

SEQ ID NO: 6351 - DNA, 201 bp, Homo sapiens
gtagcactgtggaagaaaacctaactttatggcatttacttattgaaaaactcaccaaattatgtcattgcagaacagctaagggtagacagggaagatawagcagttgatgtggaaaggaatgtagaccgcttaagcatgcttcaggttgtagcaacagcacaaaggcaaaacttccagacgatagccatgctgaggact

SEQ ID NO: 6352 - DNA, 201 bp, Homo sapiens
gtactgtatttcttctaggtagcactgtggaagaaaacctaactttatggcatttacttattgaaaaactcaccaaattatgtcattgcagaacagctaarggtagacagggaagatatagcagttgatgtggaaaggaatgtagaccgcttaagcatgcttcaggttgtagcaacagcacaaaggcaaaacttccagacg

SEQ ID NO: 6353 - DNA, 201 bp, Homo sapiens
ccttccaattcatggttccctacattggcttgcaacagaagcctgagcatttcctgctcctccccatcagtaatgataccacatttgagctgctctgcacktgaggagtttggagtgatagatggcgggttgggggttgggggtgttggaggcagtaaatgataagattccagccttactctcatcagttcaactttcgcc

SEQ ID NO: 6354 - DNA, 201 bp, Homo sapiens
tagtaaagaccgaacaaataagaatcatagaaccaaaatggaacacagctttttttgttctctacagaatacccatcgtgaggaaaaacatttacaggagrccacaaaggtctctgcttgcactgattagttctatagctctccagcagttttcttattctaaccctctttaacttacttttagagagagccacagctttt

SEQ ID NO: 6355 - DNA, 201 bp, Homo sapiens
gattgtaagtgctgcaattgctggtctattatcttctttcttcagtttctttcctttctgcctttgtgttgttttgtccagtcttcctcttttcctttttwtttatttaaaaaaaaaatttcttaaactattgttgtgtttctttttccctcagttgcttgtttctgcttgaaggaaaggttctccaattatgttcaaacc

SEQ ID NO: 6356 - DNA, 201 bp, Homo sapiens
tactgataactaaaggctacagagatttcatatattttttttaacttttagaaatcagagtgcttataaaatggctggctcatggctctgtcacccagcayctctgacgccgcctcctagccttcgttggtgagataaccaggaatagtgattccatgcgtaaacaacaagaatactaaaccaataaaactagcttatcat

SEQ ID NO: 6357 - DNA, 201 bp, Homo sapiens
ctcgatgaaggatgcataaaaagccatacttcttaaaaaaaaaaaaaagaaaaaaaaagacttccttctgcataaagagatatatttgccacatcagtccstgtagcacagttttcaaaaccattctgtcaaaaatacagtaatacaagactggctttagtgtcactagcttacactgcttttcatgtatttaggccacct

SEQ ID NO: 6358 - DNA, 201 bp, Homo sapiens
ctcattattattatcaatactaacaatgttccttttaatagcacttgtcattgacaatgcaatccaaagataaggtaataaagtaaaacaagagctttggrgtcaagacagtcctagtataaaatcttgagtaggccacttatgaattgttaatagtaagctccttaacttatctaaactcagtttaatcatctgtaaatt

SEQ ID NO: 6359 - DNA, 201 bp, Homo sapiens
atggtgttcattatatttatctttcaaatgtatttccaaaaaaaattccactaataaaaagtgaactcttaatgttgtttgccttctaacattaaaattgkgttattgtgtacctgactcattattattatcaatactaacaatgttccttttaatagcacttgtcattgacaatgcaatccaaagataaggtaataaagt

SEQ ID NO: 6360 - DNA, 201 bp, Homo sapiens
tctcttcttcacattcatccaccaaaagcatttgtagctctctttttttctggttcaaaactttggtatttgaatatttgccatttcatccctgtgatacwaactgcaggaatataaggaattgttggtgttctatttggtccccaaagagaactttaaaacttcttccagtatggttactaagctgtctgcactgccatt

SEQ ID NO: 6361 - DNA, 201 bp, Homo sapiens
tcaattacagcagtgtagcagtgtagttgaagaggcattcctcttcagggtggaagcatccttgaagtttgctttccaatgccagggtagtacctagaaaytcacttagagttctttacttttgatattttccataataagaagctaaacaaagaaacttaaaaattgggcttgaacatcaaattcaaaccatctcttctt

SEQ ID NO: 6362 - DNA, 201 bp, Homo sapiens
ggaacaaacattcactaattaggaggcaatgtggggaattctgatgaaagccttcaccaacaatttattgttttcctttccattttgaagaagatcgtgtygtgatttttcaattacagcagtgtagcagtgtagttgaagaggcattcctcttcagggtggaagcatccttgaagtttgctttccaatgccagggtagta

SEQ ID NO: 6363 - DNA, 201 bp, Homo sapiens
cctcccaaagtgctgggattacaggcgtgagcccctgcacccagagaaatcttttctcataaattgagaagaaaaaatacttgatcggattgtgcccctcmccatatgggttgagaaaatatggttgccatagctctatttataaacttttgctccgtccctaagggggttaggccctacagacaagaaggaggcttctcc

SEQ ID NO: 6364 - DNA, 201 bp, Homo sapiens
caattaccacgattctcgaacaatgcatattattttggttcttacaaatatggagatatttggaattattttaccacacaagagacattgtgcactaaatytgtaaatccaaatacataatctaactatttttcattacaaaatttgtagtgctgtatatacagggtggggggaaggatgcctaatgctgtcagtagaata

SEQ ID NO: 6365 - DNA, 201 bp, Homo sapiens
acctcaattaccaaaagttttaagattctctgtaaacataactagtgagtctttatttttcagatgattctgaatgcaaaatgagcacattatctgcacaytgaaagaatttatgtgttttttcccacatatggaaatatgcatgagtattaaaaaacaaattacaaatatccactctctagaagtttgaaaagtctaaag

SEQ ID NO: 6366 - DNA, 201 bp, Homo sapiens
aatcgacagtgaatattgcacaatcaaaagtgatgatagaaatattaaaattaagtaaatctaggtctacgtaagatatacttttgatattatctatcttragcattttgtaatagtaaacattagttctattttcagtgcgataccactaagttcataaacaaagtccctctacctcattaattaataaggttaatacaa

SEQ ID NO: 6367 - DNA, 201 bp, Homo sapiens
acgcctaattcatctttaaaagctcttgaatttcgtctgttacaaccttcctgaaccttattgccccatctaatgagaccaccctctggggcccacatggycttgctcacactttagtgcagggcccgaccagtgcattatagttggttgtttatacattactgctctccaagattgtgacctcctgtatcccaacttacc

SEQ ID NO: 6368 - DNA, 201 bp, Homo sapiens
cccgcaatgactgggactcgtacagcaatgctggggccaagaaagcgctctcaacaagcaccccaggtaactcccgcacattgttctcagccagtgtacawgggacttggctgctgatgcttgctcacagacaccaaactggaaagcaaaaggcagtatgtgactatagagtcctgaaaacacaaacaaacaaaaatgcag

SEQ ID NO: 6369 - DNA, 201 bp, Homo sapiens
agaacatgtgttccaaattagtgtggtgtttcttagctgtgtcagaaagtcagaggtgtccctgaggctgcagcgctttagcaaattttggaaataacttrggggaaaaaaaggtaaattacacagttaatctggtcctcactctacgaatgctacaaaacaatgacgaaaaggttcacggctagaccattctcaccaaga

SEQ ID NO: 6370 - DNA, 201 bp, Homo sapiens
gccactttccaggcctggagtatgatagctacataaaaatgataaatcataactttttgctatagcatcagctatttttaccttgagttcctctgacaaaygtctctcagcattgatattacattccagtttaatttctcaagcgattctaacattttttaggaattcctacttatgtataatacacccactgaccagagc

SEQ ID NO: 6371 - DNA, 201 bp, Homo sapiens
gaaggtttcctgaggatgagtgatgatgcctattaaccatgtacctatgggaacagggacaggtgagaatcagccaagtggggtagcctgggagaagcacmggaagcagatggctgccaccttcatgcatctctgcaggcagcatagcctttgtaacggacaggcattaaccaagacgtggcagagtgaaaaagaaatcat

SEQ ID NO: 6372 - DNA, 201 bp, Homo sapiens
gaatagtttccatttctttacctgtcttaatcagcccttcaaaagctcacacgaaattgtactctggggctttgcaacaaaattctagagcccctgagatkcactctaagcatacgtggtctacttaaactcctcctctctcccatctgcctcaagttgagtataaaattccaaagggattgcagatttttatggaagttt

SEQ ID NO: 6373 - DNA, 201 bp, Homo sapiens
ggattatatgttagattatattaagaaattaatgttatatttgttaaattgataatagtactgtgattatgtaaaaaaaaaaagttcattgttcgaaataytcagatctatttacatgcaaaatgacagatatctgggatttgctttaaaatacttttaaaaactgggagatagtaaatgcaataagactggcaaagtgtt

SEQ ID NO: 6374 - DNA, 201 bp, Homo sapiens
tcagttcctggcacttgcaaactgcttaaagtttggctccctgcaacgctccatagagaggagcaggcggatctaattgaatcacagtttgtggttctgcwgtactccaaccaacaaatgtagacagaccataatcagtcacatacataattgtgggttctaaaatatcattttgtctaaaaaaaactccaacgaaacatg

SEQ ID NO: 6375 - DNA, 201 bp, Homo sapiens
gaagaagcagaggctgttggcccgggcggagaagaaagcgccggcaaaggggacctccccactaagaacacctgtccttcaagcaggagttaacaccatcrccaccttggtgtagaataagaaagctcagttggtggtgattgcatacaacatggatcccatcgagctggttgtgttcctgcctgccctgtgtcgtaaaat

SEQ ID NO: 6376 - DNA, 201 bp, Homo sapiens; identical to SEQ ID NO: 6375

SEQ ID NO: 6377 - DNA, 201 bp, Homo sapiens
gccctgcacctactgaggaaatccattgcatcagatggcattcagggtccttaagggtcatttcctggattccaggctcaggttacctgacactaattcawgcacctcaagctccaggtaaactggtaatctgagcctttgcccaagctaatttccaggtaaatctgtccctttattcattaagtttagaaatctgcattc

SEQ ID NO: 6378 - DNA, 201 bp, Homo sapiens
cacttgggaggctgagctgggaggatggcttaagccctgggaactcaaggctacagtgagccatgatcacaccactgcactccagcctgggcaacagagtragatcctgtctcaaaaaaaaaaaaaaaaaaaaagaaagaaagaaaagaaaaagaaatccgtattccttgcagaccagctcaaacaccccttctttcctac

SEQ ID NO: 6379 - DNA, 201 bp, Homo sapiens
tgtcttgagccacacatacactaacactaacaatagctgatgaacttaaagaaaagcagaaagaaaaatctcataacgttttaagagagtttatgaatttstgttgagctgcattcaaagcgatcctgggtcacatgcagcctgcaggccatgggttgaacaagcttgagctaaataaaagctcagggagggtagttgcta

SEQ ID NO: 6380 - DNA, 201 bp, Homo sapiens
ctcaaattttgtcccttgagcaaacaggattccccctgccttccaaaataatctaaaacaatattaaaagaaataaggtcacatcaaaataaaacaaatastaaaatgtccctcgtccaattacgccttccagtccccacacttattatgtttgcctgaacaattaacagcttttaagatatttctggctgacccagaagg

SEQ ID NO: 6381 - DNA, 201 bp, Homo sapiens
aaaacaatattaaaagaaataaggtcacatcaaaataaaacaaatagtaaaatgtccctcgtccaattacgccttccagtccccacacttattatgtttgmctgaacaattaacagcttttaagatatttctggctgacccagaaggccatattcaatacacaaaaaggtggaaaacaagtgataggctacacagaaaatt

SEQ ID NO: 6382 - DNA, 201 bp, Homo sapiens
attccacaaacttacaaaaagtaaaactccaatttgctgcacactgagtactatgctgaatccactcaaatgaagtgatatgtaggcactgtattaggtaytgtaagtagagatgaattaaagtatatgggaggatgtgcacaggttacatacaaatactatgccattttatacaaggaacttgagcattatggtgtttgg

SEQ ID NO: 6383 - DNA, 201 bp, Homo sapiens
tgtaacctcgttttttaaatacatttgctttggatatccaagaatcttcttatctcaagaatgctataaaaaaatatataaatcccattcttaagaagccrgttattgtttggtactaggttcatccttacactacattcctcctcaagaagaaaataggtgctacttgggaggctgaggcaggagaatggcgtgaacccg

SEQ ID NO: 6384 - DNA, 201 bp, Homo sapiens
cactaacagaataattaattgggaaggtatgtactatacattttaaagagcatttttttttttctaaaatctaaatgatgacaatttggctttgtaacacmggctgaaaatatttattcattgagatacggatcatctcccttttaacaagctaataaacaatatttggataacttttttttggctaaagtctattaggta

SEQ ID NO: 6385 - DNA, 201 bp, Homo sapiens
caaagcatggatgaattttttaaaaaccaatgaattggaaaacattgttcttgaatatctctccatagacttgaaatatatcatactatggagaaaggcasacctactttggattttcatgaattagttattttccctgaacctaagtaatatgaatactggcatgaaaatttacaacggtactgtaatcatggttttttt

SEQ ID NO: 6386 - DNA, 201 bp, Homo sapiens
caacctctcagtattttgaagtaattcatgtcttattatggtgttaatttaaatcaattttacataatttatttttatatacttcaacatcattttcaagyatccaagtttttatttttaactcattaataattcatttactcttcctttaatcagatgactcatacaactttgcattttctatcttttgaagacatatag

SEQ ID NO: 6387 - DNA, 201 bp, Homo sapiens
acagggtctcactgtcatccaggcaggagtgcagtggcgcaatctcggctcactgcagcctccgcctcccaggtttaagcaattttcccacctcagcctcycgagtagctgggattacaggagcacaccaccacgcccggctaattttttgcatgtttagtagagataaggtttcaccacgttggccaggctggtctcgaa

SEQ ID NO: 6388 - DNA, 201 bp, Homo sapiens
gcagcctccgcctcccaggtttaagcaattttcccacctcagcctcccgagtagctgggattacaggagcacaccaccacgcccggctaattttttgcatktttagtagagataaggtttcaccacgttggccaggctggtctcgaactcctgacctcaggtcatctacccgcctcagcctcccaaagcctcccagaaccg

SEQ ID NO: 6389 - DNA, 201 bp, Homo sapiens
ctccgcctcccaggtttaagcaattttcccacctcagcctcccgagtagctgggattacaggagcacaccaccacgcccggctaattttttgcatgtttaktagagataaggtttcaccacgttggccaggctggtctcgaactcctgacctcaggtcatctacccgcctcagcctcccaaagcctcccagaaccgcatcc

SEQ ID NO: 6390 - DNA, 201 bp, Homo sapiens
tcccaggtttaagcaattttcccacctcagcctcccgagtagctgggattacaggagcacaccaccacgcccggctaattttttgcatgtttagtagagawaaggtttcaccacgttggccaggctggtctcgaactcctgacctcaggtcatctacccgcctcagcctcccaaagcctcccagaaccgcatccggccacg

SEQ ID NO: 6391 - DNA, 201 bp, Homo sapiens
taaacatttaattgttcatttaatttatttgggctatattaattccacataaattcaaattgcttgcaaattgaggtatgcttgattttgaaaatattctmatgaaaaagcttcctttctagccaggctttaccactacgtaagaaaggatctgactgtttggctttttcagtccatctgagatgtctctttgtaactgta

SEQ ID NO: 6392 - DNA, 201 bp, Homo sapiens
actttttaagaaaaccaaggcaaagaacagaaagtttaactcgtggtacctcctaaacaattgatgtcattactgctcttcaaaagatctcttacagacakgtagtttagccataaagatagtacgttgtgttgaaaatgcaaaatcacacaaatattgccttaaatattttatttccaaatgtaagtaatagttaaacta

SEQ ID NO: 6393 - DNA, 201 bp, Homo sapiens
tattttttaaagacatatttaaataatagcattgatcataacacaataatcactataccctcatcttccattcctacaacaaagccccttaacaaagacaygtgtacgcattatagctaccagttttatatggaactgcccactaatagctaaattggcatctttatgaatttaaggttctctataatgttgattatggct

SEQ ID NO: 6394 - DNA, 201 bp, Homo sapiens
ggttgataggaaatgatccattttcatgtatctagatttaggacgatgcatgtggaattgtagagccacttaagatcacactcatccgtgctggactaackgaagagggaagtcactatcctctcttaatagaccagacagtcctcacgtcattgctacaattaaattccagagaattttttggattctatttaatgaata

SEQ ID NO: 6395 - DNA, 201 bp, Homo sapiens
atcacacttctgaaattcctaaaaggctacgtcactgaaaactatcaggtctgagaactgaaggtggtaaatatgacaatctaaaacttccaatgctctcyttagagccaatttctttcatctatctcatcctattgatttactgtgactccccaaattattctccaagctttagccattcttagccctcttctcatccat

SEQ ID NO: 6396 - DNA, 201 bp, Homo sapiens
tatctcatcctattgatttactgtgactccccaaattattctccaagctttagccattcttagccctcttctcatccatcttcagaagatcatcaaaatcmctaacacccaaaaagtgccgaaggccagcacacacagggaaaagcttggccacctaagatataccattgcccactgagcacaaaagctcttcattatgtc

SEQ ID NO: 6397 - DNA, 201 bp, Homo sapiens
gagagacagtcttgtgaagagtttaatacgtaaggttacattaaaaattcactgcattaaaagcagttgatgctttccctaccatcacataaaaagtataygtgcacaaacagacagaagggtgcatgcgctgaattttatatagtctaggaaacattttcacattggttgtttcagtcaaatacaaagaagttacagaac

SEQ ID NO: 6398 - DNA, 201 bp, Homo sapiens
cgctgaattttatatagtctaggaaacattttcacattggttgtttcagtcaaatacaaagaagttacagaacagcatcgagtacctaagagagaccaaargcatttccttctgtaaagccctgcagctgagggcttacatccgcctggtccaatcagttcatttccaaacaaaggtaggaaatggctgcatcctagtatt

SEQ ID NO: 6399 - DNA, 201 bp, Homo sapiens
tgactatattgccaatttctcaaataatacactggtcaagttccaaaatttcattaaatatataaattgcatacataaaagttcctgtgtagcctatggaracattttaaattttcttcagcaaaattgggcctaaagtttggaaaaattcctagagagtgaaattaatctctctgtccccatctctccctctctccctct

SEQ ID NO: 6400 - DNA, 201 bp, Homo sapiens
atgatcaacaaagcaattattttatatcagtcaaagacattcaaatgtaccctggctccataggaatgctttaaagagttcaggtctagggttcaattaamccaagatggagagaaaagaaagtttggaaagaaaaacaaatattgaaatggttgtgatttgaaatgtactttcacacacaggctaatgaatatatatgta

SEQ ID NO: 6401 - DNA, 201 bp, Homo sapiens
aaatttgtagaggaaatgataggtcagaatggtttttaaatgaccttatagtagaaaacaaagttaaaatatataccatataccagtgcagtcagatataytggagtcactaatacattctgaatctgctgattaaatgagagacattcaaaatgaatgaaacttacccacatactttctcatccatgtaagcaggaaaga

SEQ ID NO: 6402 - DNA, 201 bp, Homo sapiens
aaatgaccttatagtagaaaacaaagttaaaatatataccatataccagtgcagtcagatatattggagtcactaatacattctgaatctgctgattaaaygagagacattcaaaatgaatgaaacttacccacatactttctcatccatgtaagcaggaaagaattacatttcttctgagctaatgggaatgagtatagt

SEQ ID NO: 6403 - DNA, 201 bp, Homo sapiens
ttttaaaatctacagtagatatctgccctgtttgtttaggtgttgtctacacagtatctactaattttttctttttttctttttttttttttttgagacarggtctctccctgtcacccaggctggagtacaacggcataatcaaagctcactgtaactctgaactcctggactcaagcaatcctcctgcctcagtctcct

SEQ ID NO: 6404 - DNA, 201 bp, Homo sapiens
aatagaatataagccttcactgtggaaagagaccctctttgcccgagaagtaagggaacaaagagaatggcataggaagagaatcagagaaacattcccarttacatcatttgaacacctgaatcaaactgtacctgcagataaactggacttttaaattacatcagagaataatctccctttctcacttcagtctgtata

SEQ ID NO: 6405 - DNA, 201 bp, Homo sapiens
cattggctactacatccccacagtggcctcactactacctcaatttgattttgtgaaggagtgctgaagcactatcaaagaactttggtgttcccttgctwatgtcatagttacctagagaaaagagagtatgccttaggaaatattccagtttaaagcaacattaaacataccaaattcatcaccgggattacagtatat

SEQ ID NO: 6406 - DNA, 201 bp, Homo sapiens
atacaaagaactttacggtgtttttccttgcctttgggtgtttgttttacaagagaggaactccaggtgcaatcactgaatgaggaattagaacctccctscaagctttcatctgattgcataccaacacataacgaaggacatgatatatttacagtagctaaagagttaatctttagcaactctgcttaaaaatcctaa

SEQ ID NO: 6407 - DNA, 201 bp, Homo sapiens
tgccttaaaaaccttgaaatatttttaatattcctcattacttctatggcactttgcatttatttatatgaattcattttaaaaactcactttaaagagaytaaatctttaaaatatgacatttaaaaatactgtagattttctatatcattatatttatagtttttcatcctttcttttttctgtcagtaaagtaataaa

SEQ ID NO: 6408 - DNA, 201 bp, Homo sapiens
catttatttatatgaattcattttaaaaactcactttaaagagactaaatctttaaaatatgacatttaaaaatactgtagattttctatatcattatatktatagtttttcatcctttcttttttctgtcagtaaagtaataaagttttaactgctgagaaataatgggcagcaaggtaaagaagtgtcatgatttttaa

SEQ ID NO: 6409 - DNA, 201 bp, Homo sapiens
cttgtattccagctacactggataacttcttgtacattttcctgccctttgacttttgctcatgctgttcccctggtctaaatgcctccccagcacttgamaaaacccgtcttttaaagtcagttaaaaacataatttctcaggccagtcatggtagctcatgcccgtaatcccagcactttgggaggctgaggcaagcag

SEQ ID NO: 6410 - DNA, 201 bp, Homo sapiens
tgaatgcctttggaaaacattgaattcaactctgtcctgctccagaatccacacactatgctagcatagtattactgaagcgcaaaacaccatgctagcayagtattagtgaaatacaaaacactgtactcaaggcacctagtttaaatccaccacctattagctgtgtgatcttgagaagtcccttaattctccctcatg

SEQ ID NO: 6411 - DNA, 201 bp, Homo sapiens
gtgccagctatggtttccttgtcattgaatttattaatataagtaggcagaattatttgttatcatgctaaagaaaaaatgagatttttttttaacggacmaggttttcttaaagcatcatatcagtatctcagtatctcctataaatagattttgtttaaataatacaatttactaaactgtctgagcagtgtggacttc

SEQ ID NO: 6412 - DNA, 201 bp, Homo sapiens
aaaaggagccacaatttatgctggcttataacggctagggttttctgagatgccttctcctttcgtaaattctgttactgttgacaatcctaacttactakagacagaaccgacagcggagaaagaaaagatgttcatacgcgtcaagagtcactggtaaggcagctgtttgttttttgtttatttgtttgtttgtttttt

SEQ ID NO: 6413 - DNA, 201 bp, Homo sapiens
tcattttcaaagtgctactaatcaacagagagggcaatgaatgaattcacccatatacatctgtcaggctattgagcgataaagcatggtattgagacatrtgtgttcttaccatctgcacacattacagcaatgcactgcacacatatatgtctgaacctaatgttacacgtgaaaaagaaaagcattcatgccaaccct

SEQ ID NO: 6414 - DNA, 201 bp, Homo sapiens
aacctaaagcacagcaccattttaaaacagcaaatcaccagcattcctgggatcacatttctctagagcaactatccaacatgaggcacaagaactaagtsgaactgggctaaaattgacaaaattaaagacaaaagaattatctcttttaaaaattggggcctactgtgctctgacagcatgctaaaggacaaccatcgt

SEQ ID NO: 6415 - DNA, 201 bp, Homo sapiens
cttttctatatcaagcagaaatcaggccacaaaaaaatacttctgtaaaaagcttaggaaagaataatttttcaattcaggaaatttcttcatggtgctaygaagaacttttcttgtactgaactgctatttgtgatccacctgttaaaaaaagctcaaaacacatttcaaaaacaaatagaatgcttaaactttcttaaa

SEQ ID NO: 6416 - DNA, 201 bp, Homo sapiens
ttattttccctatgtagcctttgtggactgcacaataaacacatccaatttcaaggtctcctacataagcagcatagagcaagagaaaacaaaaaatgagraagactgcttagtttaaaagatttgcttggaaatcactaagattttgtatatcaaaattaataaaactgaaagcagtaactcataaattaaagataaaac

SEQ ID NO: 6417 - DNA, 201 bp, Homo sapiens
ttgttacatgataactataagtcatatcctaaaatgttgatgctttaccatcaggaataaagaaatatgcaagcatctctgagaggctatgaaaggcaacyagaatttaacaaccatgtatacgctcccactttaagtgaacatcaactttaaatcataagtgtaagcaaagcttttcaaatacattagaaagacatcata

SEQ ID NO: 6418 - DNA, 201 bp, Homo sapiens
acctcctgtgcaaagtgaggggtgcagttcagtggccgtagggaaacaagcaccgaaactagttcctccaaggacctccatggacacaaccaaccagagckactgaagtcaaacacggtgatcccaaatcacagtttcgtaagaagtaaatgttgtaaccattctccacttggcttccagttgttcttagcaaaagtgaag

SEQ ID NO: 6419 - DNA, 201 bp, Homo sapiens
aaaattgagttatttattcagagagccactaataaaattatttgattccttcccttcaaatatacctagattgatcaataaatttagtctctggtaaatcygagacaaaaaggcttctaaaaccatacaatcattctaatttaaatgggttttaaaactacacacaactagctaacttcatgtgcctacacaaagagtttt

SEQ ID NO: 6420 - DNA, 201 bp, Homo sapiens
aagttggcactctgccacccggaagagagccctcgctggaacttgactatgctggcactctgctcctgggcttccagcctccagaactgggagaaataagytttagtgtctgtaagtcacacagtttatgttattttgttatagtagcctgaactaagacattttctgtgctctacaaaaatggaaaaggcagaaggggga

SEQ ID NO: 6421 - DNA, 201 bp, Homo sapiens
ctgtcagcaaacaaaagaaagtcacttctacagccagaccatgtcaaacagaagacgtagctactgcagacggacgccttgaatccactggtgtgtaaagkaagggcttgggcctttttgtcagctattaccattaaagaataagaggaaacagtgacattattacacaatagaaaggtcaaacagcttgcagccattcca

SEQ ID NO: 6422 - DNA, 201 bp, Homo sapiens
tgtcagcaaacaaaagaaagtcacttctacagccagaccatgtcaaacagaagacgtagctactgcagacggacgccttgaatccactggtgtgtaaagtragggcttgggcctttttgtcagctattaccattaaagaataagaggaaacagtgacattattacacaatagaaaggtcaaacagcttgcagccattccat

SEQ ID NO: 6423 - DNA, 201 bp, Homo sapiens
gtcagcaaacaaaagaaagtcacttctacagccagaccatgtcaaacagaagacgtagctactgcagacggacgccttgaatccactggtgtgtaaagtamgggcttgggcctttttgtcagctattaccattaaagaataagaggaaacagtgacattattacacaatagaaaggtcaaacagcttgcagccattccatg

SEQ ID NO: 6424 - DNA, 201 bp, Homo sapiens
gctatcatcataaacagaatatgtgtatctaagtgttttactataaacaatatagttatgcatgtaatcatctgctttcccattttagaacaattaaattktgaaggttttttaaaaatgtgtggctttcaattcagcctcaaggactttccacctcacttgttagccatttcttccaattttctgaataatataacaacc

SEQ ID NO: 6425 - DNA, 201 bp, Homo sapiens
ttctgtgcagccctttgggtagaactgctaatccttcttattaattaacgagataacggtggttaactgaaaagcaatattaacgctaactatctaggaamctttaaccaaaattattttaggcttttggttgattttcccagtgtacaaaattgtgcactgagaatttcgtaacagtgtggtgcagaatcgagaaattcc

SEQ ID NO: 6426 - DNA, 201 bp, Homo sapiens
aagcaatattaacgctaactatctaggaacctttaaccaaaattattttaggcttttggttgattttcccagtgtacaaaattgtgcactgagaatttcgwaacagtgtggtgcagaatcgagaaattccagaatgactgattttacctcagacctgaacgcataggtctcctctttaaagttttctctctctctttttaa

SEQ ID NO: 6427 - DNA, 201 bp, Homo sapiens
tggttgattttcccagtgtacaaaattgtgcactgagaatttcgtaacagtgtggtgcagaatcgagaaattccagaatgactgattttacctcagacctkaacgcataggtctcctctttaaagttttctctctctctttttaaacatgtattctgttacacatttctaactagagaggaaaactgaagtcctctcaaaa

SEQ ID NO: 6428 - DNA, 201 bp, Homo sapiens
ttgaaaaggggaaaacacaaaagcatcctgacgtgagtttttcaaaggaagaaccaacagatgttaagagaagatgatgcactggcaggtagcagaggatwcaagttatatacacaagataaaataatgaaaagttcttacaatagagattgttgaaccaacaacaaaatcaatgttttatctaaaaccatggtctcttaa

SEQ ID NO: 6429 - DNA, 201 bp, Homo sapiens
ctggctgccttccccaggagtaaatgtgcatgcaggcaggcacacctcaaaacctagccttcaagcaacttaaaatgtgagcagtagtgaagtggttgcaratcttccctccctgcactaaaaagttacatgacccactttttgaaactttacttccatccttgactttcacaacacagttacaacacatttatagtcaat

SEQ ID NO: 6430 - DNA, 201 bp, Homo sapiens
ctgtcccctttccaccaaaattcacaggtcaattctccctcctataaaggaaataaggtttatattttgtattacactctggccccatcccccttgtttcyaccccaatgccatgcattctacattctttaaaatataggcaactaactaaggtgcttggcacctaatatagtatttcaatatttgattgaccaactaaca

SEQ ID NO: 6431 - DNA, 201 bp, Homo sapiens
gaggctgctggtggcacaaagagcatgcgccattaaacttgatccattttcttatcaaacgtccaacattccaacactgaaacagcaccattccaaaagtrgtaactagagaaaccggtatacagtgagggaaagtgggcaaaggacacagctcgtcgtatcagtgtcctgaacagaaggtttccatactttgagcagtgc

SEQ ID NO: 6432 - DNA, 201 bp, Homo sapiens
gtgaacaatgaaaaatggcaacttggcaccaactttacattctttgtgtctctgcatgctgtggtggggtgacactgctggtcagttactgcttttgtggmatctatacaattcatttgccatgtagatgaattatcagttagaactgtgggtgcatatatgcatgtgcatgtgaatttgcagatacatagattatagagt

SEQ ID NO: 6433 - DNA, 201 bp, Homo sapiens
tttttccatttctaaagctaaaatggtaaataccaagaattctaatttgaaatgcaaattaattggttttgagttggagttaaaaatcaaagcagatacastgttccttaaaaaaaaaatctgcagttaactataaagacccatttttcctttcaaagggaaaaagtagtttgtttctacagcaggccatccatttctggt

SEQ ID NO: 6434 - DNA, 201 bp, Homo sapiens
agaattctaatttgaaatgcaaattaattggttttgagttggagttaaaaatcaaagcagatacactgttccttaaaaaaaaaatctgcagttaactataragacccatttttcctttcaaagggaaaaagtagtttgtttctacagcaggccatccatttctggttatctgaacactggaaataagtgctttaaatatct

SEQ ID NO: 6435 - DNA, 201 bp, Homo sapiens
ttcaaagggaaaaagtagtttgtttctacagcaggccatccatttctggttatctgaacactggaaataagtgctttaaatatcttaagaaagaagacagstctcattttatcattggtggtacattcaatggtaaaaatgtttctacatacagtgttcaccaaaacagtctgaaagtacctacctggaacaaaatgtctg

SEQ ID NO: 6436 - DNA, 201 bp, Homo sapiens
gtgctttaaatatcttaagaaagaagacaggtctcattttatcattggtggtacattcaatggtaaaaatgtttctacatacagtgttcaccaaaacagtytgaaagtacctacctggaacaaaatgtctggagcagaatgacaataatttcaaggaaatgctgccaccaaatatattatcctaccctgaccattctacaa

SEQ ID NO: 6437 - DNA, 201 bp, Homo sapiens
ttaaaaggtataataagtggacaggagtcttagaggtaaagcagcaaagctaaatatcagatcctaatatcaaaattacattacatgttttagatattacmattattgatagccccaggtctggcacaaagactgtctacttgattgtggaaaatgctcatataccaaattcctatgaagtaacctcttggtagaagaaac

SEQ ID NO: 6438 - DNA, 201 bp, Homo sapiens
ttaatgccactataaaaaaagaaaaaaaatttaaaccatggtttaaaaaatagacaaagctcattttgctatcttcaagatgccaaaaataatacttaatktcgcataagagctatgtgatttcaaaaggtaatactacaaatataggcctctaactaatggatgtaaaatcatagacatacagattattaagaggtggaa

SEQ ID NO: 6439 - DNA, 201 bp, Homo sapiens
ccaaaaataatacttaatgtcgcataagagctatgtgatttcaaaaggtaatactacaaatataggcctctaactaatggatgtaaaatcatagacatacwgattattaagaggtggaaagaacctctattctgtctttcttgttatagatgatgcaatcacttgccattccaaatttttaatttaaaattaactgtttga

SEQ ID NO: 6440 - DNA, 201 bp, Homo sapiens
aaatacaaaaattagctgggcgtggtggtgggcacctataatcctagctacttgggaggctgaggcaggagaatcgcttgaaccttggaggcaggggttgyagtgagccaagatagtgtcattgcactccagccgcgacaagaacaaaactctgtctcaaaaaaaaaaaaaaaaaaattaatgtgaccacagcttgagaaa

SEQ ID NO: 6441 - DNA, 201 bp, Homo sapiens
ttcttagccaaaatgacacacttgcttttactgagtaattattatgggtccatttattttttcaattcttttttgggcatgcacctaataataacggtacsttcatagaggattatacagaccaacacagaagaaacagaatacaatttgctgttcaagttgcaaaaggaaccacaaactctttccttaaacaacaaaagt

SEQ ID NO: 6442 - DNA, 201 bp, Homo sapiens
cctccaggccttcctctccatggcactttataaaaaccagcagctggcatcgtatccttcaaacagtatctttctcattgcaagatctaccacagtatcayatttttaaatagctctttttctttgttattccattttgtttaaacttcagtgaagctaattttcttatggcttccattaggagcaggagaaatatgtttt

SEQ ID NO: 6443 - DNA, 201 bp, Homo sapiens
ggcaaggtttgatgttacagcttccttcatccatctgcaaagctctgtcactacctaataaatgcacaatgcttctctctcctgtggtgcttttaggaaayaatgcttgtcattttccatcttattgacaaaatattgtattttttagaaaactccatatctaaggaatactttaatgaaataaagatgggttaaaacatc

SEQ ID NO: 6444 - DNA, 201 bp, Homo sapiens
ccaatataaaagtatttgccactgcaaagggcctaagcacaatcacatcttgtcccgatcatacctgcctgccagaacaaaataggcagctgaccaattakggggtgtttatctatacagtggtacctttgttctccaacaatgtcagattgcaaatgtcctggaacacatatttacctggaggattcttggcaggatcat

SEQ ID NO: 6445 - DNA, 201 bp, Homo sapiens
gatcaatcaggacggggctctgcgctggatcaccgcaacttcacaacaaacccagtcctccttaaatagccaaagattcaagttcactcggcgtgctagakttccaggggtgaaatccaatctacacttttaaccctcttgcagtccgagcgcgctggccgtgcttgccgaggccgccgccgccgccggtgttggctgctt

SEQ ID NO: 6446 - DNA, 201 bp, Homo sapiens
gaaacaggatatagggaatacataaattgggtctacactggttaagaaacaaagttaaaaaaataattctactcactttaaaatgacactgtgctgaaaawtaatgagaatagataaaagctttgaccactcccattgtctaccttaaaaaaatactagtatagttactcaaggcacggaactggacaaactgcaatttga

SEQ ID NO: 6447 - DNA, 201 bp, Homo sapiens
cagaaaatgttttctttttaatttgttttgaaagaatttcacaatcctcaaaggactcgaaaaaaaaatttgaaggtataaaaatgaagttgagtgcttamataaaatacactttcccaagacttttgatagaaacattttactcatcaaactacatgaatgcatatacatatttctatgtcaaaagaaaaacacaagtat

SEQ ID NO: 6448 - DNA, 201 bp, Homo sapiens
aaagtcatattaatatattttcctagttacctgtccccctgaaaaagatttttaaaactgctgtgtacaacaattacatttaatttgtaacagccaaatamatttaaccaggaaagattaaaaatctgtgtactaccagcaaaaattatttcccatctctctttacctacctacctatctatctgcctatcatccacctac

SEQ ID NO: 6449 - DNA, 201 bp, Homo sapiens
caaaagattttgttaacttgtagcattttaatatttcctacaacaggacaaaagtcatattaatatattttcctagttacctgtccccctgaaaaagattyttaaaactgctgtgtacaacaattacatttaatttgtaacagccaaataaatttaaccaggaaagattaaaaatctgtgtactaccagcaaaaattattt

SEQ ID NO: 6450 - DNA, 201 bp, Homo sapiens
acttttacctgtatatagtatttaattattttctgtaagtatattacttataatttttcaaagtaaatagctcagtaaaatgatcttctgtcaagctcaayaattgggtgcttagcagagcaagaaatggaaaaataatggctaaagcagcttttacgtaatctccaaagacatcaactttcacatcagtttctcatagac

SEQ ID NO: 6451 - DNA, 201 bp, Homo sapiens
cacttttacctgtatatagtatttaattattttctgtaagtatattacttataatttttcaaagtaaatagctcagtaaaatgatcttctgtcaagctcawcaattgggtgcttagcagagcaagaaatggaaaaataatggctaaagcagcttttacgtaatctccaaagacatcaactttcacatcagtttctcataga

SEQ ID NO: 6452 - DNA, 201 bp, Homo sapiens
tatgcttccatgcccattaagaaaatgtggaaacaagaaatttaggcttgggagcaacggccaaaggagaaacaaggagaaggaagagatttacttttcayttttacctgtatatagtatttaattattttctgtaagtatattacttataatttttcaaagtaaatagctcagtaaaatgatcttctgtcaagctcaaca

SEQ ID NO: 6453 - DNA, 201 bp, Homo sapiens
tagggaatcacgcagggagaacaggagcagaagggattgtccaaataaactgctccttactgctgctgctaacagagtgaatccagggacctggagcctgsagcacaattttgcccctaggtctgaaggcctggtaagagcaatttaaaggggtgtgctcagtagttgggcatatttccttctattttctgtgaaactgtt

SEQ ID NO: 6454 - DNA, 201 bp, Homo sapiens
ctgtcttgaagaagcaggaggccaagaaagtggtcaaccccctgtttgagaaaaggcctaagaattttggcattagacaggacatccagcccaaaagagasctcgcccgctttgtgaaatggccccgctatagcaggttgcagcggcagagagtcatcctctataagcgactgaaaatgcctcctgcgattaaccagttca

SEQ ID NO: 6455 - DNA, 201 bp, Homo sapiens; identical to SEQ ID NO: 6454

SEQ ID NO: 6456 - DNA, 201 bp, Homo sapiens
aaagctcagttggtggtgattgcatacaacatggatcccatcgagctggttgtgttcctgcctgccctgtgtcgtaaaatgggggtcccttactgcaatawcaaggggaagacaagactgggacatctaatccacaggaagacctgcaccactgctgccttcatacaggttaactcagaagacaaaggggctttggttaag

SEQ ID NO: 6457 - DNA, 201 bp, Homo sapiens; identical to SEQ ID NO: 6456

SEQ ID NO: 6458 - DNA, 201 bp, Homo sapiens
tccttcaagcaggagttaacaccatcaccaccttggtgtagaataagaaagctcagttggtggtgattgcatacaacatggatcccatcgagctggttgtsttcctgcctgccctgtgtcgtaaaatgggggtcccttactgcaatatcaaggggaagacaagactgggacatctaatccacaggaagacctgcaccactg

SEQ ID NO: 6459 - DNA, 201 bp, Homo sapiens; identical to SEQ ID NO: 6458

SEQ ID NO: 6460 - DNA, 201 bp, Homo sapiens
taagaacacctgtccttcaagcaggagttaacaccatcaccaccttggtgtagaataagaaagctcagttggtggtgattgcatacaacatggatcccatygagctggttgtgttcctgcctgccctgtgtcgtaaaatgggggtcccttactgcaatatcaaggggaagacaagactgggacatctaatccacaggaaga

SEQ ID NO: 6461 - DNA, 201 bp, Homo sapiens; identical to SEQ ID NO: 6460

SEQ ID NO: 6462 - DNA, 201 bp, Homo sapiens
ttgcaaatcctgggcagtttcatgaaagatttcttggaacttaacaaagctgtcatttccaatacactcgatgccttttttttttttttttttttttttttggctcttgcatgtggtttgcaagaaggttcaactattctacacaccctggctgcatcaccaatatcaatatttaaaaactaaatgcaaaagagacagatg

SEQ ID NO: 6463 - DNA, 201 bp, Homo sapiens
agctcgtcgtatcagtgtcctgaacagaaggtttccatactttgagcagtgcattctctccccacactaccaacgccagctcccaacacacacacacacamacttgcactctcctgctttctcacacacactcttgcatttttaaatagaagttttcaaactggaaaacaaaaattacatgaatgttcttccatcagcttc

SEQ ID NO: 6464 - DNA, 201 bp, Homo sapiens
tacttaaggaaaatatattaagaaaaataaaaataataaacatttcattaactcaaatattcagtaataacatcatcttttttaattatttaggtaaaatrtataccattctccttctcaggtattttaaataataggtatggtatgcagtttctgtattctttttaagatttatcttaaaccagtgtaaccagtccactt

SEQ ID NO: 6465 - DNA, 201 bp, Homo sapiens
ttttccagtattttaaaaataaaattatttcactgcttcagaagagaagaacggaggtaaaattcgctatttttgcacatgaggttttcatgaagagtagraaaaaaacaatttttatattcattaaaataaatagttatttttacatgctggcaaaagtccccacagaaataaaatcttcatatttactaatggttctct

SEQ ID NO: 6466 - DNA, 201 bp, Homo sapiens
ggaggcccaaggcgggcagatcacgaggtcaggagatggagatcatcctggctaacactgtgaaaccccgtctctactaaacatacaaaaaaaaaactcarccgggcgtggggaagggcgcctgtagtcccagctactcggcaagctgaggcaggagaatggcgtgaacccgggaggcggagcttacagtgagccgagatt

SEQ ID NO: 6467 - DNA, 201 bp, Homo sapiens
tggccgggcgcggtggctcacgcctgtaatcccagcactttgggaggcccaaggcgggcagatcacgaggtcaggagatggagatcatcctggctaacackgtgaaaccccgtctctactaaacatacaaaaaaaaaactcagccgggcgtggggaagggcgcctgtagtcccagctactcggcaagctgaggcaggagaa

SEQ ID NO: 6468 - DNA, 201 bp, Homo sapiens
ggtcatttttaaatatgatactttcggactttaaaaagagtctgaaaaccagcagcatgcttttttaaggacaatccagttggccgggcgcggtggctcaygcctgtaatcccagcactttgggaggcccaaggcgggcagatcacgaggtcaggagatggagatcatcctggctaacactgtgaaaccccgtctctacta

SEQ ID NO: 6469 - DNA, 201 bp, Homo sapiens
tatgtccctgccaccctgcctcatgctgtagtcactctaaacttcagagaccagcatcttacgaccatgagttttggtgctaagttcagaaaaattaatcytaaactgtcacaaccatcctgatgaccagtatgtctttctaattagaatcaatgcagtaatcattataattggcagtccctccccagatcacgtggagaa

SEQ ID NO: 6470 - DNA, 201 bp, Homo sapiens
acagtctttttttcacctctgatgtcatataatagatttgagatcacatcagtgagcaatgttatctacaagtatttttggaagtcttgttaaaagagccmcgatactgcaagcctaacttgaagtgcaaatggtgaatgcttctctatatctcatcttgaccactactttactgaagagtgaaaaatgacagatgcaaat

SEQ ID NO: 6471 - DNA, 201 bp, Homo sapiens
ccccagaccattggcttgagatcagctcaaagaaaaatgagattacagaatttaatctagtgaaggggagtgacagatgagttctaaaaagccttagatcmcaaaaaaaaaaaaaaaaaaaaaaaaaaggcagaggacagaaacaacatcagcttagattaaaccttccacacatttacctcctacaaatctgacatgttc

SEQ ID NO: 6472 - DNA, 201 bp, Homo sapiens
attatatattttggaagggcaaattcattatttatacaggtgctacctgacctccatccagcaagttattcattttaacctattaacaagcacactataaacaacaatgaaagttacatgaccttacacagctgtctcaagccactgtacttccatcgttaaggaaactgttagatgaccctgttgtcagaacacactaaa

SEQ ID NO: 6473 - DNA, 201 bp, Homo sapiens
catcattggttcttgcctctccatcacaatatgtcttagctttttaatagcaagaaacctgtaggtatactaaattggtggaatccaggaaaggaggaggraaaaaagtcaagacaacagcatttaagactgaaaaggggccgggcacagtggctcacgcctataatcccagctctttgggaggccgaggcaggcagatca

SEQ ID NO: 6474 - DNA, 201 bp, Homo sapiens
tttaatttcactctgctgaagtccttcctaatcaaccctgcattgtgtcctcctctgagccttcagtccctttgttgatagctctatttccacacatctcrtacatggatttgtagagtgaatgcccatatgtttgccatatcatttttgaagagcttttgctgtaaatgagaacttcagtgagtaatttccaattacttt

SEQ ID NO: 6475 - DNA, 201 bp, Homo sapiens
ttcatgagggaagacaaactggaaataaatgagttttcaagtccagccagaaagtcaacctatggttagatttacctaattgggtattttttaaaaaaaaagtacaaaaacaaaaacctgtgctcatccatttttttatggtatcttattgtatttcatttttttctcagcatttttcttcgtaaaagttcgtcctaagaa

SEQ ID NO: 6476 - DNA, 201 bp, Homo sapiens
gcatgaattattaattttcctagggcacgtaagaattggcttccaaatttttctttaatcgactttctccaaagtagcatattacataattcaaaaaaaaacagatattgtcatcttaagtttacagcttgccatatttcctagaaaataaacaataattaacaacatatctcatagttgttccctccccacctttcttca

SEQ ID NO: 6477 - DNA, 201 bp, Homo sapiens
atttaagagagaagctacctcatggtgtagtaggataagaaggaatgagattgataagaggaggcatgtaggtatattatcattactctttttttttttttcttaatggagtcttgctctgttgcccaggcttgagtgcagtggcgggatctcggctcactgcaacctccaccttccgcgttcaagcaactctccttcctt

SEQ ID NO: 6478 - DNA, 201 bp, Homo sapiens
catttaagagagaagctacctcatggtgtagtaggataagaaggaatgagattgataagaggaggcatgtaggtatattatcattactctttttttttttttcttaatggagtcttgctctgttgcccaggcttgagtgcagtggcgggatctcggctcactgcaacctccaccttccgcgttcaagcaactctccttcct

SEQ ID NO: 6479 - DNA, 201 bp, Homo sapiens
ctgccactctgtcactagaacaaaccactaagaaataaatacaacagggatatctgagtccttggcctacagtttttccatggggaaaaaaaaaaaaaaaatatatatatatatatatatatatatatatattcgttgagacatttgtttgtaagttcagattgctatctaagcatgctgggagaattcactgggagaaag

SEQ ID NO: 6480 - DNA, 201 bp, Homo sapiens
gctgccactctgtcactagaacaaaccactaagaaataaatacaacagggatatctgagtccttggcctacagtttttccatggggaaaaaaaaaaaaaaaatatatatatatatatatatatatatatatattcgttgagacatttgtttgtaagttcagattgctatctaagcatgctgggagaattcactgggagaaa

SEQ ID NO: 6481 - DNA, 201 bp, Homo sapiens
agctgccactctgtcactagaacaaaccactaagaaataaatacaacagggatatctgagtccttggcctacagtttttccatggggaaaaaaaaaaaaaaaatatatatatatatatatatatatatatatattcgttgagacatttgtttgtaagttcagattgctatctaagcatgctgggagaattcactgggagaa

SEQ ID NO: 6482 - DNA, 201 bp, Homo sapiens
ttgtacccaggaggcaaagtttgcagtgagccgagatcacgccattgcactccagcctgggcaacgagagcaaaactccgtgtcaaaaaaaaaaaaaaaaagaaagaaaagaaaagtaaaagaaaagaaatatattctaaacatgtgcagaaaactactaccaattttaaaagctaatttatcagttgaaagatttctgcc

SEQ ID NO: 6483 - DNA, 201 bp, Homo sapiens
cactttgggacaccaaggtgggtggatcacctgaggtcaggagttcgtgaccagcctgactaagatggtgaaactccgtctctaataaatacaaaaaaaaattagccggccgtggtggtgcatgtctgtaatccgagctacttggtaggctgaaacaggagaattgcttgtacccaggaggcaaagtttgcagtgagccga

SEQ ID NO: 6484 - DNA, 201 bp, Homo sapiens
gggaggcggagcttgcagtgagccgagatcccgccactgcactccagcctgggcgacagagcgagactccgtctcaaaaaaaaaaaaaaaaaaaaaaaaaagaagaagaaaataggtaatatgatagatttgaaagcaatgattgagcttgtgctgaaatgaagtgatggattgtgcctggaattttttggtttaatgact

SEQ ID NO: 6485 - DNA, 201 bp, Homo sapiens
gcaagtgggctctgccaaggtgcatctgtatccacaggtaagaaggaaggttctccattctttctctctctctctctctctctctctctctctctctctctgtgtgtgtgtgtgtgtgtgtgtgtgtgtgtgtgtagcattgacaagggggtaagcccctacaaaagagagtgaacctcagaagagagatgctggagagac

SEQ ID NO: 6486 - DNA, 201 bp, Homo sapiens
ggcaagtgggctctgccaaggtgcatctgtatccacaggtaagaaggaaggttctccattctttctctctctctctctctctctctctctctctctctctctgtgtgtgtgtgtgtgtgtgtgtgtgtgtgtgtgtagcattgacaagggggtaagcccctacaaaagagagtgaacctcagaagagagatgctggagaga

SEQ ID NO: 6487 - DNA, 201 bp, Homo sapiens
aggaggcaagtgggctctgccaaggtgcatctgtatccacaggtaagaaggaaggttctccattctttctctctctctctctctctctctctctctctctctctctgtgtgtgtgtgtgtgtgtgtgtgtgtgtgtgtgtagcattgacaagggggtaagcccctacaaaagagagtgaacctcagaagagagatgctgga

SEQ ID NO: 6488 - DNA, 201 bp, Homo sapiens
tgtattcaaaaatagtttttctgtgtgattaacagtaatattacctgggctatttttaaaatctggaattagaattcaattttaaaaactgcactcaaaaracatcctggattcagatatgaatggacctgggaagtttcttaaaagaaatacattttatcctagatcgatagtaagaaacagcaaggaaatgcacagaaa

SEQ ID NO: 6489 - DNA, 201 bp, Homo sapiens
agaatgaaaactggaaaacttgaatgaaactaaatatatagagaggcatccaagttgtacgtgtaaagtagtaaatgtagagggtatttaaaacattttttgtggttaagatctctacccttttcatctgttccactctagagataaaagttcttttttactttaagatttttgcaaaaaataattcaaaactttaaaaat

SEQ ID NO: 6490 - DNA, 201 bp, Homo sapiens
aaaaagactaagagagtaaatcgatacgtgttcagtgtagtggcagtttagattttttttctttcaattggcaatccttccgacatcaaggttaaattgtmctaaaaaagaaaaaaattacacctcattccaaatttgctaattcaagaagaactgaattattctcacgtctacttgtggcaaaacaagaaattactttat

SEQ ID NO: 6491 - DNA, 201 bp, Homo sapiens
tccgcctcccaaggttcaaacaatcctcccacctcggcctcttgagtatctaggaccacagatgcacctggctaatttttttgtatttttggtagagacarggtttcaccatgctgcccaggctggtctcaaactcctgagctcaagcaatcttcctgcctcggcctcgcaaactgctgggattacaggtgtgagccaagc

SEQ ID NO: 6492 - DNA, 201 bp, Homo sapiens
acgaaattctgctgacctcaacatttcaatcacacataatgcccgcaatattttctgctgattaaagaaactcatttaatttgtggggaaaaaaaaatgtkaaaaaaaacctcaacaaattctgaccatattaaaacatactacagagaagcatgagcaaagccaacactttcccatttgcaatggcatgattttgacata

SEQ ID NO: 6493 - DNA, 201 bp, Homo sapiens
atacaatttacaaataagcagaatctgtaatcattatattttgaagataaaattgatacttttcacacacacacacacacacacacacacacacacacaaagatttagcagtgggacaaactttttcatttaatttttgtttatagcaactaaaacatgagagactaaaagccacagactgcaaaagcattgtttagctgt

SEQ ID NO: 6494 - DNA, 201 bp, Homo sapiens
ccccatctaatgagaccaccctctggggcccacatggccttgctcacactttagtgcagggcccgaccagtgcattatagttggttgtttatacattactkctctccaagattgtgacctcctgtatcccaacttaccctgaataattttgggaatctatttaaatggcatacaaatttatcttggatgtactatccatga

SEQ ID NO: 6495 - DNA, 201 bp, Homo sapiens
cactcttgcctccccgcaaccaatccatatctcaattaatggcattcacagccattcagtttcccaagctgaaaatgctcattccagaaaccccaactccscaaagcttcacattcagttgtcagcccagactctatcttcctttcaagcctatttccccatctccatcccaactggtgctaagtcccttattgagcttca

SEQ ID NO: 6496 - DNA, 201 bp, Homo sapiens
tgccttattgtcatttcacaatcagtgacattcagtccacaaattctagtgagcatcagattcacctgagatgcttgttagaaattcagattcctcgaccycacccgcaatgactgggactcgtacagcaatgctggggccaagaaagcgctctcaacaagcaccccaggtaactcccgcacattgttctcagccagtgta

SEQ ID NO: 6497 - DNA, 201 bp, Homo sapiens
ggagaagtagaacagcttgccgtatcatgacaataaatgctacttgccttattgtcatttcacaatcagtgacattcagtccacaaattctagtgagcatsagattcacctgagatgcttgttagaaattcagattcctcgacctcacccgcaatgactgggactcgtacagcaatgctggggccaagaaagcgctctcaa

SEQ ID NO: 6498 - DNA, 201 bp, Homo sapiens
cttctaaagtcgtttcggatgttcactatggcattctacgtgtcattaaaaaagccttataaatcatcctaaaatttagagtttaaacctggaacaattayttggataaagtttcttatgttaacaggtttttaaaagttcaattttcagaaaagtgtttgttgtcagtggagatctgcatataatctagattccaattaa

SEQ ID NO: 6499 - DNA, 201 bp, Homo sapiens
aaaggttcacggctagaccattctcaccaagaaagacagcatatctcgaggtacaaaaggcacaaaagaaaattaaactgagcttaggaagaaagtgctayggacaattttacatgaaaagccaaaagggaatgttggggctacgttgaactttcctggagtctacagacagaatacacgttgccccctatattcattacc

SEQ ID NO: 6500 - DNA, 201 bp, Homo sapiens
catgtgttccaaattagtgtggtgtttcttagctgtgtcagaaagtcagaggtgtccctgaggctgcagcgctttagcaaattttggaaataacttagggraaaaaaaggtaaattacacagttaatctggtcctcactctacgaatgctacaaaacaatgacgaaaaggttcacggctagaccattctcaccaagaaaga

SEQ ID NO: 6501 - DNA, 201 bp, Homo sapiens
gaggatctataagtgaaagatagcttcactcgcttgggttaaagtgaaaaaatatgaacccactctagaactttgaaaatcaaagagagctttaaaaagcygtgtgtttatgttttgcctaatttttcactttttctcattagaaggcaaggtctgactaaatgtgggttatttctgatatctcagcttctagtttgcgga

SEQ ID NO: 6502 - DNA, 201 bp, Homo sapiens
ctcaaggccattactcctcccatgaggcactcagggaggatctataagtgaaagatagcttcactcgcttgggttaaagtgaaaaaatatgaacccactcyagaactttgaaaatcaaagagagctttaaaaagccgtgtgtttatgttttgcctaatttttcactttttctcattagaaggcaaggtctgactaaatgtg

SEQ ID NO: 6503 - DNA, 201 bp, Homo sapiens
ttagctgatataatccaatcacctggtagggaacagcatgtgtctccttagtccattggcagtgctaatggtgctcctaaatgaaggattttttttttctrtgttcacgctggttgaacttaattttccgttcacctgtttacctggattagttttcagcttaacattcattaagcatcaagacataacaagaggtgcagt

SEQ ID NO: 6504 - DNA, 201 bp, Homo sapiens
tttttttgcaaaagaaaatgcataataataaaataataactgaaagttccctattaatatcatccagcaattattaaaaatagaataaattagctgatatratccaatcacctggtagggaacagcatgtgtctccttagtccattggcagtgctaatggtgctcctaaatgaaggattttttttttctatgttcacgctg

SEQ ID NO: 6505 - DNA, 201 bp, Homo sapiens
ctagcaccatgacttacatatctggtttatcctggagtcttcacgcattattctaaatcccacacatacaacactcctgtgtacacatggcccctctgtgytatgtcacttcatgtattttcccaacacttaatatatctaggttaaaatcagacataagactttctaatatttcattggcaatctttcttctcagggagc

SEQ ID NO: 6506 - DNA, 201 bp, Homo sapiens
tcttttccatctgggagacattttggatttcagctatactatgtaatatacattttttccccttggaaaccaagaaacctgcattttacaacaaggtatgyagtgcaaagaaaatgctggtgaaataagaatctgaaaatgaaaaccagaatgtcatcagactcaagaacataatcatgaaggcaaatcgaaaaatcaatg

SEQ ID NO: 6507 - DNA, 201 bp, Homo sapiens
ggccactgaaatttaaggtggaaaaaaaatcatattatcaaaaatcatatatcaaaaaaaatcaaagcaaatcattctaccacaggggactactaatgaawcccctgcaaatatgaaaccctgcacaaaaagtgttaaacctgccaacatctctgaccagagggctgtggtacttcattaagtagtaccaacccacccccc

SEQ ID NO: 6508 - DNA, 201 bp, Homo sapiens
aagagagtagatatacaatatatcctgtttcattcctgaacatcccagttgttttatcattaagctttcttttaaagagccacttttttgcttaacaaggrgattaggtacaaagagtcatatcccaaggattaaaataaggatttgttagcgctcaagactgaaatttgtccacagggaattaactgaaaaaataggcca

SEQ ID NO: 6509 - DNA, 201 bp, Homo sapiens
caaaacgcatagtttaaaaagatgttgctacacttaagatcttcatgataaagtaatttcattaaccaaagaaaactacagaacaagagagtagatatacratatatcctgtttcattcctgaacatcccagttgttttatcattaagctttcttttaaagagccacttttttgcttaacaaggggattaggtacaaagag

SEQ ID NO: 6510 - DNA, 201 bp, Homo sapiens
ctgaaaatgactggtgggatgactaagcatggagaagtgtgtgcctacctgagaaatcctgtgtaaatgctttcacccctcattccccaaaagggaggagyccactgctcttcaaggctcttagcagctgtcatgctcaaaaggcagtagataccagccagttgatgaaaattaccttccagaaggctgaagtctttgagg

SEQ ID NO: 6511 - DNA, 201 bp, Homo sapiens
aggtcaaattactctatacccaaaggttttatttaaccacttccatcactttgctcaacaccccccacctctctctctctctctctctctctctctctctstgtgtgtgtgtgtgtgtgtgtgtgtgtgtgtgtgtgtgtgtgtgtgtatttaatatgttacagtgaagcctggctctgtccctcactagtgacatgatct

SEQ ID NO: 6512 - DNA, 201 bp, Homo sapiens
gtggtgcgatctcggctaactgcaagctccgcctcccaggttcacgccactctcctgcctcagcctccccagcagctgagactacaggcgcccgccaccaygcccggctaatttttttgtatttttagtagagacggggtttcaccatgttagccagaatggtctcgatctcctgacctcgtgatccactcgcctcggcct

SEQ ID NO: 6513 - DNA, 201 bp, Homo sapiens
tattagttttatgacaaccttctgttggctttgatttcagtatctataaaataacattggagagagagctatctcaaaatttttatgacttaaagaatttyttttttttttttttttttttttttgagatggagtctcgctctgttgtccaggatggctggagtgcagtggtgcgatctcggctaactgcaagctccgcct

SEQ ID NO: 6514 - DNA, 201 bp, Homo sapiens
aatctctaacattctattcttatgcatcttctgtaacttgggtatgtcatcttaagcctttagagaagagcagtataaaaattcaacactttttttttttktgagacggagtctcactctgccacccaggctgctgtgcaatgacatggtctcggcccactgcaacctctgcctcccaggttcaagcgattctcctgcctc

SEQ ID NO: 6515 - DNA, 201 bp, Homo sapiens
aattacaattctatttcatcatgagacttgaaagcatctgtttcttttgcctcctttataaaatctctaacattctattcttatgcatcttctgtaacttsggtatgtcatcttaagcctttagagaagagcagtataaaaattcaacactttttttttttttgagacggagtctcactctgccacccaggctgctgtgca

SEQ ID NO: 6516 - DNA, 201 bp, Homo sapiens
caaaaaaattaaaaattagctgggcatggtggcacatgcctgttgtcccagctacttgagaggcttgaggtgggaagattgtttgaacccaggaggcaggytgcagtgagccatgactatgccactgcactccagcctgggcaacaaggcaagaccccatctcggggagagggggagttacatgagatacttgggtaaaag

SEQ ID NO: 6517 - DNA, 201 bp, Homo sapiens
tttaaagagttattaagattcagcatcaattaccttctttttaaaacattttgcccctctcatcagcagcctgagcctttgtattcattcctctgttcttyctacattctttctcccaaaagctcacaagtactcccttcttcacccatcaacattatataaggtaacattattcatgtgggctatttttggatatcaatt

SEQ ID NO: 6518 - DNA, 201 bp, Homo sapiens
atcacaaccaccccaaaaattaaaaagatgaaattaaacataaaagctgaaattaacagaatagaaaaaaagaaatatttaaaaaaataaataaaacaaakgattctctaaaaagaccaacaagacagaaaaaccacttccatgcctgattaagggaaaaagagaaagtaaaaatatacaagtatagtcatgaatggctta

SEQ ID NO: 6519 - DNA, 201 bp, Homo sapiens
aaagaagaaagaaagaaacccattacttaccataaaagaaagaacagcatcacaaccaccccaaaaattaaaaagatgaaattaaacataaaagctgaaaytaacagaatagaaaaaaagaaatatttaaaaaaataaataaaacaaatgattctctaaaaagaccaacaagacagaaaaaccacttccatgcctgattaa

SEQ ID NO: 6520 - DNA, 201 bp, Homo sapiens
gccatactgtctcatctttggcaaataaaagtaaataacaaaaaaatgactgaattatctcaactacctagaaattaagaaaataaaccatgaaccaaagrgaaaaatcaaaagggaaattataaactatctaaaaagcaatgaaaagaaaaagaagaaagaaagaaacccattacttaccataaaagaaagaacagcatc

SEQ ID NO: 6521 - DNA, 201 bp, Homo sapiens
tcgatcatgtttttgaccaaagaggcaactttaacaaatccctaaaagtacagacttttaaggccatactgtctcatctttggcaaataaaagtaaataayaaaaaaatgactgaattatctcaactacctagaaattaagaaaataaaccatgaaccaaagagaaaaatcaaaagggaaattataaactatctaaaaagc

SEQ ID NO: 6522 - DNA, 201 bp, Homo sapiens
tcagtgttagcgcctctcccagggagctacaagaaggctgaaagctgcaaatcatgtttaagaggatgccgatatcctcttagaaatgaagcaccaaagamcctcagattctaagggttagaggccaacctttaatctcccttattgttctcctcactccaaaagctgatcctaaatcaacttttaagatggagataatat

SEQ ID NO: 6523 - DNA, 201 bp, Homo sapiens
cattatatttatctttcaaatgtatttccaaaaaaaattccactaataaaaagtgaactcttaatgttgtttgccttctaacattaaaattgtgttattgkgtacctgactcattattattatcaatactaacaatgttccttttaatagcacttgtcattgacaatgcaatccaaagataaggtaataaagtaaaacaag

SEQ ID NO: 6524 - DNA, 201 bp, Homo sapiens
tgccttggcctttgaaagtgttgagattataggcttgattcattgcatacggtcttcttttttcctttcttcctttttttcttcatcttctttttttgttrttttttggcagaagaaaactcaaagtgtaatgaaaacagttgcaaaacttctgttaactttgaccctctggtatgatactgaccagaggagtttgataca

SEQ ID NO: 6525 - DNA, 201 bp, Homo sapiens
taagctacaatttgtgactaactggctgttgtgaatctatcagaactttgatgagtcagagaaccatttctgtatatctttttcaaaaaaaaaaaaaaaaaccagaaataaattgttcataaaaccacagcaattaatgccactataaaaaaagaaaaaaaatttaaaccatggtttaaaaaatagacaaagctcattttg

SEQ ID NO: 6526 - DNA, 201 bp, Homo sapiens
catcgctactgaaaatacaaaaaattagctgagcatggtgatgggcacctgtaatcccagctacttgggagcttaaggcaggagaatcacttgaatccagkagacggaggttgcagtgagccgagatggcgccattgcgctccaacctggtgacagaaccccatctcaaacaaacaaacaaacaaaaaacattttgtctca

SEQ ID NO: 6527 - DNA, 201 bp, Homo sapiens
cccaccaaaaacagtataaattgtagaaaacattttatagcatttaaaaattccaatgatcagtaagcatatactatagtcccaacttaatttgacgttcmatttacataagaaataaaggaggaggacagggaaagaagaatggcatagccaaaacaactaaatttttaacatatattttctgtaaagctagttaaaaac

SEQ ID NO: 6528 - DNA, 201 bp, Homo sapiens
ggtagctgaggcgttaagaatcacttgaacctgggaagcggaggttgcagtgagacaagatcgtgccactgcactccagcctgggtgaggaagtgagactrtctaaaaaataaaaaacaaaaaaacaaaaaaaaccaagataccttttaaagagcttttaggatcattaagaccattctacatgccattacctactaatca

SEQ ID NO: 6529 - DNA, 201 bp, Homo sapiens
caaggaaaatggctgaggtgagtgttatgcaaattaagttacatggataaaatgagagctattacccccccacactttttttttctttctttcttttttcyttttttttttttttttttttttttgccctccctctcctgaccaaccagatccaaataacctttactggctgctaaatttctcttgagaaatcaagcaact

SEQ ID NO: 6530 - DNA, 201 bp, Homo sapiens
ctgtactgataactaaaggctacagagatttcatatattttttttaacttttagaaatcagagtgcttataaaatggctggctcatggctctgtcacccakcacctctgacgccgcctcctagccttcgttggtgagataaccaggaatagtgattccatgcgtaaacaacaagaatactaaaccaataaaactagcttat

SEQ ID NO: 6531 - DNA, 201 bp, Homo sapiens
aagaagctgacagttgggtgaaaccacctcaaaattaatttcttctatacttctaagtattttacatgaaaaaacaaaggaatgatgcggcttattggtaygtgttaggaaggttcactggctaaatctctgacatttaaatgttatggccacactaaaaagcacagtatttgatgtaccaatgataagcaaaataatcaa

SEQ ID NO: 6532 - DNA, 201 bp, Homo sapiens
taaatagtaaaagttacttttccattcaggaggtcaagggctggaaacttaatttattcatatttgtgtacccaatgcctataaaaattcctccaatatamtatagacatttgacaaattgttcattgaaccaaattatctcaaatcccatacatgtagaaattaataacattttactgcataaagtctttttgaatttat

SEQ ID NO: 6533 - DNA, 201 bp, Homo sapiens
agattaaacacacacagacacacacacacagagaaaccaccagcacgaaagcatcactttgtattgcacattacactgcatcccctttctcaccctcaccrgattctgaggggagggggtggggaagctctactgataataccagctttaactactgcagtttccctttgaacaaatattcaatttaactggagttaattt

SEQ ID NO: 6534 - DNA, 201 bp, Homo sapiens
cccttcttccctccctcctcaccacaccacccccagtgaaatcctggcacccagagagcactcctttcagcctgagagcccagaaccagccgttgtccccyggcaaaaagaggcccagggctgagccctgggcaagtgtctcccgacatcgctacccctcctccctttattagtttccctttcccaacagaaaccatttcc

SEQ ID NO: 6535 - DNA, 201 bp, Homo sapiens
ttcgggaggccggggacgggggctgctgggactaggaagacaggtaaagtcggggagatcgcgcggacccctgcgagttaaccctttcggccacacgcccygggagcggcctccctgcggtccccgcccctgccccggcaaatcctggagtcagcgttctgacaacgttaatttcctttgtgcgggtcatttcttcttttt

SEQ ID NO: 6536 - DNA, 201 bp, Homo sapiens
tgaaagcggacaccctactatacccagagagggtggaggatatctaggggccttgaggaccatctaactcaagccagatactctgtctacggagatttgtrggcggtgtttgccgtgctagaaaaaagaacaatctgctcctaccttgctcctgcacgtagtatgccaaaaacaaatcaagctccttaactgatactgtga

SEQ ID NO: 6537 - DNA, 201 bp, Homo sapiens
aaacttctgctactatataaattggatttaagttacattatttggagggcaatttttaaatatttaaaccattcccttacactgataacattttttcagtraccattcaactatttacctcattttatttgctacagacagaaatgctgcattcatttctttttgtaaaagtcagtcttctcctcccctactaaagtggta

SEQ ID NO: 6538 - DNA, 201 bp, Homo sapiens
gaccttattaaatcctcatcaaaaagggaaattaaggctaacagtgatcagactgctccatagagaaggcaggtcaaaaggtacgacttcaaagaaagacyctcaaggcaacagagatcgatataatttacttcagacaataaaacataaatctaatttgaaggatgttgctcatctacaactcaaagcacctaagatatt

SEQ ID NO: 6539 - DNA, 201 bp, Homo sapiens
ccagcaagttattcattttaacctattaacaagcacactataaacaacaatgaaagttacatgaccttacacagctgtctcaagccactgtacttccatcrttaaggaaactgttagatgaccctgttgtcagaacacactaaatctgtctgaataagggaaaacaaaactttgtctccaaagggtaaaaaataataataa

SEQ ID NO: 6540 - DNA, 201 bp, Homo sapiens
aatcggaaatgacttgcttataaatttgttgaattgatttgttgttccctgtgaatagacagtgagccccctgagggcagagaccatgtctgtcttgtacrctactgtatccaaagccattaggaacatcggtggtatgacaggtgctcatttaaaactttacaacctttcaaatgaataaatacgtagcctgttttaggt

SEQ ID NO: 6541 - DNA, 201 bp, Homo sapiens
gacagccatttaggaaagttacctgcatgcagatatatgcacagctaaggtaacatggaggtgtgccagtcgagcatatctgaactggccactgtctaccyagagtgacaaacaaaatgtagaatcttgcaggatagctcagatcctaccatcttgacaaccaatcacagatctgtcttctatactgggttcaggcaaggc

SEQ ID NO: 6542 - DNA, 201 bp, Homo sapiens
gaacctactggataaaatgcaaaaaaccacagaggtcccactgggctctactcctgcatggagcccagtgagactttagtggaggaaggtttcctgaggaygagtgatgatgcctattaaccatgtacctatgggaacagggacaggtgagaatcagccaagtggggtagcctgggagaagcaccggaagcagatggctgc

SEQ ID NO: 6543 - DNA, 201 bp, Homo sapiens
actatgactcaccaaggacactatgaaatgtgaccaaagtcttccagacaaaattgcttttcagtcatgtaaatatccttttaattcatgttcttacttastttatgtagcttatgtgaaactcgtttgtcactttctaaagatttacttttgtcggactccaggaaggattgtctaacttttccctaaatctcatggtgc

SEQ ID NO: 6544 - DNA, 201 bp, Homo sapiens
tctgtaatgcagaggctgaatatgtataaatgcagaggcccaatccaagcactcactatgactcaccaaggacactatgaaatgtgaccaaagtcttccaracaaaattgcttttcagtcatgtaaatatccttttaattcatgttcttacttagtttatgtagcttatgtgaaactcgtttgtcactttctaaagattta

SEQ ID NO: 6545 - DNA, 201 bp, Homo sapiens
agccccctgaaagaaatccaatagttatgtaaagagatagctgatttaaccaagtttgagaacattttagtcatcaagactagagtttaaaaatttaaatsacattccttccctccctccttagaaagacagaatatatgaaaaccaatcacttaatgaaaattcccagaggtttctttattgttttacttctagcatatg

SEQ ID NO: 6546 - DNA, 201 bp, Homo sapiens
actgggaggaggatgagaccagaaaaccccttttgcccatagcatgccacaaattgaggactaagtcagtgcatgctgctgacaggcaaagggccagctcrgcatgagcagctccgtgcagggactgcatgtgacaccagacaccattttcaaagccactaccttcctccttccccacaaacctcttcatctcccaccaaa

SEQ ID NO: 6547 - DNA, 201 bp, Homo sapiens
tgagattagtattctgaatcagcaattatattggagtgctacaattctcagtcagatacctctctacaaaattcatcatcagtatgctacataagatgagragttcagaaaaatattccaaataatcatgtctaggatgtggtatacctacagggcataagaggatcactgtaagtatctccgcagaagtacccgcttttt

SEQ ID NO: 6548 - DNA, 201 bp, Homo sapiens
ataaaacataaatctaatttgaaggatgttgctcatctacaactcaaagcacctaagatattttccaggatggatatttatgggccacaacatgtactgcygctagtctgtatttgctccttctgcacactcctttcacactcttcatctctggttccttatcttattatgaactggttgaagaggccatctcagacctca

SEQ ID NO: 6549 - DNA, 201 bp, Homo sapiens
ttctgcttccatgtattgtactaggggaaagacatggcattctccaaatattattgagaggcatctttaccacaaggcaggatagttctgggcatggggcyccctttcgaccatacctagagcaccaagaaaccaggagccccgcctgggagccccagtttcttctctgctatctctctggatgctggacttgcagtctcc

SEQ ID NO: 6550 - DNA, 201 bp, Homo sapiens
aagcatacgtggtctacttaaactcctcctctctcccatctgcctcaagttgagtataaaattccaaagggattgcagatttttatggaagttttcttacscctcatttttaatgaatattctaaatgtgttcactaccctttgaattgtattttaatattaggcaggctaagattaacttaaaatatttttaagaaagta

SEQ ID NO: 6551 - DNA, 201 bp, Homo sapiens
ttaagtacatacttctttcctggatctgttcttattttcaacagactctatttctagaatgtagagaagaaaaggatttcaaacagtctggaaaatatcayttttaagttccaatcagagaacgttaaagccaataaggaacttgaaaggaaatctgggctatcccccaacctaaggcaaagccacactgatagcaaccca

SEQ ID NO: 6552 - DNA, 201 bp, Homo sapiens
ggaaatccattgcatcagatggcattcagggtccttaagggtcatttcctggattccaggctcaggttacctgacactaattcatgcacctcaagctccasgtaaactggtaatctgagcctttgcccaagctaatttccaggtaaatctgtccctttattcattaagtttagaaatctgcattccaggaccaggcacagt

SEQ ID NO: 6553 - DNA, 201 bp, Homo sapiens
cactgtactgagaattaactgaattgctttatgtaaattctcagcacgataccttgttcatggggggtgggcaataaataggaggtatcatcatcatcacycttggtaatgacgataaagctggtatattttcaattctattgcatacagtagaatttaaatttagtcaaaaataatgttcaatattaagaaataacagac

SEQ ID NO: 6554 - DNA, 201 bp, Homo sapiens
aaactacaaaactggtaaccattcatttttgtccccatgatttaaccaagctctcctaaatcaacagttactttttcatttttattctcaacaccagtackgctaactacacagagataaaacatcactctagaaaattaacaatcttgcttcctggctctgtgagtggttacaaaatcagtttctcttttataggttatg

SEQ ID NO: 6555 - DNA, 201 bp, Homo sapiens
aaaaatcaggtttttaaaaaaacagttcatcttcattcagcatgagactatatatgtgtcgcttaatattaatggatgcttgttaaatgcttttatgtagwtttatgagagatgtgtacttcaaaattcaatgaatactattaagttgactattttgagaaatagactattttgaatggagttgaagctaactaaaatttt

SEQ ID NO: 6556 - DNA, 201 bp, Homo sapiens
atccaaacaagctaatcaatgtactgatcctgctttccgtacaccctagttaccctttaactaatggacaaacagtgaaataacttttcctattaactccwggctagaacccctaggtacgtgatacacttattataaagtgctccatataagaatatgatgcctttttaccctacgtcaatgtgacacgtgatttaaatt

SEQ ID NO: 6557 - DNA, 201 bp, Homo sapiens
tcaacagtccaaaataatttcatcttgtcctcccatgaactcatcttaaacccaaaatatgtttctccatgcacatgttttatattatacgaatgttggayacgaaaagcagattaattgtaggccctaatgctgtgtttgttagtactaagaagtcattccaaatgttccaaaagggattaatgtagtataacaagtcta

SEQ ID NO: 6558 - DNA, 201 bp, Homo sapiens
taacttagaccatttctatgaactaaagaataagactggactagactttaaaacggagtctacttccctttctctaggattagtagacagccttatcaatsccagataccaagagccacaagttcacaagatattaacacaaactcctggatattagattgaaaaactgtttccgtttcatattgcatatatctggtatgt

SEQ ID NO: 6559 - DNA, 201 bp, Homo sapiens
ttacagttcttgcttactcacttttgaatgggagggtgctagggccactcagaacccaatgcaattgctccagttaggagcagcgcagagtccagaaatayatcctgacacatttccaacctcctgcaaaaaaagctacatgctacaagatgtcataacaagcatgcttgtatgcttgttatgtataactaccatgtacac

SEQ ID NO: 6560 - DNA, 201 bp, Homo sapiens
caacgccatgcacacctagtcaccgccccttgatgatgggacaccaccagactgacatgttcactgcaaaacctgcaacaagtctgctgacatctgaggarttggagaaattattgggtgtaccccaatgccacattctattattctttaatttgttccattaagtgcaatcatcttcaggaagcctaacacatactcact

SEQ ID NO: 6561 - DNA, 201 bp, Homo sapiens
gcctttgtggactgcacaataaacacatccaatttcaaggtctcctacataagcagcatagagcaagagaaaacaaaaaatgagaaagactgcttagtttraaagatttgcttggaaatcactaagattttgtatatcaaaattaataaaactgaaagcagtaactcataaattaaagataaaacaaatgattctttccaa

SEQ ID NO: 6562 - DNA, 201 bp, Homo sapiens
tgttactatcatcttagaactactctggctaagtttggcaaggttaaaggattaaataaataaccacataaatatcaaatccagagattaacatttagcamacattttagtgcacatttttaaagagattaacatttagcacacattttaaaagaaaacgaactgacataactgggtatcactgtgactccggactagggg

SEQ ID NO: 6563 - DNA, 201 bp, Homo sapiens
tttacagatcaggaaacaggttcctgaaggagggcgactttcccaaagctaccagactaatgagtttctgaattaggccgcacagccaggtgagctcctcrtgcagggcttcagacctgaacacctgggttcaaatacttgttcctccttttaaccactgttgtatgaacttcggtcatgactggctctctctttgtctga

SEQ ID NO: 6564 - DNA, 201 bp, Homo sapiens
ggattcttttatatgttatatagttgtgatcatttaaaaaataagactttcttataattttctggagattcattaaactacaatacttcatatgcaaaggmaattatggcaatacataagttacatagctctttgtgccacaatatgtacggtgagccaaaatgggatattatatttttctagaaaaatcatttttaccct

SEQ ID NO: 6565 - DNA, 201 bp, Homo sapiens
ttaattgagtcgtgcgaagctacagaaagattagtttatacagctgctgttatttgtcataacattcctaacaagatacacatgttcaatcagtcttattwtgcacctccaaaactgggccatccaatggtctgaaacatgtggaaatcaaaagcaacagtgtacagaaggaagaccatgtatcccctcaggctgcctcaa

SEQ ID NO: 6566 - DNA, 201 bp, Homo sapiens
ctggaccttgctcttgttacttctgaagggagttgttttacgtggacaaggccaggatcatggtctctgagtgctccaaggggttaacctctgtgaattcwacttctgtgtcacatatttaaatgagtaacttagagttcaatatctttgtgttcaactaaagtcaacttcttctttatcagccaacattctcttactcta

SEQ ID NO: 6567 - DNA, 201 bp, Homo sapiens
atctcctcttcctcttatatgccccatttttgtggcccatctcagcattgattcagtgatgcagtcatcttcccctcctccctctcccttaccctctacawctatcatcaccaagttctttttcctcaatatctccagaatctatccattcctgttgtttctgttctcggtcagatcctaagcaccaaatctgaagaatga

SEQ ID NO: 6568 - DNA, 201 bp, Homo sapiens
ggctaatttattttacagtactcccgtgcactggttctctaatagctgctcaaaggccctccactgatccaaaagcccatctgctataatattagtgttamtaatgatacataggttcctgagataaataatttaattatcacatgcttattagggtctcaccaagagcagagccatttacctctttatttgaataagact

SEQ ID NO: 6569 - DNA, 201 bp, Homo sapiens
cacttttgtgctgagtcaaggaagataagaggagtgggaaacaggaagaatccattagacagtgtctgtgcatataatatcttttttttgttttctttatrtaagttctctgatggacaataatgtccccaggtagctaatgtcacaaacctcttaaacatgagagagaaattgtaccatttctcaaaggcagctttttgg

SEQ ID NO: 6570 - DNA, 201 bp, Homo sapiens
aacttcagtttcttacacttgcaattaatatacaaaccaaatagcagcaagaatttgacacctttcagtgaccaaaaggaccactgaaataagaacttagygataagaaatacctttcattaaattctcactgtacgtcaactaaatatttcaaatttagtatttccaattacataaactgaggatgggggtagatattat

SEQ ID NO: 6571 - DNA, 201 bp, Homo sapiens
gtctgcagggactagtgaggaagggaacattttcctccccactgggtttgcttggctaatagaatataagccttcactgtggaaagagaccctctttgccygagaagtaagggaacaaagagaatggcataggaagagaatcagagaaacattcccagttacatcatttgaacacctgaatcaaactgtacctgcagataa

SEQ ID NO: 6572 - DNA, 201 bp, Homo sapiens
ccctgcattgtgtcctcctctgagccttcagtccctttgttgatagctctatttccacacatctcgtacatggatttgtagagtgaatgcccatatgtttsccatatcatttttgaagagcttttgctgtaaatgagaacttcagtgagtaatttccaattactttcccccaaattaacaggcaaatattaggaaacatcc

SEQ ID NO: 6573 - DNA, 201 bp, Homo sapiens
attcctgagaattagagaggaaaaggcattctagatatcagggacagcgtgggttagactctaagctctctaatcaacatgtttacacttaaaactcgccwgtctaaaacccagacctaattttaacactttcccttttccataagaccttcaagggctttccactgcctctaggataaaatccaataccttgcattggca

SEQ ID NO: 6574 - DNA, 201 bp, Homo sapiens
caaaacaaaacagaaaaaaaaaaccaacggcaacaaaaaaaatgcaacccttttgctctcaaggttcttcaagtagtgggagagatacgtaaacacatgaytatactataatgtcatacaagcaataataagtacacatggccgggctcagtggctcacgactgtaatcccagcactttgggaggcaaaggcaggtggatt

SEQ ID NO: 6575 - DNA, 201 bp, Homo sapiens
attattattacacagtactttcatgataaaagtctctggccatacatcagcctagattagtgcagcatgtgcctaatttctcatctctgattccatgacaytggggtgtccggattctcctcctacttatctgacttctcactatcattctcctgtattaactccaattcttctaaaagtcagcattcccctggttctctt

SEQ ID NO: 6576 - DNA, 201 bp, Homo sapiens
tcatggctggttttgaactcccgacctcaggtgatcagcccgccttagcctcccaatgtgctgagattacaggcgtgagccactgtgcctggcctgacctratgaatttctaattagtggtatttttaagacagtataaaagaatggtataaaataattcaggcagagtacaattataatatttggggacagggagaaagc

SEQ ID NO: 6577 - DNA, 201 bp, Homo sapiens
aaccaccccttacatatgtcaattgtaagcaagctttttgtaacaagattcacaatgtttcactctaattctcaatacaaatcatcaaggtggatactacyatcaactccatcttacaaatgaagaaagggaggcctcaatgggtttaataacgtgcccaagttaatattgctgtttagctgcagagaggaaccttctgaa

SEQ ID NO: 6578 - DNA, 201 bp, Homo sapiens
taaccaccccttacatatgtcaattgtaagcaagctttttgtaacaagattcacaatgtttcactctaattctcaatacaaatcatcaaggtggatactaytatcaactccatcttacaaatgaagaaagggaggcctcaatgggtttaataacgtgcccaagttaatattgctgtttagctgcagagaggaaccttctga

SEQ ID NO: 6579 - DNA, 201 bp, Homo sapiens
ttcataaacaaggcaaaggtgcctatctgaagctattttaaagcccttgttgtggttcataggcttagagagagatgctttgaattctgcttccatgtatygtactaggggaaagacatggcattctccaaatattattgagaggcatctttaccacaaggcaggatagttctgggcatggggctccctttcgaccatacc

SEQ ID NO: 6580 - DNA, 201 bp, Homo sapiens
gtttctcatagactgtccagcatattggaaccgaagaaaaagagcaggcataaatactcagaacaataaacttgaaaaatgtaacctctggtatacatttratggtattaaatgaaaagcagtgaaaatgaaaaccttaaacatctgcatatactaagactatgttaagaagaaacgattattaaaagttaactaataaat

SEQ ID NO: 6581 - DNA, 201 bp, Homo sapiens
atgcccattaagaaaatgtggaaacaagaaatttaggcttgggagcaacggccaaaggagaaacaaggagaaggaagagatttacttttcacttttacctrtatatagtatttaattattttctgtaagtatattacttataatttttcaaagtaaatagctcagtaaaatgatcttctgtcaagctcaacaattgggtgc

SEQ ID NO: 6582 - DNA, 201 bp, Homo sapiens
tacataactaccaggaaactttttaaacacatgatgctaatttagcagccaacatttttgaacttcatggtctataaatttgtactgtttcccatattttsagtctctgtttctattttcttggtcctgactctcttttccattggaaattcatcatttattttactgaatatgaatatcctgctgagagctgtttatccc

SEQ ID NO: 6583 - DNA, 201 bp, Homo sapiens
caaaatcatattatggattgtatcatgctttttacataactaccaggaaactttttaaacacatgatgctaatttagcagccaacatttttgaacttcatsgtctataaatttgtactgtttcccatattttcagtctctgtttctattttcttggtcctgactctcttttccattggaaattcatcatttattttactga

SEQ ID NO: 6584 - DNA, 201 bp, Homo sapiens
gcttgataacttgcagagtaatagaaaaaccttgatttttcattgcatttccccttctgactttcttaggatctgagggacgacccttaacctttctcagyctcactctcctgtctcaaacaagctataataaaactttattccagtccactggggtattagaacaatgaatctgataggatgtccctaacacactgtgat

SEQ ID NO: 6585 - DNA, 201 bp, Homo sapiens
tattttcgaggcattttcatctacattactttgcaatcccgaaataggttgtgctttattctgaccctttacaattaccagaaaggaatgcagagcttgayaacttgcagagtaatagaaaaaccttgatttttcattgcatttccccttctgactttcttaggatctgagggacgacccttaacctttctcagcctcact

SEQ ID NO: 6586 - DNA, 201 bp, Homo sapiens
ccaatcaatcaagaatgtgcaaaatccatttcatatacattggtacaattagatactgacaataaggctctttcttaccttccatttgtactaaatatgayaaagatagcaagaataccttagctattttcgaggcattttcatctacattactttgcaatcccgaaataggttgtgctttattctgaccctttacaatta

SEQ ID NO: 6587 - DNA, 201 bp, Homo sapiens
tacgcacagggatatatatgaactcacagtaccaaaactttagaatcacatatgcaaacagtaccaatatacttaatgttttaaactgtgctagataacascccggctagaggcaagtgacataacggaaaaacatacagcatcaattcacatgttgccaactttttttggatagaactaacaggatgacactggtgatgg

SEQ ID NO: 6588 - DNA, 201 bp, Homo sapiens
tacttacatgtgattaataaccagtccttgttttattattaaattatggctcttaagtctgtgatactatattcatataaaaataaatgtatacatttaawctcaagatgcatagcaattaactggataacagagtaagatgatgcatagcctactttctacaaaggtaaagtagatttgtacgtggggtattcattactg

SEQ ID NO: 6589 - DNA, 201 bp, Homo sapiens
tcattttttcataggcatatgttcctaaaaaattttttaaattggatacagatttctctatcatgttagctaaaaagatactttgccaaatcattaaaatrtttatgtttatatccttatgtgagcttagagagaagaaactggatgggttttttatatcttatgttacttacatgtgattaataaccagtccttgtttta

SEQ ID NO: 6590 - DNA, 201 bp, Homo sapiens
aacaaggtatgcagtgcaaagaaaatgctggtgaaataagaatctgaaaatgaaaaccagaatgtcatcagactcaagaacataatcatgaaggcaaatcraaaaatcaatgcagaatttcaacataaaacaaatgcaatgtttatgatcctattagtcttaaatttttctcttaaaaggaaagcatagaaaaataagtgc

SEQ ID NO: 6591 - DNA, 201 bp, Homo sapiens
ttaagtcaaatgaacagaaaaccatcagtctataaactataaaagtgcacaagaaagaaagacaaagcataccgctctgtgtaaaatcatacagtagaagycaaacagataaatttcttgtggcaagccagggaaacagacacacaattcccagggctaagtctctcagtctaatgtaaggctcaatcctacttcccaact

SEQ ID NO: 6592 - DNA, 201 bp, Homo sapiens
tcataaaagatatcaaaagaaggtgaccttagggacaatgccgtgaaaaaacgacctgatttcccacctttctaagacatatttcactcttttaccaagawgatctttataagacccaaaactgattaagctaaacatctgctaaaacctttacatatattctgaaaatagtatgccattcatggcaccttgatctggtcc

SEQ ID NO: 6593 - DNA, 201 bp, Homo sapiens
aggggaaaaaaattatacaatgttaatacaagcttctacaagataaattcttggtaggaaaaaagtaatctctaaagatacatttgtaccttttctcatgwcaatactgagatttatgtaacaaaagtcactccacctttccttttatgccaataggcttataacaacatttgctttctaaaaattacaattctatttcat

SEQ ID NO: 6594 - DNA, 201 bp, Homo sapiens
atcagcaacggttaagagaaaacttaagctgaattacaacaaagataattataaatggataaaaggcacaattaataaagaagataaatcataaaccccasatgcaccaaaaaatattatgaatacaatctattaaaatacaagaaactttataaaaaataaagtcacagtgagaatttttactattaatgtatcttttta

SEQ ID NO: 6595 - DNA, 201 bp, Homo sapiens
ataattatactaacctctgttattccctagaacttgtttgctgaagagtgtatttaggcttttgggtcacatgagaaagagtaatgattagggtcggattstatctcttactttgttgtgtactaatgtgtaatgtcaagcatttaatacaaagtaacaaccaaagaactggaagtgtttaaatagtaagagcccaaaaat

SEQ ID NO: 6596 - DNA, 201 bp, Homo sapiens
tactactggagataaaaatataaaccccatgataagcatgttaccaacaaattaagatcttagggccagtggaacctgcgatcagctatataccgaattaygcacactggcctccagacagtccaaaatgatccgcaaatctttattcagaaaatttaccagaacaaaaggcaccacactgcttttcaaccatacatagca

SEQ ID NO: 6597 - DNA, 201 bp, Homo sapiens
tatcctaatgctgaatggcttcattagctaaagtcaacatacacatcagtgggtcttatgattgtaaaaccctagaggactgaaagcactagcatactgtmaaccctcaagaagtcagaatttgtgatacacacatagtgttgtgctgaagtttatgtttacttagcaaacccctatttcataaataatgaagtttaattg

SEQ ID NO: 6598 - DNA, 201 bp, Homo sapiens
tggtaacagagcgttaattaaattagtcaaaaaacatcaactaattgaagaacttggcaaactgtggtctttaattttaaggctaggtaaatgacacattktattttttatgtttcattatcctaagcttagatgtaatatttgggtaaaagttaccaggaatcagttataaaccagagatcattgccacagcaacatcat

SEQ ID NO: 6599 - DNA, 201 bp, Homo sapiens
tcctactacgcaccaagtgtgtgttaagtgctggttacagtaatagtcaaaatagacaaggtcccttctctcacagtgtagacagatttagacaactaatyccataaatagctatatgattacatattatgagtacaatgaaagaacagtactgggtgttgacagagaaaactaggaagacagaatttagactgaaatttc

SEQ ID NO: 6600 - DNA, 201 bp, Homo sapiens
gttcatttatacaactacttattgtactcctactacgcaccaagtgtgtgttaagtgctggttacagtaatagtcaaaatagacaaggtcccttctctcayagtgtagacagatttagacaactaatcccataaatagctatatgattacatattatgagtacaatgaaagaacagtactgggtgttgacagagaaaacta

SEQ ID NO: 6601 - DNA, 201 bp, Homo sapiens
aatggttcatttatacaactacttattgtactcctactacgcaccaagtgtgtgttaagtgctggttacagtaatagtcaaaatagacaaggtcccttctstcacagtgtagacagatttagacaactaatcccataaatagctatatgattacatattatgagtacaatgaaagaacagtactgggtgttgacagagaaa

SEQ ID NO: 6602 - DNA, 201 bp, Homo sapiens
tataataaagaacacctacacttctgaataacgcatccattcccacacattcacaaggttattaccattaaaatcttctccagaagaattttctgacaagraaagtatggctttgtttagaataagctgacaatgtcagtaaaacaagcaataaaatataaagggttgagggttttgtttttcgtttcacttctgcaactc

SEQ ID NO: 6603 - DNA, 201 bp, Homo sapiens
caaggttctgttataataactcaatctctatcaatcatttgttgcaccagaatggtgcaggacaggacatgcatttgtgagaactgcgcattcctcaggtrtaaagcaaaatatacggggcctccaagcacataagcagcccaattattgttattcaatgagagtgtttaaaatgaacattcaaaaaataatttaagaaac

SEQ ID NO: 6604 - DNA, 201 bp, Homo sapiens
tgctacatccctagtcatttagagaaaataaatgttgctgtctggctgagtcatttgttttcaaagtaggagacactgattccataacaaggttctgttayaataactcaatctctatcaatcatttgttgcaccagaatggtgcaggacaggacatgcatttgtgagaactgcgcattcctcaggtataaagcaaaatat

SEQ ID NO: 6605 - DNA, 201 bp, Homo sapiens
tattatcctaatggttttagaaatcatgtgaaattcatcagtaacaaaacctctatttagtaatggaccaattacatttgtgagataatgtcaatgaaacygaatattgtcacaggataatggtctcccattgctacatccctagtcatttagagaaaataaatgttgctgtctggctgagtcatttgttttcaaagtagg

SEQ ID NO: 6606 - DNA, 201 bp, Homo sapiens
tgatttagtgtggtagaaaaagaattacaaaaattttaaggtcatcagttcagcagctcaatgcaaatatgattactctgcacaatattctgttgctcttmatggaaaagtagtcaaaattggtataaattgtagtgtttaagttcaacctaaatctatattttttttctccaacaaatgtaaatgaagaaaaaaagaaca

SEQ ID NO: 6607 - DNA, 201 bp, Homo sapiens
attatattgacaagttttatcaagttgatacaccctcataattttcaaagttcttcattttttggacttttgaaagtattagactttcatagatttttttwaaaagagttttctagataaacaaaaactctgaatattgaaaacctcttcagagaccaaattcattgctgggtgaaggcaaaggtggtcaacacatccatc

SEQ ID NO: 6608 - DNA, 201 bp, Homo sapiens
gctgggatttgacaagattatattatattgacaagttttatcaagttgatacaccctcataattttcaaagttcttcattttttggacttttgaaagtatwagactttcatagatttttttaaaaagagttttctagataaacaaaaactctgaatattgaaaacctcttcagagaccaaattcattgctgggtgaaggca

SEQ ID NO: 6609 - DNA, 201 bp, Homo sapiens
agatcaactcatctcccaacaaggtaatttcatctacaaaggaagagagtcgctgtgaaacacagcgtatgtactcgactcatcggcagcttgcacaaatkgcgctccagatgtatatctgttcaagtcagcccaaggcaacaattttgatcaattctaatgtgataaaatgctgcagggaaagtgtgcagaaacgtgttt

SEQ ID NO: 6610 - DNA, 201 bp, Homo sapiens
acctaaaatgcagtctactcctctctaggtaaaaagtacacagtgttaattattagctgtatctcatttttaatttttgaaagatttggtattagctgttrgttaaagtacaaatgtcaaatattggattcattttcctacttaaattaagacatcagacacaatatcaagtgtactagcccaaaggatttgggcatataa

SEQ ID NO: 6611 - DNA, 201 bp, Homo sapiens
ttaaaccaataacagtttcactattaacatatttatatataaaactttttccacctaaaatgcagtctactcctctctaggtaaaaagtacacagtgttarttattagctgtatctcatttttaatttttgaaagatttggtattagctgttggttaaagtacaaatgtcaaatattggattcattttcctacttaaatta

SEQ ID NO: 6612 - DNA, 201 bp, Homo sapiens
tgaggaagtgcctaactataaatttaaaccaataacagtttcactattaacatatttatatataaaactttttccacctaaaatgcagtctactcctctcyaggtaaaaagtacacagtgttaattattagctgtatctcatttttaatttttgaaagatttggtattagctgttggttaaagtacaaatgtcaaatattg

SEQ ID NO: 6613 - DNA, 201 bp, Homo sapiens
ctggaggaaggatagcttgtgttggaaatggcaacggtgaaggtggaggtggagttcgagttgagatgactgcagaagacagaaaaggaaagattgactcrtcagctggttaccttattgctccattctgatcctgaagaatgctgtgaaactacaaaactggtaaccattcatttttgtccccatgatttaaccaagctc

SEQ ID NO: 6614 - DNA, 201 bp, Homo sapiens
caattattgatagccccaggtctggcacaaagactgtctacttgattgtggaaaatgctcatataccaaattcctatgaagtaacctcttggtagaagaarccatatgtctaggggagtgagaaatgctcatgagtcactacacttacaaaatgaatccccaaaaccactgcacaatgtttccaaaaaaaagaaagacgct

SEQ ID NO: 6615 - DNA, 201 bp, Homo sapiens
gctgacattgtttgctcaaagatgtgaagacatccacttttaaaatgagtacttagtgttttggtgactgtaatgcacatagcaaacctctagaacaaaayaatttttagtttttcctgagtaggtcgcatccatctgtgcattcagggaagtattctaagcattaagaattactgatgggtattacaagcctataggaac

SEQ ID NO: 6616 - DNA, 201 bp, Homo sapiens
tgaccatttatcctgtgataatctttcaactacttaaaaaaaaatctttgttttctgtgtgcttttatttaaattgctgacattgtttgctcaaagatgtsaagacatccacttttaaaatgagtacttagtgttttggtgactgtaatgcacatagcaaacctctagaacaaaataatttttagtttttcctgagtaggt

SEQ ID NO: 6617 - DNA, 201 bp, Homo sapiens
aaacaattcattaacaaacaggctgagggtactcctataagtgaactgtgatcatttgggtctgatcctctcctgaatctcttctattaataacaccacargagtaggcatcagagtttctagaacttggttttgaccatttatcctgtgataatctttcaactacttaaaaaaaaatctttgttttctgtgtgcttttat

SEQ ID NO: 6618 - DNA, 201 bp, Homo sapiens
tgaatattttgtaattttactagtcaaatcagatccctttttgaacaacctgtatgtaagtataaaaacaattcattaacaaacaggctgagggtactccyataagtgaactgtgatcatttgggtctgatcctctcctgaatctcttctattaataacaccacaagagtaggcatcagagtttctagaacttggttttga

SEQ ID NO: 6619 - DNA, 201 bp, Homo sapiens
gctacaagcttgtttataggaaagaaaaactactcactatgtttcttttatgtaggagtggaaaatggactgatgcagccatctttatacaaccaagataytccttttgaatattttgtaattttactagtcaaatcagatccctttttgaacaacctgtatgtaagtataaaaacaattcattaacaaacaggctgaggg

SEQ ID NO: 6620 - DNA, 201 bp, Homo sapiens
tggaattcaccacacctcacagacagccggagatgagcctcacccttacagaagagcaccaaatctatgctgctttttcttttcaactatgagaaagagcyttccttggcttctgtgttttctttgaccatagtactatatcaattcaatgaccagttttttattactggtggtgcctaagaagctggagctacaagcttg

SEQ ID NO: 6621 - DNA, 201 bp, Homo sapiens
ttcattacatagaggacaaattatctgtctgcatggtatttaacattttcagctataaagaacttttttttgcttccaaagattaatatatatcatgtatyccataagtattaactatagttgactgaacaaaacgtattcacattgtaagtggtctcgattcaatgttgtccacttaaataagtggctgtcttctttgat

SEQ ID NO: 6622 - DNA, 201 bp, Homo sapiens
ctgcatgcctcaaaactggagttcattataaaataaagcatatatgggcttcttcaaattaaaaagcagcactaactctttcattacatagaggacaaatkatctgtctgcatggtatttaacattttcagctataaagaacttttttttgcttccaaagattaatatatatcatgtatcccataagtattaactatagtt

SEQ ID NO: 6623 - DNA, 201 bp, Homo sapiens
tatagcatgatatgcatttatttacaggtattttctgcatgcctcaaaactggagttcattataaaataaagcatatatgggcttcttcaaattaaaaagyagcactaactctttcattacatagaggacaaattatctgtctgcatggtatttaacattttcagctataaagaacttttttttgcttccaaagattaata

SEQ ID NO: 6624 - DNA, 201 bp, Homo sapiens
aggatcatgtatattaaaggctatagggaatgtttaaaagaaccctctcagactaaagcactgcctttctaattttgaatttctcctagctaatataacaygattgattacctttatttcatgtaccccttgattttccttttcattcatcattgagtgctttaaaccaaatgcatttagaaactgcctctagaagaatgg

SEQ ID NO: 6625 - DNA, 201 bp, Homo sapiens
atgtacctggtgacgatatttattcttaaaggatcatgtatattaaaggctatagggaatgtttaaaagaaccctctcagactaaagcactgcctttctarttttgaatttctcctagctaatataacatgattgattacctttatttcatgtaccccttgattttccttttcattcatcattgagtgctttaaaccaaat

SEQ ID NO: 6626 - DNA, 201 bp, Homo sapiens
actgaagaatgtacctggtgacgatatttattcttaaaggatcatgtatattaaaggctatagggaatgtttaaaagaaccctctcagactaaagcactgyctttctaattttgaatttctcctagctaatataacatgattgattacctttatttcatgtaccccttgattttccttttcattcatcattgagtgcttta

SEQ ID NO: 6627 - DNA, 201 bp, Homo sapiens
ctacacatcagtacttttcataacctaaaaggataaatctttataaagcagccaccatgaactgaagaatgtacctggtgacgatatttattcttaaaggrtcatgtatattaaaggctatagggaatgtttaaaagaaccctctcagactaaagcactgcctttctaattttgaatttctcctagctaatataacatgat

SEQ ID NO: 6628 - DNA, 201 bp, Homo sapiens
actacacatcagtacttttcataacctaaaaggataaatctttataaagcagccaccatgaactgaagaatgtacctggtgacgatatttattcttaaagratcatgtatattaaaggctatagggaatgtttaaaagaaccctctcagactaaagcactgcctttctaattttgaatttctcctagctaatataacatga

SEQ ID NO: 6629 - DNA, 201 bp, Homo sapiens
aagaccgatttcttataaactagactttacttgactttattgtctcacttagggaaggcaaaagtgagctcctaatttattcagttgaaatctcaaatatwcatcaaaggttaatatgtacttcaatggcttgtttgaatggtgaacttttatttctaaacaagaagcttcttagctgcaaactttttatttccaacttac

SEQ ID NO: 6630 - DNA, 201 bp, Homo sapiens
gaggcaagttaagttccttgcccaaagtctcccacttagccctcagttatgactcagatctgtctgatttccctggccatttcactatattatattgcctmcacaggaagtcagatgacttaacataagaaagaacttttgaacagagtggtctgaaggcaaaattaattggcttcaggagacagtgaacttttcatgcac

SEQ ID NO: 6631 - DNA, 201 bp, Homo sapiens
gtgctatttcttaacaaataaaataaattacaaaaatggttatacattatttttaacttgaagtaagaagcatgtaccaaaagcaaaaggactaggtaaarcagataatccttgacagtaaaatacaatgtcaacaagcagcaaattgctttgcaaaattaacaagagtgccaaattaagtgagctcaagaaagtcatttg

SEQ ID NO: 6632 - DNA, 201 bp, Homo sapiens
gaacttcacagagaaaacgacctagtcacatctatctttatagagtctgagcatagctggtgctatttcttaacaaataaaataaattacaaaaatggttmtacattatttttaacttgaagtaagaagcatgtaccaaaagcaaaaggactaggtaaagcagataatccttgacagtaaaatacaatgtcaacaagcagc

SEQ ID NO: 6633 - DNA, 201 bp, Homo sapiens
gtgaacttcacagagaaaacgacctagtcacatctatctttatagagtctgagcatagctggtgctatttcttaacaaataaaataaattacaaaaatggktatacattatttttaacttgaagtaagaagcatgtaccaaaagcaaaaggactaggtaaagcagataatccttgacagtaaaatacaatgtcaacaagca

SEQ ID NO: 6634 - DNA, 201 bp, Homo sapiens
tacttcataaatatctctatctgggattatcttactaactgaaaggtgaacttcacagagaaaacgacctagtcacatctatctttatagagtctgagcayagctggtgctatttcttaacaaataaaataaattacaaaaatggttatacattatttttaacttgaagtaagaagcatgtaccaaaagcaaaaggactag

SEQ ID NO: 6635 - DNA, 201 bp, Homo sapiens
ctgcactttgtacatggtcctgttacagcatttattacttcataaatatctctatctgggattatcttactaactgaaaggtgaacttcacagagaaaacracctagtcacatctatctttatagagtctgagcatagctggtgctatttcttaacaaataaaataaattacaaaaatggttatacattatttttaacttg

SEQ ID NO: 6636 - DNA, 201 bp, Homo sapiens
cttttgaaaccatgaagtgagatagcactattgttgtagctatcaatctagatatgctcatttgttcatatttgaattccaaaagtacaaaaacctttacrgaatatcaacctaaaggaacaattctgaattttttttaaaacttgatacatactgtttttactctggtgatacctcgatacaaaatgttgcttgttgcta

SEQ ID NO: 6637 - DNA, 201 bp, Homo sapiens
acaggaggccacaaaggtctctgcttgcactgattagttctatagctctccagcagttttcttattctaaccctctttaacttacttttagagagagccasagcttttccttccaattcatggttccctacattggcttgcaacagaagcctgagcatttcctgctcctccccatcagtaatgataccacatttgagctgc

SEQ ID NO: 6638 - DNA, 201 bp, Homo sapiens
ggccaggggactccttaagacagcctaccatgtgtcaccaattctgaaagattttccttctagtaatgaatacactcaatgggactgggcggtgagggaarggcaaaataaaaccagcctccattcagcctctagccctcaggggaaacgaaatcaaatatatagttaaggtaccattccttaaaaaaatcccatcagcat

SEQ ID NO: 6639 - DNA, 201 bp, Homo sapiens
aggattctccaattttttttttccaggatattatagtccatcaatttccatacgactccacacacagtggtggaaaccagggtggtttggggacatgaaaraaacctcagccacaaatcagagttggtcggatcaggcagtcagatctgtctcagcaagtctttggttgggatagtcaaattccaggcatttttatctcta

SEQ ID NO: 6640 - DNA, 201 bp, Homo sapiens
atcaaagcaaatttaataaagaattttcaactatcttgcccactcacttgctttgtaattcagataaatgactcaacatctccaagcttctttcatcatcytgtaaaaggcaaatagcaatctctcccaagcagcactgtactgagaattaactgaattgctttatgtaaattctcagcacgataccttgttcatgggggg

SEQ ID NO: 6641 - DNA, 201 bp, Homo sapiens
acaaccacaattagcaccttgctggaataatgtcaaagatctcttaaagccaccgttcttttgtaaacccttctctgatgaaagaaaagtgaactgctgtyaccagcaccccgacccttgttccagggtcactaataacataaaaagcagaacttgtatatacagcaaatacagaactttgcgttgacctatttctgggca

SEQ ID NO: 6642 - DNA, 201 bp, Homo sapiens
agagaaagtatttcactccctaatgcagagaattaaaaaacaagatccactttttaatctttcttcctccagaagaaaatacaaacatcaggaatagcaawcgggctgatatggctggtggactctgttttcaaagtcttgaacatatttcccaatgccttaaaaaccttgaaatatttttaatattcctcattacttcta

SEQ ID NO: 6643 - DNA, 201 bp, Homo sapiens
gacggggtttcaccatggccaggctggtcttgaactattgacctcgtgatccgcctgcctcagcctcccacagtgctgggattacaggcatgagccactgygcccggcccacagttttcattttacacttttttctgcaattacctatgaggaaacacctatattctggaagaggcatcatttacagagaacaaaatattt

SEQ ID NO: 6644 - DNA, 201 bp, Homo sapiens
atgtgttccaaattagtgtggtgtttcttagctgtgtcagaaagtcagaggtgtccctgaggctgcagcgctttagcaaattttggaaataacttaggggraaaaaaggtaaattacacagttaatctggtcctcactctacgaatgctacaaaacaatgacgaaaaggttcacggctagaccattctcaccaagaaagac

SEQ ID NO: 6645 - DNA, 201 bp, Homo sapiens
aaaagtataaatttgcatcaggtcagatattttagtctgacaataaaacatacctcatcaaacaaaaaccattttttcttctgctgagttcaacagccacrcttgatttttaaaataataatgatagtcatgtaaactggatgcaaaactcaactcagctaacttaagaatatttttaaatacagtatatttgcagaatat

SEQ ID NO: 6646 - DNA, 201 bp, Homo sapiens
ggaagagagtaagaaatcttggccaggcacggtggtgcacacctgtaatcccggcactttgggacaccaaggtgggtggatcacctgaggtcaggagttcstgaccagcctgactaagatggtgaaactccgtctctaataaatacaaaaaaaaattagccggccgtggtggtgcatgtctgtaatccgagctacttggta

SEQ ID NO: 6647 - DNA, 201 bp, Homo sapiens
atcttgtccttttttattagtcattagattttccaaagcgtgtgtgtgtgtgtgtgtgtgtgtgtgtatgtgtgtgtgtatatgcatatatatatatatabacatatatatatatttggtatgccaaatatataatatttaccaaaatatataatatataccaaatatataatttggtataccaaatacacatatatatat

SEQ ID NO: 6648 - DNA, 201 bp, Homo sapiens
gccaaccaaaaccagtcctccctcattctcttccacctctcattttatcttcctcgatctcaatctctattttccccattctttaagtgtgggtttcatgytccccattctttaagtgtgggttaaacatatgtttattcttctaaaaaaaaagtaatgaagttatttctaaattactatattttaaactcaatcagttcc

SEQ ID NO: 6649 - DNA, 201 bp, Homo sapiens
ctgttaggtgtcccacattacactgcaagaaggaaagcttcatattagtttaggtactggatattgcaaaactgtaaaatgaaatgcttcaatgtaacatytgcaatttagttggctacaggcaaaacaatgtcttttgaaaatacagtgaagaaaaaagaatatctaaatatctgtgtctaaggactcctctagatgtaa

SEQ ID NO: 6650 - DNA, 201 bp, Homo sapiens
gagtagctgggattacaggtgcgcaccaccaggcccggctaattttttgtattttttagtagagacggggtttcaccatggccaggctggtcttgaactaytgacctcgtgatccgcctgcctcagcctcccacagtgctgggattacaggcatgagccactgtgcccggcccacagttttcattttacacttttttctgc

SEQ ID NO: 6651 - DNA, 201 bp, Homo sapiens
gcaagaaatggaaaaataatggctaaagcagcttttacgtaatctccaaagacatcaactttcacatcagtttctcatagactgtccagcatattggaacygaagaaaaagagcaggcataaatactcagaacaataaacttgaaaaatgtaacctctggtatacatttaatggtattaaatgaaaagcagtgaaaatgaa

SEQ ID NO: 6652 - DNA, 201 bp, Homo sapiens
cactttttttttttttgagacggagtctcactctgccacccaggctgctgtgcaatgacatggtctcggcccactgcaacctctgcctcccaggttcaagygattctcctgcctcagcctcccaagtagctgggactacaggcaagtgccaccacacccggctaatttttgtatttttagtagagacggggtttcactatg

SEQ ID NO: 6653 - DNA, 201 bp, Homo sapiens
atgagaaaagctatcattacgatagaggaaaaagtcatatgaccatatcaagatgctgaaaatgtacttgacaccaagaggcaggcttacctaataataartctaagcacaaatagagacaaagcaaataatacagactcttcagcaaaattcaacaataaattattctaaaaggggaacactagtctgtcattcctattt

SEQ ID NO: 6654 - DNA, 201 bp, Homo sapiens
gtagggtcactgtgaagatcagaaataaaatacagaagtacatggcccactgcttggcatacagtcaagactcagtaattagtgggtactctgcatgcttygatgtcacctcattaacagtttcacttctacctaaactaaaagcaggaacagggtgttcttattattttttaaaatctacagtagatatctgccctgttt

SEQ ID NO: 6655 - DNA, 201 bp, Homo sapiens
ttcttagagcactcttttactaaagtcaccaatataattcacattcttttaataatgaaaaactgcttgtgctagttttatctcatgagaaaaaacactgytcctaaatcaaaagcaaaatgttgtatgttcagagctatatgaagacagccaagttataaaagcccattttcagatctggaacaacttctgaaaacaaag

SEQ ID NO: 6656 - DNA, 201 bp, Homo sapiens
ataagttgaataataataaagttgaataatgcataaatatataataacttgaataatgcatacataataatgcataagttgaataatacataaaataaagmagctgaaaagagatgcaaaatgataggcaaaggattagctgatgtttctactggtgggagggaggcaggagttgctggtagttgaagagaaacaagtaga

SEQ ID NO: 6657 - DNA, 201 bp, Homo sapiens
gatctcggctaactgcaagctccgcctcccaggttcacgccactctcctgcctcagcctccccagcagctgagactacaggcgcccgccaccatgcccggstaatttttttgtatttttagtagagacggggtttcaccatgttagccagaatggtctcgatctcctgacctcgtgatccactcgcctcggcctcccaaag

SEQ ID NO: 6658 - DNA, 201 bp, Homo sapiens
acgaaaggacagatgagattgtttggggaggtggggggcatgtgtagctggttcggggtttttgtgtttggttttgtttttgttagtttattcttagagcrctcttttactaaagtcaccaatataattcacattcttttaataatgaaaaactgcttgtgctagttttatctcatgagaaaaaacactgttcctaaatca

SEQ ID NO: 6659 - DNA, 201 bp, Homo sapiens
acaggcattaaccaagacgtggcagagtgaaaaagaaatcatggatgaaatagtactcagatacttaaaatagtacttggatacctactagtgcttactcrttagcatacagaagacaatacttgagggctgtagcaaaataactgagaggattttgaaatgggcaggggtcctgcagtaggatagggggtgaaactcagc

SEQ ID NO: 6660 - DNA, 201 bp, Homo sapiens
aacaaacaggtccaacttttataaagaacaagctggagaggaaaacaacagaaaactggttttggctttcacttatattatattactcgaggtttagtagkcaagccacacaaattctgtgggatttagtcaccgttatccacctatgcccacattctttgcatggtagtaagacattaattaatttttacatctatcagg

SEQ ID NO: 6661 - DNA, 201 bp, Homo sapiens
gaagcagaggacaagcaaatgagcattgttatttgagttactcttacatccatggtggtgcatggagagttacacaaaacatttcttgttgacatttgtgrgaattaactgagaaaatcccctgggcaatgatagaaaagatgttactatctgagttttagctcctgggtacaaaaatagtttccgtggtaggaaacaaaa

SEQ ID NO: 6662 - DNA, 201 bp, Homo sapiens
tatggtgactattccttacattgttatagtctcatttgcaagtactttttgtacaactgctttttgctttttggtatagagtaaatttttcacacacacamaaaaaaaatgaatagggagctactcctaaagacttttgttacttttcacaaggaaaggactgaggtatcttcccagaactaggcaatcccactgctccat

SEQ ID NO: 6663 - DNA, 201 bp, Homo sapiens
ttttaattgcttgcctctaataaatgactacctttccaatggtagtaccaagctttggctttgccatttgccaggacaaatattataagaagatttaaacyaatatcttagtttaaaaaaatcctacagaagtaatttcttaaaaaggccattttgtgtaacagaaattttcagtgtaatgagaagtactttcaaattcta

SEQ ID NO: 6664 - DNA, 201 bp, Homo sapiens
ctaccttttccataaaagccattctagtcctttaaaaataagaaaagcaggccaggcatggtggctcacggctgtaatcccagcactgtgggaggtcaggrtgggtggagtggatcacttgaggtcagatgttcgagatcagcctggccaacatggtgaaaccccatctctactaaaaaaaatacaaaaattagctgagcg

SEQ ID NO: 6665 - DNA, 201 bp, Homo sapiens
aaagaaaaaaaaaatcctgctttcattatttcctgattctggagatccaataaaaactttatggaataaaaagtcttgcaaaaatccttcagtgaaaacayaaccaaccactcccacccccaacccccttctaaagtaatgagagttgataaactataattgcagtatggaaatttttacattttcttatgagttttaaaa

SEQ ID NO: 6666 - DNA, 201 bp, Homo sapiens
ccaggcacggtagcaggcgcctgtaatcccagctactcaggaggctgaggcaggagaattgcttgaacccgggaggcagaggttgcagtgagccgagatcrcgccactgcactccatcctgggcgacagagtgagactccatctcaaaaaaaaaaaaaaaaaaagtgaatgaaatatgatttgaaaaagccagagtaaatt

SEQ ID NO: 6667 - DNA, 201 bp, Homo sapiens
tttctcaaataatacactggtcaagttccaaaatttcattaaatatataaattgcatacataaaagttcctgtgtagcctatggaaacattttaaattttyttcagcaaaattgggcctaaagtttggaaaaattcctagagagtgaaattaatctctctgtccccatctctccctctctccctctctctttctctccctc

SEQ ID NO: 6668 - DNA, 201 bp, Homo sapiens
ttggcaacttcagttttggaagagaaagtaaacacatgctgattagcaaacagtaaactctactgtgtttaattttggcttctctttaaaaaaaaaaaaawaaaaacacaaaaaagccactatttggtgttgtgttccaagtaggagcatttgtccctaagttctttcctaaccccttactggagggcttccagaattgct

SEQ ID NO: 6669 - DNA, 201 bp, Homo sapiens
acataaaataaagaagctgaaaagagatgcaaaatgataggcaaaggattagctgatgtttctactggtgggagggaggcaggagttgctggtagttgaaragaaacaagtagaggccagtgatggcttaaaatcagacagaacaatttaaatttgatttagaaagtaataatttataaatgaattgattttagaagaaaa

SEQ ID NO: 6670 - DNA, 201 bp, Homo sapiens
ttgctcctgaatttatctgtatgagcaagtatgtgtgagagagacagagagagggagagagacaaggaaaggcagagagagggagagagaggcagtcctgycagagggctgactgtaaaagaatggaggattacacacttcactgttcaagggtgacagagggaaaacgaggctggcaccaagcaggaagcccaatcctgc

SEQ ID NO: 6671 - DNA, 201 bp, Homo sapiens
actcaatcagttccttcttctccaggttaaagattctccaggaacaagaaaaggttcacattcatgcacgacccttaccaacttttcaatcctttcgtccrctccttttttaaaagcggtcaatctctcgtggctcttctaatatctaagctttacctaaggagtgagcagtttttcctatgacccaattttatggaagat

SEQ ID NO: 6672 - DNA, 201 bp, Homo sapiens
ctttactttccccaatgagaaacttatagtgtgacaggtaagctaagagacaatctccataaatatgacagcagacatattgcacagacactaaaaaccayaggaataatgctgagaccacaagacagaaatagcccttgactttttctcgtaatggcaggtagaatgggtgggacagggagcctaaagccagataggaaa

SEQ ID NO: 6673 - DNA, 201 bp, Homo sapiens
tcttgatcctaatggacacaataaatgaggacatgagaaggaatagacatgaatttattaagaagtgaatgaggccgggtgcggtggctcatgcctgtaaycccagcactttgggaggctgaggcgggtggatcacgaggttaggagttcaagaccagcctggccaacatggtgaaaccccatctctactaaaaatagaaa

SEQ ID NO: 6674 - DNA, 201 bp, Homo sapiens
aaattcctaggatgctagagctaacagggatagtggatgtcctctaggccaattctcttccctgacagatacagaaactgagttactgagagggacaaagyttcccaagcacctgcaaacagtaggaccagcaatgtttttctcttccacttcagcaagctgcttcaatcactatatggcgtagagtgaatctctacatca

SEQ ID NO: 6675 - DNA, 201 bp, Homo sapiens
tcaatatgaaacgtaaacccacgaggatgatttaggtgatcttggagggagtcagaaatttcccaactttaacacgccctgatagcattatatttttttcmatatttccttccagtcctttaaactttttccgcatatatatatatatttatttataaaatcaatatcaaatttaaatatagttgtatccagcttttttcc

SEQ ID NO: 6676 - DNA, 201 bp, Homo sapiens
ctcaatatgaaacgtaaacccacgaggatgatttaggtgatcttggagggagtcagaaatttcccaactttaacacgccctgatagcattatatttttttyaatatttccttccagtcctttaaactttttccgcatatatatatatatttatttataaaatcaatatcaaatttaaatatagttgtatccagcttttttc

SEQ ID NO: 6677 - DNA, 201 bp, Homo sapiens
atgagctaatctctccactttccaaacctcctgtgcaaagtgaggggtgcagttcagtggccgtagggaaacaagcaccgaaactagttcctccaaggacstccatggacacaaccaaccagagctactgaagtcaaacacggtgatcccaaatcacagtttcgtaagaagtaaatgttgtaaccattctccacttggctt

SEQ ID NO: 6678 - DNA, 201 bp, Homo sapiens
aggcaaagtttgcagtgagccgagatcacgccattgcactccagcctgggcaacgagagcaaaactccgtgtcaaaaaaaaaaaaaaaaagaaagaaaagwaaagtaaaagaaaagaaatatattctaaacatgtgcagaaaactactaccaattttaaaagctaatttatcagttgaaagatttctgccacctatcattg

SEQ ID NO: 6679 - DNA, 201 bp, Homo sapiens
tcacactcttatttactgttacttatttcctgattgagcacataatactaaactggcatttttactctctagcccccagtgttcccttgggccctctggcytaatgcgtttgacatttaatactatatccttatagaactctagaaagtgcaaactgaaatttagcacaacagttaagactaccttactaatgagaatatt

SEQ ID NO: 6680 - DNA, 201 bp, Homo sapiens
tattaaatgcaagaacatcctgttagtttcttctcatataaaacctggttatttatttctgccctttgcctcatgcctgttagcttagatttaatgctgaratcagaattttaccccttcatcccatttccttaattgtctttttggttttattctagaacagatttcatgagatcttggcaggcatatttagtgattccc

SEQ ID NO: 6681 - DNA, 201 bp, Homo sapiens
taactatatgaaaatggtttaaccggaactgatataaaattgatcttagtttataaacatacacatgcccagtccataattaattcaaattcaacgaactktcactactgagaatactttagaaaaataaatatacaggtatccttttatttttaaaaagttgacattgtaaaatgagtgttttgctctagaattcatgta

SEQ ID NO: 6682 - DNA, 201 bp, Homo sapiens
ggctggagtgcagtggtgcgatctcggctaactgcaagctccgcctcccaggttcacgccactctcctgcctcagcctccccagcagctgagactacaggsgcccgccaccatgcccggctaatttttttgtatttttagtagagacggggtttcaccatgttagccagaatggtctcgatctcctgacctcgtgatccac

SEQ ID NO: 6683 - DNA, 201 bp, Homo sapiens
ccaagataaaacgtggtatgaggtcctcaaggacctatgcgaatttatctgcctttatgtacagattaaaaagtactaagtttgtcctaaattctaagatytgaaaaatcaagcaaatatcggctctagtgatctcaacagatgaacaaatgacaatgaatactgaagattttgaactagttttcctaataattatttggt

SEQ ID NO: 6684 - DNA, 201 bp, Homo sapiens
aaagggtccgatctgctatatgtcccctacaatattaagtacatacttctttcctggatctgttcttattttcaacagactctatttctagaatgtagagragaaaaggatttcaaacagtctggaaaatatcatttttaagttccaatcagagaacgttaaagccaataaggaacttgaaaggaaatctgggctatcccc

SEQ ID NO: 6685 - DNA, 201 bp, Homo sapiens
cacatccatcactccattgaaactctgtcaagcaacacagcactgaaagagaaaaatgagctttagcttaactgggatatttctgctttccattaaaatgytgggtggaagctggaagacaacaggaaaaagaaaagaaccatctgtataagataataatgttatttaaaataaataaggtagtaaatgacaggctaccaa

SEQ ID NO: 6686 - DNA, 201 bp, Homo sapiens
aagcatgtgctaaactttattaagtattgcttactatgaagaggactgctctctgccaagataaccagaaaccaaattcctaggatgctagagctaacagrgatagtggatgtcctctaggccaattctcttccctgacagatacagaaactgagttactgagagggacaaagtttcccaagcacctgcaaacagtaggac

SEQ ID NO: 6687 - DNA, 201 bp, Homo sapiens
agttactgagagggacaaagtttcccaagcacctgcaaacagtaggaccagcaatgtttttctcttccacttcagcaagctgcttcaatcactatatggcrtagagtgaatctctacatcagtaaacaaaggaatggaagaaggtaattccattatcaggtcactaaataatttagagtctaatttttctttttttaatgt

SEQ ID NO: 6688 - DNA, 201 bp, Homo sapiens
taaataacagaattctaaatggtttgtttgtactttccatgcaatatgtagattaaccatgaaattctgtttgggacactttgacatctgttttcagtgcrttacaatgaaatctggggacttgatacatacatttgctgtaataaaactgtcactaatcagtgttttccaaaatattgcccataactattactattcagt

SEQ ID NO: 6689 - DNA, 201 bp, Homo sapiens
gtttttgctttgctttcatgaatgcagtaacaaaggcaatatggggaataggtaacacctgcccaagaatcattggacgtctttaatatctttgggaaaayagataccatttagagctattttttctttaatctgtcccagtttttttagacaaaacctaaaaaaaggaagagttttatattagctaagatttgctgcagc

SEQ ID NO: 6690 - DNA, 201 bp, Homo sapiens
tgactttcacaacacagttacaacacatttatagtcaatccaacacatatatacagcccaccttaaagtgtcacctcctagacatctgtcaatcaaataartgtcatgtgttactgagttttattttaggacacatgggacaaaaatattattttccccaaaccatcattatttggactgtaattcttaaatgcatggaaa

SEQ ID NO: 6691 - DNA, 201 bp, Homo sapiens
gcatacccaaatgccatagaggaaatcattaaaccgatcagtagtttccagcagagatttgaacaattcagttactatgcgagcacattaaactaggccayggaaagagttaaaccacaatctgttctttgtgtgggaaggcagccctgctcacagcaaccacatcccatgataagacctccctatctccatacactttct

SEQ ID NO: 6692 - DNA, 201 bp, Homo sapiens
attttacccttgccatgctttttaaaatgcaatattattttataaatattaagccatgtggtaacacgtaagtacttacaccttaagtactatgttcagtracatttcattttcttataaagacatcaaacacagttttgattaaatttgagtttcaatatttgattataaatataatctatcacacaagaaagctcaaaa

SEQ ID NO: 6693 - DNA, 201 bp, Homo sapiens
tataaatattaagccatgtggtaacacgtaagtacttacaccttaagtactatgttcagtgacatttcattttcttataaagacatcaaacacagttttgrttaaatttgagtttcaatatttgattataaatataatctatcacacaagaaagctcaaaattttaatgagttattttaaacaaccaaaattcaaatttga

SEQ ID NO: 6694 - DNA, 201 bp, Homo sapiens
ctgcggtccccgcccctgccccggcaaatcctggagtcagcgttctgacaacgttaatttcctttgtgcgggtcatttcttctttttgaaaagctgggatraagttggcagtctttatggatgaaagaaatgaggtgacagggttaatccaagtaaatactcatttctctcagaaattttaggcaacctcatcttagatta

SEQ ID NO: 6695 - DNA, 201 bp, Homo sapiens
gaaagtgcctgtacttgatgagaattgcaaaatcaattttaccagctcaggtaatcaaattacccagctcttaaactactactgagtactactactactgkctactactcttaaacaaaaaacaaaatcatacccagcccttaacgtactactgtcaaattagggtagtaattttttccccaccagagaattcacaactgg

SEQ ID NO: 6696 - DNA, 201 bp, Homo sapiens
tccacaaggaggaacaccaaaaatccactcataaatgcatatataaacaatcaagaagtattgaaagtgcctgtacttgatgagaattgcaaaatcaattytaccagctcaggtaatcaaattacccagctcttaaactactactgagtactactactactgtctactactcttaaacaaaaaacaaaatcatacccagcc

SEQ ID NO: 6697 - DNA, 201 bp, Homo sapiens
ttttttttttttttttttttttggctcttgcatgtggtttgcaagaaggttcaactattctacacaccctggctgcatcaccaatatcaatatttaaaaastaaatgcaaaagagacagatgacctcctgaccccagaaagcaggcctgcaaaactgcaagtatctactgcaccatgccctgggatctttcctttttccaa

SEQ ID NO: 6698 - DNA, 201 bp, Homo sapiens
ctcctgaaaaattccaaacgataaatcccgctctcccgctcggctccaaactcctctcttttctgctctaggctcttttttttccctccctctcttgcttkctttcgttgcaaaacttggaagttgaaaaattcaccggttccaccctctggaccccgctcgagctctctccaaatcagacttaaggattgttttattatt

SEQ ID NO: 6699 - DNA, 201 bp, Homo sapiens
aaatcgtgtttctaaaaagtataaaaccagtgttttatttcataacattattcctaaggtcttaggacaattctcaaagtcgaaaaaaatgaccttacttytaccagcattacttaaaatgccttacgagctacgcccaaatatcgtcaaatgaacaggtttccacaaaaggaacacgttctaaaaactccttaacaatca

SEQ ID NO: 6700 - DNA, 201 bp, Homo sapiens
ccatcatgccaattgaaagttatattattaatggtttacattatttttaaacatatattaaatcatatgatagttcttaatttttcctttatatctgattyatactggtgtataaatattggttattgatatgctgattttgtagcatactattttgctaaacataacatttaatggtaggtccttttaaattaagatttt

SEQ ID NO: 6701 - DNA, 201 bp, Homo sapiens
tgctgtaagtcgcatatatttctgtattaacatgcctaaatgtcatctcccaagtgtgactgtttcctaatgctgagtaacactagagtcttaaagattaygagtgacatgaatatggaacataataactgtcctgatacaaaaatatttttttaaaaggtgattaaggttttcaaatatcctaactagtagtggattatt

SEQ ID NO: 6702 - DNA, 201 bp, Homo sapiens
atgacccactttttgaaactttacttccatccttgactttcacaacacagttacaacacatttatagtcaatccaacacatatatacagcccaccttaaastgtcacctcctagacatctgtcaatcaaataagtgtcatgtgttactgagttttattttaggacacatgggacaaaaatattattttccccaaaccatca

SEQ ID NO: 6703 - DNA, 201 bp, Homo sapiens
acaacagttgctatctcttgagatctttaaatgtcttggtgtgttgtgacctctctcttcaaaacgctttcctgcctcagagaaaggccaatcccactccsgccccccgactcccaccaccaccaccacccccttccttttttccccttcagacaggacacagtctggcaactcaaggcctcccataggccagacttcctt

SEQ ID NO: 6704 - DNA, 201 bp, Homo sapiens
atacacgacaacagttgctatctcttgagatctttaaatgtcttggtgtgttgtgacctctctcttcaaaacgctttcctgcctcagagaaaggccaatcscactcccgccccccgactcccaccaccaccaccacccccttccttttttccccttcagacaggacacagtctggcaactcaaggcctcccataggccaga

SEQ ID NO: 6705 - DNA, 201 bp, Homo sapiens
tcttatcagtgagaaaattgctaagtatcttatctcacaatatatgttcccacaaaggtctcattaagcctaggagcaagacatgccaataagagcccttytttatcttgtgaattgtgtatgagccagaatgcaaacaaatgtgcactagagttcacaagttcagtcaaggacaagttgctagatgggaaaacttaacag

SEQ ID NO: 6706 - DNA, 201 bp, Homo sapiens
tctcgaacaatgcatattattttggttcttacaaatatggagatatttggaattattttaccacacaagagacattgtgcactaaatttgtaaatccaaayacataatctaactatttttcattacaaaatttgtagtgctgtatatacagggtggggggaaggatgcctaatgctgtcagtagaatattttaccaacctt

SEQ ID NO: 6707 - DNA, 201 bp, Homo sapiens
tgagtgagagcttatgaggagaaagaccttgctatattgggtatcttggattgctgtttcaaattttaagtgccaaattcaaaagcaaaaagttaatggargattacaactttaacttccttatgacagcttcttcctaaattccaaatttagggaaaaacaagtaagtaaatgaaaaatcctaccaaatctattacgaat

SEQ ID NO: 6708 - DNA, 201 bp, Homo sapiens
gcgctagtgtcagaaagcaaacggttttatatagcctaccagtctagtttttcagtttaatctggctgagtgagagcttatgaggagaaagaccttgctayattgggtatcttggattgctgtttcaaattttaagtgccaaattcaaaagcaaaaagttaatggaggattacaactttaacttccttatgacagcttctt

SEQ ID NO: 6709 - DNA, 201 bp, Homo sapiens
aatctaaaacgtaagtgtagttctcccaaatggtggcaatttaatttttttgtacatgacagttttacacttttattggagtgcagtgaattacgagtacytgataggacaccctttacccacaccaaaattgagttatttattcagagagccactaataaaattatttgattccttcccttcaaatatacctagattgat

SEQ ID NO: 6710 - DNA, 201 bp, Homo sapiens
ttttttaaggacaatccagttggccgggcgcggtggctcacgcctgtaatcccagcactttgggaggcccaaggcgggcagatcacgaggtcaggagatgragatcatcctggctaacactgtgaaaccccgtctctactaaacatacaaaaaaaaaactcagccgggcgtggggaagggcgcctgtagtcccagctactc

SEQ ID NO: 6711 - DNA, 201 bp, Homo sapiens
agtcccttcaacaaagctgtaatgatgatgctttctgaacataagtgcggagtctatcattaacttagaccatttctatgaactaaagaataagactggastagactttaaaacggagtctacttccctttctctaggattagtagacagccttatcaatgccagataccaagagccacaagttcacaagatattaacaca

SEQ ID NO: 6712 - DNA, 201 bp, Homo sapiens
ccttactcagaagtcccttcaacaaagctgtaatgatgatgctttctgaacataagtgcggagtctatcattaacttagaccatttctatgaactaaagawtaagactggactagactttaaaacggagtctacttccctttctctaggattagtagacagccttatcaatgccagataccaagagccacaagttcacaag

SEQ ID NO: 6713 - DNA, 201 bp, Homo sapiens
aatccttactcagaagtcccttcaacaaagctgtaatgatgatgctttctgaacataagtgcggagtctatcattaacttagaccatttctatgaactaawgaataagactggactagactttaaaacggagtctacttccctttctctaggattagtagacagccttatcaatgccagataccaagagccacaagttcac

SEQ ID NO: 6714 - DNA, 201 bp, Homo sapiens
tcactaaataatttagagtctaatttttctttttttaatgtaaagaccttatgttcagaaacttacatttcaaagtacattaagtaaaattatgtccataygcagatatgtcttctcctatatgcatcttaataaacaaaaaaaattatcgtcatcccctacaaaacaaaaactgaaattaaaagaaagaatagagtaaat

SEQ ID NO: 6715 - DNA, 201 bp, Homo sapiens
tttcctttaaaaattgctgccatgttttcacgaaataataacctttcattattttttgataatttacgtttatttttcctcctacagcagtaaaagtaacrcatccaaagaagcactgggcctctcttagactcagtatcccaaactgtaaagtgagaagatctgtagggattttcccggctctaaaattctacaagttaa

SEQ ID NO: 6716 - DNA, 201 bp, Homo sapiens
gtctcttgaattaatttatcttaattacaaatgataatacaagatgtttaatcattatttttcttctattttcctttaaaaattgctgccatgttttcacraaataataacctttcattattttttgataatttacgtttatttttcctcctacagcagtaaaagtaacgcatccaaagaagcactgggcctctcttagac

SEQ ID NO: 6717 - DNA, 201 bp, Homo sapiens
acttcctatgaaaatgtataaaagaaaaaacctagtctcttgaattaatttatcttaattacaaatgataatacaagatgtttaatcattatttttcttcyattttcctttaaaaattgctgccatgttttcacgaaataataacctttcattattttttgataatttacgtttatttttcctcctacagcagtaaaagta

SEQ ID NO: 6718 - DNA, 201 bp, Homo sapiens
ttatctattttatagtatgctctcataacatttctattgattgtggtttcctgtacttgcattgtacccatcttttgttcacctatttttccatcaacaaytgtgcctgaaaaacatgctttcaaactttcaccatatactgtcaaactagaaattagctactagaagtagctgatattaaactttttctaatactctaat

SEQ ID NO: 6719 - DNA, 201 bp, Homo sapiens
ttctatattcagtataaataacttgcatgcattcatccattcattcaacaaatacatattatctattttatagtatgctctcataacatttctattgattrtggtttcctgtacttgcattgtacccatcttttgttcacctatttttccatcaacaattgtgcctgaaaaacatgctttcaaactttcaccatatactgt

SEQ ID NO: 6720 - DNA, 201 bp, Homo sapiens
attattatccagggacttaattatattaccagtgaaatgattttttaaatgatgtgtcatttttaatgaataagagaaaacagtcaaaattattcttcagrgaataatcttactcataatattgagatatttcttccaaccttatttgtgggactaaaagtcagtgctattggaaacataaaggaaaaaaataaacacatc

SEQ ID NO: 6721 - DNA, 201 bp, Homo sapiens
tatatatatacacatatatatatatttggtatgccaaatatataatatttaccaaaatatataatatataccaaatatataatttggtataccaaatacayatatatatatatgcatacacatacacacacacacatatacatgtacatacattaatatatataatcaacactgaactaaagaatcaacaagcccactgta

SEQ ID NO: 6722 - DNA, 201 bp, Homo sapiens
accacatatatattatatcttgtccttttttattagtcattagattttccaaagcgtgtgtgtgtgtgtgtgtgtgtgtgtgtatgtgtgtgtgtatatgyatatatatatatatacacatatatatatatttggtatgccaaatatataatatttaccaaaatatataatatataccaaatatataatttggtataccaa

SEQ ID NO: 6723 - DNA, 201 bp, Homo sapiens
ggatttaatataccacatatatattatatcttgtccttttttattagtcattagattttccaaagcgtgtgtgtgtgtgtgtgtgtgtgtgtgtatgtgtrtgtgtatatgcatatatatatatatacacatatatatatatttggtatgccaaatatataatatttaccaaaatatataatatataccaaatatataatt

SEQ ID NO: 6724 - DNA, 201 bp, Homo sapiens
aaggatttaatataccacatatatattatatcttgtccttttttattagtcattagattttccaaagcgtgtgtgtgtgtgtgtgtgtgtgtgtgtatgtrtgtgtgtatatgcatatatatatatatacacatatatatatatttggtatgccaaatatataatatttaccaaaatatataatatataccaaatatataa

SEQ ID NO: 6725 - DNA, 201 bp, Homo sapiens
ataaaaggatttaatataccacatatatattatatcttgtccttttttattagtcattagattttccaaagcgtgtgtgtgtgtgtgtgtgtgtgtgtgtrtgtgtgtgtgtatatgcatatatatatatatacacatatatatatatttggtatgccaaatatataatatttaccaaaatatataatatataccaaatat

SEQ ID NO: 6726 - DNA, 201 bp, Homo sapiens
aaatgcatttctcattttttcacctttagttcaaatgttctatattttccttgaaggatatattttcataaatccacaaatgcctacttctttgactataygatgatacatacggaatcatattaaacacataccaaaataaaaggatttaatataccacatatatattatatcttgtccttttttattagtcattagatt

SEQ ID NO: 6727 - DNA, 201 bp, Homo sapiens
tcttggttatctgtttcattttgttttggttttgttacataacccctgagaaaactctgcttaacactcacctcctctccgtgacctttccattgcagtcmcacagggttccctcccagaaagctccgcaaatctaactatatatagtagttggtgagagggttagttagttgtatacttgtcccactatctttggtattt

SEQ ID NO: 6728 - DNA, 201 bp, Homo sapiens
taatcaacactgaactaaagaatcaacaaaacccactgtatatcaccttataagagaacaaggggaagagaagtatgaaaataagaaaacctgatcactgycatctaagaactttcattcactttttatttgcctgaggagatggggaagtacagaggaactgagaatttcacaaactaggttcaaatctatctttgggta

SEQ ID NO: 6729 - DNA, 201 bp, Homo sapiens
acagttaagaaagaagtccagcgataactgcatggatcaaaattctgactctgtcacttaactagcttgccctcagagttctcatttgtgaaagggcagtraagtatctacctcatatggttaccagggaataaaggagtcaaacaggtgactttgcaaacaatacctggcgcatagtaaatgctcactaaatgttagcta

SEQ ID NO: 6730 - DNA, 201 bp, Homo sapiens
ctagtgtctgtatccactttatcttggggatcaaagttcctctgttttaactgccacattccatcctggacctaatagtttctgtgtaactaactggcaastctagcatcttgactgaaagttcacagttaagggctctgacataatgtccttgaggacaatggactcctctttcagggcaagagcagtcctgatcatgct

SEQ ID NO: 6731 - DNA, 201 bp, Homo sapiens
ttgtgttctcacacgttcacatgcacacacacacacgtgcacaccccacacgtgttttttttagggaaattaattcagtgaacataagaatgactaaatcycatatttataaatgcccagaggaacaaaaaatggatgctgcataggtcaaatatctgtactttaaaaaatcttattatatttcaaaaaaccaatgtaaac

SEQ ID NO: 6732 - DNA, 201 bp, Homo sapiens
gaagtcttatgggttccatagagcatgaatatcaggctgcttcagaaaactattaactgtaatgtactgtctgctgagtctgaagaaagtgaaaggagaastagtacatttataaaggaaggcaaggagtagaaaaatagagtggagagacacgtaactcaagcactctttatgtggtcatataaacacaacagacagtgg

SEQ ID NO: 6733 - DNA, 201 bp, Homo sapiens
tactgctgctagtctgtatttgctccttctgcacactcctttcacactcttcatctctggttccttatcttattatgaactggttgaagaggccatctcakacctcaatagaaggtacacttaccataaagctcccaaatgtaaacaatggtcctgtaataatgatgtgaactcagaaggtaagaatgatgtttagattcc

SEQ ID NO: 6734 - DNA, 201 bp, Homo sapiens
tgtttgcagctataaatttaaagcctcttcatcttcctgcaatatctttagtattaaaagaactttttaaattcttttctagcatttgtgctgccagtttyataaaacataaatccttctatgaaagcatatgactcttgctaaataacatcggcctgctccactttatcttctacctccaggaaagtcatccacagtagc

SEQ ID NO: 6735 - DNA, 201 bp, Homo sapiens
aaaacaaaatggcaagctatatatattgattaattttacattatatattttggaagggcaaattcattatttatacaggtgctacctgacctccatccagsaagttattcattttaacctattaacaagcacactataaacaacaatgaaagttacatgaccttacacagctgtctcaagccactgtacttccatcgttaa

SEQ ID NO: 6736 - DNA, 201 bp, Homo sapiens
gactgaacttttactttttaatgtgatatcacatataataccacatctcattctctacagattctgaaatgattcagggacttttaaatcagcatttgccmataaaaagacaaatttttcaaattctgcatcatatgtaaaactagctctttttcctttcctttttttaacattacagaagacctaaaaccttatatttga

SEQ ID NO: 6737 - DNA, 201 bp, Homo sapiens
acgctactgtatccaaagccattaggaacatcggtggtatgacaggtgctcatttaaaactttacaacctttcaaatgaataaatacgtagcctgttttasgttctaaatattcagggctgggcgcagtggctcacgcctgtaatcccagcactttgggaggccaaggtgggaagatcacctgaggtcaggagttcaagac

SEQ ID NO: 6738 - DNA, 201 bp, Homo sapiens
ctcatcttttcctatttcatttcctcagaaagactttcccaaaagaccttagccaacaaagacccccataccccattttcactttaatctatgtattatckatgaccctattagttttctcatagcatttaacacaatcggaaatgacttgcttataaatttgttgaattgatttgttgttccctgtgaatagacagtgag

SEQ ID NO: 6739 - DNA, 201 bp, Homo sapiens
tagaggaatacagcaaaatgcttcttatagatagctttctgataattatgaaaggttaacctgtccctgaggttatctcaataaatgcaaatggctcaaasggccttttaaccaaagctatattcataactgacgtcacaaatgagtactgaaagtactaggaaactgggttaattctcatcttttcctatttcatttcct

SEQ ID NO: 6740 - DNA, 201 bp, Homo sapiens
gaacacataataggaaaaaggtagttttatacaaaagcaaagatctgcatatggatcttttacatataaaatatttttaaatatttaattcacggtgaagmcaacctaaggttaaatcatgattccacaaaagtagtctatagaggaatacagcaaaatgcttcttatagatagctttctgataattatgaaaggttaacc

SEQ ID NO: 6741 - DNA, 201 bp, Homo sapiens
ctgaggcaggagaatcacttgaatctgggagagggagggtgcagtgagccgagatcataccattgcactccagcctgggcaatagagcaggactccgtctmaaaaaaaaagactgaaaaggcaaacttgatgaaaaggaagaaagaagaaactcaaaagcagtcacatctcaaaccttttgtttgaagataatatatacca

SEQ ID NO: 6742 - DNA, 201 bp, Homo sapiens
gtagaactgctgggtcctgaaagaacctacaagacactggggtgagaacacgtagagaagagtccaagtgcactgagaaaagtgaggcgcactgacttcaragaatggatctagtttctttcctgtcagtgaaaactgaagctcactggagttctgagacagcctctggtctcctggtccaccccaggatggctcaatatc

SEQ ID NO: 6743 - DNA, 201 bp, Homo sapiens
gacttgactgtggattctacttgagcaaaagatcctatggctgagtcttgggtatgaagagggagaagtttctcacataagcatgggcccatggggcttaractctggaaagacagctccaggggtactgccatacattgatgttggcaggatcttctgtttaaaaggtattggtggccgggcgcagtggctcacgcctgt

SEQ ID NO: 6744 - DNA, 201 bp, Homo sapiens
catcctgaggccgttaacttcctgactcctgcctttgaaatagaaccaggaactgagcttccatggcctagtttgacctggctttgtcactaccccagttstgatgagattatgatctgctaccctagaactaagcagaggtgagagccaagatgcctttctatggcctagagcacaagaagggcccacatagtaacaaaa

SEQ ID NO: 6745 - DNA, 201 bp, Homo sapiens
taccaaaaatattcattttgacccactttttctagaagcctctccctctaacaatattcatatgtaaaaccaacaaaaacactaatcaaattccagagagrttgaatttcagggtgagggaggtcttactgcatttttgccttaataatctcagtttcatctttcattccataccaaaacatggttacagggaaactatgt

SEQ ID NO: 6746 - DNA, 201 bp, Homo sapiens
atctatgcatgtgcatatatgtgcatttacaagcaaggtctagaggcctaaataataataatgatcttttgctcctcttcagtgaacttcagacaagtacyttaaagctacaagctttaaagtattagcttatgaaagcgccaaccatgcttccaaatttcaaaacaaaataaccttcgctaagtcaggaagatcacttga

SEQ ID NO: 6747 - DNA, 201 bp, Homo sapiens
tgatgaggctaatttattttacagtactcccgtgcactggttctctaatagctgctcaaaggccctccactgatccaaaagcccatctgctataatattartgttaataatgatacataggttcctgagataaataatttaattatcacatgcttattagggtctcaccaagagcagagccatttacctctttatttgaat

SEQ ID NO: 6748 - DNA, 201 bp, Homo sapiens
aaattctgtgggatttagtcaccgttatccacctatgcccacattctttgcatggtagtaagacattaattaatttttacatctatcaggagatttttcasttgctacaggatttgcaagggtacatgcatgtaaggagtagccagtttttaaaactgtgattacccttatctttcggtgagagaaagtatttcactccct

SEQ ID NO: 6749 - DNA, 201 bp, Homo sapiens
catgagagagaaattgtaccatttctcaaaggcagctttttggaagggaagatcaaagaggaggcagaattaaagccttagctcaaaaggaagacagattyccaaaacttcagcttttgccattaaaactttcaggtgtgtcccaagataaatgatacatcattggctactacatccccacagtggcctcactactacctc

SEQ ID NO: 6750 - DNA, 201 bp, Homo sapiens
catttttgtgatcctttgatttgggaaattgttttctcccattatcttataaacttcctcagtttacgtctatcatgattattgcatatcattgtgcattsactgacaatagtagatacttagcaagtactgtaaaaaaatagaaaggaaggaagagagagagggagggaggggagaagaagagaggaaggaaggagagta

SEQ ID NO: 6751 - DNA, 201 bp, Homo sapiens
cacatatttataagatccctttgttttatgctcttatagcatcatgtgccttttcaccaaatgattcaccacaattgttcattctacttttttttaagatygcgtctcactgttgcctaggctaaagtgcatttttgtgatcctttgatttgggaaattgttttctcccattatcttataaacttcctcagtttacgtcta

SEQ ID NO: 6752 - DNA, 201 bp, Homo sapiens
ctcccacctcagctctacttctttctttctttccttctttcctcccttccttccatcctagcaatcctcccacctaaactgcccttccttccttcccacckaaactgccctgccctcccctctcctccactcccctcccctcccttccttcctttcttccttccttccttcctgtagccttggtctcccaggctcaagtga

SEQ ID NO: 6753 - DNA, 201 bp, Homo sapiens
agaggcagtgaccatgcccagaagaggattctaaagtcctgcctttcaaatccctgacctagaaaaaaggactactccatttctcacaggaaaatgtgccmgtcatggaggcctacatggcacgtctctgcactgctccaggtcaggagggccatctgacactgcacaggcaccactgcagggcaaaaggatgatcaagca

SEQ ID NO: 6754 - DNA, 201 bp, Homo sapiens
cttaacactgtcaccattttacagacagatccagcaaatggttggaggccttccatgcgccatccaataatgcagggagaggcagtgaccatgcccagaasaggattctaaagtcctgcctttcaaatccctgacctagaaaaaaggactactccatttctcacaggaaaatgtgccagtcatggaggcctacatggcacg

SEQ ID NO: 6755 - DNA, 201 bp, Homo sapiens
gactgtctctggtatgatgcacaatgtatttaactttacaaacagactcattaatctctcaaaagcttaacactgtcaccattttacagacagatccagcwaatggttggaggccttccatgcgccatccaataatgcagggagaggcagtgaccatgcccagaagaggattctaaagtcctgcctttcaaatccctgacc

SEQ ID NO: 6756 - DNA, 201 bp, Homo sapiens
cataaagttgaaggcctgttaaaacgggtttagtatccctacaaagaagagatgccaatgtgcctgatctctctctctctctcttgctttctttcactatmtctctctctctctctgctttctgagacacaataagcaggtggctgtctgcaaaccacgaagagagccctcaccagaatccaatgatgctaattccctgat

SEQ ID NO: 6757 - DNA, 201 bp, Homo sapiens
cggattctcctcctacttatctgacttctcactatcattctcctgtattaactccaattcttctaaaagtcagcattcccctggttctctttatcaccctstgcaacctcaatcaaactttggcttcaaaggtttgggataacaacagctaaattcagacctgtattttcatttgcctgtcagacatcaacacttgggtca

SEQ ID NO: 6758 - DNA, 201 bp, Homo sapiens
ataccatataccagtgcagtcagatatattggagtcactaatacattctgaatctgctgattaaatgagagacattcaaaatgaatgaaacttacccacayactttctcatccatgtaagcaggaaagaattacatttcttctgagctaatgggaatgagtatagtaagctttaccgataactttaatctccacaatctcc

SEQ ID NO: 6759 - DNA, 201 bp, Homo sapiens
caggaaaccctaagctgcatgacatcatgtgggagtaaaatgactgagtgagctcaagccaggatccttgctgctggagggtttcctgcacaagggctagytgaagccacagatatggctgcaactgcattaaaatgacattggtagcagaattaaactgtctggtttcatggaaattaccgtatactgtagttatcacgt

SEQ ID NO: 6760 - DNA, 201 bp, Homo sapiens
gattctttatatacataagatcacaagacaagaaatggtcatttataaattatcctgtctcagagtgagcctcctaccatatgctgatattcaaccagaakaatttgtttgaaaaggcaaaaaaaattccagaagttaagcctataaggcaaaccagccagcaaaaggcgacagagtccacatgtctatcagatatttaat

SEQ ID NO: 6761 - DNA, 201 bp, Homo sapiens
cctcaccctgctaggtataacagtatgtgtgtgtgtgtgtgtgtgtgtgtgtgtgtgtgtgtgtgtgtgtgtgtaagctcctcaccctgctaggtataacwgtgtgtgtgtgtgtgtgtgtgtgtgtgtgtgtgtgtgtgtgtgtgtgtattctaccatattctgggttctgggcaaaacagcagattatcaaagtcctaa

SEQ ID NO: 6762 - DNA, 201 bp, Homo sapiens
taagaggtcagcaacatctcttgccgatctacattgtttcttattcaataaacatttattattgatctaccaagctcctcaccctgctaggtataacagtrtgtgtgtgtgtgtgtgtgtgtgtgtgtgtgtgtgtgtgtgtgtgtgtgtaagctcctcaccctgctaggtataacagtgtgtgtgtgtgtgtgtgtgtgt

SEQ ID NO: 6763 - DNA, 201 bp, Homo sapiens
ctcattattaatcagacttcccaacatgcttccaaggtatgcaaaatctcgtccccacataccagatgggaaagctgaggcatgcaaaagttaaataactmccaaatagcccaatataagaggtcagcaacatctcttgccgatctacattgtttcttattcaataaacatttattattgatctaccaagctcctcaccct

SEQ ID NO: 6764 - DNA, 201 bp, Homo sapiens
actgctcatgattactactcattattaatcagacttcccaacatgcttccaaggtatgcaaaatctcgtccccacataccagatgggaaagctgaggcatscaaaagttaaataactcccaaatagcccaatataagaggtcagcaacatctcttgccgatctacattgtttcttattcaataaacatttattattgatct

SEQ ID NO: 6765 - DNA, 201 bp, Homo sapiens
tggcatctttatgaatttaaggttctctataatgttgattatggctactgcttttgactgtatttttcaaaactgaccacaaaatagaagcttctaacttstctctgcccttgtgtttgcaatctccagagaaagcactccttaatttcatcatagtggtcagtaatctttagtgattgagacagaaattaaaattgatta

SEQ ID NO: 6766 - DNA, 201 bp, Homo sapiens
actaatagctaaattggcatctttatgaatttaaggttctctataatgttgattatggctactgcttttgactgtatttttcaaaactgaccacaaaataraagcttctaacttctctctgcccttgtgtttgcaatctccagagaaagcactccttaatttcatcatagtggtcagtaatctttagtgattgagacagaa

SEQ ID NO: 6767 - DNA, 201 bp, Homo sapiens
cattttgttagttatgctttgtaaaactagcatatttttaatttaatttacatcaatttaactaaaattttattaaacattcttaaacttggtggtgcatkcatttgttcgttgaaattttttttttggttttttttttttgggtatgttttaactatttcaacatacgtttttaaaaaccagatccaagaggatcagaat

SEQ ID NO: 6768 - DNA, 201 bp, Homo sapiens
aacattttgttagttatgctttgtaaaactagcatatttttaatttaatttacatcaatttaactaaaattttattaaacattcttaaacttggtggtgcwtgcatttgttcgttgaaattttttttttggttttttttttttgggtatgttttaactatttcaacatacgtttttaaaaaccagatccaagaggatcaga

SEQ ID NO: 6769 - DNA, 201 bp, Homo sapiens
aaaaaccagatcacaaacccatctgcaacagaagtacatgcaataaaagtactagaacaaaaatcaccacatttaagagagaagctacctcatggtgtagyaggataagaaggaatgagattgataagaggaggcatgtaggtatattatcattactctttttttttttttcttaatggagtcttgctctgttgcccaggc

SEQ ID NO: 6770 - DNA, 201 bp, Homo sapiens
ctgaatttatctgtatgagcaagtatgtgtgagagagacagagagagggagagagacaaggaaaggcagagagagggagagagaggcagtcctgtcagagrgctgactgtaaaagaatggaggattacacacttcactgttcaagggtgacagagggaaaacgaggctggcaccaagcaggaagcccaatcctgcctgaat

SEQ ID NO: 6771 - DNA, 201 bp, Homo sapiens
taactgaggatcccaagctgtagtggcagagctgccactctgtcactagaacaaaccactaagaaataaatacaacagggatatctgagtccttggcctasagtttttccatggggaaaaaaaaaaaaaaaatatatatatatatatatatatatatatatattcgttgagacatttgtttgtaagttcagattgctatct

SEQ ID NO: 6772 - DNA, 201 bp, Homo sapiens
agaagtgccctaaatatcacaggaaaatcaactacatacgatttcattttataatatttctacattcacgtacaggtaatctccaacttactattgattcrtgctctaaaagctcatcggtaagttaatggtcggaactcaatgaattctattgaaccaataacatattaggtgatcaggttgttacaccagcacgcaaag

SEQ ID NO: 6773 - DNA, 201 bp, Homo sapiens
tttcaggtagttgtttttattataatcattattatatgtaccacctacttgtaaaaacgctttgggcaggtttacagggaaaaaaaaaaaaacagtagtasagaaattcacttaaactaagtatgagaaaagaagtgccctaaatatcacaggaaaatcaactacatacgatttcattttataatatttctacattcacgt

SEQ ID NO: 6774 - DNA, 201 bp, Homo sapiens
taaattttcaggtagttgtttttattataatcattattatatgtaccacctacttgtaaaaacgctttgggcaggtttacagggaaaaaaaaaaaaacagwagtagagaaattcacttaaactaagtatgagaaaagaagtgccctaaatatcacaggaaaatcaactacatacgatttcattttataatatttctacatt

SEQ ID NO: 6775 - DNA, 201 bp, Homo sapiens
gtttagtagagataaggtttcaccacgttggccaggctggtctcgaactcctgacctcaggtcatctacccgcctcagcctcccaaagcctcccagaaccrcatccggccacgattcttaatagtaattcccacatctaaactatacaatgttccactcgaacccatttacaaaagccacactccattttagtggtcaaaa

SEQ ID NO: 6776 - DNA, 201 bp, Homo sapiens
cgcaatctcggctcactgcagcctccgcctcccaggtttaagcaattttcccacctcagcctcccgagtagctgggattacaggagcacaccaccacgccyggctaattttttgcatgtttagtagagataaggtttcaccacgttggccaggctggtctcgaactcctgacctcaggtcatctacccgcctcagcctccc

SEQ ID NO: 6777 - DNA, 201 bp, Homo sapiens
cactctcaactttactgtaattctccagaagagccaaaagaaaaaaaatccagaaatacagaacaaaatatttaaagatccaagccaaatgttttttaatratttttttcttttatgctgactgtatatataacattttgtcattctgatgaaatacatgttatttccttttgaaatctgaatgaatcacatttcagaaaa

SEQ ID NO: 6778 - DNA, 201 bp, Homo sapiens
cgggaggcggagcttgcagtgagccgagatcccgccactgcactccagcctgggcgacagagcgagactccgtctcaaaaaaaaaaaaaaaaaaaaaaaaragaagaagaaaataggtaatatgatagatttgaaagcaatgattgagcttgtgctgaaatgaagtgatggattgtgcctggaattttttggtttaatgac

SEQ ID NO: 6779 - DNA, 201 bp, Homo sapiens
aggataagtggtttctcaattttataaatttttctttgaaagaacctgttggcttttttaccttttcttataggagagcacatgacatttactttcttagmgaatttccagtatacattacaatattgttaactatagtcctcaacttttgcattaaatctcaaggcttattcatcctacaaaactgcaactctgtaccct

SEQ ID NO: 6780 - DNA, 201 bp, Homo sapiens
ttctcaaattttgtcccttgagcaaacaggattccccctgccttccaaaataatctaaaacaatattaaaagaaataaggtcacatcaaaataaaacaaayagtaaaatgtccctcgtccaattacgccttccagtccccacacttattatgtttgcctgaacaattaacagcttttaagatatttctggctgacccagaa

SEQ ID NO: 6781 - DNA, 201 bp, Homo sapiens
tagcccatctactccctcacccgaaaagtctgaactcctctaaggcctccatcagcagcaagatactaaactctgcatcctgaggtcaagccaagccaaawgttgacataccaggagtctctgcccctccgaccccagcttctagttgatattcccacatttcacttgaaattcaacatcctctcccttacaacctggcta

SEQ ID NO: 6782 - DNA, 201 bp, Homo sapiens
ggaaagcccaaagagagaacctgcacttctctgagcacatccctgaatgaggcaccaacttccccttccccaccagcctgctcttctcctcacaggtcctsagcatgctcaaggatctcaaagcacacagggccagtgtcaggagcatggacccatgcagtcacatagagccccacttacgtggtccccatgcttggcttc

SEQ ID NO: 6783 - DNA, 201 bp, Homo sapiens
gagccctcctcaacccttctttattactccccactctgctccccaaataggccacatcctagccccccattaattccccttcctgaagaagcgacagagayaaggaaagcccaaagagagaacctgcacttctctgagcacatccctgaatgaggcaccaacttccccttccccaccagcctgctcttctcctcacaggtc

SEQ ID NO: 6784 - DNA, 201 bp, Homo sapiens
gcttccttgcctctgttctcaacattccagaagtggtttgtaaacatacccccaactcccactgctccaaatttaaggggggaagagtcccctcatttcayctcacatcattttacttaagaatcgatgccaccttcgggctatgcatcaggtctcgtttccaatatttctagcagagccctcctcaacccttctttatta

SEQ ID NO: 6785 - DNA, 201 bp, Homo sapiens
agttaagataacagctacttcctgcttccccattccagtctcagagacacacaaacacaatatgcatcacatataaaatgtgataaaatcaaaaattatayatcaatcatgtttatgcactacattatttgcctatttccattcgtatttttgtaagcgctgtttctgaaaggtaatatagcatataattacacctttctt

SEQ ID NO: 6786 - DNA, 201 bp, Homo sapiens
ccatttatcataaaataagtgtcatctctaaaggtaactggactttccttaaaaatgaaccattctaacatgaaagaggcataaattaataaatccctgakaaagcctagcctacggctgtaaggaacatctaactgcttaactgggcaaccaaaagactcatacaaataattagaatacttatttccaattgatgaaagc

SEQ ID NO: 6787 - DNA, 201 bp, Homo sapiens
gtcagccctctcgtagactccaaaaggaaatcagagttgaacagtatagcatattgttattaaaagtgatttgagttgtgacatgaatattgtactttcartaaaggaggtatacactttagaaagctcttcagcctctagaaagaatagacatttaaaagattaaagcgtttaaagaatgatctctccactgaccagaat

SEQ ID NO: 6788 - DNA, 201 bp, Homo sapiens
aaatgtaaacattcatcactgagtcctaaaaaaacttcccatttcaaatttcatttgtgtcagtgctaatatgtatcaaaatagccgcatctcttgtacaytgtggattttctgggaagttactcacctttgattataggaaagtaaaggaaagtctaattaataggttgaaaccgtactgaatttctgcttctctgtata

SEQ ID NO: 6789 - DNA, 201 bp, Homo sapiens
aataacgaaaaatgaacttaaaaagtgattaaaacccttgagtttgagaacaccaaaaaaaacagaattgctttacaaattgtttttggcacttcacttaygaagaaaatacgctaaaatgtaagtatacatacacacatgtgcacactcacacaaacacacacccacacccctccattaatccctaaccaaatataaata

SEQ ID NO: 6790 - DNA, 201 bp, Homo sapiens
acatctccccaaagctttacaatgccatctgttctcatttttcatgacactacaaacattttcctttggaaaaaggattctgtattttgcttcctttttaraatgaaaactggaaaacttgaatgaaactaaatatatagagaggcatccaagttgtacgtgtaaagtagtaaatgtagagggtatttaaaacattttttg

SEQ ID NO: 6791 - DNA, 201 bp, Homo sapiens
gcatgtcagagtaaacaagttatttttttccactatcactttcttacatgatctacagcaaaattatgttgcctctgtcttatgaatcatcaatacatcayagcccagcctttttcatatatagtgggaaaaatgctgcagattataactactgtttctgacatggagatatttttaattcatttttatgacatgcttatg

SEQ ID NO: 6792 - DNA, 201 bp, Homo sapiens
cctattccaatgaccataatatgaaaatcattttgccaaaaaacatcctggaagtttccctcattttaggtacttgggattattctcataaactgaggacmattcaacaatgttttgaagatatacagtattctattcagaggacaaagcatatattcaaaaaaatgcaaaaatattcatcttttctcaaacaactccagt

SEQ ID NO: 6793 - DNA, 201 bp, Homo sapiens
ggtatgatctcggctcactcgcaacctccgcctcccaaggttcaaacaatcctcccacctcggcctcttgagtatctaggaccacagatgcacctggctawtttttttgtatttttggtagagacagggtttcaccatgctgcccaggctggtctcaaactcctgagctcaagcaatcttcctgcctcggcctcgcaaact

SEQ ID NO: 6794 - DNA, 201 bp, Homo sapiens
gcattattaattatgtttctgcgtaaaagacatttagggacttttatcctttgtttaattagttatcaaaataatcagtcacacagctatttaataatggrccactcttaacagacaggtgaaacagagtggttgtgttcaaaaaatatttctagttcactagtaacttactaactctctctctcttttttttttttttct

SEQ ID NO: 6795 - DNA, 201 bp, Homo sapiens
attctccagtagtcacctgaaaaacacacacacacacacacacacacacttttcctggacctttttacagcagaataatttctcagcattattaattatgyttctgcgtaaaagacatttagggacttttatcctttgtttaattagttatcaaaataatcagtcacacagctatttaataatgggccactcttaacagac

SEQ ID NO: 6796 - DNA, 201 bp, Homo sapiens
tcgtatattttgaataatgtctattctccagtagtcacctgaaaaacacacacacacacacacacacacacttttcctggacctttttacagcagaataakttctcagcattattaattatgtttctgcgtaaaagacatttagggacttttatcctttgtttaattagttatcaaaataatcagtcacacagctatttaa

SEQ ID NO: 6797 - DNA, 201 bp, Homo sapiens
ataaaaataatacaaatttcccttcaaaaaacatctgaggaattaactatgtctgtggcataaaactgaaaaaaaccgagatcagatacatagtctctgtragtgagttccaagggctgaccaaaggaacaaaaattggaaggaagggaggggaggggagggggaaaaaagaagggaggaaggaagggggagggaaagcag

SEQ ID NO: 6798 - DNA, 201 bp, Homo sapiens
aactcatttaatttgtggggaaaaaaaaatgttaaaaaaaacctcaacaaattctgaccatattaaaacatactacagagaagcatgagcaaagccaacastttcccatttgcaatggcatgattttgacataaacttataatctctatcaaagcatacgtgtatgaaaaatgaaaaccaaaaaattaatttgttttcttc

SEQ ID NO: 6799 - DNA, 201 bp, Homo sapiens
gtatttccctcataaataagacttggtaccacaacttttgtgttgcagtagttaaagctgcttgaaaaactaactacaaaggaatattggaatactaccaratagaaaatggtgacaaggggtcttttacgaaattctgctgacctcaacatttcaatcacacataatgcccgcaatattttctgctgattaaagaaactc

SEQ ID NO: 6800 - DNA, 201 bp, Homo sapiens
tttttgaatgatcatcaacacgagtgtctttttgtagctgtataagtgatttttacctccttctattaatatcctcttgcatgctttagaagccaaaggaracagcccccacattttttttttcctaaagcaattgtttcagttaagccaggcccatggcatcttttgagacagaaagctaccctttccattcacggcaac

SEQ ID NO: 6801 - DNA, 201 bp, Homo sapiens
aagaactgttactgggaatttatctctgaaacagtctcatgcattgcaggggacatttatctttttgaatgatcatcaacacgagtgtctttttgtagctrtataagtgatttttacctccttctattaatatcctcttgcatgctttagaagccaaaggagacagcccccacattttttttttcctaaagcaattgtttc

SEQ ID NO: 6802 - DNA, 201 bp, Homo sapiens
atggcgatcacacaattattacaattacatctgtaagaactgttactgggaatttatctctgaaacagtctcatgcattgcaggggacatttatctttttkaatgatcatcaacacgagtgtctttttgtagctgtataagtgatttttacctccttctattaatatcctcttgcatgctttagaagccaaaggagacagc

SEQ ID NO: 6803 - DNA, 201 bp, Homo sapiens
tttcactccataagaataattatcatggcgatcacacaattattacaattacatctgtaagaactgttactgggaatttatctctgaaacagtctcatgcmttgcaggggacatttatctttttgaatgatcatcaacacgagtgtctttttgtagctgtataagtgatttttacctccttctattaatatcctcttgcat

SEQ ID NO: 6804 - DNA, 201 bp, Homo sapiens
ctaatttaaaaaaatcatcaccaaagcaaagtttctaaatggaatgacataaaaatatcggttctacgtttcttgtcttttagaaaaacgacccatatgtrtagtattttatatggttttctctaacgtatctgagaaatgggtaagcaaatctatgcaaagagatatcatggattgtgatgtcatatttcttatgaaaaa

SEQ ID NO: 6805 - DNA, 201 bp, Homo sapiens
aaaggagtactgagagaaaacatcgttaagaattggttttctgctactcaaacccatcctcaagaaaaaacaaaagctaatttaaaaaaatcatcaccaargcaaagtttctaaatggaatgacataaaaatatcggttctacgtttcttgtcttttagaaaaacgacccatatgtgtagtattttatatggttttctcta

SEQ ID NO: 6806 - DNA, 201 bp, Homo sapiens
gaaagtctcaaaaggagtactgagagaaaacatcgttaagaattggttttctgctactcaaacccatcctcaagaaaaaacaaaagctaatttaaaaaaaycatcaccaaagcaaagtttctaaatggaatgacataaaaatatcggttctacgtttcttgtcttttagaaaaacgacccatatgtgtagtattttatatg

SEQ ID NO: 6807 - DNA, 201 bp, Homo sapiens
gaagagtcaaatactattttaggatgaaaattactttgtggtcacatcccattatagaatattgatggagccacactacatgaaagtctcaaaaggagtastgagagaaaacatcgttaagaattggttttctgctactcaaacccatcctcaagaaaaaacaaaagctaatttaaaaaaatcatcaccaaagcaaagttt

SEQ ID NO: 6808 - DNA, 201 bp, Homo sapiens
taaaagctcttgaatttcgtctgttacaaccttcctgaaccttattgccccatctaatgagaccaccctctggggcccacatggccttgctcacactttaktgcagggcccgaccagtgcattatagttggttgtttatacattactgctctccaagattgtgacctcctgtatcccaacttaccctgaataattttggga

SEQ ID NO: 6809 - DNA, 201 bp, Homo sapiens
aatcacgcagggagaacaggagcagaagggattgtccaaataaactgctccttactgctgctgctaacagagtgaatccagggacctggagcctggagcayaattttgcccctaggtctgaaggcctggtaagagcaatttaaaggggtgtgctcagtagttgggcatatttccttctattttctgtgaaactgttcatgc

SEQ ID NO: 6810 - DNA, 201 bp, Homo sapiens
tatgtactagcataaaatcaccactttctgagtcttttacagctaaaatagggaatcacgcagggagaacaggagcagaagggattgtccaaataaactgytccttactgctgctgctaacagagtgaatccagggacctggagcctggagcacaattttgcccctaggtctgaaggcctggtaagagcaatttaaagggg

SEQ ID NO: 6811 - DNA, 201 bp, Homo sapiens
atccaaggagactgcagagttgcacccagtttccactcagctattgtttttacttacacattagttggctcaatcatatttgctaaggtatttctgtatgyactagcataaaatcaccactttctgagtcttttacagctaaaatagggaatcacgcagggagaacaggagcagaagggattgtccaaataaactgctcct

SEQ ID NO: 6812 - DNA, 201 bp, Homo sapiens
tatccaaggagactgcagagttgcacccagtttccactcagctattgtttttacttacacattagttggctcaatcatatttgctaaggtatttctgtatrtactagcataaaatcaccactttctgagtcttttacagctaaaatagggaatcacgcagggagaacaggagcagaagggattgtccaaataaactgctcc

SEQ ID NO: 6813 - DNA, 201 bp, Homo sapiens
ggcagggtgaaccacctcatccctgccaaaccagaaacagtggggaaagcccagctaattggcaactcacagccggctacagtgtacatcctcggctttaratgcctgataaagttaaatggcctgccagaccctaatctacttaaacaggatcctcctttactttcaaaaacttaactcacccatttgtgtttccttaag

SEQ ID NO: 6814 - DNA, 201 bp, Homo sapiens
ctataaaaataaagacactgttgttattcttccaattgagttatttgcaaatggatcttcttgatggagcccagccctccgatatagaaaagaaaattctrtcagtcctctagggtacaattgccttgtggcaattatacccataaccacatttccttattactatttataaaagactgtggagttcaaggggaggcaaaa

SEQ ID NO: 6815 - DNA, 201 bp, Homo sapiens
ttattgacaaaatattgtattttttagaaaactccatatctaaggaatactttaatgaaataaagatgggttaaaacatcaagctaattttgtgagcacaygaaacagagaaataatctcaaagaaaatgataaattctaatttttatttgaaagtataaagcacatatgagacgacttttattgtgttgccacttcattc

SEQ ID NO: 6816 - DNA, 201 bp, Homo sapiens
ctatcttagaaatgggatgacagcaaagaactaagctccaccttcaatgtatttgaaggtctgtttggagccaatttacacaaaatatccacttaccaatktcacagaagatagaacaaaataacactgagataacgtattaggaaattattttttaatattggaggtgcactctaccacctcaatccagcacacattctc

SEQ ID NO: 6817 - DNA, 201 bp, Homo sapiens
gaaatgtataaactaaattttcagataggatttaaaaaattagtaactcaacaccagtaagaaaaactggtgtgataaagctttggatgatattatgcaarcttaattcccctgccccaaacaattgctttgaatcttacctaaatctcatccctccacccacccccaaaattagaattgccctgtaacggtaacttgtcc

SEQ ID NO: 6818 - DNA, 201 bp, Homo sapiens
ctgcatactcaacctccaacaaacacatacacaaaaacaagaaatcacatcattatttccaagttctagatagtgcttggttacaagaccagttgaacttytccttgtccactcttggtacctccaaaagatggaaaaggggaaggagggatcatccaattctttgtcagagttaattgccataggaataatttgagcctg

SEQ ID NO: 6819 - DNA, 201 bp, Homo sapiens
tatggttatttgggaaatgggaaaataaatgatgacgggcatgttcacttgctatatccattttaaaaaagggaactgagagtatactggtgcagagctaygtaccaggtgctcaaaattcctcccattttgtcttgttactcattttatctttaatagagattcaaatcaattccttatgattcaaaaatgcctaagcca

SEQ ID NO: 6820 - DNA, 201 bp, Homo sapiens
gtgaaataatgggtttgaaagaactttgaaaagtttacaagctcacagagacatgaagatggggcattttatggggcaatattctttcaaacagtcacttwaagagaacagtttaaaatacagataatcctggccaggcacggtggcatatgcctttaatcccaacactatgggaggctgaggtgggtggataacctgagg

SEQ ID NO: 6821 - DNA, 201 bp, Homo sapiens
cctctctacaaatacaaatgtagtgattgactcaatgaccaaaaagtcatattcttattttttcattgctcattttttcataggcatatgttcctaaaaawttttttaaattggatacagatttctctatcatgttagctaaaaagatactttgccaaatcattaaaatgtttatgtttatatccttatgtgagcttagag

SEQ ID NO: 6822 - DNA, 201 bp, Homo sapiens
caacacttaatatatctaggttaaaatcagacataagactttctaatatttcattggcaatctttcttctcagggagcaggacatgttctctccaaactgsctggagagtcaggactctgggctctatccggcaactgccaagcactagcacgctgactctaagcaaaccatttcacgcacgaatcagttttcatcttgcc

SEQ ID NO: 6823 - DNA, 201 bp, Homo sapiens
agaaattagacctctctgaatattttggcagaaccaatataatatttgggagatgcagtttcctgcatattttaaactatttactatttcaagtatgaagrcctatatcttcagatccctctttctgttgtttaacattgattttaaaatatacgtttgatttagcaaaacgcatagtttaaaaagatgttgctacactta

SEQ ID NO: 6824 - DNA, 201 bp, Homo sapiens
tttgttaatggaatccctgatcttgtttgttgtttgtttgtttgtttttttagtgaatccgtactcctcctaaacccagttctgagcaataagagaaattmgacctctctgaatattttggcagaaccaatataatatttgggagatgcagtttcctgcatattttaaactatttactatttcaagtatgaaggcctatat

SEQ ID NO: 6825 - DNA, 201 bp, Homo sapiens
gccagggaaacagacacacaattcccagggctaagtctctcagtctaatgtaaggctcaatcctacttcccaacttcctgaagaaatatttggaaacaagrtagggtggataagacatactattttgagttagaaattattttttgtccatctcctataaagagaagaaatgtttgttgaaggtccatgtccctactttgc

SEQ ID NO: 6826 - DNA, 201 bp, Homo sapiens
aaataaaaaaatacataaatcaagaggggacagatgattcttcctaggaaaggtgggcaagggcatatcataaaagatatcaaaagaaggtgaccttaggracaatgccgtgaaaaaacgacctgatttcccacctttctaagacatatttcactcttttaccaagatgatctttataagacccaaaactgattaagctaa

SEQ ID NO: 6827 - DNA, 201 bp, Homo sapiens
aaatttatatttaatttacaataatgacctttaaatattgttttaaaaaaagaatatatactctatgccatgtagaagctcagaggctgcctgaagagacrgaaatatacaaataaaaaaatacataaatcaagaggggacagatgattcttcctaggaaaggtgggcaagggcatatcataaaagatatcaaaagaaggt

SEQ ID NO: 6828 - DNA, 201 bp, Homo sapiens
gaggccaggagtttgagaccagcctggccaacgtggtgaaaccccgtctctaccaaaaaatacaaaaaagtagccaggtgcggtggcacacacctgtaatmccagctacttgagaggctgagacatgagaatcacttggacctgggaggtggaggttgcagtgagccaagatcggctcatgtattccaaacacctggtaat

SEQ ID NO: 6829 - DNA, 201 bp, Homo sapiens
aaggctgaagtctttgaggaacaaggctgctaagagttgtgagctgcccagcatactgggtctggtgtctgggaaaaaaaattttttttttttttttgagrcagagtcttgctctgtcacccaggctagagtgcagtagcactatcacagctcactgaagcctccacctcctgggttcaagccattcttgtgcttcagcct

SEQ ID NO: 6830 - DNA, 201 bp, Homo sapiens
ctaggtcaaattactctatacccaaaggttttatttaaccacttccatcactttgctcaacaccccccacctctctctctctctctctctctctctctctstgtgtgtgtgtgtgtgtgtgtgtgtgtgtgtgtgtgtgtgtgtgtgtgtatttaatatgttacagtgaagcctggctctgtccctcactagtgacatgat

SEQ ID NO: 6831 - DNA, 201 bp, Homo sapiens
acttcaaaatggtgccgcaaaactcttttccatcatctgttgctaaaatttgggtccagcagagaaaagaatgaaaagtctcttccattcgtaagaaactrtccagctagaacaatggcatcccctgttaccacaacatcccacttgggaaactctattcttttctgctataaattactttttcttctcatttccaacaac

SEQ ID NO: 6832 - DNA, 201 bp, Homo sapiens
tctctcatctcccatgaagtcctcttattactttttctgaaatcaaggcaagattcagtgacttataaattaggagatcaatcttcttcgttctacattcytttaaaaaactggtacaatatgggccactttccaggcctggagtatgatagctacataaaaatgataaatcataactttttgctatagcatcagctattt

SEQ ID NO: 6833 - DNA, 201 bp, Homo sapiens
gcaaatgtgtatccctagaaaaatgaagtgcttagcgcttctcagccaaaattgcaatgccatgtccttgggtgctatctgagttgtagagcaccttcacwccaaaaagattacggtgcccacccctgccacgtaacaaagaatgcaaacaaaacatttaagtcacaaatcgtttaaagaaataccataaaggctacttaa

SEQ ID NO: 6834 - DNA, 201 bp, Homo sapiens
tgaaagaaacacttccctcatcctctcttcctttactctgaatcctattctaaatttgaacatttaagaactttattgaatgtgacgtctccaaacaagtkagaggataaagaagaaaaatgttttaaaacaaaatacattaaaaaaaaagtcctttgattttagcactgacccatacagacctcattctcaaattactta

SEQ ID NO: 6835 - DNA, 201 bp, Homo sapiens
ccctttttttgactctttcacattaagtattacaaataatcaggctagaagcactgtggaggctgggcatggtgccaactgctatgtagatcaacctttcrtgagtgggctgtatacaagttcccataatgtaccctgtaaaattatgtagctgagggctatgcgttcttctggctttttaagagtaatttgtgaaagaaa

SEQ ID NO: 6836 - DNA, 201 bp, Homo sapiens
gatagagtaggtgactggggagacatggaaaaatctccttctctcaggaccttacaagacattcctaaattgtcccctttttttgactctttcacattaastattacaaataatcaggctagaagcactgtggaggctgggcatggtgccaactgctatgtagatcaacctttcatgagtgggctgtatacaagttcccat

SEQ ID NO: 6837 - DNA, 201 bp, Homo sapiens
tataatttgttatctgatagagtaggtgactggggagacatggaaaaatctccttctctcaggaccttacaagacattcctaaattgtcccctttttttgmctctttcacattaagtattacaaataatcaggctagaagcactgtggaggctgggcatggtgccaactgctatgtagatcaacctttcatgagtgggctg

SEQ ID NO: 6838 - DNA, 201 bp, Homo sapiens
atataatttgttatctgatagagtaggtgactggggagacatggaaaaatctccttctctcaggaccttacaagacattcctaaattgtcccctttttttkactctttcacattaagtattacaaataatcaggctagaagcactgtggaggctgggcatggtgccaactgctatgtagatcaacctttcatgagtgggct

SEQ ID NO: 6839 - DNA, 201 bp, Homo sapiens
ctgcttctaatgttgagctgactcaaatgtagtatttaattgttaactcagcaatcgttaggcaattaatataatttgttatctgatagagtaggtgactrgggagacatggaaaaatctccttctctcaggaccttacaagacattcctaaattgtcccctttttttgactctttcacattaagtattacaaataatcag

SEQ ID NO: 6840 - DNA, 201 bp, Homo sapiens
tattttacacaagggcaaatggctgtctctgcttctaatgttgagctgactcaaatgtagtatttaattgttaactcagcaatcgttaggcaattaatatwatttgttatctgatagagtaggtgactggggagacatggaaaaatctccttctctcaggaccttacaagacattcctaaattgtcccctttttttgactc

SEQ ID NO: 6841 - DNA, 201 bp, Homo sapiens
aataaatatctgctggctgaaaaatctacctatagacagctctttctgaattgtttatggttcttggtataaaatggtgtgtattttacacaagggcaaayggctgtctctgcttctaatgttgagctgactcaaatgtagtatttaattgttaactcagcaatcgttaggcaattaatataatttgttatctgatagagt

SEQ ID NO: 6842 - DNA, 201 bp, Homo sapiens
ttgctttctaaaaattacaattctatttcatcatgagacttgaaagcatctgtttcttttgcctcctttataaaatctctaacattctattcttatgcatyttctgtaacttgggtatgtcatcttaagcctttagagaagagcagtataaaaattcaacactttttttttttttgagacggagtctcactctgccaccca

SEQ ID NO: 6843 - DNA, 201 bp, Homo sapiens
aaaaaattatacaatgttaatacaagcttctacaagataaattcttggtaggaaaaaagtaatctctaaagatacatttgtaccttttctcatgtcaataytgagatttatgtaacaaaagtcactccacctttccttttatgccaataggcttataacaacatttgctttctaaaaattacaattctatttcatcatgag

SEQ ID NO: 6844 - DNA, 201 bp, Homo sapiens
atgttaaattggagttaaccatgagacatctagggaaacatgtccgaaaagtagttggacacataggtctaaatcattaggagagagaggtatttcaaagrtaaacatctaggagaaaaggttaatatactttaaaaatcgcaaggtactgaaaacacagagaattaaagacaaaaatctgattaagaagacagaagaaat

SEQ ID NO: 6845 - DNA, 201 bp, Homo sapiens
ttcaagagacctttcaaagtagaatatgaatgaatatgtggaggataaggaagaaaaagggttcctgggaaagaaatcatgagcaactctaaccaagggtrtctagataggattctggtgactccaggatatcttaaaaagggaaaaagcaaaaacaaagaaaacaaaaaacccaagtctggtaaaataaaataaatttaa

SEQ ID NO: 6846 - DNA, 201 bp, Homo sapiens
tttgtgatacaaaacaatcccagctttccgtctgtgaggcagaaaatgctttgcattattaaattgtagctgtatgtggcaaaagcagatcttgtaaatayggagagggaaagaatttaaactgagaggaaactttggatgcaggaggccaccgtagaaggaacctgaggccaggcatggtggctcatgcttataatccca

SEQ ID NO: 6847 - DNA, 201 bp, Homo sapiens
ctttgaaaaccaaaacctgaccattgtttcttaaattcttctatgatcaatgacattatcaagcaaaagctaataagagtcagctgggtgtggtggttcaygcctgtaatcccagcacttgaggaggccagggtgggcggatcacatgaggtcaggagttcaagaccagcctggccaacatggcgaaaccccacttctcct

SEQ ID NO: 6848 - DNA, 201 bp, Homo sapiens
tactagaaatgtgagtaagaaccacctttgaaaacagcaccaggtccaggcgagtgcacagctggattttatgtatcctttatctagtctttaggttccartgttatttacactctcccaggccttaggaaataagacaagcttcctcatgaagaacactttcttataagcctctatgaggccagcaaaacttgaatacct

SEQ ID NO: 6849 - DNA, 201 bp, Homo sapiens
attctctaaaaagaccaacaagacagaaaaaccacttccatgcctgattaagggaaaaagagaaagtaaaaatatacaagtatagtcatgaatggcttaayggcagggacacattctgagaaatgtgttaataggcaatttcatggttgtatgaacatcacagagtgtacttacacaaacctagatggtataacctactac

SEQ ID NO: 6850 - DNA, 201 bp, Homo sapiens
acaaccaccccaaaaattaaaaagatgaaattaaacataaaagctgaaattaacagaatagaaaaaaagaaatatttaaaaaaataaataaaacaaatgaytctctaaaaagaccaacaagacagaaaaaccacttccatgcctgattaagggaaaaagagaaagtaaaaatatacaagtatagtcatgaatggcttaacg

SEQ ID NO: 6851 - DNA, 201 bp, Homo sapiens
taagggataaaataaaatacataaatcactacaataaatgtatacggactgaattttcccataaagggagtttaggtcaactgaaaaatacaaaatccaaytgttttcaagaaacacacctaacacaaaatgataataaagagaacaaaaagttgtaaataaatgggtaggcaaagagaaatcaggcaaattcaaacaaaa

SEQ ID NO: 6852 - DNA, 201 bp, Homo sapiens
tatcaccatttactatgtaaacctaaggcaagctgtctaactcttctacacctcacatttctcttccctaaaatataggtaataatcatactacctatgaktagatgcaaaaattgcataatcttttcaagtaatagtaaagcagacatctcaagagcaggaaaagaaaaagtagaatttccaaattagcaaagagaaaag

SEQ ID NO: 6853 - DNA, 201 bp, Homo sapiens
agctgtgagcatgtccatctcacagtcctgctgccagacttacatattagtagggatttgtttttaattgtggcaagttgatagagaaaaaaggtcattayattaatgttacaactttcatttatttcattttaataaaatggactcatttcagatatatgagcatatttctttcaccagaacattaagaaacaaaacatt

SEQ ID NO: 6854 - DNA, 201 bp, Homo sapiens
atgtgtaatctgaagttcatttccttattactccaatgagaagtcagagatccatctgctcctaagtcatgaccattaagatggagtggggtgtgagcctrttggaagccaaatcatgaagaagggatgagtcagctcaaggccaattctaccagtgggaagacagtcaggcagtcaaacacagacaatacaatgactatt

SEQ ID NO: 6855 - DNA, 201 bp, Homo sapiens
tacatttaaggttcaaaatacaaagtattttaaatcatactgcatgcttaagtagtaacaaaacaatttacttacttctggatactcttacaagttctgayacattgaagactccagattttacaaaactatcctcaaggtaacctgaaaataaatattaaaggaaaaatgatcaatataagcagaaagtaaaataaatga

SEQ ID NO: 6856 - DNA, 201 bp, Homo sapiens
caagcaaaatatattgttatttcatcaaaggttttaagattttaattcaaattttcctaatatgtggtcactctttatactacatttaaggttcaaaatayaaagtattttaaatcatactgcatgcttaagtagtaacaaaacaatttacttacttctggatactcttacaagttctgatacattgaagactccagattt

SEQ ID NO: 6857 - DNA, 201 bp, Homo sapiens
aaacaatctgtctggcttcctatcacagtaatggatacaattcatagacctgagttattaacaggaaacttagaggttccaccttacataaactattttcratttattaagctcatgcaatatttaggcaaagatttatagtttctattgaatacatatggctccatagttaacataatttgcttacccataaataaacta

SEQ ID NO: 6858 - DNA, 201 bp, Homo sapiens
ttgaggcacaccaaaggttaaaaaaatgtgaggtaagaaatcccacagtaaccgcatgttttataatttattattagaaccatgttctatatgacactggmagtggggtacatgctagaaggagtatttcaggggctcaagtgaagtaaacaatctgtctggcttcctatcacagtaatggatacaattcatagacctgag

SEQ ID NO: 6859 - DNA, 201 bp, Homo sapiens
attgacaatgcaatccaaagataaggtaataaagtaaaacaagagctttggagtcaagacagtcctagtataaaatcttgagtaggccacttatgaattgytaatagtaagctccttaacttatctaaactcagtttaatcatctgtaaattggaaacaataaaacctagttcaaaggcagacggttggaagagtaaaatg

SEQ ID NO: 6860 - DNA, 201 bp, Homo sapiens
agtcagttgtgctaaaggaggtacacttgactcaaaggccaatgtctccatgaagatttttcactattctttaaactccatggcactcggtataaaaaatktgagcagcaaagaaggagcactgaataaagaactgactttggccttaactgttaaggcccagagttatgtgtctcctaagagtactcaacatagagtacc

SEQ ID NO: 6861 - DNA, 201 bp, Homo sapiens
tggcaaagagtttgccagatgaagagttagcagagcattccagaggtcataacttataggaaggtcccggttgttgaattcgcaacttcaagtaaagcagygggctcaagtgcaagcaagaggaagcagaatgtcacctgccaaggctatggcctgttggtgatatgaaaagattcccattttttcctgagagcagtggga

SEQ ID NO: 6862 - DNA, 201 bp, Homo sapiens
caaagtgacactctctataataaagaacacctacacttctgaataacgcatccattcccacacattcacaaggttattaccattaaaatcttctccagaakaattttctgacaaggaaagtatggctttgtttagaataagctgacaatgtcagtaaaacaagcaataaaatataaagggttgagggttttgtttttcgtt

SEQ ID NO: 6863 - DNA, 201 bp, Homo sapiens
ttaggttggtatttcagattgaaagggaaagcagaatgccacatattgtccataattttgttatctttgattctcatatttaataaatcaattttgctaasggctatgtcaagaacagattttaatgcaaatttaacactaacagaataaggcatacccaggaaataattaatagtaaattttaaggatttctgcccattt

SEQ ID NO: 6864 - DNA, 201 bp, Homo sapiens
actcagatggaaaaaaaaataagaaagacaagatcttaatggaattttttatggaggaagtattggaataaaagaaatgttcaacttgcctgttgacagtmtaatctggttctattcattaatcattaaaatcttaaatgaagaaaagcaatatccaaaaaagaaagtttttaatagagagagaagcagtcaggagtttaa

SEQ ID NO: 6865 - DNA, 201 bp, Homo sapiens
atctgagggttttaaaaacaggagttccctgcacaagctctctctttgcctgccaccatccatataagacgtgacttgctcctccttccaccatgactgtkaagcctacccagccaataaacctcttccttttgtaaattgcccagtctcaagtaggtctttatcagcagcatgaaaatggactaacacactgagcaacgg

SEQ ID NO: 6866 - DNA, 201 bp, Homo sapiens
tgctcacaaaaaaaaaaaaaaaaaaaaaaaacaacgaaatccccagctgcatactgcaaatatatttaacatatcatattttttctcattaaatgtctatwaaatgttttagaaattttacattcagacttagataaattagtgactattagaatggcagtggcaaagtgaccttataaagaattgttttcaatgttcaag

SEQ ID NO: 6867 - DNA, 201 bp, Homo sapiens
tgctgctcacaaaaaaaaaaaaaaaaaaaaaaaacaacgaaatccccagctgcatactgcaaatatatttaacatatcatattttttctcattaaatgtcwattaaatgttttagaaattttacattcagacttagataaattagtgactattagaatggcagtggcaaagtgaccttataaagaattgttttcaatgttc

SEQ ID NO: 6868 - DNA, 201 bp, Homo sapiens
atcctgggcaacagacagagaaaaaacagaaatgctggcctctgattctggttctgtcagcatgctatcacactcttatttactgttacttatttcctgaytgagcacataatactaaactggcatttttactctctagcccccagtgttcccttgggccctctggcttaatgcgtttgacatttaatactatatccttat

SEQ ID NO: 6869 - DNA, 201 bp, Homo sapiens
gctacctgtgaagctgaggtgggaggatcacttgaacctgggggggtcagggctacagtgagccatgatcgtgccgctgcactccatcctgggcaacagasagagaaaaaacagaaatgctggcctctgattctggttctgtcagcatgctatcacactcttatttactgttacttatttcctgattgagcacataatact

SEQ ID NO: 6870 - DNA, 201 bp, Homo sapiens
ggaagggctcaataaataaatgacaaccacaaatggcaatagaatcttgttttccatgtttcatttacatgtgcttgttgaagacaatttttaaatttacrtgctttcttcaataaataaataacacagaaaaaggaggcgaataatcagtgtaggctaaaaagaaggtgaaaatacaaatataatctatggactaaattt

SEQ ID NO: 6871 - DNA, 201 bp, Homo sapiens
tcatttagagaaaataaatgttgctgtctggctgagtcatttgttttcaaagtaggagacactgattccataacaaggttctgttataataactcaatctstatcaatcatttgttgcaccagaatggtgcaggacaggacatgcatttgtgagaactgcgcattcctcaggtataaagcaaaatatacggggcctccaag

SEQ ID NO: 6872 - DNA, 201 bp, Homo sapiens
cttaaaaaaatcctttgaataatgaagaacagtgctaaaacagtgaatatggaataaatgaaaactactttttaaaaacacttcaaaatgcttttgtccamtaagcaatttcattttaacagacagacaatgataaagggtcttgagtaatgtgtgtaaacctaatttgaaagagagaaaaaacatcaaacaattatgcag

SEQ ID NO: 6873 - DNA, 201 bp, Homo sapiens
tttaagtctctcttgccatatattttagcccaagcacggttaagtagcatgttcctacaagtctcaattttatcacttcgctataaaaaaggtctcgaggmtacacctacacccaataccaagttaaagcaaacctctttgaagctcacaaatgtcttccagagacacttaaaaaaatcctttgaataatgaagaacagtg

SEQ ID NO: 6874 - DNA, 201 bp, Homo sapiens
taagctcaatttactgcaaaaatacattcatagaaatagaacgcaccgaaatgcagaaaaatacatagaaaaacaggctagcatatatacaatgaaatacwaacagaagttatctttatgtgatgagattacaggtgatttttattttcttcttcatatttgaaagtttgttttttcaaattccccacaaataactattac

SEQ ID NO: 6875 - DNA, 201 bp, Homo sapiens
gcgagactctgtctcaaaaaaaaaaaaaaaaaaaaaaaggaaattgaaggatatggtaaaatgccattagattataaagacaaaaaaacttacaaaatagyatatatcatataagctcaatttactgcaaaaatacattcatagaaatagaacgcaccgaaatgcagaaaaatacatagaaaaacaggctagcatatatac

SEQ ID NO: 6876 - DNA, 201 bp, Homo sapiens
tcattgcatacggtcttcttttttcctttcttcctttttttcttcatcttctttttttgttattttttggcagaagaaaactcaaagtgtaatgaaaacasttgcaaaacttctgttaactttgaccctctggtatgatactgaccagaggagtttgatacagaccagagaaggaaagaacatacataagcacacttagct

SEQ ID NO: 6877 - DNA, 201 bp, Homo sapiens
ataacggtacgttcatagaggattatacagaccaacacagaagaaacagaatacaatttgctgttcaagttgcaaaaggaaccacaaactctttccttaarcaacaaaagtaacttataatagtaaacataagaatgggaaggttcactgaccaaactgaaaggatttgctttagagacaggtgaagaacggtagtatcag

SEQ ID NO: 6878 - DNA, 201 bp, Homo sapiens
ttccatagaataaataataaagcataattatacctcattttaaaataatttaggccgggtgcagtggctcacgcctgtaatcccaacactttgggaggctraggcgggtggatcgcctgaggtgaggagttcgagaccagcctggccaacatggtgaaaccccgtctgtactaaaaatacaaaaattagctgggcgtggtg

SEQ ID NO: 6879 - DNA, 201 bp, Homo sapiens
aaaacccaaagctccatgactttcttaagctctaaggttcatgtcaacaaatgacagatctcatcttgcaacattttagtattcttatactttggctcttktacaaaatatattctgagtgtcaacgatccagctgtcttggagctctgaaatatttgttcaatctccatggaagctagcagaagccttcattaaaattat

SEQ ID NO: 6880 - DNA, 201 bp, Homo sapiens
aaaaacccaaagctccatgactttcttaagctctaaggttcatgtcaacaaatgacagatctcatcttgcaacattttagtattcttatactttggctctkttacaaaatatattctgagtgtcaacgatccagctgtcttggagctctgaaatatttgttcaatctccatggaagctagcagaagccttcattaaaatta

SEQ ID NO: 6881 - DNA, 201 bp, Homo sapiens
gtatttttagtagagacggggttccaccatgttggtcaggctagtcttgaacacctgacctcgtgatccacccgcctcagcctcccaaagtgctgggattrcaggcgtgagcccctgcacccagagaaatcttttctcataaattgagaagaaaaaatacttgatcggattgtgcccctcaccatatgggttgagaaaata

SEQ ID NO: 6882 - DNA, 201 bp, Homo sapiens
gattaaggtaattttaaaacacatattataaatattatttacttgtatgactttgaaaatctttcttttttctttttgagatggagtctcactctgtcgcytaggctggagtgcagtggcacgatctcggcttactgcaacctttgcctcccaggctcaagcgattctcctgcctcagcctcctgagtagctgggattaca

SEQ ID NO: 6883 - DNA, 201 bp, Homo sapiens
caatctttttgattaaggtaattttaaaacacatattataaatattatttacttgtatgactttgaaaatctttcttttttctttttgagatggagtctcrctctgtcgcctaggctggagtgcagtggcacgatctcggcttactgcaacctttgcctcccaggctcaagcgattctcctgcctcagcctcctgagtagc

SEQ ID NO: 6884 - DNA, 201 bp, Homo sapiens
atctacagaaatagtgccttacgtcttaatgcctttagaaacactctaaactcagcaacataactgaaattccatctttcccttagtaaaatatcaggacyaatcctgaagctataatgaagatagctatgtacccatattttccacattcttctgataacaatctttttgattaaggtaattttaaaacacatattataa

SEQ ID NO: 6885 - DNA, 201 bp, Homo sapiens
agaaatacaaattaaaactaccaacaaatatatgtagaagtgaaaagtaaatgtctttctattttaatatttcccaattcaaataataggaaattataaaygataaatgtctaatgttttatgagacaacttaaagaatatgaaaaaaaataaattttagccataacctacaaagggaaatcacctagaatgatttatttc

SEQ ID NO: 6886 - DNA, 201 bp, Homo sapiens
aagaccaaagggatttttttctcacctttctttgctaatttaaattgatagacacacactatttactagcatttcaggaatgttccaccgtagtaatgacrgaatgtttgtgaaaattctccaaaatattaaaaggtataataagtggacaggagtcttagaggtaaagcagcaaagctaaatatcagatcctaatatcaa

SEQ ID NO: 6887 - DNA, 201 bp, Homo sapiens
accattctacaaacttcacctactggaattgaacaacatgaactagtagacacttctctcatttgaaaagaataaaggtgacaaagaaagaattcccaagycaatgcagacaactttcctaaaactcagggtgagaagaattgagggctattttctcctcagttttctactggttcaaacagatgaagctacactaaaaat

SEQ ID NO: 6888 - DNA, 201 bp, Homo sapiens
acttaaatattgtgacttagagacatgaactaagtcttcggttaggctcctcagaggccacattatttattctataaagaaaatggacttcctgaatatcytgattattcatcatgggtaattttaagtatttaacttgatgtcaggaaaattgaccagagttttccaatatggaaacctatgggagagttacatctttaa

SEQ ID NO: 6889 - DNA, 201 bp, Homo sapiens
tataaaatgctgagctacgtttgtccttacacctacaaataaaagatttccaaagtaaattaaactgtactgaggggaagcagaggacaagcaaatgagcrttgttatttgagttactcttacatccatggtggtgcatggagagttacacaaaacatttcttgttgacatttgtgggaattaactgagaaaatcccctgg

SEQ ID NO: 6890 - DNA, 201 bp, Homo sapiens
aaagttaaagaagaatgaagctccaactgaagttctgattttaagatttcccccatgccaatagcgaatgcaataactaaaccaataatcccaaagacagwctagttctagacttgaaaagtattcaagattgtgttaagagataaagaaaaagtctaaagtcaaatactgatcagctggtatgtgctgactattgtgact

SEQ ID NO: 6891 - DNA, 201 bp, Homo sapiens
aatttccagatgatgactggaaccaaagtaccataaattatcataaacttaaaatttatgataaactattttaaacatttctgataatgttgtggccaaasaaataggctattaagaatctttactttcccttttagactctcgagcttctgcacacactaagtaatagtgattcaggagttttagaaagatagtttttgc

SEQ ID NO: 6892 - DNA, 201 bp, Homo sapiens
agtctctttggtgccattcaattatggcatccgcagaaacacaaaaatcctcccaattattttagtaaaatcttcatttattcattatttcagaggctgarcaaatggtttgtgtaaacatatcctttggtaacacgcgcatgtttattttagccatctgaagacttcttctatgtttacataagccatcagacacataca

SEQ ID NO: 6893 - DNA, 201 bp, Homo sapiens
gaccagtagaaggaacaaacacttaagttgaatctatttatgtattagaacaaagaaaatagtacttgataaatataccagttgctagcacttatataatktgtattatttgccaggtactgttctacatgcttgacctaccttaaaacttttaatcctcataacaaatctatgagaaagaccattattatcctgatttta

SEQ ID NO: 6894 - DNA, 201 bp, Homo sapiens
tgacagtaaaatacaatgtcaacaagcagcaaattgctttgcaaaattaacaagagtgccaaattaagtgagctcaagaaagtcatttggagattgcatgytttagggatataaagtatattttaatgattgaaaatagatgtggctccttacatggacaagtctaccaactaatggcagaaaactcagggtttattttgc

SEQ ID NO: 6895 - DNA, 201 bp, Homo sapiens
aagtatcatatggaggataaaaaaaatcagatctacatatcatgaaacaactctacagcacacattttgggtacacttaatctaatgtattgcctgttccracactcaaatccgaatgaatgtcagttaagtaacagctgcataaataatcatgaaccaagaaaacatcaaactgacaattcagtactcatattagtcatg

SEQ ID NO: 6896 - DNA, 201 bp, Homo sapiens
cacgtgaggagtttggagtgatagatggcgggttgggggttgggggtgttggaggcagtaaatgataagattccagccttactctcatcagttcaactttygcctatgctgaattacaggctgttaaaaaaaaaaaaaaaagactggaaaacaattctctaattgctactagcataatctccctttaaaaagtatcatatg

SEQ ID NO: 6897 - DNA, 201 bp, Homo sapiens
taagtcatcaagggcttagtctagtgtaccggtaagctagtggcactgaagcgcttttcacaatctcaacatacatttgaattgcaacacacagatatttytagagtattaactagtgaacccttttattattaaaaaaaaaaaaaactacttacaaccattgaagaaaaaattgcaacaaaaaatgtaaaaattgaccgt

SEQ ID NO: 6898 - DNA, 201 bp, Homo sapiens
aagtaactgtcgtataatacatcctactgctaaaggtttgttacatggagattgtgcatgtgcctccttttgtaaaaaaatttaattaaaatacaaggttytgtatttatggcccatgaggacaaaatgccaaaagttttaaaatggatcaaccctggtgtgtagctagcaagcaataactgactactcgtcacctacagt

SEQ ID NO: 6899 - DNA, 201 bp, Homo sapiens
ttccaccttacataaactattttcaatttattaagctcatgcaatatttaggcaaagatttatagtttctattgaatacatatggctccatagttaacatmatttgcttacccataaataaactagatgtaatttgtagtaaatgataattttaaaatcttcagaaattgtttttttctaaattttgttccagaaagatta

SEQ ID NO: 6900 - DNA, 201 bp, Homo sapiens
taatagagagagaagcagtcaggagtttaagaccaggatttacagaagagactaagcaaggagaaatattctgaaacataggaaagaaatataacagttgytggatacccctttgctagtgactcagtattattttccttttcattttgttctgtatatataaaataatacaaagtaaaaatataaatactacataatata

SEQ ID NO: 6901 - DNA, 201 bp, Homo sapiens
tttaaactttttttttttactaacagtggctcatgttacgaggtcctctactatattaaaaacattttaatagactttgtccacagactgaacttttactytttaatgtgatatcacatataataccacatctcattctctacagattctgaaatgattcagggacttttaaatcagcatttgccaataaaaagacaaatt

SEQ ID NO: 6902 - DNA, 201 bp, Homo sapiens
tcatgagggaagacaaactggaaataaatgagttttcaagtccagccagaaagtcaacctatggttagatttacctaattgggtattttttaaaaaaaaartacaaaaacaaaaacctgtgctcatccatttttttatggtatcttattgtatttcatttttttctcagcatttttcttcgtaaaagttcgtcctaagaaa

SEQ ID NO: 6903 - DNA, 201 bp, Homo sapiens
aattacctgccatttaaccatttctggccaggtcttttgaataattccagaacctcaaaaactgcctcaatagttatgtatgcataacggaccaggccatyaccaaggctaagtaaatacaagaatatgcatcaaggtttaggtaataagtagataaatagactatatcagtatcaacatccatatctacctgtggcattt

SEQ ID NO: 6904 - DNA, 201 bp, Homo sapiens
ttattaaactgaatgatctccttaagggcaacattaaacatactaaagtacagtacaccatgtcacaatgtgcttaagtatccctactaaaaataaaaatkaaaacaaggttagaaaacaactaacaactaggttaaattcaatccaaaatatagatttgggaatttctaataaaattgtccatattgtttgaatgggttc

SEQ ID NO: 6905 - DNA, 201 bp, Homo sapiens
caaacagaagaattcgataaatgttgattgaccatctagtacctgcaaagagaccctatgctatcatatacagagttatgagattcagacaacatgctttmcaaaaaaaaaaaaaaaaaaaaaaaaaacctaagggatggtttcagattttgcctgtgtcttagtttcagtcatgtttggtatatattgccaagtagctat

SEQ ID NO: 6906 - DNA, 201 bp, Homo sapiens
aatttagttggctacaggcaaaacaatgtcttttgaaaatacagtgaagaaaaaagaatatctaaatatctgtgtctaaggactcctctagatgtaaaatkttatgattgtgtggcaaatgtgaacaagtccttcccacacactccaagttaacaaaaagctctgaatgttatgacaagacatatggatgtaatcccacta

SEQ ID NO: 6907 - DNA, 201 bp, Homo sapiens
gagttccagaccagcctggccaacatggtgaaatccagtgtgtgctaaaaatacaaaagttagccgggcgtggcagtgcacgcctgtaatcccagctactytggtagctgaggcgttaagaatcacttgaacctgggaagcggaggttgcagtgagacaagatcgtgccactgcactccagcctgggtgaggaagtgagac

SEQ ID NO: 6908 - DNA, 201 bp, Homo sapiens
aagctggtggtagctatcagaaccaattacaacgacagagccaatgagatccgtcatcactggggaggcaatgtcctgggtcccaagcctgtggcttacaytgccaagctcaaaaggcaaaagctaaagaacttgccaccaaactgggttaaatgtacactgttgagttttctgtacataaaaataatacaaatttccctt

SEQ ID NO: 6909 - DNA, 201 bp, Homo sapiens; identical to SEQ ID NO: 6908

SEQ ID NO: 6910 - DNA, 201 bp, Homo sapiens
aaatgacaaccacaaatggcaatagaatcttgttttccatgtttcatttacatgtgcttgttgaagacaatttttaaatttacatgctttcttcaataaayaaataacacagaaaaaggaggcgaataatcagtgtaggctaaaaagaaggtgaaaatacaaatataatctatggactaaatttgagtcctgattcaaaca

SEQ ID NO: 6911 - DNA, 201 bp, Homo sapiens
agaacacaaatcttagtatacaactttgttattttacagatgggaaaactcaagagttactgaagttaagtgatttgtctaagaccacaccagtatttagwgtttcctaatcacaattacagtgcactaggcttaaggcaaaaagactagaacagaactaaaagaaaacatatgtatgataataaatatatactttatttt

SEQ ID NO: 6912 - DNA, 201 bp, Homo sapiens
tatggagtcttattaatgttaagcatctgagagccatgggctataaaataaaatcaataccataaccttaactgtaaaagtcagaaagatactggaagggytctaatttaacaagattacagatgagttttcagaggagaacatttggggaaaagccatacatttaaaaacatttatgctacaagacatctcaaggttttt

SEQ ID NO: 6913 - DNA, 201 bp, Homo sapiens
agcaaacctctttgaagctcacaaatgtcttccagagacacttaaaaaaatcctttgaataatgaagaacagtgctaaaacagtgaatatggaataaatgraaactactttttaaaaacacttcaaaatgcttttgtccactaagcaatttcattttaacagacagacaatgataaagggtcttgagtaatgtgtgtaaac

SEQ ID NO: 6914 - DNA, 201 bp, Homo sapiens
ggaaaaaatggcaagctacgttaagaggagataagatgtcatcttcaattagatttctcaaccattttttttaaatttatgaaatcagttccttttcaaaygagaaagtatggtggtctttgtgttaaataaatgaaattcttactttaattactgagttatttaatcttaattacacttgagcatattattgtattcctc

SEQ ID NO: 6915 - DNA, 201 bp, Homo sapiens
cacatggtgtgttccttgatggtttaaataaaattcaaatgataaaaaagaggtgcatgggtaaagtcacagggccataaagaatgttctataaatttctrtcagaggacatgctttgaaattgcttatagagccatgtgctacattgaaattattacggcttataacaatggagttaagccactcaggcactgctctagg

SEQ ID NO: 6916 - DNA, 201 bp, Homo sapiens
gaatgacagcaatccttactttaacaggttttacctaataaataaaggactgatgatgggtgagggtgtgtgtcctgaaggaggaagaaaggagagagagrccaagcaggctctgcctttacttgaaagctttgtacaatcctttgtacaataccctctcaatttctccattttcttcacaaatggagctatcctggctca

SEQ ID NO: 6917 - DNA, 201 bp, Homo sapiens
cttaaaaaaaaaatctgcagttaactataaagacccatttttcctttcaaagggaaaaagtagtttgtttctacagcaggccatccatttctggttatctsaacactggaaataagtgctttaaatatcttaagaaagaagacaggtctcattttatcattggtggtacattcaatggtaaaaatgtttctacatacagtg

SEQ ID NO: 6918 - DNA, 201 bp, Homo sapiens
taaatatcttaagaaagaagacaggtctcattttatcattggtggtacattcaatggtaaaaatgtttctacatacagtgttcaccaaaacagtctgaaaktacctacctggaacaaaatgtctggagcagaatgacaataatttcaaggaaatgctgccaccaaatatattatcctaccctgaccattctacaaacttca

SEQ ID NO: 6919 - DNA, 201 bp, Homo sapiens
atcataaaatttgcaaaaactgccctagcatttaacatgtcttcgtcatattaccagcagagaattccccacaaaactaccagccttcctgaactccaaartaagacattagtttggaactgacttagaagcaaaaatctgaattctagattgctatgttttccttggattttacccattctaggattagtcaagggattg

SEQ ID NO: 6920 - DNA, 201 bp, Homo sapiens
attcagatttttcaaaatatctatctgggcttttgaaggttctaatgtggttctcctttgacagcccttagcataatattacctatcatgaggtactaaayaaatattttctgacagctgactctactgccctactcctaagaaggatgaaaatataccattgaacttgaactcagagaagtacaaatttaagcaaataat

SEQ ID NO: 6921 - DNA, 201 bp, Homo sapiens
atctttgttttctgtgtgcttttatttaaattgctgacattgtttgctcaaagatgtgaagacatccacttttaaaatgagtacttagtgttttggtgacwgtaatgcacatagcaaacctctagaacaaaataatttttagtttttcctgagtaggtcgcatccatctgtgcattcagggaagtattctaagcattaaga

SEQ ID NO: 6922 - DNA, 201 bp, Homo sapiens
cagattggaaactccactgtagtatcatcttgtggaaagattatttataaaatagtcaaaattacatgaccactttaaatttatcattaactctaatttakgtaggctctattaaagttcttttctaagaaaaacaacactcaaaactacacatcagtacttttcataacctaaaaggataaatctttataaagcagccac

SEQ ID NO: 6923 - DNA, 201 bp, Homo sapiens
gaaaaagtctaaagtcaaatactgatcagctggtatgtgctgactattgtgactgattagagaggattatttttaatggcagattatcaactggtttacawgaacctttttgaaatagtctccaggactatgtgaatttattttttagattcaaatgagatatattttcagtgataggtgaactttcttccagtcagaata

SEQ ID NO: 6924 - DNA, 201 bp, Homo sapiens
gagaaaaggatatactgcattttactgaacttctatgaagttaagtcggggcgggggggtgttccacatttctgaaaatgttccaaaccataaaaagacayttctcagcagagactaatcagttcagtttgccaaagcaggacccatgagttcttcaagccaccaaaaccatcttccaatagaaaagttaaagaagaatga

SEQ ID NO: 6925 - DNA, 201 bp, Homo sapiens
tttagaaagaaaataaaaatgctttttttctatgcatcacaccaaataatctgcactgaataaaataatcaataactttaagcatgcagtttgcaaaacayagaagacatgcagtttagaggagaaaaggcccaccttacaaacattcgccctaacttgtgtttagaagcatcaaggtcttcagttttaaccttttactaa

SEQ ID NO: 6926 - DNA, 201 bp, Homo sapiens
gactcttttttagaaaaagctattgcaatatgcttctctattaattaaagcatacaagagaaacaagtgcttagaacataacaattagccattattagagyacaaattgagctggaatgaaagcaaacgttaatgttcaatagagagatatattttagaaagaaaataaaaatgctttttttctatgcatcacaccaaata

SEQ ID NO: 6927 - DNA, 201 bp, Homo sapiens
ttgaacctgggaagcggaggttgcagtgagacaagatcgtgccactgcactccagcctgggtgaggaagtgagactgtctaaaaaataaaaaacaaaaaamcaaaaaaaaccaagataccttttaaagagcttttaggatcattaagaccattctacatgccattacctactaatcaaaagaaaagttacaatttttgaga

SEQ ID NO: 6928 - DNA, 201 bp, Homo sapiens
accactcacttgtggctttgcgttttcttgaaaggggtgaagggagagaagagagaatgaaacaataaattcagtttctcttttgcataaagcactccctytaatgttttaaaatagcttatgtttgtattattcttggattgtccttcagctttctttttcattcaattatattgatctttcatatctgacagtacaggc

SEQ ID NO: 6929 - DNA, 201 bp, Homo sapiens
ttctaagtgtaatgttgaaataaaagttaactctttatattacctaaggacatactgcccttatcatacgtatgccacatatatgtggagatatacacacrcactacatacacacacacatatagatgcatacacacacaaacacatatatgtaatacaaacatatggtttgcaacccattattgaaagttattttttgtt

SEQ ID NO: 6930 - DNA, 201 bp, Homo sapiens
aaaaagccactccatatgggagcactgccactaaatattaaatgtgttccttataattactgcactcgtttagtaaaaaactcttacataatacttgaagmcttcgatatagcaacctacacttaaataaaaacttccttaaaatgttcggtttaaacataaataagaaaaaagctcttcctcaattggccaaattaagga

SEQ ID NO: 6931 - DNA, 201 bp, Homo sapiens
agctaaatcaaaattccaaaaataaaatgtttgatatcatggatactattttcttgctattttgaccaaatgtatgacatggctccccccaaaagggaagmagcaaatgaattatttagagcttaagatgcattactggtgatggtcctgcttcattttgttattggtaagactacctctgaagtactgtatttcttctag

SEQ ID NO: 6932 - DNA, 201 bp, Homo sapiens
ttgctttacttttgaaaccatgaagtgagatagcactattgttgtagctatcaatctagatatgctcatttgttcatatttgaattccaaaagtacaaaamcctttacagaatatcaacctaaaggaacaattctgaattttttttaaaacttgatacatactgtttttactctggtgatacctcgatacaaaatgttgct

SEQ ID NO: 6933 - DNA, 201 bp, Homo sapiens
aatctgttggtaccaatatactttgccagttacattctaatcttattttacctttaattcacaagcaattcagtggtcagatgggtttcaatttcttaccygcctattgggttgaatacaattgaaaagtacggtgaaagatatttcttttctccttacaacaggaaaaaaaactacatgtttaaggtaggcccatgcata

SEQ ID NO: 6934 - DNA, 201 bp, Homo sapiens
tcccatcagcatctaatgggtttaattcatccacaggaagattaattgcttaaaattctatatttcccttctgctctggttctcagttttaaaaggggagrtaaaatgaaaacaggatttacttttttgttccttaaaaattgaactttgattttaatctatcagtccaaatacattcaacaatagcaaccctctgttcaa

SEQ ID NO: 6935 - DNA, 201 bp, Homo sapiens
aaactacttacaaccattgaagaaaaaattgcaacaaaaaatgtaaaaattgaccgtctccaacttgtcccctttactattaacaatgtgaccaacagatytgtggcacggacacagtacaaagagttgtcatggcaatgagtttggctgatgcaaaggtcattgtgcagggtcaaagggcaaaatcagtggtccatgtta

SEQ ID NO: 6936 - DNA, 201 bp, Homo sapiens
aaagctgaaaagtcaacctcagacgagtgtggaaaaggaaattgtgatatgtaccatcataaaacagagaaactgaaaatctaagcagaaaagatctaaayccctccaaatgccagaatactatgccccacctcttgtagcaaggagggctgcaaatttgtccccatcactgtcagcaaacaaaagaaagtcacttctaca

SEQ ID NO: 6937 - DNA, 201 bp, Homo sapiens
agtgacattattacacaatagaaaggtcaaacagcttgcagccattccatgacccaaacaagtcaaggtcaagggattcaggtagcaacttagccagggcrtaagttacagcgcaaatgaattgttttaacacatcagctttggtcaattaaacctaacaaggcaagttgcatcacgtagcagggttcctgacaccaaggc

SEQ ID NO: 6938 - DNA, 201 bp, Homo sapiens
attcaggtagcaacttagccagggcataagttacagcgcaaatgaattgttttaacacatcagctttggtcaattaaacctaacaaggcaagttgcatcasgtagcagggttcctgacaccaaggccagaagctgagaccgacctcataaaacaaggcttttaacatagcatagcaaatttaaggtaatccaaccagaaac

SEQ ID NO: 6939 - DNA, 201 bp, Homo sapiens
cgaggcatgtttttggtgttttgccaaattatgtgcttctgtttgtggctttcaaatatggattagacagacgcacaagcatgtactgtttggcaagtagmgacaatggtctagtctgaatttagtaatttaagcttttcattagtcctcgtaggtgaaagaaagaattaacaacaacttgtttgagctctatctttatat

SEQ ID NO: 6940 - DNA, 201 bp, Homo sapiens
agaagaggtggtggagttctgtttgccagttagctaaattaactgatttcttaagaaatccaagtgaactgtatagtaaggtggtcaatttttggaaacaytgtttaggcaacagataagagatagtgaggttttgttttgaagttaatttacttcatgagaaagtcaaatcaacagtcatagaccatgaagctgataaga

SEQ ID NO: 6941 - DNA, 201 bp, Homo sapiens
tgggctaaaattgacaaaattaaagacaaaagaattatctcttttaaaaattggggcctactgtgctctgacagcatgctaaaggacaaccatcgtttggwaacattgtttcagaaccagagaagaggtggtggagttctgtttgccagttagctaaattaactgatttcttaagaaatccaagtgaactgtatagtaagg

SEQ ID NO: 6942 - DNA, 201 bp, Homo sapiens
gtataaacattcctggaagcttttatactgcttgtggcacataatcagttgcttattgccaagggaaagactttttccccagaaaggcaatctgtgcacaygctaatttgaaagacagggtaggagctgcaagtgttttaatagcccattatcaaaaattatcccttggctataaaatccccagaccattggcttgagatc

SEQ ID NO: 6943 - DNA, 201 bp, Homo sapiens
gttcacactgtacagttactattattatttatcatttcttatttacctgtgtttttagtataaacattcctggaagcttttatactgcttgtggcacatartcagttgcttattgccaagggaaagactttttccccagaaaggcaatctgtgcacacgctaatttgaaagacagggtaggagctgcaagtgttttaatag

SEQ ID NO: 6944 - DNA, 201 bp, Homo sapiens
tacaattcacatcacatcagttctacaattggtggctttatgttactctacatatacctatatgtcccgatttttttttcttgtgaaaaatgattaagacrcagaatcagatatactctttaggagattagcttcaatcttatgctaacaaaatcgcagtcaccctcaaatggagttatggcaagcaaatttgctttctca

SEQ ID NO: 6945 - DNA, 201 bp, Homo sapiens
tgccttaggacaaatctgaatcataagcacataaggctcgtgagaatctctttggtattgagtgaaccctgccaactattcaacattcacatctcattcawtgttacatacaaagctcatgaagtgataacatttctttgttttaaaaataaaagagcactgaaaaaagaagtcaattgcttgtggtggtgatgaaagtga

SEQ ID NO: 6946 - DNA, 201 bp, Homo sapiens
aatgtaagatcacctggggattaaatctcaactgtagcacatatcaatgactgtgagcatctgactttaccttgttttacaattctcatgaaatggatgtmtggtcaatgactgaggggatgataaactttatattaaccaaacatgatataaaaatccagggcatactgatgaccagatatgggctggtaagaattagtt

SEQ ID NO: 6947 - DNA, 201 bp, Homo sapiens
tagacaaattactgacctctctgaatttgaatttgtatatctatttaaacaaagataataggctcaaagtttgaaacaaatgggatatgtagaaaaaacaytgagcaaaatgcctggaacacaataagtactaaaaaaatagtaaatactattattgttgttcttgctactgttattattattacacagtactttcatgat

SEQ ID NO: 6948 - DNA, 201 bp, Homo sapiens
tggtgtgtaccagatgttaaaaaaaagcaaattcaaaaacagaaatatcagtattcaatgcagaaatatattttaaattaaatcccattcttcctctcctkatagacacagaatcaaagaaagccaattgtatgtctaattttttaacctttttcctgaacaaaaatcccaatttgactcatgactctagattctttatat

SEQ ID NO: 6949 - DNA, 201 bp, Homo sapiens
agtatttcattgtggactcatgactcagtgctttggaacttggtatctttgggagtgagtgtctattctccacgtctcttgccacagggggaaaaaggtamagataaacagtaacacaatttcacccaaccgagatataaatctgtgggcttctccacccttctcaaaaataaatgaatgaatgaaggaaattcagttcct

SEQ ID NO: 6950 - DNA, 201 bp, Homo sapiens
ctgctgattaaagaaactcatttaatttgtggggaaaaaaaaatgttaaaaaaaacctcaacaaattctgaccatattaaaacatactacagagaagcatragcaaagccaacactttcccatttgcaatggcatgattttgacataaacttataatctctatcaaagcatacgtgtatgaaaaatgaaaaccaaaaaatt

SEQ ID NO: 6951 - DNA, 201 bp, Homo sapiens
tgtttatttaaatctttcaaaccgcccatcctacattatgaccatatcaaaattgcagagtgcaatatatttgtcaatactgtttatgaacctttgggggraaataaatctcaaacattaacactatgcagaccccatatatgagttttacaagtctcttattgccaatttaagttcagaactataaggcacagacatttt

SEQ ID NO: 6952 - DNA, 201 bp, Homo sapiens
ctaaaaagacacgtcctcaaaatctgatgaaaaatcgtaactcttaagaatacttgttattgaaacttttactaagcagcttaactgttttcacatatttmtcttcccacacacatcttcaacaattatttttgtgctttgcaccattgattgggaacaatgttacataatgaatcatgaaacttattttaccctcaactg

SEQ ID NO: 6953 - DNA, 201 bp, Homo sapiens
tatactttgccagttacattctaatcttattttacctttaattcacaagcaattcagtggtcagatgggtttcaatttcttacctgcctattgggttgaayacaattgaaaagtacggtgaaagatatttcttttctccttacaacaggaaaaaaaactacatgtttaaggtaggcccatgcataacatacaatttgaaat

SEQ ID NO: 6954 - DNA, 201 bp, Homo sapiens
gaaaattaagactaaagtgaggcagaaaaatccagagtaagatatataaacaattattgaattctaaccgattgaggatattctaaaatattttacattawtcaatataaatgcaatatcattcttttttgtacaggaaaaaaaagaaaaagaaaagcagcaatctgttggtaccaatatactttgccagttacattctaa

SEQ ID NO: 6955 - DNA, 201 bp, Homo sapiens
tagaaatcagagtgcttataaaatggctggctcatggctctgtcacccagcacctctgacgccgcctcctagccttcgttggtgagataaccaggaatagygattccatgcgtaaacaacaagaatactaaaccaataaaactagcttatcatgcaaatattaaggcatctagaaagtcagttaaaatatattgtcataga

SEQ ID NO: 6956 - DNA, 201 bp, Homo sapiens
agtaattgactgcagtatgagcagctgctagcagtataggctggatataacagtaacaatcacattaagtcaagcttgatttacaccagtttaaaacttgkggcaattgagttcatttgcaacccacaaaaagtacccaaagaacgttatcctccaaccgggcacaataaaaccttcactaacattctggcccagtctggg

SEQ ID NO: 6957 - DNA, 201 bp, Homo sapiens
gatttttgttgcttttgttattgtttatagttcattatactttattttatatagggtaaacttaataaagtaaatatattaagtacaaaaccttctttatsttgggaggccgaggtgggtggatcacaagatcaggagtttgagaccagcctggccaatatggtgaaaccccatctccactaaaaatacaaaaattagccg

SEQ ID NO: 6958 - DNA, 201 bp, Homo sapiens
gtgaactgaggagccactgatgtttgacatccacccacccaccttctttagaaacagaatgaaagaaggagtgagaggaagttgtaagatctcagtagggrataaaacaggtgccacattaagtcattattctgaaaaatatatatacatttttaagagtattataacaaaatgtcccaatttaatgcacttctattttaa

SEQ ID NO: 6959 - DNA, 201 bp, Homo sapiens
tcaaccatacatagcatgaaaagacagaaaatcattcaattagcatatgtgtttcactgctgtgaactgaggagccactgatgtttgacatccacccaccmaccttctttagaaacagaatgaaagaaggagtgagaggaagttgtaagatctcagtagggaataaaacaggtgccacattaagtcattattctgaaaaat

SEQ ID NO: 6960 - DNA, 201 bp, Homo sapiens
acccttctctgatgaaagaaaagtgaactgctgttaccagcaccccgacccttgttccagggtcactaataacataaaaagcagaacttgtatatacagcmaatacagaactttgcgttgacctatttctgggcatctttaatatacgttgcacgatttcactgctttcctcacccttgctactattccactggactcctt

SEQ ID NO: 6961 - DNA, 201 bp, Homo sapiens
gttagtaaaatgaaaaagcacttatctacaggaaacttatgtgggttatcataacaacatagagtacatttaattaatcacacttcctttgatataaatgrccatctatggtcatgcagagaacagtgaattaaatgaataccaataacatggcaatcagaaaaaccccaaaattatttttgtacaacaaaaagttttgat

SEQ ID NO: 6962 - DNA, 201 bp, Homo sapiens
ttgttttggataacaatgctttctatctatatccaactacaatctgcaaagttaatttctgcatccctctacactctgcacgttagtgtgtatatcctgtrcatctccaacccccaccaaaatgttagtaaaatgaaaaagcacttatctacaggaaacttatgtgggttatcataacaacatagagtacatttaattaat

SEQ ID NO: 6963 - DNA, 201 bp, Homo sapiens
acattttataaagatgatttttacctactgcctgaaaaatagatttggtggggtctctcatgaggggagtctcagagacaaaattccgtctgaggggggggtctcacagtcaaaactctccagttgagtttcatatccttgcataaaatgacccttgccatctctattatttccctccatgtgcactgtgtccagccacat

SEQ ID NO: 6964 - DNA, 201 bp, Homo sapiens
tccaggtacgaaagctctgtgtctatttacatggctcgcacatggcagcggacatgtgagtgaaagcggacaccctactatacccagagagggtggaggayatctaggggccttgaggaccatctaactcaagccagatactctgtctacggagatttgtgggcggtgtttgccgtgctagaaaaaagaacaatctgctcc

SEQ ID NO: 6965 - DNA, 201 bp, Homo sapiens
cacccaaggttgaattcacatccctgagtatgaaaaactcaacaataataaagaagcccatggtgaggaggaaattacgcctcatgggccttccacaacargagacgcaaacataatccttactcagaagtcccttcaacaaagctgtaatgatgatgctttctgaacataagtgcggagtctatcattaacttagaccat

SEQ ID NO: 6966 - DNA, 100 bp, Homo sapiens
gcagacaaagtctggcgtctggatctagtcatggtgatcctgttcaaagscatccccttggaaagtaccgatggagagcggctcatgaaatccccacatt

SEQ ID NO: 6967 - DNA, 100 bp, Homo sapiens
acatagaggcatttcttccatagagcctttgtgttcaaactgtttttttycttttttctttttttcctttttttttcattttttctttttttaagatttc

SEQ ID NO: 6968 - DNA, 100 bp, Homo sapiens
aaatgtaaaaattgaccgtctccaacttgtcccctttactattaacaatrtgaccaacagatctgtggcacggacacagtacaaagagttgtcatggcaa

SEQ ID NO: 6969 - DNA, 201 bp, Homo sapiens
cgggaggcggagcttgcagtgagccgagatcccgccactgcactccagcctgggcgacagagcgagactccgtctcaaaaaaaaaaaaaaaaaaaaaaaaraagaagaagaaaataggtaatatgatagatttgaaagcaatgattgagcttgtgctgaaatgaagtgatggattgtgcctggaattttttggtttaatga

SEQ ID NO: 6970 - DNA, 201 bp, Homo sapiens
acattttgttagttatgctttgtaaaactagcatatttttaatttaatttacatcaatttaactaaaattttattaaacattcttaaacttggtggtgctkgcatttgttcgttgaaattttttttttggttttttttttgggtatgttttaactatttcaacatacgtttttaaaaaccagatccaagaggatcagaata

SEQ ID NO: 6971 - DNA, 201 bp, Homo sapiens
tattagttttatgacaaccttctgttggctttgatttcagtatctataaaataacattggagagagagctatctcaaaatttttatgacttaaagaatttyttttttttttttttttttttgagatggagtctcgctctgttgtccaggatggctggagtgcagtggtgcgatctcggctaactgcaagctccgcctccca

SEQ ID NO: 6972 - DNA, 201 bp, Homo sapiens
ctgcttccccattccagtctcagagacacacaaacacaatatgcatcacatataaaatgtgataaaatcaaaaattatacatcaatcatgtttatgcactrcattatttgcctatttccattcgtatttttgtaagcgctgtttctgaaaggtaatatagcatataattacacctttctttttaaaatgctatgataatct

SEQ ID NO: 6973 - DNA, 201 bp, Homo sapiens
aatatgcatcacatataaaatgtgataaaatcaaaaattatacatcaatcatgtttatgcactacattatttgcctatttccattcgtatttttgtaagcrctgtttctgaaaggtaatatagcatataattacacctttctttttaaaatgctatgataatcttctcactgcctgggaagtttccatggcagaaagactg

SEQ ID NO: 6974 - DNA, 201 bp, Homo sapiens
tggtatttcttgattaccatccaccagtaggttgatctttggaaagttacttatctttggaaagttacctatccaccagcaggttgatctttggaaagttwacgcgggcccccaggttccttgttagtcacataagggatctgtaataaacacttcctaagtcaggtccaccatccattctccacagcagtggttcttaag

SEQ ID NO: 6975 - DNA, 201 bp, Homo sapiens
gccacagggtgtccccggggcttaccttttctgttcagtgtttgatgccctgtggtttttctctcacagagaccacagtccagtcatcatggcacacatcstcttcaacgtattgctcaaaggcctttctcagagagtgaggtctgcgattctataactgcactttctttttttttttttttactgtcattgtttagaaag

SEQ ID NO: 6976 - DNA, 201 bp, Homo sapiens
ctgacatttaaatgttatggccacactaaaaagcacagtatttgatgtaccaatgataagcaaaataatcaaaaggttttaaaaaaaaagcttgcagatartgaaagtacaggtagcttacatgtgcctaatactaagttttgaaatgtcctcatctgttcccaaccttatgcgactgtttttaacaatgacataacctac

SEQ ID NO: 6977 - DNA, 201 bp, Homo sapiens
actttgccatcacactttagctcagaacacatatcttccaggtatctaaaccttcttcaggttatctagtcatgttcagattagatgcccagccaatgacrtggccccactctctccccactatatcctgaactctttaaggacagaaacgatctttctgaacaagatgcctaacacagaccctaatatacagatacagaa

SEQ ID NO: 6978 - DNA, 201 bp, Homo sapiens
taagctctaaggttcatgtcaacaaatgacagatctcatcttgcaacattttagtattcttatactttggctcttttacaaaatatattctgagtgtcaaygatccagctgtcttggagctctgaaatatttgttcaatctccatggaagctagcagaagccttcattaaaattatcatcagaattattcccattactaaa

SEQ ID NO: 6979 - DNA, 201 bp, Homo sapiens
agagagaaaaaacatcaaacaattatgcaggacttggagcatattttcgtcacttattaaacactggcataggtaaatagctgctattcaccatgcctctygggaaaacctcttggctatggagtcttattaatgttaagcatctgagagccatgggctataaaataaaatcaataccataaccttaactgtaaaagtcag

SEQ ID NO: 6980 - DNA, 201 bp, Homo sapiens
acaacacacatggaaattatttaatgacagagtgtgtgggaacagcaagtctcagtcagatattcctgcttaagagcctctggaagaacttacatcagacrcaaagatcagtgttagcgcctctcccagggagctacaagaaggctgaaagctgcaaatcatgtttaagaggatgccgatatcctcttagaaatgaagcac

SEQ ID NO: 6981 - DNA, 201 bp, Homo sapiens
tcctaatgctgaatggcttcattagctaaagtcaacatacacatcagtgggtcttatgattgtaaaaccctagaggactgaaagcactagcatactgtaarccctcaagaagtcagaatttgtgatacacacatagtgttgtgctgaagtttatgtttacttagcaaacccctatttcataaataatgaagtttaattgtg

SEQ ID NO: 6982 - DNA, 201 bp, Homo sapiens
tcacttttatcaagcacctgctatctgtcaggtgtgctcccctatgtgatcctcacaactggcatgaacataattgactgcacaaagcggttggctgactygctcattctcctgatgacccttataatcattcaagggaaaattttaattccaaagttcatgctcttttcactccaccatgccacctacaatggtgggaaa

SEQ ID NO: 6983 - DNA, 201 bp, Homo sapiens
tagtgtcatccttgctccagagaggatataaggtggcttacttgaggtacacccaatatataatcctactggttcccagaggtgttgccacactacatgcrtaagtcaacacacaaaatagcacaagcacctataaaacctacaaaaaggaaagtagcatgttaagtccatgttattcccggtaagaaagttctgcttaat

SEQ ID NO: 6984 - DNA, 201 bp, Homo sapiens
agaaatatttggaaacaagatagggtggataagacatactattttgagttagaaattattttttgtccatctcctataaagagaagaaatgtttgttgaargtccatgtccctactttgcaagcactgaggcaagaaagttttaatgacctttatagataaactttctactcctagatgaaacttcttttaggaactcttt

SEQ ID NO: 6985 - DNA, 201 bp, Homo sapiens
aaaatatacattaaatgcaccagcataatataaatacagaggcaagggtgctaatgtagaggagggaagagttttatggcacgattttgactaaaagaaayagctctcgcactagagagaaataaactaaaacattatttattcaaaacatttcttttcgaattttatgaagattgcatatttgttggaagcaaaacattt

SEQ ID NO: 6986 - DNA, 201 bp, Homo sapiens
tcccactccctaaatagttttataccccaaaagtcattttagaatcatctttccacttttattccatatttgtaatctgattttaatgacctcagggtagsccatttttttaaactccagacaggttctaattcatctatacaacaaagcaatacgtggtgttaaaaaaaagactaagagagtaaatcgatacgtgttcag

SEQ ID NO: 6987 - DNA, 201 bp, Homo sapiens
tttcaattgttttgcctatgtactatagtctgtaactatcctagtctataatcaaagaaatcaggagtgcccaccacctatttgcagaggtctctaaagcrgagtccacagtggccagggcccatctagcaaactggcatgctcagtgggacaggtcaagagggcgggtctgcctctggcttcctccttcttctaacacat

SEQ ID NO: 6988 - DNA, 201 bp, Homo sapiens
aatcacacaaatattgccttaaatattttatttccaaatgtaagtaatagttaaactatttatatcccttcatgagaaactggaagctgaaattttcagaygtgaaggaatttctcagaaagtgatcctaaaaattttcaggaaaaacatctaacaatttaaccataaagagctttggtgaagtctgacacccagtattta

SEQ ID NO: 6989 - DNA, 201 bp, Homo sapiens
aataccaaatgtctcagatgggccctgaagaatgaatcagaactaattagctgaaggatgggatggtcaggcaaagggagaggatgtttggtgtgatgacrgtaaaaaggtcctgagggctgaaagatgtgggttcctctcccgtactcactcactgtagacctctctcaagggtccatctgtagccctcagattccctca

SEQ ID NO: 6990 - DNA, 201 bp, Homo sapiens
tttgatgaaggttctaagtacaaggatcaaactataatcgtgtcatttcttcaatactttcagtactgctccccgaccaggatttagtttgccaaattacracatcattttcaaagtgctactaatcaacagagagggcaatgaatgaattcacccatatacatctgtcaggctattgagcgataaagcatggtattgaga

SEQ ID NO: 6991 - DNA, 201 bp, Homo sapiens
catcaggaataaagaaatatgcaagcatctctgagaggctatgaaaggcaactagaatttaacaaccatgtatacgctcccactttaagtgaacatcaacyttaaatcataagtgtaagcaaagcttttcaaatacattagaaagacatcatatcaaatctttctgccatcaacagcaatcccagtttacatatgtttaaa

SEQ ID NO: 6992 - DNA, 201 bp, Homo sapiens
cataccacgttgccacagaaaagtgagcatgatcagaaggaagcgtctcttcttgctatgcttggcactggggcatgcagccgtaataactcaagtttccratcgcataaccactagtccttgagatttctaaaattattcctccttcacaaggatggagggaaaaaggctggaaaatttgctttgaacattatgttggct

SEQ ID NO: 6993 - DNA, 201 bp, Homo sapiens
tctggtgggagactgtgttttcttatcagtgagaaaattgctaagtatcttatctcacaatatatgttcccacaaaggtctcattaagcctaggagcaagrcatgccaataagagcccttctttatcttgtgaattgtgtatgagccagaatgcaaacaaatgtgcactagagttcacaagttcagtcaaggacaagttgc

SEQ ID NO: 6994 - DNA, 201 bp, Homo sapiens
acaaaagtgacactattaatgtggcctcacttttataacacctatattacctgcaaagtcacatggagcttagtgaagtgaaaattcttaagctgaaattycttccctggtgtaggccttgttttaatacataagcctagatttatattattaaaatagtagagaatattagtcatcacaagttattgttgttaagtgtgt

SEQ ID NO: 6995 - DNA, 201 bp, Homo sapiens
gaaataattcttttcttaaaggtaattcttattttatttcgcacttgtttaaacaaattccattttcaactggtttatgcttcatcaataacttactacaygttctgaactgccttaaaataggattctgaaaatacacaacctccaggcaacttttgatagtaaaattacttcatccatcaccccatatttttaattata

SEQ ID NO: 6996 - DNA, 201 bp, Homo sapiens
tgattacatcacagcatgaggcatacccaaatgccatagaggaaatcattaaaccgatcagtagtttccagcagagatttgaacaattcagttactatgcragcacattaaactaggccatggaaagagttaaaccacaatctgttctttgtgtgggaaggcagccctgctcacagcaaccacatcccatgataagacctc

SEQ ID NO: 6997 - DNA, 201 bp, Homo sapiens
agtagaccctaaatttgaggcacacattggctttttgtaacaattccactttctaaaatgatctggtgtttactggcacacaatgacagactccttcataygccaaagcccataccttctcatgaaataaagcagtgtatactgtgtctcagaaacataggagagggccctctcagtgagcaaatgatagagcatttactt

SEQ ID NO: 6998 - DNA, 201 bp, Homo sapiens
aagctgaaataagctgccccatacctttagaggtttaaaatactgcctcaaataacagttctgggctaagatattttagttactttgtcagttgttagttycctgggcagcgatgaaaactgcccccaggtaagtctgttgggtctcgccgcttttctatttgaccgtctggcttaaagtgatacaaatcgtgtttctaaa

SEQ ID NO: 6999 - DNA, 201 bp, Homo sapiens
tgggacagcagagattctggaagaagcagggtttatccagtggtggaagagacaagtcccctagagaccgggagggaaactggtccatctgtcaccaagtrgggagtacagtggccccagcacccggatgtgaggttcctggccctgcatcctgggtccccaggatgtcactattgatcacaggcttaagctcttctcctg

SEQ ID NO: 7000 - DNA, 201 bp, Homo sapiens
ttttaacagaacccccgcacagtccctgttcagcctgccttctccacggtgccgttctcccagcctgtctgtttcccacccaggcccagggggcgcagacwaaaagtgagttcaacacagaggccctgggtggccgagcagacagtaggaaggaccgagggtctgagaggctggccccagccagcaggccactcagggcct

SEQ ID NO: 7001 - DNA, 201 bp, Homo sapiens
ggaaatgacattgccttccacttcaaccctcggtttgaagatggagggtacgtggtgtgcaacacgaggcagaacggaagctgggggcccgaggagaggargacacacatgcctttccagaaggggatgccctttgacctctgcttcctggtgcagagctcagatttcaaggtgagcaagaatcccctccccacctctcac

SEQ ID NO: 7002 - DNA, 201 bp, Homo sapiens; identical to SEQ ID NO: 1011

SEQ ID NO: 7003 - DNA, 201 bp, Homo sapiens
gccgcatcttgcccacccaagagttccctgtctctgtccgctgggcacccagagctggggacctgggggtcaccctggattcttcactccctcttctttaygtctctccaaggcacgaacgtgtctccctcctgaagccaccgatgtggtccaggcctctgggattcctcaccatgacgacaggggtccagttccccaccc

SEQ ID NO: 7004 - DNA, 201 bp, Homo sapiens
agcagacagtaggaaggaccgagggtctgagaggctggccccagccagcaggccactcagggcctacaggccgcatcttgcccacccaagagttccctgtytctgtccgctgggcacccagagctggggacctgggggtcaccctggattcttcactccctcttctttacgtctctccaaggcacgaacgtgtctccctcc

SEQ ID NO: 7005 - DNA, 201 bp, Homo sapiens
aggcccagggggcgcagacaaaaagtgagttcaacacagaggccctgggtggccgagcagacagtaggaaggaccgagggtctgagaggctggccccagcmagcaggccactcagggcctacaggccgcatcttgcccacccaagagttccctgtctctgtccgctgggcacccagagctggggacctgggggtcaccctg

SEQ ID NO: 7006 - DNA, 201 bp, Homo sapiens
tgccttttgttttaacagaacccccgcacagtccctgttcagcctgccttctccacggtgccgttctcccagcctgtctgtttcccacccaggcccagggrgcgcagacaaaaagtgagttcaacacagaggccctgggtggccgagcagacagtaggaaggaccgagggtctgagaggctggccccagccagcaggccac

SEQ ID NO: 7007 - DNA, 201 bp, Homo sapiens
ccgcatcttgcccacccaagagttccctgtctctgtccgctgggcacccagagctggggacctgggggtcaccctggattcttcactccctcttctttacrtctctccaaggcacgaacgtgtctccctcctgaagccaccgatgtggtccaggcctctgggattcctcaccatgacgacaggggtccagttccccacccc

SEQ ID NO: 7008 - DNA, 201 bp, Homo sapiens
tccagtgacctctgggaagagagagcccttcaaggtcagtccagccattcccctggcttcaggaaggctactgatgatggggaggaaatgggactcagaaytcggtggataaaggttcaggtgggctgcccaccccaggttccacatcaacctgtgctctgggaaccacatcgccttccacctgaacccccgttttgatga

SEQ ID NO: 7009 - DNA, 201 bp, Homo sapiens
atgggcttcttctcagctgacagcccaaattcatgggaactggtacaatcttccccttccgcgtggtggctgacctgtcccccttcttccgacagccgatkcctttcatcaccaccattctgggagggctgtacccatccaagtccatcctcctgtcaggcactgtcctgcccagtgctcagaggtaagccaagggctcca

SEQ ID NO: 7010 - DNA, 201 bp, Homo sapiens
accgggagggaaactggtccatctgtcaccaagtggggagtacagtggccccagcacccggatgtgaggttcctggccctgcatcctgggtccccaggatrtcactattgatcacaggcttaagctcttctcctgatggtgcaaatgaggcaggggggcttagaattagtggggctgcctgcggaggggttgaggggcagg

SEQ ID NO: 7011 - DNA, 201 bp, Homo sapiens
atgccacagaagactatttgctttccctgggcctaggtttgctgtgaactttcagactggcttcagtggaaatgacattgccttccacttcaaccctcggyttgaagatggagggtacgtggtgtgcaacacgaggcagaacggaagctgggggcccgaggagaggaagacacacatgcctttccagaaggggatgccctt

SEQ ID NO: 7012 - DNA, 201 bp, Homo sapiens
gactgtctgagtaactaattggatttgtgtttgcctccacacaggaccctaagacccgtggggctgcgactccctctgtactggtcacagccgcaccctakccccttgcatggcgctgtcaaacccaggctggccactgactagcgctggaggggagcaaacgggaggccggccacctgactgatggtcccacaccttctc

SEQ ID NO: 7013 - DNA, 201 bp, Homo sapiens
ctcctggtggtcacttgaagtggtgcactcagcagcgggttccatctttcacccacttgccaggcctggcgttgaagatttcgtctccaagggaccaggawggccccagcttgagagaggaggctctgatcaatccagggtgctacttggtaggaggtcaagtaaagggcttgatggggaatgaagtgaaaaaataagatg

SEQ ID NO: 7014 - DNA, 201 bp, Homo sapiens
cacagtggtgtgacagcacctcctggtggtcacttgaagtggtgcactcagcagcgggttccatctttcacccacttgccaggcctggcgttgaagatttygtctccaagggaccaggaaggccccagcttgagagaggaggctctgatcaatccagggtgctacttggtaggaggtcaagtaaagggcttgatggggaat

SEQ ID NO: 7015 - DNA, 201 bp, Homo sapiens
ctctcaccttgcaccgtgcaccaacccttcacccctcctggaaagcaggcctgatggcttcccactggcctccaccacctgaccagagtgttctcttcagrggactggctcctttcccagtgtccttaaaataaagaaatgaaaatgcttgttggcacattcatgtgggttgaccatggcttctttaattcatttggagac

SEQ ID NO: 7016 - DNA, 201 bp, Homo sapiens; identical to SEQ ID NO: 713

SEQ ID NO: 7017 - DNA, 201 bp, Homo sapiens; identical to SEQ ID NO: 712

SEQ ID NO: 7018 - DNA, 201 bp, Homo sapiens; identical to SEQ ID NO: 710

SEQ ID NO: 7019 - DNA, 201 bp, Homo sapiens
gtgctgggcctgagggatacagacggcacaggccagtgctcctgtccctgatggggtgggaacagtattctagaccagggaacagtacaggggaaagagcrcgcacagcctgtttagtgaagagccgtcgttcagtggggatagagtgcaggtgaggggcttattaacaactgaggagggagggagggtgggagggaggga

SEQ ID NO: 7020 - DNA, 201 bp, Homo sapiens
caggagcccaggcccagagcactcctgtgtgctgggcctgagggatacagacggcacaggccagtgctcctgtccctgatggggtgggaacagtattctasaccagggaacagtacaggggaaagagcacgcacagcctgtttagtgaagagccgtcgttcagtggggatagagtgcaggtgaggggcttattaacaactg

SEQ ID NO: 7021 - DNA, 201 bp, Homo sapiens
tgagacagtatctgtagtatgcttaggacagtgcctggcaggtggcatgtgtgataggagtgttagctattgcaaagggaaggaggttttaacatttgtaycctgactgcttcgtggagaaggcattggggtggaaaagacaagttaggagactgatgctgcaggagcccaggcccagagcactcctgtgtgctgggcctg

SEQ ID NO: 7022 - DNA, 201 bp, Homo sapiens
cagattgtcacagataacgacagtgccacgcacaaagcaaaacagagcgatgagatagagcgagcctgggaggggcagctagggccaacgtgcagaggcaygggtgtggcctgtccaggaacagcaggcaggcgtgctccaccctgactacatattcaaatcacccagagagcttacaaaggaaatatcagtgctgggacc

SEQ ID NO: 7023 - DNA, 201 bp, Homo sapiens
agtaagtgtcaaatcagacccaagaaggaggtgttattcatttcttcatttactcaacaaccattttcttgtcgcctgctttgcgcaggaagcaccccacrtgctgggggcacagtcatgaagcacacagacagggtcctgcctccagggagtttataatttaggtggggaaagaacaaggaaagtaaagcatggacagat

SEQ ID NO: 7024 - DNA, 201 bp, Homo sapiens
agcttctcagtaaggcaccgcagtctggagcttggagaggctcccatgggtgcacagggggagggggtaaaggaggtttgaggtaccttgaacagtatggrggctgattcctctgggatgaaggcccaaaagaagagaaggtggccaacaaattattattattattattattactgtcccgcatgaaggaagtgctgggat

SEQ ID NO: 7025 - DNA, 201 bp, Homo sapiens
gtcagtccagccattcccctggcttcaggaaggctactgatgatggggaggaaatgggactcagaattcggtggataaaggttcaggtgggctgcccaccscaggttccacatcaacctgtgctctgggaaccacatcgccttccacctgaacccccgttttgatgagaatgctgtggtccgcaacacccagatcgacaac

SEQ ID NO: 7026 - DNA, 201 bp, Homo sapiens
tgggagctacagaaagcaatgaggtctctatcaaacccagtctcctctctctcgagaggaaccagtggggataccctaccccccaaccccaaagccctgtrcacctgggggtaaaaatctgggtgccacgggctcaggaaggcttgcttgggagcaagagggaggtgggtgtgtccggggaggcatttctgagcacaagag

SEQ ID NO: 7027 - DNA, 201 bp, Homo sapiens
ttggaaagcactgaagcccaggaatcgacccacaataggccttcaacaaataccacttctcaccttatgggtgaaatatggcactggaagtaatgctcttsgctgtgggagctacagaaagcaatgaggtctctatcaaacccagtctcctctctctcgagaggaaccagtggggataccctaccccccaaccccaaagcc

SEQ ID NO: 7028 - DNA, 201 bp, Homo sapiens
ccaagagttccctgtctctgtccgctgggcacccagagctggggacctgggggtcaccctggattcttcactccctcttctttacgtctctccaaggcacsaacgtgtctccctcctgaagccaccgatgtggtccaggcctctgggattcctcaccatgacgacaggggtccagttccccaccccctacacccaaccact

SEQ ID NO: 7029 - DNA, 201 bp, Homo sapiens
tctctccctcttgcccctgcctctgcctttcggcttctccttggctctattaatgcttctcctcactgcccggtgccttttgttttaacagaacccccgcrcagtccctgttcagcctgccttctccacggtgccgttctcccagcctgtctgtttcccacccaggcccagggggcgcagacaaaaagtgagttcaacaca

SEQ ID NO: 7030 - DNA, 201 bp, Homo sapiens
acccctgcactgctcaccagagcctggctctttcccatcccatcttggcagggccctaacccccttgcctcatcgccctgcctgcctggtctctccctctygcccctgcctctgcctttcggcttctccttggctctattaatgcttctcctcactgcccggtgccttttgttttaacagaacccccgcacagtccctgtt

SEQ ID NO: 7031 - DNA, 201 bp, Homo sapiens
ctccttccctgactctctcccctgcgggtggtaggggagggaagagctggagggagaccgcacccctgcactgctcaccagagcctggctctttcccatcycatcttggcagggccctaacccccttgcctcatcgccctgcctgcctggtctctccctcttgcccctgcctctgcctttcggcttctccttggctctatt

SEQ ID NO: 7032 - DNA, 201 bp, Homo sapiens
caataccatgtgaaaaatgggaagattagggtatgctgggcccacattcccacagggcaccagcagctgggtgggagctgctgttacccttttggcattcraggctgctccctgagatcagcgaagcacacagtaggccctcagcaaatctgggcttctcgccctttggtcctcatctctcattccctccttccctgactc

SEQ ID NO: 7033 - DNA, 201 bp, Homo sapiens
aggtgggagaattgcttgagcccaggaattagagttctgtctgggcaaaacagcaagaccctgtctccaaaaaactttgtttaaataataaaataaaatawataaaactaaataaggtcaggagataccaataccatgtgaaaaatgggaagattagggtatgctgggcccacattcccacagggcaccagcagctgggtg

SEQ ID NO: 7034 - DNA, 201 bp, Homo sapiens
gctgaggtgggagaattgcttgagcccaggaattagagttctgtctgggcaaaacagcaagaccctgtctccaaaaaactttgtttaaataataaaataawataaataaaactaaataaggtcaggagataccaataccatgtgaaaaatgggaagattagggtatgctgggcccacattcccacagggcaccagcagctg

SEQ ID NO: 7035 - DNA, 201 bp, Homo sapiens
ggctcaagaaccaaactgaatccagttcaaattcccagctctgccattcatcatctgtgggatcttagacaagcaacttcacctctctcagccttggtttyttcatctgtagaatggtcattgcctgccccccatgggtggttgtgtggttcagtgaggagacagatatcagaggtcacacagtggcccccctgggcccac

SEQ ID NO: 7036 - DNA, 201 bp, Homo sapiens
tgtgcagctgtcctacatcagcttccaggtcagactgtccacctggcaccggtcccaggggctgggatgcagggcccagcgtagctgtgtctaggccctgytgggtgggcccaagccaatctcctacccaggtcactctggggacaacctctgcttccctgtcccagtacctgcccgccccttctcctctgtcactctgcc

SEQ ID NO: 7037 - DNA, 201 bp, Homo sapiens
caccatctccgtcaatggctctgtgcagctgtcctacatcagcttccaggtcagactgtccacctggcaccggtcccaggggctgggatgcagggcccagygtagctgtgtctaggccctgctgggtgggcccaagccaatctcctacccaggtcactctggggacaacctctgcttccctgtcccagtacctgcccgccc

SEQ ID NO: 7038 - DNA, 201 bp, Homo sapiens
gactggcttcagtggaaatgacattgccttccacttcaaccctcggtttgaagatggagggtacgtggtgtgcaacacgaggcagaacggaagctgggggsccgaggagaggaagacacacatgcctttccagaaggggatgccctttgacctctgcttcctggtgcagagctcagatttcaaggtgagcaagaatcccct

SEQ ID NO: 7039 - DNA, 201 bp, Homo sapiens
cttaacaacttccatcttcggtatcaattggtaatcactttccaagacctatgtttcttgtttgctaataccagcacttttccttaaccgttttctatttrcttttagcaaatcatgctgtaaaggcaaaatccaataattaaaacaaaaacacattagatcccaattagaaaaacaaaaacgatgccaacaaagcagtct

SEQ ID NO: 7040 - DNA, 201 bp, Homo sapiens
ggaccatgaccctgatcttccgccccttcctctctccctctccctccacctcccccaccccccagcaccaggagggcttcccactcccatcctgtcatatrgagacagatcctacctcagagggccctctcctcttgggagctttctgtctctcccttccttggggcaggaatttcgaaaggactacagggatgaagctga

SEQ ID NO: 7041 - DNA, 201 bp, Homo sapiens
gatgccaagggcagggaggccccgatctccctgaaccctccaaccaggggaatcaggaccatgaccctgatcttccgccccttcctctctccctctccctscacctcccccaccccccagcaccaggagggcttcccactcccatcctgtcatatagagacagatcctacctcagagggccctctcctcttgggagctttc

SEQ ID NO: 7042 - DNA, 201 bp, Homo sapiens
ccgttctcagctccagtggaaccaggtgtgtgtgtatatggatggaaacgtttcactccagcctcgtcccttagtaaaccactgtgcctgtgagcctgggytagttcaaacagcaacatccaagctcacgtgcctggctcaggggaggcccaatgcgtccctaacccatgccacagggcagcactccacaggcacaacctg

SEQ ID NO: 7043 - DNA, 201 bp, Homo sapiens
tcccacaccttctccctgcaggctgtccccttttctgggactattcaaggaggtctccaggacggacttcagatcactgtcaatgggaccgttctcagctscagtggaaccaggtgtgtgtgtatatggatggaaacgtttcactccagcctcgtcccttagtaaaccactgtgcctgtgagcctgggttagttcaaacag

SEQ ID NO: 7044 - DNA, 201 bp, Homo sapiens
aacttgaagaatgtgaaaatcagccaggagatagaactgtgctttaatgcgggttatagaacgacattggatatgaagcattttgggaataaactttgaarattggaagtaccagtttgtgaattttgctgagagagatgaaggtggggggtgggtgacagtggtgaagcatctcctatgtgccagtctcttttaccacag

SEQ ID NO: 7045 - DNA, 201 bp, Homo sapiens
agcagtggcaagtaggctgaatttggctggtgggtgttttctgtttggcctgcacagtgtttcttttaacgttttattataggaaattcaaacatgcagarggaattgtaccatcaacaacacacacccatcactctgctccaacaatgatcaactcaggcctatcttgcttcatcctataccctccctcgcttgcttcct

SEQ ID NO: 7046 - DNA, 201 bp, Homo sapiens
gggggctcccctgggttgggacaattaagcctcacttggtgacccatctggcagtcggagccacgcttcctccacatgccgacagtgggggaaggtcacgyggttcgctgtcctgctgaggagggctgagtgccatgagggcctggcttggaaacctcactcccacttcttgtctggcctcatctagcccagcctctttgg

SEQ ID NO: 7047 - DNA, 201 bp, Homo sapiens
tgggtccttcctgggtggggaggcagggtggggagggtgggcagaggcagggtactgagggagggaagctgccatggcccacctcagcagaggccagggtygggcttgagtgccccctggtgacactgagtccagaatgaggctgcctacgttctggtctgcagagctcggctctgctttctaaactccagagagaaagaa

SEQ ID NO: 7048 - DNA, 201 bp, Homo sapiens
gaggtcatcctggcacacctgtgccgtgctgagctcactcatgcctggagggatgctccttcccacgagtcatggctttgacagtgttgactgagctgtcstgtcctgtcctgtcctgtgtgctcaggggaagacatgtagagcggggtggttcatgtaaagaggaagcaagcacgcttctgggacagtaaggacgctacc

SEQ ID NO: 7049 - DNA, 201 bp, Homo sapiens
gggggtgggggcatcccaaagagaacacaagcagggcagaaatatcagaggaggtcatcctggcacacctgtgccgtgctgagctcactcatgcctggagrgatgctccttcccacgagtcatggctttgacagtgttgactgagctgtcctgtcctgtcctgtcctgtgtgctcaggggaagacatgtagagcggggtgg

SEQ ID NO: 7050 - DNA, 201 bp, Homo sapiens
ccattgaataacagccaagttgctttggtttctatttctttgttaagtcgttccctctacaaaggacttcctagtgggtgtgaaaggcagcggtggccacrgaggcggcggagagatggccttcagcggttcccaggctccctacctgagtccagtgagttccagggctatgggcacagggctgcctcagccagagggaca

SEQ ID NO: 7051 - DNA, 201 bp, Homo sapiens
agggcacctgcctcctgccacgctgacttcaggactggtcgagccccagggaacatttgcagggcagcccaactttggccctggccctggcgctggccctrgctctggggaggatagaaagtgtgctggatacagtcagacagaactggctgccactttggatttgatcccttccaccttggcaagcttgggcaagttgct

SEQ ID NO: 7052 - DNA, 201 bp, Homo sapiens
atggctctgtgcagctgtcctacatcagcttccaggtcagactgtccacctggcaccggtcccaggggctgggatgcagggcccagcgtagctgtgtctargccctgctgggtgggcccaagccaatctcctacccaggtcactctggggacaacctctgcttccctgtcccagtacctgcccgccccttctcctctgtca

SEQ ID NO: 7053 - DNA, 201 bp, Homo sapiens
tctccgtcaatggctctgtgcagctgtcctacatcagcttccaggtcagactgtccacctggcaccggtcccaggggctgggatgcagggcccagcgtagstgtgtctaggccctgctgggtgggcccaagccaatctcctacccaggtcactctggggacaacctctgcttccctgtcccagtacctgcccgccccttct

SEQ ID NO: 7054 - DNA, 201 bp, Homo sapiens
gcagggcccagcgtagctgtgtctaggccctgctgggtgggcccaagccaatctcctacccaggtcactctggggacaacctctgcttccctgtcccagtrcctgcccgccccttctcctctgtcactctgcccctccttctgtgttactgtctctgtccggaacacctgccttggtctcccagactcctcagctgcccct

SEQ ID NO: 7055 - DNA, 201 bp, Homo sapiens
atctccgtcaatggctctgtgcagctgtcctacatcagcttccaggtcagactgtccacctggcaccggtcccaggggctgggatgcagggcccagcgtasctgtgtctaggccctgctgggtgggcccaagccaatctcctacccaggtcactctggggacaacctctgcttccctgtcccagtacctgcccgccccttc

SEQ ID NO: 7056 - DNA, 201 bp, Homo sapiens
ccagagagcttacaaaggaaatatcagtgctgggaccccagcccaggccaatgaggcagtcagctgggcattcgtattttaaaaatatgccttaagtgatyatactctgcagtcagagttgaaaatgactgatgtagggctttgcagccatggaaaggagcttggattttaacacagtgaaaagcctcaggagtgtttcaa

SEQ ID NO: 7057 - DNA, 201 bp, Homo sapiens
aggtcatgagcagcagagctaggattcagacctggagttggcctgactctaaaacgatgcatgcctcaccatggcccatcactcctttaaagagcaccagmagagagaatttgacaaagtggttgcccgtggggcctgggatgggtggggaaaccacgctaggcctcggggctgctgagggcctgagggaaggaatgggga

SEQ ID NO: 7058 - DNA, 201 bp, Homo sapiens
gtttctatttctttgttaagtcgttccctctacaaaggacttcctagtgggtgtgaaaggcagcggtggccacagaggcggcggagagatggccttcagcrgttcccaggctccctacctgagtccagtgagttccagggctatgggcacagggctgcctcagccagagggacacagctctggggctctgaggaagcaact

SEQ ID NO: 7059 - DNA, 201 bp, Homo sapiens
gagagggtgggctgatgggtccttcctgggtggggaggcagggtggggagggtgggcagaggcagggtactgagggagggaagctgccatggcccacctcrgcagaggccagggtcgggcttgagtgccccctggtgacactgagtccagaatgaggctgcctacgttctggtctgcagagctcggctctgctttctaaac

SEQ ID NO: 7060 - DNA, 201 bp, Homo sapiens
aaggaattagtctgcaaattctagtgcatctaggtggagcacaggaaggaagagaggtgcagactcacgtatggccctggggcacctgccatcctctcgcrcccgtacagcccttacctgccagcacttaccctacccagcttgagttctgggccttctcaccagcacatcgctgggacctggtcgacttcaggtaagttt

SEQ ID NO: 7061 - DNA, 201 bp, Homo sapiens
ccgtggccaagcatgcttaggacacacagccacatacttctgggcagtgtcatctggcaacttgctgtcatgtcagtgtggtcaagcattgtagacctctrtgaaccaaatatgcttcaggcttgggttgagcacaggagagggaggagggaaaggtcactggggctgggagtgcctacttccctctgtgagtgtcacccc

SEQ ID NO: 7062 - DNA, 201 bp, Homo sapiens
catctggcaacttgctgtcatgtcagtgtggtcaagcattgtagacctctatgaaccaaatatgcttcaggcttgggttgagcacaggagagggaggaggsaaaggtcactggggctgggagtgcctacttccctctgtgagtgtcaccccagtccacccagtaccatacctttctctctctggacccacttccttttgct

SEQ ID NO: 7063 - DNA, 201 bp, Homo sapiens
gtggtcaagcattgtagacctctatgaaccaaatatgcttcaggcttgggttgagcacaggagagggaggagggaaaggtcactggggctgggagtgcctrcttccctctgtgagtgtcaccccagtccacccagtaccatacctttctctctctggacccacttccttttgctgccggctcctccccattgaataacagc

SEQ ID NO: 7064 - DNA, 201 bp, Homo sapiens
tcctacccaggtcactctggggacaacctctgcttccctgtcccagtacctgcccgccccttctcctctgtcactctgcccctccttctgtgttactgtcyctgtccggaacacctgccttggtctcccagactcctcagctgcccctttctcttcatccctcagtttccatcctggtaaggagggcatattgttctagaa

SEQ ID NO: 7065 - DNA, 201 bp, Homo sapiens
tctccaggtcactggtaacatttatttttcagcgacatcgttccagcctttatccagggtctattaagggtatagttttgtaagcacattgcaaattaccyttgcaagcagagtaggtctctgggcttgagaagcctgtgggtaagtcagtccaagtatgcttatctgagataaggatgtccccattcgttcagtatgcaa

SEQ ID NO: 7066 - DNA, 201 bp, Homo sapiens
gccctggcgctggccctggctctggggaggatagaaagtgtgctggatacagtcagacagaactggctgccactttggatttgatcccttccaccttggcragcttgggcaagttgcttaatctttctgagcctcgttgcctcactagggacacaggagctgaggctgcttcccttgttggaaagcactgaagcccaggaa

SEQ ID NO: 7067 - DNA, 201 bp, Homo sapiens
atgtgaaggatctaggttgtgcgctccttaggagaatctgagtctaatgcctgatgatctaaggtggaaaagtttcatcctgaaatcattgtatatccctytccatccgtgaaaaattgccctccatgaaactggtccctggtgccaaaaagtttggtgactgctgccttaaactactactggatttactgagtgaggcaa

SEQ ID NO: 7068 - DNA, 201 bp, Homo sapiens
tagggactcagtgaatgaatgtggaatgtggttcacacagccagggagaatgggataccagccagggcaagaacagtctactgggtggggcaggatccagracaaggaggtgagcagcccttcctccggccactcaagtagtggggactgggaggaggggcgctttgtctacgcagtcttcttatggctcatcaccgtaca

SEQ ID NO: 7069 - DNA, 201 bp, Homo sapiens
ctccctactgtgttgattggtctaaaaacacatcagcctttgggtatgaccttactggggcccctccaggcagggtgtggagcagaggaccctcctttatrggctggactcaatagtgaggctgcttacctgtgactcacctccaaggctcaaggtgatgctaaggtgctgatttgctagaactctgagctgtgcctgtgt

SEQ ID NO: 7070 - DNA, 201 bp, Homo sapiens
ccagggcattcagatcactcatccatagtcacacaactgaaaatgcagatgcgggattccctcagcccatcggagctcaaaagcaaggactttcccattayccccactaccaggagagggagccccggctccggtgccggagacgtgaaggcggccattctaacccacaaaggcccgcacagggaggcaaacttgggagat

SEQ ID NO: 7071 - DNA, 201 bp, Homo sapiens
gccagagcttctcagtaaggcaccgcagtctggagcttggagaggctcccatgggtgcacagggggagggggtaaaggaggtttgaggtaccttgaacagkatgggggctgattcctctgggatgaaggcccaaaagaagagaaggtggccaacaaattattattattattattattactgtcccgcatgaaggaagtgct

SEQ ID NO: 7072 - DNA, 201 bp, Homo sapiens
ccccctgccctaccacaggtctttggacaagcaacgaagctccatcttctgctgtcacacctggcagccatttcagaggagccatggcctgcctgggttgyccctctgtgggggatctgtccaggctgcgacacccaccagctccccactctgtataactgagggccacattccctacaaaacagcccccaacccccctcc

SEQ ID NO: 7073 - DNA, 201 bp, Homo sapiens
agttcctcaggccccagtgtagtcctcggagctggcagcaccagcagcaactgggagcttgttggaaacgcggcatcccgcgcaccgcccccctgccccgygacacacacacatacctacctgagagatcagagccttcgttttcacaacaccccaggtgagacacacacattaaagctgagaagccggctgggcatggtg

SEQ ID NO: 7074 - DNA, 201 bp, Homo sapiens
acagagcttttctggagcctgaggttgacactacaccttctcctgccacctgagactctgctgctagaagagggaggggagagagaggggcgaagtcggcyagggcggccaggaggcagacaccaaacccgagctgggagccgtgtgttgctaggaccccagcgtcccctgctgagctccttccttggttctgaccaggag

SEQ ID NO: 7075 - DNA, 201 bp, Homo sapiens; identical to SEQ ID NO: 711

SEQ ID NO: 7076 - DNA, 201 bp, Homo sapiens; identical to SEQ ID NO: 1012

SEQ ID NO: 7077 - DNA, 201 bp, Homo sapiens
tccccactctgtataactgagggccacattccctacaaaacagcccccaacccccctcccccgccacacacacatacagtgtgattaaagtaaaatgcaaytcatgtaaatatctccatcaaggaatcatacagggaagacccaagtggccgttgggaacagactgggtgttagttttttaaatacagaggcataaataac

SEQ ID NO: 7078 - DNA, 201 bp, Homo sapiens
aagctcacgcagcctctgcagctcactcaaggccctcttgggccaccatgcttttgcatatgctgtccctggtcccggaagcaccctctgccagcctgccycgagcacatgcctaattgcccttccatgctctgcctaagtgccgctcctctgggagtcctccccgcctggaatattgttggacgctcccctggtgtcccc

SEQ ID NO: 7079 - DNA, 201 bp, Homo sapiens
ggaagaggacaggagaagagggggccagtcctcagacaccccaggcccacgcacacacaggatggctggggagctgggcctgtggggggtggtcgtgaggrgatggagaggacaagaagctcctatttgatttcccatgtcctgcaggctgcttcacttctgtccaggcaccagcacctcccccaggtccttctgaaaaag

SEQ ID NO: 7080 - DNA, 201 bp, Homo sapiens
cagggactttctttcacccagcctggagttcagtggtatgatcatagctcactgcagcctcaaattcctgggcttgagtgatcctcccatctcagcctccrgagcagctgggactacaggagtgcactatgatgcccagctaattattattattattattttgagatggagtctcgctctgccaccaggctggagtgctgt

SEQ ID NO: 7081 - DNA, 201 bp, Homo sapiens
aagaggacaggagaagagggggccagtcctcagacaccccaggcccacgcacacacaggatggctggggagctgggcctgtggggggtggtcgtgaggagrtggagaggacaagaagctcctatttgatttcccatgtcctgcaggctgcttcacttctgtccaggcaccagcacctcccccaggtccttctgaaaaaggg

SEQ ID NO: 7082 - DNA, 201 bp, Homo sapiens
acatggtggcctgcacctattttgtcccagctattcgggaggttgaggcgggaggattacttgagccagggggtggaggctgcagtgaaccatgatcacasccctcactgaactccagcctgggcaacagagtgagaacccatctctaaataaataaataaataaataaataaataaataaataaataatcttgtttttcc

SEQ ID NO: 7083 - DNA, 201 bp, Homo sapiens
ttgcaaattacctttgcaagcagagtaggtctctgggcttgagaagcctgtgggtaagtcagtccaagtatgcttatctgagataaggatgtccccattcrttcagtatgcaacctgaggtcacctctcctctgctccccatgagcattttatgcatatataaataataccgctgcagccataaaaaggaatgagatcatg

SEQ ID NO: 7084 - DNA, 201 bp, Homo sapiens
cctcacttggtgacccatctggcagtcggagccacgcttcctccacatgccgacagtgggggaaggtcacgcggttcgctgtcctgctgaggagggctgastgccatgagggcctggcttggaaacctcactcccacttcttgtctggcctcatctagcccagcctctttggagggcctgggggaagctggaaccacgtgc

SEQ ID NO: 7085 - DNA, 201 bp, Homo sapiens
ggtcatcctggcacacctgtgccgtgctgagctcactcatgcctggagggatgctccttcccacgagtcatggctttgacagtgttgactgagctgtcctstcctgtcctgtcctgtgtgctcaggggaagacatgtagagcggggtggttcatgtaaagaggaagcaagcacgcttctgggacagtaaggacgctacccg

SEQ ID NO: 7086 - DNA, 201 bp, Homo sapiens
accactgccacagtgaccttcttataagcaaatgtgatcacaccctctccctgcttaaaaatcttcacagcccccagcccttcaaataaagcccaaattcyccagcagggtatatgaattcctccccagtctgccccaatccacgtccctgcctcacccccaacccacgaagctcacgcagcctctgcagctcactcaagg

SEQ ID NO: 7087 - DNA, 201 bp, Homo sapiens
agctgagaagccggctgggcatggtggctcacgcctgtaatcccagcactttgggaggccgagacaggcagatcatctgaggtctggagtttgtgaccagyctggctaacatgacaaaaccccgtctctactaaaaataataataatttaaaaaaaagtagccgggtgtggtggcgggcacctgtaatcccagctactcgg

SEQ ID NO: 7088 - DNA, 201 bp, Homo sapiens
ctcaagggatcctcccacctcagcctcccaagtaactagagttaaaggtgtgcaccaccacacctagctattttttttttattttttgtagagatgggggwcccattacgttgttcaggctggcctcaaactcctgggctcaagtgatccttctgcctcagcctcccaaagtgctgggattatagatgtgagccactgtgc

SEQ ID NO: 7089 - DNA, 201 bp, Homo sapiens
gccgctgacacggaagaggacaggagaagagggggccagtcctcagacaccccaggcccacgcacacacaggatggctggggagctgggcctgtggggggyggtcgtgaggagatggagaggacaagaagctcctatttgatttcccatgtcctgcaggctgcttcacttctgtccaggcaccagcacctcccccaggtcc

SEQ ID NO: 7090 - DNA, 201 bp, Homo sapiens
gaagccgctgacacggaagaggacaggagaagagggggccagtcctcagacaccccaggcccacgcacacacaggatggctggggagctgggcctgtgggrggtggtcgtgaggagatggagaggacaagaagctcctatttgatttcccatgtcctgcaggctgcttcacttctgtccaggcaccagcacctcccccagg

SEQ ID NO: 7091 - DNA, 201 bp, Homo sapiens
tctcaaagactccttcctgcccctcccagtcagagacccccaagggtgacgccattctggcctgttgttcaacttgacttgaacaacccttcaagtcaagyttggatctggcttcttctgctcagttgcgaggcccattgatgtttcctgtggcctagctcctttttattgccgagggctactctgttgtatgaaaaccac

SEQ ID NO: 7092 - DNA, 201 bp, Homo sapiens
ccccctcccccgccacacacacatacagtgtgattaaagtaaaatgcaattcatgtaaatatctccatcaaggaatcatacagggaagacccaagtggccsttgggaacagactgggtgttagttttttaaatacagaggcataaataactgtacacaaggcagttaaatacacagtggtgtgacagcacctcctggtggt

SEQ ID NO: 7093 - DNA, 201 bp, Homo sapiens
cacatgggacaggtggccccagagcaaaacgctaagacagtgtctaagaagaagctcaaggccttcccagaagcgctggcctcatgtgagaatcccacccrcgccagaccccgtttcagatcctttgtgagggaggcaggcctgtgccccctgccctaccacaggtctttggacaagcaacgaagctccatcttctgctgt

SEQ ID NO: 7094 - DNA, 201 bp, Homo sapiens
tagctattgcaaagggaaggaggttttaacatttgtaccctgactgcttcgtggagaaggcattggggtggaaaagacaagttaggagactgatgctgcargagcccaggcccagagcactcctgtgtgctgggcctgagggatacagacggcacaggccagtgctcctgtccctgatggggtgggaacagtattctagac

SEQ ID NO: 7095 - DNA, 201 bp, Homo sapiens
ccgatgtggtccaggcctctgggattcctcaccatgacgacaggggtccagttccccaccccctacacccaaccactgccacagtgaccttcttataagcmaatgtgatcacaccctctccctgcttaaaaatcttcacagcccccagcccttcaaataaagcccaaattctccagcagggtatatgaattcctccccagt

SEQ ID NO: 7096 - DNA, 201 bp, Homo sapiens
tacaaaaattagctgggtatggtggtgggctcctgtaatcccagctactcgggaggctgaggcacgagaatcacttgacccactgcactccagcctgggcracagactgacattccatctcaaaaaacaaaaaaaaacagttgaaggaaaaataaataattaataaatgaaaccccaggtgagctaagactagaaagacaa

SEQ ID NO: 7097 - DNA, 201 bp, Homo sapiens
gggaagatgctctgctgaaggtggccaggagggcaaaggtcacagtggccattgttatatggtggtggtggggagagggggatggcttcttcttaacctcytcgggtgagtcgaaggtttaccctccagacccttgatgggtccctttggtcccttgggcttcctgagtctccagccagggcctgggacctttgctgggag

SEQ ID NO: 7098 - DNA, 201 bp, Homo sapiens
ggcctcggggctgctgagggcctgagggaaggaatggggagcccgggcacagaaatagaggagggggctgccccacggctacacaaggcatctgggaagaygctctgctgaaggtggccaggagggcaaaggtcacagtggccattgttatatggtggtggtggggagagggggatggcttcttcttaacctcttcgggtg

SEQ ID NO: 7099 - DNA, 201 bp, Homo sapiens
gtggggaaaccacgctaggcctcggggctgctgagggcctgagggaaggaatggggagcccgggcacagaaatagaggagggggctgccccacggctacasaaggcatctgggaagatgctctgctgaaggtggccaggagggcaaaggtcacagtggccattgttatatggtggtggtggggagagggggatggcttctt

SEQ ID NO: 7100 - DNA, 201 bp, Homo sapiens
ccagcctgggccacaaagtgagaccacgtctctacaaaaaatagacaaacattagccaggtgtggtggtgcatgcctgtagtcctagctacctgggaggcrgaggtgggagggtcacgtgagcctgaggaagtggaggctacagtgagctgagatcgcgtcaacacactccagcctggctgacagaatgagatcctgtctc

SEQ ID NO: 7101 - DNA, 201 bp, Homo sapiens
aacatttccagcctctcaaagactccttcctgcccctcccagtcagagacccccaagggtgacgccattctggcctgttgttcaacttgacttgaacaacmcttcaagtcaagtttggatctggcttcttctgctcagttgcgaggcccattgatgtttcctgtggcctagctcctttttattgccgagggctactctgtt

SEQ ID NO: 7102 - DNA, 201 bp, Homo sapiens
ttcacatgtctctttgagttcctgtttttggttatttgggggatatacccagaagtggaattgctggatcatatagtaattctatgttgagatttttgagkaacagccatgctgttttcacagagttccagtttacccacaatctagccaacagttgttatttcctggattttttttttttttttaatcacagccatccta

SEQ ID NO: 7103 - DNA, 201 bp, Homo sapiens
atgcctgatgatctaaggtggaaaagtttcatcctgaaatcattgtatatccctttccatccgtgaaaaattgccctccatgaaactggtccctggtgccraaaagtttggtgactgctgccttaaactactactggatttactgagtgaggcaaaccaagtactgttttgtcatagtctgtttacaggagagagttgcac

SEQ ID NO: 7104 - DNA, 201 bp, Homo sapiens
gtcccgggctgttgttatcatgttggccaccagagggcgcaacggctccaagcccaactggaattctcacttaactcccacaagtatcctagctagttaayagcattatccccactttacagatgaggaaactgaggcccagggcattcagatcactcatccatagtcacacaactgaaaatgcagatgcgggattccctc

SEQ ID NO: 7105 - DNA, 201 bp, Homo sapiens
attattattattattattattactgtcccgcatgaaggaagtgctgggatctgctttttcagatgaggaaacaaactcacaagtgcaggttacttgcttgyggtcacacagtcagtaagtgtcaaatcagacccaagaaggaggtgttattcatttcttcatttactcaacaaccattttcttgtcgcctgctttgcgcag

SEQ ID NO: 7106 - DNA, 201 bp, Homo sapiens
ccaacaaattattattattattattattactgtcccgcatgaaggaagtgctgggatctgctttttcagatgaggaaacaaactcacaagtgcaggttacytgcttgtggtcacacagtcagtaagtgtcaaatcagacccaagaaggaggtgttattcatttcttcatttactcaacaaccattttcttgtcgcctgctt

SEQ ID NO: 7107 - DNA, 201 bp, Homo sapiens
tgggaaccacatcgccttccacctgaacccccgttttgatgagaatgctgtggtccgcaacacccagatcgacaactcctgggggtctgaggagcgaagtytgccccgaaaaatgcccttcgtccgtggccagagcttctcagtaaggcaccgcagtctggagcttggagaggctcccatgggtgcacagggggagggggt

SEQ ID NO: 7108 - DNA, 201 bp, Homo sapiens
ctgggaaccacatcgccttccacctgaacccccgttttgatgagaatgctgtggtccgcaacacccagatcgacaactcctgggggtctgaggagcgaagyctgccccgaaaaatgcccttcgtccgtggccagagcttctcagtaaggcaccgcagtctggagcttggagaggctcccatgggtgcacagggggaggggg

SEQ ID NO: 7109 - DNA, 201 bp, Homo sapiens
tccctgagatcagcgaagcacacagtaggccctcagcaaatctgggcttctcgccctttggtcctcatctctcattccctccttccctgactctctccccygcgggtggtaggggagggaagagctggagggagaccgcacccctgcactgctcaccagagcctggctctttcccatcccatcttggcagggccctaaccc

SEQ ID NO: 7110 - DNA, 201 bp, Homo sapiens
tgcactgtcatgtctgacatgagccaggggctcagcacacggaatcgcacccagtcctctcagaacgctgccagccaggggctcagcacacagcgttgcayccagtcctctccagaacactgtcgggtggtgttactgtcctgccattcagaggagggaactggggcacaggcaggtcaagtgacttggccagtgtcagaa

SEQ ID NO: 7111 - DNA, 201 bp, Homo sapiens
ctgcactgtcatgtctgacatgagccaggggctcagcacacggaatcgcacccagtcctctcagaacgctgccagccaggggctcagcacacagcgttgcwcccagtcctctccagaacactgtcgggtggtgttactgtcctgccattcagaggagggaactggggcacaggcaggtcaagtgacttggccagtgtcaga

SEQ ID NO: 7112 - DNA, 201 bp, Homo sapiens
aacttttctgtgcctcagtttcctcatctgtaaaagtggccggggttgctgtgaggataaatgttcctagtcatgcccagagccctcatggacacacatgsatccaaatgccacagcagccttagctggtcaacctcaaaacaacacatttgttcttacagtgttggaggtcagaagtctaaaatcaaagtgtcatggaag

SEQ ID NO: 7113 - DNA, 201 bp, Homo sapiens
tcctgctgtgggacttctctgagagactgcggtgccctcaggagatgccaagggcagggaggccccgatctccctgaaccctccaaccaggggaatcaggmccatgaccctgatcttccgccccttcctctctccctctccctccacctcccccaccccccagcaccaggagggcttcccactcccatcctgtcatataga

SEQ ID NO: 7114 - DNA, 201 bp, Homo sapiens
aacctgtgctctgggaaccacatcgccttccacctgaacccccgttttgatgagaatgctgtggtccgcaacacccagatcgacaactcctgggggtctgrggagcgaagtctgccccgaaaaatgcccttcgtccgtggccagagcttctcagtaaggcaccgcagtctggagcttggagaggctcccatgggtgcacag

SEQ ID NO: 7115 - DNA, 201 bp, Homo sapiens
ccccacccaagatactccaggaggtgtgagctctgagataaatatgtttgggaaatgccacatcctttctttccttccagccttgaagggtcctgatgagyagcagcatgctgaaggcttccagaagtcttgtagtaaagcaacgtgtttgccttgccttaactaagcatgtcccaggctattcgaccttggaaccttttt

SEQ ID NO: 7116 - DNA, 201 bp, Homo sapiens
actggccccacactgaagaccagactcaggtcttcattttctagaaagagggtccaggagctcaggggtggtccccatcccagcctgggatgcctcccccrgaacatgtgctctcctctggcaggtgatggtgaacgggatcctcttcgtgcagtacttccaccgcgtgcccttccaccgtgtggacaccatctccgtcaa

SEQ ID NO: 7117 - DNA, 201 bp, Homo sapiens
gcatggggtccagcagcccccattgctacctaattccttagcagcccagggtgtctgcctgctacttccctgcctggaaggaaggccttctgcctggtgcrttcctgctgcagcctccactgcctcttagactctcacacaagctcagctccctgtcgcgtcctctcagggccaggcttctccttatcacaagcttagact

SEQ ID NO: 7118 - DNA, 201 bp, Homo sapiens
cccacactgaagaccagactcaggtcttcattttctagaaagagggtccaggagctcaggggtggtccccatcccagcctgggatgcctcccccagaacaygtgctctcctctggcaggtgatggtgaacgggatcctcttcgtgcagtacttccaccgcgtgcccttccaccgtgtggacaccatctccgtcaatggctc

SEQ ID NO: 7119 - DNA, 201 bp, Homo sapiens
agctgagaacggtcccattgacagtgatctgaagtccgtcctggagacctccttgaatagtcccagaaaaggggacagcctgcagggagaaggtgtgggamcatcagtcaggtggccggcctcccgtttgctcccctccagcgctagtcagtggccagcctgggtttgacagccccatgcaaggggatagggtgcggctgt

SEQ ID NO: 7120 - DNA, 201 bp, Homo sapiens
gacagcctgcagggagaaggtgtgggaacatcagtcaggtggccggcctcccgtttgctcccctccagcgctagtcagtggccagcctgggtttgacagcsccatgcaaggggatagggtgcggctgtgaccagtacagagggagtcgcagccccacgggtcttagggtcctgtgtggaggcaaacacaaatccaattagt

SEQ ID NO: 7121 - DNA, 201 bp, Homo sapiens
aatgaggacgatccaaaaagaaagcaagagacttacaatgggagccgggttggcaggccacacgccgggaggctggaggggtgaggagagtcaaaatggtrgttatcgcgggcaccacagaatgggaggagatggtggcaaaactccagggaggctcttgtgctcaaaaatgcctccccggacacacccacctccctcttg

SEQ ID NO: 7122 - DNA, 201 bp, Homo sapiens
atagaactgtgctttaatgcgggttatagaacgacattggatatgaagcattttgggaataaactttgaaaattggaagtaccagtttgtgaattttgctsagagagatgaaggtggggggtgggtgacagtggtgaagcatctcctatgtgccagtctcttttaccacaggctgtttctcacaaaatcatcaatcatatg

SEQ ID NO: 7123 - DNA, 201 bp, Homo sapiens
actctctcccctgcgggtggtaggggagggaagagctggagggagaccgcacccctgcactgctcaccagagcctggctctttcccatcccatcttggcakggccctaacccccttgcctcatcgccctgcctgcctggtctctccctcttgcccctgcctctgcctttcggcttctccttggctctattaatgcttctcc

SEQ ID NO: 7124 - DNA, 201 bp, Homo sapiens
ccggggttgcccagcttccctatcacatggacctccatgagccatctgtcttcccaactgtcatactaagattgtgcttgaatctggtttagactctaacrgccctcagcacctgctctggtgcgggccctctaaccatctccaaagctttacttagcatacccatttcctgcccagcactcatcccccacccaagatact

SEQ ID NO: 7125 - DNA, 201 bp, Homo sapiens
aagcaacgtgtttgccttgccttaactaagcatgtcccaggctattcgaccttggaacctttttgatgccaactgtctaccgacccattcaacgcatttgrggaaatgcctgttatctcctcactgttcttcaaacacaccagcttaactcccacccccggggcctttgtacctgctgcccctccagaacagcccagagtg

SEQ ID NO: 7126 - DNA, 201 bp, Homo sapiens
agcccaggctcaagaaccaaactgaatccagttcaaattcccagctctgccattcatcatctgtgggatcttagacaagcaacttcacctctctcagcctwggtttcttcatctgtagaatggtcattgcctgccccccatgggtggttgtgtggttcagtgaggagacagatatcagaggtcacacagtggcccccctgg

SEQ ID NO: 7127 - DNA, 201 bp, Homo sapiens
cttcatcaataaaatgcaagcccttcctgctggggggatgagggtgagcagacgccagcctgggtgtaaataagaagtgtgaggttcacacgaggctgacraggggcagccttgctctcccctgtgttcacagccttgctttggccacacagatactttctgaaaggggggtttggggagaggccagggagactctcctgc

SEQ ID NO: 7128 - DNA, 201 bp, Homo sapiens
ttcatcaataaaatgcaagcccttcctgctggggggatgagggtgagcagacgccagcctgggtgtaaataagaagtgtgaggttcacacgaggctgacarggggcagccttgctctcccctgtgttcacagccttgctttggccacacagatactttctgaaaggggggtttggggagaggccagggagactctcctgcc

SEQ ID NO: 7129 - DNA, 201 bp, Homo sapiens
ccagggagactctcctgcccccattctacagatggaaaaatggaacacattcccccgacttctcaaagctgccaactggtccaggatgtgcagtagggccwtctgacagcccacccagctcagatctcagccactgctaagattctcttggggcccagaacttttctgggcctgactcccctgggtctacctgccacccct

SEQ ID NO: 7130 - DNA, 201 bp, Homo sapiens
ttccctatcacatggacctccatgagccatctgtcttcccaactgtcatactaagattgtgcttgaatctggtttagactctaacggccctcagcacctgmtctggtgcgggccctctaaccatctccaaagctttacttagcatacccatttcctgcccagcactcatcccccacccaagatactccaggaggtgtgagc

SEQ ID NO: 7131 - DNA, 201 bp, Homo sapiens
cacatggacctccatgagccatctgtcttcccaactgtcatactaagattgtgcttgaatctggtttagactctaacggccctcagcacctgctctggtgygggccctctaaccatctccaaagctttacttagcatacccatttcctgcccagcactcatcccccacccaagatactccaggaggtgtgagctctgagat

SEQ ID NO: 7132 - DNA, 201 bp, Homo sapiens
ctggtctatagattaaggagctccttccaaaggaagaagttatgccaggacctcagtggcaggtgtttctaaacagatggaggaatggagaaggcacagcrtcaatggcccacaatgcgcagaggaagatcatccaggccccagcagcaacaaagccatgagcaggcccagcatctcctgagctggagatgccttagcctt

SEQ ID NO: 7133 - DNA, 201 bp, Homo sapiens; identical to SEQ ID NO: 6999

SEQ ID NO: 7134 - DNA, 201 bp, Homo sapiens
tgctcccttggcaggtagttcaggccttggccctcctcacaagagaattccaccaggatggtggtgtggctgggtaaggaaatagaagcctcaggtgggcygggcgccatggctcatgcctgtaatcctagcactttgggaggccaaggtgggtggatcacctgaggtcaggagttcaaaaccagactggccaacatggtg

SEQ ID NO: 7135 - DNA, 201 bp, Homo sapiens
actcaatgagcagctgtttgttctggttctgagatccaccctctgtaagcgcggagctgaggaacgttgaaagggacttagagaggttgcaggttgtcccrtctgcccaagcagaaactgagttccggagtggaaaagtgacttggagaaggtcactcaggtcgcggtggaatcaggtggacagctcagcttccctgactc

SEQ ID NO: 7136 - DNA, 201 bp, Homo sapiens
agtcaaacagtttaagtctctcttgcactctccttttagtgaaagagttcaatgaggaaggagaggaagtggaacagacgcttagagtccaagctggaaamgtggcccgtggttaaccaagagtagatgtaaaagcacaggtggccacaggttaccaggtgagccagtcctaccgatggcatggctgctaatgccagcaga

SEQ ID NO: 7137 - DNA, 201 bp, Homo sapiens
gagtgagcaggggggcagcctcttgtcactgacccagtagctgcctggatggggaaggaaggtgtcaggatggaaaagaggccccattcaggattctcagyaggtagcgaggcccccaggcagacaccctctattctccagctgcaggggaaaggaggctctaaagacctggctctaagagcaaaaggcaggaagaaggtg

SEQ ID NO: 7138 - DNA, 201 bp, Homo sapiens; identical to SEQ ID NO: 7008

SEQ ID NO: 7139 - DNA, 201 bp, Homo sapiens; identical to SEQ ID NO: 7009

SEQ ID NO: 7140 - DNA, 201 bp, Homo sapiens; identical to SEQ ID NO: 7010

SEQ ID NO: 7141 - DNA, 201 bp, Homo sapiens
tggagatgaaagacagagagagagagaagggagtgagagcgagaggaagagagatggggagagagacagaggaggctgagaagaagagaagggagagagakagagtgatgtaaaaggtaaagagacagggagagaggtgcatgagtaggaggttgggtcactcttgatcccagttgccagtgaaaactgttggtcactgtc

SEQ ID NO: 7142 - DNA, 201 bp, Homo sapiens
tggatctgccactgtgtggtgcctgtccctaggctctctatggctgtgagactgaaacagacacagtagttaaaaggtgacctaggtagtcagtgggggamaccttaaactagaagctccctaagggcaggggggtatctgtgccaccttctcccccagagttgtgtgcacaaggtggagctcttctaagggcctgaggga

SEQ ID NO: 7143 - DNA, 201 bp, Homo sapiens
ttggcacatagtagctattgctactattttgaatgttgttttgcctttgtttttgttttgagatagggtatcgctctgtcacccaggctggagtacagtgrtgtcatcatagctcactgaagcctcagcctccctgggtttaagcaatcctcccacctcagcctcccaagtagctgagactacagatgtgcaccactaagc

SEQ ID NO: 7144 - DNA, 201 bp, Homo sapiens
tccccaccactggggctaccactttttaggcccttaccatgggccagatactaagccatctgcttcgtgtaacttcgaagcacacttacctgatagggtgmcagcaaggactcaaagaggtgtctgggcttggcacatagtagctattgctactattttgaatgttgttttgcctttgtttttgttttgagatagggtatc

SEQ ID NO: 7145 - DNA, 201 bp, Homo sapiens
gcggatgctgtccccttctctctccaccatccttctgcggctccctcctgaaacagcctccctcagcgccttgagtcttgtgccctaacaggctcttgcaygcagtgagagggaggccccgaggccagctgtctctgttcagaaggacctggggttctccttgaccatgagctcagggctcagaccccaacacaaacaagc

SEQ ID NO: 7146 - DNA, 201 bp, Homo sapiens
ctgcaatttctccatctgtgcctttctcccaggaggagtgtccagattcacttagcccatgtgggccaggagccctggacagtgcctggcacacagtaggscctcggcggatgctgtccccttctctctccaccatccttctgcggctccctcctgaaacagcctccctcagcgccttgagtcttgtgccctaacaggctc

SEQ ID NO: 7147 - DNA, 201 bp, Homo sapiens
tgaactgcaatttctccatctgtgcctttctcccaggaggagtgtccagattcacttagcccatgtgggccaggagccctggacagtgcctggcacacagkaggccctcggcggatgctgtccccttctctctccaccatccttctgcggctccctcctgaaacagcctccctcagcgccttgagtcttgtgccctaacag

SEQ ID NO: 7148 - DNA, 201 bp, Homo sapiens
tgaaagttcttaagaatgagtcaaacagtttaagtctctcttgcactctccttttagtgaaagagttcaatgaggaaggagaggaagtggaacagacgctyagagtccaagctggaaaagtggcccgtggttaaccaagagtagatgtaaaagcacaggtggccacaggttaccaggtgagccagtcctaccgatggcatg

SEQ ID NO: 7149 - DNA, 201 bp, Homo sapiens
tcactctgcccattatgcccatttatccattcatccacaccatccatcccccaatacatcttaagtgacaagtttattccagttttggggaaagcaaagayggataagggcggctcccctttctagctaatgttcaaggcagtgcactctggttgcatcctgcagacacttggaaaaattcagttcactcaacacaactgt

SEQ ID NO: 7150 - DNA, 201 bp, Homo sapiens
ggcacaccagtgtgaccccagtgtcttctttatgggccacggggcccccgagtggcacctaaaccccagatccctccctttcctcccggaacccccagggrtcggcggtcccacaggggacagagtggaaggggtgcttacttccgcacaaagcagggcactgggttttgaggcttcagttgttgagccatgtgctgcaga

SEQ ID NO: 7151 - DNA, 201 bp, Homo sapiens; identical to SEQ ID NO: 7013

SEQ ID NO: 7152 - DNA, 201 bp, Homo sapiens; identical to SEQ ID NO: 7014

SEQ ID NO: 7153 - DNA, 201 bp, Homo sapiens; identical to SEQ ID NO: 7015

SEQ ID NO: 7154 - DNA, 201 bp, Homo sapiens; identical to SEQ ID NO: 713

SEQ ID NO: 7155 - DNA, 201 bp, Homo sapiens; identical to SEQ ID NO: 712

SEQ ID NO: 7156 - DNA, 201 bp, Homo sapiens; identical to SEQ ID NO: 710

SEQ ID NO: 7157 - DNA, 201 bp, Homo sapiens; identical to SEQ ID NO: 7019

SEQ ID NO: 7158 - DNA, 201 bp, Homo sapiens; identical to SEQ ID NO: 7020

SEQ ID NO: 7159 - DNA, 201 bp, Homo sapiens; identical to SEQ ID NO: 7021

SEQ ID NO: 7160 - DNA, 201 bp, Homo sapiens; identical to SEQ ID NO: 7022

SEQ ID NO: 7161 - DNA, 201 bp, Homo sapiens; identical to SEQ ID NO: 7023

SEQ ID NO: 7162 - DNA, 201 bp, Homo sapiens; identical to SEQ ID NO: 7024

SEQ ID NO: 7163 - DNA, 201 bp, Homo sapiens; identical to SEQ ID NO: 7025

SEQ ID NO: 7164 - DNA, 201 bp, Homo sapiens; identical to SEQ ID NO: 7056

SEQ ID NO: 7165 - DNA, 201 bp, Homo sapiens
ctctgtgcctggtcagctctgagaagaccccgtatgcgcacccagttccatcccctgagccagactttgggtcctcagggcaaggttagaagttgcaggargagggaaaaagctttacctgaatttgttggtgagctctttcagcatgaagagggatttcttcagtttctagaaagagaggaaatgacagagttctcaggc

SEQ ID NO: 7166 - DNA, 201 bp, Homo sapiens
tggcaggagatggctcctggcccacaatggaagttggtttacatatggggccacctggccaaggacctggttgtcaggtgagaattttagcttgtctctcmctccagctaaactgtagcaacttgtgtgggccctgtcccctggtgggagacccagaatagcctggccccctcccatccagccctgggcatctccagaggg

SEQ ID NO: 7167 - DNA, 201 bp, Homo sapiens
ccatccagctggagcatggagctgcagccccttctagtcctcccaacccctgagccttgtcaccaactcccatgaccaccccatgcttggcctgcagaccygtgagagggacttggtttctgtggcttgacccgtgacacactccgagggcaaacctctggcccagggtccctctgtgcctggtcagctctgagaagaccc

SEQ ID NO: 7168 - DNA, 201 bp, Homo sapiens
atagcagctgcattgtattatgtatcataactaatctagagatggtctaatgtatacaagaggatgtgcataggttatatgtaaatactaagccatgttayatcagagacttgagcatccatgggttttggcatccccggggaccctagaaataatcctccatggataccaagggatgactgtataaactcactcaggaag

SEQ ID NO: 7169 - DNA, 201 bp, Homo sapiens
ggggctcatccctgctgtctgtttcatcttgttaaagccaggttaagacagctgagcaaacagacagtagagtggcccccaggaagggtgggtggaggatrctggcctttgggcttgcctggaccatggtgggagggggaaggttaccaggaagcagtgctgtcagggttaaattcaggaggaggtggttatgctggtggg

SEQ ID NO: 7170 - DNA, 201 bp, Homo sapiens
aggctgggggctcatccctgctgtctgtttcatcttgttaaagccaggttaagacagctgagcaaacagacagtagagtggcccccaggaagggtgggtgkaggatgctggcctttgggcttgcctggaccatggtgggagggggaaggttaccaggaagcagtgctgtcagggttaaattcaggaggaggtggttatgct

SEQ ID NO: 7171 - DNA, 201 bp, Homo sapiens
cggtgatcctccatctctccatcctatgatccctgagggatgggctccgggctgggctcctcttacctggccccagatcccttcccagcaccagacccagrgtcattagccacaagctctgctgcctccctggctctctgtgagatgcccagaatagggccctgccagtcttctcccccattctcctagggccacagcccc

SEQ ID NO: 7172 - DNA, 201 bp, Homo sapiens
cgcttgagggccctgtgagggggagagcgggccaccaaggaaagtgggagggggcttgtgggaggctcttgcccacatccccctcctgcacagcatgttcsgtacacacgcattgagcgcctgccctgaggaccgatgggcctcctgtactttcttagagtccaggaagaagaggagaaagaaaaggtgaagaggaagacc

SEQ ID NO: 7173 - DNA, 201 bp, Homo sapiens
tgcgcttgagggccctgtgagggggagagcgggccaccaaggaaagtgggagggggcttgtgggaggctcttgcccacatccccctcctgcacagcatgtycggtacacacgcattgagcgcctgccctgaggaccgatgggcctcctgtactttcttagagtccaggaagaagaggagaaagaaaaggtgaagaggaaga

SEQ ID NO: 7174 - DNA, 201 bp, Homo sapiens
gaaggcatctcagggaaggggtctgtattagtttgctttcacattcctataaagaaatacctgagactgggtaatttataaaggaaagaggcttaattgayttgcagttcaggaaacttacaatcatggcagaaggcgaaggggaagcaggcaccttcttcacaaggcgacaggagggagtgagtggagaacaaggaagtg

SEQ ID NO: 7175 - DNA, 201 bp, Homo sapiens; identical to SEQ ID NO: 7070

SEQ ID NO: 7176 - DNA, 201 bp, Homo sapiens
tatggaaaaagagccagatttgaggaggaacataacatgaggctttccaaattattctcagctgaaaggtctttaatgaaagtttcaaactctttagtagwtggatcgctggcatcagtggtgctggtgctagctgcctttcttttctctcattcattgtttgaaattgttgaggattgaacaagtgtgaagatgacctga

SEQ ID NO: 7177 - DNA, 201 bp, Homo sapiens; identical to SEQ ID NO: 7071

SEQ ID NO: 7178 - DNA, 201 bp, Homo sapiens
tccatctgccaagggtgaagggcccatgatgggctattccagggatgtggaggcagactggggagagggaccagaggtctctgtacaataggcctcctggsatgctcagggaccacagagatgttcagcttcctatggggaacaagacctctcctgaccgcttggttctactccactcatcacttggactatcatggccct

SEQ ID NO: 7179 - DNA, 201 bp, Homo sapiens
ggagcacagaggactcactgcagaatcccaaagcaatcagcactgctgtagattccaacaggcacaggccccatgtctgctggcagcccagcttggtgtcyctgcaacccagtgggagccttggtgaggggtccaaggtaaagggtgaaagggccacctgtccccgctctgtgctcctagggagcccaggaccctttcacc

SEQ ID NO: 7180 - DNA, 201 bp, Homo sapiens
tttggccttttccagaatggtctaggaatgggaatcctactgtggtagcttattgggcctggcttctttcccttagcaaaacgcatctaggatccacccaygttcatgtgggcatcactagatcgttcccttttctctctgaatcttctgccatttgaagggaggaccacccttcctctctgcgttcccgtgttgaaggtc

SEQ ID NO: 7181 - DNA, 201 bp, Homo sapiens
ctgctctctgaggctgtgggtgctctcagggaggggtgggggctcccacaaatgggtctggctcctccagtgcgcttgagggccctgtgagggggagagcrggccaccaaggaaagtgggagggggcttgtgggaggctcttgcccacatccccctcctgcacagcatgttcggtacacacgcattgagcgcctgccctga

SEQ ID NO: 7182 - DNA, 201 bp, Homo sapiens
ctagagatggtctaatgtatacaagaggatgtgcataggttatatgtaaatactaagccatgttatatcagagacttgagcatccatgggttttggcatcyccggggaccctagaaataatcctccatggataccaagggatgactgtataaactcactcaggaaggcttctcatcagaggaagggcctagttcaggacac

SEQ ID NO: 7183 - DNA, 201 bp, Homo sapiens; identical to SEQ ID NO: 7072

SEQ ID NO: 7184 - DNA, 201 bp, Homo sapiens; identical to SEQ ID NO: 7073

SEQ ID NO: 7185 - DNA, 201 bp, Homo sapiens
gctgctctctgaggctgtgggtgctctcagggaggggtgggggctcccacaaatgggtctggctcctccagtgcgcttgagggccctgtgagggggagagygggccaccaaggaaagtgggagggggcttgtgggaggctcttgcccacatccccctcctgcacagcatgttcggtacacacgcattgagcgcctgccctg

SEQ ID NO: 7186 - DNA, 201 bp, Homo sapiens; identical to SEQ ID NO: 7074

SEQ ID NO: 7187 - DNA, 201 bp, Homo sapiens; identical to SEQ ID NO: 711

SEQ ID NO: 7188 - DNA, 201 bp, Homo sapiens; identical to SEQ ID NO: 7077

SEQ ID NO: 7189 - DNA, 201 bp, Homo sapiens
cagacacaggtatactacaaaatatgtatgggttttttataataatgtttttttttgagatggagtctttatttcccaggctggagtgtagtgacctgatytcagctccctgccacctctgcctcttggcagattcaagctattcttcttcctcagcatcctgagtatgtgggattaaatgtgcccaccaccatgcccaga

SEQ ID NO: 7190 - DNA, 201 bp, Homo sapiens
gccccccagggttcagagaggctgaaggcttcctgccacacaaccttatccagggctgttgggcctgggatatggccccctgtcagaactcaggtaggagsggccttggctgttacccagcccccttgccacctcacatggggacctgtctccgcagtgggcgactgggcccagatatgagtcaccctctgccctcctggg

SEQ ID NO: 7191 - DNA, 201 bp, Homo sapiens
gaaggtgtttcagaacaggatcattgtccatggctcaggtatgaaataactggtctcgaaaaggtgcccacaggccagacctggacgtcttcatgaggcgmtgtagggacagggtgggcatcaggcccggagagttccctgggagaggtcagagcccacaccccatggccacttcagtctcccactgggtggtgctggata

SEQ ID NO: 7192 - DNA, 201 bp, Homo sapiens; identical to SEQ ID NO: 7079

SEQ ID NO: 7193 - DNA, 201 bp, Homo sapiens; identical to SEQ ID NO: 7081

SEQ ID NO: 7194 - DNA, 201 bp, Homo sapiens
aggttcctcccttgacactggaggattacaatttaagatgagatttgagtggggacacagagccaaacctatcagggtctcagctggtcttgcagctcccytggggctgagaatgtgtgcagatctgctgaccctgctttatagcactcgggggctctatcagtgcacccccatctgctgcttcctgggggtggtggctgc

SEQ ID NO: 7195 - DNA, 201 bp, Homo sapiens
gaaaactgttggtcactgtcacctaaccacacatgcaataaagtcttctgcctgctccttacagcccccaagaacaccttcttcaagagaataaagtcttygatggctgcccttccctagttgattttggtcatgtcttctaatgaaccatgatgtctctttgtaggaatggtatggaaaaagagccagatttgaggagga

SEQ ID NO: 7196 - DNA, 201 bp, Homo sapiens
cggggcccccgagtggcacctaaaccccagatccctccctttcctcccggaacccccaggggtcggcggtcccacaggggacagagtggaaggggtgcttwcttccgcacaaagcagggcactgggttttgaggcttcagttgttgagccatgtgctgcagacgccgtggtgcaggggaccctggccatctgctacgatac

SEQ ID NO: 7197 - DNA, 201 bp, Homo sapiens
attttcattcttttgagccctggagagacagtcttgagttggtgctaatagacctttaatgcctctctcattgcctagtactcttttaaaaaacaaagaargagcaggccttggccagggaatagtatctagctaaaattcattaacttcattttgttttcattgaatttaagttttgctgctttccatttgtgagagtga

SEQ ID NO: 7198 - DNA, 201 bp, Homo sapiens; identical to SEQ ID NO: 7087

SEQ ID NO: 7199 - DNA, 201 bp, Homo sapiens; identical to SEQ ID NO: 7089

SEQ ID NO: 7200 - DNA, 201 bp, Homo sapiens; identical to SEQ ID NO: 7090

SEQ ID NO: 7201 - DNA, 201 bp, Homo sapiens
agcagacgttcactgagtttgaacaaaattcagctagagcagctgatgtatattgaggcctgagttcacctgcctgggtctctggagtcctcggagtctcygtgtggtccccgtgatctgacactgaggacacacctgtagtctgctgatcccagaaagaggggtgtgtgctgcctggggtggggaagatgtcggggcatg

SEQ ID NO: 7202 - DNA, 201 bp, Homo sapiens
cgcctgctttgcagggcgctgggaggggagagggaggtgtatgctggaaagctccccaagggcaaggcctgcctctgcgtcactcactgtcagatcctcakagcccggggctggtccagcacgtggccaccattccctaagtattggatttgcttcatcagtgctgaaggcaggggatagagcttagacagaccccctgtg

SEQ ID NO: 7203 - DNA, 201 bp, Homo sapiens
gggctggccctgtggatcacttgggcctagtgaggggaaataaagaccagggggcagaggaggagcatgggggcagctggtggcctaaggagaaggcatcycagggaaggggtctgtattagtttgctttcacattcctataaagaaatacctgagactgggtaatttataaaggaaagaggcttaattgacttgcagttc

SEQ ID NO: 7204 - DNA, 201 bp, Homo sapiens
aaggtggagctcttctaagggcctgagggagagcagcagtgacctaagccctcaggcctgtggccctggctcatgcctgggaccacatctacaggaccagrggcagaggtcatggcacctgggacacccagcacagatgtcctaggttgaatgcaccctgtcatgtccctgctgtggagcagctctggctgggaaccgacc

SEQ ID NO: 7205 - DNA, 201 bp, Homo sapiens
caaggtggagctcttctaagggcctgagggagagcagcagtgacctaagccctcaggcctgtggccctggctcatgcctgggaccacatctacaggaccasgggcagaggtcatggcacctgggacacccagcacagatgtcctaggttgaatgcaccctgtcatgtccctgctgtggagcagctctggctgggaaccgac

SEQ ID NO: 7206 - DNA, 201 bp, Homo sapiens
ggagaccttaaactagaagctccctaagggcaggggggtatctgtgccaccttctcccccagagttgtgtgcacaaggtggagctcttctaagggcctgarggagagcagcagtgacctaagccctcaggcctgtggccctggctcatgcctgggaccacatctacaggaccaggggcagaggtcatggcacctgggacac

SEQ ID NO: 7207 - DNA, 201 bp, Homo sapiens
gtcagtgggggagaccttaaactagaagctccctaagggcaggggggtatctgtgccaccttctcccccagagttgtgtgcacaaggtggagctcttctargggcctgagggagagcagcagtgacctaagccctcaggcctgtggccctggctcatgcctgggaccacatctacaggaccaggggcagaggtcatggcac

SEQ ID NO: 7208 - DNA, 201 bp, Homo sapiens
gatactaagccatctgcttcgtgtaacttcgaagcacacttacctgatagggtgacagcaaggactcaaagaggtgtctgggcttggcacatagtagctaytgctactattttgaatgttgttttgcctttgtttttgttttgagatagggtatcgctctgtcacccaggctggagtacagtggtgtcatcatagctcact

SEQ ID NO: 7209 - DNA, 201 bp, Homo sapiens
gtggagcagatgggggttaatggtcagcagcagcagcagcatccccaccactggggctaccactttttaggcccttaccatgggccagatactaagccatmtgcttcgtgtaacttcgaagcacacttacctgatagggtgacagcaaggactcaaagaggtgtctgggcttggcacatagtagctattgctactattttg

SEQ ID NO: 7210 - DNA, 201 bp, Homo sapiens
agaaggtggcgcatggagaaaggactgccagggaaggctgatcaccagcccccaaaggggcagtaagttggcgtggtcctgataaactaaccacgtccttytctggcccagacctgaactttagcaagacactcaccggtgatctacagactcacaatgactaaatccaccaaagactaatggatacctcacaggccagtt

SEQ ID NO: 7211 - DNA, 201 bp, Homo sapiens
cacagggcctaccccacaatgtaactgatcatatacatacagaaggcttggtttagtgcctggttcctacagatctctcccacacgcctcctattacggtyaacaactctgggtggtgggtgttccctccctccttgaactgatgagggagctgaggctgagttgatgaacagatgcccaataaggggcagactgcggctg

SEQ ID NO: 7212 - DNA, 201 bp, Homo sapiens
ccaggcaacgctcagttacagagggcagggcagggggcagcggccagtggtggagccgagaccacctggacgagatgttggcctcccgctctatggcagcrtcaccccgccccctgccaccccggcccactttgcttccctcagtgaccctgacctttccttcttggcttcagcacaatgagaataatctaattatttcta

SEQ ID NO: 7213 - DNA, 201 bp, Homo sapiens
cagaggactcagaagtgtgggcagctcccagctttgcccacccaggcaacgctcagttacagagggcagggcagggggcagcggccagtggtggagccgaraccacctggacgagatgttggcctcccgctctatggcagcatcaccccgccccctgccaccccggcccactttgcttccctcagtgaccctgacctttcc

SEQ ID NO: 7214 - DNA, 201 bp, Homo sapiens
ggacagaggactcagaagtgtgggcagctcccagctttgcccacccaggcaacgctcagttacagagggcagggcagggggcagcggccagtggtggagcygagaccacctggacgagatgttggcctcccgctctatggcagcatcaccccgccccctgccaccccggcccactttgcttccctcagtgaccctgacctt

SEQ ID NO: 7215 - DNA, 201 bp, Homo sapiens
aggaggcctccaaccaactgcagaggtccccctggttttcctcgggattaaattttgctctcacaagacatgtaggcctctcctctcctggtctgggtggstgttctctagcagggcaaacagagtctctggccagtttttagaaactgtgtttgtgcttcctagaggacagaggactcagaagtgtgggcagctcccagc

SEQ ID NO: 7216 - DNA, 201 bp, Homo sapiens; identical to SEQ ID NO: 7092

SEQ ID NO: 7217 - DNA, 201 bp, Homo sapiens; identical to SEQ ID NO: 7093

SEQ ID NO: 7218 - DNA, 201 bp, Homo sapiens; identical to SEQ ID NO: 7094

SEQ ID NO: 7219 - DNA, 201 bp, Homo sapiens
gttttggggatgaaaataatctactgtctccaaagcagcccctgtgctcatggaaaccacatctctcagggagggactgtggactccaccattctgagctrtccatacaggaaggggattcattttcctgggtcactgaggaagaacagtgggtctttggtcctggagaacacctagatggactgtcccttctgggaacac

SEQ ID NO: 7220 - DNA, 201 bp, Homo sapiens
gggctccgggctgggctcctcttacctggccccagatcccttcccagcaccagacccagggtcattagccacaagctctgctgcctccctggctctctgtragatgcccagaatagggccctgccagtcttctcccccattctcctagggccacagcccctactgtccccatgcctttcccccttccccatggggacagtg

SEQ ID NO: 7221 - DNA, 201 bp, Homo sapiens
gttctgatatgtctcccattctcccagcatttccatccacttgctctttcatctcatctcctgccacatttgctgtcaaatgagaaatgttggagttagcrgagctgccaggcttcccggagtggcccgtggatgctgggtcttgggctctgaagccttggtgggacccaggtggaaggagccagggaagggcagacccta

SEQ ID NO: 7222 - DNA, 201 bp, Homo sapiens
ttcacaaggcgacaggagggagtgagtggagaacaaggaagtgccacactttaaaaccatcagctctcctgagaactcactcactatcaggggaacagcayggcgtggggggaagaactgtccccaaatccaatcccctcccaccaggttcctcccttgacactggaggattacaatttaagatgagatttgagtggggac

SEQ ID NO: 7223 - DNA, 201 bp, Homo sapiens
gtggcctgcagggaccctcctgggcctcctgtaggctaggggtgagcctaacccctgggctggggatgcagggcactgcagggcaaggagggttctaaacygatgtgcagaatctcctggccactgctccagcccctcctggagtgactccttcatcctccaagtctccagggtggcccctatgcagccagcctctccctg

SEQ ID NO: 7224 - DNA, 201 bp, Homo sapiens
gggttggtggctcgagctgcacccattggggcttcagtctccagagtcagtgaccttccccatgagggtcacctgacccctccaggacactgggtcagacmaggtcttgccgctcctcatgggggggcactcatttcagtggggacgtggcttctggagataggggcttgcccgcggcttgaggcatccctgagccctccc

SEQ ID NO: 7225 - DNA, 201 bp, Homo sapiens
gggtgggggctcccacaaatgggtctggctcctccagtgcgcttgagggccctgtgagggggagagcgggccaccaaggaaagtgggagggggcttgtggraggctcttgcccacatccccctcctgcacagcatgttcggtacacacgcattgagcgcctgccctgaggaccgatgggcctcctgtactttcttagagtc

SEQ ID NO: 7226 - DNA, 201 bp, Homo sapiens
aggctttcacaacctagtagtcattcattcattcactcactcactcaacaaacaagtccatgtgccaggcactgtccagggtgctgagactaccgagcttragaagaaatagttcctgtcctggaggaactcagtccagtacatttatctaacttatgtgacctcctccactgtcggcaactcgtgggcaggggtcaaatt

SEQ ID NO: 7227 - DNA, 201 bp, Homo sapiens
cacctgccccactttgggggaaaaggctttcacaacctagtagtcattcattcattcactcactcactcaacaaacaagtccatgtgccaggcactgtccrgggtgctgagactaccgagcttgagaagaaatagttcctgtcctggaggaactcagtccagtacatttatctaacttatgtgacctcctccactgtcggc

SEQ ID NO: 7228 - DNA, 201 bp, Homo sapiens; identical to SEQ ID NO: 7104

SEQ ID NO: 7229 - DNA, 201 bp, Homo sapiens; identical to SEQ ID NO: 7105

SEQ ID NO: 7230 - DNA, 201 bp, Homo sapiens; identical to SEQ ID NO: 7106

SEQ ID NO: 7231 - DNA, 201 bp, Homo sapiens; identical to SEQ ID NO: 7107

SEQ ID NO: 7232 - DNA, 201 bp, Homo sapiens; identical to SEQ ID NO: 7108

SEQ ID NO: 7233 - DNA, 201 bp, Homo sapiens
aagaagaaagatttccttctgcagaaagctgctttttggcttgtttctgaagccagggagggtcacgagagccgagttcgtctgtggtgactatgtcaccrtctgtgcccaggatgtgcatctgaccaccccccaacccccaaagcctgggcttgatgttccctccagctggagacctggctccctgacacggcctggcct

SEQ ID NO: 7234 - DNA, 201 bp, Homo sapiens
ccctactctcaaagcacacttggccctcatatctgggagttctgcatctgtggattcagccaacagcagatggaaaatattcagaaatgaaattggatggytgtctatactgaacatgtgtagactgttcctgtcatcattccctaaacaatacagtatcacaaccatttatatagcagctgcattgtattatgtatcata

SEQ ID NO: 7235 - DNA, 201 bp, Homo sapiens
tttagtatctctaatggtatctatttttttatttctgatattttaattgggtatttctctccatgatccttggttattccagctagaggatcctgtggggraagtgcccggcacacagtagaggctcactcttctagacatgttatctaaaatctggcttatccgtccttccacccaaggcctaggtgatgccaaattcca

SEQ ID NO: 7236 - DNA, 201 bp, Homo sapiens; identical to SEQ ID NO: 7114

SEQ ID NO: 7237 - DNA, 201 bp, Homo sapiens; identical to SEQ ID NO: 7115

SEQ ID NO: 7238 - DNA, 201 bp, Homo sapiens; identical to SEQ ID NO: 7124

SEQ ID NO: 7239 - DNA, 201 bp, Homo sapiens; identical to SEQ ID NO: 7125

SEQ ID NO: 7240 - DNA, 201 bp, Homo sapiens; identical to SEQ ID NO: 7127

SEQ ID NO: 7241 - DNA, 201 bp, Homo sapiens; identical to SEQ ID NO: 7128

SEQ ID NO: 7242 - DNA, 201 bp, Homo sapiens; identical to SEQ ID NO: 7129

SEQ ID NO: 7243 - DNA, 201 bp, Homo sapiens; identical to SEQ ID NO: 7130

SEQ ID NO: 7244 - DNA, 201 bp, Homo sapiens; identical to SEQ ID NO: 7131

SEQ ID NO: 7245 - DNA, 201 bp, Homo sapiens
atccctctggttcaccccatctccactgggaccctgtggctcccataggcttacttgactccatatcggtccctgaagaacaggtggttccttaatgtccrgctcatgtccaggtcgatctggtggatgtgtccagaggacctcttgcccttctccttcatgacctgtagggcagggccaagaggaggaagcaggctcaga

SEQ ID NO: 7246 - DNA, 201 bp, Homo sapiens
ctgatggtctggccattggggcttcctttcgagggggccggggactagggatcctgaccacaatgactgtcctgctacatgaagtgccccacgaggtcggrgactttgccatcttggtccagtctggctgcagcaaaaagcaggttggtgatgtctgccaaacacagctgcctcaaaccctttatctctcctcactcaccc

SEQ ID NO: 7247 - DNA, 201 bp, Homo sapiens
ttatcgcttttattattccttttttctttcctcctcccttggtcaccttttgcctctcattcatttccttttccatcttctccaactttcctctctctttycccctctctcccttttaccccctcctcagacgttgaatggctcgctgaccctggagctggtgaatgagaaattctggaaggtgtcccggccactggagct

SEQ ID NO: 7248 - DNA, 201 bp, Homo sapiens
agcaggaagcaggggagccaggagggcctggagggggcgcctctgacaccggaggacctgatgggtgtggcggggagggtgggggtgccggaggaggtgayggtcctgaggagcctgctttgcccagcctggagggcgtcagtgaaaagcagtacaccatctacatcgcacctggaggcggggcgttcacggtgagagctt

SEQ ID NO: 7249 - DNA, 201 bp, Homo sapiens
cccgggcctagggagaggcgcggcggcggcgggagcgcgaacggctggagctgggtgaggggcagtgccggcgcgggggcgggagcgggggcggagagggkcgcttctggaggggcggggtctacgcgaggggcggcccccctgacgccctcctccccttccccccacccccagccttcttcgccttctcctcggctgtgg

SEQ ID NO: 7250 - DNA, 201 bp, Homo sapiens
tcatctcccaccacaccccctcactcgtgtgctccagttgctgtccaccttgtgcttcctcctgcacagagtctccagggaggctggaccctctgtggaamggctccttcctctgttcctctcctcttagctcctcttcattcttcaggcctcaccttctcaatagcctcagggaagccttcctgaccttcttttcagggt

SEQ ID NO: 7251 - DNA, 201 bp, Homo sapiens
gccctactcctgcagaaagtgtggccacagctcttgccacagctcacacctggcccagcactgcggcacacacctgcctgaacccaatcactgccaccagygtggcaagggcctctccccaaggctccagcccgttgcagcctgccactctacacacaggcaagcagccttacgtctgtgccacctaagccttcttgtggt

SEQ ID NO: 7252 - DNA, 201 bp, Homo sapiens
ccagccctaaccacccggcagcctcttctctgtctctgctgcccgtcctgccttcactctgaaacagcctgccccctcccgggtccccagtcctcaccttygccccacacgcccccctctctatttatcacatttcctttcgtgtccccctaaccccatcgcttggtgcgagtgctctcttgccctcctctccccatgact

SEQ ID NO: 7253 - DNA, 201 bp, Homo sapiens
gtgagggtcaggagagaagcagaactgatgggatgggtccgtgggtcagtccttgttgcctgctagcttctaagcctcagcatcctaggagctgaccacakactgatcattagggctggaaatcatgggtgtaaattgcagtttcttagtaaacaactggccctgctcttcttaagaaaaatatagggctgggcacagtga

SEQ ID NO: 7254 - DNA, 201 bp, Homo sapiens
ctgccagagaggtggaacaagtattattatcttcatttgaaagatcacaaacacaaaaattaccttccctgttcctcattcagtgtcataagtcagtgcayataagactcactttgggagtttattaaaagcagagcttcatgccccccaacattctgattcagtagtgaattgggttctcagaatctgaatttttaacag

SEQ ID NO: 7255 - DNA, 201 bp, Homo sapiens
agcgggtcggagggtctagggagagccaaagcagagggtggagggagtccccagggtggtaaggggaatcccgggcacatcgggacctaggtgtgttctcrggactagaaggctaaagcggcagatcttttgcagccttttcccccgggatcctggaatgggggttacggagaagtgaggggggttgatccccagagtcgc

SEQ ID NO: 7256 - DNA, 201 bp, Homo sapiens
ctccagacattctgcccctgtgtaccccacccacacgcgcacccccccttcccaatgggagctccatcttgtgtatgtccctgtttccgcgtggtgtctcyattccccctttcctcccgtgcgcctccctcccttccccgccccgggccgcggctcctgattgtccaaacgcaattctcgagtctatggctccggccgaga

SEQ ID NO: 7257 - DNA, 201 bp, Homo sapiens
tatttccttacagattactgaaatgatcccgatgggacacttgggggaccctgagggtgagcactgaatgtagtggggtccctgggaagggggcctgaatraagagatccccaaagtttggggattttctaggggactggtggttggtgtctgtggagaggtttgtggggagggatgtctttggtgggagattatggctgt

SEQ ID NO: 7258 - DNA, 201 bp, Homo sapiens
gcttcacagagagagagagagagagagagagagaatactgggcacagttcctggcaaacattaaatattcaatgaatgtatgagaaatgaagacaaaaaarggtcacagactcagtcttcaaaaaaatccataaaagaagctttcacccacatgagtatttccttacagattactgaaatgatcccgatgggacacttggg

SEQ ID NO: 7259 - DNA, 201 bp, Homo sapiens
atgctgccttccaggctgacgtgtctgaggccagggccgccaggtgcctgctggaacaagtgcaggtgaacgctaggccactttccccctctaaagctctratattgcctccactgccccggctttttgtggggggtttttgatgcgtaacctccccctcccataggcctgcttttctcgcccaccatctgtcgttgtgtc

SEQ ID NO: 7260 - DNA, 201 bp, Homo sapiens
gcaaggaggggccgccccgagggaaccatgctgccttccaggctgacgtgtctgaggccagggccgccaggtgcctgctggaacaagtgcaggtgaacgcyaggccactttccccctctaaagctctgatattgcctccactgccccggctttttgtggggggtttttgatgcgtaacctccccctcccataggcctgctt

SEQ ID NO: 7261 - DNA, 201 bp, Homo sapiens
agcatctcaatattgaatccagcacctagtcctatccattttatctgctctaatatatctcaagtctgtccactcgttttcatccctccacatccctgggytagccaccatgtggaccatgtggccttctctgagtcattgcagtagctgaagaggctgggaatggccttctctacagtatgacacacacctaagagggat

SEQ ID NO: 7262 - DNA, 201 bp, Homo sapiens
tcaggaatgctgaatatgggaagcaggggtgcttgtgaccctaataaattccaagtcctcttccctgccacctccggctcttcttgtgtccaagccctcakacccttccccacctccccctcctttccctttcccgaaggattgttccctttctctgcctggtctcccagggcaacccccgccgccgggtgtgagaggaaa

SEQ ID NO: 7263 - DNA, 201 bp, Homo sapiens
ctttttattttgatgtttagtttccaaatccatgtcccctatacctataccccaccagccacttctaaaccactgataatctttagctattggtgagtgcytttttctcttttctgcccatcaggcgatgcgtctgcaactactgacagcagtaggggcactggcaggcacagcctgtgcccttctcactgaaggaggagc

SEQ ID NO: 7264 - DNA, 201 bp, Homo sapiens
gccccacgaggtcggagactttgccatcttggtccagtctggctgcagcaaaaagcaggttggtgatgtctgccaaacacagctgcctcaaaccctttatytctcctcactcaccctaaacccaaacagcctcttattagttccaaacaattcatactgtcattgacaagtcctctagaaatgagggggaagaagttctgg

SEQ ID NO: 7265 - DNA, 201 bp, Homo sapiens
tcacaaatcacatggaatatgtgctgtgggtaatggcaggtatctgagaaacactaaaggactgggtgtaaagtggtctctgaggggaggtgtgagaatarctgaccaagactggaacaagtggtgatggaagcctctgatcattttctcttcttgtcctgtacaagacctgcgtgtgtcggggtacctgaatctggctgc

SEQ ID NO: 7266 - DNA, 201 bp, Homo sapiens
aagatgggccagtgagacctcagaacgctgaagaagaaaaaagaggcttaggtaagggccagagttggtgataaatttgggcaagggacatcatcacaaaycacatggaatatgtgctgtgggtaatggcaggtatctgagaaacactaaaggactgggtgtaaagtggtctctgaggggaggtgtgagaatagctgacca

SEQ ID NO: 7267 - DNA, 201 bp, Homo sapiens
gacatggaagacaaggtgagcccaggaacaactttcctgaaagctgacttgcctgcctcagaatctcctcatcttatggccctcaggagggagaggacatrttggaagatctgttctccactctgaccaactcttttcttccctcagagcgttctaccaaggagaagcagagctcagaggaagaagaaaaggaaacaagag

SEQ ID NO: 7268 - DNA, 201 bp, Homo sapiens
gccctacggagcgggtaataggagagacatgtttgagatgagatgaaggggtacaaagttagggccctctcactggtcttggttcagcctaggcttcagtwcccttgactgaccactcagggcttcccttctcctaccccaggaacaaggagtgtcctacctgccgaaagaagctggtgtccaagcgatccctacggccag

SEQ ID NO: 7269 - DNA, 201 bp, Homo sapiens
cctaccccaggaacaaggagtgtcctacctgccgaaagaagctggtgtccaagcgatccctacggccagaccccaactttgatgccctgatctctaagatytatcctagccgggaggaatacgaggcccatcaagaccgagtgcttatccgcctgagccgcctgcacaaccagcaggcattgagctccagcattgaggagg

SEQ ID NO: 7270 - DNA, 201 bp, Homo sapiens
tcgtggttccatcatcaacatcagtagcatcgtaggaaaggtcaggttgagttggacgaggtcagccagccaagtggtatagagaggagaacccctccttragactcctgactcattccacatctctgactcacctataggtggggaacgtggggcagacaaactatgcagcatccaaggctggagtgattgggctgaccc

SEQ ID NO: 7271 - DNA, 201 bp, Homo sapiens
gtcagatgcttgagggtgctggggagcacctggggggtctgagggaggtaccagcattcagccctctccagaatcggcagccactctccttcccacagacrtgggatccgctgtaactctgtcctcccagggttcattgcaacacccatgacacagaaagtgccacagaaagtggtggacaaggtaggaggctgtgggtgg

SEQ ID NO: 7272 - DNA, 201 bp, Homo sapiens
ttccctttctctgcctggtctcccagggcaacccccgccgccgggtgtgagaggaaagagtatgtgtcactgtgtatgcgtgacactccgggtctttttgragggaggggttcgtgcgtcacccctttccactggttctgcagcaccagtcccctccccccaactccctgggttcttatggtccccaagggtgatttgttc

SEQ ID NO: 7273 - DNA, 201 bp, Homo sapiens; identical to SEQ ID NO: 831

SEQ ID NO: 7274 - DNA, 201 bp, Homo sapiens
ctgaggggaggtgtgagaatagctgaccaagactggaacaagtggtgatggaagcctctgatcattttctcttcttgtcctgtacaagacctgcgtgtgtyggggtacctgaatctggctgctgacttggcacacaacttcactgatggtctggccattggggcttcctttcgagggggccggggactagggatcctgacc

SEQ ID NO: 7275 - DNA, 201 bp, Homo sapiens; identical to SEQ ID NO: 830

SEQ ID NO: 7276 - DNA, 201 bp, Homo sapiens
tccgccccacatgcagtctttgtctttttggggggaatggggccccttgtcttctccacacccggggcccctaagcagcagtgtcgggccacgccccctckgtgggaggtcggcctgcgctggtggccgcagatggcctaaggctggcgggcctttgattggccccggctttgcccttgccacgcccctctgcgctgggat

SEQ ID NO: 7277 - DNA, 201 bp, Homo sapiens
tgcccagaatgccagcaaaacgtgggaactgagtctgtatgagctgcaccggaccccgcaggtgacaggcattctccctttcaggcttaccccctcccccmaacccttatatccacagaccgcatcacacagcttcttttccgtaatttgctctattctgccttgcctggccctacctttgaatcaccttaatctttccaa

SEQ ID NO: 7278 - DNA, 201 bp, Homo sapiens
ccagaatgccagcaaaacgtgggaactgagtctgtatgagctgcaccggaccccgcaggtgacaggcattctccctttcaggcttaccccctcccccaaamccttatatccacagaccgcatcacacagcttcttttccgtaatttgctctattctgccttgcctggccctacctttgaatcaccttaatctttccaaagc

SEQ ID NO: 7279 - DNA, 201 bp, Homo sapiens
acaaagtatctatatgagattcttctatattgtacagagtggggcaaaacacgcccccatctgctgccttttctattgccctgcaacgtcccatctatacsaggtgttggagaaggtgaagaaccctcccattcacgcccgcctaccaacaacaaacgtgcttttttcctctttgaaacctgcagttctgtgtgtctgttt

SEQ ID NO: 7280 - DNA, 201 bp, Homo sapiens
gagcagccggtttctatagctggaaagagggagggaggtggagaggactgcggagaagctccctgttcgacatcccagtccccgggccacctcccaaaaamgggcaggctgggctgcagactcggagtgtgagtgcacagcctttgcccgccgggcagcggggctgagcggagggagggtcgcctgggaacactagttctg

SEQ ID NO: 7281 - DNA, 201 bp, Homo sapiens
tccggccccaccccctgctcgtggagaagggagaatactgccagacgaggtgaggagccctgtctttccccagccactgagaaaccaaagatcacctagakttccatcagaagtgggctttgcccaaacccaaaataccaccccaacccagaatccattttggaaagcccctacctccagtcctcatctgaggcgctctgg

SEQ ID NO: 7282 - DNA, 201 bp, Homo sapiens
tccaagtcatcagtccttctctttctcagaattcttgtctcctatagagaccaacatgggtcttctcactgtatttctcaaaattcttattttatgggctrctgtttctaaaacccctttccctctaacccacaccacctttctactcactgatgccttcaggaagccataatggatggcacagagattgctgtttcccct

SEQ ID NO: 7283 - DNA, 201 bp, Homo sapiens
gaggttaaggcatgagaatcacttgaacctgggaggcggagtttgcagtggccgagatcacgccactgcactccagcctgggcgacagagtgaacctctayctcaaaacagaacaaacaaagaaaaaaatgcccttaagagttcttttataaaaataaaaacagaaaaaaaatagataacttaatttccagagatctccag

SEQ ID NO: 7284 - DNA, 201 bp, Homo sapiens; identical to SEQ ID NO: 826

SEQ ID NO: 7285 - DNA, 201 bp, Homo sapiens
gcggagaccgtggttccctaagtggcgcagaactcccgggacgcaggatcctcacgcgggacgagcccgtcccgtgggcgggagaaccgcggcgtccacgkcccgtcccacccgcgccgcgaatggtgggtgacgtctccgccggcggggggagcgggtgtagcggaggagcaggcggaagtgacgtagggccccagcgcc

SEQ ID NO: 7286 - DNA, 201 bp, Homo sapiens
aggaggctgtgctctgggcttctccaccttcacagtccacctcagcgaggagggaggtgccgctgaaaccgccaaccacttcttcagttgggtgtggggcwtagcctctcctctcccacctctgtctcctctgcttcctcctcccccatgctgctctcacctctctcccctctccctgcaggctgggagcaaagggagagg

SEQ ID NO: 7287 - DNA, 201 bp, Homo sapiens
gaacaaacaaagaaaaaaatgcccttaagagttcttttataaaaataaaaacagaaaaaaaatagataacttaatttccagagatctccaggacaaccccstaccatcaaatcctagtcccccaactaatcccacccaacccccagaggctactgggttcttcctgcctcaggtgttcacactacacccggcgcccctatt

SEQ ID NO: 7288 - DNA, 201 bp, Homo sapiens
tcaagtctgtccactcgttttcatccctccacatccctgggctagccaccatgtggaccatgtggccttctctgagtcattgcagtagctgaagaggctgrgaatggccttctctacagtatgacacacacctaagagggatcctttaaaaatgcaaatctgattgtttcagtcagcctccttaaacctattcagtggttt

SEQ ID NO: 7289 - DNA, 201 bp, Homo sapiens
gagggagaggacatgttggaagatctgttctccactctgaccaactcttttcttccctcagagcgttctaccaaggagaagcagagctcagaggaagaagraaaggaaacaagaggggttcagaagaggcgaggagggagcacagtacccaaagatgggccagtgagacctcagaacgctgaagaagaaaaaagaggctta

SEQ ID NO: 7290 - DNA, 201 bp, Homo sapiens
gggggccggggactagggatcctgaccacaatgactgtcctgctacatgaagtgccccacgaggtcggagactttgccatcttggtccagtctggctgcascaaaaagcaggttggtgatgtctgccaaacacagctgcctcaaaccctttatctctcctcactcaccctaaacccaaacagcctcttattagttccaaac

SEQ ID NO: 7291 - DNA, 201 bp, Homo sapiens
ctcttttctgcccatcaggcgatgcgtctgcaactactgacagcagtaggggcactggcaggcacagcctgtgcccttctcactgaaggaggagcagtggrcagtgaaattgcaggtggtgcaggtcctggctgggtcctgccatttactgcaggtggctttatctacgtagcaacagtgtctgtgttgcccgagctgctg

SEQ ID NO: 7292 - DNA, 201 bp, Homo sapiens; identical to SEQ ID NO: 2854

SEQ ID NO: 7293 - DNA, 201 bp, Homo sapiens
agctgggtgaggggcagtgccggcgcgggggcgggagcgggggcggagaggggcgcttctggaggggcggggtctacgcgaggggcggcccccctgacgcmctcctccccttccccccacccccagccttcttcgccttctcctcggctgtggagccctggtggggggtctgcgcccggtcaccatgacgacgccggcgaa

SEQ ID NO: 7294 - DNA, 201 bp, Homo sapiens; identical to SEQ ID NO: 829

SEQ ID NO: 7295 - DNA, 201 bp, Homo sapiens
gcccgtgtaggggtgctctgtgactcccaagcaggaggatcactgcaggccagtagggaggtgaggagcggcctcacagaggaggtgggactgggctgggraaggaaacagagaagcctttctgcagtgggtgagggagatggggggaagctccctctcccttaccctacctaccacccagcacgattttacctctcaggc

SEQ ID NO: 7296 - DNA, 201 bp, Homo sapiens
cccaagcaggaggatcactgcaggccagtagggaggtgaggagcggcctcacagaggaggtgggactgggctggggaaggaaacagagaagcctttctgcmgtgggtgagggagatggggggaagctccctctcccttaccctacctaccacccagcacgattttacctctcaggcttctcagtctccaaagcagagcaga

SEQ ID NO: 7297 - DNA, 201 bp, Homo sapiens
gcaaagggagaggaggaggagaagagaggacagacccagccctctacctactatggcactcctttacctgccagctgtcacaaccaacccttccccaactsccctacccgggacccccatctccacccacaaatccactcaaatttcctgcctggaatgtggagtctcttcccactgctctcacctctctcagcacagcct

SEQ ID NO: 7298 - DNA, 201 bp, Homo sapiens
tccacccacaaatccactcaaatttcctgcctggaatgtggagtctcttcccactgctctcacctctctcagcacagcctgggcaaggggcccttctcctscccctaatataggaagtacttcagccaaggggcccacctgaccctgtgcgaacactttcacacaggtgataggccctactcctgcagaaagtgtggccac

SEQ ID NO: 7299 - DNA, 201 bp, Homo sapiens
ttgccacagctcacacctggcccagcactgcggcacacacctgcctgaacccaatcactgccaccagtgtggcaagggcctctccccaaggctccagcccrttgcagcctgccactctacacacaggcaagcagccttacgtctgtgccacctaagccttcttgtggtagatgagggtgctggcccccactccaacctgca

SEQ ID NO: 7300 - DNA, 201 bp, Homo sapiens
gggagcacagtacccaaagatgggccagtgagacctcagaacgctgaagaagaaaaaagaggcttaggtaagggccagagttggtgataaatttgggcaarggacatcatcacaaatcacatggaatatgtgctgtgggtaatggcaggtatctgagaaacactaaaggactgggtgtaaagtggtctctgaggggaggtg

SEQ ID NO: 7301 - DNA, 201 bp, Homo sapiens
aggctgaggtacaagaattgcttgaacccgggaggcggaggttgcagtgagccgaggtcgtgtcactgctctccagcctgggcgacagagacgttttctcaaaaaaaaaaaaagaaagaaagaggctttgcaaacctcaggtttttgggccggctctctggcctgtgcggagcacaccccacagcgactgccacggggctc

SEQ ID NO: 7302 - DNA, 201 bp, Homo sapiens
ttcacttatgcgaattacacctcaataaaaatgttataaagaaaaacctccccaaacaaattaatatttcaaaaagcagaaaacttaaaaaaactaaaagmattttatcccaagagtgtttactatgttactgcagcacagggttctgggtggcctcagagcaggggatgtggtggggagtgaggttggcctcacagctca

SEQ ID NO: 7303 - DNA, 201 bp, Homo sapiens
ggcccctacagctacacagtcggccccgcaggctcccaggaccactctcaacactcagggccatccccacggtccccaccagcacatgcctcagcagggtygcacatgggcatccctgcacccctgcttcgaatgcaggcagcagcctcccatggccagccctcccgccccgcaagctgggcctcacctgtgttctgggcg

SEQ ID NO: 7304 - DNA, 201 bp, Homo sapiens
tacaaaattagccaggcgtggtggcgcatgcctgtaatcccagctacccaggaggccgaggcaggagaatcgcttgaacctgagaggcggtggttgcgatragccgagatcccacctttgcattccagcctgggcaacagagcgaaactccgcctcaaaaaagaacaatccacagaaaaacaggcaaagactttaaatatc

SEQ ID NO: 7305 - DNA, 201 bp, Homo sapiens
tggccgggcacggttgttcatacctgtaatcccagcactttgggaggctgaggcgggtggatcacctgaagtcaggaattcaagaccagcctgaccaacayggagaaaccctgtctctactaataatacaaaattagccaggcgtggtggcgcatgcctgtaatcccagctacccaggaggccgaggcaggagaatcgctt

SEQ ID NO: 7306 - DNA, 201 bp, Homo sapiens
aaagaaacagacccctatatttatgtggatgtggtttaatgtatgtatgacattccaaatctgtggagtcaggatggaattcgatgaatggtgttgggacyactgggtcactcatctggaagagttagaattatacgctgcgtcactcaaaaaacaaatgtgagagagattaaaggtctaggtggtaatgtaaaaaggaaa

SEQ ID NO: 7307 - DNA, 201 bp, Homo sapiens
ggtgaatccctgtctctactaaaaatacgacactggggctggtggcgggcgcctgtgatcccagctacttagaaggctgaggcaggagaattgcttgagcmtgggaggtggaggttgcaatgagctgagatgatcacgccactgcaccccagcctggcgacagagcaaggctctgtctcaaacaaaacaaaacaaaaaaca

SEQ ID NO: 7308 - DNA, 201 bp, Homo sapiens
gctactcaggaggctcaggtgagaggatcgctggagcccagggggtcgtggccgcagtaagacgagatcatgccactgcactccagtctgagattgtctcaaaaaaaaaaaaaaaaaaaaaaagtcattaaatactgccaaaaaggaggggaaacttggatacagcaaacaatggtaaataaagtaaccagtaaaatgtat

SEQ ID NO: 7309 - DNA, 201 bp, Homo sapiens; identical to SEQ ID NO: 4452

SEQ ID NO: 7310 - DNA, 201 bp, Homo sapiens; identical to SEQ ID NO: 4453

SEQ ID NO: 7311 - DNA, 201 bp, Homo sapiens
ttttcaaaaatacatgtgtatatcccatgctaaagtagttaagggtgaagggtcctgatctctaatacaacctcacgattcagagaaaataaaccagaaatttttttttttttttttttttgagagagagtgtcttgctctgtcgcccaggctggagtgcaatggtgtgatctcggctcactgcaacctctgcctcgcagg

SEQ ID NO: 7312 - DNA, 201 bp, Homo sapiens
gtgaggggctggaaatgagacgcacacggggacccgacacagccgacccaggaaggccgaggctgaatgcagcactggggacaggcgaacagcctgccttaacaccccacaaaagctccgtggcgtggcctgagtgtctctaccagtggccgtggatgaaggctgaaaacagcaggtttgcttgaaaatgtgtttcagagg

SEQ ID NO: 7313 - DNA, 201 bp, Homo sapiens
tgttgaacgggcgcggggtctccttctggcgtgatgaaggctttggaagcacacagaagtgatggttgtacgttatgaatgtattaaatgctgctaaattrtagactttaagagatggttaaaatggtgaatttttttaaccatctataggactctgataaaaatgttgttttatgtatattttacctcaataaaaattat

SEQ ID NO: 7314 - DNA, 158 bp, Homo sapiens
atgattgtgccacagaagataaatgttctgaaattaactgtagtgatgggtacacagtgctgtgaacatactaaaaaccacagaattgcacactgtgagcratctgaatagtatgtgaagatctttttttttcttttctgataacagagtctcgctcg

SEQ ID NO: 7315 - DNA, 201 bp, Homo sapiens
actgtattccagcctaggtgatggaatgagaccctctcttaaagaaaaaccccaaatcaaaaacaaacaaaaaaatgagccaggtgtggtggtgcgcattygcagtcccagctactgaggaggctgaggtgggaggatcacctgagtccaggggggttgaggctgcagtgagttatgattgtgccacagaagataaatgtt

SEQ ID NO: 7316 - DNA, 201 bp, Homo sapiens
ttttgtgaaaccaggttttgctatgttgtccaggctggtcttgaactcctgggctcaagtgatctcctgcctcagccccacaaagtgttgggattacacgygtgagccaccacgcgaggcacagtattcttcttaacagccaagattcagtaacgaacaacttgcccatcaatgaggaatggataaacaaaatacagcaca

SEQ ID NO: 7317 - DNA, 201 bp, Homo sapiens
ccaagtcctaagatgggctaaacaaacaccataatttctcagacagccagctatagccttggagacctttcagtttggtagactttatccagctcagcacygaaaagaaagaggctttgggccgggcgcaatggctcactgaacctgtaatcccagcactttgggatgccgagacgggcagatcacctcaggtcaggagtt

SEQ ID NO: 7318 - DNA, 201 bp, Homo sapiens
gtcaagggcacaggggagggaagagggggacttttaggatcaaaaggatcctaaaagactttgtagccaaacacaaacgtgaataaagctttgataatccratcgtgtgaggatatttcttaggcagtaagggaaatacgaataggactgttagagaacattacagaattcttatgcattttgtgaaaacagcactgtgcc

SEQ ID NO: 7319 - DNA, 201 bp, Homo sapiens
aaggtatatgtgagaatgtgcataagttgcatgcaaatcccatgccattttatacaagagactcgagcatctgattttggtacccgtgtgggtcctgtaaygcacccctgtggatactgaggacagactgtatacatgaaagcattaagctcgtaacatgagtagggaagcgggaagggtaagtgcagtggtgtgaggaac

SEQ ID NO: 7320 - DNA, 201 bp, Homo sapiens
aactgtgtataaaaaatattcctggccgggcatggtggctcacacctgtaatcctagcactttgggaggctgaggtgggtggatcacgaggtcaggagatygagaccagcctggctaacatggtgaaatcccgtctctactaaaaatacaaaaaattagccaggtgtggtggcgggcgcctgtagtcccagctactcggga

SEQ ID NO: 7321 - DNA, 201 bp, Homo sapiens
atgttgtaatgaaccaagattttcagcttaagaggtaaaatcaaagaatatttaaaaacccttataatcttaacatttgaatggaaaacagtatgaattcmtatttttcaaaaatacatgtgtatatcccatgctaaagtagttaagggtgaagggtcctgatctctaatacaacctcacgattcagagaaaataaaccag

SEQ ID NO: 7322 - DNA, 201 bp, Homo sapiens; identical to SEQ ID NO: 4486

SEQ ID NO: 7323 - DNA, 201 bp, Homo sapiens
tactataaaggacctagtctatttgtcactttccacctctttaaataaaccagacaggcttttctaggcatttcttttctgatttcatttttcttttattraaatctcaaccaaaacacaaaaacaaaaatttaaatttcctgcaagaaatttaaattttcatgttttggcccaagacactgaaagcaggcttacccatcc

SEQ ID NO: 7324 - DNA, 201 bp, Homo sapiens
ttaaaacatttggttctagactgcgcatggtggctcacgcctgtcatctcagcgctttgggagaccaacgagggtggatcacctgacgtcaggtcgagacmggcctggccaacatggtgaaaccccgtctttactaaaaatacaaaaaattagccggccatggtggtgggagcctgtaatccgagctacttgggaggctga

SEQ ID NO: 7325 - DNA, 201 bp, Homo sapiens
actgagggacctcaaggggcttttgctttcttgtacagttaagaatatgagaaccacatactaacagcttccttgtgaccccaaatagctcaggggtcctmcatgtcctacagcaaggctgaaagcagctcacacgggaggcacggtgccctggtgtgaagagtgtgtgaaggagacaaagagcatcagggagaaaatgaa

SEQ ID NO: 7326 - DNA, 201 bp, Homo sapiens
cacatactaacagcttccttgtgaccccaaatagctcaggggtcctacatgtcctacagcaaggctgaaagcagctcacacgggaggcacggtgccctggygtgaagagtgtgtgaaggagacaaagagcatcagggagaaaatgaaaggggatgcagggtctcggagcagccagagtgtgagggcccaggggcaggcggg

SEQ ID NO: 7327 - DNA, 201 bp, Homo sapiens
tttggcccaggaccaagagtgacaccactgacttccctggttctgaagcctttggacttggactgagccatgacactggcatcccagggtttccagcttgyggaggggacttttataactattgaatgctacattcgttaagtgtacatgaaatattcatgaagttaggccatatactggggcgtaaaataagtctccaac

SEQ ID NO: 7328 - DNA, 201 bp, Homo sapiens; identical to SEQ ID NO: 4489

SEQ ID NO: 7329 - DNA, 201 bp, Homo sapiens
tagaaaactaattataaagttcatgtgagagaggaagtgcacaagagtgtaaaaatagccaggaaaactctgcaaaagaaatggagaggtcctctgccccygaaccatctcctggcctccgtaatggaaccacatgacaccaggacccatgtaggcaagcaggcccagggacatgaaaacccggggacagaccccagtgcc

SEQ ID NO: 7330 - DNA, 201 bp, Homo sapiens
taaatttataaatgtaatgtaatccttataaaaacgccgcatgcttttccccagatctagaaaactaattataaagttcatgtgagagaggaagtgcacargagtgtaaaaatagccaggaaaactctgcaaaagaaatggagaggtcctctgcccctgaaccatctcctggcctccgtaatggaaccacatgacaccagg

SEQ ID NO: 7331 - DNA, 201 bp, Homo sapiens
cattagaaaaaaataaatttaaacatgaaacaaaaaatactataaaggacctagtctatttgtcactttccacctctttaaataaaccagacaggcttttstaggcatttcttttctgatttcatttttcttttattgaaatctcaaccaaaacacaaaaacaaaaatttaaatttcctgcaagaaatttaaattttcatg

SEQ ID NO: 7332 - DNA, 201 bp, Homo sapiens; identical to SEQ ID NO: 4506

SEQ ID NO: 7333 - DNA, 201 bp, Homo sapiens
atactaacagcttccttgtgaccccaaatagctcaggggtacgtgtaaaatacaaacatgcactattattttcagtaatattgggtgactaatttttttctttttttttttgagacaggttctcactctgtcacccaggctggagtacagtgttatgatcacagctcactgtagccttggccctccctgggttcaagcaat

SEQ ID NO: 7334 - DNA, 201 bp, Homo sapiens
ggccaggcgtgatggctcatgcctgtaatcccagcactttgagaggctgaggtgggcggatcatgaagtcaggagtttgagaccagcctgaccaacatggkgaaaccccgtctccactaaaaatacaaaaattagcctggcgtggtggcgcgggcctataatcccagctactcaggagtctgaggcaggagaattgcttga

SEQ ID NO: 7335 - DNA, 201 bp, Homo sapiens
tgaggcaggagaattgcttgaaccccagaggcggaggttgcagtgagctgagattgtgccactgcactccagcctgggtgacacagcaagactctgtctcaaaaaaaaaaaaaaaaaagaaagaaagaaaaaaaaatctaaattgttgccttcaaaacatttgcggaaaaaacaaaaaagataaaaaggtccacctgtcgc

SEQ ID NO: 7336 - DNA, 201 bp, Homo sapiens
tcccagcacttcgggaggcagaggtgcgcagatcacgaggtcaggagatggagaccatcctggctaacacggtgaaaccccaactctactaaaaatataakaaattagcctggcgtggtggcgcgcacctgtagtcccagctactcaggaggctgaggcaggagaatggagtgaacccaggagacagagcttgcagtgagc

SEQ ID NO: 7337 - DNA, 201 bp, Homo sapiens
agcctggcgtggtggcgcgcacctgtagtcccagctactcaggaggctgaggcaggagaatggagtgaacccaggagacagagcttgcagtgagccgagaytgcaccactgcactccagcctgggccacaaagcgagactccgtctcaaaaacaacaacaacaacaaaaagtccacctgtctggggcaggcaccatgagtg

SEQ ID NO: 7338 - DNA, 201 bp, Homo sapiens
tggaattcaggtatcacatctgagtacccaagctgagttttagataccggcagaacgcatggtgctgactcagggataagcatgtaaacattaagcaaacmaaaaaaaaataacatttttaactcaaaaaaggtacacggaaaaggaacagccatcgtggagcccgtgatctggctgtgagcgtggggactcggctgtaac

SEQ ID NO: 7339 - DNA, 201 bp, Homo sapiens
cctagtaggactggccctccaagacccagctcttcttgcctcctgctctccttctagcctcaaggtccctgccttctgtgtgtgcttcctggcttcctcartcctgctgatgtcaacccaatggggaggcccagcccctcaggttgtgcttccagcttctgtccattaagtcgctcggtagaggtccccaaagcccccagg

SEQ ID NO: 7340 - DNA, 201 bp, Homo sapiens
atcgcttgaaactgggaggcagaggttgcggtgagccgagattgcaccattgcactccagcctgggtgacaagagcgaaactccatctcaaaacaaaaacaaaaacaaaaacaaaaacaaaactaaggaatgccttcttcaagttcctctggaacagtcatgcaaactggccttctaaatggtcaaagaaagcctgtaagt

SEQ ID NO: 7341 - DNA, 201 bp, Homo sapiens
atcgcttgaatctgggaggtagaggttgcagtgagctgagatcaggccattgcattccagcctgggcaacgagagcaaacaatgtctcaaaaaaaaaaaaraaaaagaaaagaaaccccccacccccaccaaaaaaaacaacatttggttcttcaaatggtactgtctaggaaacagaaaggcaaggcacaggataggaat

SEQ ID NO: 7342 - DNA, 201 bp, Homo sapiens
aacccacggcgagctaacccacggccagctaacccacggccagctaacccacggccagcttacccacggccagctaacccacggccagctaacccacggcsagcttacccacggccagcttacccacggccagctaacccacggccagctaacccacggccagcttacccacggcgagctaacccacggccagcttaccca

SEQ ID NO: 7343 - DNA, 201 bp, Homo sapiens
acggcgagctaacccacggccagctaacccacggccagctaacccacggccagcttacccacggccagctaacccacggccagctaacccacggccagctwacccacggccagcttacccacggccagctaacccacggccagctaacccacggccagcttacccacggcgagctaacccacggccagcttacccacggcg

SEQ ID NO: 7344 - DNA, 201 bp, Homo sapiens
aacccacggccagctaacccacggccagcttacccacggccagctaacccacggccagctaacccacggccagcttacccacggccagcttacccacggcsagctaacccacggccagctaacccacggccagcttacccacggcgagctaacccacggccagcttacccacggcgagctaacccacggcgagcttaccca

SEQ ID NO: 7345 - DNA, 201 bp, Homo sapiens
aacccacggccagcttacccacggccagctaacccacggccagctaacccacggccagcttacccacggccagcttacccacggccagctaacccacggcsagctaacccacggccagcttacccacggcgagctaacccacggccagcttacccacggcgagctaacccacggcgagcttacccacggcgagcttaccca

SEQ ID NO: 7346 - DNA, 201 bp, Homo sapiens
acggccagctaacccacggccagctaacccacggccagcttacccacggcgagctaacccacggccagcttacccacggcgagctaacccacggcgagctwacccacggcgagcttacccacggcgagctaacccacggcgagctaacccacggcgagcttacccacggcgagctaacccacggcgagctaacccacggcg

SEQ ID NO: 7347 - DNA, 201 bp, Homo sapiens
aaattagccaggtgtggtggcgggcgcctgtagtcccagctactcgggaggctgaggcagtagaatggcatgaacccgggaggcagagcttgcagtgagcygagatcgcaccactgcacttcagcctgggcaacagagcgagactccatctcaaaaaataaataaataaataaataaataaaaataaaaatattccccaaa

SEQ ID NO: 7348 - DNA, 201 bp, Homo sapiens
ttgaacccaagaggtggaggttgcagtgagccgagatcatgccactgcacttcagcctgggtgacagagcaagactccttctcaaaaaaaaaaaaaaaaaraaaaaaaaaagaaaaagaaaaagaaagaaaaaaagcaccctgaggttgggcacggtggttcacgcctgtaatcccagcactttgggaggccgaggcgggc

SEQ ID NO: 7349 - DNA, 201 bp, Homo sapiens
acacagcccgagtgccagccaggttaaggggatggatgccctccaaacaaggcacacttacttcacctttcagtcaagcagcacttactgatgggggatgygttgacaaacacgtcatgaggcaagttcatcattgtacaaacgtcacagagtgcacttaccgcgtaccacgcacctaggctgtatggcacagcctgtgct

SEQ ID NO: 7350 - DNA, 201 bp, Homo sapiens
tgaacaggggggccgggctcttcatgcagggtgcagggtagctggccctcatctgagaacaaggagaggggacagcacttcacactatacacacaactcarccccaggtggattaatgacctaaaggaaagattttaggttgaactgtgaagcttccagaaaaattcagaatacatattttgacctgttagtgaggaaaga

SEQ ID NO: 7351 - DNA, 201 bp, Homo sapiens
catgtcagccagaaaaggcacagtggaaatggtcaccagacctgaacaggcacctcgctggaggatgacccagcaacgacgtgaaaagatgctcaagctcrcaggtcaccggtggcagcccaggctgcaaagctaggtccagagccacccacataaggcaggaagcggggaggctctgccaggctgggggcctctctgagc

SEQ ID NO: 7352 - DNA, 201 bp, Homo sapiens
gaggcaagagaattgcttgaacccgggaggtggaggttgcggtgagccaagattgcaccattgcactccagcctgggcaacaagagcaaaactccgtctcaaaaaaaaaaaaaaaaaattccgagagaaggcctggtgtggtggctcacaactgtagccaacatggtgaaacatcatctgtactaaaaatataagaattag

SEQ ID NO: 7353 - DNA, 201 bp, Homo sapiens; identical to SEQ ID NO: 4523

SEQ ID NO: 7354 - DNA, 201 bp, Homo sapiens
attcttcgggtgcaaaggagaagtaaagaacttacttttttcccatttttttctaaatctctgaaaaagaaactcaatataaagacttatttacgcgggcrcggtggctcacgcctgtaatcccaacactttgggaggccaaggcgggtggatcgcctgaggtcaggagttcgagaccagtctggccaacgtggtgaatcc

SEQ ID NO: 7355 - DNA, 201 bp, Homo sapiens
aaactaaaatgtatgtaaaaaaagggagagcatcagagagaagtaagtgaaggtaaaataaaatcttttcttattcttaattgacctaacagaaaacaaamaaaaaaaaagttttctttttttgagatagggttttgttctgtttcccaggctggagtgcagtggcataattacggctcactgcagcttcaacctccgggg

SEQ ID NO: 7356 - DNA, 201 bp, Homo sapiens
acctcagctcaggaggcggaggttgcggtgagccaaaatcataccagtgcccttcagcctgggtgtcagagcaagaccctgtctcaagaaagaaaaaaggaaaaaaaaaaagagagaaggtacaaattattgatatcatttaaaaaaaaaagaagggagggggtcaatcactgttaatcccatggccattaaaagcttaat

SEQ ID NO: 7357 - DNA, 201 bp, Homo sapiens
aggcggaggttgcggtgagccaaaatcataccagtgcccttcagcctgggtgtcagagcaagaccctgtctcaagaaagaaaaaaggaaaaaaaaaaagaragaaggtacaaattattgatatcatttaaaaaaaaaagaagggagggggtcaatcactgttaatcccatggccattaaaagcttaatagagcagtatcat

SEQ ID NO: 7358 - DNA, 201 bp, Homo sapiens
atagggtccatagtttacattaaggttcacttgttttgtacttggattttgacaatccagatttcaagaattatatgtagataatgaatccataaaggaayaaaaagaaaacagattttgaagcaagtgttaaattgctgaacttaggaaacaggtgaataatatttaacaggcgttggtatccttactgtatcaagaacg

SEQ ID NO: 7359 - DNA, 201 bp, Homo sapiens; identical to SEQ ID NO: 4524

SEQ ID NO: 7360 - DNA, 201 bp, Homo sapiens; identical to SEQ ID NO: 4525

SEQ ID NO: 7361 - DNA, 201 bp, Homo sapiens; identical to SEQ ID NO: 4537

SEQ ID NO: 7362 - DNA, 201 bp, Homo sapiens; identical to SEQ ID NO: 4539

SEQ ID NO: 7363 - DNA, 201 bp, Homo sapiens; identical to SEQ ID NO: 4541

SEQ ID NO: 7364 - DNA, 201 bp, Homo sapiens; identical to SEQ ID NO: 4542

SEQ ID NO: 7365 - DNA, 201 bp, Homo sapiens
ggggcaagctggccagggaccctcggcagctcacaggctccaccaggctcagtacacagctcattgaggcattgctaccctctgtggggcctgcagtctgsgccatgcccaccaacacccacacaaacagtaaagacactcacacgtcccatcccagcctgatcccccagatgccacggagcagctaaaggaaagcctcac

SEQ ID NO: 7366 - DNA, 201 bp, Homo sapiens; identical to SEQ ID NO: 4545

SEQ ID NO: 7367 - DNA, 201 bp, Homo sapiens; identical to SEQ ID NO: 4555

SEQ ID NO: 7368 - DNA, 201 bp, Homo sapiens
ccagtgtctcctccaggcccgcgcaagcagaagacggactgatggggacaggattggactgacccccagtgtctcctccaggcccgcacaagcagaagacrgctgacggggacaggatcaggactgacccccggcgtctcctccaggcccgcaaaagcagcagacagactgatggggacgggatcaggactgacccccagt

SEQ ID NO: 7369 - DNA, 201 bp, Homo sapiens
tatactaaaatacacaaaacatgacctaaagtcaccgtaatacactgtcacgctgcatattgctacccatgaaaatatgtcaattctacccaaattcattmatgtattcaatgcagtcttgatgtacattttataagccttgagatgtttattcaaaagttcatctagaagaggaaatgcttaagaatgagtaagaaaatt

SEQ ID NO: 7370 - DNA, 201 bp, Homo sapiens
gatgtacattttataagccttgagatgtttattcaaaagttcatctagaagaggaaatgcttaagaatgagtaagaaaatttggagaaaaaatgtgggaamcgttcccttagacattaacatgtaatatacagctgtgagagctaaaaatgtgttactggtaaggaagtggacaagcagacgaagaaagacaaacgaggct

SEQ ID NO: 7371 - DNA, 201 bp, Homo sapiens
taggcggcccatgagtcaagcagggtggggtggagggagacaacttacgagaagttcagcatgggctggcccacgtgggagatgtgaacctcctccaggtwctggaagggctgcagtgtggggtaggtcccggctccaggtgggtccgacagccaggtgcccagcatccaggacagtggctccaccactgggttcatcttg

SEQ ID NO: 7372 - DNA, 201 bp, Homo sapiens
atcggactgatgcccagtgtctcctccaggcccgcgcaagcagaagacggactgatggggacaggattggactgacccccagtgtctcctccaggcccgcrcaagcagaagacggctgacggggacaggatcaggactgacccccggcgtctcctccaggcccgcaaaagcagcagacagactgatggggacgggatcagg

SEQ ID NO: 7373 - DNA, 201 bp, Homo sapiens
gacccccagtgtctcctccaggcccgcacaagcagaagacggctgacggggacaggatcaggactgacccccggcgtctcctccaggcccgcaaaagcagmagacagactgatggggacgggatcaggactgacccccagtgtctcctccaggcccgcgcaagcagaagacggactgacggggacaggagttcttggaacc

SEQ ID NO: 7374 - DNA, 201 bp, Homo sapiens
agacggactgacggggacaggagttcttggaaccatcgcagcttctgaaattacacaacctttggattataaattccaggaagtctgggaaaagaagatckggggaaaggaaagcaaaggctctgggggtggaggagaccacgtccaagaacagcttggaaccaaggagggccgcacatgtggcctggcccagtggccgag

SEQ ID NO: 7375 - DNA, 201 bp, Homo sapiens
cctggcggcgccccccagggtcccagtggaacaggggcaccagggccgcggcgccgggcatggccttcacactccccacgaggcaggacagccccgggctrgggtgaggggcacgcgccgcaagtcctgcctctgctcccgggcggccccctccagcctccgccggccccgccccggaagcgcagccccgcctcaggcgcc

SEQ ID NO: 7376 - DNA, 201 bp, Homo sapiens
cgaggcaggacagccccgggctagggtgaggggcacgcgccgcaagtcctgcctctgctcccgggcggccccctccagcctccgccggccccgccccggawgcgcagccccgcctcaggcgccgcatctccgccctctcttgcgcctgcgggaccgggagggccgcgctcgccccccagcgccagggtcacgccaccgcgc

SEQ ID NO: 7377 - DNA, 201 bp, Homo sapiens
cgctgggcggtggggcgcgctcactggctgccacctcacctagcaggcgtcacagggctcactcaagagctccagcaagagcagaggcgggagcctcgccrgcccctccacagaccacagcgaccgcgcccctcggcccggaggccccgccctccccactcctgcttccccagccacggggtcttctcccggcccctcatc

SEQ ID NO: 7378 - DNA, 201 bp, Homo sapiens
ggtctctacaaatcatatacctgatcagacaagcgctgagcttccagtgcttcccttctccactgcctcccactttcactgtaactagaactgatgtccartgtgttcttggaaagctcagaaataccatctttggaacagtaattcatcagaataaattatagcagctgtttccaacaagaatccaagcctatggcagct

SEQ ID NO: 7379 - DNA, 201 bp, Homo sapiens; identical to SEQ ID NO: 4564

SEQ ID NO: 7380 - DNA, 201 bp, Homo sapiens
cagtggctcatgcccaatcccaacactttaggaagctgagccgggtgggtcacttgagatcaggaattcaagaccagcctggccaacatggtgaaaccccrtctgtactaaaaatacaaaaattagctgggtgtggtggtgcatgcctgtaaccccagctacttgggaggctgaggcatgagaatcgcttgaactcaggag

SEQ ID NO: 7381 - DNA, 201 bp, Homo sapiens
ttgtgccactgcactccagcctgggcaacagagcaagactccttctcaaaaaaaggaaaaaagaaaaaaagaaacagacccctatatttatgtggatgtgstttaatgtatgtatgacattccaaatctgtggagtcaggatggaattcgatgaatggtgttgggactactgggtcactcatctggaagagttagaattat

SEQ ID NO: 7382 - DNA, 201 bp, Homo sapiens
tcaactgtgtataaaaaatattcctggccgggcatggtggctcacacctgtaatcctagcactttgggaggctgaggtgggtggatcacgaggtcaggagrtcgagaccagcctggctaacatggtgaaatcccgtctctactaaaaatacaaaaaattagccaggtgtggtggcgggcgcctgtagtcccagctactcgg

SEQ ID NO: 7383 - DNA, 201 bp, Homo sapiens
tgcaaatcccatgccattttatacaagagactcgagcatctgattttggtacccgtgtgggtcctgtaacgcacccctgtggatactgaggacagactgtrtacatgaaagcattaagctcgtaacatgagtagggaagcgggaagggtaagtgcagtggtgtgaggaactcccagtcctttggcaccactggagggtgcc

SEQ ID NO: 7384 - DNA, 201 bp, Homo sapiens
tcagagaaccaccaagtcagcgaggaccagcaccccaaagagaaggaagtgtggaggtgagacccaatttggagcaactggccccgatgcttttgctgccyggaagtcaaggggttcaaggggtggaggctgagagggatgtggtagctaagaggctgagaagctaagtggggccttctcagactcatggagctggaggga

SEQ ID NO: 7385 - DNA, 201 bp, Homo sapiens
acacacaaaaaattagccgggcatgatggcacatgcctgtagtcccagctactcaggaggctcaggtgagaggatcgctggagcccagggggtcgtggccrcagtaagacgagatcatgccactgcactccagtctgagattgtctcaaaaaaaaaaaaaaaaaaaaaaagtcattaaatactgccaaaaaggaggggaaa

SEQ ID NO: 7386 - DNA, 201 bp, Homo sapiens
ctggaagctcacacctgtttcctccagactctgccccgtgccctgccctgtgctgaccgtgctccatgtccttccgctgtaataagtcagctcctgccacrtcctatgaggcctcccagtgaacctggctgggggtggtccaagggaccccagacatctaaaggtggcctataagatccaatccagaaccaaaacaaacaa

SEQ ID NO: 7387 - DNA, 201 bp, Homo sapiens
ttgcagatggagccaagtaagaacgtggagagacaagcagtcacggaacaaagtaaaagcacagcttaggtctggttaccagataccttcccagagaggcygaccaactcccacggggccaccctttgccagagaacatttgcaaaagctaagaagctcccagctagcctgtgaataactccaataccaaaatggacaatg

SEQ ID NO: 7388 - DNA, 201 bp, Homo sapiens
aagtaagaacgtggagagacaagcagtcacggaacaaagtaaaagcacagcttaggtctggttaccagataccttcccagagaggccgaccaactcccacrgggccaccctttgccagagaacatttgcaaaagctaagaagctcccagctagcctgtgaataactccaataccaaaatggacaatgatgtctaaaaacaa

SEQ ID NO: 7389 - DNA, 159 bp, Homo sapiens
atgcccaggggaaaaacagaaatcatgatggagagaaaatacagcaagtatttctataaaatataaaaaggccataaagtggatacaaataatttgcaaaygttatgtttgatttccctcgttaatctgagtatcaattgaagaactattagaatcggc

SEQ ID NO: 7390 - DNA, 132 bp, Homo sapiens
atggagagaaaatacagcaagtatttctataaaatataaaaaggccataaagtggatacaaataatttgcaaatgttatgtttgatttccctcgttaatcygagtatcaattgaagaactattagaatcggc

SEQ ID NO: 7391 - DNA, 201 bp, Homo sapiens; identical to SEQ ID NO: 4578

SEQ ID NO: 7392 - DNA, 101 bp, Homo sapiens
waggaagtgaggtcacagatgtctctcctgccacagagaatagcagtgagatcagctcacgtggagcagaatctacagtctacaggggaaggaactggtgg

SEQ ID NO: 7393 - DNA, 201 bp, Homo sapiens
tgtgccactgcactccagcctgggcaacagagcaagactccatctcaaaataatagtaataataataaaatcagtacaattaatatgctaagggctctaayggaaaaagtgggtgataggcaagaaaacatgggcaatgtaagaggagtgatggacaaaagaacaaaaaggaaattgctgcaaaccaaaaatgctaactga

SEQ ID NO: 7394 - DNA, 201 bp, Homo sapiens
gttacaccagtggcccagttcaacacagagaaatcagaagtgtccacacaattatcaataatcaatctgaagattaaatgggaaaaaatctatttacaagyaacaaaaatgataaaacacttgagtttaccctaacatgaaatgtacaagacctgtataattaaaactataaagaaataaagcttttctatatactaaaat

SEQ ID NO: 7395 - DNA, 201 bp, Homo sapiens
tgaatccataaaggaataaaaagaaaacagattttgaagcaagtgttaaattgctgaacttaggaaacaggtgaataatatttaacaggcgttggtatccytactgtatcaagaacgtttataactcagtgggcaagcaagaccgcgaacacgtggttcatagacgtgctaacaatgtaccctcaaggaatcgctgctggc

SEQ ID NO: 7396 - DNA, 201 bp, Homo sapiens
tgaaatgcaaagagaaaaaaacggaaaaaaaaaatcagaatattggagaattgtggggcaaaagtgttacatgagcataatgggaatgccagaaagagatraaaggagcagaagtatttgaattaaccatagttcagagttttccaaaattatcgatgacaccaaaccacagatccaggaagctcggaaaacatcaagcaa

SEQ ID NO: 7397 - DNA, 201 bp, Homo sapiens
taggaatatggttttcctatgtacacgacaggcaaaggaaaccatccgccatatgtaaacatctagaaaccaattttaagaaatacttaacagtaaaataygggaaaaaacagaaatagagctaatatacatacaaagattacacaggaaattttgttttttgagacagggtctcactgtcacctaggctggagtacagtg

SEQ ID NO: 7398 - DNA, 201 bp, Homo sapiens
ccatggtactcggctaatttttaaattatttatagagatggggtctccctatgttgcccaggctggtttgaacttctggactcaagtaaccttccctcttyggcctcccgaagtgctgagattacaggcaagagctactgtgcctggcttacacaccaaatttttaataacaacaaggaatagaacttgggaggtggatga

SEQ ID NO: 7399 - DNA, 201 bp, Homo sapiens; identical to SEQ ID NO: 4611

SEQ ID NO: 7400 - DNA, 201 bp, Homo sapiens
aaacaacaactcagagacacgaagggctggctgtttgcaaaaacctgtaatggagacaaacttcaggaagtttaaccaagaggaacagagagaagctgtcwaaagcagcattagctctgataactacaaacagctttaaaattccaagagaagctgggaggccgaggcgggtggatcacctgaggtcgggagttcgagacc

SEQ ID NO: 7401 - DNA, 201 bp, Homo sapiens
aaaaaaactaaaagcattttatcccaagagtgtttactatgttactgcagcacagggttctgggtggcctcagagcaggggatgtggtggggagtgaggtyggcctcacagctcagggccttggctcctggccccagggtctgctgccatccaagctgcagcacctactgcagatctaatatttcgagaaaagccagaagc

SEQ ID NO: 7402 - DNA, 201 bp, Homo sapiens
tgcagatctaatatttcgagaaaagccagaagctgattttaggctaaaatatcccaatttctaaacatctgttcaaattaaaacaaatgacaccactgtgktgtgagtcgcataccttggggcaggtgcagagggccagagagggctggagccacacacagcgccctgcccggtgcctctcacctcccacctctcctcttc

SEQ ID NO: 7403 - DNA, 201 bp, Homo sapiens
ggcttgctgttatttgctctgaatcttaatggagtttaatttggacagggacaacaggtcaggcagtaaacaagcagcggcggcgcctccttctgtctacrctgcacctcaccaggttaacctgctcctggggccgctccccctgcaccctccaccacttcgggccgcgtggaacgtggcagcagcctagccactgtccct

SEQ ID NO: 7404 - DNA, 201 bp, Homo sapiens
aatggctctgcaggaagtgaatgctaactttaaatggtgcattctgggaattgtagttccactatgaaagatcacgtctcagaagaaagtaaaagacaatracagcccagatcacagaatttcagagctggaaggagctttggaggttaggtgaattttatgaaagagggactggccagaggtctgggcggagtgacgagt

SEQ ID NO: 7405 - DNA, 201 bp, Homo sapiens
gcaggaagtgaatgctaactttaaatggtgcattctgggaattgtagttccactatgaaagatcacgtctcagaagaaagtaaaagacaatgacagcccasatcacagaatttcagagctggaaggagctttggaggttaggtgaattttatgaaagagggactggccagaggtctgggcggagtgacgagtgcggcttct

SEQ ID NO: 7406 - DNA, 201 bp, Homo sapiens
atgaaagagggactggccagaggtctgggcggagtgacgagtgcggcttctaccctcagcctcctccaccagctacagcagaggaaggcaacaccacagaracaggcacatcctaaatgctttctctctccagagcagtccctctggccacccctggcatgtccttttctgtctcctagagggtggctggagactcatctt

SEQ ID NO: 7407 - DNA, 201 bp, Homo sapiens
tgaaagagggactggccagaggtctgggcggagtgacgagtgcggcttctaccctcagcctcctccaccagctacagcagaggaaggcaacaccacagagmcaggcacatcctaaatgctttctctctccagagcagtccctctggccacccctggcatgtccttttctgtctcctagagggtggctggagactcatcttc

SEQ ID NO: 7408 - DNA, 201 bp, Homo sapiens
aggcagatagcttgagctcaggagttccagaccagcttgggcaacatggcaaaaccctgtctctacaaaacatacaaaaattagcagggcatggtggcacscatctgtagtcccacctacttaggaggctaagtgggaggatcacctcagctcaggaggcggaggttgcggtgagccaaaatcataccagtgcccttcagc

SEQ ID NO: 7409 - DNA, 201 bp, Homo sapiens
ggcgggcagatcacgaggtcaggagatcgagaccatcctggctaacaaggtgaaacacagtctctactaaaaatacaaaaaattagctgggtgtggtggcrcgtgcctgtactcccagctactcaggaggctgaggcaggagaatcgcttgaacccagggggcagaggttgcaatgagccgagatcgcgccactgtactcc

SEQ ID NO: 7410 - DNA, 201 bp, Homo sapiens
aacgaaaaaaccttttccctgaacttgattttgagggaaaataggtcacagatacaacccacagccaccaaaacacacatacggatgctgtgagaagtggkgggtcagtgcctcgctggaggacaggaggggcctctgggagctgggggggtggcccctgagaagcctcagggtctggcctggctcagaggcctggggcgg

SEQ ID NO: 7411 - DNA, 201 bp, Homo sapiens
ttaaaaaaactgtgtattacttctataattaaaaaataaagatacttcaaccactccccatccctggtggctctcctctacttcagaggcctacactgctrtctccctaaaagcaggcaatttctccacctgtggggtgcaggtggtgggaagggatactgagggacctcaaggggcttttgctttcttgtacggtaagaa

SEQ ID NO: 7412 - DNA, 201 bp, Homo sapiens
aaagatacttcaaccactccccatccctggtggctctcctctacttcagaggcctacactgctatctccctaaaagcaggcaatttctccacctgtggggwgcaggtggtgggaagggatactgagggacctcaaggggcttttgctttcttgtacggtaagaatatgagaaccacatactaacagcttccttgtgacccc

SEQ ID NO: 7413 - DNA, 201 bp, Homo sapiens
gcccaggcaacatagcaaaacactgtctctaccagaactacaaaaaattggctgggcgtggtggcacgtgcctgtcgtcccagctactcaggaggctgagstgggaggatcgcttgggcctgggaggcagagatcgcaatgagccgagagcacatcactacactccaacctgggtgacagagcgagaccctgtctcagaaa

SEQ ID NO: 7414 - DNA, 201 bp, Homo sapiens
ggacgtgaactggcacagcctagtgaagaccatctggcatgtgcctgagaggttaagtgtggagcagtggcccaggactgccactcctggagacatgcatwcccagcagaaatgacacacctgtccccacaggacgctgcccatgaatgtttacagcagcaccattcccaacagccccaaagtggaaacaacacagatgtc

SEQ ID NO: 7415 - DNA, 201 bp, Homo sapiens
gggacgtgaactggcacagcctagtgaagaccatctggcatgtgcctgagaggttaagtgtggagcagtggcccaggactgccactcctggagacatgcayacccagcagaaatgacacacctgtccccacaggacgctgcccatgaatgtttacagcagcaccattcccaacagccccaaagtggaaacaacacagatgt

SEQ ID NO: 7416 - DNA, 201 bp, Homo sapiens; identical to SEQ ID NO: 4633
  misc_feature 140: n = A,T,C or G

SEQ ID NO: 7417 - DNA, 201 bp, Homo sapiens
atggaaggctttcactccagatatacatgtttccctccttcccattgattccagtgtttactcaaatgtcaccctctcatagctctctctctataaaacascaactccattgtatgttacttctatttcttaaatcttcttcttaaattagttacaagattatttgtaacttttagacataatatgtgtatgagtattaat

SEQ ID NO: 7418 - DNA, 201 bp, Homo sapiens
gaagatttactatatgccaggctctctattatatgctctctatccaattttttcatctgactttccaaattgttcatcaagaaatattcattgaacaactrttatgtgccagatacggttctaaggtcaggaagcacaacagtaaatagaatagacacagtacctgttgttgtagagttgctattctcttagaggagatgg

SEQ ID NO: 7419 - DNA, 201 bp, Homo sapiens
cactcactctgctttgctagtttctcttcctgtgcctgcctcttaagtgtgtttctccaggtttcatagccaccattcttctcttgactctttactgggtrcaagtatcatctcatcttatttgactctctcggcaaccctagggttgtaatcacatctgaaatacacaaccctaaggttgttgagagaatcaaataagat

SEQ ID NO: 7420 - DNA, 201 bp, Homo sapiens
atcttcagtccatattctgactctctgaagtatttgccactcataacttcatctttgacatactcttctccactgatttgggtagcagtacttttgctagkttctctcctgtatctttgacttttccaaccttgaacccatgtgttgctcccttttctgctactgcctcttagacatttatcttttccagagttctgtttt

SEQ ID NO: 7421 - DNA, 201 bp, Homo sapiens
cacaatcttgttgaaggtgctgtattttaattagcaattccttttgcttttccacttcatcaataaaatccatttcaaatttattgatggattcatgttgytcttcttttatttttgtaacatagcttaacacatacttgcagaaaaaaattaaacaaattggtaaatgaaaattttgtcacatgtagagaaagttttcat

SEQ ID NO: 7422 - DNA, 201 bp, Homo sapiens
ggtaacagtaagttgttgtgagagggaagaatagagcacaaggagatttgctgaattcaataggttaaacaaacaaacaaacaaacaacttttatttttaygtttaagttacctgaagtacttgaattgtctcttttgttttttcaaggcatttatttgattcatgaactttggcttgaagttttgctattatgtcattag

SEQ ID NO: 7423 - DNA, 201 bp, Homo sapiens
tttaagagttctttgtatattttgtataacattccttcaccagatttatcttttatatacagtttctgccagtctgtggcttctcttgattctcctgacartgtcttttgtaaagcagaagtttaagtctcaataaaatccaacttaccagtttttttctttatggattgcacttcttgtattatatcttaaaaaatcgcc

SEQ ID NO: 7424 - DNA, 201 bp, Homo sapiens
ttattcaagatttatataggaagaatgaaaagtgttaaaagccaggaagcatcctaacaaatcctctaaataaacctttccttattgattatgaatgcgasgaccagagagaataaacagtgtaaggtgatgcattagtaagtgagaacatatttctttttttttttttttttgagatggagtctcactctgtcgcccagg

SEQ ID NO: 7425 - DNA, 201 bp, Homo sapiens
agtggactataatacaagcaaatatcatcttatgttttgcttagtatttggaattttcaatgtgtttttacccacaactttcggtttgatctttatgtacrtgtgtgtgcgtgtgcatgtatataaataagtgtatatgtatatacacttttttaaaaaagacacttattacatgagctctaaaaattactttccccatga

SEQ ID NO: 7426 - DNA, 201 bp, Homo sapiens
atctatttttggaaacaagtggactataatacaagcaaatatcatcttatgttttgcttagtatttggaattttcaatgtgtttttacccacaactttcgrtttgatctttatgtacgtgtgtgtgcgtgtgcatgtatataaataagtgtatatgtatatacacttttttaaaaaagacacttattacatgagctctaaa

SEQ ID NO: 7427 - DNA, 201 bp, Homo sapiens
tacactgaacagtgtcagttgtttactcgtgatcccgtggctgactgagagctgtgtcttgccgccactgcccatgatcacagtagagtattgctatcttrtgaagagatcagaattcaaagtaaagttttcactgaatgcgtatcgctctcacaccatccctaaagttgaaaaatctcaagttgaaccatgacaagttgg

SEQ ID NO: 7428 - DNA, 201 bp, Homo sapiens
agttgtacgagaatgtttacagcagttttattcaaaatagccaaatactgaacggaacccaaatttccatcaataggaaaaagaataaaaaaattatggcrtattaatacaatgaactattccttggcagtaaaagggagtgtagaaagtcaaacataagagactacatactgtatgattctatttgtataaagctctaga

SEQ ID NO: 7429 - DNA, 201 bp, Homo sapiens
atacactcacagttaaaaacaaccattatacaacctcctaaattagaagagtaaagtaaaattttctgctggtagcctcacccatagccttctcctttcayaccacttggacatctttctaaatcaatatcacaaaaagaataccccattcttatgcttagttttccattatacagatagtgccttattattggtggacac

SEQ ID NO: 7430 - DNA, 201 bp, Homo sapiens
ggcggcgtgaccactgctaaacaggagaggggatttaaagggcccagcagagagtcggaggagagggccgaagggaggggctcccaggagtgggcagagartggtggtcctggaataccagaatactattatctgccaaaagctagcgaacgtcatcctccaccccatccttaaaaagtttggaacctgtagacgaaacta

SEQ ID NO: 7431 - DNA, 201 bp, Homo sapiens
tcttgaaaagaaagctctaagtacaacattaggttttcaaatgaatcaatgatataatccagagtggcttatctattgatgctttgccacaataatttgayaaattagtctcctggatagatgaatctttgatgtacctttcttactgtaaaataaatattacactgtgcttttctagttacaatgctgcttcttacagga

SEQ ID NO: 7432 - DNA, 201 bp, Homo sapiens
taagtacatatactcgtatatatacttctatagacttataagtataatacttctaattatataagtatttactatatatacttatatattacttatatatrttacttacatattacttatatataatatataacttatatattacttatatatgttatacttatatatattataatatatattatatataatatataactt

SEQ ID NO: 7433 - DNA, 201 bp, Homo sapiens
atgaatgcaagtaacacattccatgtggagttgttgtaataaagcggtttctgactcccagcatagacataagttttcctgtatctattgaggtctgaagrgaggctagtccattatttgccagtctttatgtctggccaggtatcactctgcaacgtatttttaatttctggtaaatgaaaatagctctaagcacatgaa

SEQ ID NO: 7434 - DNA, 201 bp, Homo sapiens
aaatagaatagacacagtacctgttgttgtagagttgctattctcttagaggagatgggtaatacagaaaaatctcagtctctctctctctctctctacayacacacacacacacacacacacacacacacacacacacataatgtaatgattaataggatcaggagacagagagagagtgataaggtgggttaagagtgc

SEQ ID NO: 7435 - DNA, 201 bp, Homo sapiens
ataacgactaagaatttccacagattaacaacgtacaccaaaccaggaatccagaaaactcataatgctaaacgggacaaatataaaaaaaaaaaaaaacmaaaaaaacccccgaaaaaaaacccccaaaaacaaaaaacaacatctaagcatatcatattcaaacttcagaaaaatcaaaggtaaaaaaaaatctttgaa

SEQ ID NO: 7436 - DNA, 201 bp, Homo sapiens
ggaaaatgtcatgaattgccctgggtataactcccaaatgatcttctgaacccatcatggtatatgtttttcctgaagcagtctgtccataggcaaatatrgtacctgcaaaaaacaaaacacacatacgcaaagattaaaaacaaacctataatgggtaaaactatgcatgcttgttgcacagacgcccaagactaaaat

SEQ ID NO: 7437 - DNA, 201 bp, Homo sapiens
ctttcaggcaacaatgagcaactttaagttcctcttcagtttccaggtgctttattattagaggaaattccaataaatttatagaaacattataactattwtgttgtaattaactcccctttccaaatatttagggtttataataatatttggttacaaaatattttttaaaaacatggtgaaagatgaaacctactttag

SEQ ID NO: 7438 - DNA, 201 bp, Homo sapiens
aatttgactgtggaaaggcaatatagtagtactcttattgtcacttttccctaactcagcttgtttaactctacctttgatgttttattttctaatctctytgtattctagaaagtaaggtctgcatggaaaatagtaaaggcacataatcagattgtctttatttccttacctatcattttaaagtgttttctaacttta

SEQ ID NO: 7439 - DNA, 201 bp, Homo sapiens
tctatggaaaagaaataaaatttagggatgttagcaacatatgattcactgaagcaatttttaggaaaaaaagctttctctgcaaaaagagaagttatttmcattcagcaaaaatttgactgtggaaaggcaatatagtagtactcttattgtcacttttccctaactcagcttgtttaactctacctttgatgttttatt

SEQ ID NO: 7440 - DNA, 201 bp, Homo sapiens
ttgccatacagtaagtactcaaatttttgccatttttcttttagacaagtagaaagaaaaactggcaggccatggatttacagaaacattcaccagcctgyaaggtttgcattaacctctaaaactttatcagtgcaacctcttttccctcattactgtcttttattcaacataatgatactactactaccaaaaaaaatg

SEQ ID NO: 7441 - DNA, 201 bp, Homo sapiens
ataacccatatcttgtatattaacagtttaatcactgtgaaagataagggcagagagagatgagaaaaaaagaagagataaaggagggacaaagtaaagasgggcaatacagcgtgtagctacaatcacgggtttaggaggcagatttatgtggctcaattatgagtttgataatgggttattgggactaaaaaactacct

SEQ ID NO: 7442 - DNA, 201 bp, Homo sapiens
agcttgtaaaattattgttagttattaccattgtgagtaacaaatgaaattgagaatattatgcatttaagtatttgaggttaaagagtatatatacaagyatatgaaaactctgaaaataaacaccctttaccttttgctgaaattcatctttagtttctcctgtattttcctccatatgcaaattcctggaaacttcct

SEQ ID NO: 7443 - DNA, 201 bp, Homo sapiens
acgatgagatactgcctcacatccattaggatggctactatcaaaaaaaaaaaaaaaaaaaaacagaaaatagtgtgttggcaaaggtgcatataaaccaraacacttctgtcctgttggtgggaagtaaaatggtgcagctgttatggaaaacattatggtgctttctcaaaaaattaaaaatagaattaccatataacc

SEQ ID NO: 7444 - DNA, 201 bp, Homo sapiens
tctatactttgtagtgctgaatccttggctttgcgatgctccttgaattgtttcagttcattcactttttcctgaacctcactaatttgttttatattaarttgttcctctttctcataaatctcttggatcttaaacataattataaaataagttaatagtcataaaaatatgtaaacacacacacacacatacacaact

SEQ ID NO: 7445 - DNA, 201 bp, Homo sapiens
atgtatgcctatgatctattttgagttaatttttgtgaaaagtataagttctttgtctttttttgcttgtggatgttcagttgtctggcatcattagttgrtcagactatccttttcccattgagaagcctttgtttccatctctcccagaatagaaatgagagttcttaaaatagcttacagggcctttatgatctggtc

SEQ ID NO: 7446 - DNA, 201 bp, Homo sapiens
cctctctctctctctctgcatatatatatatatatatttttttttttttcctcaagcttcagtggggttacatcccaataagcccattgtaaattgaaaayattgtcagttgaaaatgtatttaatatacctaattcactgaacatagagcttagccgagcctacttaaatgtgctcagaacacttgttagcctacagttg

SEQ ID NO: 7447 - DNA, 201 bp, Homo sapiens
tttagttttttgaatatccatgatatgaatcaacattgacaaagtctgatgagaaatttgagtaaattcaattaagtatgtattgtagttcatggttgagkgctggtttatgtttatagtaggcagtctgagttagcagataaaacaagtgattaagaatcaaaccacctatttgtcagcttggtacagatacttcacaca

SEQ ID NO: 7448 - DNA, 201 bp, Homo sapiens
tgtatagtagaaagataagtgcaataaaacgaggtatgcctgtttgttggcttcctgatcaaccaaccctccacccctaacacctagataacgttggatckctctctttcataatataacccttttataatgtcctttttgtttttgtttcttttttaatagcactcatggcagagttagttatttgtaaaattatttaac

SEQ ID NO: 7449 - DNA, 201 bp, Homo sapiens
taggttcatcgattgtgccaaatgtgccaccctgatgtgggctgttgataggggagattgtgtttgtggagatggggtataagagaactctctgtactttstgctcaattttgctgtgaacctaaaactgctcttaaaaaaaaaagtttattaaagcacatgaggcccatctaaagtagctggccaggcttgtctatgact

SEQ ID NO: 7450 - DNA, 201 bp, Homo sapiens
aatctcagtctctctctctctctctctacacacacacacacacacacacacacacacacacacacacacataatgtaatgattaataggatcaggagacaragagagagtgataaggtgggttaagagtgctagtttcttatgaaacacattcttgtgggaagcagcagacaatacataacaaatatatagtaaaataatg

SEQ ID NO: 7451 - DNA, 201 bp, Homo sapiens
taaatagaatagacacagtacctgttgttgtagagttgctattctcttagaggagatgggtaatacagaaaaatctcagtctctctctctctctctctacmcacacacacacacacacacacacacacacacacacacacataatgtaatgattaataggatcaggagacagagagagagtgataaggtgggttaagagtg

SEQ ID NO: 7452 - DNA, 201 bp, Homo sapiens
tttgaatgtctgaaatttgaattgtcttttctgaaattttttctctaagtttatcaacagtttctttgtgttcttttgatagcatacgagcagtttttagktcctgttgtatttccagatcctttatggttagaagaaatcaagaaatgtaatgatataaaggcacgttacctttacttaatgattgagtttaaacaaaat

SEQ ID NO: 7453 - DNA, 201 bp, Homo sapiens
tccttccagttatccaggtgcagactctggagccatgctgctcagcttctcacctgaaaattctgtcagggccaccttgagaaaatttcagactatgaaaagtttgtcacaacttacgcttcagctacctggtccgaaatatcatcatctggcactgagctaatctcagtgtttccacccttgcccacccccactgccagt

SEQ ID NO: 7454 - DNA, 201 bp, Homo sapiens
caacagcaagagttgaaattcgctgtccagtccagaaacgtgacaagcctgttgtgcgccttagaaaatctgagtttaggcttttctcctgtttctctctytctgtaactcgtttccattagctgtggcttcctcagaggttgaattagggaaaataaataccgaggactgaaaaactcattgagtaatgggttgatactt

SEQ ID NO: 7455 - DNA, 201 bp, Homo sapiens
tgaactggtcccaggaaaatggccaggaccctccgcggccggcacttcagggctcacaggccgccccgcctttaaatttaaaatttcccaaacgccgcatytgattgagccgtggcctcgtgacgtcatgggccattccacgtgcggagcagcgcgggggacgcaaggcgggcggcgtgaccactgctaaacaggagaggg

SEQ ID NO: 7456 - DNA, 201 bp, Homo sapiens
cacaaatgacagagcatcacgtaacatgaggaaaatcatcaagtagatcactgaatatgccaagagtattaaagctaaattattaaaagttaaaattataygaaatatcacagtcttggatgagaaaactaaagaggttagggtttggttttttattgttaaattaaaacaagattaaagtctactaaaataagttataca

SEQ ID NO: 7457 - DNA, 201 bp, Homo sapiens
agccacctctaaagagacagagatgactctttagagacttctttccaagaagattcttagagtaagtgggtaggctggagggttggaacagatggaacacraatgacagagcatcacgtaacatgaggaaaatcatcaagtagatcactgaatatgccaagagtattaaagctaaattattaaaagttaaaattatatgaa

SEQ ID NO: 7458 - DNA, 201 bp, Homo sapiens
tttaaaaaaaaagtacactttgaaaaagctcccttccacttttatccccattcaaccagttcctatacctctaccaggaaaccactgttattagtttttttctttagagatttttaaaaatacaagttcgtatgtatttatttccttccttcttcactgatatcaatagtaacagtccatacatactattttgcactttgc

SEQ ID NO: 7459 - DNA, 201 bp, Homo sapiens
ttgttatacagacagacacacaattttttttgttaccttctatttgtggcaagtaataatagtttcccattgataggactaatattaaagtttccttttayaataaattaagtacaaaaagtgagttattttaaaaatatcaagtcaatttcagtaaaatagtgttgggtgtggcaaaaattatgaaggtaagatacaaat

SEQ ID NO: 7460 - DNA, 201 bp, Homo sapiens
aaacctatagaatgcaatattggattatgttaataataaatgtggctaagttttaaaaccttaaagtagcataaaagaataaaatattaaatttgtatatraactataagaattttaatttcactgaaataaaatatactctaactgtagaacaccaaaatgcagttaccataatcaataatttctcagacttacaataaa

SEQ ID NO: 7461 - DNA, 201 bp, Homo sapiens
tccaaggccaagagtcaggaaatgacagattcaaatccaggaagtctagctccagaggtcattctcttatccatgacaccctcacaccccaaaaagtctaytgaataaataaattcctactcaattaaaaacaaacaaaaaatcacaccaacaaagtaagaattttgttcactatgttgtttttctttcaccagagtctac

SEQ ID NO: 7462 - DNA, 201 bp, Homo sapiens
cccaggctggagtgcaacgggtcttggctcactgcaagctccgcctcccaggttcaagcgattctcctgcctcagcctcccaagtagccgggattacaggygcctgcaaccacgcacagctagtttttttgtatttttagaattacttattttaaatcatagtctccattgtaatcacatatgaaatacacagtatttaaa

SEQ ID NO: 7463 - DNA, 201 bp, Homo sapiens
agacaaatactgcatgatctcactcacatgcagaatcttaaaaagctgatctcttagaagtacaaagtataatggtggttattggaggctggggtgttttkcagggagaagaaaatggggaaatcttggtcagatgacataatgacagttagatagcaggaataaatttcaacagctctattgtacagcaaggtgactata

SEQ ID NO: 7464 - DNA, 201 bp, Homo sapiens
ggcatgtacccaaaggaacttaaatgagtatgttcaagaaatatctgcattcccatatttactgcagcactttccacaacagccaagatatggaaccaacytaagagtctaccaacagaagaatggataaagaaaatttggtataaagtcacaatggaatattcttcagctatttaaaaaaaaaaaaagaaatcctaccat

SEQ ID NO: 7465 - DNA, 201 bp, Homo sapiens
aaagtactgaaggaaaacagttgtaacatcaaaagttagaaaatcaaatattcagaaagtgggaggagataaagtgtggagtttgtttgtttgtttagtamtcaatgataatctgttatcagtttaaaataacctgcataactgtaagactttttcttgtaagcctgatggtaaccacgaaggaaaaaaacctataataaa

SEQ ID NO: 7466 - DNA, 201 bp, Homo sapiens
ttctggattaagttctcttaacgtgtagcctaatattttatacttagaaaatgagtgatctgtttctataaattccattataactatttagtattagttayactaattttcacataactctcttagatggagaaggaaaaacaaaacgtacaaaattagcttctccagctattctaatgttttaattatttagaaacatac

SEQ ID NO: 7467 - DNA, 201 bp, Homo sapiens
agctaaacctttccccaaaatgtaggttttggaacatattttgctacatacacatagacttatatttttagtttaacatggactagatactgcaaaactgkttttgaacaggatgtttttattacataatcttttaagtaaccttaaattttgtgtcgaattaaaagtaaagggcctagagcagtggctcacacctgtaat

SEQ ID NO: 7468 - DNA, 201 bp, Homo sapiens
atttaaatggtaattgtcattaggtgaaatgaaatatttaacttacatctccaagtagtaaaaattataaaattaaatacaccaagttaaaataggtagayggtaaagatttttctcattcctcgagtatggtgatacttgacattttccattctccctctaaaacatactatttaagcatctcatgttactatattccca

SEQ ID NO: 7469 - DNA, 201 bp, Homo sapiens
ttgcccaggctggagtgcaatggcatgatctcggctcatggcagcctcaacctcccaggctcaagcaatcctgccacctcagttacccaagtagctggcartacctgccaggcttatttttgtatattttgtacagaccaggtctcactatgttgcccaggctggtcttgaactcctgggctcaagtgatctcccacttcg

SEQ ID NO: 7470 - DNA, 201 bp, Homo sapiens
aaaaaagtattaaaaactggaaccaaacatatataagtaatcaggtatactgaaagcaaactgaagcgattaaatgacatcatcatcagattcaatgttakttaatgccaagatcttatatcaactaaaatcatctagagctataaaattgtgaaaaaatatcccagtttaatatttaagatcttgactatatactactgc

SEQ ID NO: 7471 - DNA, 201 bp, Homo sapiens
taagaacaaattagaagatgaactatattcatttctatttctaactagtcaaaacgtttacagtatctctcttgtctgctagtttaaaataaactataccraaatatttaaggcactattatcgcaaaggtttttatttcaaaataagggataagtgcttataaatgtgtttacctctttcctcagcctttctacttcaga

SEQ ID NO: 7472 - DNA, 201 bp, Homo sapiens
gcaacatttgaggactacagaaatggctgctacatggattatattactaagtattctgttaaatacaccttgaaaaaatatattttttaatctagtagcawaagaacaaattagaagatgaactatattcatttctatttctaactagtcaaaacgtttacagtatctctcttgtctgctagtttaaaataaactatacca

SEQ ID NO: 7473 - DNA, 201 bp, Homo sapiens
cagtcacaaaagataaatactgcatgattccacttatatgaggtactcagagtagtcaaattcataaagacagaaaaataaatggtggtagccagggtctrtgggaaggaaaactggggagctgttgctcaatgggtatagttttggttttgcaagatgaaaagaattctggaaattggttgtatcacaatgtgaatgaat

SEQ ID NO: 7474 - DNA, 201 bp, Homo sapiens
ctcttagaagaaaacataggggaacagattcatgataagggtcttggcaatgatttcttggatatgacaccaaaacacaggcaacaagagtaaaaataaayaaacttgactacattgaaattaaaaacttctgtgtatcaaaggatacaatcaacagagtaaaaagacagccgatggaatgggaggaaatttttgcaatat

SEQ ID NO: 7475 - DNA, 201 bp, Homo sapiens
agagatgctggcttctcctacggcccaagtgtcaaatataatctattgtgaatgataggaagggattcctagaggagaaagctttaactgagatctgaagkataagagcattagttaggcaaaaaggagtatggaggtactgcaggtagagagacctgagaatctgaaagccatgagctgcggaagagagttgctggagaa

SEQ ID NO: 7476 - DNA, 201 bp, Homo sapiens
taagtgttgcatagtatttcgatatattgttcatatttactgtttccttctgaggaacatttagattgtttcagatttttaattaaaatcactacaataawtaacctgtggcatatgtatacgttgtgtttgtatatacacacacactcctttaacagtatatatgtaggctaaagtccgtaaggaaaatgctaattgcag

SEQ ID NO: 7477 - DNA, 201 bp, Homo sapiens
taatagtttctaaattgattaagacaactgtctacccatgttactctcactgatatcctgcacaattccacacagaattttactttcttttgaggtataayatatataaagcatgctcatcttcaatgtataacttaattattcttgacacaggtgtaaatctatgaaactacaacccagattaaaacagagaatatttct

SEQ ID NO: 7478 - DNA, 201 bp, Homo sapiens
aaaacaagttagaatgtaagcagtttcttcaaggaaggcaaatagtgtctacttgtgttctatatgcacatatctatctacatatctgtatctatatcttyttaattccacaaataattttgggcacagttacttccaaaagaagaacaaaacaacacatacctttttctgtaattcatcttttgatttatctaaatcctt

SEQ ID NO: 7479 - DNA, 201 bp, Homo sapiens
tttttatgactcatattgacatcttctttcactctaagcagttgaagttcttttttctgaagttcttggatcttgagataattgtaaaacaagttagaatrtaagcagtttcttcaaggaaggcaaatagtgtctacttgtgttctatatgcacatatctatctacatatctgtatctatatctttttaattccacaaata

SEQ ID NO: 7480 - DNA, 201 bp, Homo sapiens
tcaggtttcggtaagcctttggaagacaaccaataatcatttgtagttttaacagggggtacttacttttattctagagcacttttctctcaggctttccrtaaggtgctgttgtccatcacttagtaaccttttttcaggttttacttggtggttctgtcggtcctgctttggtaaaaagaaaataaacagggcttttgt

SEQ ID NO: 7481 - DNA, 201 bp, Homo sapiens
tctgcctcaggaactttgtactcgctgttccctttgcctataatggtcttttcagacatctgtatggcctgaccctttacctcgttcaggtatttgctcargtatcacttttctggtgaggacttaaattcacaagctcccattgttgtttgtgtatgtgtgtatatatgcattatacccacacacctgtactagattaca

SEQ ID NO: 7482 - DNA, 201 bp, Homo sapiens
gaactaagtcagatacaagtctgacttagtttaaaattctgattctaacaatttactagctgtgtaaccttgggcaactgctaaacttcctttctgaggaaggcagtttccttgtttatgaatggagcaataaagcctatatcatgaggtaaagcacccagtatggtacctggcatacagtagacatgcaataaatctgga

SEQ ID NO: 7483 - DNA, 201 bp, Homo sapiens
agaaaaggaaccattttaaaacaaaacacagcattttttttttcttaaggcctgacctcagcagaaactatttcaccagagcctaacatgctggggttttrtcagggcctaatatatctggaggagggggaaatactaagtttcagctggctcttgccttccatgtgaaggcagggaaatatactccgcctgccacccacc

SEQ ID NO: 7484 - DNA, 201 bp, Homo sapiens
tcatttcttctgtattctttagtttagtacctaagtggtaatcagatcctgttaccaccaccacttaaaacaatagtctaatgattccccatctacaaaaagaactccaagctttgttattgagtctggcttctactacagtttcatcttctgtaattttatttagtacgtcatataacttgcatacacttctatcattgc

SEQ ID NO: 7485 - DNA, 201 bp, Homo sapiens
cgtgaaacttggatgacagggtggaggcttaaaagggaacatgttaacagcgaaaaaccccagtttggctgaagagaacagagatataaggtcaaaaagaraggactagatctcatgagccctctaggttaggatagcaacatgtgctttatctgtagtgccagtgagcagagtgattgtgtaggctacttgtacatgtac

SEQ ID NO: 7486 - DNA, 201 bp, Homo sapiens
agtgagttcatctgaggccagaggcacacattaacgacagggaccagcaagagaaggagcctgcggccctgatgacagcctcaaggcaacaactcctctgracttcttatgtgaggacaataaactttagtgtttttcacgttttttgttacatggagctaagtgatttctaacagtcacaggggataagaacaaagactg

SEQ ID NO: 7487 - DNA, 201 bp, Homo sapiens
tcaattctgaaagcaaaatgacttcttcccgcaaagcttcattttcttcaacttctttatttagttctttctgaagatcagtaatctttccttccaattcyaaattacagagcaaatctagaaagttttggtaaattgtataaagatccaatgttgccaaacaggtaatttaatttttaattgtccttgaatcaccttttt

SEQ ID NO: 7488 - DNA, 201 bp, Homo sapiens
aggagagagtaacaatttagaatctgatttgaagtctaagggattaaaacagaacttatatatattagtttaaattcatagtaaaattcaaagtcactaawattttaaaaacataattcccttatttctgacatcatgttcagttacatatgttgcatgttttatagttctaattgcttatcaatagaaataccaacatga

SEQ ID NO: 7489 - DNA, 201 bp, Homo sapiens
catcctatcaggctgaactggtcccaggaaaatggccaggaccctccgcggccggcacttcagggctcacaggccgccccgcctttaaatttaaaatttcycaaacgccgcatctgattgagccgtggcctcgtgacgtcatgggccattccacgtgcggagcagcgcgggggacgcaaggcgggcggcgtgaccactgct

SEQ ID NO: 7490 - DNA, 201 bp, Homo sapiens
cagagtttcaaaaattagtttacaagttatatgaggcagattaaaactactaaaaaatatttaaaacagaaagtaaattcagtagattataatcatatgtrtaagtttttgaatatatggaagaaatcagtacatttgagtgtcatcgaaatgttgcaatgttcaacctaatgaaaaatataagaatcagtaggtaagtgc

SEQ ID NO: 7491 - DNA, 201 bp, Homo sapiens
gagaatttcctgtgtgaaaaataagcgtcaaattgtttaaacattaggaaagttttgatccaaatattttatttatatatatatatatatatatataaaawaaaaagagggcaatacctagtggactcttgcttttcttccttttaatatcatttcttaatattttaaagtaaactaagaaatataattgtaagttaaaac

SEQ ID NO: 7492 - DNA, 201 bp, Homo sapiens
aattccatttcttctttttctgttcgtagttgttcatagtctaataccagattatcatagtcagcacgaagtgagttcaactcactttctatattctcctrttataaacaagaacagattttccaatcagaaaattcaaatattttttgtttccttaataaaatttgaattatttaaataactactttaactttgatttga

SEQ ID NO: 7493 - DNA, 201 bp, Homo sapiens
acaacatatcgattataacaggcgagttaattaaaaaaaactatgcttaattttagtaggtaatgttttcttcttcaagctgatcttcccctatattaagytgagataaaaatcaaactcacctggagagcagtaagtgtttcatcaaaagatactggagtaattgtgcagataatacgtgtctttgcatttcctcccaag

SEQ ID NO: 7494 - DNA, 201 bp, Homo sapiens
aaatcaaactcacctggagagcagtaagtgtttcatcaaaagatactggagtaattgtgcagataatacgtgtctttgcatttcctcccaaggaattctgragaattcgtgttaacttgctatctcgataatttatgaaaccacttagcaaggaataagtttacaggagaaaaagattgagaacgtttatataataaagta

SEQ ID NO: 7495 - DNA, 201 bp, Homo sapiens
caatttaatgaaataaatgattcatacatacctcctctaattgttttttaagatccattatttcttttctataccttttcaggagagcttcatcagttgayacctcattaacataaggagtattcttcatatatttagcagtactggcaaactggaaaaaaaatacgaaagtgctaagtgttcaacacttaaaaaaattcg

SEQ ID NO: 7496 - DNA, 201 bp, Homo sapiens
tttagcctaaagaagaagaaatcaaaattatgtcatatagatctgtattcaaacataataaaacaagggaactagtttctatttttgaaaaccattgactwggtagaattcttattaagcctagtttaaaattttattagtctaaggatattgcttaaaaaaaaaatcaaactcttgactctttacttcactctaactacc

SEQ ID NO: 7497 - DNA, 201 bp, Homo sapiens
aattatgtcatatagatctgtattcaaacataataaaacaagggaactagtttctatttttgaaaaccattgacttggtagaattcttattaagcctagtytaaaattttattagtctaaggatattgcttaaaaaaaaaatcaaactcttgactctttacttcactctaactaccattttctttttttcctactttgtcc

SEQ ID NO: 7498 - DNA, 201 bp, Homo sapiens
aaaaacacctgtctcatgtgtgtttcaactagtgcatcattcttaggagattcagaataaagaacttatgattactttctatttatttatttatttatatytgtttgagacagagtttcactcttgtcacccaggctggagtgcaacgggtcttggctcactgcaagctccgcctcccaggttcaagcgattctcctgcct

SEQ ID NO: 7499 - DNA, 201 bp, Homo sapiens
tttttgtttccttaataaaatttgaattatttaaataactactttaactttgatttgatatctttctaaagttctacattttggcaaactagctaacttaraatagattattttgaaagaaggagaattttaaaaatatatcaataaagtgtatgtttgcctgtgcctgacagggaattttgaccataagtcctcaagctc

SEQ ID NO: 7500 - DNA, 201 bp, Homo sapiens
catgatcaactttccacaaatgtgactttatctctaaaatggcaaatatactaacagtccctatctcatagggttattgacagatttaatgaaatatatayaaatttattacaacaatacacagcacaaagtaggtccagtataagcatttgctaagatgatggtatgctatatatatttatgtgattacacaacaaaata

SEQ ID NO: 7501 - DNA, 201 bp, Homo sapiens
tcacagggatgagccactgtgccctggcctaaaacttactgatttttaatgggagcctgtccttaacttccttatatttactcaaaggatgacatgatcarctttccacaaatgtgactttatctctaaaatggcaaatatactaacagtccctatctcatagggttattgacagatttaatgaaatatatataaatttat

SEQ ID NO: 7502 - DNA, 201 bp, Homo sapiens
cagtgtaagttaaaattgtccaaaatactagcattgaaatatgttcatttgggaggtatgtgctatttctggatttaggtctacagaaataaaaattaccmaaaaaaaagtttagttagaaaaaatggccagggaaataactttaaaaattcaccttttcctttagtttttcttcaacttctgccagtctgtcacaggtcc

SEQ ID NO: 7503 - DNA, 201 bp, Homo sapiens
ttctgtaattcctttagaacttttctttctttggttatagatttcacttcctcataattttcattaagtttctgagccaactcaagcctctctgtttccawatgttccaatgtcaattctttgttctttaattcattctttaaattctctatttcattaatctttttctgcatctcactcatctcttcttgtacattaaga

SEQ ID NO: 7504 - DNA, 201 bp, Homo sapiens
gcatttaccactatttaatgttttcttgttcatttgattgcttatttatcagctactttctttcactacaaatggatcagagggattttaggggttttgtycaccttgttctcattgcatttctataacctaggagtgtgcctgccacattaaacactcgacaaatacttacccagtcaattaatgaaccacatcctagct

SEQ ID NO: 7505 - DNA, 201 bp, Homo sapiens
aacacaagccttgattcttataagacacttgttaaaatgggaggaaaatacgaaacttactttagccaaagtttctctaatatgttctttcagctggtcawgtttaacttcaagggcttcttttatcgttttaaggttgtctctttccttggttagagattttatctcttcctgactttcttgaaatttttcattcaacct

SEQ ID NO: 7506 - DNA, 201 bp, Homo sapiens
accttcttggtattcaagagcaatttttaattgttctgtttctagtcatttcatgattaagagacattaaaaaaactggtaacataattataatacaaacrttataactataacacaaacacaagccttgattcttataagacacttgttaaaatgggaggaaaatacgaaacttactttagccaaagtttctctaatatg

SEQ ID NO: 7507 - DNA, 201 bp, Homo sapiens
gtttaaaaaagaaaataaaacaatctcatatttggtttcaccctttcttgtaatttagaattattttttctaaattattttttgaatatttaagaaaacarttcttttctctgaaacatcttctctctgtttcaataccttcttggtattcaagagcaatttttaattgttctgtttctagtcatttcatgattaagagac

SEQ ID NO: 7508 - DNA, 201 bp, Homo sapiens
aaggaacaggtttaaaaaagaaaataaaacaatctcatatttggtttcaccctttcttgtaatttagaattattttttctaaattattttttgaatatttwagaaaacagttcttttctctgaaacatcttctctctgtttcaataccttcttggtattcaagagcaatttttaattgttctgtttctagtcatttcatga

SEQ ID NO: 7509 - DNA, 201 bp, Homo sapiens
tgggatcttaggacattcataaaataccaaggttactatcaggagattatgatcataatttttttttttttgagacggcatctcactctgttgcccaggtkggagtgcagtggcgcaatctcagttcactgcaacttctgcctcctgggttcaagagattctcctgtctcagtctcctgagtagctgggattacaggtgtg

SEQ ID NO: 7510 - DNA, 201 bp, Homo sapiens
agtttatagaaggcttagtctaatctttagtgacaaatctaatattattgataagccttttgtacttttaatagcaaaaggataacaaggtaacttttgaygctattataagcttaccaaaattgaaggatttacttccatcaacttgataaatgacattattgtcagttttccagtaaacttgggcagtttctccaagtg

SEQ ID NO: 7511 - DNA, 201 bp, Homo sapiens
tcatgactttcttgaagtcttttggacaatccgagcatttctatttctatccttagtagtgctgaatctttgggtttgaattgctccatctcactcacgaytttggtagtttcattgtctttttctttcatatttaaggactgttcttgtttgctttgagactcctggatcttaagagaatcataaaacagtacagttgat

SEQ ID NO: 7512 - DNA, 201 bp, Homo sapiens
tttcagattgaagaacttcttgcagcctctgtaggtcatctttctccttagctacagatttcatttcatcatgactttcttgaagtcttttggacaatccragcatttctatttctatccttagtagtgctgaatctttgggtttgaattgctccatctcactcacgattttggtagtttcattgtctttttctttcatat

SEQ ID NO: 7513 - DNA, 201 bp, Homo sapiens
tctctatctgaagggcctcctgtactcttttcatttcctctttttccttaatcataatttgtatttcttcttgactttcttgaagtctgttggtcaactcragcatcttactttctatactttgtagtgctgaatccttggctttgcgatgctccttgaattgtttcagttcattcactttttcctgaacctcactaattt

SEQ ID NO: 7514 - DNA, 201 bp, Homo sapiens
ttagtgttttctttcagttggtctctctctatctgaagggcctcctgtactcttttcatttcctctttttccttaatcataatttgtatttcttcttgackttcttgaagtctgttggtcaactcgagcatcttactttctatactttgtagtgctgaatccttggctttgcgatgctccttgaattgtttcagttcattc

SEQ ID NO: 7515 - DNA, 201 bp, Homo sapiens
aataaggcaatcatttttacattgtaatctaatgtatgtagtactttctttcataagggatatgagtaacaataattagatgtcattttccaatttaacawgtcccactttttcctgtaattcaccatcagaatttcctaaatcccaatgaatatttgctacttgagctgtcttctctgaaatattctgtctactaacagt

SEQ ID NO: 7516 - DNA, 201 bp, Homo sapiens
ggaaggcaaatagtgtctacttgtgttctatatgcacatatctatctacatatctgtatctatatctttttaattccacaaataattttgggcacagttamttccaaaagaagaacaaaacaacacatacctttttctgtaattcatcttttgatttatctaaatccttttgaatgtctgaaatttgaattgtcttttctg

SEQ ID NO: 7517 - DNA, 201 bp, Homo sapiens
ttaattccacaaataattttgggcacagttacttccaaaagaagaacaaaacaacacatacctttttctgtaattcatcttttgatttatctaaatccttytgaatgtctgaaatttgaattgtcttttctgaaattttttctctaagtttatcaacagtttctttgtgttcttttgatagcatacgagcagtttttagtt

SEQ ID NO: 7518 - DNA, 201 bp, Homo sapiens
tccactgtgttttcattccaaattagtaattattcccaaaagtaaaactgtcagaatgtaggatgatcaactatttaagacacagtatttttttcaacttyttggttctctgaaaatacccttccctaaggtaaaatgagttcattttcacacacaaaaaatacactacaagtcaacttttctatgttctttcaagaggca

SEQ ID NO: 7519 - DNA, 201 bp, Homo sapiens
aactcccaaatgatcttctgaacccatcatggtatatgtttttcctgaagcagtctgtccataggcaaatatagtacctgcaaaaaacaaaacacacataygcaaagattaaaaacaaacctataatgggtaaaactatgcatgcttgttgcacagacgcccaagactaaaatgtttctgcagcattgagtgaatacaaac

SEQ ID NO: 7520 - DNA, 201 bp, Homo sapiens
atggtttcattgtatatttccatgtaagatacacgtaagagaaattccctatcaggaaactagaagaaaaaaaattatataaaaacaccaggaagcatccrattgtgaaaacctaatgctaaatgctcatgtgcttaaagaggtaaaatgtatgtaaaacaaactaagaaaccccttggttctactgttgacaaaataatg

SEQ ID NO: 7521 - DNA, 201 bp, Homo sapiens
tttcagctgcatatataataaaatccatagaaacacaataatttttattttaacttaaaaaagtatgatttgaggtccaaacgtgcttgattgaaaagatrgtttttacaagtgttctaaagaaatacagcataaagtcttactttctccctttgtaatccatttcaaagccatttctgatgtatatacaacttcttctgt

SEQ ID NO: 7522 - DNA, 201 bp, Homo sapiens
tttaattacctgcagcgcctgtttgagcagctctttcactgcctgcaagatcaaccaaattctgtaagatagataaaaataaatccttagggcagataatktgaaataataaaattcaaactactgaaagaacatttttaatacatggtatatctgaatattcgatctgtatccatgtctcccatgctactgtttaggcat

SEQ ID NO: 7523 - DNA, 201 bp, Homo sapiens
acatatttcatgagttttaattacctgcagcgcctgtttgagcagctctttcactgcctgcaagatcaaccaaattctgtaagatagataaaaataaatcyttagggcagataatttgaaataataaaattcaaactactgaaagaacatttttaatacatggtatatctgaatattcgatctgtatccatgtctcccatg

SEQ ID NO: 7524 - DNA, 201 bp, Homo sapiens
attttgtaccacattatctttcttaatttccttattttgaaagtttaaatggtttttatggaattctcatgggctttcctgctgtacaatcccatcaattrtataattttcattttttaattgatgctattgtagactaaaataaaaattaagcagatacagatgctgatttctatgttaaacttttatcagaaaatcaca

SEQ ID NO: 7525 - DNA, 201 bp, Homo sapiens
acagaatacacctagctttctttggagggaaaggactgagttggaaaacagattcacctttcattttatattatttcataacaatattttaaccacatgawtattagtttctctcaagttaaagaaattagttgacataaatcagtgtgtaaaatggagtctactcattcagatttgttttggttatctagctctgagctc

SEQ ID NO: 7526 - DNA, 201 bp, Homo sapiens
gtaaatagaatagacacagtacctgttgttgtagagttgctattctcttagaggagatgggtaatacagaaaaatctcagtctctctctctctctctctayacacacacacacacacacacacacacacacacacacacacataatgtaatgattaataggatcaggagacagagagagagtgataaggtgggttaagagt

SEQ ID NO: 7527 - DNA, 201 bp, Homo sapiens
agtaaatagaatagacacagtacctgttgttgtagagttgctattctcttagaggagatgggtaatacagaaaaatctcagtctctctctctctctctctmcacacacacacacacacacacacacacacacacacacacacataatgtaatgattaataggatcaggagacagagagagagtgataaggtgggttaagag

SEQ ID NO: 7528 - DNA, 201 bp, Homo sapiens
ggaagaacattccatgctcatgggtaggaagaatcaatatcgtgaaaatggccatactgcccaaggtaatttatagattcattgccatccccatcagctaycaatgacttttcttcacagaactggaaaaaactactttaaggttcatatggaaccaaaaaagagcccgcattgccaagtcaatcctaagccaaaagagca

SEQ ID NO: 7529 - DNA, 201 bp, Homo sapiens
cagcagcacatcaaaaagcttatccaccatgatcaagtgggcttcatctctgggatgcaaggctggtttaacatacaaaaatcaataaacgtaatccagcmtataaacagaaccaaagacaaaaaccacatgattatctcaatagatgcagaaaaggcctttaacaaaattcaacaacacttcatgctaaaaactctcaat

SEQ ID NO: 7530 - DNA, 201 bp, Homo sapiens
caggctctgaaattgaggcaataattaacagcctaccaaccaaaagaagcccaggaccagatggattcacagccgaattctaccagaggtactaggaggarctggtaccattccttctgaaactattctaatcaatacaaaacaagggaatcctccctaactcattttatgaggccagcatcatcctgaaaccaaagcctg

SEQ ID NO: 7531 - DNA, 201 bp, Homo sapiens
gaccaacaaaattgatagaccgctagcaagactaataaagaagaaaagagagaagaatcaaatagacccaataaaaaatgataaaggggatatcatcaccratcccacagaaatacaaactaccatcagagaatactataaacacctctatgcaaataaactagaaaatctagaagaaatggataaattgctggacacata

SEQ ID NO: 7532 - DNA, 201 bp, Homo sapiens
gagctggttttttgaaaagaccaacaaaattgatagaccgctagcaagactaataaagaagaaaagagagaagaatcaaatagacccaataaaaaatgatraaggggatatcatcaccgatcccacagaaatacaaactaccatcagagaatactataaacacctctatgcaaataaactagaaaatctagaagaaatgga

SEQ ID NO: 7533 - DNA, 201 bp, Homo sapiens
taaagatgttctttgaaaccaatgagaacaaagacacaacataccagaatctctgggacacatttaaagcagtgtgtagagggaaacttatagcactaaaygcccacaagagaaagcaggaaagatctaaaattgacaccctaacatcacaattaaaagaactagaaaagcaagatcaaacacattcaaaagctagcagac

SEQ ID NO: 7534 - DNA, 201 bp, Homo sapiens
ttgcctgagcccgcgtctctaaagaaacctatagaatgcaatattggattatgttaataataaatgtggctaagttttaaaaccttaaagtagcataaaaraataaaatattaaatttgtatatgaactataagaattttaatttcactgaaataaaatatactctaactgtagaacaccaaaatgcagttaccataatca

SEQ ID NO: 7535 - DNA, 201 bp, Homo sapiens
tattcttaaaaaacataaaatttgtggatactatgtgctatcaccacaaaaacaataactatgtgaggtagtacatttgttagctagatttaaccattccmcaatgtatatatacttcaaaacatcatacatcatgttgtatacaataaacacataaaatgttatctgtacatttaaaaaaaattaaaaaagcttacatta

SEQ ID NO: 7536 - DNA, 201 bp, Homo sapiens
acaacagccaagatatggaaccaacctaagagtctaccaacagaagaatggataaagaaaatttggtataaagtcacaatggaatattcttcagctatttwaaaaaaaaaaaagaaatcctaccatttgcaacaatatggatgaacccaaaggacattataaaccaggaacagaaagacaaatactgcatgatctcactca

SEQ ID NO: 7537 - DNA, 201 bp, Homo sapiens
aataaaaaaggagacattacaattgataccacagaaatacaaagaacaattatatgccaataaattgaaaaacctagaagaaatgaattcctctaccacaytacctaccaggactgaattatgaataaatagaaaacctgaacaggccagtaatgagaaaggagacttgaatcagtaataaaaagtctcctatcaaagaaa

SEQ ID NO: 7538 - DNA, 201 bp, Homo sapiens
catggcacatgtatacctatgtaacaaatctgtatgttatgcacatgtaccccagaacttaaagtataattaaacaacaacaacaacaacaaagaggaatytcacaggccaggagggagtgcaatgatatagtaaaagtactgaaggaaaacagttgtaacatcaaaagttagaaaatcaaatattcagaaagtgggagga

SEQ ID NO: 7539 - DNA, 201 bp, Homo sapiens
ttaaatggtaattgtcattaggtgaaatgaaatatttaacttacatctccaagtagtaaaaattataaaattaaatacaccaagttaaaataggtagacgrtaaagatttttctcattcctcgagtatggtgatacttgacattttccattctccctctaaaacatactatttaagcatctcatgttactatattcccact

SEQ ID NO: 7540 - DNA, 201 bp, Homo sapiens
ccttgaaaaatacacgtttagtagatttttgttttcagtcagttaagtacagaaatgtattaattcttataaagttttttcttcccataaagtatccatcrgctctacattagtgtactttttaataagttctgatttggaatctaggtttggattagggttgtttcatgcagtgcctttacaatattattacttttcacc

SEQ ID NO: 7541 - DNA, 201 bp, Homo sapiens
atcaaacaaataaaaaaaaacccctcagcatgaccccaccaagtagctatatcatctgttaataaagctacaataatgtcaatagcaaattagtatgcacyacttggaggagagatttaaaaagtggtaatcaaaccttgaaaaatacacgtttagtagatttttgttttcagtcagttaagtacagaaatgtattaattc

SEQ ID NO: 7542 - DNA, 201 bp, Homo sapiens
tataagggaggtgagttttgttatctcattaaaagcagattgtaattctttctccagatcaacttgcattttcttttttgcctccaactggctttgatatwactgaatatcattttccatttgcttgtatgtagttgcaagttctttctattgagaaaaacattgcaaatgcacaaaaatacactgatcattacaactact

SEQ ID NO: 7543 - DNA, 201 bp, Homo sapiens
aaaaacttaatcaatgaataatttaagtaatgtttaatcatttaaaattgttatttaagaagtatcttaagtggtatggtccatgaaaaaaataaaaataraagtaccacttaagtaatatttaaataattacataatttaaataacccatatcttgtatattaacagtttaatcactgtgaaagataagggcagagagag

SEQ ID NO: 7544 - DNA, 201 bp, Homo sapiens
caatccccaaaacttataaaattaaaacaatacaaatggtcgcattctactatgatccacagtgaacttctccaaatatttatttaaacttatacacattrtatcacccctaaacatagaaaacctaagtgtgaaaatattggcagacatcaacaacaaacaattaaaaataaaatttaaaaattatgacagcaaaaaaaa

SEQ ID NO: 7545 - DNA, 201 bp, Homo sapiens
gaatatggtattgctgacacttaaatttggacttctaggactcagaactgtgacagaatatgtctctattgtaagccatcaagtttacagcaatttgctawggcagccctaggaaactgatacaggctgattaaggagataaactgattaaggagataaggggaagatgagataaagtaaaaaagcaaagagactaattaa

SEQ ID NO: 7546 - DNA, 201 bp, Homo sapiens
ttctcagaaacaattcctctgagtttgtcaatagtttcctgctgctctttcagatgcatgtgagcaattcttagttcctcttgtattttcagatcctttaycattagagaaattttaaaaacagtgacatatcttaatattagtttttaaaaaataaagtgatatattttcttagtaaaaataataacactgttactctat

SEQ ID NO: 7547 - DNA, 201 bp, Homo sapiens
ctcctttcataccacttggacatctttctaaatcaatatcacaaaaagaataccccattcttatgcttagttttccattatacagatagtgccttattattggtggacacttagattatttctaggttttagtcaccagacacaacgctgcagtgaacactgtatttttgcccaaatatgtgaatataatggtagggtaaa

SEQ ID NO: 7548 - DNA, 201 bp, Homo sapiens
tctcctttcataccacttggacatctttctaaatcaatatcacaaaaagaataccccattcttatgcttagttttccattatacagatagtgccttattattggtggacacttagattatttctaggttttagtcaccagacacaacgctgcagtgaacactgtatttttgcccaaatatgtgaatataatggtagggtaa

SEQ ID NO: 7549 - DNA, 201 bp, Homo sapiens
ttctcctttcataccacttggacatctttctaaatcaatatcacaaaaagaataccccattcttatgcttagttttccattatacagatagtgccttattattggtggacacttagattatttctaggttttagtcaccagacacaacgctgcagtgaacactgtatttttgcccaaatatgtgaatataatggtagggta

SEQ ID NO: 7550 - DNA, 201 bp, Homo sapiens
aaaaaaaactttaaaatgttatattaagggaaatagactgctttaacacagtttataaaaataaagaattaaatgttattttctgaaaatatttttgcttyttttaaaactgttttctattgtgtaaaaattagagtaaccatttcccactgtcctttactgttcataggaatttccagagaaagaaataaaaacattgta

SEQ ID NO: 7551 - DNA, 201 bp, Homo sapiens
tggtcagagcacaggtagagaaacatgtaaaattcaagttactgtaatcatgtagtaggtaacatgtttagttcaggctgctaaacaataaaacaagggcrttctcacaagaatgagccctttatttttaataatttaagaaaagctagatgttaatcaatctggaatgttggagaggggattcctgtttttggttttagg

SEQ ID NO: 7552 - DNA, 201 bp, Homo sapiens
cctacatattactatgctcagacccacataatctttaatttggtagtaagaatactaaatagcaaatatgccggcacctgaagcaggacttaaatacattratgtttataactgaaatatttaaaaggatattactaaaaaagatggtaccttcagtttcttcatgattctgtggaattccatggagcatctctggtttgc

SEQ ID NO: 7553 - DNA, 201 bp, Homo sapiens
taatacttgtttatatgtctgtctcaccccagactatgagatctttgagatgttaactcacatctgcctcctgaacatcctgacataatgtctaggcccayaggcagagttcaggtgttgctgatatcctacatattactatgctcagacccacataatctttaatttggtagtaagaatactaaatagcaaatatgccgg

SEQ ID NO: 7554 - DNA, 201 bp, Homo sapiens
gtactttctgctcaattttgctgtgaacctaaaactgctcttaaaaaaaaaagtttattaaagcacatgaggcccatctaaagtagctggccaggcttgtmtatgactttaccacagttgctgcccatagcttgaaacagactcatgtcttacgatctctaaggctactcgtggaaaaggctcagttcttacagaagcagt

SEQ ID NO: 7555 - DNA, 201 bp, Homo sapiens
gagattgtgtttgtggagatggggtataagagaactctctgtactttctgctcaattttgctgtgaacctaaaactgctcttaaaaaaaaaagtttattaragcacatgaggcccatctaaagtagctggccaggcttgtctatgactttaccacagttgctgcccatagcttgaaacagactcatgtcttacgatctcta

SEQ ID NO: 7556 - DNA, 201 bp, Homo sapiens
gtatcaatgtaggttcatcgattgtgccaaatgtgccaccctgatgtgggctgttgataggggagattgtgtttgtggagatggggtataagagaactctstgtactttctgctcaattttgctgtgaacctaaaactgctcttaaaaaaaaaagtttattaaagcacatgaggcccatctaaagtagctggccaggcttg

SEQ ID NO: 7557 - DNA, 201 bp, Homo sapiens
attcaaaaatcaattaatgttccatcacataggctaaagaagaaaaatcacatgatcatatcaatggatgcagaaaaaatttgtcaaaatccaatacccaytcataatttaaaactctcagcaatagagatgaacctctacaacttgataaagaatgtctacaaaaaactacagctaacatcatagttaatcatgaggaac

SEQ ID NO: 7558 - DNA, 201 bp, Homo sapiens
caaaaaataaaataaaataaaataaaaaacaaagatgtaaaaaaagatgtgaaaatctcaacaaaatattaggaagtcaaatccaatcacgtgtaaaaatkattatacatgaccaaatgggatttatcccaggtatgcaaggctggtttaacattcaaaaatcaattaatgttccatcacataggctaaagaagaaaaatc

SEQ ID NO: 7559 - DNA, 201 bp, Homo sapiens
agatgagttcaatggtgaactctaccaaatatttaagaaatttaaggaaaaaactatacccattctctacaacctacaatctcttctagaagatagaaacrgaaactcattctatgatgtcagcattattctaatactaaaaccagatgatgacattatacaagaaaactacagaccagtatctcccataaaaagagatgt

SEQ ID NO: 7560 - DNA, 201 bp, Homo sapiens
aactcaattattacaacccacaattatgaacaacccacaaatttgataatttaaatgaaatggaccaattctttgaaagacacaatctaccaatacacaaraaaggcagttcgattaggcctatatctatcaaagaaatggagtcagtaattaaaaactttccaaaacagaaagcaccaggtccagatgagttcaatggtg

SEQ ID NO: 7561 - DNA, 201 bp, Homo sapiens
ataaaaaaaaaaaaaaaccaaaaaaacccccgaaaaaaaacccccaaaaacaaaaaacaacatctaagcatatcatattcaaacttcagaaaaatcaaagrtaaaaaaaaatctttgaagaagctagaagggaaaaaacaccatacctataggggagtgaagataagaattacatctgacttctctgaagctattcaagct

SEQ ID NO: 7562 - DNA, 201 bp, Homo sapiens
tcaaaaaaccctagaattctaggacagtgtatatgctgaagttcattatttagaacattctaaaacagtactttaaaagaatgtgaacattctttgtagtktgcatcagtttctgaaatttcagatgttggatgtggatgatgacaataaaatgaataatgactagagaggattcatattgatctgcaagatgataatctc

SEQ ID NO: 7563 - DNA, 201 bp, Homo sapiens
atcccctcgggggtggggggtcttgatatacatattttaaaaaaacttcaaaaaaccctagaattctaggacagtgtatatgctgaagttcattatttagmacattctaaaacagtactttaaaagaatgtgaacattctttgtagtttgcatcagtttctgaaatttcagatgttggatgtggatgatgacaataaaatg

SEQ ID NO: 7564 - DNA, 201 bp, Homo sapiens
gtgtctaatttataaattaaactttatcataggtatggatgtatagaaaaaacagaatacatagggtttggtaccatccatggcatcccctcgggggtggrgggtcttgatatacatattttaaaaaaacttcaaaaaaccctagaattctaggacagtgtatatgctgaagttcattatttagaacattctaaaacagta

SEQ ID NO: 7565 - DNA, 201 bp, Homo sapiens
ttagcatagtgctaagcatattaaataggcactcatattttacatgaacaccacttaaacaaaggacattggttaattgactctctaaagtaatatatatwtatctttccctttaattttattaattttttttttttgagatggaatcttgctctgttgcccaggctggaatgcagtggcgcaatctcgactcactgcaac

SEQ ID NO: 7566 - DNA, 201 bp, Homo sapiens
acagcacagtggttatgcgatttattagttagcatagtgctaagcatattaaataggcactcatattttacatgaacaccacttaaacaaaggacattggktaattgactctctaaagtaatatatatttatctttccctttaattttattaattttttttttttgagatggaatcttgctctgttgcccaggctggaatg

SEQ ID NO: 7567 - DNA, 201 bp, Homo sapiens
tattataatctgtctgcaaattcttaaaacatgcagttaaaaacagcacagtggttatgcgatttattagttagcatagtgctaagcatattaaataggcrctcatattttacatgaacaccacttaaacaaaggacattggttaattgactctctaaagtaatatatatttatctttccctttaattttattaatttttt

SEQ ID NO: 7568 - DNA, 201 bp, Homo sapiens
agatgatgatttttggattgaaaatgtcaaaggtttatattataatctgtctgcaaattcttaaaacatgcagttaaaaacagcacagtggttatgcgatwtattagttagcatagtgctaagcatattaaataggcactcatattttacatgaacaccacttaaacaaaggacattggttaattgactctctaaagtaat

SEQ ID NO: 7569 - DNA, 201 bp, Homo sapiens
ctttctttagcttcatgcagtgaattttccagctctcgaattttctattagaaaaagcacacattcataagctctatcatcaagacagaatcacagtatakaaatttgagacagagatgatcatatttagatattgttaatttttcacagattgtattaacaatggatagaagagaggccaaacatcattcaatctacaga

SEQ ID NO: 7570 - DNA, 201 bp, Homo sapiens
tttgctcttgggccctagggaactataaactaaaaggaaatataatcttcacacagaaacacagtaaggccaacaaatgaaattaagagaaccaacagaarccttagtaaaactgctaaatacacacacacacacacacacacacactcttaatgttcactttcaggcatacaaaagccacttaaaattgtttatattctg

SEQ ID NO: 7571 - DNA, 201 bp, Homo sapiens
gaaagtgcagctttatttctgtatggtcaggaaagcaaaccctgactgcagctctggtctaaggtgctacaaaggtcaaattctgatcactgttctccagyagaaagagacattttatgagttgttagtttacgcattaatcagtaacgataaattataagactttctgcctttcttaatgactatgaattatctgtatct

SEQ ID NO: 7572 - DNA, 201 bp, Homo sapiens
cttataataagtatatatataagcatacatatatgcttataagttagaaggtcaggtgctaaccccacgatttcatatagccattgagatctgcatcttasttcagtacttgttctactgcgtaaagctatctcaagtactgttcaagcattctttcttttcaaatggaacatgacagacagaatatgaataaaggtagtt

SEQ ID NO: 7573 - DNA, 201 bp, Homo sapiens
taagtatataagtgtatatatatacttataagtatataagtgtatatatatacttataagtatataagtgtatatatatacttataagtatataagtgtayatatatacttataagtatataagtgtatatatatacttataagtatataagtgtatatatatacttataagtatataagtgtatatatatacttataagt

SEQ ID NO: 7574 - DNA, 201 bp, Homo sapiens
taagtatataagtgtatatatatacttataagtatataagtgtatatatatacttataagtatataagtgtatatatatacttataagtatataagtgtayatatatacttataagtatataagtgtacatatatacttataagtatataagtgtatatatatacttataagtatataagtgtatatatatacttataagt

SEQ ID NO: 7575 - DNA, 201 bp, Homo sapiens
taatacaagcaaatatcatcttatgttttgcttagtatttggaattttcaatgtgtttttacccacaactttcggtttgatctttatgtacgtgtgtgtgmgtgtgcatgtatataaataagtgtatatgtatatacacttttttaaaaaagacacttattacatgagctctaaaaattactttccccatgactgaagtgt

SEQ ID NO: 7576 - DNA, 201 bp, Homo sapiens
tatcactgtgggaggaaaatatacaaataggtgataattttaattgtctccaaagttcaaaataaaggaaatactaccaagtacaataagccattatagaracccaaacagctcaagtcttatttccctggaagtcacccttgacttctgccttctaccttactccctctgcttatttgaccaaccattaattctatgcct

SEQ ID NO: 7577 - DNA, 201 bp, Homo sapiens
tgccaccagcatttatccagttcctccggagagaaacctgggaagcaatcctagagacctcactctcttttattttaagtcatccaagtctcttgatacamtctcatcctatctatcaaattcacttccttgtttttatccctattggggccaagctagtccatgctaaaattactttttgtctgaactaccataaacaca

SEQ ID NO: 7578 - DNA, 201 bp, Homo sapiens
gataaaacaaagtataaaccccagtatcccctccccccaaataaatccacacaaaaaagttcataaaaaatttcaaaaattttacagattacaagaagtcyatccatatatgctttatctatctgtggggactccaggtttagaaaactttactttgataaaaactctggtactgtttccttatgtctacaatgaagaggt

SEQ ID NO: 7579 - DNA, 201 bp, Homo sapiens
gtgggacttctcagcctccctaattgtgtaaaccaattcccctaataaacatcctctctctctctctctgcatatatatatatatatatttttttttttttcctcaagcttcagtggggttacatcccaataagcccattgtaaattgaaaacattgtcagttgaaaatgtatttaatatacctaattcactgaacataga

SEQ ID NO: 7580 - DNA, 201 bp, Homo sapiens
tccctggctctccagcttgcagacagcctatggtgggacttctcagcctccctaattgtgtaaaccaattcccctaataaacatcctctctctctctctcygcatatatatatatatatatttttttttttttcctcaagcttcagtggggttacatcccaataagcccattgtaaattgaaaacattgtcagttgaaaat

SEQ ID NO: 7581 - DNA, 201 bp, Homo sapiens
caaagactgtggcgtcagtaagactagagcaagtcccatatctctctctcactagctaagtgagtaaatcacttaaatctctgaacctcttatgtttctcwtctgtaaaatgaaggtaaaatagcacctacctcagggatgtggtgaggaggaacgactaagcctgtgaatccatcagcacaatgtttgccacacaggtgc

SEQ ID NO: 7582 - DNA, 201 bp, Homo sapiens
actgcattagtggttagaaaaaacatcaattcctataaccctatagccctgacatttaaattttaggagatggcaaccatgacataacaggaagaaagatyctctgaatttttcctacgacattttagctaggaatttgatgatactgacaagactaagcagacaatttgtagatttcctcccacatttagtttagttaac

SEQ ID NO: 7583 - DNA, 201 bp, Homo sapiens
aacaaaacacacatacgcaaagattaaaaacaaacctataatgggtaaaactatgcatgcttgttgcacagacgcccaagactaaaatgtttctgcagcaytgagtgaatacaaaccattgtagccttgtatggcagaatcgatgattggtgctgctatttcttcatacacatttttggtagtttcattaccatgaaagac

SEQ ID NO: 7584 - DNA, 201 bp, Homo sapiens
gtatgatctccattttcagatgggctccaatgctatgtctcaatttttctatgtgtatagattgatttctctttccatgataaattagtggtaccatgtawttttgcgtatttctgcatttaccatattggaattaagggattttctttctagtttataatggggggaaagaacaatgtcttatttatatctacagtctca

SEQ ID NO: 7585 - DNA, 201 bp, Homo sapiens
ttagcctaaagaagaagaaatcaaaattatgtcatatagatctgtattcaaacataataaaacaagggaactagtttctatttttgaaaaccattgacttsgtagaattcttattaagcctagtttaaaattttattagtctaaggatattgcttaaaaaaaaaatcaaactcttgactctttacttcactctaactacca

SEQ ID NO: 7586 - DNA, 201 bp, Homo sapiens
tatcctttggtaggtaagtagataaacaggtacatacacacaatggaatattattcagcattaaaaagaaataagctatgaaaccatgaaaagacatggasaaaacgtaaataaatattactaagtgaaagttgtcaacctgaaaaggctatatactgtatgattccaacatatgacattctggaaaaggggctactatgg

SEQ ID NO: 7587 - DNA, 201 bp, Homo sapiens
acacagaatatgcctaatttccttgcagagtgaggactgagttagatggtagactgagttagatgaaagtagtttctttcaatttaaagaaactagtttakagataagaacagtaaagaaaaatgagtctattcattcaagatttgttttggttaactagctgtgaggtagtataaacaactcttttttattgctagactg

SEQ ID NO: 7588 - DNA, 201 bp, Homo sapiens
tgacagaaagtccatctttgaggattcaactcttaaatggagcttcagtgaccttctgccgcctcaaaagtgttttcttgtgaaggctttcattctcaccytctcccccagtactggtaaacaaagggatggattcaaaatgcaactctgattatgtctgtcttgcttaaaattcttaaaaccttttggaaacttatgaaa

SEQ ID NO: 7589 - DNA, 201 bp, Homo sapiens
ataaacaattttgtttccagtgaagcagtttatagaaggcttagtctaatctttagtgacaaatctaatattattgataagccttttgtacttttaatagsaaaaggataacaaggtaacttttgatgctattataagcttaccaaaattgaaggatttacttccatcaacttgataaatgacattattgtcagttttcca

SEQ ID NO: 7590 - DNA, 201 bp, Homo sapiens
tgtgataagtgtaacagagattatttaaatagagctggaaaaggggccagtagctttaggttcataggactggatagcagtggaaggcttgtcattaagcwgcgatctgaatgacctgagaagaggaagctggtcccaaaaagatcaagggaaacagtagtctagacaaaaagaatagccaaaacacttagtcacaaagca

SEQ ID NO: 7591 - DNA, 201 bp, Homo sapiens
actgcataaccagaaatctttataaacatgacttatagatacgacttacatttatagcacttattttgttgggctagtcatgcatgctagctgtactatgstgtagcaataccatgactttactgtggcatctttaagagctggacctctctttcatttcacaaatattactgaaaagaagtggctgcttattatgctcca

SEQ ID NO: 7592 - DNA, 201 bp, Homo sapiens
agttagttctaatgttctattctgtccttattctttattcaagaaccaggcacaaagattatctcctcagcatagctttgcctactttatccttcctcccmgccagatttcagatgaactgctccttgaactgcataaccagaaatctttataaacatgacttatagatacgacttacatttatagcacttattttgttgg

SEQ ID NO: 7593 - DNA, 201 bp, Homo sapiens
cagcctccctgctctcacccacacagagaactgccaagagatgaacctgtctgagccactgggtcaggcttgcagtcctccatcccacaatagactgaagsggccctgtctcagcttcaatgcctctttgctgcagtcaggaagctatctcgactgtattgggaactgctgggtgaagcacctgccccagccaccaggaca

SEQ ID NO: 7594 - DNA, 201 bp, Homo sapiens
cataaataagtcacgaccaaatgtaacctaatacgtgaacttattggtaaagggagacagagactgaaattactattgctggtacaaatttagggtattaytgtatgacattacactagttcagcaaacagctccatattgcctacacaggtatttaaaagtttttataataatctataatcacattagaaaacaatagaa

SEQ ID NO: 7595 - DNA, 201 bp, Homo sapiens
aacggaacccaaatttccatcaataggaaaaagaataaaaaaattatggcgtattaatacaatgaactattccttggcagtaaaagggagtgtagaaagtsaaacataagagactacatactgtatgattctatttgtataaagctctagaagagacaaatgatttaaggtgaacatatcaggactgataatctggcgggg

SEQ ID NO: 7596 - DNA, 201 bp, Homo sapiens
ctcagcctcccgagtagctgggactacaggtgtgtgccaccacgcctagctaatttttgtacttttagtagagacggggtttcaccacgttggccaggctrgtattgaattcctgacctcaggtgatctgcctgccttggcctcccaaagtgctgggattaaaggcatgaaccaccatgcccacccttattaatcttaaat

SEQ ID NO: 7597 - DNA, 201 bp, Homo sapiens
caaaagacacacgaaaaaatgctcatcatcactggccatcagagaaatgcaaatcaaaaccacaatgagataccatctcacaccagttagaatggcaatckttaaaaagtcagggaacaacaggtgctggagaggatgtggagaaataggaacacttttacactgttggtgggactgtaaactacttcagccattgtggaa

SEQ ID NO: 7598 - DNA, 201 bp, Homo sapiens
taagtatatataagtgtatatatatacttataagtatataagtgtatatatatacttataagtatataagtgtatatatatacttataagtatataagtgyatatatatacttataagtatataagtgtatatatatacttataagtatataagtgtatatatatacttataagtatataagtgtatatatatacttataa

SEQ ID NO: 7599 - DNA, 201 bp, Homo sapiens
gacagcctatggtgggacttctcagcctccctaattgtgtaaaccaattcccctaataaacatcctctctctctctctctgcatatatatatatatatatwtttttttttttcctcaagcttcagtggggttacatcccaataagcccattgtaaattgaaaacattgtcagttgaaaatgtatttaatatacctaattca

SEQ ID NO: 7600 - DNA, 201 bp, Homo sapiens
agtatatataagtctgcatatatacttgtaagtatatataagtgtatatatatacttataagtatataagtgtatatatatacttataagtatataagtgyatatatatacttataagtatataagtgtatatatatacttataagtatataagtgtatatatatacttataagtatataagtgtatatatatacttataa

SEQ ID NO: 7601 - DNA, 201 bp, Homo sapiens
tcagtcatactatagatcttgaaaagaccttataaagatggtgaagactaaaacaaatagctacattcatcttcaatgtgcagacactgctgcatgaccayaagcatcatgatcagggaaacatgatgtcaccaaaagcacaaagtaagatactggtgactgatcctaaaagatggagatgtattatctgccaaagaattc

SEQ ID NO: 7602 - DNA, 201 bp, Homo sapiens
tcagaaatggatgacaggacatcactatagagcccatggacattaaaaaatattaggaacaactcaattattacaacccacaattatgaacaacccacaawtttgataatttaaatgaaatggaccaattctttgaaagacacaatctaccaatacacaagaaaggcagttcgattaggcctatatctatcaaagaaatgg

SEQ ID NO: 7603 - DNA, 201 bp, Homo sapiens
tctactaaaaatacaaaaaattagctgggcgtggtggcaggcgcctgtagtcccagctacttggaggctgtggcaggagaatggcgtgaacccgggaggcrgagcttgcagtgagccgagatcatcacaccactgcactccagcctgggcaacagagcaagactccgtctcaaaaaaaaaaaaaaaaaaaaaaaagacttc

SEQ ID NO: 7604 - DNA, 201 bp, Homo sapiens
tctcaagttaaagaaattagttgacataaatcagtgtgtaaaatggagtctactcattcagatttgttttggttatctagctctgagctcatagagattawcctttttcatgactaaattgtgaagaggcagggctgcttctaataagataatccagagtattgtggtgtatacatactatggaatactactcagccatga

SEQ ID NO: 7605 - DNA, 201 bp, Homo sapiens
ggcttgatcgagtttgtcatctgtctgagacacaaaggggagggccctgtgactgaagcatttgtggcaatggagagaggtaggcaggtccaggtccaggmcccatggggccttgtgggctgtgataaaatgtttggatcttattctcaagggtgaggggaagcctatggagggttttaagcaagggggtaaaaagggatt

SEQ ID NO: 7606 - DNA, 201 bp, Homo sapiens
gtgtactttagaaagctatccaagatgtttcatttattaagagaaattcaaggtgcacggttatgtacacagaatatgtctggatatacatacataatttytggaaagatacacagaatatgcctaatttccttgcagagtgaggactgagttagatggtagactgagttagatgaaagtagtttctttcaatttaaagaa

SEQ ID NO: 7607 - DNA, 201 bp, Homo sapiens
atagcaaaaggataacaaggtaacttttgatgctattataagcttaccaaaattgaaggatttacttccatcaacttgataaatgacattattgtcagttktccagtaaacttgggcagtttctccaagtgattcttctctaaaagaataaaaacaccgcattttaaccagtcataaaagtcatgtcataggaggaataat

SEQ ID NO: 7608 - DNA, 201 bp, Homo sapiens
aggggaacatcacacaccggggcctgttgtggggtggggggagggggggatagcattaggagatatacctaatgtaaatgacgagttaatgggtgcagtayaccaacatggcacatgtatacatatgtaacaaacgtgcatgttgtgcacatgtaccctaaaacttaaagtataataaaaaaataaataaaaataaaaaaa

SEQ ID NO: 7609 - DNA, 201 bp, Homo sapiens
gaaggggaacatcacacaccggggcctgttgtggggtggggggagggggggatagcattaggagatatacctaatgtaaatgacgagttaatgggtgcagyataccaacatggcacatgtatacatatgtaacaaacgtgcatgttgtgcacatgtaccctaaaacttaaagtataataaaaaaataaataaaaataaaaa

SEQ ID NO: 7610 - DNA, 201 bp, Homo sapiens
cagcacatcacacttattccaaaattgaccacatagttggaagtaaagcactcctcagcaaatgtaaaagaacagaaatgataacaaactgtctctcagaycacagtgcaatcaaactagaactcaggattaagaaactcactcaaaaccgctcaactgcatggaaactgaacaacctgctcctgaatgactactgggtac

SEQ ID NO: 7611 - DNA, 201 bp, Homo sapiens
tggctaattttgtatttttagtaaagacagggtttctccatgttggtcaggctggttcctttcctttttaaaatagaaaatgtaggccttaggctcagagmaaatgaaggcaacagttaactaccaggaatttcagaattattttgttatacagacagacacacaattttttttgttaccttctatttgtggcaagtaata

SEQ ID NO: 7612 - DNA, 201 bp, Homo sapiens
ataaccttcagtttaatgccagttgctaccaaagccacacctggaccttgtcattatctgaaagtcataaactagacctcttgctctcattgccgttgctrtccttccaaatcattaatttagttaatcccactatagctatttagctcatcaggggctatttagctctgttcccttgttgcatgactttttttttttttt

SEQ ID NO: 7613 - DNA, 201 bp, Homo sapiens
gctgatctcttagaagtacaaagtataatggtggttattggaggctggggtgtttttcagggagaagaaaatggggaaatcttggtcagatgacataatgmcagttagatagcaggaataaatttcaacagctctattgtacagcaaggtgactatagttaatgacaatttattgtattcttaaaaaacataaaatttgtg

SEQ ID NO: 7614 - DNA, 201 bp, Homo sapiens
aaagaaaaagaaatttaaaaagaacggagtaggattcttcctcctcaactgtggttaaaatgggagaaaaactgcagtgtgatacatgtcatatattctgkggtatttttgtaatctttctctgtgttgactcaattcaataagcttcaatttttcttattaatatattaatgatgtgagaaaaatattagagaaattatt

SEQ ID NO: 7615 - DNA, 201 bp, Homo sapiens
aaagtgtgtgaaaaggaaaaatgatttaaacatatgatctgatctacagttaatccattgctaccatttaaattgcagatttaaatggtaattgtcattargtgaaatgaaatatttaacttacatctccaagtagtaaaaattataaaattaaatacaccaagttaaaataggtagacggtaaagatttttctcattcct

SEQ ID NO: 7616 - DNA, 201 bp, Homo sapiens
caatcaacagagtaaaaagacagccgatggaatgggaggaaatttttgcaatattgcatataactgataaaggggtaatattcagaagtataaagaactcytacaactcaatgacaaaaatcaaacaacccagtataaaaatgggaaaagacttaaatagacatttctgcaaggaagataaacaaatggccaaaaagcaca

SEQ ID NO: 7617 - DNA, 201 bp, Homo sapiens
aggaggtgaaagacatctgctgaaaactgtaaatgttgctgagaagaaattaaagaagacacaaatggtaagacatcccatgttcatggattagaagacawtatttttaagacatcaatactaccgaacaatctaccatttaatgtaatccctatcaaaatcccaatggtgtcttttgcagaattagaaaaatctatccta

SEQ ID NO: 7618 - DNA, 201 bp, Homo sapiens
aattaagacaattttatgtataatagcatcaaaaaagaacaaaatactaagaataaacttaaccaaggaggtgaaagacatctgctgaaaactgtaaatgktgctgagaagaaattaaagaagacacaaatggtaagacatcccatgttcatggattagaagacaatatttttaagacatcaatactaccgaacaatctac

SEQ ID NO: 7619 - DNA, 201 bp, Homo sapiens
agaagaaattaagacaattttatgtataatagcatcaaaaaagaacaaaatactaagaataaacttaaccaaggaggtgaaagacatctgctgaaaactgkaaatgttgctgagaagaaattaaagaagacacaaatggtaagacatcccatgttcatggattagaagacaatatttttaagacatcaatactaccgaaca

SEQ ID NO: 7620 - DNA, 201 bp, Homo sapiens
tacactaacaatgaacgatccaaagaagaaattaagacaattttatgtataatagcatcaaaaaagaacaaaatactaagaataaacttaaccaaggaggkgaaagacatctgctgaaaactgtaaatgttgctgagaagaaattaaagaagacacaaatggtaagacatcccatgttcatggattagaagacaatatttt

SEQ ID NO: 7621 - DNA, 201 bp, Homo sapiens
tgaacccgggaggcagacattgcagtgagccgagatcatgccgttgcactccaggcgacagagcgagactctgtctcaaaaaaaaaaaaaaaaaaaaaaargaagttgatgttctttctcctgaagttcttggatcttgagataatcatacaataagttaggattatcagtagatataaaaagatcaatgatagtttctaa

SEQ ID NO: 7622 - DNA, 201 bp, Homo sapiens
aaaacattttctcccacttatcttgttcactacagtacctagaagaatatttgatgaatgaattaaatctctctataaatttagttcaggcccacataaaraaatatgagaataaaaaagatttttacagattttaataaacttgtctgaactctgttactttcaaaaagaggatttaattagatattttaagatatatga

SEQ ID NO: 7623 - DNA, 201 bp, Homo sapiens
cccagcaccttggaaaagttcatatcctgtgtacattttgcatttctgattaaaaagtataaagtgaaacaaaaacattttctcccacttatcttgttcamtacagtacctagaagaatatttgatgaatgaattaaatctctctataaatttagttcaggcccacataaagaaatatgagaataaaaaagatttttacag

SEQ ID NO: 7624 - DNA, 201 bp, Homo sapiens
ctcacgcctgtaatcctagcactttaggagatcgaggcaggaggatcacttgagctcaggagctcaaaaccagcctcagcaacatagtgagaccctgtctytataaaaataaataaataaataaataaacaaccaggaaaacaaataaattagattttaatttctgattcctactcttccaaatctctgcattattcactt

SEQ ID NO: 7625 - DNA, 201 bp, Homo sapiens
ttgtcactcaaaagcaatgttaaaatgatcagaaaatgaataatagtatcagtaagttttatagggagtgaccttaactcattggtaaaaaagtagaaaartcatctaatttttggagacaggatttgtttttcatagctacaaattaggttttagggccaggcatggtagctcacgcctgtaatcctagcactttaggag

SEQ ID NO: 7626 - DNA, 201 bp, Homo sapiens
ctggtcagagcacaggtagagaaacatgtaaaattcaagttactgtaatcatgtagtaggtaacatgtttagttcaggctgctaaacaataaaacaagggygttctcacaagaatgagccctttatttttaataatttaagaaaagctagatgttaatcaatctggaatgttggagaggggattcctgtttttggttttag

SEQ ID NO: 7627 - DNA, 201 bp, Homo sapiens
gggcgtggtggcaggcgcctgtagtcccagctacttggaggctgtggcaggagaatggcgtgaacccgggaggcggagcttgcagtgagccgagatcatcrcaccactgcactccagcctgggcaacagagcaagactccgtctcaaaaaaaaaaaaaaaaaaaaaaaagacttccttgtcaagcatatttagatatttgg

SEQ ID NO: 7628 - DNA, 201 bp, Homo sapiens
agaggcagagaggcagatacagagaattacaacttagagcagaaaccctttgcaggaaccagttatggggtaggaaaacctgaactgcaatgatgaattaytggagctcagtgtggcaactctgagagttaaaaacttcggagacctagtcatacagtggccgccacacttttgtattttaccttcaggagctctaccaag

SEQ ID NO: 7629 - DNA, 201 bp, Homo sapiens
ttgtatttctgtacagggaataacaatactcttttatattgaaggctaactaactctgaaattattgatatcttttttacttcctaattcctgcagattgkactttctgctctcatcatgaatgccccattagtctcatccctaacttctttgtggctttgtggtcattctaccaggctttgtggtcattctaccagatct

SEQ ID NO: 7630 - DNA, 201 bp, Homo sapiens
tacaaacctcaatgttaatagggaaaataactcactgattgttggtaattaatctgaatatcttgtatttctgtacagggaataacaatactcttttataytgaaggctaactaactctgaaattattgatatcttttttacttcctaattcctgcagattgtactttctgctctcatcatgaatgccccattagtctcat

SEQ ID NO: 7631 - DNA, 201 bp, Homo sapiens
tcattacaaacctcaatgttaatagggaaaataactcactgattgttggtaattaatctgaatatcttgtatttctgtacagggaataacaatactctttyatattgaaggctaactaactctgaaattattgatatcttttttacttcctaattcctgcagattgtactttctgctctcatcatgaatgccccattagtc

SEQ ID NO: 7632 - DNA, 201 bp, Homo sapiens
gaacaccacttaaacaaaggacattggttaattgactctctaaagtaatatatatttatctttccctttaattttattaattttttttttttgagatggartcttgctctgttgcccaggctggaatgcagtggcgcaatctcgactcactgcaacctccacctcctggattcaagcgattgtcctgcctcagcctcccga

SEQ ID NO: 7633 - DNA, 201 bp, Homo sapiens
aagcacacattcataagctctatcatcaagacagaatcacagtatagaaatttgagacagagatgatcatatttagatattgttaatttttcacagattgyattaacaatggatagaagagaggccaaacatcattcaatctacagacatgttatttccctcatttagatgatgatttttggattgaaaatgtcaaaggtt

SEQ ID NO: 7634 - DNA, 201 bp, Homo sapiens
agtttctagctataacaattgttgaaaaaacaaatttaattttttcttttgcctctctgctcatgtctcactgaatagaccagaatttttagaacaatgtkaaataatgaataaagcaggcattcttgacgtgttcctaattttaactggagagaaaagacactggagcagaacagcaaatttaaatatgccaatttggat

SEQ ID NO: 7635 - DNA, 201 bp, Homo sapiens
ttctatgttttacatttttaattaatattctgtctccttcaactagaatgtaagttccttgatggcatggtctttgttttttcattggcctctagaacagygagtgacacatagctggtgctcagcaaatatttgttgaatgaataaaaactgtgatcaattatttgtaatattaaaaaattacaacattctaaaacttta

SEQ ID NO: 7636 - DNA, 201 bp, Homo sapiens
tatataagtgtatatatatacttataagtatataagtgtatatatatacttataagtatataagtgtatatataagtgtatatatatacttataagtatawgtgtatatatacttataagtatataagtgtatatatacttataagtatataagtgtatatatacttataagtatataagtgtatatatatacttttaagt

SEQ ID NO: 7637 - DNA, 201 bp, Homo sapiens
caaacagctcaagtcttatttccctggaagtcacccttgacttctgccttctaccttactccctctgcttatttgaccaaccattaattctatgcctctaraatccccctcaaccaattccactaacatatcctgatcctgatcaccaagctctttcaccctgactgcagcaatagcaatcctctccacttactgctgtcc

SEQ ID NO: 7638 - DNA, 201 bp, Homo sapiens
gctctacttttgaactgagttcattctaaaagaatcaaaggagagagtaacaatttagaatctgatttgaagtctaagggattaaaacagaacttatatayattagtttaaattcatagtaaaattcaaagtcactaatattttaaaaacataattcccttatttctgacatcatgttcagttacatatgttgcatgtttt

SEQ ID NO: 7639 - DNA, 201 bp, Homo sapiens
cccaaagtgctgggattacaggtgtgagccaccatgcctggccagttcctacattctgatgagtttttttttttaccagctgtagtggcctctccaacctyattggggttggtaatggcctttccacctttgtctgaagggttaaccctgcattgcctgaggaaataataatggcctcccctgaggcagctgccaagcaag

SEQ ID NO: 7640 - DNA, 201 bp, Homo sapiens
cctccctaattgtgtaaaccaattcccctaataaacatcctctctctctctctctgcatatatatatatatatatttttttttttttcctcaagcttcagkggggttacatcccaataagcccattgtaaattgaaaacattgtcagttgaaaatgtatttaatatacctaattcactgaacatagagcttagccgagcct

SEQ ID NO: 7641 - DNA, 201 bp, Homo sapiens
catcttttctttctttctttttttttttttttttgaggcagtgcctcactctgttgcctaggctggtgtgcagtggcatgatcatggctcactgcagtatygatctcccaggctcaagtaatcctcccagctaagcctcccacatagctgagaccacaggtggatgtcactgcacctggataatatattaaaaaaacactt

SEQ ID NO: 7642 - DNA, 201 bp, Homo sapiens
tctcactatgttgtccaagcttatcttaaactcctaggctcaagtaatcctccaaccttggcctcccaaagtactgggattacagactcacacacctggcmaagtaaaccatttttttttcccactgaattgaatgttactgttatcatacacctgtactaaattctcatacttaattgggtatatttctgaaccctctat

SEQ ID NO: 7643 - DNA, 201 bp, Homo sapiens
aatgatagtagcatgtattttattatctgctagactattttctttggtcattgaagattgaccaactttccttttgcttctttaaattactatattggtaratggatttcatctttcctctattttatctgtagcagctgactgaggtctgtaatgccctacaaatcaaaacactgtatactagtgatctagttctcatta

SEQ ID NO: 7644 - DNA, 201 bp, Homo sapiens
agtgaaattttgagtcatcctgctcagtcctgcctgggatgtaaatcatcctcttgtccagcatacactacttgttcacttgatagccaccctgattatcygattgctgctgtattgcagtacttgtgtccaagtaacccttattttaattaataatggccccaaagcacaagagtagtaatgctggcaatttagatatgc

SEQ ID NO: 7645 - DNA, 201 bp, Homo sapiens
ccactttttcctgtaattcaccatcagaatttcctaaatcccaatgaatatttgctacttgagctgtcttctctgaaatattctgtctactaacagtttaytggtactcagttgaatataagcagtttttgattcctcttttatttccggtccctttatgattagaggaaaattaataaaacttaacatgaacaccgtcat

SEQ ID NO: 7646 - DNA, 201 bp, Homo sapiens
ctacaataaataacctgtggcatatgtatacgttgtgtttgtatatacacacacactcctttaacagtatatatgtaggctaaagtccgtaaggaaaatgmtaattgcagacttgaacttttcaagaacagtaccaaattatctgcttaaaaggctgtatcatttcattcttgccaacagtagtacttggttcaaagaagg

SEQ ID NO: 7647 - DNA, 201 bp, Homo sapiens
tttctaatttactcagagttaagctttggtcttttatttgtttctttagttgctccatttcagacacttttttctgtgtctcattgacatctttttttaaygtaataagttgatgttcatttgccttaagttcttgaatcttaagataatcataaaataatatgttaggtggctttttagggacagataaataatagtttc

SEQ ID NO: 7648 - DNA, 201 bp, Homo sapiens
cacaacgctgcagtgaacactgtatttttgcccaaatatgtgaatataatggtagggtaaagagagaacacaactcactctagctttggtttcttgcaggstttccttgagttggtctctctccagtttgagtgtctcctctactcttcttagattatctctttctttcattacagatttcatttcttcaaggttttcatg

SEQ ID NO: 7649 - DNA, 201 bp, Homo sapiens
ggatggtacatcacaatcttgttgaaggtgctgtattttaattagcaattccttttgcttttccacttcatcaataaaatccatttcaaatttattgatgsattcatgttgttcttcttttatttttgtaacatagcttaacacatacttgcagaaaaaaattaaacaaattggtaaatgaaaattttgtcacatgtagag

SEQ ID NO: 7650 - DNA, 201 bp, Homo sapiens
agtaatcaaaacaatgtggtgctagcataaagacagacatataaaccattggaacagaatagaaagaccagaaattaatgcttgtgtatatggtcacagtrtcttcaacaaggatgccaagactactcaatggggacaggatgatcttttcaaaaaatggtgttgggaaaacaatagccacacacaaaagaacgaagttgt

SEQ ID NO: 7651 - DNA, 201 bp, Homo sapiens
taccaagttattaatgcctactcttatgtgctggaagaagccacatatacatgctgatccacatagtagaaatccctgctttctaatcacaactgggtctscagtattacaagaaaaacaacaaattacaaatagacatgaccttatccaaacattggttttgtgcctttctctactgattgtggacttctttgttttttc

SEQ ID NO: 7652 - DNA, 201 bp, Homo sapiens
tagtgttgggtgtggcaaaaattatgaaggtaagatacaaataatcgaagtctggcaaaattaaattaagaaatgctatttagtagacaacatatcgattrtaacaggcgagttaattaaaaaaaactatgcttaattttagtaggtaatgttttcttcttcaagctgatcttcccctatattaagctgagataaaaatca

SEQ ID NO: 7653 - DNA, 201 bp, Homo sapiens
accgatttcatttattcctcttcctgctttttctccctagcacttattacctacatatcaccacttaacatcctacattttcaactttactttctgtctcstcccattagaatggaagagccactgggcaatgacgggagtgtctgtgttgtacaaagtcactaaaaaaaaattgataaatatttgtagaatgatcttgag

SEQ ID NO: 7654 - DNA, 201 bp, Homo sapiens
ttggagaaatttaattataatggatggtaaaagttgcgctttttaatgttcttttaaaaactggacttagtttctgcatgtgtctatatgaggtctatggyaaaattgtccctccttgttcattgtttcagcaacttctaatgctggctctaacaatctgtaatcacatctagctttgttcctgctttactaataatgccc

SEQ ID NO: 7655 - DNA, 201 bp, Homo sapiens
ggaaaggaggttaagacaggagagatgtgaagaatgaaaaatggcaacgtgattcaccgtgtttggtcatgaagatggtgtatttcacctcagagttggaraagtttactccccattttgtcctaaaatgaactattagacaaaccatagttaaactgagaggtaataaagttttatttggaattcttcaatttgaaattc

SEQ ID NO: 7656 - DNA, 201 bp, Homo sapiens
agctattataatgaatttatatgtgtgattctttttagtttttatcttttccacttagatcatatgtattttcacatgttgttatgtaacctacaaataakttttagtagctgcttgattctctagagtagatataaactgtactttatttagcaacccccttattgttggcaatatgcatgagcttctagaagataacag

SEQ ID NO: 7657 - DNA, 201 bp, Homo sapiens
tggcaagagtgcaggtgcaagctaaaccatttaagcattatgaactattcatttatatcctttgcccagttttttgttggtttcttttaagcttttaaggyatctggactttgtatcagttacaaaagggttttcccactgtaagttgacttccaacaatttttagtttttttatattgaaatttttgagctacttataat

SEQ ID NO: 7658 - DNA, 201 bp, Homo sapiens
tggagatttttgagactaggcaggtaaatatgtattaccagttaaggaggctaatttttcttgcacagtgtccactacagatgacacagatacataataaragggcaaagtggtaatgaaggcagcatgagtgaaggttaaagatgagaacaagcattcatattcaaagatactcagaggcccaatctatgagggaggagt

SEQ ID NO: 7659 - DNA, 201 bp, Homo sapiens
cacatcaagctaaagaatttaggccctaaaaatgcagaataaagcaatatggtaaaagatagaaaaggagcaagaaagaaacagcaataatttagtgtggmaagaaggaagtgaaggtttactaatgtggaatataggaatgtttgcataatgcatatattcgcttattcagcaaatctatattagacataaaataggtat

SEQ ID NO: 7660 - DNA, 201 bp, Homo sapiens
ggcttttctcctgtttctctctctctgtaactcgtttccattagctgtggcttcctcagaggttgaattagggaaaataaataccgaggactgaaaaactyattgagtaatgggttgatactttttttttcttcttttttttggaaacggagtctcgctctgtcaccccaggctggagtgcagtggtgcttatctctgctc

SEQ ID NO: 7661 - DNA, 201 bp, Homo sapiens
accctggacactccttggctctggactatgcacctcacaccataccaagttattaatgcctactcttatgtgctggaagaagccacatatacatgctgatycacatagtagaaatccctgctttctaatcacaactgggtctccagtattacaagaaaaacaacaaattacaaatagacatgaccttatccaaacattggt

SEQ ID NO: 7662 - DNA, 201 bp, Homo sapiens
ggtagacggtaaagatttttctcattcctcgagtatggtgatacttgacattttccattctccctctaaaacatactatttaagcatctcatgttactatrttcccactagaaaattatctacaacttgggtgatttttgacaaaagctttaggaaaaccagggaaatggctccatgtcctaaggccaatttgacttttat

SEQ ID NO: 7663 - DNA, 201 bp, Homo sapiens
ctacaaagtaaacacggaatctaaacttactgatgtattcaccaaaattacctctccctgatatattattctatacattataaatgcctgagaattgacasttttaaaatcagtcttgttaccctaatgaagtttaccaaggcaaaacagaaactttacaaacattgtgaatactaagatctgctagtaaagagctagagg

SEQ ID NO: 7664 - DNA, 201 bp, Homo sapiens
ctcaacagctatttaaagcaatgtttctcagagtataagtaccataagtaactttaggtgggtacaccaaggtgaccattagataacattgaatccttcaytgagaaagctaccctactgatatttctcatttttcctttccttttttttttttttgttttttgttttgagacatagtttcgctcttgttgcctaggctgg

SEQ ID NO: 7665 - DNA, 201 bp, Homo sapiens
attcaggaagccattgttttcaagagccaggaagaaaactcttcacttaggataccgtaagaatccttttttcttgggctactttataaaacatacatacsacagagtttcaggctctttaaaaacccatctttacactgatctaactgctcagattaattttgaaacaggcaacgtgcagaaaaaaacaacatctaaaaa

SEQ ID NO: 7666 - DNA, 201 bp, Homo sapiens
tctggaaccttcttaacattaggttgaatattcagagtagaatatcagccctgctgtgccattaacaaagctcttctcctgcccagacatggacaggacawcaaatccagctgggatggaagggaaaagttgttcttctgcatttcactaggttcaatttacaaccttgagttgagctggctctgtacccagtcaacccct

SEQ ID NO: 7667 - DNA, 201 bp, Homo sapiens
ctccaaataggctaaaaaatcaacttacattaaaaaaaacaatttgttataaaaatttgctagttcaacattctgtggacccacccaaaaatcccttctargcactaaacaagtagatttttcaaagtcccttcattactaagtcagtttctctaattttcctgttaatgttcatctggaaccttcttaacattaggttga

SEQ ID NO: 7668 - DNA, 201 bp, Homo sapiens
aagtttacatttcagctccactgtactccacacctacttcctttactaaaatttgtaaagcattttagagcctggttttgcaaatgagtctcatgcatgtrcaacagtcttacccacgatgacctaagctttcctcctataccacagtctctgctctacccctgtaacctatgcaaaggatctgtcttcaaaaatacattc

SEQ ID NO: 7669 - DNA, 201 bp, Homo sapiens
tactgtggtgcccagagactagtggaagctgatgcaggcttcaggaaagagtgataaaggtggagctgcagaaatgtctatgggtagctgaggaggagagsgctgaggcaggatgggcaggaccttgtagatggttgctgcagggatggtgggcctcaccaatttagggcagtgtttcctaagaacaccttcttcagaatt

SEQ ID NO: 7670 - DNA, 201 bp, Homo sapiens
ggagtgcagtggcgcaatcccggctcactgcaacctccgcctccctggttcaagcgattctcctgcctcagcctcccgagtagctgggactacaggcgccygccaccacgctcagctattttctgtttttagtagagacgaggtttcaccatgttggtcaggctggtctcaaactcctgaactcaggtgatccgcctgcct

SEQ ID NO: 7671 - DNA, 201 bp, Homo sapiens
agcacatttcaagccacaacacttccaaatatcttgtaacctaagctctggctaactaagggtaatttagcttatcagcagtacccaaatcaaatgagctmttctgaagatacggattcagagaaatcacaaaggctcatgtgcttcttcattaaacatttgtctattaatttccccagctattaacaattgttgttaata

SEQ ID NO: 7672 - DNA, 201 bp, Homo sapiens
ctccatcaatgatgacagggttaccagttacataagcagactgcagtgataaacacaaggagacagaacaattaaccaggtttgatacaggctgtattttsaaattttcctgtgactaggataactaaacaatttacccttgtcctaacaggaaacctcacttaaacacttaattcagggaaatccaaattaacatttggt

SEQ ID NO: 7673 - DNA, 201 bp, Homo sapiens
agggcctgccttccttcccaccatggagatcctaaaatcacaagctccagcctccatcaatgatgacagggttaccagttacataagcagactgcagtgayaaacacaaggagacagaacaattaaccaggtttgatacaggctgtattttgaaattttcctgtgactaggataactaaacaatttacccttgtcctaaca

SEQ ID NO: 7674 - DNA, 201 bp, Homo sapiens
tatttctacatcccctacatggctgaaaatttaatagatgctcagaaactaactttgctaactatttgtttcatgtttctgggtgtattcttacatgaggrtggaagactatttataaaatagatgatcagaaattattgctttaatttaacttccatacattgtaacacataatacagctttgtatcagtaccatctgtc

SEQ ID NO: 7675 - DNA, 201 bp, Homo sapiens
gacagcaggaaccacatgattatttctacatcccctacatggctgaaaatttaatagatgctcagaaactaactttgctaactatttgtttcatgtttctrggtgtattcttacatgaggatggaagactatttataaaatagatgatcagaaattattgctttaatttaacttccatacattgtaacacataatacagct

SEQ ID NO: 7676 - DNA, 201 bp, Homo sapiens
tttgcctatgtgattcctatttcaagagcaacagtgccctcaggtggcacagatttagaattctcaagggaaatcaaaattgcaaggaaaacaagtgtctsaacatctcagagcagcaaagtgatactgctagtgttctaacatactgagagatgttagtttgttgtaagagagacgttaaggcagaacaaaacaaacccg

SEQ ID NO: 7677 - DNA, 201 bp, Homo sapiens; identical to SEQ ID NO: 7427

SEQ ID NO: 7678 - DNA, 201 bp, Homo sapiens
ctggaagtgattgtgtaacctatcatcctcattttttagctaaaagaaatatgtactgagagggtacaagtgccatctctatggcacatggccaattaggrgcagggcgcagactgcacctaaggacttctgatgatagagtccaagaccaggattcgattttgtcaaggtcactttaaacaagaggcactaataccatat

SEQ ID NO: 7679 - DNA, 201 bp, Homo sapiens
ttcctacctttgttcatttatgatggtgtaaaattttaaaattaggatctacatacagaacaatgcagaattatataaaaatatttgaatattgaaaaatraagtggaaattattattattatttaggtacagggtcttgctctgtcaccctggagtgcagtggcatgattacagctcactgcagcctcaaactcttgggc

SEQ ID NO: 7680 - DNA, 201 bp, Homo sapiens
aatataatttataatatatacaatgtattaatatgtatatgtataatatataataatatatgtataatacatataatatataattatctataatgtgtattatattttataatttataatatattataaataatatgtatatggtttattttgggggaatatagaaataaaagattcataaagaaagggaagacttgaaat

SEQ ID NO: 7681 - DNA, 201 bp, Homo sapiens; identical to SEQ ID NO: 7446

SEQ ID NO: 7682 - DNA, 201 bp, Homo sapiens; identical to SEQ ID NO: 7485

SEQ ID NO: 7683 - DNA, 201 bp, Homo sapiens; identical to SEQ ID NO: 7486

SEQ ID NO: 7684 - DNA, 201 bp, Homo sapiens; identical to SEQ ID NO: 7578

SEQ ID NO: 7685 - DNA, 201 bp, Homo sapiens; identical to SEQ ID NO: 7579

SEQ ID NO: 7686 - DNA, 201 bp, Homo sapiens; identical to SEQ ID NO: 7580

SEQ ID NO: 7687 - DNA, 201 bp, Homo sapiens; identical to SEQ ID NO: 7581

SEQ ID NO: 7688 - DNA, 201 bp, Homo sapiens
tttataatatatacaatgtattaatatgtatatgtataatatataataatatatgtataatacatataatatataattatctataatgtgtattatattttataatttataatatattataaataatatgtatatggtttattttgggggaatatagaaataaaagattcataaagaaagggaagacttgaaattttgttt

SEQ ID NO: 7689 - DNA, 201 bp, Homo sapiens
ataatttataatatatacaatgtattaatatgtatatgtataatatataataatatatgtataatacatataatatataattatctataatgtgtattatattttataatttataatatattataaataatatgtatatggtttattttgggggaatatagaaataaaagattcataaagaaagggaagacttgaaatttt

SEQ ID NO: 7690 - DNA, 201 bp, Homo sapiens
aatatataataatatatgaataatacatataatatatagtaatataatttataatatatacaatgtattaatatgtatatgtataatatataataatatatgtataatacatataatatataattatctataatgtgtattatattttataatttataatatattataaataatatgtatatggtttattttgggggaata

SEQ ID NO: 7691 - DNA, 201 bp, Homo sapiens
taatatataataatatatgaataatacatataatatatagtaatataatttataatatatacaatgtattaatatgtatatgtataatatataataatatatgtataatacatataatatataattatctataatgtgtattatattttataatttataatatattataaataatatgtatatggtttattttgggggaat

SEQ ID NO: 7692 - DNA, 201 bp, Homo sapiens
catataatatataataatatatgaataatacatataatatatagtaatataatttataatatatacaatgtattaatatgtatatgtataatatataataatatatgtataatacatataatatataattatctataatgtgtattatattttataatttataatatattataaataatatgtatatggtttattttgggg

SEQ ID NO: 7693 - DNA, 201 bp, Homo sapiens
acatttctatgattttaaaaacacagactatgattcttcgtgacactatgtagggactctggatgaatcacccagcattctcaaggacatatattttagtyacattgcatttatatgatgctttatggattttaaatacatttatgcatatgatctcagctaatcctcacaataaccctgagatgtagataaaatcgtaca

SEQ ID NO: 7694 - DNA, 201 bp, Homo sapiens
aacaaaataacgttcttaaaaaaatgacagctgttttcaatactctcaaaatactgctcttctgtaatgagactatatatcatttctgagtttgagttacyaaactccaaataataagagaaaaattggttgtttcaacacttttcctactaagagtatgctagtgctttcataaatgtcaaaccataccctgccattata

SEQ ID NO: 7695 - DNA, 201 bp, Homo sapiens
atggccctgtaaagcctccagtcaaaggttttgctaggaatctttgccaaccgaagaagcacttccagaacaaatgccgaagcacagagcagcctttctaygcactctgaaaacctcctcttagctggccttcctgtctttctgggaccagattttggggtcaaagccttaacatttgataaactgtaatctcaaactaaa

SEQ ID NO: 7696 - DNA, 201 bp, Homo sapiens
gtaaacttaaagtccatcttgactcctccaataacccatccgtccctcttccttcctctctgtccattttccaagttgaataataagggtcctttctgagyaatggctttatagtaaagaatgactggtgtacattagatgtttctcagtaagccagcagtaataactgaaaatgggctcatttgaagttcttacaaactt

SEQ ID NO: 7697 - DNA, 201 bp, Homo sapiens
ctcaggcaaaaccttagaataaagccacctaagagacattacattagtgctgccccctaacacttgcactatccattcaaccaagttcaaccgaggtcccyctgctgcttctagagcccctagtcagtacctgttcccatgctgccttcccagtccaggtcaggagctgtcgtcatggtgtcaggctctccctggctcccc

SEQ ID NO: 7698 - DNA, 201 bp, Homo sapiens
atgtgactgcactcactggcatttcccagggggattaccaccttcccatggtacaagaatgtcagcaagactacgagtgaatgctgacttaaatgaaatgygaataaatgttgttattgtgtgttactgatgttgggaaacttactccattcaacacataatttttgaatacctactgaggccaggtattgtgctaggtcc

SEQ ID NO: 7699 - DNA, 201 bp, Homo sapiens
cattttatctgttgcaactattatactaaactctgcctttgtagcatgaaaacagccataggcaataacataagcaaattgggtgtggaagtgtttcagtraaactttgcttacaaaacaggtgtgccttactcacctgggcacacacagttgcacctgatgccctgctggatgaaatctgcagccacagattttgtgagg

SEQ ID NO: 7700 - DNA, 201 bp, Homo sapiens
gagggatcggcacacctttcttggtaaagaggcagacaaaaaatatttatggctttgagagtcattttatctgttgcaactattatactaaactctgcctytgtagcatgaaaacagccataggcaataacataagcaaattgggtgtggaagtgtttcagtaaaactttgcttacaaaacaggtgtgccttactcacctg

SEQ ID NO: 7701 - DNA, 201 bp, Homo sapiens
ttaataaacacatctacggttattgtgaaaatgagacacacccctatagttattaagaaaaggaaagttctgcttttcttctttgctttgtatgagggatyggcacacctttcttggtaaagaggcagacaaaaaatatttatggctttgagagtcattttatctgttgcaactattatactaaactctgcctttgtagca

SEQ ID NO: 7702 - DNA, 201 bp, Homo sapiens
ccttcaggtttgaaaggtccccaggtcatattgaaatgtttccctttcacacaccaccccccattatcaattgtgcactaccaagggaaaccttgatcctrgatatgcaatcatttctttttaaagaatattataatccttattagataccttaagttccttttagattggtagaaccaggtaaaagtacatatcaattta

SEQ ID NO: 7703 - DNA, 201 bp, Homo sapiens; identical to SEQ ID NO: 7599

SEQ ID NO: 7704 - DNA, 201 bp, Homo sapiens
cctggtggaacctggccacttgggtctccagtggttcctgctggactaacaaccttgattcatttatttatttgacaaatgtttgtggagcacctctataygctgaagactcttctaagacacagcaaggtgggggaaaaaagcaagcaaacaaaccaacccaaataacaaagatatccccaaatctttgccctaatggat

SEQ ID NO: 7705 - DNA, 201 bp, Homo sapiens
gtaaactgcaattaaaatcctttggtgttggagtttggttcagtggggtgaagaagtggtggtacacacctaataatctgggtactctcttagggtttctyatgatgatgtgtgattttagagctaagctgtctccagccacatgtggctactgagcacctgaaatgcagctagtctgaaatgaaatgtgctgcaagtgta

SEQ ID NO: 7706 - DNA, 201 bp, Homo sapiens
gtaatataatttataatatatacaatgtattaatatgtatatgtataatatataataatatatgtataatacatataatatataattatctataatgtgtwttatattttataatttataatatattataaataatatgtatatggtttattttgggggaatatagaaataaaagattcataaagaaagggaagacttgaa

SEQ ID NO: 7707 - DNA, 201 bp, Homo sapiens
ttgaatgaaagtcatagaaaactttctgtaaggaaagtgaaactaaaaagttatgaattacccagcaacattaaagagaacatcaagtctctcaacttcaytggcaaactgatcaatttgtttcttctttgtgacatcaaggacacgagtttgaatacctgaaaaataaaacaagaggcactattcctaaaaatgtttagc

SEQ ID NO: 7708 - DNA, 201 bp, Homo sapiens
ttggtagtcttagtttctcatcatcagttgccataactcttaggcagattccaaaagaaaatgaagattaataacaaaacaaaacaataaaacaggaggcmtaggcacttctttacattcctctcttgtgtatgttgaatatgtgtatccttgcaaagagaagaaatggtatctcagcagtaactatttcattttaaactc

SEQ ID NO: 7709 - DNA, 201 bp, Homo sapiens
taacatgtgattaacaggaaggagatgattggtgagttttcttcgtaaccaggttcactgtggataggaagggcctgccttccttcccaccatggagatcytaaaatcacaagctccagcctccatcaatgatgacagggttaccagttacataagcagactgcagtgataaacacaaggagacagaacaattaaccaggt

SEQ ID NO: 7710 - DNA, 201 bp, Homo sapiens
cgtcggcgccggtacaggctccggagtaagcatgggttggtccggggcccgcagcggcagccccgtgtgccctccgccgggtttcaggtccggcggcgcgsgtgcagagccgcgtgcgatgcctggtgcgcgtggcttcccccggaaaggtggcgccaggccgaccatgggcccacgtcccggggcctcggagcggcaccg

SEQ ID NO: 7711 - DNA, 201 bp, Homo sapiens; identical to SEQ ID NO: 7639

SEQ ID NO: 7712 - DNA, 201 bp, Homo sapiens; identical to SEQ ID NO: 7640

SEQ ID NO: 7713 - DNA, 201 bp, Homo sapiens
cctctcttgtgtatgttgaatatgtgtatccttgcaaagagaagaaatggtatctcagcagtaactatttcattttaaactcacagatccaactatgccakattgtgacataatccacattttgtactgctgtccttgtccttcaacttgacttcttgctgatggctcagatcaactgtctttgtgaagcattccacaaac

SEQ ID NO: 7714 - DNA, 201 bp, Homo sapiens
tgtatccttgcaaagagaagaaatggtatctcagcagtaactatttcattttaaactcacagatccaactatgccagattgtgacataatccacattttgyactgctgtccttgtccttcaacttgacttcttgctgatggctcagatcaactgtctttgtgaagcattccacaaactcacaggcagttatttccctgtat

SEQ ID NO: 7715 - DNA, 201 bp, Homo sapiens
gaagaattagtggctcagatcgaagtggtctttctttgagcaaattaaatgagaacttatccctatcttataaatgtagcatcttagcacatatatgccayaaactctctaaaatgatattattttgatgagcaaattgtggccaaatgtgattgagggtaatgaactccttgggaagaatagtgcttacttcatcagaag

SEQ ID NO: 7716 - DNA, 201 bp, Homo sapiens
ctgctcttgctatgtgaggatacagcaagaagaggaccatctgcaaaccaggaagtgggccctaaccagaaactatatctgctggcacctttatcttgcayttcctagcctccagactgaaaaataaatgtttgttgtctatgacactccatctatggtaatttgttatagcagcccaaagtgactaagacagatgctaac

SEQ ID NO: 7717 - DNA, 201 bp, Homo sapiens
tcaagatgtccttcccctatccttcccctgccagagactgggttgctggtacctatacagtaatcagaattttgtctgagtgaggggtggagaagagcaastgttctggaataagagactgtttctatttgtgagcttcccctttatgtcatttccattatttattagaaatgactctgttagtcaagggtatccagtcaa

SEQ ID NO: 7718 - DNA, 201 bp, Homo sapiens
ggcaatccacctgcctcagccttccaaagtgctgagattacaggcctgagccactgtgcccagcccagatattgcactttaacctaccttatccttccttyagtacctggagaggacagcctctggtgctgagtttcctcactaccaccatcactctctccatgacccctgcacacattgctatgacattatttgtgtcct

SEQ ID NO: 7719 - DNA, 201 bp, Homo sapiens; identical to SEQ ID NO: 7654

SEQ ID NO: 7720 - DNA, 201 bp, Homo sapiens
taaatatcatatatttatatataatatttactataaatatcatatatttatatataatatttactattaatatcatatatttatatataatatttactatwaatattatatatttatatataatatttactattattatatatttatatataatatttaatattttatatatataaaatttttcgcagtaaagagtttaat

SEQ ID NO: 7721 - DNA, 201 bp, Homo sapiens
ttaatattatatatttatatataatatttactataaatatcatatatttatatataatatttactataaatatcatatatttatatataatatttactatwaatatcatatatttatatataatatttactattaatattatatatttatatataatatttactattattatatatttatatataatatttaatattttat

SEQ ID NO: 7722 - DNA, 201 bp, Homo sapiens
aacattattattctttaattcctacaaggtactcgaaaaccttaagtgaaaaagatttctatctttttatcttagcgcatttatggaaaaaatattaactrtcctgaatattttataattttgtaggaaaaatatgcatctattttttcttgacttcttttatatagtaataaaagttattttggaagctctttgtgtgtt

SEQ ID NO: 7723 - DNA, 201 bp, Homo sapiens; identical to SEQ ID NO: 929

SEQ ID NO: 7724 - DNA, 201 bp, Homo sapiens; identical to SEQ ID NO: 916

SEQ ID NO: 7725 - DNA, 201 bp, Homo sapiens
acctcacaccaagacctgaagccacacacctggtgtagaaagggcggagagtcttctaggtggatggaatagcatgtggggaagagtttgtggtatttgargagtagggaggagaccaggctgtccagagcagggcatagaagatgaattggaggctggacaggtataattatagggagactagcttgcaggtgtttatgg

SEQ ID NO: 7726 - DNA, 201 bp, Homo sapiens
taaatatgttgttttaagttactagatttctggtaatttgttatggtagctctaggggattaatataggctataacagttatcactgcactctgggaagcmcaaagtattggcatcgtcatcaggtatttacagatttttcattgtttctctcagtccagacacagtttaccaattgggtcagtttttattataaccagcg

SEQ ID NO: 7727 - DNA, 201 bp, Homo sapiens
ggcgtgatctcgtctcactgcaagctccgcctccctggttcacgccattctcctgcctcagcctcccgagtagctgggactacaggtgcctgccaccacgyctggccaattttttgtatttttagtagagacagggtttcaccgtgttagccaggatggtctcgatctcctgacctcaagatctgcccgccttggcctccc

SEQ ID NO: 7728 - DNA, 201 bp, Homo sapiens
tgggtggccccgatgccgggccggccgtgctttacgggcttgtaggtgatggagaactcgcccaggtagtggccgatcatctcgggcttgatctccacctrgttgaaggtcttgccgttgtagacgcccaccatgctgcccaccatctcgggtaggatgatcatgtcccgcaggtgcgtcttcaccacttcctgcttctcc

SEQ ID NO: 7729 - DNA, 201 bp, Homo sapiens
gtagagactgagaatcaccactgtagtgattgtatctgtgtggcaaatcatcttaaagatttcttgtatttggaaacaatgtctaataaagaatggccaaatacaaagttacactatacaaaaactatgtcatcaaaaattatattgttcaagtgaataattagcaatatgaaaatatgttcataaaatattaagtgaaag

SEQ ID NO: 7730 - DNA, 201 bp, Homo sapiens
gacctggggaacacagtctcaagaggtcctgagaaagtgtgccccagcggtcggaattacagtttgcttttagatattttagggaagcaggagttataggraaaggcataaatcaatgcatggaaggtatgcagtggtttgccccaaaaaggtgggataacttgaaacagaagcttagtttataggtggattcagagactc

SEQ ID NO: 7731 - DNA, 201 bp, Homo sapiens
agcctgtaaaatattttaaagaggtttattctgagccaatacaagtgtcaatgacctggggaacacagtctcaagaggtcctgagaaagtgtgccccagcrgtcggaattacagtttgcttttagatattttagggaagcaggagttatagggaaaggcataaatcaatgcatggaaggtatgcagtggtttgccccaaaa

SEQ ID NO: 7732 - DNA, 201 bp, Homo sapiens
tttgtaggaaaaatatgcatctattttttcttgacttcttttatatagtaataaaagttattttggaagctctttgtgtgttatcaatttgtctggggtarcaggggtaggcattgttgtgaaagtttctttgccatggtttttggtttgtttatttttcagcagagatagtcttttttcagtttcttgattatgttaact

SEQ ID NO: 7733 - DNA, 201 bp, Homo sapiens; identical to SEQ ID NO: 914

SEQ ID NO: 7734 - DNA, 201 bp, Homo sapiens
tttgggaatttttgatataatatgatccagattggggagaaaatgctactgtggttcattgttcataatttgcttttcgagtgttgaaatcctgagtattktttttttctgtatgtagatgttcaagttcactcatctaagactccttacccggagtggtgtttgcataatgtgatggtgatgatgataacaaaaaaacaa

SEQ ID NO: 7735 - DNA, 201 bp, Homo sapiens
tcttcacctggtaagttgggtggcttccaggacacctgattctcatggctcttctctctttcctggctgccccatcctcagtctcctttgctggttcttcctcatcttcctgatgacggcaggttagagtgctcaagcctcagtcttctgaccacttctttttttctacactcacttctttggtggtcaatcttatccagt

SEQ ID NO: 7736 - DNA, 201 bp, Homo sapiens
acgttggtcaggctggtcttgaactcccgacctcaggtgatctacccgcctcagcctcccaaagtgctgggattagaagtgtgagccaccacgtctggccrggacactttctttacttggcttctctttcttcacctggtaagttgggtggcttccaggacacctgattctcatggctcttctctctttcctggctgcccc

SEQ ID NO: 7737 - DNA, 201 bp, Homo sapiens
agctactgcctcagttctctgcttgccttactatgaacttttgaaatttttgtccatacctgcagtttctagttcctttcttcctgttctttctcgagccbgttccaattaggttttcatctcctgctccaccaaaattgtgcttaatatggtagctaatgactaccatgtcactaattccattggtcaattctcagtcct

SEQ ID NO: 7738 - DNA, 201 bp, Homo sapiens
tacttcaaacctacacttcaaaaggtcttttcaggacgtgaatgcatacaagtgcacaatccctgtacactggccagaaccggtccatggtcggtcttctwatcatgaaaaagttcctgaaatcagcccagtgaaagctgtagttctggctggtgcaacaggggttcagctggtcagcatctgtgaactgattaagttgta

SEQ ID NO: 7739 - DNA, 201 bp, Homo sapiens
atttaattgtattacttcaaatacatttaaatgtattacttcaaacctacacttcaaaaggtcttttcaggacgtgaatgcatacaagtgcacaatccctstacactggccagaaccggtccatggtcggtcttcttatcatgaaaaagttcctgaaatcagcccagtgaaagctgtagttctggctggtgcaacaggggt

SEQ ID NO: 7740 - DNA, 201 bp, Homo sapiens
agctggtttgcacaaaggatttaattgaagtgagtttaataaatggactattaacagaggtgcaacagccttaagggaactcggcaaagagtggtgaagaaccagggacaagcacagcaggaagccaatgccactcatagacgcgtagaagcaagtggtgatggtgttactggacccctgtgagagccacagctgtggaga

SEQ ID NO: 7741 - DNA, 201 bp, Homo sapiens
ggttgcctgcctccagaccctacctgccttaaaacaagtgttacagatgctatattattttcatatttattatttttaaatcaatttcattatatattccygagtgaattgtagcataatttatatttctccttaatagcaagctttgagagtttacattgaaactgtactagtgtgcattttgagcagataaattcaaga

SEQ ID NO: 7742 - DNA, 201 bp, Homo sapiens
tgcagatgacattttccacttctactattgatcataggtaccttcatggttaagaacatgcattttttgtcattgcaattttattcccaaatctattcatrtattcagcagtgaaccgaatacccgttatatgccagataccttgctaggctgggctgtgggtgatacctgttccacaagacaaatgtgggctcaaagaga

SEQ ID NO: 7743 - DNA, 201 bp, Homo sapiens
gacgagggagagggtgaggccaccaggcagtgagcgccctcggcggccgcgtgatcccgggggtggggcccatttctgagttggggccagctccccacccscaagaggccccacattccgggccagcagcccagaaagtccctccccgcaggcggagacagccccaagaagtcgacgccccggtcccgccgcccggccact

SEQ ID NO: 7744 - DNA, 201 bp, Homo sapiens
ctgaccaatcttaggttctacaatagtgatgttatctataggagcaactggggaagtcacaaattttgtgacctctggccacttgactcctgagcagtaasagattagagaaactgatgcaggtcaggggagccccaacgtggagcttagcccatgtaggtttttggctttgcccaggaaagaattcaagagcaagccaga

SEQ ID NO: 7745 - DNA, 201 bp, Homo sapiens
gatccgcctgtcttggcctcccaaagttctgggattacaggcgtgagccaccacacccagccgacattttctaataattaaacccaaattcaagttactgkatttttctcttcattgtcttaagataattatacacaggtattcacttcttcctccctccctttctttctttttaagtttgtcatgctagcatgttccacc

SEQ ID NO: 7746 - DNA, 201 bp, Homo sapiens
aattggtgtttgattgatgaccccaaatgatcaataaaagactgaatatattctattcattctactgctggacagggaaagctagcgtgcagccaatttgygtaaatgtaaaaggtttttaaaaatcaagttttgacactcagagggggcaaagttcagttttacagcaaatttgacacatttctctgtgatgcttcatag

SEQ ID NO: 7747 - DNA, 201 bp, Homo sapiens
atttttagcagagacagagtttcaccatgttggccatgctagtcttgaactcctgacctcaaatgatctgcctgcctcagcctcccaaagtgctgggattrcaagtgtgagctactgcgcccagcctactcttgacttttaatatcagagatgagtttttattttgggaatttttgatataatatgatccagattggggag

SEQ ID NO: 7748 - DNA, 201 bp, Homo sapiens
ggaggagctacatgctttgagtccagggctgccttaggctctggggatacagtggagaaccagcaagacacattaacgccctcagagaagatgaagtaggrgtgagagggggccttgagtttgctttaaaagtgtactttttaaggtattgcattaaatcatttgaaaagattccttgaatatagaaatgattatccaaaa

SEQ ID NO: 7749 - DNA, 201 bp, Homo sapiens
tattgtcctaatggtgaggactgttaagtgttagaatggaaccaaagaataggaaaaatgacatcctgtgctgaaagctttaaagaggctgaattcacatyggtctttgtaggtttagatgtgtttctgtctgaaaaaggaatagataatcccttatatttttataatcctatgaagttcttgggtgtttgtttgtttgtt

SEQ ID NO: 7750 - DNA, 201 bp, Homo sapiens
aggaaaaatgacatcctgtgctgaaagctttaaagaggctgaattcacattggtctttgtaggtttagatgtgtttctgtctgaaaaaggaatagataatyccttatatttttataatcctatgaagttcttgggtgtttgtttgtttgttttttgagacagagtctcattctgttgcccaggctggagtgcaatggtgcg

SEQ ID NO: 7751 - DNA, 201 bp, Homo sapiens
gctaatttttgtatttttagtagagatggggtttcaccatgttggccaggctggtcttgaactgctgacctcaagtgataccccgcctcagcctctcaaaktgctgggattacaggcatgagccactgggcccggccaaactgagacatttttaagaagaaaggagacaacaggcataaatcagattgttaagattaggaa

SEQ ID NO: 7752 - DNA, 201 bp, Homo sapiens
cctgaggtcaaaatatcatcttatgctttctactaagagcattaaaattttgtcttttacttttctactctagtacacagaaaaaacaaaccaaaaaaacyccaacaatatgaaaaatagttttgtctttgatatttaagtacttacttcatctggaattaattttaatgtgtgaggtgatgtgattcaacttcatttttt

SEQ ID NO: 7753 - DNA, 201 bp, Homo sapiens
gataggcaattgagtatttggtagataggaagtgttctgggaggcctctcatatagtatgtgagagctctcatataggggataaaggaagtcacacctcayaccaagacctgaagccacacacctggtgtagaaagggcggagagtcttctaggtggatggaatagcatgtggggaagagtttgtggtatttgaggagtag

SEQ ID NO: 7754 - DNA, 201 bp, Homo sapiens
cagccaacatggaaactttaaaagtaaacttttattgtctatttctaattataaaagtaatacacattaatgttaaagtttataagatgtagaaagatatraagaaaaaaccctggctattctgggcacactgcctgtggggtattcctgttccacaaggagtagaacctctgctgctgctacaaattaaataaaaaaaca

SEQ ID NO: 7755 - DNA, 201 bp, Homo sapiens
aatgcagccactgcaaaaccatgtcccaacaaggagtcacagtgggataaataggctgacctggcttcctgccttctaatccccagtcagcaccagccatyagccaaacccaattggaagccagaggacaaggagagtcagatgacacagttgtaggcgtcagcctcccagagcacaagccaaggcaaagggtggagagtg

SEQ ID NO: 7756 - DNA, 201 bp, Homo sapiens
ctccacctggttgaaggtcttgccgttgtagacgcccaccatgctgcccaccatctcgggtaggatgatcatgtcccgcaggtgcgtcttcaccacttcckgcttctccatgggcggcgcctccttcttggccttgcgcaggcgcttcagcagggagtgctgcttccgccgcaggccccggttcagccgccgccgctggcg

SEQ ID NO: 7757 - DNA, 201 bp, Homo sapiens
cttaaaagataatttaaaagttgaaattctctcagttttacatataacttcaagatgattcaacaccattggtaccatttggccatgttttcatcctcccraaatgttttgttaaatggggtctggaatcccagagattctcatctgctgctgctatgaagcaaaattaactcaagagtggagtgaaggtgttaggtcaat

SEQ ID NO: 7758 - DNA, 201 bp, Homo sapiens
tgctgacattgtttttgtccagtggagaagggtgaggataatgttggaaagagggcagggagcaagcttcacttcatcaaggaggggctttggttcaaatyggtttgggtgggcgggcactttgaaaatccatttgtcacactaaacggcaagtccaggtccaggaggttcctgtcttccctctctcaagagcaaactgca

SEQ ID NO: 7759 - DNA, 201 bp, Homo sapiens
agggagcaagcttcacttcatcaaggaggggctttggttcaaattggtttgggtgggcgggcactttgaaaatccatttgtcacactaaacggcaagtccrggtccaggaggttcctgtcttccctctctcaagagcaaactgcaagtagtttcattgcaggataaggccaagcccaccgctgcccatgctgtttttgttt

SEQ ID NO: 7760 - DNA, 201 bp, Homo sapiens
ttcattgcaggataaggccaagcccaccgctgcccatgctgtttttgttttgtttccagacagagtctagctgtcaccaggctgcagtgcagtggtgcgakcatagctctcctgagctcaagtgattctcttgcctccacctcccaaagccctgggattacagctgtgagacacctcatggggacccggtttactgggttt

SEQ ID NO: 7761 - DNA, 201 bp, Homo sapiens
tgctgtttttgttttgtttccagacagagtctagctgtcaccaggctgcagtgcagtggtgcgatcatagctctcctgagctcaagtgattctcttgcctycacctcccaaagccctgggattacagctgtgagacacctcatggggacccggtttactgggttttttttgttttttgttttttgtttttttttgagacag

SEQ ID NO: 7762 - DNA, 201 bp, Homo sapiens
ggttcagctggtcagcatctgtgaactgattaagttgtaattgttttaatattgcttatctcaagccagtgcttgtttagcctctagaggaaaagaaaacstttgtggcagttagaccatagtttatttcttaagtgtaggagtgtgtgacttaggtcctttttataatttgatgtcttattgctacaaagagtctgttct

SEQ ID NO: 7763 - DNA, 201 bp, Homo sapiens
tgtggctaaggaggcttcgttagtagttaaaagcacacacataaccctacccaacggatccctctcttctcttaaccaagagggcgcaccactgccctackcaacctccccacaaataaggacgagacacgggaagtgttaaaagcaagtggtgagtataaaatcctcggaattttctctttgagcaactaactaggtctg

SEQ ID NO: 7764 - DNA, 201 bp, Homo sapiens
agggagagggtgaggccaccaggcagtgagcgccctcggcggccgcgtgatcccgggggtggggcccatttctgagttggggccagctccccacccgcaaraggccccacattccgggccagcagcccagaaagtccctccccgcaggcggagacagccccaagaagtcgacgccccggtcccgccgcccggccactaccc

SEQ ID NO: 7765 - DNA, 201 bp, Homo sapiens
tcttggacaaaaatgtgtaaattttggcaattttcatctgctgctcttacgaaaatcttgtttctttttttctttctttcaagacgtagtcttgctctgtygcccaggctggagtgcagtggcgcaatcttggctcactgcaacctccacctcccaggttcaagcaattctcctgccccagcctccccagtagctgggatt

SEQ ID NO: 7766 - DNA, 201 bp, Homo sapiens
ggtagacgagtaagtggttgttgaatgaatgagtgattatttctgtaccatcattgaattgttagtaacaaaatgcagtttacagccacttacttgtgacrataacaatagtgtctaaagtaaacacaccctcgcttttccctagtgattctcctgttcagccagtttaaaagcactggcttagtcaacctccaggaagaa

SEQ ID NO: 7767 - DNA, 201 bp, Homo sapiens
acaccctcgcttttccctagtgattctcctgttcagccagtttaaaagcactggcttagtcaacctccaggaagaatggacatcatattgcactggaaacscatctttattctgaggcctctagctgatgagaatgttgctgcttaagtacaatctgtacctcctcttcccttcatcccagttctccctcctttttctgca

SEQ ID NO: 7768 - DNA, 201 bp, Homo sapiens
tgagctcaccgcaaactctgcctcccgggttcaagcgattctcctgcctcagcctccagagtagctgggattacaggtatgcaccacgatgcccagctaaktttgtatttttagtagagatggggtttctccacgttggtcaggctggtcttgaactcccgacctcaggtgatctacccgcctcagcctcccaaagtgctg

SEQ ID NO: 7769 - DNA, 201 bp, Homo sapiens
gttgaacagtgccccccaaaaaggtatgtctaaatcctaatcccaggtatccatgaatgtgaccttacttggaaataggatctttgcagatgttaactatrgatctcaagatgagatcaccctggatttagactgggctctaaatcctatgattggtgcccttataagagaaaggagaaggagatttgagacaaagacaca

SEQ ID NO: 7770 - DNA, 201 bp, Homo sapiens
aatatgttgttttaagttactagatttctggtaatttgttatggtagctctaggggattaatataggctataacagttatcactgcactctgggaagcccraagtattggcatcgtcatcaggtatttacagatttttcattgtttctctcagtccagacacagtttaccaattgggtcagtttttattataaccagcgtt

SEQ ID NO: 7771 - DNA, 201 bp, Homo sapiens
taaaaatataacaaaattttttagatattaaaattaaaaaatattttaaagaatttgttatatcatataggtaatatgatattactaaaagtttagaaggrccaaaaagtctgacaaattgtattactcttatgaaacaactattgaagttatacattccctttcaatcttgttgatatgcatgtttttatattaattgta

SEQ ID NO: 7772 - DNA, 201 bp, Homo sapiens
ctccttaatagcaagctttgagagtttacattgaaactgtactagtgtgcattttgagcagataaattcaagactgttttgcatgttgctgtatcatcctstttgtaattggatacatctcttatttcataggagagatcctgcatacagtacattcccgccagaaggtgttttcgtaaatacgcttggccttctgatcct

SEQ ID NO: 7773 - DNA, 201 bp, Homo sapiens
aatcaatttcattatatattcctgagtgaattgtagcataatttatatttctccttaatagcaagctttgagagtttacattgaaactgtactagtgtgcmttttgagcagataaattcaagactgttttgcatgttgctgtatcatcctgtttgtaattggatacatctcttatttcataggagagatcctgcatacagt

SEQ ID NO: 7774 - DNA, 201 bp, Homo sapiens
cactgtctccagggttcaagtgattctcctgtttcagcctcccaagtagctgggattacaggtacccaccatcgtgccaggctaatttttgtattttagtrgagatggggtttcaccatgttggccaggctagtcttgaactcctgacctcaggtgatccgcctgcctcagcctcccaaagtgctaggattacaggtgtga

SEQ ID NO: 7775 - DNA, 201 bp, Homo sapiens
cactgcaaccactgtctccagggttcaagtgattctcctgtttcagcctcccaagtagctgggattacaggtacccaccatcgtgccaggctaatttttgyattttagtagagatggggtttcaccatgttggccaggctagtcttgaactcctgacctcaggtgatccgcctgcctcagcctcccaaagtgctaggatta

SEQ ID NO: 7776 - DNA, 201 bp, Homo sapiens
gtgtttgagaaccacaatgttaacaatatagccaatatgtacagtctgcacagctgggttggactgatagctgtcatatgctatttgttacaggtcagtayttcagtgtatttacaagcaagttataaaaacaattcagagactgtaaatgttttcttttctttttttttttttttttttttgagacagagtctcgcttag

SEQ ID NO: 7777 - DNA, 201 bp, Homo sapiens
gaaaaaggtttcaaaaagggagtgtccagtgtgtcaaactgttcattttgtgttgtttaaaaaacaaaacaaaacacattctgtgtcctttcgtctttccstagccatcatcgtctacagactgccgtggacctggaaatgcagcaagctcctgatgaaatccatccatgcagggttaaatgcagttgctgccattcttgc

SEQ ID NO: 7778 - DNA, 201 bp, Homo sapiens
ggagtgaagaaaatgccagcaaaggaactcctccaccgtcccctagagggagccactgagaggcaggggtaacatggggaagaggggagaagcaaaagccragggaaaaaggtttcaaaaagggagtgtccagtgtgtcaaactgttcattttgtgttgtttaaaaaacaaaacaaaacacattctgtgtcctttcgtctt

SEQ ID NO: 7779 - DNA, 201 bp, Homo sapiens
caggtgcgtcttcaccacttcctgcttctccatgggcggcgcctccttcttggccttgcgcaggcgcttcagcagggagtgctgcttccgccgcaggcccsggttcagccgccgccgctggcgcgcactgtacagctgcatcggctgctccagctgctcgtaggacatgtccagcagctggtccaggtccacgccgcggta

SEQ ID NO: 7780 - DNA, 201 bp, Homo sapiens
ctccttcttggccttgcgcaggcgcttcagcagggagtgctgcttccgccgcaggccccggttcagccgccgccgctggcgcgcactgtacagctgcatcrgctgctccagctgctcgtaggacatgtccagcagctggtccaggtccacgccgcggtaggtgaacttgcggaaggtccgcttcttcttctgctctacttc

SEQ ID NO: 7781 - DNA, 201 bp, Homo sapiens
ccacgccgcggtaggtgaacttgcggaaggtccgcttcttcttctgctctacttctgccatcttgccggatcctcagaagagcagcatactggacttctgwatgcaccagaagaaatgcaacattattttgtggaagttcaaaagacagatggcatctagggctcccagtgcctcatctcctgatgggtgggatttggatt

SEQ ID NO: 7782 - DNA, 201 bp, Homo sapiens
ctgccaaatctttttagacagcgaaaaccttcatctaaaatatgttttgaaactcttcattcatgttagagtccaatatacggttttctaaaaggtttttwaatttctctaaactttgtacttctcttaatctgttcatacttaactcttggacaaaaatgtgtaaattttggcaattttcatctgctgctcttacgaaaa

SEQ ID NO: 7783 - DNA, 201 bp, Homo sapiens
catcccagcactttgggaggccacggtgggtggatcacctaaggtcagagaccagcctggccaacatggtgaaaccctgtctctactaaaagtacaaaggraaaaaaaaaagacagatgtggtggtgcgggcctgtaatcccagctacttgggaggctgaggcaggagaatcacttgaacctgggaggcagagcttgcagt

SEQ ID NO: 7784 - DNA, 201 bp, Homo sapiens
aaaagtgtggagtgatgattaggattcaggcctctccttgcctagccttcctccattctctctctctcaacctctcactctctctctctctctctctctctgtctctgtctcatttaacagagcactggattgcgaatggagtgcaagtagagactgagaatcaccactgtagtgattgtatctgtgtggcaaatcatctt

SEQ ID NO: 7785 - DNA, 201 bp, Homo sapiens
gaaaagtgtggagtgatgattaggattcaggcctctccttgcctagccttcctccattctctctctctcaacctctcactctctctctctctctctctctctgtctctgtctcatttaacagagcactggattgcgaatggagtgcaagtagagactgagaatcaccactgtagtgattgtatctgtgtggcaaatcatct

SEQ ID NO: 7786 - DNA, 201 bp, Homo sapiens
ggaaaagtgtggagtgatgattaggattcaggcctctccttgcctagccttcctccattctctctctctcaacctctcactctctctctctctctctctctctgtctctgtctcatttaacagagcactggattgcgaatggagtgcaagtagagactgagaatcaccactgtagtgattgtatctgtgtggcaaatcatc

SEQ ID NO: 7787 - DNA, 201 bp, Homo sapiens
tggaaaagtgtggagtgatgattaggattcaggcctctccttgcctagccttcctccattctctctctctcaacctctcactctctctctctctctctctctctgtctctgtctcatttaacagagcactggattgcgaatggagtgcaagtagagactgagaatcaccactgtagtgattgtatctgtgtggcaaatcat

SEQ ID NO: 7788 - DNA, 201 bp, Homo sapiens
acccacgacctggctccctgtctctatcagcgctcacattccccattcaaacctctaggtcttgagcagattgtaggaggttctggcccagtgaactcacytggaacactcaaatgaaggaagtaaaagggtgtgaggcaagaggagcagtgacagccttaagtgtgagctaattcaccccaagagcaagcaaaagtgcaa

SEQ ID NO: 7789 - DNA, 201 bp, Homo sapiens
tatggcagaaatttagtctgaagtctagtccaaataaatgttttctatattctcatatctatttatatgaatcttatcacattaaggctagactgagacaygtcacaaatttctctcttgtggaatgaaggtgaaaaagagaaatataagcattgggtgaatgttgaaatggataagttctgagattcctcttaaagttta

SEQ ID NO: 7790 - DNA, 201 bp, Homo sapiens
cacatgtctgccgacctttgttcatgtcagaggtagcccacagggcagtgctcatttatatcaccaatccataagaatacatttttgttttgtcaaaaagmcaatgtctatagaattatctgaaacctgttttttcagatctgactagagtgagttagctatgatcactttccttctggtagccactcaaggggcgtgata

SEQ ID NO: 7791 - DNA, 201 bp, Homo sapiens
cctggctatttcgccgtacctgggaatccatattcggcagaagcctgttatgccaaggaaccctcttagttgctttagtgttttggaatgaggataagccrgtataggctggatacatttctcaccaagggcaaaacttctggtgagtgtactctttctgcaggaagtaaaaatggccttactaaataaattaaatttatg

SEQ ID NO: 7792 - DNA, 201 bp, Homo sapiens
gcctggaagaaatgtggctggattaagagttgcacaagtgtgcagtcgcagcactggtccctcaagtaatagagcctgatgtttaagcaaatggttgtctracagccacaagtctccacacagtgagatctcttccctgtatcattttaactgcttcagatactaagactgctactgctgccactaccagtaaaaaatgag

SEQ ID NO: 7793 - DNA, 201 bp, Homo sapiens
agggattcttagtcagcctaggaaatccagctagtcctatctcttagtaccacctctcaacaggaaaacccaagtgctgttggggaggttggccaaagacygctctaactgcttcctgctgaattgggacgtagtaggggtcgtgcaattgagatttcctcgggaggggtgccttcgatgtcattaacatcagagcatggg

SEQ ID NO: 7794 - DNA, 201 bp, Homo sapiens
aactgatgcaggtcaggggagccccaacgtggagcttagcccatgtaggtttttggctttgcccaggaaagaattcaagagcaagccagaggtggaagaamacagctttactgaagaggcagtgttacagcaccatgactgctcctgtagagcagtgctaccccctaggcagagagtagcctgtaaaatattttaaagagg

SEQ ID NO: 7795 - DNA, 201 bp, Homo sapiens
tatataatatttactattaatattatatatttatatataatatttactattattatatatttatatataatatttaatattttatatatataaaatttttygcagtaaagagtttaattaatgcaaagcagccaagcagaaggactggagttatcactcaaatcagtcttcctgagggctcagaggttagggtttttcaat

SEQ ID NO: 7796 - DNA, 201 bp, Homo sapiens
attttataattttgtaggaaaaatatgcatctattttttcttgacttcttttatatagtaataaaagttattttggaagctctttgtgtgttatcaatttstctggggtaacaggggtaggcattgttgtgaaagtttctttgccatggtttttggtttgtttatttttcagcagagatagtcttttttcagtttcttgat

SEQ ID NO: 7797 - DNA, 201 bp, Homo sapiens; identical to SEQ ID NO: 928

SEQ ID NO: 7798 - DNA, 201 bp, Homo sapiens; identical to SEQ ID NO: 923

SEQ ID NO: 7799 - DNA, 201 bp, Homo sapiens; identical to SEQ ID NO: 921

SEQ ID NO: 7800 - DNA, 201 bp, Homo sapiens
ataagggatataagacaaatcccttctagatctgagtcatgtcttggaagagagctactctgaaatgcctatagaccataagcagactgtgtgtgagcaaraaatatacttttatatgttaagctcttgaaaatggagcctgttagttcctatagcatgttctgtcctaatataatcagattaaaataatcatcttccatt

SEQ ID NO: 7801 - DNA, 201 bp, Homo sapiens
tgtagaatattggcaggagacttaatgaccagtttgagtgtctgttacgtcccttataaaaaaactatgggcatattgtagttggtgctggttagatttatttatttatttatttttaatttttttttaacccctggaagaaaagtgtcattacactggaggaatgcaatttggcaatgacctaagacagcgtttggtccc

SEQ ID NO: 7802 - DNA, 201 bp, Homo sapiens
atgtagaatattggcaggagacttaatgaccagtttgagtgtctgttacgtcccttataaaaaaactatgggcatattgtagttggtgctggttagatttatttatttatttatttttaatttttttttaacccctggaagaaaagtgtcattacactggaggaatgcaatttggcaatgacctaagacagcgtttggtcc

SEQ ID NO: 7803 - DNA, 201 bp, Homo sapiens
gtcaagaggtttgggtgagaggggaggagacagagagggtgacaattggacaggggcaagagtccaaggaggcatttgggtgctcttttttttttttttttgtctacttctgctttttattgtgagaagtttgggcttatggaaaggctaacaggatggcaccagtaaagaaagagacactgtgaacactggagagacaca

SEQ ID NO: 7804 - DNA, 201 bp, Homo sapiens
agtcaagaggtttgggtgagaggggaggagacagagagggtgacaattggacaggggcaagagtccaaggaggcatttgggtgctcttttttttttttttttgtctacttctgctttttattgtgagaagtttgggcttatggaaaggctaacaggatggcaccagtaaagaaagagacactgtgaacactggagagacac

SEQ ID NO: 7805 - DNA, 201 bp, Homo sapiens
ttcacagagttgaggtgagaattataatgaaactgtgaagcacttagatggtacctactacctagcaaggactcaattgtgtgtgtgtgtttgtgtgtctstgtatgtgtgcgtgtgtgtgtaataaatgagcccaacacaggcaagggggagatgtgttattaggtcttcatatatcgcacatttttattttactattgc

SEQ ID NO: 7806 - DNA, 201 bp, Homo sapiens
attagccgggcatggtggtgtgcacctgtaatcccagctatttgggaggctgaggcaggagaatatcttgagcccaggaagcagaggttgcagtgagccargatcatgccactgcactccagcttgggcgacatagtgagactctgtctcaaaaaaaaagaagactaaaaaataagtatgtgaggtgatggatatgttaat

SEQ ID NO: 7807 - DNA, 201 bp, Homo sapiens; identical to SEQ ID NO: 925

SEQ ID NO: 7808 - DNA, 201 bp, Homo sapiens
accatggcttgccactcctatttccttagcctgctttgaaaatcatccccgtatacttcctgcacattctaaggtctttcaagacggcaacaagacaatayagcaaagtagtccttggagatgagctacagaagagggctagaagtgaacgttcccaaatgcattctggaagccctggcagtcagaaccctttttcttata

SEQ ID NO: 7809 - DNA, 201 bp, Homo sapiens
acgttcccaaatgcattctggaagccctggcagtcagaaccctttttcttataatagcattagataatgctgacattgtttttgtccagtggagaagggtraggataatgttggaaagagggcagggagcaagcttcacttcatcaaggaggggctttggttcaaattggtttgggtgggcgggcactttgaaaatccatt

SEQ ID NO: 7810 - DNA, 201 bp, Homo sapiens
cagtcagaaccctttttcttataatagcattagataatgctgacattgtttttgtccagtggagaagggtgaggataatgttggaaagagggcagggagcragcttcacttcatcaaggaggggctttggttcaaattggtttgggtgggcgggcactttgaaaatccatttgtcacactaaacggcaagtccaggtccag

SEQ ID NO: 7811 - DNA, 201 bp, Homo sapiens
ggcggccgcgtgatcccgggggtggggcccatttctgagttggggccagctccccacccgcaagaggccccacattccgggccagcagcccagaaagtccmtccccgcaggcggagacagccccaagaagtcgacgccccggtcccgccgcccggccactacccagagggctgccgccgcctctccaagttcttgtggccc

SEQ ID NO: 7812 - DNA, 201 bp, Homo sapiens; identical to SEQ ID NO: 919

SEQ ID NO: 7813 - DNA, 201 bp, Homo sapiens
tttttttttttttttttgagacagagtctcgctctgtcgcccaggctggagtgcagtggcgtgatctcgtctcactgcaagctccgcctccctggttcackccattctcctgcctcagcctcccgagtagctgggactacaggtgcctgccaccacgtctggccaattttttgtatttttagtagagacagggtttcaccg

SEQ ID NO: 7814 - DNA, 201 bp, Homo sapiens
ttttgtatttttagtagagacagggtttcaccgtgttagccaggatggtctcgatctcctgacctcaagatctgcccgccttggcctcccaaagtgctggrattacaggcgtgagccactgcgcccggccagcttctaggtttttaggaaggccatcttcttcaatgctctcccccacctgctacatcaggaatcacccaa

SEQ ID NO: 7815 - DNA, 201 bp, Homo sapiens
tgtggaagttcaaaagacagatggcatctagggctcccagtgcctcatctcctgatgggtgggatttggattttctttccacaaccctcacaacatgtctycttactctacattctacatctgtgtgagggacaaaaaattctgcatgagcatgtttctagcatctaggtgttttttttgtttgtttttttgttttttttt

SEQ ID NO: 7816 - DNA, 201 bp, Homo sapiens
gaaatgcaacattattttgtggaagttcaaaagacagatggcatctagggctcccagtgcctcatctcctgatgggtgggatttggattttctttccacarccctcacaacatgtcttcttactctacattctacatctgtgtgagggacaaaaaattctgcatgagcatgtttctagcatctaggtgttttttttgtttg

SEQ ID NO: 7817 - DNA, 201 bp, Homo sapiens
gccatcttgccggatcctcagaagagcagcatactggacttctgtatgcaccagaagaaatgcaacattattttgtggaagttcaaaagacagatggcatstagggctcccagtgcctcatctcctgatgggtgggatttggattttctttccacaaccctcacaacatgtcttcttactctacattctacatctgtgtga

SEQ ID NO: 7818 - DNA, 201 bp, Homo sapiens
ctgctctacttctgccatcttgccggatcctcagaagagcagcatactggacttctgtatgcaccagaagaaatgcaacattattttgtggaagttcaaargacagatggcatctagggctcccagtgcctcatctcctgatgggtgggatttggattttctttccacaaccctcacaacatgtcttcttactctacattc

SEQ ID NO: 7819 - DNA, 201 bp, Homo sapiens
attctatattccttcctttcctgtgtagaactccttttattgtataaactgaagggagagaaattaaatagtctaatgatctcaagttgatttcgtgagakaatataactacctttaagtaacatttaaaagactaacagaaattaagagcagttcttaaaaaacagttgggatatcctattaatttatctaaaagtgacc

SEQ ID NO: 7820 - DNA, 201 bp, Homo sapiens
tcctgacaggtgacacaaggaggcactggatggggaggtcagtgggatataaaagtctgggcaggggcagactcagggaaggtttctcagtggagatgggrgtcagggaaatttagaggcagtggcgtgggtaggaagtggtcagaagctgccagagcagtttacagccaaggacatcagggccagtcaggttgtggtaag

SEQ ID NO: 7821 - DNA, 201 bp, Homo sapiens
ccaaaaaggtatgtctaaatcctaatcccaggtatccatgaatgtgaccttacttggaaataggatctttgcagatgttaactatggatctcaagatgagrtcaccctggatttagactgggctctaaatcctatgattggtgcccttataagagaaaggagaaggagatttgagacaaagacacacagagaagaaggcta

SEQ ID NO: 7822 - DNA, 201 bp, Homo sapiens
ggaccctgattaacacactcagtctcattagcctcccaacacatgtttattgagtaactgccacatcccaaggaggaataaaatgatcaattagagaatcmatgccttcaatagggcagtctgagagtggagacagccagagaagcagatccttatattacatcctgacaggtgacacaaggaggcactggatggggaggt

SEQ ID NO: 7823 - DNA, 201 bp, Homo sapiens
aattccaatatgctgtttgttttctgccaggaccctgattaacacactcagtctcattagcctcccaacacatgtttattgagtaactgccacatcccaasgaggaataaaatgatcaattagagaatccatgccttcaatagggcagtctgagagtggagacagccagagaagcagatccttatattacatcctgacagg

SEQ ID NO: 7824 - DNA, 201 bp, Homo sapiens
atgaaattactcaattccaatatgctgtttgttttctgccaggaccctgattaacacactcagtctcattagcctcccaacacatgtttattgagtaactrccacatcccaaggaggaataaaatgatcaattagagaatccatgccttcaatagggcagtctgagagtggagacagccagagaagcagatccttatatta

SEQ ID NO: 7825 - DNA, 201 bp, Homo sapiens; identical to SEQ ID NO: 927

SEQ ID NO: 7826 - DNA, 201 bp, Homo sapiens; identical to SEQ ID NO: 913

SEQ ID NO: 7827 - DNA, 201 bp, Homo sapiens; identical to SEQ ID NO: 912

SEQ ID NO: 7828 - DNA, 201 bp, Homo sapiens
tgctaaccgagcttctcagaaatattatttcacaacttcatggctttgcttagtgggaggaattttggcacctggcttcttccttgctcagatccagaggrcaggtagtgtttaagaaaacaggatttgcaattaggaagacctcagtttggattaggttcatccatttgatagttggtgaccgtggaccaagttacttct

SEQ ID NO: 7829 - DNA, 201 bp, Homo sapiens
cagagggaaatgagttgtggagactgataatcctgttctgagcattctgccaaggagagtgaaataatactttattcaaagagggaagggaagtgtaatgrgcacaccatgtttaagtagaattcataagtgttttaaaattccagtgtacttcaaactcaataacttactcttattttatttttgaattcacttcaagtt

SEQ ID NO: 7830 - DNA, 201 bp, Homo sapiens
cgaagttcaagaccagactgggcaacatagggagactgtctctacaaataaaggaaagacagagagagagatcgagagagagagaaatcaagagagagacwgatctaacaattagcaataaagagaatacctatttaaaaatctgtgggtcctggctgggcatagtgcactgctcactcctgtgatcccagcactttgaaa

SEQ ID NO: 7831 - DNA, 201 bp, Homo sapiens
tgcaggataaggccaagcccaccgctgcccatgctgtttttgttttgtttccagacagagtctagctgtcaccaggctgcagtgcagtggtgcgatcatasctctcctgagctcaagtgattctcttgcctccacctcccaaagccctgggattacagctgtgagacacctcatggggacccggtttactgggtttttttt

SEQ ID NO: 7832 - DNA, 201 bp, Homo sapiens
cttccctggtgtgagatcggcatcagggtgtgagcaccactgggcacctaaggcatttcgttgcgtaactctcagttattttgccactatgcttataagaraaaaacatactcaagttccaaagtaactgtcagaagcactctttccttcgtggtggagcccttaagtttggccccgagctgtctacaccttgtttgctca

SEQ ID NO: 7833 - DNA, 201 bp, Homo sapiens
ctctagcttttggcgcaaacaccatttatttgtaaccacttccccaaaggcacggccttcagaaagtagttagagaaaggcagcaaggggtggagtggtgytatgtcgcagaaaataatcgagaggagtagcaagggtttggaaagatatgcccactggccgaaatctctagctttgcctgcgggcaggctgccttttctt

SEQ ID NO: 7834 - DNA, 201 bp, Homo sapiens
tcaccttgttgcccaggctgttctcaaactcctggactcaagtgatctgcccgccttagcctcccaaagtgctaagattacaggtgtgaggcactgcgccyggcctttactgttaacttaaaacaaaaaattataaatttgaaaaaagaggagactttatttcttataaaaggttatagcctgcaaggaggccattccata

SEQ ID NO: 7835 - DNA, 201 bp, Homo sapiens
ttagctatgatcactttccttctggtagccactcaaggggcgtgataggcgagtgaggtttatagagtgaaaggaagacggctcatgcaggatttggctgrtgagtgttctattagggtgagaattttggaaggagaagctttctgattgactttcaaatacagttggcaatctggttggtataatatctactggtacata

SEQ ID NO: 7836 - DNA, 201 bp, Homo sapiens
cccacaaacgagtgtgcaaaagagtgctgacctcattcctaaagaaaagtgattttggcttttgtttttgttggttgttttaaacttgtactgcagctttsgcaagtgtggccagcattctcccactctggaatgtagtggaaggtgttactaaccctcagcattcaaaggcttccctggtgtgagatcggcatcagggtg

SEQ ID NO: 7837 - DNA, 201 bp, Homo sapiens
ttaaacattaatgctagtcagctgttgagtctaaattccaaaatggagggggtagacttcccttccggctgtagctagaaactcagctttaaggtttttcyggggtctgcttggccaaggaggtccattcagtcagtgaggggcttaggattttatttttagtttacaccaccttacaggttcctccttaacaccctttga

SEQ ID NO: 7838 - DNA, 201 bp, Homo sapiens
aacatgtcttcttactctacattctacatctgtgtgagggacaaaaaattctgcatgagcatgtttctagcatctaggtgttttttttgtttgtttttttktttttttttttttttttgagacagagtctcgctctgtcgcccaggctggagtgcagtggcgtgatctcgtctcactgcaagctccgcctccctggttcac

SEQ ID NO: 7839 - DNA, 201 bp, Homo sapiens
agtactctttctaacctgtcataatattgatatgaggcacaagaaaatatagctgatctttctgaaaacacacaatttctgaatatttttaaatgtgtagkcaattaattgaatttttttctttttctacatgtatttggtaccaagtagctgcctttgcgaggattttaatcactcagagatgtttctagggctaaaaat

SEQ ID NO: 7840 - DNA, 201 bp, Homo sapiens
cccatttaatttggttggacacgagttatggtttctttctttttgcttgtttgttttgatacagggtcttgctctgtcagccaggctggagtgtagtggcraaatcatgactcactgcagcctcgacctcccgggcccaagtgattcttccacccctctcaaagtgctgggattacagttgtgaaccaccgcaccgtccca

SEQ ID NO: 7841 - DNA, 201 bp, Homo sapiens
tatagagacttccttaaaaggtcaaaacaagctttgaaatgactatacagactttggctgtacttttctaagtttttgttgttgttcattcaatttcttcrtattatcctatccatttaattaacatatttattaagtacttactgtgtaccagacactgtgtaaaacaagtaagatacagctcggtctgcaagctgttcc

SEQ ID NO: 7842 - DNA, 201 bp, Homo sapiens
aagcaaagctaacatagaagttacaaaacaaatctccctctccttctttattcccctttccctttctcgctcaccctctctctccttgtcccattttctcytctgtgtccctctcccttcctttccccctctctctcccctcctttccccctctctctccccacctcccatactccaagtatattttggaatatgtatata

SEQ ID NO: 7843 - DNA, 201 bp, Homo sapiens
caggcacctgtaatcccaggtactcaggagtctgagacaggagaattgcttgaacctgggaggtggaggttgcagtgagccaagattgtgccactgcactstagcctgggcaacagagtgagattctgtctcgaaaaaaaaagagggataaactccaaagaagcaaagctaacatagaagttacaaaacaaatctccctct

SEQ ID NO: 7844 - DNA, 201 bp, Homo sapiens
tgcacttcagcctgggcaacaagagcgaaactcccgtctaaaaaaaaaaaaaaaaaaaaaaaaagaagtaggctctggccgggcacggtggcttacgcctrtaatcccagcactttgggaggctgaggcgagtggatcccctgaggtcaggagttcgagaccagcctggccaacatggtgaaacactgtctctactaaaaa

SEQ ID NO: 7845 - DNA, 201 bp, Homo sapiens
ctacttgggaggctgaggcaggagaattgcttgaactcgggaaacggaggttgcggtgagtcgagatcttgccattgcacttcagcctgggcaacaagagygaaactcccgtctaaaaaaaaaaaaaaaaaaaaaaaaagaagtaggctctggccgggcacggtggcttacgcctataatcccagcactttgggaggctga

SEQ ID NO: 7846 - DNA, 201 bp, Homo sapiens
aactgcttacaatctccagagggaaacttctatcatttaacaactctgttttaaaaaagttcacaggcaggggtggtggctcatgcctataatgccagcaytttgggccgccaaggcaggtggatctcctgagctcaggagtttgagaccagcctgagcaacatgatgaaaccccctttctaccaaacatacaaaaattag

SEQ ID NO: 7847 - DNA, 201 bp, Homo sapiens
actggaggcataatataccaaatagttaattagttaataatggttatctttggcctggtgtggtggctcatgcctgtcatcccagcactttgggaggccamggtgggtggatcacctaaggtcagagaccagcctggccaacatggtgaaaccctgtctctactaaaagtacaaaggaaaaaaaaaaagacagatgtggtg

SEQ ID NO: 7848 - DNA, 201 bp, Homo sapiens
tgtctatagaattatctgaaacctgttttttcagatctgactagagtgagttagctatgatcactttccttctggtagccactcaaggggcgtgataggcragtgaggtttatagagtgaaaggaagacggctcatgcaggatttggctggtgagtgttctattagggtgagaattttggaaggagaagctttctgattga

SEQ ID NO: 7849 - DNA, 201 bp, Homo sapiens
tccataagaatacatttttgttttgtcaaaaagacaatgtctatagaattatctgaaacctgttttttcagatctgactagagtgagttagctatgatcamtttccttctggtagccactcaaggggcgtgataggcgagtgaggtttatagagtgaaaggaagacggctcatgcaggatttggctggtgagtgttctatt

SEQ ID NO: 7850 - DNA, 201 bp, Homo sapiens
ggctttctgagttttcttaattagtgtatataatgacctggctatttcgccgtacctgggaatccatattcggcagaagcctgttatgccaaggaaccctsttagttgctttagtgttttggaatgaggataagccagtataggctggatacatttctcaccaagggcaaaacttctggtgagtgtactctttctgcagga

SEQ ID NO: 7851 - DNA, 201 bp, Homo sapiens
acccaagtgctgttggggaggttggccaaagaccgctctaactgcttcctgctgaattgggacgtagtaggggtcgtgcaattgagatttcctcgggaggsgtgccttcgatgtcattaacatcagagcatgggctagcaggccggtccaggggtccacggtagatcttagtcatggactgcttctggggctccatttgaa

SEQ ID NO: 7852 - DNA, 201 bp, Homo sapiens
atcattgtcccttcccctgtgctctcacgtgatagatgattggctatttctttacctcctgttttagcctaattagcattttagtgagctctctttactayctgactggtctggtgtgagctaagttgcaagccccgtgcttaaaggtggatgcagtcaccttcccagctaggcttagggattcttagtcagcctaggaaa

SEQ ID NO: 7853 - DNA, 201 bp, Homo sapiens
ataaatatcatatatttatatataatatttactattaatatcatatatttatatataatatttactattaatattatatatttatatataatatttactawtattatatatttatatataatatttaatattttatatatataaaatttttcgcagtaaagagtttaattaatgcaaagcagccaagcagaaggactggag

SEQ ID NO: 7854 - DNA, 201 bp, Homo sapiens
actataaatatcatatatttatatataatatttactataaatatcatatatttatatataatatttactattaatatcatatatttatatataatatttamtattaatattatatatttatatataatatttactattattatatatttatatataatatttaatattttatatatataaaatttttcgcagtaaagagtt

SEQ ID NO: 7855 - DNA, 201 bp, Homo sapiens
ttatatatttatatataatatttactataaatatcatatatttatatataatatttactataaatatcatatatttatatataatatttactattaatatyatatatttatatataatatttactattaatattatatatttatatataatatttactattattatatatttatatataatatttaatattttatatatat

SEQ ID NO: 7856 - DNA, 201 bp, Homo sapiens; identical to SEQ ID NO: 926

SEQ ID NO: 7857 - DNA, 201 bp, Homo sapiens; identical to SEQ ID NO: 924

SEQ ID NO: 7858 - DNA, 201 bp, Homo sapiens; identical to SEQ ID NO: 922

SEQ ID NO: 7859 - DNA, 201 bp, Homo sapiens
gcctgcagtcagtttgattggttgtagaaagcaaccaatcagagatactttcaattttccatccgccatgcagaaaagcggggtttgcaaagggagtagcytcgggtccttttgctacttagatgtggaaagttggggttttccttttggtttagttctaggaagtccgtgtgaattgacctgaggttgcctgcctccaga

SEQ ID NO: 7860 - DNA, 201 bp, Homo sapiens
cgccatgttgcccgggcttgtcttgaactcctggactcaagtgatcttcccaccttggcctcccaaagtgctgggattacaggcgtgaggcaccacactcrgcccccattttcatatagaaagcacaacatggacatcaggaagcttgccctttgatactaatagaatcactgaagttcactgaagaagatttaggaatat

SEQ ID NO: 7861 - DNA, 201 bp, Homo sapiens
aatcctgatctcaagtgatcctcctgcctcggcctcccaaagtgctgggattacagcaggcatccctttaaatgcatgccttctgtgaacagcacttccastactgacttagagagacaaaaggtcttataattttcggtccactaggttataaattatcaccttcacttgtaaggtagtaagattaagatagttaaaagg

SEQ ID NO: 7862 - DNA, 201 bp, Homo sapiens
ttaaaaatacagattcctgggccctaatccagaaattggatttagcaggtcagaatgtggcccaggcatctttttattttttatttttttgttgttgttgkttttgttcttgagacagagctttgctctgtcacccaggctgaagtgcacaatgtcagctcactgcaacctccgccatccgggttcaagcaattctcttgc

SEQ ID NO: 7863 - DNA, 201 bp, Homo sapiens
ggcagtttgttaaaaatacagattcctgggccctaatccagaaattggatttagcaggtcagaatgtggcccaggcatctttttattttttatttttttgktgttgttgtttttgttcttgagacagagctttgctctgtcacccaggctgaagtgcacaatgtcagctcactgcaacctccgccatccgggttcaagcaa

SEQ ID NO: 7864 - DNA, 201 bp, Homo sapiens
gagggttttccagactgtttatccatatctctagaataatttgagtgaatcaacagcagtcattttcaaacttcaacatacgtaagaatcgtctgggcagyttgttaaaaatacagattcctgggccctaatccagaaattggatttagcaggtcagaatgtggcccaggcatctttttattttttatttttttgttgttg

SEQ ID NO: 7865 - DNA, 201 bp, Homo sapiens
acatcttaatgtagtcaattatataaatatattctatttttaaacttgggtgagttaaaaacatatttgtctcaaaattctcttttgctgtctgaaatatmcagattcatatctcgcgttgttgtctttgtgctaaccgagcttctcagaaatattatttcacaacttcatggctttgcttagtgggaggaattttggcac

SEQ ID NO: 7866 - DNA, 201 bp, Homo sapiens
tccggccaatgtttatttattttttaattgatgtataataatcataacatatttttgtggtacatatgatattttgataaaagtatacaatgggtaatgamcaaatcagggtaattgggatacccattatttcatttatctttactttgtgttgggagcattccagttcttctcttctaggtattttgaaatatacaataa

SEQ ID NO: 7867 - DNA, 201 bp, Homo sapiens
tgtgaaccatcacgtccggccaatgtttatttattttttaattgatgtataataatcataacatatttttgtggtacatatgatattttgataaaagtatmcaatgggtaatgaacaaatcagggtaattgggatacccattatttcatttatctttactttgtgttgggagcattccagttcttctcttctaggtatttt

SEQ ID NO: 7868 - DNA, 201 bp, Homo sapiens
tgtttgtgcaaaggttttgtttttcttcttaaatcataaatggatgtggaattttattgaatgcttttgctatctctgctgagatgaatataccttttttkttttttttttttgagatggagtcttgctctatcacccaggctggagtgcagtgctgccaccttggctcactgcaacacctgcctcctaggctcaagcaat

SEQ ID NO: 7869 - DNA, 201 bp, Homo sapiens
aaaaagaatctttgactattttttattttaaagagaatgcctgccaaaggctaaaaaagaattaataaataaaaagaatgcttctaatattttaccattgrgtacagatgcgtcacatttcctcctacccctgtttgtgcaaaggttttgtttttcttcttaaatcataaatggatgtggaattttattgaatgcttttgc

SEQ ID NO: 7870 - DNA, 201 bp, Homo sapiens
tgtttgtgtcttttgtctatttaaaaaatgtttctctttttcttaaagatttataggaattctatatcgaattctttttcatttatatatattgctatatyttctcctagtttgaagcttgcattttctctgttgttaacatcttttgataaacagaaattgtcaattttaatgtaaccaaattaatcatcttttcctctg

SEQ ID NO: 7871 - DNA, 201 bp, Homo sapiens
aaggtaaaaaaaaatccataaataattcattttctattgtggtaaccaattaccacagacttaatggcctgaaacaacataaatttatgacctcacagtayctgtacatcagaagtccagattggcttgtctggtttctctgctctgggtctaacaaggccagtatcaaggtgtcagccttccagggctctgattgggaga

SEQ ID NO: 7872 - DNA, 201 bp, Homo sapiens
ctgagacatttttaagaagaaaggagacaacaggcataaatcagattgttaagattaggaatttggttttggataagtttgagatgtctgggaagcaaacrccgtacggaaataccaagaagacattggattatgcagatctgaagcttagaagacagttctgggctggagatataaattttttggagtccctgccatgga

SEQ ID NO: 7873 - DNA, 201 bp, Homo sapiens
tcttgctctgtcacccaggctggagtgcagtggcatgatctcagctcactgcaacctctgcctcccaggttcaagcgattctcctgcctcagcctcccaartagctgagattacaggtatgcaccacaatgcctggctaatttttttgtatttttagtagagacagggtttcaccatgttggtcaggctggtcttgaactc

SEQ ID NO: 7874 - DNA, 201 bp, Homo sapiens
ttataatcctatgaagttcttgggtgtttgtttgtttgttttttgagacagagtctcattctgttgcccaggctggagtgcaatggtgcggtcttggtttmctgcaacctccgcctcccgagttcaagcgattctcctgcctcagcctcccaagtagctgggattacaggtgcctaccaccacgcccggctaatttctgta

SEQ ID NO: 7875 - DNA, 201 bp, Homo sapiens
gtaggtttagatgtgtttctgtctgaaaaaggaatagataatcccttatatttttataatcctatgaagttcttgggtgtttgtttgtttgttttttgagmcagagtctcattctgttgcccaggctggagtgcaatggtgcggtcttggtttactgcaacctccgcctcccgagttcaagcgattctcctgcctcagcct

SEQ ID NO: 7876 - DNA, 201 bp, Homo sapiens
atcaatttagtttccagatttgatcagtctgtagaaagtgctttgtgtttgtttatttaaacaatacttatgggtcacacatacacacaagtaacctagtraaatctgaataagggatggaggaggagggagagaaaaaaataaaaaataagtaaattttaaaaaaacctgaataaggtcagaggattgtatcaatgtcaa

SEQ ID NO: 7877 - DNA, 201 bp, Homo sapiens
ctcctgcctcaagcctcccaagcagctgggattacagacatgcaccaccatgcccagctgatttttgtgtttttagtggagacggggtttcaccatgttgrccaggctggtctcaaactcctgacttcaagtgacccacccgccttggcctcccaaagtgctgggattacaggcatgagccaccacgcccagcctgtattt

SEQ ID NO: 7878 - DNA, 201 bp, Homo sapiens
ttctaataattaaacccaaattcaagttactgtatttttctcttcattgtcttaagataattatacacaggtattcacttcttcctccctccctttctttstttttaagtttgtcatgctagcatgttccaccatcaatatcttttcttttaaaggatttaaagtgtatttctcatctataatgtttgtatttcccctcat

SEQ ID NO: 7879 - DNA, 201 bp, Homo sapiens
aaaagcaagatgcagaacaatatgtatagggataataaattttctggaatgatccatgagaaggtgataaaaggggttacattaggtagtggaactggagygaggaaacttcattttctaccctttggttctatatgaaaggttttgtcatattacacatattgctttttaaataatttaaaattagtttagaacttaaaa

SEQ ID NO: 7880 - DNA, 201 bp, Homo sapiens; identical to SEQ ID NO: 909

SEQ ID NO: 7881 - DNA, 201 bp, Homo sapiens; identical to SEQ ID NO: 917

SEQ ID NO: 7882 - DNA, 201 bp, Homo sapiens; identical to SEQ ID NO: 918

SEQ ID NO: 7883 - DNA, 201 bp, Homo sapiens; identical to SEQ ID NO: 920

SEQ ID NO: 7884 - DNA, 201 bp, Homo sapiens; identical to SEQ ID NO: 930

SEQ ID NO: 7885 - DNA, 201 bp, Homo sapiens
tcttatcacattaaggctagactgagacatgtcacaaatttctctcttgtggaatgaaggtgaaaaagagaaatataagcattgggtgaatgttgaaatgsataagttctgagattcctcttaaagtttagattctgatgagatttcctgaacaggtgcctctcttgtggctcaggtaccagagggactctgtagaactcc

SEQ ID NO: 7886 - DNA, 201 bp, Homo sapiens
ctttcgcaagtgtggccagcattctcccactctggaatgtagtggaaggtgttactaaccctcagcattcaaaggcttccctggtgtgagatcggcatcasggtgtgagcaccactgggcacctaaggcatttcgttgcgtaactctcagttattttgccactatgcttataagaaaaaaacatactcaagttccaaagta

SEQ ID NO: 7887 - DNA, 201 bp, Homo sapiens
aacattaatgctagtcagctgttgagtctaaattccaaaatggagggggtagacttcccttccggctgtagctagaaactcagctttaaggtttttctggrgtctgcttggccaaggaggtccattcagtcagtgaggggcttaggattttatttttagtttacaccaccttacaggttcctccttaacaccctttgatgt

SEQ ID NO: 7888 - DNA, 201 bp, Homo sapiens
aatcctcggaattttctctttgagcaactaactaggtctgttactgaagccctctgcgagcttggatgctggacgagggagagggtgaggccaccaggcartgagcgccctcggcggccgcgtgatcccgggggtggggcccatttctgagttggggccagctccccacccgcaagaggccccacattccgggccagcagc

SEQ ID NO: 7889 - DNA, 201 bp, Homo sapiens
cccagaaacttgagcccgggcgcgatgccggagcgccgcgcagtcgggccgctgcagcccacgcgccccggaaagtcgcccctgtggaccgagcctgcgcratcgggggcgcggaaacactttcgcctcagccttttgctgaacttgcttccaggctgcagatgaggaggggaaggcagcggggaaaagattgccagagcg

SEQ ID NO: 7890 - DNA, 201 bp, Homo sapiens
tgcgcaatcgggggcgcggaaacactttcgcctcagccttttgctgaacttgcttccaggctgcagatgaggaggggaaggcagcggggaaaagattgccrgagcgagaatttgcccgtatttgtaacatcctcggccctgggtaaaggggctggccaaggggggcgagtgaagcatccgccctgggttcctctcctccta

SEQ ID NO: 7891 - DNA, 201 bp, Homo sapiens
ccaaggggggcgagtgaagcatccgccctgggttcctctcctcctagagtgttaaactcagtcgagtccgggaagctgccaggacttccaagtgtgtttcrccgccctgcccagtcattggacggtcttgagcccgacttgtttatgtggcagaagagtggcgaaagttcccccgcggggcttcctattgggcactggccc

SEQ ID NO: 7892 - DNA, 201 bp, Homo sapiens; identical to SEQ ID NO: 915

SEQ ID NO: 7893 - DNA, 201 bp, Homo sapiens
ataatacatattttataatatttactattaatattatatatttatatataatatttactataaatatcatatatttatatataatatttactataaatatyatatatttatatataatatttactattaatatcatatatttatatataatatttactattaatattatatatttatatataatatttactattattatat

SEQ ID NO: 7894 - DNA, 201 bp, Homo sapiens
aattaaatgataacctttgcactttttggtgtttagcttctttcaggtttttcagtctttctgcttccatgggctccgctttctctccgagcatttctcaygcccatacatgtttattctggaattgtcatctttggaacagtgattgcaacagcacttatgggattgacagagaaactgattttttccctgtaagttgca

SEQ ID NO: 7895 - DNA, 201 bp, Homo sapiens
atttatccttcatttatccagagagcattttgaagcatattgagctttgcagcagagcctctatgtagccaggatagatgctgtgaaaactccatgtgctrgaggtcacctgcctcacttctgtgagagcccctcaaatctctgcgagccacctattgagtaggtaagactaattggctagtgggtttgcaggcttatgga

SEQ ID NO: 7896 - DNA, 201 bp, Homo sapiens
ctaataccaaaaagctttctggaggtcttggaatatcttctcataattgagggtaagggaaacacaagtgttattgctcgttgcctgacttgccacagagragaagacatcagaatggctaatagtgattgcatgctgtgtgtccactaagtgcattatgtcacatcacatgtatgtaagagtaaactgaggcagagaagt

SEQ ID NO: 7897 - DNA, 201 bp, Homo sapiens
gtcttggaatatcttctcataattgagggtaagggaaacacaagtgttattgctcgttgcctgacttgccacagaggagaagacatcagaatggctaataktgattgcatgctgtgtgtccactaagtgcattatgtcacatcacatgtatgtaagagtaaactgaggcagagaagttatgtaacttacccatgaaagttg

SEQ ID NO: 7898 - DNA, 201 bp, Homo sapiens
agaggcatttgctttcccaggaaactaaagaattatgtagggtctgcttagaggagaaaaagcatgaggaggggaaaccacagtgtttgagttgacatcartttagtttccagatttgatcagtctgtagaaagtgctttgtgtttgtttatttaaacaatacttatgggtcacacatacacacaagtaacctagtgaaat

SEQ ID NO: 7899 - DNA, 201 bp, Homo sapiens
gggcactttgtttgcatatagttggcatttagtgtgtttgtagactatatataatggaatattccactaccttctcttttgagggttttccagactgtttrtccatatctctagaataatttgagtgaatcaacagcagtcattttcaaacttcaacatacgtaagaatcgtctgggcagtttgttaaaaatacagattcc

SEQ ID NO: 7900 - DNA, 201 bp, Homo sapiens
acaacattagcacggtgccttgtgcagaatagatactcaatatgtgaatatgtgtctactagtagttaattggataaactggcagcatccctggcctgttktcatgcagtcatttcctgttaattctgggagacaatgatttcacaactagcgggaagcagtcctaaaagtttaaaatccgataaggaatatctgggacag

SEQ ID NO: 7901 - DNA, 201 bp, Homo sapiens
tgaattagggcgttggacccctccccctgcctcccttcttctgtctccccattagcccttggatctcaatcaagaaagctgaacagtgatgttagtgcttyctccccactctcctctcttttcataattgttttgctaggatggtagatcctaaataggcatctgaaaaaaaatgttcctttaaactcagtaattcagtaa

SEQ ID NO: 7902 - DNA, 201 bp, Homo sapiens
aaaaccgtgaaagcgcaacagacttcagtttatataggaaccttgctgtcttctctgcaaagaggtatcccactagcgatttcattatcaaggaaatgaasacaccttttctgcagaattcatttctttctcataaaacaaaaatcaacttcattccacatagctttttaggttgaactgactaaattctgtgtcctaatg

SEQ ID NO: 7903 - DNA, 201 bp, Homo sapiens
ctattataactattttcccctcagagagcaccagaattgcagaattcacagaacaaaataataagaaataaagatttcttatactggatatgacttttaayctggattctctaaaaaccaacttatactctgctctatatcttaatatgtaaaattaagaaatatcaggctgggcatgctggctcatgcctataattccag

SEQ ID NO: 7904 - DNA, 201 bp, Homo sapiens; identical to SEQ ID NO: 7727

SEQ ID NO: 7905 - DNA, 201 bp, Homo sapiens; identical to SEQ ID NO: 7728

SEQ ID NO: 7906 - DNA, 201 bp, Homo sapiens; identical to SEQ ID NO: 7738

SEQ ID NO: 7907 - DNA, 201 bp, Homo sapiens; identical to SEQ ID NO: 7739

SEQ ID NO: 7908 - DNA, 201 bp, Homo sapiens; identical to SEQ ID NO: 7740

SEQ ID NO: 7909 - DNA, 201 bp, Homo sapiens
tctggggcttggcttgcctcatgagtcatggtgccggcagggagttcctttgtcttggtcatctggggcagctttctggtccaaatcttttttttttttttaggcggagtttcactcttattgtccaggctggagtgcaatggcacgatcttggctcactgcaacctccgcctcctgggttcaagcggttctcctgcctca

SEQ ID NO: 7910 - DNA, 201 bp, Homo sapiens; identical to SEQ ID NO: 7743

SEQ ID NO: 7911 - DNA, 201 bp, Homo sapiens
ccctagaagcttcagagaggagctcagcagccctgtgaacccttgattttggcccagtgagacccatgtcagacttacgtgctccacaactgtaagataayacatttgtgttagctacgctgccatgtggtcatctgttgcagcagcaatggaaaactaatactgcactgtaacataataaatggtcaaggccaccatgca

SEQ ID NO: 7912 - DNA, 201 bp, Homo sapiens
cttagtctgtatccccttgagtttggggccacaaaggactgagtctaactgctgctcaggaaacctaaagggcaagaaagatgaactggtgatctgctttkgtttcagaggatgaaggtctgcagctgcgttcagctcagcctgtctctcccagagtttgtcaggacagagtaaataggtcatttctgtggaacaagtgtt

SEQ ID NO: 7913 - DNA, 201 bp, Homo sapiens
gggaggctgaagtgggcggatcacgaggtcaggagattaagaccatcctggctaatacggtaaaaccctgtctctactaaaaatacaaaaaaattagccgratgtggtggcatgcgcctgtagtcccagctactcaggaggctaaggcaggagaatcacttgaacccgggaggcggaggttgcagtgagccaagattgcgc

SEQ ID NO: 7914 - DNA, 201 bp, Homo sapiens
acttgaacccgggaggcggaggttgcagtgagccaagattgcgccactgcactccagcctgcgcaacagagcgagactccgtctcaaaaaaaaaaaaaaarttctccaaaggtaaaacaatgtttctggctactctataataatcgtataacccagttcttacatactaaaatgtgccatccaaacagtccaatgtcgtaa

SEQ ID NO: 7915 - DNA, 201 bp, Homo sapiens
gaatttgcctgccagcacatctttgatatgcagaccaaccaattagggttccacgccccaacctacctgcttttatcagatcactacaggccctgctgaarttatttaaactgtccaatcataaggttgttctgcttgcttactttgctttcccctttcctcttttcaaaagccacaataaaggcttctgccctttctgcc

SEQ ID NO: 7916 - DNA, 201 bp, Homo sapiens
ttatattttagcctagggtttatacatttgcatgagcgagggctctaaaataaatagaacctagatgtgatcaagcaccatccttttcttccccatctggstattttctgctaacatatgggataaaggtagtagatgagaattggggaatcaaggatttaatcctaattctcttttgcctggataaagaccagactctgc

SEQ ID NO: 7917 - DNA, 201 bp, Homo sapiens
attgcctcctttgaaaaggctaatcagaaactttaaaaaatgcaaatttctataatctggaagcccctccccatttttagttgtcctgcctttccagaccraaccaatgtacatcttacatatattaattaatgtctcatgtctccctaaaatgtgtaaaaccaagctgtgccccaaccaccttgggcacatgtcgtcagg

SEQ ID NO: 7918 - DNA, 201 bp, Homo sapiens
tgaaaaggctaatcagaaactttaaaaaatgcaaatttctataatctggaagcccctccccatttttagttgtcctgcctttccagaccgaaccaatgtayatcttacatatattaattaatgtctcatgtctccctaaaatgtgtaaaaccaagctgtgccccaaccaccttgggcacatgtcgtcaggacctcgtgagg

SEQ ID NO: 7919 - DNA, 201 bp, Homo sapiens
ctcccatgctccccacgtagcacaaaagaggctgtactgaattagacattttgctggaatgcctctcaaagatgctctgctcactccccattctcccagawaccttcctcttatccttgtgtctgcttgtcagtccagtgtcttactctgttcccttagtaagagagtttcttcctgcctcttctcaaaggaagaggctat

SEQ ID NO: 7920 - DNA, 201 bp, Homo sapiens; identical to SEQ ID NO: 7755

SEQ ID NO: 7921 - DNA, 201 bp, Homo sapiens; identical to SEQ ID NO: 7756

SEQ ID NO: 7922 - DNA, 201 bp, Homo sapiens; identical to SEQ ID NO: 7757

SEQ ID NO: 7923 - DNA, 201 bp, Homo sapiens; identical to SEQ ID NO: 7758

SEQ ID NO: 7924 - DNA, 201 bp, Homo sapiens; identical to SEQ ID NO: 7759

SEQ ID NO: 7925 - DNA, 201 bp, Homo sapiens; identical to SEQ ID NO: 7760

SEQ ID NO: 7926 - DNA, 201 bp, Homo sapiens; identical to SEQ ID NO: 7761

SEQ ID NO: 7927 - DNA, 201 bp, Homo sapiens; identical to SEQ ID NO: 7762

SEQ ID NO: 7928 - DNA, 201 bp, Homo sapiens; identical to SEQ ID NO: 7763

SEQ ID NO: 7929 - DNA, 201 bp, Homo sapiens; identical to SEQ ID NO: 7764

SEQ ID NO: 7930 - DNA, 201 bp, Homo sapiens; identical to SEQ ID NO: 7779

SEQ ID NO: 7931 - DNA, 201 bp, Homo sapiens; identical to SEQ ID NO: 7780

SEQ ID NO: 7932 - DNA, 201 bp, Homo sapiens; identical to SEQ ID NO: 7781

SEQ ID NO: 7933 - DNA, 201 bp, Homo sapiens
ctactcaggaggctaaggcaggagaatcacttgaacccgggaggcggaggttgcagtgagccaagattgcgccactgcactccagcctgcgcaacagagcragactccgtctcaaaaaaaaaaaaaaaattctccaaaggtaaaacaatgtttctggctactctataataatcgtataacccagttcttacatactaaaat

SEQ ID NO: 7934 - DNA, 201 bp, Homo sapiens; identical to SEQ ID NO: 7808

SEQ ID NO: 7935 - DNA, 201 bp, Homo sapiens; identical to SEQ ID NO: 7809

SEQ ID NO: 7936 - DNA, 201 bp, Homo sapiens; identical to SEQ ID NO: 7810

SEQ ID NO: 7937 - DNA, 201 bp, Homo sapiens; identical to SEQ ID NO: 7811

SEQ ID NO: 7938 - DNA, 201 bp, Homo sapiens; identical to SEQ ID NO: 7813

SEQ ID NO: 7939 - DNA, 201 bp, Homo sapiens; identical to SEQ ID NO: 7814

SEQ ID NO: 7940 - DNA, 201 bp, Homo sapiens; identical to SEQ ID NO: 7815

SEQ ID NO: 7941 - DNA, 201 bp, Homo sapiens; identical to SEQ ID NO: 7816

SEQ ID NO: 7942 - DNA, 201 bp, Homo sapiens; identical to SEQ ID NO: 7817

SEQ ID NO: 7943 - DNA, 201 bp, Homo sapiens; identical to SEQ ID NO: 7818

SEQ ID NO: 7944 - DNA, 201 bp, Homo sapiens; identical to SEQ ID NO: 7820

SEQ ID NO: 7945 - DNA, 201 bp, Homo sapiens; identical to SEQ ID NO: 7822

SEQ ID NO: 7946 - DNA, 201 bp, Homo sapiens; identical to SEQ ID NO: 7823

SEQ ID NO: 7947 - DNA, 201 bp, Homo sapiens; identical to SEQ ID NO: 7824

SEQ ID NO: 7948 - DNA, 201 bp, Homo sapiens
taacagaaatgtagtcaagccttcctaagatccactgaagtgtaagataaagtttgtaggcaaaatttatctagccaaacacttgacctattaagagggcytctctggtctacattcagagttctttttggacttgcatgattccttcatacttcaataaggccctcagatctatgagccaaaattctgagacactgccag

SEQ ID NO: 7949 - DNA, 201 bp, Homo sapiens
tctgatgcaacatgaaattatcagtgatttatattggtgacaaggtcacaggtcctatgaatactagtggggtttgttgtctgcattcataataaagagaytgctaaatttcagttaggagttactgaaaataaagatgcaatttcccctcatccatgttctgtccacatataccgggttaagaacactaatctagtccca

SEQ ID NO: 7950 - DNA, 201 bp, Homo sapiens
gataaattgagatatctgcaaaaattctgatgcaacatgaaattatcagtgatttatattggtgacaaggtcacaggtcctatgaatactagtggggtttkttgtctgcattcataataaagagattgctaaatttcagttaggagttactgaaaataaagatgcaatttcccctcatccatgttctgtccacatataccg

SEQ ID NO: 7951 - DNA, 201 bp, Homo sapiens; identical to SEQ ID NO: 7831

SEQ ID NO: 7952 - DNA, 201 bp, Homo sapiens
tgttgactagaatctcaaggattcagcattggctttagcaacatgcaaatgacagaagtcaagctaaattattttccaacaaaggtaaaatgctgacttayaccatttgatttctcttttaaaaaaagctttatctgctaacagaaatgtagtcaagccttcctaagatccactgaagtgtaagataaagtttgtaggcaa

SEQ ID NO: 7953 - DNA, 201 bp, Homo sapiens; identical to SEQ ID NO: 7834

SEQ ID NO: 7954 - DNA, 201 bp, Homo sapiens; identical to SEQ ID NO: 7837

SEQ ID NO: 7955 - DNA, 201 bp, Homo sapiens; identical to SEQ ID NO: 7838

SEQ ID NO: 7956 - DNA, 201 bp, Homo sapiens; identical to SEQ ID NO: 7846

SEQ ID NO: 7957 - DNA, 201 bp, Homo sapiens
acaaggtcacaggtcctatgaatactagtggggtttgttgtctgcattcataataaagagattgctaaatttcagttaggagttactgaaaataaagatgmaatttcccctcatccatgttctgtccacatataccgggttaagaacactaatctagtcccaaagtgtcctgtcacggattagcaaactgcagcccagttt

SEQ ID NO: 7958 - DNA, 201 bp, Homo sapiens
cccccaaagaacccatgggtgtttttccatgagaggtattcagctttgcatgtgtgccagcctatgacagtaaatcaagtaagaacttccccctcctcccyccctacaaagtaactagggttactttgaagaagtgctgggtataattgataaattgagatatctgcaaaaattctgatgcaacatgaaattatcagtgat

SEQ ID NO: 7959 - DNA, 201 bp, Homo sapiens; identical to SEQ ID NO: 7887

SEQ ID NO: 7960 - DNA, 201 bp, Homo sapiens; identical to SEQ ID NO: 7888

SEQ ID NO: 7961 - DNA, 201 bp, Homo sapiens; identical to SEQ ID NO: 7889

SEQ ID NO: 7962 - DNA, 201 bp, Homo sapiens; identical to SEQ ID NO: 7890

SEQ ID NO: 7963 - DNA, 201 bp, Homo sapiens; identical to SEQ ID NO: 7891

SEQ ID NO: 7964 - DNA, 201 bp, Homo sapiens
atgaagaaagtttattccccccatttaacatgggtttggctatgttctcttcaaagcagtaatccttgctttatttcatcaagaagcctctgaccactctrgggcttggcttgcctcatgagtcatggtgccggcagggagttcctttgtcttggtcatctggggcagctttctggtccaaatcttttttttttttttagg

SEQ ID NO: 7965 - DNA, 201 bp, Homo sapiens
cccgccaccacgcccagctaattttttgtatttttagtagagacaggctttcaccgtgttagccaggatggtcccgatctcctgacctcgtgatccgcccrcctcggcctcccaaagtgctgggattacaggcgtgagccactgtgcccggccccatttcttaaatagagagaaaaaaaggggggcagggaggagtggaac

SEQ ID NO: 7966 - DNA, 201 bp, Homo sapiens
ggcacctgaaatacccctacatgagtaggcaggcctaagggctcatcttcctgggtggagacctggccaggttctccagggttgggggaccatcttgaaaragtgggctctttggtgatggggggttctttagataaagagggattcctagcaaggggtgtctgcccagtgagagggggttgatcagtaagggggtgctca

SEQ ID NO: 7967 - DNA, 201 bp, Homo sapiens
aataaggtgcgagccgcagtatccacagagcttcatcccccagctcaggttgggcctcctacccaggatccaggacttatctgtgcccccaactcccagcyctagggtgccaaaggccggcactcctatgcccttagattctggctggctgatagaagcccctgctaacccagcatagcgctccagcaaaggttcagactc

SEQ ID NO: 7968 - DNA, 201 bp, Homo sapiens
aaagtctcctatcccaccccatccccaactcctgcaaggccagagtctttcccaaacataagtaccagcaagggtggcagcacagtcagccccttcctgtrtggcaccaaatttcccaaactataaaagtcacctgtgacatggtgtggcctctgctttcttttcagtctaatcactgtcaaacacttcatgagttgtatc

SEQ ID NO: 7969 - DNA, 201 bp, Homo sapiens
cccgaccccgcactccctcccccaaatctgcaaagcccgcgcgctctgaccccgccaggacctcgagccctcgctgcgcccccgcgcactctgcatcccgmacctcgagccagggaaacaatcccccaaggccccacaacctgcgttcgggaagcgcccccagcccggcccgccccgcacctgcagcgccggttggtcaca

SEQ ID NO: 7970 - DNA, 201 bp, Homo sapiens
agggccaggaactgtcaggataaggccagaggaaaaaggtaggcaggggagactctgaggaagcccctggcacagaacctttggatggtgtgcaaagtccyttcaccactcagccctgggaggcagaagtgggtgagggacccaagctcagtcccaagctcccctccttatgttccccggctcccgctccagggacagcag

SEQ ID NO: 7971 - DNA, 201 bp, Homo sapiens
agatcagagccaatgccagtcaaggggctccggggctgtctagaaagggtaggttgccagggcccatggagttccagagtgcagaggcagggcatgccttkggagagagccagggcccccatccatgaccccatgcctggactcctgcttttcccacaccaccctgtggctgaaacatgccacggtgcttaaagaaagcag

SEQ ID NO: 7972 - DNA, 201 bp, Homo sapiens
gagccgcagtatccacagagcttcatcccccagctcaggttgggcctcctacccaggatccaggacttatctgtgcccccaactcccagctctagggtgcsaaaggccggcactcctatgcccttagattctggctggctgatagaagcccctgctaacccagcatagcgctccagcaaaggttcagactctaggaggtac

SEQ ID NO: 7973 - DNA, 201 bp, Homo sapiens
tttaaaggaagtccttggccatttctctgtcccttgtcagtgaggctcacggacccaaagcctgacccacacccctcacaagccctgaggaccatcctaargccagtatctgaagaccagactcaggcctctcagtgtctggagctgggttttatcccacctcactcctcccagtgagcctcctgaccctgctgtgggaga

SEQ ID NO: 7974 - DNA, 201 bp, Homo sapiens
tcctctcatcaaattggaggggcatccccagtggaacaggcccagtcagcatcccaaccctgatgggtgtctcagtaccaggggagtcccatgactccaggttgagcctggcctccttgggaatcagggctacctctcggtagctgccagatgagaggctgcagggcactgggctggacagcatgggtgtgatagaccaaa

SEQ ID NO: 7975 - DNA, 201 bp, Homo sapiens
atcctctcatcaaattggaggggcatccccagtggaacaggcccagtcagcatcccaaccctgatgggtgtctcagtaccaggggagtcccatgactccaggttgagcctggcctccttgggaatcagggctacctctcggtagctgccagatgagaggctgcagggcactgggctggacagcatgggtgtgatagaccaa

SEQ ID NO: 7976 - DNA, 201 bp, Homo sapiens
ctcccgagtagctgggactacaggcgcccgccaccacgcccagctaattttttgtatttttagtagagacaggctttcaccgtgttagccaggatggtccygatctcctgacctcgtgatccgcccgcctcggcctcccaaagtgctgggattacaggcgtgagccactgtgcccggccccatttcttaaatagagagaaa

SEQ ID NO: 7977 - DNA, 201 bp, Homo sapiens
gaagcccaggaccagtatcctgcaggggtagggatgggggtggcaggggtgggggtggggcctctgctcagaatcctcaagtcagaatttctagctcttgwcacattgtgtcagcttcatcttggccataatgggggcagagctctgggcacagggctgcaccacagcagccacagggctagccaagtggcaattacagga

SEQ ID NO: 7978 - DNA, 201 bp, Homo sapiens
ttgcccagctccccgaacccgacccaaaaggcaggaccaacttagaaaaaccagatgggcagtcgggctagggcaggctcccctagctaggagcagtaaayacacagaggtgtgtgtttgcaggtagtcagtgtggcatcccctagcatcccctagctacgcatcccctagctaggagcagtaaacacacagaggtgtgtg

SEQ ID NO: 7979 - DNA, 201 bp, Homo sapiens
gcaaggcagaacccgtttctcatctcagtatgctcggctgatgtctgcagaatgaatgaatggcctggcactgagtccttcctgccatctgcccactattmttgaaacaatgggtctctgagttttatggtgtagccaagctgtagcttgctgaccccacacatgccacatacatgttttctgtctttcctgagggtcatg

SEQ ID NO: 7980 - DNA, 201 bp, Homo sapiens
agaacccccaagccgtccgaggtaatggggaactttagcccgaccccgcactccctcccccaaatctgcaaagcccgcgcgctctgaccccgccaggacckcgagccctcgctgcgcccccgcgcactctgcatcccgaacctcgagccagggaaacaatcccccaaggccccacaacctgcgttcgggaagcgcccccag

SEQ ID NO: 7981 - DNA, 201 bp, Homo sapiens
cagggccaggtgtggtggctcacgtctgcaatcccaatactttgggaggccaagacaggaggattgcttgagctcaggagtttgagaccagcctgggcaaygaagcgagaccccgtctctataaaaataatttttttttttgagatggagtctccctttcttgcccaggctagagtgtaatggcacgatcttggctcactg

SEQ ID NO: 7982 - DNA, 201 bp, Homo sapiens
aaagagctccgggatgccatgatggagcccccaagccaggcagcaactgcacggtggggagaccccagcacagtggcaccagggcccagctcctgtctcargcgctcagggaagccactcatgagggtgctgccaccgtccagtaccacattggccagtagctgctcctgctgcttggcctccaaccggctgatgcttagg

SEQ ID NO: 7983 - DNA, 201 bp, Homo sapiens
cagagacacagacaaagacagaacctgtgatggaagaggagcaaggagatgacaaagtaaaagggacacaggcacaaagggcaggaaaggggaggtggacrggagttctgaagggggcggatgggtgcccagcagagccctaaggcctccatggcgatgtgctctaaatccctgggccaggagctatccatggtactggga

SEQ ID NO: 7984 - DNA, 201 bp, Homo sapiens
ggaggactgagtacacagtgggcatagagctgcatatacagcaaggacaagtcagacaatgaattagatggggcgatgcataggaaatataagctaccagmccaggtgggcaattccaccctccatttctttttttttttttttttttttttttttgagacagagtctcgctctgtcacccggctggagtgcagtggcgtg

SEQ ID NO: 7985 - DNA, 201 bp, Homo sapiens
tcctgcatgaccttctcctcacacttcacctcacccctctaggcaggcttgctaggaaggccccaacctctgcagagagggtcaagggtcaaatcactgtragaaacccttctcccctgtggatcaggctggaaccctcccacttaggaggtcttgaggatagtagagaggtggcaagaagggcgtcaaggggagaggcac

SEQ ID NO: 7986 - DNA, 201 bp, Homo sapiens
tgtcaagtggggccagatccccagtgaggatgggtgccacataggaagtgccatggccactgcccagcaccagcccagtggtacgtccataagcatagagsgccagcagggcctgatgcactgtctgcatggctgggacatggaaatgctcaaagagtatttcagccaccttttctcggttggtgagtggtgagatgggcg

SEQ ID NO: 7987 - DNA, 201 bp, Homo sapiens
gaaaccgaaggtggcagggtccacactgggctatgtcactggtgctgtcactgtgcatgcactctggtaaggtcagggtgacatcctccatgatgagatgytgttgggctcccacaatgggacttgaagatacactagtggaggagagtctcggggcatcctgggaggcctgctcacagcagcactgggagctaacccaag

SEQ ID NO: 7988 - DNA, 201 bp, Homo sapiens
caaacgccgagtgcaagactggctacaaaagtatgcaggtggttggtcaggtgaggtggctcacgcctgtaatcccagcacttcgggaggctaaggtgggyggatcacctgaggccaagtgttccagaccagcctggccaacatgatgaaagcccatctctactaaaaataaaaaataattagccagggatggtggtacac

SEQ ID NO: 7989 - DNA, 201 bp, Homo sapiens
gaatctggccttctcccagggcagaggactgcttgcctgcctgtgaatggtggccagggcatggggctggagagtagggccatcagagatatgtgaacagmcagcctaggagagcacctgaagggtccacaccaaatattagaaaagggagacccttgccccaccctggaaaccaacctgactctgagtggagacaccagt

SEQ ID NO: 7990 - DNA, 201 bp, Homo sapiens
atatacagcaaggacaagtcagacaatgaattagatggggcgatgcataggaaatataagctaccagaccaggtgggcaattccaccctccatttcttttytttttttttttttttttttttttgagacagagtctcgctctgtcacccggctggagtgcagtggcgtgatctcggctcactgcaagctccgcctcccggg

SEQ ID NO: 7991 - DNA, 201 bp, Homo sapiens
cttttcctggaggttctaggagggatgcccctcaatgccacgacgccatttcctactacgacttccatcatgctccgcgccgctccgggggcggtgacccytcttggcccacgtcttgtcagtgacgcacttcctgtcagtgacgcacttcccctctgctgggcgcgcggtggacggtctgaaagggagtgttcgggtttc

SEQ ID NO: 7992 - DNA, 201 bp, Homo sapiens
cactaaaaataaaaaattagctgggcatggtggcacatgcctgtaatcccagctactagggaggctgaggctggagaatcgcttgaacctgagaggtggakgttgcagtgagccaagatggcaccactgcactctagcctgggtgacagagtgagactctatctaaaaaaataaaaaataaaaaataaaaatagagcaaag

SEQ ID NO: 7993 - DNA, 201 bp, Homo sapiens
cctgggttcaagtgattctcctgccttagcctccctagtatctgggattacaggcatgtgccaccacgaccggctgattttatatttttagtagagatggsgtttctccatgttggtcaggctggtcttgaactcctgacctcaggtgatccgcccgccatggcctcccaaagtgctgggattataggcgtgatccactgc

SEQ ID NO: 7994 - DNA, 201 bp, Homo sapiens
atatttttttttttttttttttttttgagatgcagtctcactctgtcgcccaggcaggagtgcagtggcccaatctcggctcactacaacctccgcctccwgggttcaagcgattcacatgcctcagcctcccaaattgctaggattacaggcgtgcatcaccatgccctgctaatttctgtattttttagtagaaacagg

SEQ ID NO: 7995 - DNA, 201 bp, Homo sapiens
caccaatccacctttactaagaatagccctagtatactgccagccactcctccttgaaatactccctccttgaactactccctttccttcactctcctaakaacaaatcctcttgattttcctcttctctcactagctaattcttctcacttaccttctaaacctctttttctctgcctgccctttacaggctgccttttt

SEQ ID NO: 7996 - DNA, 201 bp, Homo sapiens
tcgtcacacctaacccctctgttctctgtcatagtatgttattttattagccttttcaaagggtatacttttttattattgtttagtttgttttttccacsagcaaagtctatcttattcattattatgttccttaaatgaatcctttgagtcactactgctactatctgaatttcagtccacggttgtgactcagagcgt

SEQ ID NO: 7997 - DNA, 201 bp, Homo sapiens
ttttgtatttttagtagagacggggcctcaccatgttggccaggctggtctcgaattcctgacctcaagtgatcctcccaccttggcctcccaaagtgctkggattacaggcgtgagccaccgtgcccggcccaaagctgggattttcaatttgctgtctgtaggatcttgaataggcaggatgttatgttccagaacctg

SEQ ID NO: 7998 - DNA, 201 bp, Homo sapiens
tatattgtattaggtattgtaagtaatcaacagatgaattaaagtatagaggaggatgtgtgtaggttatatgcaaacactacatcattttatatcagggrcttgagcatcctcggattcaggtatcttcaggaggtcctgggaccatttccccctgaatatcaagggatgactgtatatcctcacctatcggaaaaaccc

SEQ ID NO: 7999 - DNA, 201 bp, Homo sapiens
tatacagactttttttcttgttattatcccctacacaatacagtatagcaacttcacatcgcatttatattgtattaggtattgtaagtaatcaacagatgaattaaagtatagaggaggatgtgtgtaggttatatgcaaacactacatcattttatatcaggggcttgagcatcctcggattcaggtatcttcaggagg

SEQ ID NO: 8000 - DNA, 201 bp, Homo sapiens
tctcttctcatttatacttcattgctttacatagtatttacgtactttcagtaataagcacaactggcataaataggtttgtgaataaacacactgtcacsattgataagcacacttcacagagggggaaccagaagtgttgttcccatcacattggagaatagcctaatggtgtgatgtcagttaaattggataagagag

SEQ ID NO: 8001 - DNA, 201 bp, Homo sapiens
gagtccacctgtattctacgcggatgaggtgcagaagagctaagatattctggcggtgggtgatggaaaggaggatactttggaggcagacacatccccascccaactttggcgtgggtttccctgggtcttcctgcgacagccctaaatcaacatcaattgtggcggactcctctgcctccagtttccaccctatctgta

SEQ ID NO: 8002 - DNA, 201 bp, Homo sapiens
gtgtgcccttacagagtgactattgaaagactgtagcatacacctcgaggaaagtcccctttctagagtccacctgtattctacgcggatgaggtgcagargagctaagatattctggcggtgggtgatggaaaggaggatactttggaggcagacacatccccaccccaactttggcgtgggtttccctgggtcttcctg

SEQ ID NO: 8003 - DNA, 201 bp, Homo sapiens
gaggtcacaaagagtaaagggcagactgagactggattcctcgtcctttgattcaggacatagtgagctagtgggtgaacaagaaccttatcagcccttamgcactgtgtgcccttacagagtgactattgaaagactgtagcatacacctcgaggaaagtcccctttctagagtccacctgtattctacgcggatgaggt

SEQ ID NO: 8004 - DNA, 201 bp, Homo sapiens
tccatggagaaaagaagtctcacatcagccccagctgactcctataaaaattctgaggcaggaagtctcatcagcaatcattcccatttcaccggagaaaytgtgacccagaatgcaaaaggcaaacccagggctatcttcccgccaagagagatgccgggtcccgaacctcagatcggcagggtcagcacagttgcaagt

SEQ ID NO: 8005 - DNA, 201 bp, Homo sapiens
ccagtgtcattttatggtcattcatctattaactcatttgtttatgtattgtctatgactactctcaccctacaaggcagaactgagtatttgtggttgcratagaaaccacatggcccaacagatctggaagcaacttaagggcaggcacagcagtttaatcatttttgtaacctcttagcatttagcagaataaggggc

SEQ ID NO: 8006 - DNA, 201 bp, Homo sapiens
aatgcaggccatctaaagacggggtaggaagggaacagagtggtgagagtgaaaaagactaaaaggtaggtaatatagagctagtcagtgtaaatcaaaarttcctacttaaggacaaaagaaggccagtgtcattttatggtcattcatctattaactcatttgtttatgtattgtctatgactactctcaccctacaag

SEQ ID NO: 8007 - DNA, 201 bp, Homo sapiens
tgttgcatgaaaattgggagccctaacattacagacttctcccaaatactttcacatagtgaagaatgcgaatttaaagtggaatagggaaaaaaggaacmaaagcacagcttaactgtaaaataactgagaaacggaaagaactcaaagtggaactaagtgaatgcaggccatctaaagacggggtaggaagggaacaga

SEQ ID NO: 8008 - DNA, 201 bp, Homo sapiens
catatctggccaatgtttataagcctgacagccctgtgctgtttcatttccatggaccaatcaaagaacattcaagtacccatgagttgccagagtggctstccagttccagctgagctcatggcaagaactcttccctctttctcctgatctgcagaactcctaggagtccctgattgttgtgtccctgtttactctcca

SEQ ID NO: 8009 - DNA, 201 bp, Homo sapiens
ttccatgcctgtcccaggaccaaatggaaccatccttatggagacacacaaaactgttgggtaagaactgaacagatccagatgaagtcctaaagaactcratcagttaagcagcaaagcgcagctgtgtgatcagcagcagccctcttcttgagttaggagttctgtatgaccttgatcaaaactgtccttggaggtttg

SEQ ID NO: 8010 - DNA, 201 bp, Homo sapiens
tgctgactctcaacttttcctggaaaaaatggatcattcccaccatatggggatgagctatatggactccaacagtaccatgcaaccttctcaccatcacscaaccacttcagcctcacactcccatggtggaggagacagcagcatgatgatgatggtgagtgccataggaggggcaatgcaggccctttcccacccact

SEQ ID NO: 8011 - DNA, 201 bp, Homo sapiens
gccctccagcgcatacttctcagtcactcacccgccgctcggcgagaggaaatcggtgtcgtcctcgtcccccgcaccgaacattgcgttggctttcaccrggttgcggggaggaagctgggtattcccagagtcccagggcctgtcaccgccgacgtcgtaaaatgccgcggcggcgtgctgctttccggcagggcgaac

SEQ ID NO: 8012 - DNA, 201 bp, Homo sapiens
gatgacaatgggaaaaggacttgaacctcaagctctctctaaggagctgttttcctcaaacgagaagaattgaagtgtttagttctatcatgttttctgcyaattaccatgcatagaccctcagtagaattggatttccatgtcagcccccactccaggaaggcagcccaatccctaggtgatggggaacccctctcacgg

SEQ ID NO: 8013 - DNA, 201 bp, Homo sapiens
taaatgtataaatgcttgatgaatgaaagaatataacagtggaggaagaaagaaggtaacagagtctttgctgggccattcttggggaatcctgttattamaatagccactaggttgggcatggtggctcacacctataatcccagcactttggaagaccacggtgggtggatcacctgagctcaggagttcgagaccagc

SEQ ID NO: 8014 - DNA, 201 bp, Homo sapiens
tattccacatttgctacggtaaaatcctgttacaaaactaccctataaagaattattttctatagttaagcattttctgaatcctagccattggtccatasaggtctcttttttttggtttgggatataatggatgatctcaaatatggattactctgatttatgtctccttagcaccttgttaacaattttttttaaaat

SEQ ID NO: 8015 - DNA, 201 bp, Homo sapiens
gtttgagaccagcctggccaacatggtgaaaccccatctctactaaatataccagaaattagttgggcgtagtggcaggcacctgtaatcctagctactcrggaggctgagacaggagaatcgcttgaacccgggagggggaggttgcacttagccgggatcgtgccgttgcactccagcctgggtgacaagagtgaaact

SEQ ID NO: 8016 - DNA, 201 bp, Homo sapiens
ggttcccccgctgcctcccatggcctgggatgggagttaaacttttgcctgtgtccagcgtttccatcttcttgaagctggaattatggagcttgggggargggaatcagaactctaccccatgtccattctaatcagggcctctgtatctgccgggaggaagaaagacctattcctccaaatcccagacttcccctagtc

SEQ ID NO: 8017 - DNA, 201 bp, Homo sapiens
aattttttttttttttttagcaacccatagtaaaagagcaactcaaaaaaatatgcactgattttgaagcagctccagtgagaaatgcaacttgctatttsggctagtcaggttcctggataccactgtgcagccctttggcacaacttgctgtggagctctgtggtcagaaccgcttctctgcccttccatgacgccaca

SEQ ID NO: 8018 - DNA, 201 bp, Homo sapiens
tcagaaccgcttctctgcccttccatgacgccacactcacacccggaggtcgctccacatctcccagtccttcaagcttttcgtttttttgtttttttttwaaattgttcccagaagcaaacacatggcctgaacaatccctggattgtaaaataaacaacactacaaaggaagacaataccaaatgaggctccgtagtca

SEQ ID NO: 8019 - DNA, 201 bp, Homo sapiens
gctggggatgaggatgggcgtagacacggtggcagaggccgtgtctgggggcggcccagtctggcccccaggctgggggccaaggtccagcgtgtagactygaggctggcgcaggaagtagcggctcttgggctggtccttgaggcacagctgatggccttccaggatgacatggtggggctccaggcggagcagggcgag

SEQ ID NO: 8020 - DNA, 201 bp, Homo sapiens
agtatataggaatccagccacgcacagtggaggaagagcgttgcaggcccagggaacagcatgtgtggccccgaggtgagaaaagctcttccaatttgagraagtgaaaggagcccagggtgatcaaggtgtggtgaccggagtaggcaaggtgggagggtatagtactcgggacctgtgaactcaggagctcatctggat

SEQ ID NO: 8021 - DNA, 201 bp, Homo sapiens
ttacacaaacctagatggtagagcctgctacatgcctaggctatacggtctagcctgttgctcctaggctacaaacccatacagcttattatgttctgaayactgtaggcaattgtaacacaatgataattgcgtgtgtctttcaacataaacttagaaaaggcaaggtaaatatatggtattataatcttaggtggccac

SEQ ID NO: 8022 - DNA, 201 bp, Homo sapiens
gggactacaggtgcgcgctaccatgcccggctaatttttacattcttagtagagacaggatttcgccttgttggccaggctggtctcaaactcctgacctmaggtgatccacctgcctcgacctcccaaagtgctgagattacaggcatgagccaccgcgcctggccccttatttctttactgacattttcagccatactt

SEQ ID NO: 8023 - DNA, 201 bp, Homo sapiens
gcatgccaccgtggctggctaatttttgtatttcttgtagagatggggtttctccaggttgcctaggctggtctcaaactcctgggctccagcaatccacytgccaaaagtgctaagattacacttgagccaccgtgcccacatttgatttttaaataggtaatatatttacatggttgagcatgtgaatggtttgatttc

SEQ ID NO: 8024 - DNA, 201 bp, Homo sapiens
gagtcatgagactcggtggagcccagccaatgtctggagcagaggcgtggggtggttttaactcatctgggaaggaagaggtggcagagggcagaaggatrgagaaaaggtgatgagtgcagcaggtttagaatccggcatggtcagtgtttagcaggccccagtcaagggcagagggcaactctccctagggggccacca

SEQ ID NO: 8025 - DNA, 201 bp, Homo sapiens
aggttcaagggattctcctgcctcagcttccccagtagctgggatcacaggcatgtaccaccacatctggctaatttttgtacttttagcagagataggawttcaccatgttggtctggctggtctcaaactcctggcctcaagtgatctgcccgcttcggcctcccaaaatgctggaattacaggcatgagccaccgcac

SEQ ID NO: 8026 - DNA, 201 bp, Homo sapiens
ttctgatctttttttttttttttaacaggttaagaaatatcctctcagttgtcggtactgatgccttgaaaaagaccaaaaaggatgatgagaagtctaaraagtccaaagaagaggtagaacatgtctttaacttcacagtataaacatgaaggaaatgaggggataggtctctcgttttctgctttcaatggtttgttt

SEQ ID NO: 8027 - DNA, 201 bp, Homo sapiens
agtctaaaaagtccaaagaagaggtagaacatgtctttaacttcacagtataaacatgaaggaaatgaggggataggtctctcgttttctgctttcaatgktttgttttgctgagatgttgggggaaatgtttttgaaggctctaccattcaagaagagttgctggcagtagttttggttcctttgtaagtatgaatggag

SEQ ID NO: 8028 - DNA, 201 bp, Homo sapiens
agaagtctaaaaagtccaaagaagaggtagaacatgtctttaacttcacagtataaacatgaaggaaatgaggggataggtctctcgttttctgctttcartggtttgttttgctgagatgttgggggaaatgtttttgaaggctctaccattcaagaagagttgctggcagtagttttggttcctttgtaagtatgaatg

SEQ ID NO: 8029 - DNA, 201 bp, Homo sapiens
caaaaaggatgatgagaagtctaaaaagtccaaagaagaggtagaacatgtctttaacttcacagtataaacatgaaggaaatgaggggataggtctctcrttttctgctttcaatggtttgttttgctgagatgttgggggaaatgtttttgaaggctctaccattcaagaagagttgctggcagtagttttggttcctt

SEQ ID NO: 8030 - DNA, 201 bp, Homo sapiens
ggcagggagcgctaagggggaaggggatctctgcgggaaggggccgttaaggagcgggagaaggcggtggagggctgaggaggaaggctgcgggactcagyggtgtcctacacagcggaccaccgttttcctgatccctaagcgctttcgtggactgtagcttatttgcacctctcccactacagccccaaagggcaagca

SEQ ID NO: 8031 - DNA, 201 bp, Homo sapiens
tcaccctaccttcacctcctcaaatcaatgaagagcgtcttaagtagtgtccaatttgtcctttcaattacagaggaaacaggactgtgaaactcagggtragcttcatcctctggtgaagtccggtaaattgccaagattaaaccttagtttaatgcagatctttgatttagcaggcaaccaaaactaaagcacccgacg

SEQ ID NO: 8032 - DNA, 201 bp, Homo sapiens
gcacaggacgttgtatcatgttcttagaaggccacctgaaagaaatctatggaataaatttctcccccaatgggtaaaataaacacactgaatgaggggcraaaaagggttctgggtcagtaagtactctatttctaacttcaatactgcatccaatccacagctatcacattgcaaccggcagtggtgacaacacctgca

SEQ ID NO: 8033 - DNA, 201 bp, Homo sapiens
aatttattacctttttacgccctgccacgaactgtgtagacattgtttttattaatcttttgtttggccgggcgtggtggctcacgcctgtaatcctagcrctttgggaggccgaggtgggtagatcgcttgagctcaggagttcaagacgagcctgggcaacatggcaaatgccgtctctgcaaaaaaatactaaaatta

SEQ ID NO: 8034 - DNA, 201 bp, Homo sapiens
ttataatctctaaaccaaaaaccaaaatgggtttttttgtgttttgcttttttaaaaatgtaatttaaatattagcttaaattaaaatagttcatgttttratagttgaatagtcacttgaatactctgtatgtccacatgttccctagtatataacatgggttataaagaggcaggaaccttttaacttgcatctcttac

SEQ ID NO: 8035 - DNA, 201 bp, Homo sapiens
agttgaatagtcacttgaatactctgtatgtccacatgttccctagtatataacatgggttataaagaggcaggaaccttttaacttgcatctcttacacycctttagggcataacacaaatgtaggagcaattgtattccatcccaaatccactgtctccttggacccaaaagatgtcaacctggcctcttgtgcggctg

SEQ ID NO: 8036 - DNA, 201 bp, Homo sapiens
agcgtgtagacttgaggctggcgcaggaagtagcggctcttgggctggtccttgaggcacagctgatggccttccaggatgacatggtggggctccaggcrgagcagggcgagcatggcagtgtccgtgggcaagtcagtgacaggctgccctgaggccagcactgtgggctggcgacagagtgggcacagcaggcggcgc

SEQ ID NO: 8037 - DNA, 201 bp, Homo sapiens
acttgaggctggcgcaggaagtagcggctcttgggctggtccttgaggcacagctgatggccttccaggatgacatggtggggctccaggcggagcagggygagcatggcagtgtccgtgggcaagtcagtgacaggctgccctgaggccagcactgtgggctggcgacagagtgggcacagcaggcggcgccgggctgga

SEQ ID NO: 8038 - DNA, 201 bp, Homo sapiens
ggtatggaacgtgttgttgaaggggttccagcagacggggcactcagcctcaagctcccggccctgctgctcagccatcctcagccacacacggggaggcytcgcgggagacgtcctggcagaagggggaaaggagcaaaggaacagccatgaagtcccatccttgtgcttggcctggggcaaagtgttctgtgggtgttg

SEQ ID NO: 8039 - DNA, 201 bp, Homo sapiens
aggtaggcaaagatgcggaactgagggttgcggaaacactccctcaaagagtggtggctggggatgaggatgggcgtagacacggtggcagaggccgtgtstgggggcggcccagtctggcccccaggctgggggccaaggtccagcgtgtagacttgaggctggcgcaggaagtagcggctcttgggctggtccttgagg

SEQ ID NO: 8040 - DNA, 201 bp, Homo sapiens
ccaaaagatggagaatatgagcaacagagtgacactgaggatgacggccatcaggtaggcaaagatgcggaactgagggttgcggaaacactccctcaaaragtggtggctggggatgaggatgggcgtagacacggtggcagaggccgtgtctgggggcggcccagtctggcccccaggctgggggccaaggtccagcgt

SEQ ID NO: 8041 - DNA, 201 bp, Homo sapiens
ttatcttaaatattccttaagctttgaaagttgtattcatggctgggtgcagtggctcacgcgtgtaatcccagcactttgggaggctgaggtggatggaycacttgaggtcaggagttgagactagcctggccccaacatggcaaaaccccaactctactaaaaataaaaaaatgagctgggcgtgctggcatgaacctg

SEQ ID NO: 8042 - DNA, 201 bp, Homo sapiens
agaagatttgtctctgcaggaggtacattctgcttgactgcaagcactcaattctctaaatctggtttgtacttctgccatcattttattccattccagcrctctggcatgcaagataatccatctctaaaattcaagacttccaaattgagatgaacgattattgggcttgggttggggtttataaccaatccgatcatt

SEQ ID NO: 8043 - DNA, 201 bp, Homo sapiens
atgtttataagcctgacagccctgtgctgtttcatttccatggaccaatcaaagaacattcaagtacccatgagttgccagagtggctgtccagttccagstgagctcatggcaagaactcttccctctttctcctgatctgcagaactcctaggagtccctgattgttgtgtccctgtttactctccaggcaacagatgc

SEQ ID NO: 8044 - DNA, 201 bp, Homo sapiens
aattccccttctcttctcctgtagctatccatgggaacttcttgcttactggtgcctatgataacacagccaagatctggacgcacccaggctggtccccrctgaagactctggctggccacgaaggcaaagtgatgggcctagatatttcttccgatgggcagctcatagccacttgctcatatgacaggaccttcaagc

SEQ ID NO: 8045 - DNA, 201 bp, Homo sapiens
gccaggctggagtgcagtggtgcgatcttggctcactgcaacctccgcctcccgggttcaagcagttctcctgcttcagcctcccgagtagctgggattamaggcgcacaccaccacgcccggctaatttttgtatatttagtagatatggggtttcaccatgttggtctggctggtctcaaactcctgaccttgtgatcc

SEQ ID NO: 8046 - DNA, 201 bp, Homo sapiens
ggtcgcggtggcttctgcctgtgattccggctacttgggaggctgaggtgggagggattgcttaagcctgggaggcagaggttgcagtgagccgagattgygccattgcactctagcctgtgtgacagagcaagaccctgtctcaaaaaaaaaaaaaatttgttcgaatgccttatagccttcctcacagcacccaggatt

SEQ ID NO: 8047 - DNA, 201 bp, Homo sapiens
cagactgcaattactagaaattatttctctctatttgaagaagatctgctgatgttgcctgttttctttttaataggagaagtgtttgaaattgaagagcrtatcagcgagcgacaggcagaagtattggctgagtttgagagaaggaagcgagcccggcagatcaatgtttccacagatgactcagaggtcaaagcttgc

SEQ ID NO: 8048 - DNA, 201 bp, Homo sapiens
gcctttctaaatatttactttttttctttattataatcacagggttctactccaaattttggttgatcatttagttgaactttaatagaatgtctcaaatyatgttaacaatatcttactgtgtttatatgagttagcccataatctgtcttaggccaatttttaccgcactattaatgtttcttttttgtgtttgttcgt

SEQ ID NO: 8049 - DNA, 201 bp, Homo sapiens
ttttacaatgacattttttcctaaatggggaacaggctcaggaagaaaattagcatttgcgttagacgtctatttctacgtcctctttctctgcttctcawgatcacaccaaactacagatgtcagtcagtgctctacctgttgtataatacaatgtagccttggtttagccgttctcgctcttcaccagtgaccccagag

SEQ ID NO: 8050 - DNA, 201 bp, Homo sapiens
ttgttggtaagttccattttacaatgacattttttcctaaatggggaacaggctcaggaagaaaattagcatttgcgttagacgtctatttctacgtcctstttctctgcttctcatgatcacaccaaactacagatgtcagtcagtgctctacctgttgtataatacaatgtagccttggtttagccgttctcgctcttc

SEQ ID NO: 8051 - DNA, 201 bp, Homo sapiens
gcacaccaccacgcccggctaatttttgtatatttagtagatatggggtttcaccatgttggtctggctggtctcaaactcctgaccttgtgatccgcccrcctcgtcctcctaaagtgctgggattacaggtgtgagccactgtgcccggcagaatttcaattcttaaacttgcagctataaggctgtattttgcctacc

SEQ ID NO: 8052 - DNA, 201 bp, Homo sapiens
catctttacctctttgtgtaatgaatacctttctaaacttaaataccacagttttataatgtcaaaaaattacaatttttttttttttaaacagagtctcrctctgtcgccaggctggagtgcagtggtgcgatcttggctcactgcaacctccgcctcccgggttcaagcagttctcctgcttcagcctcccgagtagct

SEQ ID NO: 8053 - DNA, 201 bp, Homo sapiens
ggaggccaaggcaggtggatcacaaggtcaggagatcgagaccatcctagctaacacggtgaaaccccatctctactaaaaatacaaaaaattagctgggmatgatggcattcgcctgtagtcccagctacttgggaggctgaggcaggagaatcgcttgaacccaggaggtggaggttgtagtgagccgagatctcgcca

SEQ ID NO: 8054 - DNA, 201 bp, Homo sapiens
accacgcccggctaatttttgtatatttagtagatatggggtttcaccatgttggtctggctggtctcaaactcctgaccttgtgatccgcccgcctcgtyctcctaaagtgctgggattacaggtgtgagccactgtgcccggcagaatttcaattcttaaacttgcagctataaggctgtattttgcctacccccttat

SEQ ID NO: 8055 - DNA, 201 bp, Homo sapiens
ccacaacctccacctcccgggttcaagcgattctccagcctcaccctcccgagtagctgggattacaggcatgtgccaccatgcccggctaattttgtatytttagtagagacggggtttctccatgttggtcaggctggtctggaactcccgacctcaggtgatccacccgccttggcctcccaaagtgctaggattaga

SEQ ID NO: 8056 - DNA, 201 bp, Homo sapiens
aggcacgagaattgcttgagctccggagaggcggaggttgcagtgagctgaggtcacgccactgtgcgccaacctgggcgacagagtgagactccatctcaaaaaaaaaaaaaaagaaataaagaaagcaaagtgtttacagtgacaagttgatttcaactagcagttgtcagttaagttagtaacagggcatcacccaaa

SEQ ID NO: 8057 - DNA, 201 bp, Homo sapiens
gttggatttgatgatacttttttttttcttttgagttggagtttcgctcttgttgcccaggctgaagtgcaatagtgtgatctcggctcattgcaacctcygcctcctgggttcaagtgattctcctgccttagcctccctagtatctgggattacaggcatgtgccaccacgaccggctgattttatatttttagtagag

SEQ ID NO: 8058 - DNA, 201 bp, Homo sapiens
atctcagcactttgggaggctaaggcgtgtggatcacctgaggtcaggagtttgagaccagcctggccaacatggtgaaaccccatctctactaaaaattaaaaaaaaaaaaaaaaaactagtcaggtgtggtggcgggcacccataatcccagccacttggtaggctgaggcaggacaatcacttgaacccaggaggtgg

SEQ ID NO: 8059 - DNA, 201 bp, Homo sapiens
gagaacatgcaatatttgtctttttgtttgactttttttttttattttttgagactgagtcttgctctgtcacccaggctggagtacagtggcgtgatctyggctcactgcaacctctgcctcccgggttcctgagtagctgggattataggcacctaccgctacgtccagctaatttttgtatttttagtagagatgggg

SEQ ID NO: 8060 - DNA, 201 bp, Homo sapiens
ccagcctggtatcaaactcctgggttcaagcgatctgcctgcctcagcttcccaaagtgctgggattacatgtgtgagccaccatgcccggccattaagattttttttttctttttttgagatggagtctcgctctgtcacccaggctggagtgcagtggcacaatctcagctcactgcaacctccgcctcccggattcaa

SEQ ID NO: 8061 - DNA, 201 bp, Homo sapiens
tagtagagatgatgtttcactatgttggttaggctggtctcgaactcttgacctcaggtgatccacccaccttggcctcccaaagtgctgagattacaggygtgagccaccacacccggccacagtaattctaatctttctaccctagttataagctcaacttggtaaataaaatattttaggtagattttatcatagatt

SEQ ID NO: 8062 - DNA, 201 bp, Homo sapiens
gattttatcatagattaaaggttaggaaaattttcgcaacctactcatctgacaaagggctaatatccagaatctacaatgaactcaaacaaatttacaaraaaaaaaacagacaaccccatcaaaaagtgggcaaaggacatgaacagacacttctcaaaagaagacatttatgcagccaaaaaacacatgaaaaaatgc

SEQ ID NO: 8063 - DNA, 201 bp, Homo sapiens
gacatgaacagacacttctcaaaagaagacatttatgcagccaaaaaacacatgaaaaaatgctcaccatcactggccatcagagaaatgcaaatcaaaascacagtgagataccatttcacaccagttagaatggcaatcattaaaaagtcaggaaataacaggtgctggagaggatgtggagaaataggaacactttta

SEQ ID NO: 8064 - DNA, 201 bp, Homo sapiens
ccagaaccaagattttaggcttctttctttggtggtcccttctgaaatcgactcttttctgaattaggggttctggtctttatgccttgggtggaaaagaraaaaagacaaaagttggccaggcacagtggctcatgcctgtaatcccaacactttgggaggccaaggcaggtggatcacaaggtcaggagatcgagacca

SEQ ID NO: 8065 - DNA, 201 bp, Homo sapiens
gcccgagagagcctgctgcgtaagtcacaagtcagcattcgctacaattccatgcctgtcccaggaccaaatggaaccatccttatggagacacacaaaastgttgggtaagaactgaacagatccagatgaagtcctaaagaactcgatcagttaagcagcaaagcgcagctgtgtgatcagcagcagccctcttcttga

SEQ ID NO: 8066 - DNA, 201 bp, Homo sapiens; identical to SEQ ID NO: 942

SEQ ID NO: 8067 - DNA, 201 bp, Homo sapiens; identical to SEQ ID NO: 943

SEQ ID NO: 8068 - DNA, 201 bp, Homo sapiens
ggggggccaaggcaggctggatcacctgaggacaggagttcgagaccagtctggccaacatggggaaaccccgtctctactaaaaatacaaaaattagccrggcatggtggtgggcgcctgtaatcccagctactcagaaggctgaggcaggagaatcacttgaacctaggaggcggaggttgcagtgagccaagatggcg

SEQ ID NO: 8069 - DNA, 201 bp, Homo sapiens; identical to SEQ ID NO: 946

SEQ ID NO: 8070 - DNA, 201 bp, Homo sapiens; identical to SEQ ID NO: 947

SEQ ID NO: 8071 - DNA, 201 bp, Homo sapiens; identical to SEQ ID NO: 948

SEQ ID NO: 8072 - DNA, 201 bp, Homo sapiens; identical to SEQ ID NO: 949

SEQ ID NO: 8073 - DNA, 201 bp, Homo sapiens; identical to SEQ ID NO: 950

SEQ ID NO: 8074 - DNA, 201 bp, Homo sapiens
atcaggcattatcttctaccagattccaatgcagacaaatggtagagaaagccaaagttccaaagagggaaagagagggatagggatacctaaaagggggaaaaaaaaatctatacattttaccttttctgcaaactgcaaaaaactggccactagggagcagtatagattaacagttaaaagtgctggctgtagaggtta

SEQ ID NO: 8075 - DNA, 201 bp, Homo sapiens
gtgatctcggctcactgcagcctccgcctcccgggttcaagcgattttcctgcctcagcctcccaagtggctgggattacaggcacctgccaccacatttytcttttttgtatttttagttattttttatatttttgtatttttagtagagacagggtttcaccatgttggccaggctggtcttgaactcctaacctcaaa

SEQ ID NO: 8076 - DNA, 201 bp, Homo sapiens
accaaccataggtcgaaaatacactactgaccatatacagactttttttcttgttattatcccctacacaatacagtatagcaacttcacatcgcatttatattgtattaggtattgtaagtaatcaacagatgaattaaagtatagaggaggatgtgtgtaggttatatgcaaacactacatcattttatatcaggggct

SEQ ID NO: 8077 - DNA, 201 bp, Homo sapiens
ccaaccataggtcgaaaatacactactgaccatatacagactttttttcttgttattatcccctacacaatacagtatagcaacttcacatcgcatttatattgtattaggtattgtaagtaatcaacagatgaattaaagtatagaggaggatgtgtgtaggttatatgcaaacactacatcattttatatcaggggctt

SEQ ID NO: 8078 - DNA, 201 bp, Homo sapiens
caaccataggtcgaaaatacactactgaccatatacagactttttttcttgttattatcccctacacaatacagtatagcaacttcacatcgcatttatattgtattaggtattgtaagtaatcaacagatgaattaaagtatagaggaggatgtgtgtaggttatatgcaaacactacatcattttatatcaggggcttg

SEQ ID NO: 8079 - DNA, 201 bp, Homo sapiens
aaccataggtcgaaaatacactactgaccatatacagactttttttcttgttattatcccctacacaatacagtatagcaacttcacatcgcatttatattgtattaggtattgtaagtaatcaacagatgaattaaagtatagaggaggatgtgtgtaggttatatgcaaacactacatcattttatatcaggggcttga

SEQ ID NO: 8080 - DNA, 201 bp, Homo sapiens
accataggtcgaaaatacactactgaccatatacagactttttttcttgttattatcccctacacaatacagtatagcaacttcacatcgcatttatattgtattaggtattgtaagtaatcaacagatgaattaaagtatagaggaggatgtgtgtaggttatatgcaaacactacatcattttatatcaggggcttgag

SEQ ID NO: 8081 - DNA, 201 bp, Homo sapiens
catatacagactttttttcttgttattatcccctacacaatacagtatagcaacttcacatcgcatttatattgtattaggtattgtaagtaatcaacagatgaattaaagtatagaggaggatgtgtgtaggttatatgcaaacactacatcattttatatcaggggcttgagcatcctcggattcaggtatcttcagga

SEQ ID NO: 8082 - DNA, 201 bp, Homo sapiens
atatacagactttttttcttgttattatcccctacacaatacagtatagcaacttcacatcgcatttatattgtattaggtattgtaagtaatcaacagatgaattaaagtatagaggaggatgtgtgtaggttatatgcaaacactacatcattttatatcaggggcttgagcatcctcggattcaggtatcttcaggag

SEQ ID NO: 8083 - DNA, 201 bp, Homo sapiens
atacagactttttttcttgttattatcccctacacaatacagtatagcaacttcacatcgcatttatattgtattaggtattgtaagtaatcaacagatgaattaaagtatagaggaggatgtgtgtaggttatatgcaaacactacatcattttatatcaggggcttgagcatcctcggattcaggtatcttcaggaggt

SEQ ID NO: 8084 - DNA, 201 bp, Homo sapiens
acagactttttttcttgttattatcccctacacaatacagtatagcaacttcacatcgcatttatattgtattaggtattgtaagtaatcaacagatgaattaaagtatagaggaggatgtgtgtaggttatatgcaaacactacatcattttatatcaggggcttgagcatcctcggattcaggtatcttcaggaggtcc

SEQ ID NO: 8085 - DNA, 201 bp, Homo sapiens
tgaattaatgaatacagaacacttttactgcaaccagtggcaagacattcaaagagaaacaaacacacatttacccacagaattgaagctcacttcccaattttttttttttttttagcaacccatagtaaaagagcaactcaaaaaaatatgcactgattttgaagcagctccagtgagaaatgcaacttgctatttggg

SEQ ID NO: 8086 - DNA, 201 bp, Homo sapiens
gaacctggaagccaagcacctgtgagattgtgggcagtcccttcaacacctggagtccctggtctggaaaggtagggtggcaatttcgtctttgtagatgygaagagggtaactgagtcttctgggcttcctctctctggggccctcatttctcttcgaaagtggctggaacctcctccttgcacaaaggggctgcctgct

SEQ ID NO: 8087 - DNA, 201 bp, Homo sapiens
tctgttcacgtggcccatcttttgttcccgctcaaattctttttgtacctatggtcctcttttctttctctctctctttctttctttttttttttctttcttttttttttttttttttaagacgtagttttgctctgtcgcccaggctagagtgcagtggggcgatactggctcactgtaacccccacctccctggttcca

SEQ ID NO: 8088 - DNA, 201 bp, Homo sapiens
aaaaaagaaagaaagaaagaaagaaagaaagaaagaaagaaagaaaaacagaaatgcaaaatctcagacccactccagacctacggaggcagaatttgcatttttacgagatccctgggagattcagagacacattcattacaagtgaagagtactgatttaggagacatacctccagtatatactccttgatgccttctg

SEQ ID NO: 8089 - DNA, 201 bp, Homo sapiens
gaggatatatgtgtgtgtatatataaacatatatacatatgtgtgaatatatatgtgtgcgtgtgtgtgtgtgtgtgtgtatatatatatatatatatatwtttttttttttttttttttttgagatgcagtctcactctgtcgcccaggcaggagtgcagtggcccaatctcggctcactacaacctccgcctcctgggt

SEQ ID NO: 8090 - DNA, 201 bp, Homo sapiens
ttttttttttgagatgcagtctcactctgtcgcccaggcaggagtgcagtggcccaatctcggctcactacaacctccgcctcctgggttcaagcgattcwcatgcctcagcctcccaaattgctaggattacaggcgtgcatcaccatgccctgctaatttctgtattttttagtagaaacagggttttgctatgttggc

SEQ ID NO: 8091 - DNA, 201 bp, Homo sapiens
gcctcagcctcccaaattgctaggattacaggcgtgcatcaccatgccctgctaatttctgtattttttagtagaaacagggttttgctatgttggccagrctggttgcaaactcctggcctcaagtgatccacccgcctcagcctcccaaaatgctgggattataggtgtgagccattgcaactgaccaagagaatattt

SEQ ID NO: 8092 - DNA, 201 bp, Homo sapiens
tagctgcatgatcttgggcaatttacctctctgagcctttcccatttgtaaaacggatataataattaatagtacctcatagagaggagtaaatacaattwtatatatatatatatatatatatatacatttctcatttgtaaaatgggcatagtaggtaaaattatttcatagagtagaagggaggaataaatacaataa

SEQ ID NO: 8093 - DNA, 201 bp, Homo sapiens
gctgcatgatcttgggcaatttacctctctgagcctttcccatttgtaaaacggatataataattaatagtacctcatagagaggagtaaatacaattatwtatatatatatatatatatatatacatttctcatttgtaaaatgggcatagtaggtaaaattatttcatagagtagaagggaggaataaatacaataatg

SEQ ID NO: 8094 - DNA, 201 bp, Homo sapiens
tgcatgatcttgggcaatttacctctctgagcctttcccatttgtaaaacggatataataattaatagtacctcatagagaggagtaaatacaattatatatatatatatatatatatatatacatttctcatttgtaaaatgggcatagtaggtaaaattatttcatagagtagaagggaggaataaatacaataatgtc

SEQ ID NO: 8095 - DNA, 201 bp, Homo sapiens
catgatcttgggcaatttacctctctgagcctttcccatttgtaaaacggatataataattaatagtacctcatagagaggagtaaatacaattatatatatatatatatatatatatatacatttctcatttgtaaaatgggcatagtaggtaaaattatttcatagagtagaagggaggaataaatacaataatgtcta

SEQ ID NO: 8096 - DNA, 201 bp, Homo sapiens
ccccgtctctactaaaaatacaaaagttagctgggcatggtggcacacatctgtagtcccagctgctggggaggctgaggcaggagaatcgcttgaacccrggaggcggaggttgcagtgagccgagatcatgccactgcactccagcctgggcaacagagtgagactccatctcaaaaaataaataaataaataaataaa

SEQ ID NO: 8097 - DNA, 201 bp, Homo sapiens
agaaaatatctttttttttactttgaagtttggcaaccttcatgttaccccaaagcaaaaccattgtgtcaggagtcaaacaaatgtttagaaagcaaacwtgacgtctctattgtacaacctcctttctcttggctgtttaaaggatgtacttcgtgtattaaagggtactttatgttgaagtaacgaaaaaaccctaat

SEQ ID NO: 8098 - DNA, 201 bp, Homo sapiens
tcgcgcgctgcacggctgctgcctctctggactctggagccctgtgacccgtccctccgcgaccctctctgtctccttacctgctccctcggagccgcctyctccgcctccgttcgtgcagccctgcacgcatgtgctttgttttctgacttcccaggcccgatttccaggtagcgtgggtgggtcttatttgcataggtc

SEQ ID NO: 8099 - DNA, 201 bp, Homo sapiens
ttctacttccttagagaaaaccaaaaaaggaatagctaaatcagagaattgtggtgaaactttctgtattctcagtgttaaatttgatttggttttcctgrtaactgtggggaacaaaaataaactataactttcctcagtatgtcttttaccatcaaattagctgttgtctatgtctaggagcacagtcacatgcctaga

SEQ ID NO: 8100 - DNA, 201 bp, Homo sapiens
attcccattctttacattcttattttaacacaaaaaccctgtgaagttgacaaaatgattcctatttcacacataaagaagtcatcgaagcaagctgttcmgtttggttaataattttagcctcctataaaaattataaaggtcaacatgataagcattaagtgaaaatgatggaagtgaaaactccttgaaagtatgtac

SEQ ID NO: 8101 - DNA, 201 bp, Homo sapiens
tggctataaaagaggaagtgaaaagtagctgcagtattcactgtcatatgttctacttccttagagaaaaccaaaaaaggaatagctaaatcagagaattktggtgaaactttctgtattctcagtgttaaatttgatttggttttcctgataactgtggggaacaaaaataaactataactttcctcagtatgtctttta

SEQ ID NO: 8102 - DNA, 201 bp, Homo sapiens
ggttaataattttagcctcctataaaaattataaaggtcaacatgataagcattaagtgaaaatgatggaagtgaaaactccttgaaagtatgtacagatrcaaattattacacgtatctaggatgaaactaaggactgtgaagtatacaaaggaagaaatagttccttctcccatgaagcttaggatactacaggtgata

SEQ ID NO: 8103 - DNA, 201 bp, Homo sapiens
acaagtttgtacttagattggtaggaagtggaattttttattctaaatggcatgattgatgtaaaaaagttcaaatggcttaggagtgtatgaagtaaaargttacatttccctagctccattccatgtcagtagccacttcattttctaatggcccctagaacatgaggttgttgtgaaggcatggtaaacaccacttgg

SEQ ID NO: 8104 - DNA, 201 bp, Homo sapiens
tgatgtaaaaaagttcaaatggcttaggagtgtatgaagtaaaaagttacatttccctagctccattccatgtcagtagccacttcattttctaatggccsctagaacatgaggttgttgtgaaggcatggtaaacaccacttggggcactggtattaatctgttaaaattttcaattcagctttcctttggattataatc

SEQ ID NO: 8105 - DNA, 201 bp, Homo sapiens
ttctgtgggctccagggtggtcaggcagactactctggagggcctgaggctccagttgctccctcccctgaatcggcaaagctttgggagactgccttctkgccaccaacccaggggcctgtctccatggcagcatgcacgcagcacctggggctgccaggtggcccagtcggcagcctcttgagcacacctgcttggagc

SEQ ID NO: 8106 - DNA, 201 bp, Homo sapiens
caagggcagggatctttgttgagtggcacatggtagacactcaataaatacttattgaatagatgggttaagtgaaagtggcagggatcaactagagtgtyctgtgcttagggtcttttaataaagatggaaagaatgatgttaatcttgtagcaattatcttttaaagtctgggaattaacagtactgttatacttcatt

SEQ ID NO: 8107 - DNA, 201 bp, Homo sapiens
ttttggggaagctagggaccataaagcagatcagaattgtatcagcccctcatgctttcttgactataacctactaacttttcttttctccccatctcacytccctcattctctttctaggtacaataagccatttgtgaaattttccctgttcaatagcaagtttaagccagagcctccatcctttccatctctgaattc

SEQ ID NO: 8108 - DNA, 201 bp, Homo sapiens
gttgtgagatttttatcccagttttacgtgtacttattatccttacaaagtttttgtaacttgttacgagttttaaggatggcagtgccccttaggataamaaataaagcatgataaatagactacattaacagtaaaaacttctgttcgttcatctaaagacacaataaaagaaatgaaaagggaagccacagactggga

SEQ ID NO: 8109 - DNA, 201 bp, Homo sapiens
agtatttattgaatagccacctaaagggtatattagactgcatatagcctttacctaagccttatagtgaattctgtaaacaagatatgaatgcattaacytcattgctgagctctcacagagcataatgataatattaccacagagtaataataaggcttttacatatatggtcttttctcccctctttttccccattca

SEQ ID NO: 8110 - DNA, 201 bp, Homo sapiens
aaaatctggattttaaggctgggtgcggtggttcacaccttaaatcccagcactttgaggggccgaggcaggtggatcacctgaggtcaggagctcaagamcagcctggccaacatgatgaaaccctgtttctactaaaaatacaaaaagtagccgggtatggtggcacacgcctgtaatcccgcctacttggaaggctga

SEQ ID NO: 8111 - DNA, 201 bp, Homo sapiens
tccttatcatggaagccaggaaagacaggcaggctccaaaagaactgtcccgggctccagattatatctgtctgagctagagaaaagagcccatgtgcagwtgtatgactacttctgtgtagtctttttgtgcaatctaatctccatagtccctatggattattatatcttattcttattgtaccatagaaataaggccaa

SEQ ID NO: 8112 - DNA, 201 bp, Homo sapiens
cccctccacacacaccagcttcccattctcccactccaactctagctataggagttattgttcctgggccgggcacggtagctcaagcctataatcccagyactttgggaggccgagttggacagatcacttgagctcaggagtttgagaccagcatggccaacatggtgaaaccccatctctactaaaaatttaaaaatt

SEQ ID NO: 8113 - DNA, 201 bp, Homo sapiens
cccattctcccactccaactctagctataggagttattgttcctgggccgggcacggtagctcaagcctataatcccagtactttgggaggccgagttggrcagatcacttgagctcaggagtttgagaccagcatggccaacatggtgaaaccccatctctactaaaaatttaaaaattagccaggtgtggtagcatgca

SEQ ID NO: 8114 - DNA, 201 bp, Homo sapiens
aactctagctataggagttattgttcctgggccgggcacggtagctcaagcctataatcccagtactttgggaggccgagttggacagatcacttgagctyaggagtttgagaccagcatggccaacatggtgaaaccccatctctactaaaaatttaaaaattagccaggtgtggtagcatgcacctgtaatcccagcta

SEQ ID NO: 8115 - DNA, 201 bp, Homo sapiens
tattgttcctgggccgggcacggtagctcaagcctataatcccagtactttgggaggccgagttggacagatcacttgagctcaggagtttgagaccagcrtggccaacatggtgaaaccccatctctactaaaaatttaaaaattagccaggtgtggtagcatgcacctgtaatcccagctactcggcaagctgaggcat

SEQ ID NO: 8116 - DNA, 201 bp, Homo sapiens
ggccgagttggacagatcacttgagctcaggagtttgagaccagcatggccaacatggtgaaaccccatctctactaaaaatttaaaaattagccaggtgyggtagcatgcacctgtaatcccagctactcggcaagctgaggcatgagagtcacttgaatccaggaggcagaggttgcagtgagccgagatcacaccact

SEQ ID NO: 8117 - DNA, 201 bp, Homo sapiens
tttgagaccagcatggccaacatggtgaaaccccatctctactaaaaatttaaaaattagccaggtgtggtagcatgcacctgtaatcccagctactcggyaagctgaggcatgagagtcacttgaatccaggaggcagaggttgcagtgagccgagatcacaccactgcactccagcctgggcaaccatgcaaaactctg

SEQ ID NO: 8118 - DNA, 201 bp, Homo sapiens
catggtgaaaccccatctctactaaaaatttaaaaattagccaggtgtggtagcatgcacctgtaatcccagctactcggcaagctgaggcatgagagtcrcttgaatccaggaggcagaggttgcagtgagccgagatcacaccactgcactccagcctgggcaaccatgcaaaactctgtctcaaaaataaataaataa

SEQ ID NO: 8119 - DNA, 201 bp, Homo sapiens
ttagacactcctagttttgaggtagatgattacccatctgtttgtgtctattatgttgtatggtatactttaaatttaacttgcgcaaactcaatagtcarttggactgccttaggtaccagatgtctgtttggagccataaaatcaatttgttttgggaagaaggagagcatttagttcaggtaatgtgttaaattagca

SEQ ID NO: 8120 - DNA, 201 bp, Homo sapiens
gttttcagttacaccatcttagccgttctcctatctgagcaagagaagaggtaaaaatataatgtcttcaaaagctgagagtagcattttttctatgtgtmtttctagctggacagcacattggctaatgattttgcacatgtttgacagtacctccatattttccttccatacttagaaatggctggagcttttgtggca

SEQ ID NO: 8121 - DNA, 201 bp, Homo sapiens
acaattccatgcctgtcccaggaccaaatggaaccatccttatggagacacacaaaactgttgggtaagaactgaacagatccagatgaagtcctaaagarctcgatcagttaagcagcaaagcgcagctgtgtgatcagcagcagccctcttcttgagttaggagttctgtatgaccttgatcaaaactgtccttggagg

SEQ ID NO: 8122 - DNA, 201 bp, Homo sapiens
gaaccatccttatggagacacacaaaactgttgggtaagaactgaacagatccagatgaagtcctaaagaactcgatcagttaagcagcaaagcgcagctrtgtgatcagcagcagccctcttcttgagttaggagttctgtatgaccttgatcaaaactgtccttggaggtttgggtttgtaggtcatgagcaggccaaa

SEQ ID NO: 8123 - DNA, 201 bp, Homo sapiens
taataatgaacaagttaagaaattcagatcaagatataaaagaatggcagattgcagttgattctataaagttacacctagtcagccctgtcctctttttstttacaatgtaagactgtattgatttctgtgttctgtctaagaaagtatttggatgattattggtttttcccatagattggcaaatgttttttgagattg

SEQ ID NO: 8124 - DNA, 201 bp, Homo sapiens
acaagttaagaaattcagatcaagatataaaagaatggcagattgcagttgattctataaagttacacctagtcagccctgtcctctttttctttacaatrtaagactgtattgatttctgtgttctgtctaagaaagtatttggatgattattggtttttcccatagattggcaaatgttttttgagattgttttaataa

SEQ ID NO: 8125 - DNA, 201 bp, Homo sapiens
gaccatatatgtgtggttatttctgtacttcctattctcttccattgatctatttgtgtatgagtgatttttgtatccccaacatccaatttagggcctartaaatgtataaatgcttgatgaatgaaagaatataacagtggaggaagaaagaaggtaacagagtctttgctgggccattcttggggaatcctgttatta

SEQ ID NO: 8126 - DNA, 201 bp, Homo sapiens
gcatggtggctcacacctataatcccagcactttggaagaccacggtgggtggatcacctgagctcaggagttcgagaccagcctggccaacatagtgaarccccatctctatgaaaaatacaaaaattagctgggcatggtggcgcacacctgtagtcccagctactcagaaggctgaggcaggagaatggcttgaaccc

SEQ ID NO: 8127 - DNA, 201 bp, Homo sapiens
aaaaatacaaaaattagctgggcatggtggcgcacacctgtagtcccagctactcagaaggctgaggcaggagaatggcttgaacccgggaggtggaggtygcagtgagccaagattgcgccactgtgctccaggctgggcaacagagtgagactctgtctcaaaagaagaaaaaaaaaaaagccctagaggtttacagcg

SEQ ID NO: 8128 - DNA, 201 bp, Homo sapiens
gtagaaaggtgccggctttggaaccagatttggaacaatttgtcttggacaaatggcttaacctctctgaacttcattttcctctgtaaaaaaggctaatyatcccactcctacaaggttgctctggggaaggaatagtctatacggtgcccagtagaatacggaaggcgctcaatacagagttagcatgattatttttag

SEQ ID NO: 8129 - DNA, 201 bp, Homo sapiens
ctctctgaacttcattttcctctgtaaaaaaggctaatcatcccactcctacaaggttgctctggggaaggaatagtctatacggtgcccagtagaatacrgaaggcgctcaatacagagttagcatgattatttttagacccattttctagatggggaagccaaggctcagaagggtgaggcaacttgccgaagtcttcc

SEQ ID NO: 8130 - DNA, 201 bp, Homo sapiens
tttggacctcctgtacaccctggaagctttggttgctttgtctttctcctgtgagtcactctggctttttctctgaggggatcaagtgcgctcatccttgsaggcctctgttctgggtccgattgatctcctgccatcccctcggattccactgtcctctgtgcgctgacctgcctcgactcctggcttctgccgagatgg

SEQ ID NO: 8131 - DNA, 201 bp, Homo sapiens
caggtaaaatccactgaagctgttataaattctttgacgaatgggcctggagaggagtatgagagaccatctgggttcctgatgtgttctgcttcttcatytaggtactgatgactagaatgtccagtttatgaaattcagcaagctattaacttaagacatctgaaactttttacgtgattactatacttgaattgaaag

SEQ ID NO: 8132 - DNA, 201 bp, Homo sapiens
ccaagcgggggtgcagatcacctgaggtcaggagtttgagaccagcctggccaatgtggtgaaaccccatctctactaaaaatacaaaaattagctgggcrtggtggtgcatgcctgtaatcccagctactcgggaggctgaggcaggagaatcgcttgaacccaggaggcggaggttgcagtgagccaagatggcgccat

SEQ ID NO: 8133 - DNA, 201 bp, Homo sapiens
tcacacaggcacctaatccagtctgggctgagtgtggggtggacaaggatgtcaggcaagccttcctggagaaaatgatgtcttagttgacttctgaaggkcaggcagagagaagaatgcacaaggaggctcaagtacagctttggtaacgtagcaagaccctgtctctacaaaaaagtaaaaaaaatagctgggctggta

SEQ ID NO: 8134 - DNA, 201 bp, Homo sapiens
gaccaccttccttacacggcagtctgggggcagcatttcaagagagtgaaagtagaagctgcaaagttttaaaactaagggttgtaactatcaagagttgyaagggcccagcctcaggagcttcatcgtgtccatttctctgcattctattggtcaccccataagtcaaaaggccagcctagattcaagggtgtgaaaata

SEQ ID NO: 8135 - DNA, 201 bp, Homo sapiens
aacacagatgcctgtctctacataaaacaataaaaatttttaaaaaaaatttttttttaatgcccagaacaatagggcatgattcaaaattatcctccgarctgcctctctggttctttctgggaaaaacacttaggcaagttgagaaaggaaggaaagttggaataatggcaaaactgttagaagcattcctctttcctc

SEQ ID NO: 8136 - DNA, 201 bp, Homo sapiens
gaggtggaaggatcacttgagcccaggagtttcaggttgccaccgtgagccatgacctcaccatgagaccccaactcaaaaaaaaaaaaaaaaaaaaaaaraggctcaagagagcattccacagcctgaaatcccaaggtaatactatgttaacaaaaaccattttgttttgttttgtttttgagaaaacacaacccccca

SEQ ID NO: 8137 - DNA, 201 bp, Homo sapiens
acgtctctattgtacaacctcctttctcttggctgtttaaaggatgtacttcgtgtattaaagggtactttatgttgaagtaacgaaaaaaccctaatggrtgttcctaaacctaaaccttttctttattccacatttgctacggtaaaatcctgttacaaaactaccctataaagaattattttctatagttaagcattt

SEQ ID NO: 8138 - DNA, 201 bp, Homo sapiens
tgttgcccaggctgcagtgcaaaggcacaacctcggctcactgtaacctctgcctcccgggttcaagtgattctcctgcctcagccttctgagtagctggrattacaggcaggtgccaccacacccagctaattttgtatttttagtagagacagcgtttcagcatgttggtcaggctggtctcgaactcctgacatcagg

SEQ ID NO: 8139 - DNA, 201 bp, Homo sapiens
gcccaggctggtctaactcctggactcaagcaatcctcctgcctcagcctcccgaagtgctgggattacaggcatgagccaccacacctgtccctctcccmctcgtattactcagacttaaactaccccaaaaaggctaaagtcctgctaagagtctccgtagaactgatgattcaagaggctcttatgatcacagctggt

SEQ ID NO: 8140 - DNA, 201 bp, Homo sapiens
ccctgacttcaaggagcttatggcccagtgagggaaaacaaaagcaaacagacaattacaacagagagtgaccgtgcctatgagagaggttagcacaggasgataaggttgagcctaacccagctgggggctggaaggagtaagagttagcctggcaaagaaaaagaaagggcttttctggcaaagggaacactgtgtata

SEQ ID NO: 8141 - DNA, 201 bp, Homo sapiens
tgcttaatgtcaggagctcaagcccagcttgggcaacacagatgcctgtctctacataaaacaataaaaatttttaaaaaaaatttttttttaatgcccaraacaatagggcatgattcaaaattatcctccgagctgcctctctggttctttctgggaaaaacacttaggcaagttgagaaaggaaggaaagttggaata

SEQ ID NO: 8142 - DNA, 201 bp, Homo sapiens
aactccaactcaccaattcacaggattatcctccgcgtccaaacagatcttaaatgtgtacgtcattcattaaacaaacacttcttgtgttccagctacaragttaaaaggtacagtcataatctgtggggaaaacaaagagaaaactgtgatatcatgtaatgagaaccctgatgaggatactagcactggcatcacaca

SEQ ID NO: 8143 - DNA, 201 bp, Homo sapiens
cagatgataactttctctaagagagtgaaatgatgttttatccaaagttacttaatagaagaatggctcagctactcaaatcactggaattaccaccattyttcaccacttgctgctgaactgtgggcatttaaatgccaagcatcaggctgaccgcagtggctcatgcctgtaaatcccagtgctttgggaggccaaggc

SEQ ID NO: 8144 - DNA, 201 bp, Homo sapiens
ctggcagggagcgctaagggggaaggggatctctgcgggaaggggccgttaaggagcgggagaaggcggtggagggctgaggaggaaggctgcgggactcrgcggtgtcctacacagcggaccaccgttttcctgatccctaagcgctttcgtggactgtagcttatttgcacctctcccactacagccccaaagggcaag

SEQ ID NO: 8145 - DNA, 201 bp, Homo sapiens
caatggtgcaatctcagctcactgcaacctctgcctcctgggttcaagcacctccacctcagcctcccgagtagctaggattgcaggcatgcaccaccacrcccggctaattttgtatttttagtagagacagggtttctccatgttggtcaggctggtctcaaactctggacctcaggttatctgcccacctcagcctcc

SEQ ID NO: 8146 - DNA, 201 bp, Homo sapiens
tgacatgtccttccagccttttctttaaaaaaaaaaaatggccaagggaatatttgaactcttatcttgtattcttgggtggagctgattttatcctggaygtttaagtagcttttgtaggtactcaggaatcctaaaatcaatagcctttttggtgattggaacatcacgaacatgcatacccagattatcactgtagaa

SEQ ID NO: 8147 - DNA, 201 bp, Homo sapiens
agctgattttatcctggatgtttaagtagcttttgtaggtactcaggaatcctaaaatcaatagcctttttggtgattggaacatcacgaacatgcatacscagattatcactgtagaaacacagctgctgattctcattagcagtatgaggaggaggaagatgatggtgagtcttgccaggctttgaactgcaggactgg

SEQ ID NO: 8148 - DNA, 201 bp, Homo sapiens
tgccattcttttaacataaggcctcagccttttcttggagtgtaggaccctgttgcctgtttttataagtaaagctttattagaacacagcctttctcatktgtttatgtattgtctatgactcctcttaccctccaaggcagaattgaatatttgtgattgcaacagaaaccacatggcctgcaacatctaaaatgttta

SEQ ID NO: 8149 - DNA, 201 bp, Homo sapiens
cgtttctccatgttggtcaggctggtcttgaactcctgacctcaggtgatccgcccgccatggcctcccaaagtgctgggattataggcgtgatccactgygcctgactgataatttaattttttaaataggaaatatattcatatggtttgtaattcaaaaagtacacaaggatattcagtgaaaagtatttcatttact

SEQ ID NO: 8150 - DNA, 201 bp, Homo sapiens
gtctgtgttttactgtcttcccaaatttttggatggttatgaggtgtgtgataactttacaaagtgtatgataccataacaattactaatcttttggggayttgtttgtttgttcgtttgtttgagagacagagtcttggtctgtcgcccaggctggagtgcggtggcgcgatctcagctcactgcagcctcaacctccct

SEQ ID NO: 8151 - DNA, 201 bp, Homo sapiens
aatctcagcactttgggaggctaaggcgtgtggatcacctgaggtcaggagtttgagaccagcctggccaacatggtgaaaccccatctctactaaaaatwaaaaaaaaaaaaaaaaaactagtcaggtgtggtggcgggcacccataatcccagccacttggtaggctgaggcaggacaatcacttgaacccaggaggtg

SEQ ID NO: 8152 - DNA, 201 bp, Homo sapiens
cagttgacaaaccctggagaggtcagctgggaacaaatgtaaaagtctcagcaaaacggtgtacttcctgtttgaggtctgtctttctggtagttcaatcyctgtatttcacaactagtctacaaaaataaaactacaaaaatatttaatttcccctccctctgggatttagagattttacttacacagtgcgttagaaaa

SEQ ID NO: 8153 - DNA, 201 bp, Homo sapiens
acaaaaataaaactacaaaaatatttaatttcccctccctctgggatttagagattttacttacacagtgcgttagaaaacctctctcaaatcccaaagaygagtgatttggtattaaattcagtgttaacccccaagttctttgattattaggtggtggtctgtgcaaattttatgtgagactgggctaactctgtgacc

SEQ ID NO: 8154 - DNA, 201 bp, Homo sapiens
tgtctttttgtttgactttttttttttattttttgagactgagtcttgctctgtcacccaggctggagtacagtggcgtgatcttggctcactgcaacctytgcctcccgggttcctgagtagctgggattataggcacctaccgctacgtccagctaatttttgtatttttagtagagatggggtttcaccatgttggcc

SEQ ID NO: 8155 - DNA, 201 bp, Homo sapiens
agtgctgggattacaggcatgaaccaccgctcctggccatcattttttttttttttttttttttttttttagctctcacttgttgaacatccagttcttarattctgtgtactaagtatctatgttgtacatctctgtaattcagaactgtggttctcaagctttagcatgcataagaattgtccatggaacttgataagc

SEQ ID NO: 8156 - DNA, 201 bp, Homo sapiens
ttttttttttttttttttttttttttagctctcacttgttgaacatccagttcttagattctgtgtactaagtatctatgttgtacatctctgtaattcakaactgtggttctcaagctttagcatgcataagaattgtccatggaacttgataagcacctaaattttgaggccctactccctaagaggtgattcagtggt

SEQ ID NO: 8157 - DNA, 201 bp, Homo sapiens
cacttgttgaacatccagttcttagattctgtgtactaagtatctatgttgtacatctctgtaattcagaactgtggttctcaagctttagcatgcataaraattgtccatggaacttgataagcacctaaattttgaggccctactccctaagaggtgattcagtggtgtggcatagggtccataatttttatttttacc

SEQ ID NO: 8158 - DNA, 201 bp, Homo sapiens
aatacaaaaagtagccgggtatggtggcacacgcctgtaatcccgcctacttggaaggctgaggcacaggaattgcttgaacctgggaggcagaggttgcrgagatcgtgacactgcactcaagcctgggcgacagactgtgactctgcctcagaatcctttttaaattaaaaaataagtaaataaaatctggagttcaca

SEQ ID NO: 8159 - DNA, 201 bp, Homo sapiens
ttatcactttttccaggatttgtcttgcctcaacaggtttctcatctcctttgctgagtttgaacagcttgataagctggagtgatgtagaaagatgaaayttatgatagaaggggatgaccttcaaccgatatctggagataaagtgtttctttgtcttattccttctttttaagagatgtggggcgggggtgggtgtgg

SEQ ID NO: 8160 - DNA, 201 bp, Homo sapiens
ctactaaaaatacaaaaaattagccaggcgtggtggtgggcacctgtaatcccagctactcgagaggctgaggcaggagaatcgcttgaacccaggaggcrgagcttgcagtgagccgagatcataccactgtactccagcctgggtgacaagagcaaaactccatctcaaaaaaaaaaaaaaaaaaaaaaaaggctattc

SEQ ID NO: 8161 - DNA, 201 bp, Homo sapiens
aaatacaaaaaattagccaggcgtggtggtgggcacctgtaatcccagctactcgagaggctgaggcaggagaatcgcttgaacccaggaggcagagcttkcagtgagccgagatcataccactgtactccagcctgggtgacaagagcaaaactccatctcaaaaaaaaaaaaaaaaaaaaaaaaggctattcctactac

SEQ ID NO: 8162 - DNA, 201 bp, Homo sapiens
catttctgttggttaatttgggttttgttttgtttgttgttgttgttttgttttttgtttttcttagtagagacaaggtttcaccatgttggccaggcagktctcaaactcctgacctcaagtgatctacccacctcagcctcccaaagtgctgggattacagcactttgtaatgtaaaatgggattgcattttatacact

SEQ ID NO: 8163 - DNA, 201 bp, Homo sapiens
aggcagttctcaaactcctgacctcaagtgatctacccacctcagcctcccaaagtgctgggattacagcactttgtaatgtaaaatgggattgcattttrtacactttataatgtaatgggattacagctcactttgtgagccatcgcacccggcctctgtcagttaatttggaataggaatatgaagccagcacccggg

SEQ ID NO: 8164 - DNA, 201 bp, Homo sapiens
tattttggcctagaatgccactaagtttttttttttttaagacaagacattcctgttgcccaggctggagtgcatggcacaatcatggctcactgcagccrtgacctcccaagatcaggtcgattctcccacctgagcctctcaagtagttgagactacgggcacacatcaccacacctggctaacttttttgtattttta

SEQ ID NO: 8165 - DNA, 201 bp, Homo sapiens
cacacctggctaacttttttgtatttttagtagagatggggtttcctcatgttgcccaggcgggtctgaaactcctgggcttaagcgatctgcctgcctcrgcctcccaaagggttaggattacaggtgtgagccactgtacccagctctaagttctgtttattgcagtattatatcaaggtctcccctttgttttcctac

SEQ ID NO: 8166 - DNA, 201 bp, Homo sapiens
tatcaaactcctgggttcaagcgatctgcctgcctcagcttcccaaagtgctgggattacatgtgtgagccaccatgcccggccattaagatttttttttyctttttttgagatggagtctcgctctgtcacccaggctggagtgcagtggcacaatctcagctcactgcaacctccgcctcccggattcaagcgattttc

SEQ ID NO: 8167 - DNA, 201 bp, Homo sapiens
gcagatcacctgaggtcaggagttccagagcagcctggccaacatggcgaaaccccgtttctgctaaaaatacaacaaaaaaattagccaggtgtggtggygtgcacctgtagtcccggctacttgggaggcttaggcaggagaatcacttgaactcaggaggcggaggttgcaatgagctgagattgtgccactgcactc

SEQ ID NO: 8168 - DNA, 201 bp, Homo sapiens
ggaaataacaggtgctggagaggatgtggagaaataggaacacttttacactgttggtgggactgtaaactagttcaaccattgtggaagtcagtgtggcrattcctcagggatctagaactagaaataccatttgacccagccatcccattactgggtatatacccaaaggactataaatcatgctgctataaagacaca

SEQ ID NO: 8169 - DNA, 201 bp, Homo sapiens
tggagaatcgcttgaacctgagaggtggatgttgcagtgagccaagatggcaccactgcactctagcctgggtgacagagtgagactctatctaaaaaaawaaaaaataaaaaataaaaatagagcaaagattgtatgaccctggattttaacttattgttacatgagtacccatttttattttggaagaagctgagctta

SEQ ID NO: 8170 - DNA, 201 bp, Homo sapiens
gagaatcgcttgaacctgagaggtggatgttgcagtgagccaagatggcaccactgcactctagcctgggtgacagagtgagactctatctaaaaaaatawaaaataaaaaataaaaatagagcaaagattgtatgaccctggattttaacttattgttacatgagtacccatttttattttggaagaagctgagcttaag

SEQ ID NO: 8171 - DNA, 201 bp, Homo sapiens
tatatcctgcacaaatgacacttcaaaacaggtgcatactttgaaaggttttcttgggatttgtatataccttgccctgggtcactgatatgtctgaagasatttgataatgtggcatcattgagtagatttctctaattgataatgagggacctgaataattaagaacctgtgggtcttcaaaattagttcatggtaata

SEQ ID NO: 8172 - DNA, 201 bp, Homo sapiens
ctttatttcctttggtcttaagaaggcactcttgcaaatattcattccctcctcctgaccaggattcatattgataatatggaatgaagtaaatcctttgkggttttcttatgctataatcatttttcagactctcattggaagagaacagtatttgtgtcttctgcctctagctctttatgaggatgtgtcagtagtctt

SEQ ID NO: 8173 - DNA, 201 bp, Homo sapiens
cattggaagagaacagtatttgtgtcttctgcctctagctctttatgaggatgtgtcagtagtcttcctggctagcgaaagtcttttcttttctttttttytttttttttttttttttgagacggagtcttgctctgtagcccaagctggagtgcagtggcgcggtctcgctttactgcaagctccgcctcccgggttcac

SEQ ID NO: 8174 - DNA, 201 bp, Homo sapiens
gggtaggagttaacaaggagaaaataaatagatggctccctgaatctatataaatttcctacccacagtctttttttttttttttttttgagatagtctcstgtcacctaggctggagtgcggtagtccaaccttgactcactgaaacctccacctcccaggttcaagtgattctcatgcctcagccacccgagtaactgg

SEQ ID NO: 8175 - DNA, 201 bp, Homo sapiens
ggtttcatcatgttggccaggctggtctcgaactcctggcctcaagtgatctgcctgcctcagcctcccaaagtgctgggataacaggcatgagccaccgygcctggccaatttattctttacctcttggtaattgtgtcttatttctcagcttatttccttcacagcatgaaattatatttattgtttctctccctatca

SEQ ID NO: 8176 - DNA, 201 bp, Homo sapiens
aattctgagtaaagatgctaggagagcattcatttattagatgcattccatatagacaaagtatttaccaagaaacaagcccaggagcagggaaccaccasgttgcctggtgaaccagcctagatcagaaatggagcaggtcaaaactcctgtactgatcagtagtgggatcatgcctgtgaatagccattgcattccagc

SEQ ID NO: 8177 - DNA, 201 bp, Homo sapiens
ctacttgggaggctgaggcaggagaatcgcttgaacccaggaggtggaggttgtagtgagccgagatctcgccactgcattccagcctgggctacagagcragaatccgtatcaaaaaaaaaaaaaaaaaagataaaagttgatggtgggggcccaggagaaaagttgatggtgggggcctagtagaatactcatgctcgg

SEQ ID NO: 8178 - DNA, 201 bp, Homo sapiens
agtaatttcttctatactacccaaccctcaattctatttttttttctttttttctttctttttttttttttttctggagacagggtctccctctattgccyaggctgaagtgcagtggcactatcttggctcactgcaatctctgccttccagactcaagtgatcctcccacctcagcctcctaagtagctggaactacag

SEQ ID NO: 8179 - DNA, 201 bp, Homo sapiens; identical to SEQ ID NO: 944

SEQ ID NO: 8180 - DNA, 201 bp, Homo sapiens; identical to SEQ ID NO: 945

SEQ ID NO: 8181 - DNA, 201 bp, Homo sapiens
gcggtggctcacgcctggtaatcccagcactttgggaggctgaggcaggtggatcatgaggtcaggagatcgagaccatcctggctaacacggtgaaaccygtctctactaaaaaaaatattaaaaaattagccaggcctggtggtgggcgcctgtagtcccagctacttgggaggctgaggcaggagaatggtgtgaacc

SEQ ID NO: 8182 - DNA, 201 bp, Homo sapiens
tctctactaaaaaaaatattaaaaaattagccaggcctggtggtgggcgcctgtagtcccagctacttgggaggctgaggcaggagaatggtgtgaacccrgaagtcagaggttgcagtgagccaagattgcacctgggcaacacagcgagactccgtctcaaaaaaaaaaaaaaaaaaagatgtccgtattttaggtggt

SEQ ID NO: 8183 - DNA, 201 bp, Homo sapiens
ttaggcaagaggctctgagctgggcctataagaagttcaccgcccaaccttgagatgcacagtgaccctgccagtccctttggtaatgccaaaatgctgaygttacttgctcttcccactggcccccagtgggcatcttgccatcaccaccattcctagtctcttccgagtgtagtgtcatgaacatggacttagaggagt

SEQ ID NO: 8184 - DNA, 201 bp, Homo sapiens
taggcaagaggctctgagctgggcctataagaagttcaccgcccaaccttgagatgcacagtgaccctgccagtccctttggtaatgccaaaatgctgacrttacttgctcttcccactggcccccagtgggcatcttgccatcaccaccattcctagtctcttccgagtgtagtgtcatgaacatggacttagaggagtc

SEQ ID NO: 8185 - DNA, 201 bp, Homo sapiens
ggctacaggcacacaccatcatgtctggctaatttttgtatttttagtagagatgagtttttgccatgttggccaggctagtcttgaactcctgagctcargtgatccgcccgtctcggcctcccaaagtgctgggattgggaaaggtgtgagccactgtgcccggccataatacctgtttgaattaggcacctagcacaa

SEQ ID NO: 8186 - DNA, 201 bp, Homo sapiens
catgttggccaggctagtcttgaactcctgagctcaggtgatccgcccgtctcggcctcccaaagtgctgggattgggaaaggtgtgagccactgtgcccrgccataatacctgtttgaattaggcacctagcacaaaataggtattcgagccttagtattttttttattatctacaattgttgttactccagctttcaga

SEQ ID NO: 8187 - DNA, 201 bp, Homo sapiens
gtctcggcctcccaaagtgctgggattgggaaaggtgtgagccactgtgcccggccataatacctgtttgaattaggcacctagcacaaaataggtattcragccttagtattttttttattatctacaattgttgttactccagctttcagaatgaaaagtaacactcttcttgataaggttaataggttagtatttttc

SEQ ID NO: 8188 - DNA, 201 bp, Homo sapiens
cacaaagtattacagggaataaaataaggtattgccttttatgtggcaaatgaccttcctgattactagtaagtgatgttagaaagttctacctaaatacytttgtgaaaacaagttcgaaaaggcaaacaactctatcattctgagaatatccaaatggaatgaaatcacttaaaaggcttcccactttgagcaactgct

SEQ ID NO: 8189 - DNA, 201 bp, Homo sapiens
tccctgcttcctaagttactctaaaacaaggtaaaacccactagataactgtctttagtggaaagactaactcaatagtgagctgactgtagagtcaaagytcagcatgctagcattttatgagattcgttacaactgaagtttaagccatactttaaagctcatgcttaataatatatgagtttttagaaagcaaaaatt

SEQ ID NO: 8190 - DNA, 201 bp, Homo sapiens
aaaacccactagataactgtctttagtggaaagactaactcaatagtgagctgactgtagagtcaaagttcagcatgctagcattttatgagattcgttamaactgaagtttaagccatactttaaagctcatgcttaataatatatgagtttttagaaagcaaaaattacgatacttagagaacactaaagtctcttggg

SEQ ID NO: 8191 - DNA, 201 bp, Homo sapiens
ctagataactgtctttagtggaaagactaactcaatagtgagctgactgtagagtcaaagttcagcatgctagcattttatgagattcgttacaactgaastttaagccatactttaaagctcatgcttaataatatatgagtttttagaaagcaaaaattacgatacttagagaacactaaagtctcttgggatgaagca

SEQ ID NO: 8192 - DNA, 201 bp, Homo sapiens
caaacagacatgatttctgcaatcaacgtccctaatgtaaatgattttacaataaaaaaaattgtaaattataataaatgctatgaaaaaaatatggtgcyttgtgagagcctacagagatggaggcagcatggacgggaatgacacatgaaacttggatacggtcaaaagtggcctcttaaattgaagagttgacatttg

SEQ ID NO: 8193 - DNA, 201 bp, Homo sapiens
agaaatagttccttctcccatgaagcttaggatactacaggtgatattatcaacacaaaacactggcacattacatttcaaattcctttgtactaaatcargcattatcttctaccagattccaatgcagacaaatggtagagaaagccaaagttccaaagagggaaagagagggatagggatacctaaaagggggaaaaa

SEQ ID NO: 8194 - DNA, 201 bp, Homo sapiens
ggaccccggaagcccttgactcgctccagagttcagccccgagccgcgcgagtcgactcacctacctcttttcaagccggcctagccccttcccggaaccycggctcccccccaacgaaactactgctaagccaactggactacacttcccagactgcttggagcctctctctccgcagaacctcgtcttccgcgagcttt

SEQ ID NO: 8195 - DNA, 201 bp, Homo sapiens
ggtctcagccaaagtgtgtgtttatataggcacaaagttaataaatgaaacaagaggtggcttgaaccattttcttgccttttgaagctgtgtcatttagktttatgtgtttggcataatttaataaactgaaaaacagtaaactataaaatgtgtaatagacagttacttttccctcagggcatacacagactgcaatta

SEQ ID NO: 8196 - DNA, 201 bp, Homo sapiens
tcatttagttgaactttaatagaatgtctcaaatcatgttaacaatatcttactgtgtttatatgagttagcccataatctgtcttaggccaatttttacygcactattaatgtttcttttttgtgtttgttcgtttttgttttgttttgttttgttttgttttgttttgttttgtgttttgagacagagtcttgctctgt

SEQ ID NO: 8197 - DNA, 201 bp, Homo sapiens
cccctccccagtgcgagttttgaattggataaacatttgttgttgggctttgaaaattgagacatcaaatgcattccatatcaatgacatagaacaatgawaaatgtttcttggattttattgaagaggggtaccatcctcagataatgccctcttgttatttgcaggttgcgaagtcttagttgtggtctagtcacacac

SEQ ID NO: 8198 - DNA, 201 bp, Homo sapiens
agacatcaaatgcattccatatcaatgacatagaacaatgataaatgtttcttggattttattgaagaggggtaccatcctcagataatgccctcttgttwtttgcaggttgcgaagtcttagttgtggtctagtcacacacaattatgaggagcccctctggtctctctgtccactgtctcatctccccttcatcatcca

SEQ ID NO: 8199 - DNA, 201 bp, Homo sapiens
aatgccctcttgttatttgcaggttgcgaagtcttagttgtggtctagtcacacacaattatgaggagcccctctggtctctctgtccactgtctcatctmcccttcatcatccagcttgttggaagggttttttctattactcccttgaggtccttacccttatttactcttcaacctgctgcaaactgaccaaccccta

SEQ ID NO: 8200 - DNA, 201 bp, Homo sapiens
tttttctctacttgcccttggtgatcagctctactcccatggcatcattcactgtgtgttctgatgattcccaaatctctcactgcagcttaggtatcccmcaggtacttcaaacttgagacatctgaattgaaatatttccccacctctctcctatactcatacaattcttagttgaaaatctgcctagcctcctttata

SEQ ID NO: 8201 - DNA, 201 bp, Homo sapiens
cactgcaacctccacctcccaggtacaagccattctcctgcctcagcctcccaagtagctgggactacaggcatgtgccaccatgcctggctaatttctgyatttttagtagagacggggtttcaacacgttggccaggtgttgaacacctcctcaagtgatcctctcaacacctcctcaagtgatccgcctgcctgggcc

SEQ ID NO: 8202 - DNA, 201 bp, Homo sapiens
tgcttactgctatagtgataggtaatataatggattatagtttgccagtactctctgttgtttccccaggactaagctacttgaaatcaagaactgattcytagtcatcactgtatagttagcacctgagtcagtatccagtacattgtggcactgagtgaaagttggcagtcttcacagaccaagtggtagcagtgtagg

SEQ ID NO: 8203 - DNA, 201 bp, Homo sapiens
gggaggatcgcttgagctcaggaggttgaggctgcagtgacccatgatcatgccactgcactccaccctgggcaacaacaagacctcatctcttaaaaagraaaaaaaaaaggttgctaggtggtttgaacagtgagagaatagtaaaggcttgctcccatcttaggggaactttaataacagtgtttaaaactgtgttaa

SEQ ID NO: 8204 - DNA, 201 bp, Homo sapiens
agctgactcagaagttgtgatcctaagactgtagaaaacatctgggcacagtggctcagtcctgtaatcccagcattttgggaggcagaggcaggcggatsacttgagcctcaggagtttgagaccagcctggtcaacatggtgaaaccctgtctctactaaaaatacaaaaatttgccaggtgtgatagcatgtgcctat

SEQ ID NO: 8205 - DNA, 201 bp, Homo sapiens
gtagccttggtttagccgttctcgctcttcaccagtgaccccagagatccattacacaaagcactctgtcacattcttgacactagtattttggaacaggycctgtagtgagtttatagaccaactagtatccataactcagtctggcttttctttttcagttatgtgacctcgctaagatacttaatttctgtaagcttc

SEQ ID NO: 8206 - DNA, 201 bp, Homo sapiens
tttcaccgtgttagccaggatgggctcgatctcctgaccttgtgatctgcccgccttggcctcccaaagtgctgggattacaggtgtgagccacagcgccyggcccaaaaaatttttaaaaatttatttaattttttaaaacgttagccaggtgtggtggcatgcgcctgttagtcccagctactcaggaggctgggtgat

SEQ ID NO: 8207 - DNA, 201 bp, Homo sapiens
catacacacagcattaatccttgatttgatttgacttggttttctctggctgcaagactggactatcacaacttcctacacatccacttttctctcatgtscagtcacactctggcattttataatctctaaaccaaaaaccaaaatgggtttttttgtgttttgcttttttaaaaatgtaatttaaatattagcttaaat

SEQ ID NO: 8208 - DNA, 201 bp, Homo sapiens
tgaaaatgaagtaagtggaagatttcattcttaggccttttcttactaaaggagttatgtccgttttttcttacctgttaactttggatcttgatttttgyctatagcctagtgaccactatttcctagctccatttattccagaaagatccagcctacctcctacatgataaattaacaatgaactaaatataatattct

SEQ ID NO: 8209 - DNA, 201 bp, Homo sapiens
tatctgtaatccacttgtaccaaaactatgtgatttctgtgtccttatatctcttccaaagcatgttttctttctagaatccaggtactcctttggtgcaraatgactattttgcttattgggccaaagtagtttacaagtgtagttacaatttagcctctcgtgttgtacagaatgggtatgtctgcacagaaggtaagc

SEQ ID NO: 8210 - DNA, 201 bp, Homo sapiens
tggctatctgccaggtaaatttttagagcagagatcttcaggtaggattttcttgggctgcagggaattggaatcagaggagaatgtttaatatagtgagrgctaagtatatttgccttttttttttttttgaggtggagtctcactctgtcacccaggctggagtgcagtggcgcgatctcggctcactgcaaccgccgt

SEQ ID NO: 8211 - DNA, 201 bp, Homo sapiens
actgcaaccgccgtctcccgggttcaagcaattctcctgcctcgacctcccgagtagctgggactacaggcgcgtgccaccatgcccagctaatttttttwtttttagtagagacagggtttcaccatgttggccaggctggtcttaaactcctgacctcaggtgatcttcccgcctcagcctcccaaagtgctgggatta

SEQ ID NO: 8212 - DNA, 201 bp, Homo sapiens
tcagcctcccaaagtgctgggattatagataacaggtaacgcgcccagccatatttgcctttaaattacaattaatctgaaatttcagagttacaaattamcagaaaacaaggattttcactcttgtccaatgctacaggtatataagtctcccttcctggttctgtaagttcagggaggctagaatctgttagagaactt

SEQ ID NO: 8213 - DNA, 201 bp, Homo sapiens
ttagctgggcatggtggcgcacacctgtagtcccagctactcagaaggctgaggcaggagaatggcttgaacccgggaggtggaggttgcagtgagccaasattgcgccactgtgctccaggctgggcaacagagtgagactctgtctcaaaagaagaaaaaaaaaaaagccctagaggtttacagcgattccatggtttt

SEQ ID NO: 8214 - DNA, 201 bp, Homo sapiens
tgcagtgagccaagattgcgccactgtgctccaggctgggcaacagagtgagactctgtctcaaaagaagaaaaaaaaaaaagccctagaggtttacagcrattccatggttttcagctagcacctaaggcagataagcttagttgttgagtcattgtttatgtcagaaaggagcttcctgttaatatggttatatgaata

SEQ ID NO: 8215 - DNA, 201 bp, Homo sapiens
tgtgttcccgtggaatgcaggccaggctttagcttaactgagcagtaaaacaggagagaaattgacctactggtaaaggagcaaattataatttccttccytctgccatacccttagatctgtgggaaagcacgcttctcgttgcaggaagtaaagcagactttcatgagtgctttgcttcattctttcctccatggatgc

SEQ ID NO: 8216 - DNA, 201 bp, Homo sapiens
gtctctattgtacaacctcctttctcttggctgtttaaaggatgtacttcgtgtattaaagggtactttatgttgaagtaacgaaaaaaccctaatgggtrttcctaaacctaaaccttttctttattccacatttgctacggtaaaatcctgttacaaaactaccctataaagaattattttctatagttaagcattttc

SEQ ID NO: 8217 - DNA, 201 bp, Homo sapiens
aaaaggttgtctacagaggagagttattaaagaaaggcttcttggccgggcacggtggctcacgtatgtaatcgcttgaacctgggaggcggaggttgcartgagccaagatcacaccgttgtactacagcctgggcaacagagcaagactccatctcaaaaaaacttaatttgctgttgcagagaggttgacaatggctt

SEQ ID NO: 8218 - DNA, 201 bp, Homo sapiens
cactgtgcctgacctaaacatactgtttttaatctgatttcaattataaccaaatagttgcatttcctatgtagttgttcagcttctgaattctcaggacyaccctctgttgctcacttcactattgttcaggtattaatgaattctatttcatagattatgatgaaaagaactttttttcttctttgtagtatgtgtaaa

SEQ ID NO: 8219 - DNA, 201 bp, Homo sapiens
gggaggttgcacttagccgggatcgtgccgttgcactccagcctgggtgacaagagtgaaactccatctcaaaaaaagatgagatgaactcctaggttcaratgatcatcctgcttcagcctcctgagtaactgagatacaggcacgggccaccgtgcccagcttgtatactgcacttttgacaagtcacttccatctctg

SEQ ID NO: 8220 - DNA, 201 bp, Homo sapiens
gcttgagcatcctcggattcaggtatcttcaggaggtcctgggaccatttccccctgaatatcaagggatgactgtatatcctcacctatcggaaaaaccstcaaacttacatcttgtcttatttgggtggtgtatcaaccactccaaggatctaagttcttttttgactgaaaagactctaccacctactagctgggtgg

SEQ ID NO: 8221 - DNA, 201 bp, Homo sapiens
cgctgatcttttaatgtgcctaagtaactgcaatcagcgtgtacaaacctcgctgccttctgctttgttcttagcacacagctggtcagccttctgagatyttagagctggccatcccaccaaccttagggagttaaagcggggagttggagggaggcgcactccagcccagcttctccgtttcaaccagaaatacttggc

SEQ ID NO: 8222 - DNA, 201 bp, Homo sapiens
gttgctcctaggctacaaacccatacagcttattatgttctgaacactgtaggcaattgtaacacaatgataattgcgtgtgtctttcaacataaacttasaaaaggcaaggtaaatatatggtattataatcttaggtggccaccatcacatatgtaattcactgttgatcaaaacattgttatggatatatgaggcagt

SEQ ID NO: 8223 - DNA, 201 bp, Homo sapiens
tatgttctgaacactgtaggcaattgtaacacaatgataattgcgtgtgtctttcaacataaacttagaaaaggcaaggtaaatatatggtattataatcktaggtggccaccatcacatatgtaattcactgttgatcaaaacattgttatggatatatgaggcagttgaaattattaatgcaaatggatttgagagaaa

SEQ ID NO: 8224 - DNA, 201 bp, Homo sapiens
gttcacgtggcccatcttttgttcccgctcaaattctttttgtacctatggtcctcttttctttctctctctctttctttctttttttttttctttctttyttttttttttttttaagacgtagttttgctctgtcgcccaggctagagtgcagtggggcgatactggctcactgtaacccccacctccctggttccagca

SEQ ID NO: 8225 - DNA, 201 bp, Homo sapiens
cagcaatccacttgccaaaagtgctaagattacacttgagccaccgtgcccacatttgatttttaaataggtaatatatttacatggttgagcatgtgaayggtttgatttcacagtgaaaactgtctcttcgcagccacctagtttccctggaaatcaaagtattatactatcagtttgttgtgtatctttccaaagatg

SEQ ID NO: 8226 - DNA, 201 bp, Homo sapiens
ctcacacctgtaatcccagcactttgggaggccaaggcgggtggatcacttgaggtcaggagttcaagaccagcctggccaacatggtgaaaccccgtctstactaaaaatacaaaaattagccggcgtcatggtgcacacctgtagtcccagctactcaggaggctgaggcaggagaatcgcttgaacctgggaggcaga

SEQ ID NO: 8227 - DNA, 201 bp, Homo sapiens
aatcccagcactttgggaggccaaggcgggtggatcacttgaggtcaggagttcaagaccagcctggccaacatggtgaaaccccgtctctactaaaaatmcaaaaattagccggcgtcatggtgcacacctgtagtcccagctactcaggaggctgaggcaggagaatcgcttgaacctgggaggcagaggttgcagtga

SEQ ID NO: 8228 - DNA, 201 bp, Homo sapiens
agccggcgtcatggtgcacacctgtagtcccagctactcaggaggctgaggcaggagaatcgcttgaacctgggaggcagaggttgcagtgagctgagatygtaccactgcactccagcctgggcgacagagcaaaaaaaaaaaaagaagaccttcttcggttttttaatggttgtatcagatttcattgaatggctgtac

SEQ ID NO: 8229 - DNA, 201 bp, Homo sapiens
actgcattccagcccaggcaacagagagagaatccatctcaaaaaaaacacaaacaaacaaaccaaaaccaaaacaaaacaaaacaaaaaaacggtgcatrttggctgggcacatgcctataatcccagcactttgggaggccgaggttggaggattgcttgagcccaggagttcaagactagcgaccccattgctacaaa

SEQ ID NO: 8230 - DNA, 201 bp, Homo sapiens
gtagtaagaaagttcacttagaaagtaagttaagtctgagttttctgcaaccagggtatccagaacttaaaaagataagcaggtagggcaggtaagaagtyagtcatgacattgtaagcattgaaataaaaataaaataagtcatagccaggcatggcctgtaatcccagcactttgggaggccgaggcaggcagatcact

SEQ ID NO: 8231 - DNA, 201 bp, Homo sapiens
gatggagaaaaggtgatgagtgcagcaggtttagaatccggcatggtcagtgtttagcaggccccagtcaagggcagagggcaactctccctagggggccmccatgtcatcatcactcagagccttgcctgaggcttgtctagcatttaggacagttccggcagcataggcatcacttagagattgttagaaatgcaaaat

SEQ ID NO: 8232 - DNA, 201 bp, Homo sapiens
tgaagcaggagaatcgcttgaacctgggaggtggagattgcagtgagccaaaattgtgccattgcactccagcctgggcaacagagcgagactacgtctcmaaaaaaaaaaaaaaaaaaaaaaagaaagaaagaaagaaagaaagaaagaaagaaagaaagaaaaacagaaatgcaaaatctcagacccactccagaccta

SEQ ID NO: 8233 - DNA, 201 bp, Homo sapiens
cagcctcccaaaatgctgggattataggtgtgagccattgcaactgaccaagagaatatttttgaatattaagagaattaccaaaatgtgacacggagacmcgaagggaggaattttgctgttggcaaaatgatgccaatagactcactcaacacggggttggacacaacctttattttgtgaaaaaaaaaaaaaaaaaaa

SEQ ID NO: 8234 - DNA, 201 bp, Homo sapiens
attttcttttttttttttttttttgagacggaattttgctcttggcgtccaggctggagtgcaatggcaggatctcggctgtgcaacctccacctccaggsttcaagcgattctcctgcctcagcctcctgagcacccgagattacaggtgcccgccaccaggcctggctaatttttgtatttttagtagagatggggttt

SEQ ID NO: 8235 - DNA, 201 bp, Homo sapiens
ccaggctggtcttgcactcctgacctcaggtgatccacctgcctcagcctcccaaagtgctgggattacaggtgtgagccaccacgcccagtttttttttkttttttttttttttttaatgagacggagtcttgctttgtcacccaggctggagtgcagtggcacgaccttggctcactgcaacctctgcctcccagattc

SEQ ID NO: 8236 - DNA, 201 bp, Homo sapiens
gtcttgcactcctgacctcaggtgatccacctgcctcagcctcccaaagtgctgggattacaggtgtgagccaccacgcccagtttttttttttttttttkttttttttaatgagacggagtcttgctttgtcacccaggctggagtgcagtggcacgaccttggctcactgcaacctctgcctcccagattcaagcgatt

SEQ ID NO: 8237 - DNA, 201 bp, Homo sapiens
tgcaacctctgcctcccagattcaagcgattctcctacctcagcctcccacgtagctgggattataggcacctgccaccacacccagttaatttttgtatktttgtagagacggggtttcattgtgttggccaggctggtctcgaactcctgacctcatgatccacctgcgttggcctcccaaagtgctgggattacaagc

SEQ ID NO: 8238 - DNA, 201 bp, Homo sapiens
tcccattttctattaatatctttaatggactctgcatcaacttgggagataagttacttgtaaatttttagcagggcatggtggctcactctcagaggctsagacaggaggactgcttgaggccaggagttcaagactagcctgagcaatatagcaagaacccatctttacaaaaaattaaaaattagccaggcgtggtgg

SEQ ID NO: 8239 - DNA, 201 bp, Homo sapiens
tttctagctgcatgatcttgggcaatttacctctctgagcctttcccatttgtaaaacggatataataattaatagtacctcatagagaggagtaaatacwattatatatatatatatatatatatatatacatttctcatttgtaaaatgggcatagtaggtaaaattatttcatagagtagaagggaggaataaataca

SEQ ID NO: 8240 - DNA, 201 bp, Homo sapiens
atcctggatgtttaagtagcttttgtaggtactcaggaatcctaaaatcaatagcctttttggtgattggaacatcacgaacatgcatacccagattatcmctgtagaaacacagctgctgattctcattagcagtatgaggaggaggaagatgatggtgagtcttgccaggctttgaactgcaggactgggtgcacctaa

SEQ ID NO: 8241 - DNA, 201 bp, Homo sapiens
ctcaggaatcctaaaatcaatagcctttttggtgattggaacatcacgaacatgcatacccagattatcactgtagaaacacagctgctgattctcattascagtatgaggaggaggaagatgatggtgagtcttgccaggctttgaactgcaggactgggtgcacctaaaaaaaaaaaaaagaaagccactgtcttccta

SEQ ID NO: 8242 - DNA, 201 bp, Homo sapiens
gaacatgcatacccagattatcactgtagaaacacagctgctgattctcattagcagtatgaggaggaggaagatgatggtgagtcttgccaggctttgarctgcaggactgggtgcacctaaaaaaaaaaaaaagaaagccactgtcttcctaaattcgtgtatcttcagattggtaatactggactaggaatcaggaaa

SEQ ID NO: 8243 - DNA, 201 bp, Homo sapiens
ttatcactgtagaaacacagctgctgattctcattagcagtatgaggaggaggaagatgatggtgagtcttgccaggctttgaactgcaggactgggtgcmcctaaaaaaaaaaaaaagaaagccactgtcttcctaaattcgtgtatcttcagattggtaatactggactaggaatcaggaaatctgaattcctgtccca

SEQ ID NO: 8244 - DNA, 201 bp, Homo sapiens
agtaaaaaaaatagctgggctggtagtgtgtacctgtagtcctagctactcaggaggctgaggtggaaggatcacttgagcccaggagtttcaggttgccmccgtgagccatgacctcaccatgagaccccaactcaaaaaaaaaaaaaaaaaaaaaaaaaggctcaagagagcattccacagcctgaaatcccaaggtaa

SEQ ID NO: 8245 - DNA, 201 bp, Homo sapiens
ttgctggcagtagttttggttcctttgtaagtatgaatggagctaagtgagttttccagtcaggaaagaatcatggcattcctggtataaccatgtagttmcatatcatagaaaaaaattcagtagaaagtcctctgcctgatttcatcctattaccgaatgaattcaccttccttctgggcagttaaaatggagaaatga

SEQ ID NO: 8246 - DNA, 201 bp, Homo sapiens
ggttggggtatggagggacaaggatggaagataatctgtccaaagtcacattcctaactggggatagaatcaacatttgaatctaggctttttcctatctyttacagaactcaaaatgctttctgatgatcggttaatttatctttctaccatctttagactggtgatttatcattactatgctaatcggatctgcctaca

SEQ ID NO: 8247 - DNA, 201 bp, Homo sapiens
tgattattaggtggtggtctgtgcaaattttatgtgagactgggctaactctgtgacctttttggaatttcaaaataaacaaatgcattattttagttccyggttgaatcttggctttcttttctttattactgatacataataattgcacatatttatgggcacaataattaataattgcacaatgtataatgatcaaat

SEQ ID NO: 8248 - DNA, 201 bp, Homo sapiens
agactcctggcctcaagtgatctgcccgtcttggcctcccaaagtgctgggattacaggtgtgagccactgcgcccagccctattattcagagtgcatttygacaagtcaagtgtgcatttgtttctcactgaaactattctttttttgttgttttttgtttgtttgtttttttgagatggagtctcactctgtcgcccag

SEQ ID NO: 8249 - DNA, 201 bp, Homo sapiens
ggagtgcagtggtgcgatctcggctcactgcaagctccacctcccgggttcacgccattctcctgcctcaacctcccgagtagctgggactacaggtgccygccaccacgcccggctaatttttgtatttttagtagagacagggtttcaccgtgttagccaggatggtttcaatctcctgacctcgtgatccgcccacct

SEQ ID NO: 8250 - DNA, 201 bp, Homo sapiens
tgcatgaaagcaaaagtaaatgaacttactgttggacccagacttagaatcaatcaatcaacaagtatttattgaatagccacctaaagggtatattagastgcatatagcctttacctaagccttatagtgaattctgtaaacaagatatgaatgcattaacctcattgctgagctctcacagagcataatgataatatt

SEQ ID NO: 8251 - DNA, 201 bp, Homo sapiens
atagccacctaaagggtatattagactgcatatagcctttacctaagccttatagtgaattctgtaaacaagatatgaatgcattaacctcattgctgagytctcacagagcataatgataatattaccacagagtaataataaggcttttacatatatggtcttttctcccctctttttccccattcattatcttatttg

SEQ ID NO: 8252 - DNA, 201 bp, Homo sapiens
tggaaaattaaacagctgtagccataaggatttaatctataaagatttttttccttctgtaaatctgcctcaaagaagaacttaagcaggaaacatgagtscctgcatattacctttaaatagcttccaattgccctggaaataaaatttagaatccttaaaatgacctttaagattttttttttgagacacagtctcgct

SEQ ID NO: 8253 - DNA, 201 bp, Homo sapiens
tgtaccatagaaataaggccaatactcaatgctaagactcagaataggcatcagaatttagccgtcttgctaattccctaacttctgaccataaattcatrtgtatttttgttaaacatattagattttacagactgtgtctgtcttgcaggtgatggggcaggtacagggaaaacttttttgataatcttcagaggttga

SEQ ID NO: 8254 - DNA, 201 bp, Homo sapiens
tatcccaggctggagtgcagtggcactatctcagctcactgcaacctccacattatcgtgcctcagcctcccaagtagctggaactacagacacaccaccrcatccagctaatttttagtagagatggggttttgccatgttggccaggctggtctcaaactcctagcctcaagtgattcacctgcctcggcctccctaag

SEQ ID NO: 8255 - DNA, 201 bp, Homo sapiens
tatagatgatcccttggagttattatcaacaaaggcaaaaggcaaaacagtagccaggttttattggagaagttttaaaaagataaaatctaagatttgtrtgtgggcgtgtgaggtaattataatggtgggtttgggataactactttcctgagtgcagactatccttgtaagactacagttgtagcaagtgccgtgtgg

SEQ ID NO: 8256 - DNA, 201 bp, Homo sapiens
ccaggcatggtagcgggcgcctgtagtcccagctacttgggaggctgaggcaggagaatggtgtgaacccgggaggcggagcttgcggtgagctgagatcrcgccaccgcactccagtctgggtgacacagcgagactccgtctcaaaaaaaaaaaactagacgttggagtatggcatggatttgttgcactagagattgt

SEQ ID NO: 8257 - DNA, 201 bp, Homo sapiens
tggctcatccatctctttgcagaccgaattgtttggagccagacttctctccttggctgactcaagaaagagtagcatccaagaggggctcattaagcatmtgcagttgataaagatgagaaggaattttagaatactttgattcaactgtttctcctaccatttctcaataccattctatcagtgtgatatatgggcact

SEQ ID NO: 8258 - DNA, 201 bp, Homo sapiens
aggctgaggcaggagaatcgcttgaacccaggaggtggaagttgcagtgagccgagatcgtgccactgtactccagtcagggcgacagagcgagactctgyctcaaaaaaaaaaaaaaaaaaaattattgaggaaaagtgagtaggtcagtttcagtggaacatatgaatgtgaagcggagtagattgagataaggctgga

SEQ ID NO: 8259 - DNA, 201 bp, Homo sapiens
taattatacctacctatatatatttatttgcttacatttttactgagagagccttcttcctcttgagtagccccacaaaggcaagtaccttgtctttttgyatcagactccttataggtagatattgaaacctacatggattttgtaagaattaataaatactttttgaatgaatgaatatttggtaagtattcttccaga

SEQ ID NO: 8260 - DNA, 201 bp, Homo sapiens
tctttcgcttcccacctgtcctccatctaaattagttctttcaccgttattctctgccacagttcatttttgtacctccttcataccacttacacaaatgrtaattatacctacctatatatatttatttgcttacatttttactgagagagccttcttcctcttgagtagccccacaaaggcaagtaccttgtctttttg

SEQ ID NO: 8261 - DNA, 201 bp, Homo sapiens
taaagcagacccaagcaagtcaagtcatttgctccagattatgtggcaagctacttacagagtcacaccagaaccaagattttaggcttctttctttggtrgtcccttctgaaatcgactcttttctgaattaggggttctggtctttatgccttgggtggaaaagagaaaaagacaaaagttggccaggcacagtggctc

SEQ ID NO: 8262 - DNA, 201 bp, Homo sapiens
aacagaatatgatcttgtctcaaaaaaaaaaaaaatggggaaattatttatttagttatgcattagtggtagctgtggagttaggcacacctggtaggaayagcattggaatgtataattcaaaatacacatgtatctttttattcacatgaattccattttatgtgtatgaaatcatcaagatcaaagtgaatattagat

SEQ ID NO: 8263 - DNA, 201 bp, Homo sapiens
gccaatgtatatttgtctgactagctagttttgtttaaatcaaactgtgaaaggctgtatacttcaagaaacatgaaagtgagccttatgtgtgacttagytcctttcagagattaattttgtcatctaatgagcaagcaagctattatatttcatatttactgtaccttaaaattggaaagtatttaacatattttattt

SEQ ID NO: 8264 - DNA, 201 bp, Homo sapiens
cccaggctcaagcaatcttcccatctcagcctttcgagtagccgggactacaggcatgcaccaccacgcccagctaattttttgtatttttgatagagtcrgggctttgccatgttgcccaggctggtctcaaactcctgagcttaagcagtctgcccaccttggcctcttagagtgctgggattacaggcatgagccacc

SEQ ID NO: 8265 - DNA, 201 bp, Homo sapiens
ctgggcgacagagtgagactccatctcaaaaaaaaaaaaaaagaaataaagaaagcaaagtgtttacagtgacaagttgatttcaactagcagttgtcagwtaagttagtaacagggcatcacccaaataactgcattttaaagtggacagggcaggcctgactggggaaaagggagggaaggggtagggggttcctgatg

SEQ ID NO: 8266 - DNA, 201 bp, Homo sapiens
caaaaacacatgcatttatactgtatcaatgtattttaataaacagagattctttttgttggtaaagtattaatacttttttaaacaaactgacatcaaayatccatttcaataataacaacaatagcacataggcaggtctggtagaatctgcctacctgatttcagatccaggctctattactttctagctgcatgatc

SEQ ID NO: 8267 - DNA, 201 bp, Homo sapiens
gattgtatatctttctgagaattttaatacagctaaaaagtatgtaattttttccataaatgaaaacacaatacgtaaattgttgtataacccccattttkcatttatataccattgaggatatctttccatgtcagtaatgagaggtctactatattttaaaaataaaattatgcatatttgtcctaagaaattcagaca

SEQ ID NO: 8268 - DNA, 201 bp, Homo sapiens
gaatgccttatagccttcctcacagcacccaggattgtgactgactctgcatttttaattcttgaaacttggctttccataacatggtacatgcttcaggwctacatatgacccagagagcaaggtggctgaactatagtctggaagccctcaggtaaagaggcacatctcaccactcattggttaaacaatgcatcatag

SEQ ID NO: 8269 - DNA, 201 bp, Homo sapiens
ctggataccactgtgcagccctttggcacaacttgctgtggagctctgtggtcagaaccgcttctctgcccttccatgacgccacactcacacccggaggycgctccacatctcccagtccttcaagcttttcgtttttttgtttttttttaaaattgttcccagaagcaaacacatggcctgaacaatccctggattgta

SEQ ID NO: 8270 - DNA, 201 bp, Homo sapiens
acttgtttcgctgcataacaagtatagatcccaaaacttaatgtcttaaaacaacagatagattacttctcatgagaagatgggatagctgtgcaatttcycttctgatttcaccttagttgagtcataaggctgcactcagatgcagatttggctgggtgggaaggtctgaggtaccctcacgtgacctcattctggtga

SEQ ID NO: 8271 - DNA, 100 bp, Homo sapiens
aacttctcttttcttccttccccattcacatctattagaagactgcatcwccatttctttggcccccttactctgttgtcctttcccttttctttcagtt

SEQ ID NO: 8272 - DNA, 201 bp, Homo sapiens
ctgaagcaggagaatcgcttgaacctgggaggtggagattgcagtgagccaaaattgtgccattgcactccagcctgggcaacagagcgagactacgtctmaaaaaaaaaaaaaaaaaaaaaaaaagaaagaaagaaagaaagaaagaaagaaagaaagaaaaacagaaatgcaaaatctcagacccactccagacctacg

SEQ ID NO: 8273 - DNA, 201 bp, Homo sapiens; identical to SEQ ID NO: 8064

SEQ ID NO: 8274 - DNA, 201 bp, Homo sapiens
ctgtaaaataactgagaaacggaaagaactcaaagtggaactaagtgaatgcaggccatctaaagacggggtaggaagggaacagagtggtgagagtgaaraagactaaaaggtaggtaatatagagctagtcagtgtaaatcaaaaattcctacttaaggacaaaagaaggccagtgtcattttatggtcattcatctat

SEQ ID NO: 8275 - DNA, 201 bp, Homo sapiens
taagtaactttcccaggacatacaatcagatcaccttctttttcttttaaaattcaccttcaccttccaaattctttttacagatgtgttccagttaggtrgttaagtcctgtcactccgttattctaatgcaaaggtgattctccagtattgcaaagatgattctccagtattgaacgattttgaattctgttaaagaaa

SEQ ID NO: 8276 - DNA, 201 bp, Homo sapiens
agtcagattaaagctaccaaaggaaacaggctaaaaagaaccaatgctagtttacctcctgtaagttgaatttctattctagagagaatgggttaggtgtrttcgattgctttagaagataacttatccaaatacatacagcacatcactgaaaatttaagtgggaagagaaaaaaatataatcacttttatttattatgc

SEQ ID NO: 8277 - DNA, 201 bp, Homo sapiens
gtgggaagagaaaaaaatataatcacttttatttattatgctttaataattaatttgtaagttttaacttttttgatgtaatttagctttggcatattccygtgggatcttttcctaaaataaagcttttagtgagcgtaaggacttatcaggattggtttgtgtttgagcctacagtgtatgtttatatattaatctcca

SEQ ID NO: 8278 - DNA, 201 bp, Homo sapiens
cttcctattcatacaccattcggtaagccttgcataggattccattacaatatatccattgtctactgacaatgagagcaagtagattctgctcttgttcwatctcctagtatatttggatgtgaaatatatcctgcacaaatgacacttcaaaacaggtgcatactttgaaaggttttcttgggatttgtatataccttg

SEQ ID NO: 8279 - DNA, 201 bp, Homo sapiens
cgcgccgctccgggggcggtgacccctcttggcccacgtcttgtcagtgacgcacttcctgtcagtgacgcacttcccctctgctgggcgcgcggtggacsgtctgaaagggagtgttcgggtttcgctggggcctcgcggctccagagcccagcatggcttcctcgcgagcctcttccacggtacagagcccgggatccc

SEQ ID NO: 8280 - DNA, 201 bp, Homo sapiens
tttgaaatgtatacacttgtaatgttgtaacttgttatcctttagcaccgcgttggttatttcatctatccttagtatttccccagtgataagcagtaatycgggaagcataaaacacgagattgaacacttccaacggaatgaagtaaacagatttcagagcaaacctttcataggaaaatacccgagagaacctcacta

SEQ ID NO: 8281 - DNA, 201 bp, Homo sapiens
ccccacctctctcctatactcatacaattcttagttgaaaatctgcctagcctcctttataatccattagcaaaatctggtctgttctacttgcgagatayaactccagctatcttctttgctctatctttactgctttcaaatctgcactgttgtgatagccccaaacatgttgtgttaattgcttgcttaaaatcctag

SEQ ID NO: 8282 - DNA, 201 bp, Homo sapiens
ctttgtaagtatgaatggagctaagtgagttttccagtcaggaaagaatcatggcattcctggtataaccatgtagttacatatcatagaaaaaaattcartagaaagtcctctgcctgatttcatcctattaccgaatgaattcaccttccttctgggcagttaaaatggagaaatgacagttataagaggagtagaatg

SEQ ID NO: 8283 - DNA, 201 bp, Homo sapiens
ggactcaattacaattcttaacttgtctgtcatgcacctcttttcacctcaactatacagcctctgaactctcaaattacacagtaaattcaaaaaaatayataggaatttggaagaagaaaaggttgtctacagaggagagttattaaagaaaggcttcttggccgggcacggtggctcacgtatgtaatcgcttgaacc

SEQ ID NO: 8284 - DNA, 201 bp, Homo sapiens
aacacacatttacccacagaattgaagctcacttcccaattttttttttttttttagcaacccatagtaaaagagcaactcaaaaaaatatgcactgattktgaagcagctccagtgagaaatgcaacttgctatttgggctagtcaggttcctggataccactgtgcagccctttggcacaacttgctgtggagctctgt

SEQ ID NO: 8285 - DNA, 201 bp, Homo sapiens
cttcttctactcttagaaacaggtatgagttttgtttacagtctctctcatatttttcacaaaacacatattttccaaaagtatatgaaggtaaatttggmgagaaaatgtaaatgttcagatctcccaagagctttgtgttttatacgctaggcttctaagcctcccaagggctttgtgtttttatactctaggcttttt

SEQ ID NO: 8286 - DNA, 201 bp, Homo sapiens
aatctgcctagcctcctttataatccattagcaaaatctggtctgttctacttgcgagatacaactccagctatcttctttgctctatctttactgctttyaaatctgcactgttgtgatagccccaaacatgttgtgttaattgcttgcttaaaatcctagattgtcttctcatacttggagtaaaaaactcttaccatg

SEQ ID NO: 8287 - DNA, 201 bp, Homo sapiens
ctataaagtttgatcgttcctgccgtacctgcttcacaggtctgttagaaagatcatccgagataatagatataaaagtaatttgttgaaaaatttccaamataagaagtctctaaaaagtttaaggccagccagccatggtggctcacacttgtaatcccagcactttggaaggccacggcaggaggatcacttgagccc

SEQ ID NO: 8288 - DNA, 201 bp, Homo sapiens
ctgaggtcgggagtttgtgaccagcctgaccaacatggagaaatcccgtcactaccaaaaatacaaaaaaaaaaaaaattagacaggaatggtggcacatkcctgtaatcccagctactcgggaggctgaggcaggagaatcgcttgaacctgggaggtggaggttgtggtgagctgagattgcaccattgcactccagcc

SEQ ID NO: 8289 - DNA, 201 bp, Homo sapiens
agttaagacaaaatgctatgactttgaaattcacagaaagaaataacagtttagattaggtcttcaggtattcaggatagagataatctcctgaaaaacckgaatttcagagattcttagactggctgccaaaggatgaagctagtgaaggagaaaaagcttaaattccatcttgagctcttggattgtgataatacaatg

SEQ ID NO: 8290 - DNA, 201 bp, Homo sapiens
ttttcttcatatttggaaagttttcagccatcattgcttcaggcattttttctgttcaagtatctctttcttctcttgtgatatctgatcacaagatcaartgatcatatgtatattttaaatgtttttgctaattctatcatttctgtcatttctgggtctatttgtattgaatgatttttctcctggttatggatcaca

SEQ ID NO: 8291 - DNA, 201 bp, Homo sapiens
tttgcaatgaggtctcttttctagctggtaagaactcaaatatcccccagtgctttgtgagctctgccatctccattgaactcattgttcccttgtagttrttctttccccagtagctgttctttgtcctactttcattgtggaatcactccctgtgcatatgcagatttatattacactgaggtgacttctaggtacatg

SEQ ID NO: 8292 - DNA, 201 bp, Homo sapiens
tggacccacaaattcaacctttcattaatattacataccatcgtggataaggtaagaaacttacaatggtacacttccaattattccccacatgatttagkctatatgttcaaatttttacctctacatatgctaaagttaaatatattgctatcattttgcttcaagtagtcaactctcatttaaaaagatatagaaatt

SEQ ID NO: 8293 - DNA, 201 bp, Homo sapiens
tataatatccctcagaattcaaaattttatgattgctttaggatttacaatatccctttggacccacaaattcaacctttcattaatattacataccatcrtggataaggtaagaaacttacaatggtacacttccaattattccccacatgatttagtctatatgttcaaatttttacctctacatatgctaaagttaaa

SEQ ID NO: 8294 - DNA, 201 bp, Homo sapiens
ttgtcagctttcagacctggagtatggtatagcaatggctcctctcccctgttacttcaaatggtgatggttgtactccctccttggtctgtcatctgttyagccagactgtggtcaatcacatgaatcttttcaaagaaccaactttctgtttcatggatttactcctttgttggtctattttcttgttcactgaatgtc

SEQ ID NO: 8295 - DNA, 201 bp, Homo sapiens
gaggctctgttgattaattggttcagtcattgtgtgtatgtgtatttgtgtctgtctgtctgtcttgtggtttgtctagctttaattgaatcattttctcrttcaccttttcctaccataatatctaaactggttataaggccatccagtgaattcctcattacagatataacttttctcagtttttaaatttccatttgg

SEQ ID NO: 8296 - DNA, 201 bp, Homo sapiens
aagattcatagcattctagaactttaacgagttcttagaaagatttcctttaaaacacaggcaccaaaggaaagatcagagtgcctatcagtcaaaattgyactcatgtgcatgctctttaatatagacatcttctgggtgttcctgagaataaggcaggaaactagactgctatgcatcaggctgtgcaggttgtaggtg

SEQ ID NO: 8297 - DNA, 201 bp, Homo sapiens
agtctttattctaagaaggcataaatcctactcctaaagtatgacttttctggggtctctactgaatgcccgagatgttcaatgaggtgtctctcctcggrctgatcagaaccccggtatcccccagtgctacgtgagctctggcgtcaccattgagctcactgtttccctgaatttgtcctttccccagtagtggttctc

SEQ ID NO: 8298 - DNA, 201 bp, Homo sapiens
caccaagggcctgtatcggcatctggattcctgcagtagttcattgtcaggccactggaaattccaaagcaatacaagttacaggaggcggaagaatattsagggacatccagcaccctctacattttgttctaacaaagtcttaacaagtgtctttgaaatattcccattaaaggtatcatacaattgccacaacacaaa

SEQ ID NO: 8299 - DNA, 201 bp, Homo sapiens
taggcttggaacctggatgacagtcggaggagcgaccacagtcccttctgtgtctgagcatcgcgtcaggttgcagtactcccacctgatgctggggtccrtggtaaaacaccaagggcctgtatcggcatctggattcctgcagtagttcattgtcaggccactggaaattccaaagcaatacaagttacaggaggcgga

SEQ ID NO: 8300 - DNA, 201 bp, Homo sapiens
tgctcaggaccaagtgtgtttgtacccattgaaaaagaagtagatagaaaaagatttgcctctccatagatgtgcaagtatcaattccctgtgacccaagrtgcaaaaggccaacacaacattcacttcagggactagagcttagaatgatagaattccaaggtgaaaaggttgtattaaccctcagccgatgttgtagaa

SEQ ID NO: 8301 - DNA, 201 bp, Homo sapiens
gcaatgcaggatgcaggtggtaattggctgtcgggggcagaggaggggaaagacatggaaattttgcatgtttccctagatcgttgatcatgaaagccaargcctctggcttccaggccatggggcagaaaacgatcctatatatctgactgaaggcaaagacactttgcttctcaaggatgtgtgcacgccaaaaccttc

SEQ ID NO: 8302 - DNA, 201 bp, Homo sapiens
tctatgaaactctactgaatgttcatacaaagggcactgcatttggcaatgcaggatgcaggtggtaattggctgtcgggggcagaggaggggaaagacayggaaattttgcatgtttccctagatcgttgatcatgaaagccaaggcctctggcttccaggccatggggcagaaaacgatcctatatatctgactgaagg

SEQ ID NO: 8303 - DNA, 201 bp, Homo sapiens
gttctaggaaatatttcacctgaaatccttagaaaaacagaacagaacagatcttctcactgcaaagtgcgctcacgaagtagcacctttctatgaaactmtactgaatgttcatacaaagggcactgcatttggcaatgcaggatgcaggtggtaattggctgtcgggggcagaggaggggaaagacatggaaattttgc

SEQ ID NO: 8304 - DNA, 201 bp, Homo sapiens
atccttgttaattttctgtcacgtcgatctaatattggctgtggggtgttaaagtctcccactatttttgtgtggaagtctaagtctctttgtaggtctcyaagaacttgctttattaatctgggtgctcctgtattgggtgcatatataagtaggacagtcagatcttcttgttgcattgatacttttaccattaggtaa

SEQ ID NO: 8305 - DNA, 201 bp, Homo sapiens
gagacatgctccatcaatacctagtttattaagagtttttagcatgattgggtattgaattttatcaaaggccttttctgcgtctattgcgataatcatayggtttttgtcattggttctgtttatgtgatggattatgtttattgatttgaatatgttgaaccagccttgcatcccagggatgaagccaacttgatcatg

SEQ ID NO: 8306 - DNA, 201 bp, Homo sapiens
tatccatctacccatcccttttacttttcagcatccctctctgtgctgactctcatctgccttccttccttggatcttctcttgctgggaacctctatccyttcaggccactggtacttaggaccaagagattttctccctattggaatacaggtagaaatagaaacagatcaattcacctgtccataagtaagcacataa

SEQ ID NO: 8307 - DNA, 201 bp, Homo sapiens
ttccatgtctttggttgttgattatggccaaatgattggccatggggtggtcagaccagggcttctatccatctacccatcccttttacttttcagcatcmctctctgtgctgactctcatctgccttccttccttggatcttctcttgctgggaacctctatcctttcaggccactggtacttaggaccaagagattttc

SEQ ID NO: 8308 - DNA, 201 bp, Homo sapiens
aaccaacaaacaaaaacaccaaagaaacaaattcctaacactttagaactgtagtaagttcttagaaatatttcacataaaagcttagaaaaaaaggacaratgagagggcttctcaatggaaactgtgctcacgtgcaagcacatttatgggaatttctactgaatgttcatgaggactatggggcagcaaacagcaaag

SEQ ID NO: 8309 - DNA, 201 bp, Homo sapiens
ggcagagaaacggacagacatgaaaacaatgaacgtttcataacaaaaggcaaggtcttcagcttctgggccatgggagagacaacagtccttcgtctagractgcagacaaagacacttcagttatcagggatgggtggaggcgaacagcttactcccctgcaggagagatgaaatcctctcatgacccacatcctgagt

SEQ ID NO: 8310 - DNA, 201 bp, Homo sapiens
cttagcatttgtttgtccaaaaacgactgtatctttccttcatatatgatgcttactttcgctggatacaaaattcttgactgataattgttttgtttgargaggctatgatagggctccaatcctttatagcttgtacagttcctgctgaaaaactggctgttaatctgatagggtttcctttatacattacctggtgct

SEQ ID NO: 8311 - DNA, 201 bp, Homo sapiens
tgtgcatagcgtttaagcttgctgggtttttttccttcttttcactctaaaggtgttattccattgtttctgacttgatctttttttttcttcttagcatrttattccattttttctgacctgatcttttcttcttcttactactctaaaggtgttatttcattgtttctgattttatcttgttttccttcttaccactct

SEQ ID NO: 8312 - DNA, 201 bp, Homo sapiens
gcttcaagtagtcaactctcatttaaaaagatatagaaatttgatcaagaaaatattttgcatttacatctacatttgccatttgctgggttcttcattaygtgggctgcagaaagttctcctcttgaactattcttcttctagctaattttctttgggcaacatctcttgttacacaagcctgctgattccaaattatta

SEQ ID NO: 8313 - DNA, 201 bp, Homo sapiens
cacatgccttgtcacctgtcccaaacctgcctctcctacaaatactgtttcttagctgattgtactgtcacctaggtccaaatagactaactttaagtgaygtaagcaaaggtatcactttgtcaggcttaataaaacaaaatttcaccaggaaagagaaaatcaaagaagacaacaataatattattatttgcatttgta

SEQ ID NO: 8314 - DNA, 201 bp, Homo sapiens
ccaaaaatcacacctctggctcccccagagagtgcgctaaggcttcctcccacatggcagacccagaaccaacacacgagaaccagtgtagcactgaaggsttgtgcgtcagtgggggtatccatggcttttcatcccagcatccaagcaggtaaatgtctggcacaacttcttaccttgttcaaaaaaagcctctaggct

SEQ ID NO: 8315 - DNA, 201 bp, Homo sapiens
cacgtacatacaaatgtttatctgtcaggctgtctgtaagtctctataaaactgcatgatctattcagtgtttgatttgctgatttgttatttacctaagsaatccatccacatgatctacattcatgaatttatttacatacagttgatctcaatatctacttctcagctttcacacctggaggatgctatagcaatggc

SEQ ID NO: 8316 - DNA, 201 bp, Homo sapiens
atcccagtaaatcatagagttttgctctttaaaattctatacctgagtcatttagcttcttgactatgagtttcttgttttctgtatatttggcgtgttgygagccatcatcgcttcaagtataatgtctgtcatgatatctttttcttctccttctgtgacttgcctaacacatatattaaatgtgtggatttttcctag

SEQ ID NO: 8317 - DNA, 201 bp, Homo sapiens
tgttgttctttctttatgaaaactctccctgtgcatacgcagctttgtatttagccaaagccttgaggagacttctgtgtgtattcctggagctcctttcytccacaaatcccttctcattcttagccagcctagaacacatcagctgcctgaggcatcgcagactccagtctctctcctcagttaagcaagactgctgtg

SEQ ID NO: 8318 - DNA, 201 bp, Homo sapiens
cctgagacattctgtccaacattctgggtctgagagaaattgggtcataagaagttagctggaagcatggctcttccaggagaaatttaagtgggtggctstttctcttgggagaaaactcaaagacatacccatttgggtagtattctgtggttctctgatgccagtgtggtgtcatagaggaccaagactgacatgtcc

SEQ ID NO: 8319 - DNA, 201 bp, Homo sapiens
gtggtggagaatgagcctcgataactctgtccatcaccatggtagcagtcctggactgtggggctttgctccgttggtgctgaaattcaaagaggagaaawcaaactgagtaatttccagaacacagaagcatgagaaaaaaaatccatgatagaaacaggacatcatctctgaaaatgacgaccatgctctgttctacat

SEQ ID NO: 8320 - DNA, 201 bp, Homo sapiens
catgagaagcagggatgagaacactgagaaatcccttccctcaaatcctaggtgtggaaggcatgcccaagatgaaggtaggctggggagataaacaattyggtggctatgtactgcttcaaagtctcaggacaatacggatctaatgaagacatgttaggtttctcaagaacaacagcctcaaaaatggcattccttcaa

SEQ ID NO: 8321 - DNA, 201 bp, Homo sapiens
aagctgtggtcttagatcaactgtcaaaatgtttgttcataggaaccccctttttttcttcttagctttgaaatcagacaatttaactatgatgtaccccrgtaaatcagagttttgctctttaaaaatctatacctgagtcattgagcttcatgactatgaatttctcattttctgtatgtttggaaatttgtcagccgt

SEQ ID NO: 8322 - DNA, 201 bp, Homo sapiens
ttcaatcatacatcacaaaagctcttattagggtaaaacacattgagcattgctacatattcctcaatgaacaatttttacttctctatgtttcaatgctsgtgtggctctaggattcacacctgtgtgggtgtgggtgtgtgcacgtgtgccattgtgtgtatatatgtgcagctatttctgtagattctattgaattat

SEQ ID NO: 8323 - DNA, 201 bp, Homo sapiens
taagtttggataaattgtgttatattcttactcagttcaaaacttttctaaattccttagtgatgttttctttgtcccaaagagtattttgaaatgcaccrtatgactcccaaatatttgagaagctggcaaacttctcattattcatatctcactttattctgggagaataaagtgacacactctgtatgactttaattc

SEQ ID NO: 8324 - DNA, 201 bp, Homo sapiens
gtctcttttcttgttcactgaatgtcactggtttggactacttccttccatctgctttccttggctcttatttgctttttttttttttcttgtgtagatayttaagctgtggtcttagatcaacaactgtcaaagtctttgttcataggggattccaaagagcttttctttttcaaaacacaagatgaatatttatagtat

SEQ ID NO: 8325 - DNA, 201 bp, Homo sapiens
tacaaatatttctctgtcagcctctctgtatgtctctctacaggactacactaactattcagcatctggtttgctgatttgttgtcttcctcaggaattgkcccacatgattaacattcctgaatttattcacatacaattgttctcaaaatcttcttttcagctttcagaactggaagatgctatagtaatggcacctct

SEQ ID NO: 8326 - DNA, 201 bp, Homo sapiens
tggtttctttcaccataaattgtgttttctataaactcacatgaatggactcatacagactatacactttgacgtctggcttctttccttaatatattttygaggtttgttcatgcttctgagactatcagtaacttgttccttgttgatgaatagtattcctttgtataaatatactggaaattcttttttcattttctt

SEQ ID NO: 8327 - DNA, 201 bp, Homo sapiens
gaaaaaaataaaaataaaacagatgattacagacagccaggcagccacatagacccaggacgatacagaatcaatgcagtcatgtcaggcttctctaggaygacagaatcaggggccacattcctcaggagccacaacgctgaagactgcaatgaacactattttaagaaattactggaaatgcttattggcttggaaata

SEQ ID NO: 8328 - DNA, 201 bp, Homo sapiens
taataggcaaatggacatgagaaaacacacaaacaaacacgaaagtaagagatgcctaccattctagaactgtagtaagttcttagaaatatttcatgtamaacttagtggaaaagaaatatcagattgcttctcatcggaaactccactaacatggaagctcatttctaggaatctctacagagtgttcatgacgacatg

SEQ ID NO: 8329 - DNA, 201 bp, Homo sapiens
gatgattacagacagccaggcagccacatagacccaggacgatacagaatcaatgcagtcatgtcaggcttctctaggacgacagaatcaggggccacatycctcaggagccacaacgctgaagactgcaatgaacactattttaagaaattactggaaatgcttattggcttggaaataatcacacagttgacagcatgt

SEQ ID NO: 8330 - DNA, 201 bp, Homo sapiens
aggcgctgagtgttccttcccagtggctgaccctgagtccacattctacttggaattgtgtgagcatggaaggcttctatatcactaagattttgcaactsttttcatcccaacgtcctagggtgtggttgtctggccatagacttcctaccttcttcagaagaagcctctgtgcttggatctgggaccaccgtgagagtt

SEQ ID NO: 8331 - DNA, 201 bp, Homo sapiens
ccagggaccattgatgtcaccatcagggttacggcagtactgaaaacaagcaggcatgtaagctccagctcacgtggagcaggagagggagaagatattcyaaggcacacacatttcacatctattcttagaagacaaaagggagcgttccttcttcctttctatcattattatattttttgacaaagttatttctttcta

SEQ ID NO: 8332 - DNA, 201 bp, Homo sapiens
tggtagagaatgagcctcgataactctgtccatcaccatggtagcaatcctggaccccggggctttgctccgttggtgctgaaattcaaagaggagaaatmaagctgagtaatttctagaacacagaagcatcagaagaaatctgtgactgaaacaggatcattgtctctgagaaagactaccatgctctgttctgtacta

SEQ ID NO: 8333 - DNA, 201 bp, Homo sapiens
gggaggaaggaaggggagggtgggaagaaagaagggatggaggaagagagggaggaaaaaagtcttgaagataagaccccatgtcagttttcccttaaacrtacttcttcaagcagtgagcagcagtcagcacccactctggggatattaaggtgcctccacagaagtgctttccaaacctagaaagaaaacatgccaagg

SEQ ID NO: 8334 - DNA, 201 bp, Homo sapiens
tatgagaaatttggacctaggaagtgagcttgtagcatgggccagctaagagaaattttagttgactattgttccttttatggctaacatgatagacataygcatttggatagtataatgggatcctccgatgccaatgtggtgtcatagacgaccaagactgacatgttcttcctgtgatagtggtggagagtgtgcctc

SEQ ID NO: 8335 - DNA, 201 bp, Homo sapiens
acatacgcatttggatagtataatgggatcctccgatgccaatgtggtgtcatagacgaccaagactgacatgttcttcctgtgatagtggtggagagtgkgcctcgataactctgtccatcacctcggtagcagtcctggaccccagtgctgttttcagttggtgctgaaattaaaagagaaaatcaagctcagtattgc

SEQ ID NO: 8336 - DNA, 201 bp, Homo sapiens
gtacttcttcaagcagtgagcagcagtcagcacccactctggggatattaaggtgcctccacagaagtgctttccaaacctagaaagaaaacatgccaagrctttggtcaaattggatggtttgttctacttcattgtacagaaagccaggaagacaagttcactcagttttgatcatgttcatattcccaaagcaaagga

SEQ ID NO: 8337 - DNA, 201 bp, Homo sapiens
aagcatgggtcttctaaccaatatttgagttggctgttgctcctcttatggttttaatcaaatacatacgcatttgggtagttttctggggtcctctgatrccagtgtggtatcatagatgaccaagattgacaggtccttcctgtgacagtggtggaggatatgcctcgataactccgtccatcaccatggtagcaatcc

SEQ ID NO: 8338 - DNA, 201 bp, Homo sapiens
gcatgcaaattgaaatgtagaataaaaatacaaatagacttataggattctagaaatttaataagtagtcataaatattttaattcaaccctggaaaacaracaaacaaagaaacaaacaaaaaacagatcagagtgcctatacttcaaaattacactcatgtgaatggtcttttgcttacacctcttctgggtgttcatg

SEQ ID NO: 8339 - DNA, 201 bp, Homo sapiens
ttttgccaaaatgtgagtctaagagaaatttgtccctaggaagtgagcttaaagcatgggtcttctaaccaatatttgagttggctgttgctcctcttatkgttttaatcaaatacatacgcatttgggtagttttctggggtcctctgatgccagtgtggtatcatagatgaccaagattgacaggtccttcctgtgaca

SEQ ID NO: 8340 - DNA, 201 bp, Homo sapiens
cccatctgtgccactttttttgatgcctgaggcaagaataggcacagcctgtccccaggagagcaaagctaagtgactccagaatgaagctctatagctgyggctttcaccccacagccctggactctgacaaaagtgaccagcccaagaccttcccaaggtctctttcattttttatgacaagatctatgcaaggtcact

SEQ ID NO: 8341 - DNA, 201 bp, Homo sapiens
tttatgacacaaacaggacagtagtttcagaattatgactgttctctttagtatactcacaagcagaaggacatgctgaagcaaaaacaatagattaatarcattctaatattttaataagttcttagaaattttatattcaaaacctggtgggaaaaggacctatcagtgctcttacaattggaacaaagactcatgtgc

SEQ ID NO: 8342 - DNA, 201 bp, Homo sapiens
cacattctacttggaattgtgtgagcatggaaggcttctatatcactaagattttgcaactcttttcatcccaacgtcctagggtgtggttgtctggccayagacttcctaccttcttcagaagaagcctctgtgcttggatctgggaccaccgtgagagttgcaaggacacttgattctgtcaccaggcattgtgtcagg

SEQ ID NO: 8343 - DNA, 201 bp, Homo sapiens
tatcactaagattttgcaactcttttcatcccaacgtcctagggtgtggttgtctggccatagacttcctaccttcttcagaagaagcctctgtgcttggrtctgggaccaccgtgagagttgcaaggacacttgattctgtcaccaggcattgtgtcaggttgcagtactcccacctgacactgggatccatggtgtaac

SEQ ID NO: 8344 - DNA, 201 bp, Homo sapiens
acatcccagctctggtccccccagagaaggcactgaagcttccttcccattggctgtccatgacttcaccttcgacttcctgtgcagcatggaagttttcygcatcacaaagattttgcaaatctttttatcccaatgtccgagggtatggttgtctgactgcaggcttcttaccttcttcagaaggaagctctgtgcttg

SEQ ID NO: 8345 - DNA, 201 bp, Homo sapiens
ggggcttacatggaaggacagtatagatggtttctgggcctgttcttaccttgttctgagactgacttgccagggccaggaatgtgggtgggccacacacmcccctacaatgcttccaggacatttcttcggctccacttgaggcttcccacaatcaaatgaagaggatgctgtggcacaaggtgggaaaagaagtcgcat

SEQ ID NO: 8346 - DNA, 201 bp, Homo sapiens
gcttacatggaaggacagtatagatggtttctgggcctgttcttaccttgttctgagactgacttgccagggccaggaatgtgggtgggccacacaccccsctacaatgcttccaggacatttcttcggctccacttgaggcttcccacaatcaaatgaagaggatgctgtggcacaaggtgggaaaagaagtcgcatttg

SEQ ID NO: 8347 - DNA, 201 bp, Homo sapiens
caggcattgtgtcaggttgcagtactcccacctgacactgggatccatggtgtaacaccaagggcgaatctcagcatctggattcctgcagtagttcctgstcaggccactgcaaatttcaaaacaacacaggtcaccagagatgggagaagattcaagggcacttagcgccctctacattttgctgtaacaaagtgtaaa

SEQ ID NO: 8348 - DNA, 201 bp, Homo sapiens
tggaagttttctgcatcacaaagattttgcaaatctttttatcccaatgtccgagggtatggttgtctgactgcaggcttcttaccttcttcagaaggaasctctgtgcttggaactgggaccaccgtgggagttgtgaggagagttgattccatcactggacattgcgtcaggttgcagtactcccatctgacactggga

SEQ ID NO: 8349 - DNA, 201 bp, Homo sapiens
cccaatgtccgagggtatggttgtctgactgcaggcttcttaccttcttcagaaggaagctctgtgcttggaactgggaccaccgtgggagttgtgaggasagttgattccatcactggacattgcgtcaggttgcagtactcccatctgacactgggatccatggtataacaccaagggcgaatctcagcatctggattc

SEQ ID NO: 8350 - DNA, 201 bp, Homo sapiens
gcatctggattcctgcagtagttcctggtcaggccactgcaaattacaaaacaatacagttcaccagagatgggagaagatacaagggcaccagacatccyctacattttgttgtaacaaagtggtaaaaagtgactttgaaatattctcactaaaggtcctgtaacaatcacaaatcgtcctcaacttctaaacaactgt

SEQ ID NO: 8351 - DNA, 201 bp, Homo sapiens
tgactgcaggcttcttaccttcttcagaaggaagctctgtgcttggaactgggaccaccgtgggagttgtgaggagagttgattccatcactggacattgygtcaggttgcagtactcccatctgacactgggatccatggtataacaccaagggcgaatctcagcatctggattcctgcagtagttcctggtcaggccac

SEQ ID NO: 8352 - DNA, 201 bp, Homo sapiens
ggagaagatacaagggcaccagacatcctctacattttgttgtaacaaagtggtaaaaagtgactttgaaatattctcactaaaggtcctgtaacaatcayaaatcgtcctcaacttctaaacaactgtgaacatttcaaagacagattatcattcttattgtaacacatccaaactcgtctatactccataagaaaaccg

SEQ ID NO: 8353 - DNA, 201 bp, Homo sapiens
agtcgcatttgagtccaagttagcaattgtgtcgtttaattcaggacgaattccaagcactagtttttcacatctcaaaggtgaaattaaatggtaaaatsataaacactctttagatttttctttctaagtttaaaaagtggtagtaaacaacaaaggacactctcctttcaaggaaatataagttctttctaaaccatg

SEQ ID NO: 8354 - DNA, 201 bp, Homo sapiens
tcaccagcgtggggtgaagaccacaggtgagcgagtacctgcttagctttagcaaggcaatatctgcttgtgtgggctccaagaacagcctagacacttcyatttcctgaacatgagattcgaggttcacttcttggtgtgcacccaggatgaccttgtaggatgaaggccttgaggacctagaaaagatgaggatgtcaa

SEQ ID NO: 8355 - DNA, 201 bp, Homo sapiens
ggcttctgcatcagtcagattttccatctcttttcatcccaatgttcaaatgtgtagatatctggccacagacttcttacctgcttcagaatgagcctccrtgcttggaactggaacaacagtgggagtctctaggacacctgattctgtttctgagcattgtgtcagattgcagtactcccacctcacacacggatcggt

SEQ ID NO: 8356 - DNA, 201 bp, Homo sapiens
ttctgtttgaaaagatttgtcagcaaagggaaaaagagtccaaatcaaagtggcttacatttttttccagacctgcccatttatttgtccctggaatgaaygtgctgtgtctatggggctcctgggcagcccattcctggcatggcgtcccagtaacagtggttgccttcttgccccggtatcctttcccattcccaaaca

SEQ ID NO: 8357 - DNA, 201 bp, Homo sapiens
aaaaattgctccaccagagagagtgctgaggcttctttccacctgccataccctcaagtttctgtgtagcatggaaggcttctgcatcagtcagattttcyatctcttttcatcccaatgttcaaatgtgtagatatctggccacagacttcttacctgcttcagaatgagcctccatgcttggaactggaacaacagtgg

SEQ ID NO: 8358 - DNA, 201 bp, Homo sapiens
agggaaaaagagtccaaatcaaagtggcttacatttttttccagacctgcccatttatttgtccctggaatgaacgtgctgtgtctatggggctcctgggmagcccattcctggcatggcgtcccagtaacagtggttgccttcttgccccggtatcctttcccattcccaaacatacagtctgtagaaaaaaataaaaat

SEQ ID NO: 8359 - DNA, 201 bp, Homo sapiens
ccagacctgcccatttatttgtccctggaatgaacgtgctgtgtctatggggctcctgggcagcccattcctggcatggcgtcccagtaacagtggttgcyttcttgccccggtatcctttcccattcccaaacatacagtctgtagaaaaaaataaaaataaaacagatgattacagacagccaggcagccacatagacc

SEQ ID NO: 8360 - DNA, 201 bp, Homo sapiens
tgtgtctatggggctcctgggcagcccattcctggcatggcgtcccagtaacagtggttgccttcttgccccggtatcctttcccattcccaaacatacartctgtagaaaaaaataaaaataaaacagatgattacagacagccaggcagccacatagacccaggacgatacagaatcaatgcagtcatgtcaggcttct

SEQ ID NO: 8361 - DNA, 201 bp, Homo sapiens
tcactgccaatgcaggtttcatgagaagaagaggcaagaacacctagaaatttctaacttcaaagctgaggtgaacagagcctgtgaaagactgagatagrccagggagagacagcattcgttggttacctcctgctatgcagccccaggacaatagaaaaataatgcagtctccttaggtttctctaggatatcatactc

SEQ ID NO: 8362 - DNA, 201 bp, Homo sapiens
tccaggccatggggcagaaaacgatcctatatatctgactgaaggcaaagacactttgcttctcaaggatgtgtgcacgccaaaaccttcttcccttggasgagggagggaatcctctcatgccctgcatcctgaattgcagtaaaggagaagtctactaacctttctctctagacccctcacaggtacaagtgccatcag

SEQ ID NO: 8363 - DNA, 201 bp, Homo sapiens
tagcactcctgcaccccaggcctctgctcagtcggtgctgaaatgaaaacacaagaaataaactgagtatctctgagaataacgaaatatgtgaagccatytatgacacaaccagaaaggagtctatgagaattacgaacgttatctttcccttacctgtaggcagatggatgggagaaaaccaaccaaaaaacatacagc

SEQ ID NO: 8364 - DNA, 201 bp, Homo sapiens
tctctaggtcctctaccatctgttgtcccacatgtagaaaccatttttccatgtctttggttgttgattatggccaaatgattggccatggggtggtcagrccagggcttctatccatctacccatcccttttacttttcagcatccctctctgtgctgactctcatctgccttccttccttggatcttctcttgctggga

SEQ ID NO: 8365 - DNA, 201 bp, Homo sapiens
tgtagcggacctagaaaataccagagtcatcccaaactccaatccctctcctctgctcagctagatggctacaggctgcttgagctccatctccttgctaytcagtgcaggaagggtatccaggaagaaagccaaggcatctatggagttgagctcatcattggccctctctcaattctctaggtcctctaccatctgttg

SEQ ID NO: 8366 - DNA, 201 bp, Homo sapiens
ccaggcagaatgcagcatctctagaatgggttcctgggcaggaccttctctcctgctctcagtctaccctctgctggccgcagctactctgcactgagggwaagggggatgagttgaaagaacagtgggacccatggcataaaggaagatggcagggtagactaagagatctgaagaggtcggacagctacggaggaacac

SEQ ID NO: 8367 - DNA, 201 bp, Homo sapiens
ttcagatttttatatgcttcttttactattacatcataatgcacaatttcctatactgattttttcaatcaatgttatatcatgagtttttaaaaaaatgmtacagtcttcataactaatattttaatgaggagtgactgcttaatgggcatgaggtttcctttggggatgagaaaaatgtcctggaaatatggtgacggt

SEQ ID NO: 8368 - DNA, 201 bp, Homo sapiens
gcttcttgaatctgtggtttttaatattcttcttatttgaaaagtttttagctatccttgcttccagtatttgttcctgtagcaatctctccttcctctcsttctgtgacttcctacccacatgcaggaaatctttttatattttcccgcctgtctgtgaggatcagtggatttcattttttagtatttgtggaggtgtgt

SEQ ID NO: 8369 - DNA, 201 bp, Homo sapiens
ccagtttctcatgagatgtttcttgttattatatctttgccttctgactgttgaacggtgatgtacaaaagtgaatcatacagttttttttttttttttttggaaattccctgtctgattcattcagcttcttgaatctgtggtttttaatattcttcttatttgaaaagtttttagctatccttgcttccagtatttgtt

SEQ ID NO: 8370 - DNA, 201 bp, Homo sapiens
actttttttaaagaaaaaaaatctaatgcagcacacacttcctagaaacactgagattatacatacatgtggccaaaaagggatcagaatatcctccttcygccttctgcccaatccatctctctggaataactggtatggattttgacgtgtgtattgtggaattggttatgcacatacaaaagtatctctatctgtcta

SEQ ID NO: 8371 - DNA, 201 bp, Homo sapiens
gctcacaggaaatgttcctctgcatctgagccaagttgagtcctgagcagtcaccttgaagcatgactcttctaacagaaacttccattggcccttccttygcttatggtaaagaacaaagacgtacgcatttgggtagttttctggggtccgactatgctggtgtggtgtcatagatgaccaagcttggcaagttcttcc

SEQ ID NO: 8372 - DNA, 201 bp, Homo sapiens
tcttatggtaaagaacaaagacatacgcatttgggtagtattctggggtccgactatgcgagtgtggtgtcatagatgaccaagcttggcaggttcttccrgtgacagtggtggagtatgtgcctcgataactctgtccattaccgtggtagcactcctgcaccccaggcctctgctcagtcggtgctgaaatgaaaacac

SEQ ID NO: 8373 - DNA, 201 bp, Homo sapiens
tgcaaatttcaaaacaacacaggtcaccagagatgggagaagattcaagggcacttagcgccctctacattttgctgtaacaaagtgtaaaaagagactttgaaatattttcactaaaggtcccataatatgcacaaatggtcctcaacttctaaacaactgcgaacatctcaaagacaaattatcattcatattgtaaca

SEQ ID NO: 8374 - DNA, 201 bp, Homo sapiens
ctgcaaatttcaaaacaacacaggtcaccagagatgggagaagattcaagggcacttagcgccctctacattttgctgtaacaaagtgtaaaaagagactttgaaatattttcactaaaggtcccataatatgcacaaatggtcctcaacttctaaacaactgcgaacatctcaaagacaaattatcattcatattgtaac

SEQ ID NO: 8375 - DNA, 201 bp, Homo sapiens
ttcagaagaagcctctgtgcttggatctgggaccaccgtgagagttgcaaggacacttgattctgtcaccaggcattgtgtcaggttgcagtactcccacctgacactgggatccatggtgtaacaccaagggcgaatctcagcatctggattcctgcagtagttcctggtcaggccactgcaaatttcaaaacaacacag

SEQ ID NO: 8376 - DNA, 201 bp, Homo sapiens
ccttctgctccacaaaactaggaggaaggtgaggcagcttaacatttctcttctctcagacccttagctccaaggaaatcatcctgagacattttgctacrccatctgaatctgacacaagttgagttcggagaactcagcttgaagcatgtctcttgtcacagaaacttcagttggccctttattctcttatggtaaaga

SEQ ID NO: 8377 - DNA, 201 bp, Homo sapiens
cttcccttcaggaattggaagtcagaataacggaattccaactggaaagtcttcattgacgcttagtgggtgttgggcaagggtaatctaagtgtttggtsgttcgtcattctgactttcttcataaggtgatctcctcgcctcctcatttcccttctgctccacaaaactaggaggaaggtgaggcagcttaacatttct

SEQ ID NO: 8378 - DNA, 201 bp, Homo sapiens
atattaaatgtgtggatgttttcctagatgtccttgaggctctgttgattaattggttcagtcattgtgtgtatgtgtatttgtgtctgtctgtctgtcttgtggtttgtctagctttaattgaatcattttctcgttcaccttttcctaccataatatctaaactggttataaggccatccagtgaattcctcattacag

SEQ ID NO: 8379 - DNA, 201 bp, Homo sapiens
tatattaaatgtgtggatgttttcctagatgtccttgaggctctgttgattaattggttcagtcattgtgtgtatgtgtatttgtgtctgtctgtctgtcttgtggtttgtctagctttaattgaatcattttctcgttcaccttttcctaccataatatctaaactggttataaggccatccagtgaattcctcattaca

SEQ ID NO: 8380 - DNA, 201 bp, Homo sapiens
atatattaaatgtgtggatgttttcctagatgtccttgaggctctgttgattaattggttcagtcattgtgtgtatgtgtatttgtgtctgtctgtctgtcttgtggtttgtctagctttaattgaatcattttctcgttcaccttttcctaccataatatctaaactggttataaggccatccagtgaattcctcattac

SEQ ID NO: 8381 - DNA, 201 bp, Homo sapiens
acatatattaaatgtgtggatgttttcctagatgtccttgaggctctgttgattaattggttcagtcattgtgtgtatgtgtatttgtgtctgtctgtctgtcttgtggtttgtctagctttaattgaatcattttctcgttcaccttttcctaccataatatctaaactggttataaggccatccagtgaattcctcatt

SEQ ID NO: 8382 - DNA, 201 bp, Homo sapiens
ccctggttgaactatttcactggtctttagtgggcattgtggaatggtgctatttctaagcacatggtcatatgttcttctgagctttctattcatgagamctcaccacctccaagtatcctcctacttctatcaactatgagaaaagagagctggcctgacatttctctcctctcagaccctgtgcccaaagcaagaagc

SEQ ID NO: 8383 - DNA, 201 bp, Homo sapiens
ccttgctattcagtgcaggaagggtatccaggaagaaagccaaggcatctatggagttgagctcatcattggccctctctcaattctctaggtcctctacsatctgttgtcccacatgtagaaaccatttttccatgtctttggttgttgattatggccaaatgattggccatggggtggtcagaccagggcttctatcca

SEQ ID NO: 8384 - DNA, 201 bp, Homo sapiens
tgcagtgtcatgtgaggccaactactggaggagacttctatgcgtatttgtagagctcctttcctccacaaaccagttcttatttgtagcggacctagaawataccagagtcatcccaaactccaatccctctcctctgctcagctagatggctacaggctgcttgagctccatctccttgctattcagtgcaggaagggt

SEQ ID NO: 8385 - DNA, 201 bp, Homo sapiens
agcttgctgttctcttgtagttgctgtttctcagtaaatgttctttgccacactttctgtagaaccattttctgtgcacatgcagtgtcatgtgaggccarctactggaggagacttctatgcgtatttgtagagctcctttcctccacaaaccagttcttatttgtagcggacctagaaaataccagagtcatcccaaac

SEQ ID NO: 8386 - DNA, 201 bp, Homo sapiens
tgtattgcctgatttattttctggtcatggatcacacgaaattcttttctacacgtagtcaaatttttaatttaggactcactctggggataccgcatagytgaggcaattgactttgttgtttacttctgaagagagttgagatttcctctcacaggcacttcattgattggaaacccatttgatgcttggacacttgct

SEQ ID NO: 8387 - DNA, 201 bp, Homo sapiens
taaatatctgaaatcagttatcatactgatatgtcaaattttcatgcaattctaattatcgatgtcatttctgagcctgtttgtattgcctgatttatttyctggtcatggatcacacgaaattcttttctacacgtagtcaaatttttaatttaggactcactctggggataccgcatagctgaggcaattgactttgtt

SEQ ID NO: 8388 - DNA, 201 bp, Homo sapiens
aaatttaaatataagttttatacacaagtatataaatattcagacatatatataaatattcagatgtttgtgtgtgtgtgtgtgtgtgtatatatatatayatatatatatatatacacatcttaatttttttttttttacttattacccatgacaaaaatggcaaacaaaccttcgggaattgaaatttagaatgacaga

SEQ ID NO: 8389 - DNA, 201 bp, Homo sapiens
attttagacaatttaaccaagaagatttgccaaagtaaatcatacatttttacttttcaaaatcatatttctgattgattagttttcttgaatctgtgagyttttttttcttcatatttggaaagttttcagccatcattgcttcaggcattttttctgttcaagtatctctttcttctcttgtgatatctgatcacaaga

SEQ ID NO: 8390 - DNA, 201 bp, Homo sapiens
tctttgtggtgttctctgtatttcctgaatttgaatgtggtattctctgtatttccttaatttgaatgttggcctgtcttgctaggttggggaagttctcctggataatatcctgaagagtgttttccaacttggttccattctcccatcactttcaggtacaccaatcaaacgtaggttcaatcttttcacatagtccca

SEQ ID NO: 8391 - DNA, 201 bp, Homo sapiens
cccactctcttctggcttgtagagtttctgcaggaagatccactgttagtctgatggggttccctttgtgggtaacccaaactttctctctggctgccctyaacatttttttccttcatttcaaccttggtgaatctgacgattatgtgtcttcaggttgctcttcttgaggagtatctttgtggtgttctctgtatttcc

SEQ ID NO: 8392 - DNA, 201 bp, Homo sapiens
ccacacatctacaaccatctgatctatgacaaacctgacaaaaacaagaaatagggaaaggtttccctatttaatacatggtgctgggaaaactgcctagmcatatgtagaaagctgaaactggatcccttccttacaccttatataaaaattaattcaagatggattaaagacttaaatgttagacctaaaaccatataa

SEQ ID NO: 8393 - DNA, 201 bp, Homo sapiens
agcctaccaaccaaaaaaagtccaggagagattcatagccgaattctaccacagatacaaagaggagctggtaccaattcttctgaaactattccaatcakagaaaaagagggaatcctccctaactcattttatgaggccagcatcatcctgataccaaatcctggcagagacacaacaaaaatgagaattttagaccaa

SEQ ID NO: 8394 - DNA, 201 bp, Homo sapiens
cccacagaaatacaaactaccatcagagaatattataaacacctctgtgcaaataaactagaaaatctagaagaaatggaaaaattcctggacacatacamcctaccaagactaaaccagaaagaaattgaatccttgaatagaccaataacaggctctgaaattgaggcaataattaagagcctaccaaccaaaaaaagt

SEQ ID NO: 8395 - DNA, 201 bp, Homo sapiens
tcgaaacgcctatttgatgcattgaatttcgtgtttttgcgattttgttaatattcttgatcaatgaaaagttttcggccatccttgattccggtatttgyttctgtttccaatctcccgttctcttttctgtgacttgcttcccatatgcaggaaatcttttcctattttgcaacatgtctgtgaggttcggttggtttt

SEQ ID NO: 8396 - DNA, 201 bp, Homo sapiens
caggaattgaactcagctctgcaccaagcagacctaatagacatctacagaactctccaccccaaatcaacagaatatacattcttctcagcaccacatcrcacttattctgaaattgaccagatagttggaagtgaggcattcctcagcaaatgtaaaagaacagaaattataacaaactgtctctcagaccacagtgca

SEQ ID NO: 8397 - DNA, 201 bp, Homo sapiens
taaccagcgaacatcatgatgacaggatcaaattcacacataaaaatattaaccttaaatgtaaatgggctaaatgctccaattaaaagacacagactggmaaattggataaagagtcaagatccatcagtgtgctgtattctgaagacacatctcacgtgcagagacacacataggctcaaaataaagggatggaggaag

SEQ ID NO: 8398 - DNA, 201 bp, Homo sapiens
aaagtttagatgaatggcagactaaaataaacagcatagagaagaccttaaatgatctaatggagctgaaaaccatggcacgagaactacgtgacacatgmacaagtttcagtagttgattcaatcaagtggaagaaagggtatcagtgattaaagatcaaatgaatgaaatgaagcgagaagagaagtttagagaaaaaa

SEQ ID NO: 8399 - DNA, 201 bp, Homo sapiens
aacaaagctggacagagaatgactttgatgagttgagagaagaaggcttcagacgatctgtaataacaaatttctccgagctaaagaaggatgttcgaacycattgcaaagaagctaaaaaccttgaaaaagtttagatgaatggcagactaaaataaacagcatagagaagaccttaaatgatctaatggagctgaaaac

SEQ ID NO: 8400 - DNA, 201 bp, Homo sapiens
cctagccaagggaagccatgacagatgtacccggaaaatcgggacactcccaccctaatattgcacttttccaatggtcttagcaaacggcacaccaggakattatatcctgcacatggctcagagggtcccatgcccacagagccttgctcactgctagtacagcagtctgagattgaactgctagcacagtagtctgag

SEQ ID NO: 8401 - DNA, 201 bp, Homo sapiens
gtcttctgaacacagcaaaccaatgggtcttgactctttattcaatttcccagtctgtgtcttttaattggggcatttagcccatttacatttaaggttartattgttatgtgtgaatttgatcctgtcattatgatgctagctggctattttgcccattagttgatgcagtttctttatagtgttgatggtgtttacaat

SEQ ID NO: 8402 - DNA, 201 bp, Homo sapiens
tgccctggacagaatttccaatactatgttgaataggagtggtgagagagggcatccttgtcttgtgctggttttcaaagggaatgcttccagcttctgcycattcagtatgatattggctatgcatttgtcataagtagctcttattattttgagacatgctccatcaatacctagtttattaagagtttttagcatgat

SEQ ID NO: 8403 - DNA, 201 bp, Homo sapiens
cctcggcctcccaaagtgtcttctagggtttttatggttttaggtcttacatttaattctttaatctatcttgagttaatttgtgtataaggtgtaaggargggatccagtttcagttttctgcatatggctagccagttttcccaacaccatttattaaatagggaatcctttccccattgcttatttttgtccagtttg

SEQ ID NO: 8404 - DNA, 201 bp, Homo sapiens
gttacataggtatacacgtgtcatggtggtttgctgcacccagcaacccatcatctacattaggtatttctcctaatccaatccctcccctagcctcaacwccccaacaggcccctgtgtgtgatgttccccttcctgtgtccatgtgttctcattgttcaactcacacttatgagtgagaacatatggtgtttggttttc

SEQ ID NO: 8405 - DNA, 201 bp, Homo sapiens
ctgccagaggcaaatacattggtttctttcaacagaaattagtttttcctcttttggaggaaatgtaaatgatctcatgtaaatgaactcatacagaatayacatggcttctttcctgagtatatttttgagctccatccatgctatttaagatactcagtgctgaatagtattcaagtgtaccagtaggttgcaaattat

SEQ ID NO: 8406 - DNA, 201 bp, Homo sapiens
acagcttgcagctgtgcaggctatagggtatttggtcatcagtcagggacagacataaaaaccttgcatgtttccctagaacatatatatatatatatatrtgtgtgtgtatatatatatgtatatatatatgaatactagtctgtatgaacatatatatatgaacatatatatgaatactaacttatatgaacatatata

SEQ ID NO: 8407 - DNA, 201 bp, Homo sapiens
caggtttatatatattaattatattatattatattatattatattatattatattatattatattatatgttagtgtgtgtgtgtgtgtgtgtgtgtgtgtatgtgtgtgtgtcctgcaaattgtatggctatacagcttgcagctgtgcaggctatagggtatttggtcatcagtcagggacagacataaaaaccttgca

SEQ ID NO: 8408 - DNA, 201 bp, Homo sapiens
acaggtttatatatattaattatattatattatattatattatattatattatattatattatattatatgttagtgtgtgtgtgtgtgtgtgtgtgtgtgtatgtgtgtgtgtcctgcaaattgtatggctatacagcttgcagctgtgcaggctatagggtatttggtcatcagtcagggacagacataaaaaccttgc

SEQ ID NO: 8409 - DNA, 201 bp, Homo sapiens
aaaactggagcttagaacccagtgtgttcacacaggtttatatatattaattatattatattatattatattatattatattatattatattatattatawgttagtgtgtgtgtgtgtgtgtgtgtgtgtgtatgtgtgtgtgtcctgcaaattgtatggctatacagcttgcagctgtgcaggctatagggtatttggt

SEQ ID NO: 8410 - DNA, 201 bp, Homo sapiens
gaaagtgttttttaatatcttttatagtcatttatggcagaaagccagtttttgtcagacctggttttttgtccatgtacctgcccattttaatctccatrtctgtttacttcctaattctcatctacattcttgcttttgctcttcctctcctggcaacccatatcccttcagaaaactggagcttagaacccagtgtgt

SEQ ID NO: 8411 - DNA, 201 bp, Homo sapiens
ttaaagttcccatctggtattatttttcttctacctgaataactttccttaaaatcttttaatacagaagcctgccttggaaacattcttttgtttttttscttgtttcctctggaggtggcagaatacgtatttacatcacgtttattttaaagggtttttttgtttatttgtttgttttggctggacatgtcgtcctag

SEQ ID NO: 8412 - DNA, 201 bp, Homo sapiens
gacaatatgcaggggcaccccacaccctctcctttgtgctgcaacaaggtcattaccagtgcctttctaatattcccataaaagtaccatatgattgccasaagcacaaatggctctcaatcactaatcctgtctgcacatttctcatacttaaaagattattattataaaaaaaaatctaaagtagcaaacgcttcttag

SEQ ID NO: 8413 - DNA, 201 bp, Homo sapiens
gagttctgtgagccactctagcaaagtaatcaaacccatggagggtcatatagaaaaacagatctttatccagctgggcagaagtacaggtcacagcctgsaacttgggattggcatctgcagtggggcagtcttgtaggactgagccttaacttgtgggatctgacactgtctccagatagagtgtcaggaccgagttac

SEQ ID NO: 8414 - DNA, 201 bp, Homo sapiens
agtaaagaaaaatcaactcaacagcagagtgaaatgcgatgcgatcaggtttgtcgatggcatttcacaaacttacagaaggaagtctctttagaggagaacagcaattgagcacaggtgccctggtgtagaaaggagatgaggaagcaaaacatgcaggcagatgggtctgtgtcctatgtgttcttcctaagagacacc

SEQ ID NO: 8415 - DNA, 201 bp, Homo sapiens
aaagtaaagaaaaatcaactcaacagcagagtgaaatgcgatgcgatcaggtttgtcgatggcatttcacaaacttacagaaggaagtctctttagaggagaacagcaattgagcacaggtgccctggtgtagaaaggagatgaggaagcaaaacatgcaggcagatgggtctgtgtcctatgtgttcttcctaagagaca

SEQ ID NO: 8416 - DNA, 201 bp, Homo sapiens
ataaagtaaagaaaaatcaactcaacagcagagtgaaatgcgatgcgatcaggtttgtcgatggcatttcacaaacttacagaaggaagtctctttagaggagaacagcaattgagcacaggtgccctggtgtagaaaggagatgaggaagcaaaacatgcaggcagatgggtctgtgtcctatgtgttcttcctaagaga

SEQ ID NO: 8417 - DNA, 201 bp, Homo sapiens
ggtttgtctgtaccaccctccaccttctctgagccccagcttcctcaatggtaaaataggaacaataatacctaactcacagtggtttgtagcatttaaaytttaaaatatgcaaacaccaggagcagcctcccacacccataggtgcccctcatttgccaagtttccttttacctggcctcagtgctcccagactcagca

SEQ ID NO: 8418 - DNA, 201 bp, Homo sapiens
gacaagtaacattcttgtttctttatttgtaggcagatggacttgagaaaagcaacaaccaaccaacaaacaaaaacaccaaagaaacaaattcctaacaytttagaactgtagtaagttcttagaaatatttcacataaaagcttagaaaaaaaggacaaatgagagggcttctcaatggaaactgtgctcacgtgcaag

SEQ ID NO: 8419 - DNA, 201 bp, Homo sapiens
ggtcctatgaaacaggcacttgtcattcctgttcttcagttgaggaaactgaggcgtaaggaggttgtatagctcagcttgagtctgggtctgcggagtcrctgcccaaatgcttcctccccatgcgtgttggccccactcttgcttccaaccttccacatgtttgttcataaatttcattcttattccttattactttct

SEQ ID NO: 8420 - DNA, 201 bp, Homo sapiens
gcttcactctgtctcccgtccaattaattatttctcatcattccctcaatccaagtaacaaaccttgaaacacgagcatagacaccaggcttattggggcrtgcacagccaagaccccaagaagtgactccttgtaaaatgtatttgtccttctcgaagcaaaccagaggccctccactgtcaccctaaacagaggtaggg

SEQ ID NO: 8421 - DNA, 201 bp, Homo sapiens
cacaaccagaaaggagtctatgagaattacgaacgttatctttcccttacctgtaggcagatggatgggagaaaaccaaccaaaaaacatacagcaaaccyacagattcctaccaatctagaactgtagtaagttctaggaaatatttcacctgaaatccttagaaaaacagaacagaacagatcttctcactgcaaagtg

SEQ ID NO: 8422 - DNA, 201 bp, Homo sapiens
tgctgaaatgaaaacacaagaaataaactgagtatctctgagaataacgaaatatgtgaagccatttatgacacaaccagaaaggagtctatgagaattaygaacgttatctttcccttacctgtaggcagatggatgggagaaaaccaaccaaaaaacatacagcaaacctacagattcctaccaatctagaactgtagt

SEQ ID NO: 8423 - DNA, 201 bp, Homo sapiens
aaatgtaagggggctgctgtctgtctttgaagaaaactcaaggttgtacccatttggataatattctgttgtcctctgatgccagtgtggtgtcatagagraccaagactgacatgtccttcctgtgacagtggtagagaatgagcctcgataactctgtccatcaccatggtagcaatcctggaccccggggctttgctc

SEQ ID NO: 8424 - DNA, 201 bp, Homo sapiens
tataatgggatcctccgatgccaatgtggtgtcatagacgaccaagactgacatgttcttcctgtgatagtggtggagagtgtgcctcgataactctgtcyatcacctcggtagcagtcctggaccccagtgctgttttcagttggtgctgaaattaaaagagaaaatcaagctcagtattgcctagaaaagggaaatgtg

SEQ ID NO: 8425 - DNA, 201 bp, Homo sapiens
tagttttctggggtcctctgatgccagtgtggtatcatagatgaccaagattgacaggtccttcctgtgacagtggtggaggatatgcctcgataactccrtccatcaccatggtagcaatcctggaccacagggcttttctcaggtggtgctgaaattaaaataaaataaatcatactcagtaattgcatgagcagagaa

SEQ ID NO: 8426 - DNA, 201 bp, Homo sapiens
gtggtagcactcctgcaccccaggcctctgctcagtcggtgctgaaatgaaaacacaagaaataaactgagtatctctgagaataacgaaatatgtgaagmcatttatgacacaaccagaaaggagtctatgagaattacgaacgttatctttcccttacctgtaggcagatggatgggagaaaaccaaccaaaaaacata

SEQ ID NO: 8427 - DNA, 201 bp, Homo sapiens
cttcccccaacatggtagaactcaggcaacactcgagcatccgtttaccattgaaggcggctgcatcagtgggaatttccatggcttttcatcccagcatsgaagcgtgtagatgtctggccacagactccttaccttgttcggaaggagcctctaggcttggaaccggggtaacagtcggaggcgcgacggcagtccctt

SEQ ID NO: 8428 - DNA, 201 bp, Homo sapiens
aacttacgaattgcatgttccactgaaacgatacccaaaatgtccaggttctgtgggttcggactgattactcttcatttatggggatcacaacccataayttgttcatgtgtttgtgaatagatgaatagcctcggcattgaattcaatgattcacaaaagtgtaaaaaaaaatctgtgcctgtgatagactgtaggtaa

SEQ ID NO: 8429 - DNA, 201 bp, Homo sapiens
cccaaatgcttcctccccatgcgtgttggccccactcttgcttccaaccttccacatgtttgttcataaatttcattcttattccttattactttctgaartctcagttcccataattatatagacatatttctatctcacagtaacattgccaaattattctctaaaagggtgtgacagtggaaaatgtcactggaaaac

SEQ ID NO: 8430 - DNA, 201 bp, Homo sapiens
aatattagctaacatagtaggtggaaattgtcctgattcattttctaatttacacttccttgacaattagggagaagaaatactagggacaattctcctcrttgtagttcttcttttgtgaaaaactgcttaatttccttcgccaaattgaaacagaacctctgctaaagtgccagaggaaatgctgtttttccagatgga

SEQ ID NO: 8431 - DNA, 201 bp, Homo sapiens
aattagggagaagaaatactagggacaattctcctcgttgtagttcttcttttgtgaaaaactgcttaatttccttcgccaaattgaaacagaacctctgytaaagtgccagaggaaatgctgtttttccagatggacatgcccagggatttctcagtgctctcacaaataatccaagtttccaatgttgcaagcccagct

SEQ ID NO: 8432 - DNA, 201 bp, Homo sapiens
ggacccacaaattcaacctttcattaatattacataccatcgtggataaggtaagaaacttacaatggtacacttccaattattccccacatgatttagtytatatgttcaaatttttacctctacatatgctaaagttaaatatattgctatcattttgcttcaagtagtcaactctcatttaaaaagatatagaaattt

SEQ ID NO: 8433 - DNA, 201 bp, Homo sapiens
tgtattatgggccatggggatccaacactgtctctctagagactctacacatgtgacctagtctcaagcccagaccctccattccaggaagctggttcaawgagcaactggatgtgctcagagcttgagtacttgaaagacttctttttcttccttggcttccctcttttggatacatggaaaattcttattatataatat

SEQ ID NO: 8434 - DNA, 201 bp, Homo sapiens
tgcgctcacgaagtagcacctttctatgaaactctactgaatgttcatacaaagggcactgcatttggcaatgcaggatgcaggtggtaattggctgtcgrgggcagaggaggggaaagacatggaaattttgcatgtttccctagatcgttgatcatgaaagccaaggcctctggcttccaggccatggggcagaaaacg

SEQ ID NO: 8435 - DNA, 201 bp, Homo sapiens
ttattaataggcaaatggacatgagaaaacacacaaacaaacacgaaagtaagagatgcctaccattctagaactgtagtaagttcttagaaatatttcaygtaaaacttagtggaaaagaaatatcagattgcttctcatcggaaactccactaacatggaagctcatttctaggaatctctacagagtgttcatgacga

SEQ ID NO: 8436 - DNA, 201 bp, Homo sapiens
ggcggagcttgcagtgagccgagatcatgccactgcactccagcctgggcaacaaagcaagactctgtctcaaaaaaacaaagtcttctctaagaactttkgctcacaggaaatgttcctctgcatctgagccaagttgagtcctgagcagtcaccttgaagcatgactcttctaacagaaacttccattggcccttcctt

SEQ ID NO: 8437 - DNA, 201 bp, Homo sapiens
tggtgtgaacccgggaggcggagcttgcagtgagccgagatcatgccactgcactccagcctgggcaacaaagcaagactctgtctcaaaaaaacaaagtmttctctaagaacttttgctcacaggaaatgttcctctgcatctgagccaagttgagtcctgagcagtcaccttgaagcatgactcttctaacagaaactt

SEQ ID NO: 8438 - DNA, 201 bp, Homo sapiens
ctcagccgatgttgtagaaggatactctaactctttggtcatttgtcatcccggctgttttattaataagatcttctcaactccatatatccttctgcttmcataaaactaggaggaaggagagccagcttaaaaaatgtcttctcagccaggcacggtggctcacgcctgtaatcccagcactttgggaggctgaggcag

SEQ ID NO: 8439 - DNA, 201 bp, Homo sapiens
aaatgaaaacacaagaaataaactgagtatctctgagaataacgaaatatgtgaagccatttatgacacaaccagaaaggagtctatgagaattacgaackttatctttcccttacctgtaggcagatggatgggagaaaaccaaccaaaaaacatacagcaaacctacagattcctaccaatctagaactgtagtaagtt

SEQ ID NO: 8440 - DNA, 201 bp, Homo sapiens
ctgcaccccaggcctctgctcagtcggtgctgaaatgaaaacacaagaaataaactgagtatctctgagaataacgaaatatgtgaagccatttatgacamaaccagaaaggagtctatgagaattacgaacgttatctttcccttacctgtaggcagatggatgggagaaaaccaaccaaaaaacatacagcaaacctac

SEQ ID NO: 8441 - DNA, 201 bp, Homo sapiens
acccagaagtatatggaactaagaaaagtcatattaggtttctcaaggatgacagactcaaaaaccgcattcctccgaaaccgcaaagccaaagatgcaaygaacactgactacttgaagaaataccatgaaaggcttatcatgagcttggtaaatcttcacaaatttggcaaaatgttagaatattcttctggctaagac

SEQ ID NO: 8442 - DNA, 201 bp, Homo sapiens
ctatgtactgctacctggacccagaagtatatggaactaagaaaagtcatattaggtttctcaaggatgacagactcaaaaaccgcattcctccgaaaccrcaaagccaaagatgcaatgaacactgactacttgaagaaataccatgaaaggcttatcatgagcttggtaaatcttcacaaatttggcaaaatgttagaa

SEQ ID NO: 8443 - DNA, 201 bp, Homo sapiens
ggctactggccaaaattttattcccttggagggatggctggtatctttggcccaggattctgcattgcaacaaagtagatatccactactcttcttctcaragaccaacacagatatatgttccatgagaaggaggggcaagaacactgagagatccctcccatcaaagcctagttgtgcaggactggcttaagatggaga

SEQ ID NO: 8444 - DNA, 201 bp, Homo sapiens
ttggagaagatacagcaccacctggcaccctctatgttttcttgtaacaaagtgtaaacaagcaaatttgaaatattctcactaaagtcccataacactcrcaaatggtcctcaacttctaaacaactgtcaacatttcaaagacagcttatgattcttattgtaacacattcaaagtaatctatgctttataagaaaact

SEQ ID NO: 8445 - DNA, 201 bp, Homo sapiens
gagattggagaagatacagcaccacctggcaccctctatgttttcttgtaacaaagtgtaaacaagcaaatttgaaatattctcactaaagtcccataacrctcacaaatggtcctcaacttctaaacaactgtcaacatttcaaagacagcttatgattcttattgtaacacattcaaagtaatctatgctttataagaa

SEQ ID NO: 8446 - DNA, 201 bp, Homo sapiens
caatagaaaaataatgcagtctccttaggtttctctaggatatcatactcaaaggccatgttcttaagaaactgcaaactgtagattgcaatgaaaaaagyctactttaaatcactggaaaggcttattggcttggaaatcttcacatatttggcaggctgttagaatatccattttggctaggacactgaaatgacccat

SEQ ID NO: 8447 - DNA, 201 bp, Homo sapiens
acacatgcacacatatgtttattgcggcactattcacaatagcaaagacttggaaccaacacaaacgtccatcaatggtagactggattaagaaaatgtgrcacatatacaccatggaatactatgcagccataaagaaggatgacttcatgtcctttgtagggatgtggatgaagctggaaaccatcattctcagcaaac

SEQ ID NO: 8448 - DNA, 201 bp, Homo sapiens
tttatccctgggatgcaaggctggttcaacatatgcaaatcaataaatgtaatccatcatataaacagaaccaaagacaaaaaccacatgattatctcaayagatgcagaaaaggcctttgacaaaattcaacagctctccatgctgaactctcaataaactatgtattgatgggacatatctcaaaataataagagctat

SEQ ID NO: 8449 - DNA, 201 bp, Homo sapiens
gaggagctggtaccaattcttctgaaactattccaatcatagaaaaagagggaatcctccctaactcattttatgaggccagcatcatcctgataccaaakcctggcagagacacaacaaaaatgagaattttagaccaacatccatgatgaacattgatgcaaaaatcctcaataaaatactggcaaactgaatccagca

SEQ ID NO: 8450 - DNA, 201 bp, Homo sapiens
ttgtgtggaagtctaagtctctttgtaggtctctaagaacttgctttattaatctgggtgctcctgtattgggtgcatatataagtaggacagtcagatcytcttgttgcattgatacttttaccattaggtaatgccctcctttgtctcttttgatctttgatggtttaaagtctgtttcatcaaagactaagattgcaa

SEQ ID NO: 8451 - DNA, 201 bp, Homo sapiens
caggaccatatggaattaatgcagccctgttaggtttctcgaggatgacaggctccagagccacatttctctgaatctgcaatgctgaagattgcactgamtgctggctacttgaagaaatccccggaaaagcttactggactgaaagagtcacacacctgacagcacgttacaataaaaattttggctgggacactgagg

SEQ ID NO: 8452 - DNA, 201 bp, Homo sapiens
agacccaggaccatatggaattaatgcagccctgttaggtttctcgaggatgacaggctccagagccacatttctctgaatctgcaatgctgaagattgcwctgaatgctggctacttgaagaaatccccggaaaagcttactggactgaaagagtcacacacctgacagcacgttacaataaaaattttggctgggacac

SEQ ID NO: 8453 - DNA, 201 bp, Homo sapiens
ctggcaagtggcagagtcagaacagttttccagggccccagactcccagtgcccttgcctgcacctctgagaaagtagagctgagactttaagacagtttyagttttcctactgccaagggggtaaggctgacggatataattattgtcagggcataccgcaaagagaagaaggaatccataaaatgtagtacaggtgctg

SEQ ID NO: 8454 - DNA, 201 bp, Homo sapiens
ctcacaggtacaagtgccatcagaaagaggtttaagaacactgagaaatcactcccttcaaagcctaggactgaagagccttagagcattgggagctcatrtactgctccatagacccaggaccatatggaattaatgcagccctgttaggtttctcgaggatgacaggctccagagccacatttctctgaatctgcaatg

SEQ ID NO: 8455 - DNA, 201 bp, Homo sapiens
gatctcattgttccccctgtcactattcttttggtccactactgtctgttgtccaacatgtagaaaccatttttccatgtctttggtgtcacttatggcckaaagcctggccatgggctggtcagacctgggcttctgtccatctatccacccttttactttacaggatctctctctttgctgactctcatctgccttcct

SEQ ID NO: 8456 - DNA, 201 bp, Homo sapiens
tgtgtgtatatatatatatatatatatatacatatatatatatatatatatgtgtatatatatatatatatatatatactatatatatatatatatatatrtgtatatatatatatatatatgggtatatatatatatacacacatgcacacatatatttgtgtgtgtaaatgaatattcagttacatacctgaatattta

SEQ ID NO: 8457 - DNA, 201 bp, Homo sapiens
tttttattctttttaaagattgtcttggtgattctagcatatacattctgttaggttttcaagaaaagactgcaggaattctgcttgggtgtgggttgaarctaaagatcagttttgtgaaaagtgacattggattttttaatctataagcatgatgtgtctttatttagatcttctaattttcttctcaccaatgttatg

SEQ ID NO: 8458 - DNA, 201 bp, Homo sapiens
ttcatatcctttgcccactttttgatggggttgttttttttttcttgtacatttgtttaagttgcttgtacattctaaacattagccctttgtcagatggmtagaccacagaatttttctccataggttgctttttcactctgatgagagttttttgctgtgcagaagctctttattttaattagatctgatttgtaaatt

SEQ ID NO: 8459 - DNA, 201 bp, Homo sapiens
caaggagaaggcatcggtcactttcattactgtccctctatgtaaatgatattgttttcctctggcttataagattatccttgttatctttgatgttggaygatttatctataatgtacccaagtaaatcatagagttttgcttttaaaaatactatttctgattcattgagcttcttgactgtgagtttatcattttctt

SEQ ID NO: 8460 - DNA, 201 bp, Homo sapiens
aatttatgcaaaaatttaaatataagttttatacacaagtatataaatattcagacatatatataaatattcagatgtttgtgtgtgtgtgtgtgtgtgtrtatatatatatatatatatatatatacacatcttaatttttttttttttacttattacccatgacaaaaatggcaaacaaaccttcgggaattgaaattt

SEQ ID NO: 8461 - DNA, 201 bp, Homo sapiens
cagagatgccctgcccagagaggaggaatctagagaggcactcttgctacaatggctttgccaagctgcagtgcaccctgcccagttcaaacttcctagcrgttttgcttacactgtgaggggaaaacctcctactcaagccccagtatttgtggatacccctcctcccaccaagcttgagcgtcccaggtcaacttcaga

SEQ ID NO: 8462 - DNA, 201 bp, Homo sapiens
aatcctcccattcgtgacctgtggctgcctgggaaaacgggaaatgtattatgggccatggggatccaacactgtctctctagagactctacacatgtgasctagtctcaagcccagaccctccattccaggaagctggttcaatgagcaactggatgtgctcagagcttgagtacttgaaagacttctttttcttccttg

SEQ ID NO: 8463 - DNA, 201 bp, Homo sapiens
ttcagttacatacctgaatatttatatataaatatttaaaatgttatattaaaatatataaaaatactcagacatacatagtgaaacaatataatttttartgaaatattaaaaatatataaatttatgcaaaaatttaaatataagttttatacacaagtatataaatattcagacatatatataaatattcagatgttt

SEQ ID NO: 8464 - DNA, 201 bp, Homo sapiens
aggttcaaggtggccatgatgaaaagcaggctctggtggagagggcagccatctcctccccagaagcactcagctcaaaagccattttctgttttttttgyttttttttttccaaatccatattaaggaagcagtttccttaccaaaacagaaggcaacttaccacagagagggatatcacagtagtcaaaaagttttctt

SEQ ID NO: 8465 - DNA, 201 bp, Homo sapiens
cttgactttgttgtttacctctaaagagggttttcctctcccaggcagttaattgacttggaaatgattttaatgcttggagacttgcttttcagttttgycagggtttgtctagagctgcctttttttctagaaatttactaattctactcctaaagtatgacttttctggagtctctactgtattcccaagaggttcag

SEQ ID NO: 8466 - DNA, 201 bp, Homo sapiens
agcccatgtatgtcttttcaccctgagatgggtcttctgaacacagcaaaccaatgggtcttgactctttattcaatttcccagtctgtgtcttttaattrgggcatttagcccatttacatttaaggttaatattgttatgtgtgaatttgatcctgtcattatgatgctagctggctattttgcccattagttgatgca

SEQ ID NO: 8467 - DNA, 201 bp, Homo sapiens
ccatagacccaggaccatatggaattaatgcagccctgttaggtttctcgaggatgacaggctccagagccacatttctctgaatctgcaatgctgaagaytgcactgaatgctggctacttgaagaaatccccggaaaagcttactggactgaaagagtcacacacctgacagcacgttacaataaaaattttggctggg

SEQ ID NO: 8468 - DNA, 201 bp, Homo sapiens
atttgctcttccttatgcctcccaagaacgttgctccaacctctctctatcctcacattcatgacctgtggctgcctgagaaaatgggaaatgtattacgrgccatggggatgaaacactgtctctctagagactctatacatgtggcctagtgtcaatcccagaccctccattccaggaagctggttcaatgagctacag

SEQ ID NO: 8469 - DNA, 201 bp, Homo sapiens
gaaagatctaaaattgacaccctaacatcaccattaaaagaactagagaagcaagagcaaacacattaaaaagctagcagaaggcaagaaataactaagaycagagcagaactgaaggagatagagacacaaaaaaaccttcaaaacatcaatgaatccaggagctggttttttgaaaagatcaacaaaattgatagacca

SEQ ID NO: 8470 - DNA, 201 bp, Homo sapiens
ggtctgttcttgcagtcaatatggggctaaaattcacaatatgagcctctgcatgctgctctgtccagagctgcaatctagtcctgcctcctgtctgccaygatccctcacctcttgggtttttcttctattactttaaagatgttactttattgtttctgactttcattgtttctgatgagaaggcatcagtcatttgtg

SEQ ID NO: 8471 - DNA, 201 bp, Homo sapiens
tgcaggaaatctttttatattttcccgcctgtctgtgaggatcagtggatttcattttttagtatttgtggaggtgtgtgtgtgtgtgtgtgtgtgtgtgygtgcatgtttctaagcctgtgcatgtgtgagtatgtgtgtatatgtgtgtgtcatttgtgtatgtgtagctggttctgtaggtggtataaaattgttttt

SEQ ID NO: 8472 - DNA, 201 bp, Homo sapiens
acctgagagatagagcttcgggagctcatgtactactccacagacccagggagatatggaattaatgcaacccagttaggtttctcaaggataacaggatytagagccacatttctcggaatctgcaatgctgaagattgcactgaatgctgtctacttgaagaaatccctggaaaagtttactggcttggaaagacacac

SEQ ID NO: 8473 - DNA, 201 bp, Homo sapiens
tgataccaaatcctggcagagacacaacaaaaatgagaattttagaccaacatccatgatgaacattgatgcaaaaatcctcaataaaatactggcaaacygaatccagcagcacatcaaaaagcttatccaccatgatcaagttggctttatccctgggatgcaaggctggttcaacatatgcaaatcaataaatgtaat

SEQ ID NO: 8474 - DNA, 201 bp, Homo sapiens
atatatatatatatatgggtatatatatatatacacacatgcacacatatatttgtgtgtgtaaatgaatattcagttacatacctgaatatttatatatraatatttaaaatgttatattaaaatatataaaaatactcagacatacatagtgaaacaatataatttttagtgaaatattaaaaatatataaatttatgc

SEQ ID NO: 8475 - DNA, 201 bp, Homo sapiens
tggccgaataggaacagctccagtccacagttcccagcatgagcaaagcagaagatgggtggtttctgcatttccagctgaggtactgggttcatctcacyggggcttgtcagacagtgggtgcagcccacggagagtgagccgaagcaaggcgggatattgcctcacccgggaagtgtaaggggtcagggaattcccttt

SEQ ID NO: 8476 - DNA, 201 bp, Homo sapiens
ttgcccattagttgatgcagtttctttatagtgttgatggtgtttacaatttggtatgtttttgcagtagctgttactggtttttcctttccatatttagkgttttcttcaggacctcttgtaaggcaggcctggtgttgacaaaattcctcagcatttgcttgtttgtaaaggattttacttctcctttgttataaagct

SEQ ID NO: 8477 - DNA, 201 bp, Homo sapiens
tactgaagcttctgtatggtgtgggggtgaagttcccaggtcactggagttgtgtacctaggaggattatggctgcctctgctgagtcatctgagttgtcrgggaagtggagggaagctgtcagtcacaggcctcacccagcacccatgcaaactgaagggctggtcttactcccaccatgcccccaaccccgcaacagct

SEQ ID NO: 8478 - DNA, 201 bp, Homo sapiens
tcagcatctctatacttcctgactctcagctgccttcctccttttgcccctcatgggctggcaacacatagcttttcagacaccttgttctcagaacccartgtgtttatacaggttagaggagaaagtgatcggaagatctcgaagtcaatatagatatccttcacttgttacccaagacaaacatggcaaacacaacct

SEQ ID NO: 8479 - DNA, 201 bp, Homo sapiens
tactatgcagccataaagaaggatgacttcatgtcctttgtagggatgtggatgaagctggaaaccatcattctcagcaaactatcacaaggacagaaatycaaacaccgaatgttctcactcataggtgggaattgaacaatgagagtacatggacacagagtggggaacatcacacaccggggcctgtcatgggatggg

SEQ ID NO: 8480 - DNA, 201 bp, Homo sapiens
atatatacatatatatatatatatatatgtgtatatatatatatatatatatatactatatatatatatatatatatgtgtatatatatatatatatatgkgtatatatatatatacacacatgcacacatatatttgtgtgtgtaaatgaatattcagttacatacctgaatatttatatataaatatttaaaatgttat

SEQ ID NO: 8481 - DNA, 201 bp, Homo sapiens
tcatatataaatatatgcactcatttctattttcttcttcttcttcttcttcttcttcttcttcttcttcttcttcttcttcttcttcttcttcttcttcytccttcttcttcttcttcttcttcttcttcttcttcttcttcttctggctcctcctgcggctccaaaaaatttctcttactcttcttcttcttcttcttc

SEQ ID NO: 8482 - DNA, 201 bp, Homo sapiens
tgatttcctaggatggccatctgaggtttacaatgtgcattacatgcttagctgtttcctgctgctcgtattttttttttcttctcagctgcagaagaggrcagtttttcatcataatgactctaaatttgtttttcatgcatcccacgctagacaaagaagggttcggtgggactatcccgggctgattagatcacctct

SEQ ID NO: 8483 - DNA, 201 bp, Homo sapiens
gtgtgtgtgtgtgtgtatatatatatatatatatatatacatatatatatatatatatatgtgtatatatatatatatatatatatactatatatatatayatatatatgtgtatatatatatatatatatgggtatatatatatatacacacatgcacacatatatttgtgtgtgtaaatgaatattcagttacatacct

SEQ ID NO: 8484 - DNA, 201 bp, Homo sapiens
aactcacagtggtttgtagcatttaaattttaaaatatgcaaacaccaggagcagcctcccacacccataggtgcccctcatttgccaagtttccttttayctggcctcagtgctcccagactcagcagtgcagaaaaagggaacaaggagtcaaggaggtgaggttttaaaaataataggaaaatgacagaaaaagggaa

SEQ ID NO: 8485 - DNA, 201 bp, Homo sapiens
tggtgcttcaggcccagtgtgtttatacctgtatgtatgtgtgtgtgtgtgtgtgtgtatatatatatatatatatatatacatatatatatatatatatrtgtgtatatatatatatatatatatatactatatatatatatatatatatgtgtatatatatatatatatatgggtatatatatatatacacacatgcac

SEQ ID NO: 8486 - DNA, 201 bp, Homo sapiens
tttagggatgtgcatgtgtgtgtgtgtttgtgtgtgtgttagaacttgtgagtttttgcatgtgtgtgtgtatgggtgtgttttgaatgtgtgtgtgtgtrgctcattctgtaggttctgcagaattgtttttggttaattttttcttctgaaacatctaaatttttcaggcggacatacagtaatttcttcatttaagac

SEQ ID NO: 8487 - DNA, 201 bp, Homo sapiens
ttaaatataagttttatacacaagtatataaatattcagacatatatataaatattcagatgtttgtgtgtgtgtgtgtgtgtgtatatatatatatatayatatatatatacacatcttaatttttttttttttacttattacccatgacaaaaatggcaaacaaaccttcgggaattgaaatttagaatgacagaattg

SEQ ID NO: 8488 - DNA, 201 bp, Homo sapiens
gcaaagcaggtaggagtttgggctgcggggatcttgaagcatttgctcttccttatgcctcccaagaacgttgctccaacctctctctatcctcacattcrtgacctgtggctgcctgagaaaatgggaaatgtattacgggccatggggatgaaacactgtctctctagagactctatacatgtggcctagtgtcaatcc

SEQ ID NO: 8489 - DNA, 201 bp, Homo sapiens
aggaggaaggagagccagcttaaaaaatgtcttctcagccaggcacggtggctcacgcctgtaatcccagcactttgggaggctgaggcaggcggatcacraggtcaggagaccaagaccatcctggctagaacagtgaaaccctgtctctactaaaaatacaaaaaattagccgggtgtggtggtgggtgcctgtagtcc

SEQ ID NO: 8490 - DNA, 201 bp, Homo sapiens
taagacactgagatagcccatttttcaacgaggtgagttgtgaagtcgatcaccctggagggtttgtgccaattctaaagacacagcccacccaacgttgyaccagaaatcaatccgctggctcccccagagagtgcacggaggcttcctcctacatgacagaactcagtcaacactcgagcatccgtttaccattggagg

SEQ ID NO: 8491 - DNA, 201 bp, Homo sapiens
gcaagacttctcaaagctgccctggaaacctagctttcaggcaggatgcagtatctctaggatgggttcctggtcaggacttcctctcctgctctcagtcyatcctctgctggccacagcaattccgggactgagggaatgggggatgagttgaaagaacagtggcactcatggcataaagggagacagctgggcagacta

SEQ ID NO: 8492 - DNA, 201 bp, Homo sapiens
tcaaatggtgatggttgtactccctccttggtctgtcatctgttcagccagactgtggtcaatcacatgaatcttttcaaagaaccaactttctgtttcayggatttactcctttgttggtctattttcttgttcactgaatgtcattggtttggactatttccatccatcccctttccttgtgtcttatttgcttttcct

SEQ ID NO: 8493 - DNA, 201 bp, Homo sapiens
taaatttatgcaaaaatttaaatataagttttatacacaagtatataaatattcagacatatatataaatattcagatgtttgtgtgtgtgtgtgtgtgtrtatatatatatatatatatatatatatacacatcttaatttttttttttttacttattacccatgacaaaaatggcaaacaaaccttcgggaattgaaat

SEQ ID NO: 8494 - DNA, 201 bp, Homo sapiens
tttatgaaaactctccctgtgcatacgcagctttgtatttagccaaagccttgaggagacttctgtgtgtattcctggagctcctttcttccacaaatccmttctcattcttagccagcctagaacacatcagctgcctgaggcatcgcagactccagtctctctcctcagttaagcaagactgctgtggtcagctgggct

SEQ ID NO: 8495 - DNA, 201 bp, Homo sapiens
ggacttgtaggtaaagacacattgcctctcagggagaaggagtacaggccaaaattttatagcctaggaggggagacagggaatcttgggcccaggatccmtcattacaagaaagctgacatccactactcttcttctcaaaaaacaacggagataaatgttccatgagaagcagggatgagaacactgagaaatcccttc

SEQ ID NO: 8496 - DNA, 201 bp, Homo sapiens
ttccatttgcttggtaaatattccttcatttctttattttgagcccatgtatgtcttttcaccctgagatgggtcttctgaacacagcaaaccaatgggtmttgactctttattcaatttcccagtctgtgtcttttaattggggcatttagcccatttacatttaaggttaatattgttatgtgtgaatttgatcctgtc

SEQ ID NO: 8497 - DNA, 201 bp, Homo sapiens
tcattttaataatattccctggtatctggcttccagtgtttctgaggtgaacgcattagcaatttgtatcactgtactctaggaagacacagctctttttyctccagtttctcgtgagatgtttcttcttcttatatccttgccttgttacctttgaactgtgatgtagagaagtgcatcatgtagttttttttctcgaaa

SEQ ID NO: 8498 - DNA, 201 bp, Homo sapiens
ccttcaggaattggaagtcagaataacggaattccaactggaaagtcttcattgacgcttagtgggtgttgggcaagggtaatctaagtgtttggtggttygtcattctgactttcttcataaggtgatctcctcgcctcctcatttcccttctgctccacaaaactaggaggaaggtgaggcagcttaacatttctcttc

SEQ ID NO: 8499 - DNA, 201 bp, Homo sapiens
cttgcagtcaatatggggctaaaattcacaatatgagcctctgcatgctgctctgtccagagctgcaatctagtcctgcctcctgtctgccatgatccctyacctcttgggtttttcttctattactttaaagatgttactttattgtttctgactttcattgtttctgatgagaaggcatcagtcatttgtgtaactgtt

SEQ ID NO: 8500 - DNA, 201 bp, Homo sapiens
ttcccccaaatatgttttccaagcttttagtattgtctttttcctcaggagccacgattattcttatatttggtcatttaacataatcccagacatcttgraggctttgttcatattttcttatcctttattctttgtctttgttggattgggttaatttgaagtccttgtctttgagctctgaatttattttttctactt

SEQ ID NO: 8501 - DNA, 201 bp, Homo sapiens
gctttttacactaagtctttaatttgatttggctagtcaatactgttactttcttttgatattttatctgttttattacatattcatctttttttaaatawttgaaatagttatcttagtcatatgtcaaattttcatgcaattcttctattcttcttatacctaattctttcgggtcacctctgttgctacataagcctg

SEQ ID NO: 8502 - DNA, 201 bp, Homo sapiens
atctggggctaaagagctgcactacccttcattgatttcctaggatggccatctgaggtttacaatgtgcattacatgcttagctgtttcctgctgctcgwattttttttttcttctcagctgcagaagaggacagtttttcatcataatgactctaaatttgtttttcatgcatcccacgctagacaaagaagggttcgg

SEQ ID NO: 8503 - DNA, 201 bp, Homo sapiens
tttgctcttcaagtcctggcaacacatgtcctttcagaccactggtgcttcaggcccagtgtgtttatacctgtatgtatgtgtgtgtgtgtgtgtgtgtrtatatatatatatatatatatacatatatatatatatatatatgtgtatatatatatatatatatatatactatatatatatatatatatatgtgtatat

SEQ ID NO: 8504 - DNA, 201 bp, Homo sapiens
aacgttgcaccagaaatcaatccgctggctcccccagagagtgcacggaggcttcctcctacatgacagaactcagtcaacactcgagcatccgtttaccrttggaggctgctgcatcagtgggaatttccatggcttttcatcccagcatcgaaacgtgtaggtttctggccacaggctccttaccttgttcagaaggag

SEQ ID NO: 8505 - DNA, 201 bp, Homo sapiens
tacataccatcgtggataaggtaagaaacttacaatggtacacttccaattattccccacatgatttagtctatatgttcaaatttttacctctacatatkctaaagttaaatatattgctatcattttgcttcaagtagtcaactctcatttaaaaagatatagaaatttgatcaagaaaatattttgcatttacatcta

SEQ ID NO: 8506 - DNA, 201 bp, Homo sapiens
ttattacatattcatctttttttaaatatttgaaatagttatcttagtcatatgtcaaattttcatgcaattcttctattcttcttatacctaattctttygggtcacctctgttgctacataagcctgctgattccaaagtcttacactttccagtttctttgttttgggcagtgcacaatatgcatttatccaacatgg

SEQ ID NO: 8507 - DNA, 201 bp, Homo sapiens
accacgttgcaccagaaatcactccgctggctcccccagagagtacacggaggcttcccccaacatggtagaactcaggcaacactcgagcatccgtttamcattgaaggcggctgcatcagtgggaatttccatggcttttcatcccagcatcgaagcgtgtagatgtctggccacagactccttaccttgttcggaagg

SEQ ID NO: 8508 - DNA, 201 bp, Homo sapiens
cctggccatgggctggtcagacctgggcttctgtccatctatccacccttttactttacaggatctctctctttgctgactctcatctgccttcctgccayttttattctctaacaaccagtatcccttcagaccactggtggtcagaaccgactgtgtttctacatattggaatagacgtagatatagaaagagatagat

SEQ ID NO: 8509 - DNA, 201 bp, Homo sapiens
agcaggcctataaaatcctagctaccacagtagtcccaaattccaatctctctcctgcattcaggaagatggctacagtccatctgggctccatcaccttrctcttcagtgcaagaagggcctccaggaagaaagccaaggtatctatggagttgatctcattgttccccctgtcactattcttttggtccactactgtct

SEQ ID NO: 8510 - DNA, 201 bp, Homo sapiens
gctattctgcttttgtttctctcatggtcagcttttgctgacattttcctgaaacacagttctcagaggtgcattttaaatgttctcaccaatgtcatcarttctataatttctgggcctgtttgtgttgagtgattttttctcccagttatgtatcacagtgaaagcttcttgtgtctctattaaatttttaaatagaag

SEQ ID NO: 8511 - DNA, 201 bp, Homo sapiens
actctgtatgactttaattcttttaaatctatggagacttgctggaaggtcatgtgtagagtacacctcagtgaatgctccatgcacactttaatgtgtaytcggtagttcggtataatgttaaataggtcgacgtttttattgagaacaaagatactatgtctaattttctgcatatttgttctagcctgttgtgtttgg

SEQ ID NO: 8512 - DNA, 201 bp, Homo sapiens
aggtttctcgaggatgacaggctccagagccacatttctctgaatctgcaatgctgaagattgcactgaatgctggctacttgaagaaatccccggaaaascttactggactgaaagagtcacacacctgacagcacgttacaataaaaattttggctgggacactgaggtagcccattttagaacaaggtgaattgtgaa

SEQ ID NO: 8513 - DNA, 201 bp, Homo sapiens
agacagattatcattcttattgtaacacatccaaactcgtctatactccataagaaaaccgagagaaaacatcaatgtgtacaagaaaggatcagaatacyctccttccaccttctgccaaatatgttactttggattaactgagagattttgaagtgagtcttgtagattgttttatgcacgtacaaatgtttctctgtc

SEQ ID NO: 8514 - DNA, 201 bp, Homo sapiens
ttttttttttttttgagattgagtcttgctctgtcacccaggctggagtgcagtggcatgttctcggctcacagcaaactctgaatcccaggctcaagtgyttctcctgcctcagcctcccaagtagttggaattacaggtacccaccaccatgaccggctaattttttaatttttcgtagagatggggttttgccatgtt

SEQ ID NO: 8515 - DNA, 201 bp, Homo sapiens
cacggaggcttcccccaacatggtagaactcaggcaacactcgagcatccgtttaccattgaaggcggctgcatcagtgggaatttccatggcttttcatyccagcatcgaagcgtgtagatgtctggccacagactccttaccttgttcggaaggagcctctaggcttggaaccggggtaacagtcggaggcgcgacggc

SEQ ID NO: 8516 - DNA, 201 bp, Homo sapiens
ttcctctctactggaaaagccaccacttcagtcactggtgaccagcacacaccaggaaggtgagtggcctgaggtagttatggcacttacggctcccttgytatggatctggaactcaagccccaagacgtctccttagatgatctgaatatgcattcagggacagatctggggagtttctgagcaacacttagactgggg

SEQ ID NO: 8517 - DNA, 201 bp, Homo sapiens
catgtaaaacttagtggaaaagaaatatcagattgcttctcatcggaaactccactaacatggaagctcatttctaggaatctctacagagtgttcatgaygacatggaacagcatagaagaaagggtgatgcatttggcaaagctgaaaagcaagtctccaagcattaaaatggttttttggggaggaggcaaggacata

SEQ ID NO: 8518 - DNA, 201 bp, Homo sapiens
tggagctgcctttattctaggaatatacaaagtctactcataaagtctgacttttctgaggtctctactgaatgcccaagattttcaatgaggtctcttcyctctagctggtcaaaactccaatattccagagcactatgtgagctctgtcacctttattaagctcactgttcccttgtagttgttgttcctcaatatatg

SEQ ID NO: 8519 - DNA, 201 bp, Homo sapiens
agcggtcctgcatctaggactcgtaggcaaagacaaattgtctctcagagagggctactggccaaaattttattcccttggagggatggctggtatctttsgcccaggattctgcattgcaacaaagtagatatccactactcttcttctcagagaccaacacagatatatgttccatgagaaggaggggcaagaacactg

SEQ ID NO: 8520 - DNA, 201 bp, Homo sapiens
tattgttctttctttgtgaaaactctccttgtgcatacgcagctttgtatttagccaaagccttgagaagacttcggtgtgtattcttggagctcctttcytccacaaatcccctctcattcttagccagcctagaatacgtcagatgcctgaggcatcacaaactccagtctctctcctcagttaagcaagactgctgtg

SEQ ID NO: 8521 - DNA, 201 bp, Homo sapiens
cttccaggagaaatttaagtgggtggctgtttctcttgggagaaaactcaaagacatacccatttgggtagtattctgtggttctctgatgccagtgtggkgtcatagaggaccaagactgacatgtccttcctgtaacagtggtggagaatgagcctcgataactctgtccatcaccatggtagcagtcctggactgtgg

SEQ ID NO: 8522 - DNA, 201 bp, Homo sapiens
ttaactatgatatatcccagtaaatcatagagttttgctctttaaaattctatacctgagtcatttagcttcttgactatgagtttcttgttttctgtatrtttggcgtgttgcgagccatcatcgcttcaagtataatgtctgtcatgatatctttttcttctccttctgtgacttgcctaacacatatattaaatgtgt

SEQ ID NO: 8523 - DNA, 201 bp, Homo sapiens
tcttatgagggttataactcttgatttttgatggctaagatgttgtgcactttttcaggtgattgttggctctgtgtgcatcttctcctaagaaatgactrttcaagcctgttgcccattttgattaggttgtttgtcctctgattagtgagtgggagaaatgtttctatactctggatacaggccatttgtcagatatat

SEQ ID NO: 8524 - DNA, 201 bp, Homo sapiens
gtaggatagatgcatatttatcgaactttataagaaagcatcagactgattttttaatttgttgtatgattttgaacttccaccagcatatgagagagtgrcacattctagctccaaatcggtgacaccacttattattgtgtcttcttaatgatatccatgtacactggatgttcagtgtcatcttatgagggttataac

SEQ ID NO: 8525 - DNA, 201 bp, Homo sapiens
ctcagacatacatagtgaaacaatataatttttagtgaaatattaaaaatatataaatttatgcaaaaatttaaatataagttttatacacaagtatatawatattcagacatatatataaatattcagatgtttgtgtgtgtgtgtgtgtgtgtatatatatatatatatatatatatatacacatcttaattttttttt

SEQ ID NO: 8526 - DNA, 201 bp, Homo sapiens
ttcagaccactggtgcttcaggcccagtgtgtttatacctgtatgtatgtgtgtgtgtgtgtgtgtgtatatatatatatatatatatatacatatatatrtatatatatatgtgtatatatatatatatatatatatactatatatatatatatatatatgtgtatatatatatatatatatgggtatatatatatatac

SEQ ID NO: 8527 - DNA, 201 bp, Homo sapiens
atgtcctttcagaccactggtgcttcaggcccagtgtgtttatacctgtatgtatgtgtgtgtgtgtgtgtgtgtatatatatatatatatatatatacayatatatatatatatatatgtgtatatatatatatatatatatatactatatatatatatatatatatgtgtatatatatatatatatatgggtatatata

SEQ ID NO: 8528 - DNA, 201 bp, Homo sapiens
agtcctggcaacacatgtcctttcagaccactggtgcttcaggcccagtgtgtttatacctgtatgtatgtgtgtgtgtgtgtgtgtgtatatatatatayatatatatatacatatatatatatatatatatgtgtatatatatatatatatatatatactatatatatatatatatatatgtgtatatatatatatata

SEQ ID NO: 8529 - DNA, 201 bp, Homo sapiens
gcagtcaagagacacatgaaaaagtgctcaccatcactggccatcagagaaatgcaaatcaaaaccacaatgagataccatctcataccagttagaatggkgatcattaaaaagtcaggaaacaacagatgctagagaggatgtggagaaataggaacatttttacactggtggtgggactgtaaactagttcaaccattg

SEQ ID NO: 8530 - DNA, 201 bp, Homo sapiens
ttgttactgtagccttgtagtatattttgaagtcagatagcatgatgcctccagctttgttctttttgcttaggttgtcttggatatacaggccctttttytattccatatgaaattgaaagtagttttttctaattatgtgaagaaatcaatggtagcttgatggggataacattgaatctataaatcactttgggcagt

SEQ ID NO: 8531 - DNA, 201 bp, Homo sapiens
catgccattctcctgcctcagcctcccaagtagctgggactacaggtgcccacgaccacacccagctaattttttgtatttttagtagagatgggctttcmctgtgttagccaagatggtctcgatctcctgacctcgtgatccatccacctcggcctcccaaagtgtcttctagggtttttatggttttaggtcttacat

SEQ ID NO: 8532 - DNA, 201 bp, Homo sapiens
tttgtttttttgatggagtctcactctgttgcccaggctggagtgcagtggcacaatcttggcttgctgcaagctcaacctcctcagctcatgccattctyctgcctcagcctcccaagtagctgggactacaggtgcccacgaccacacccagctaattttttgtatttttagtagagatgggctttcactgtgttagcc

SEQ ID NO: 8533 - DNA, 201 bp, Homo sapiens
gatgtactaagagcccaaactcgtgacaaatttctttcttccttggcttctctcttttgaatacatggaatattcttattatacaatatacctcagagttsaaaactttgtgattgctctaggatttgcaatatctccttgaacccacacagtaacattttattaatattacataccattgtgcatgaggtaagaaactta

SEQ ID NO: 8534 - DNA, 201 bp, Homo sapiens
tctgccaactgcattcctccagaataaatgacatagattttgaagagtgcattttagatttttttttttttttgtgacggagtctcgctctgtcgcccagrctggagtgcagtggcgcaatctcggctcactgcaaggtctgcctcctgggttcaagccattctcctgcctcagtctcctgagtagctgggactacaggcg

SEQ ID NO: 8535 - DNA, 201 bp, Homo sapiens
gctgtgcaggctatagggtatttggtcatcagtcagggacagacataaaaaccttgcatgtttccctagaacatatatatatatatatatgtgtgtgtgtrtatatatatgtatatatatatgaatactagtctgtatgaacatatatatatgaacatatatatgaatactaacttatatgaacatatatatgtatatata

SEQ ID NO: 8536 - DNA, 201 bp, Homo sapiens
ttgtcagacctggttttttgtccatgtacctgcccattttaatctccatatctgtttacttcctaattctcatctacattcttgcttttgctcttcctctmctggcaacccatatcccttcagaaaactggagcttagaacccagtgtgttcacacaggtttatatatattaattatattatattatattatattatatta

SEQ ID NO: 8537 - DNA, 201 bp, Homo sapiens
ttttgctattttcactgatatccttaaggttctatttatttttttcagcctttctctctctctctttctctctctctctctctctgtgtgtgtgtgtgtgygcgcgcgcgcgcgtgtgcgtgtgtgtgtgtcttacagattgtatggctttcattgagttatcttctggttcactttttcttctgtaatgtataaactaat

SEQ ID NO: 8538 - DNA, 201 bp, Homo sapiens
tcttttgctattttcactgatatccttaaggttctatttatttttttcagcctttctctctctctctttctctctctctctctctctgtgtgtgtgtgtgygtgcgcgcgcgcgcgtgtgcgtgtgtgtgtgtcttacagattgtatggctttcattgagttatcttctggttcactttttcttctgtaatgtataaacta

SEQ ID NO: 8539 - DNA, 201 bp, Homo sapiens
tagggtactggggactggtgcactggagagggcatagaggctctgagccccttcccacgtgccttgccctgtgcatctcttccacctggctgttcaccagkatcctttttaatatcttttataataaatgggtaaataaaagtaacgtgtttccctgagttctgtgagccactctagcaaagtaatcaaacccatggaggg

SEQ ID NO: 8540 - DNA, 201 bp, Homo sapiens
gaagcctccataaaaacccaacaagactgcacttggagagcttctgggttgctgaacacttagggtactggggactggtgcactggagagggcatagaggmtctgagccccttcccacgtgccttgccctgtgcatctcttccacctggctgttcaccaggatcctttttaatatcttttataataaatgggtaaataaaa

SEQ ID NO: 8541 - DNA, 201 bp, Homo sapiens
tgcttctggacactagaaggcccagcctgtgatgcagatgtcctcactctacaggttccctcatggagcactaaatgccctagactctaggggtgtggggwtgtgcggtgggaactctaaactcaaaacgtatcagcctatcagagaatgcctccaaaaccccacatttcctaagtgacttgttcaagccatcagaacacc

SEQ ID NO: 8542 - DNA, 201 bp, Homo sapiens
gacacactttctgcttctggacactagaaggcccagcctgtgatgcagatgtcctcactctacaggttccctcatggagcactaaatgccctagactctargggtgtggggatgtgcggtgggaactctaaactcaaaacgtatcagcctatcagagaatgcctccaaaaccccacatttcctaagtgacttgttcaagcc

SEQ ID NO: 8543 - DNA, 201 bp, Homo sapiens
tgaagcagacacactttctgcttctggacactagaaggcccagcctgtgatgcagatgtcctcactctacaggttccctcatggagcactaaatgccctasactctaggggtgtggggatgtgcggtgggaactctaaactcaaaacgtatcagcctatcagagaatgcctccaaaaccccacatttcctaagtgacttgt

SEQ ID NO: 8544 - DNA, 201 bp, Homo sapiens
aagaatttcccttgttttgcttaatccaatttgagttggattttctgtcacttgcaagaaagaatcatgttagatataattctattctttattagtagtasgagctgccatgatggagtgcttaggatgtgctcagcacttgatgcactttcttattatttcccccataacagccctgcagcccacatcagctgaggaaac

SEQ ID NO: 8545 - DNA, 201 bp, Homo sapiens
tgagcttcttgactatgtgagtttatcattttttccatatttagaaagtcatcagccatcactgcttcaagtattttttctgttccaatatctctttcccytcctctgtgacttgctttaaacaaatattaaatattttgatattttcatagatgtccttgaggctctgtttatcttctcaggctttgtataagcgtgcta

SEQ ID NO: 8546 - DNA, 201 bp, Homo sapiens
taaagggtttttttgtttatttgtttgttttggctggacatgtcgtcctaggttgatctgtttttatttctctttatcactttaaagatgttatgccattrtttccaaggagaaggcatcggtcactttcattactgtccctctatgtaaatgatattgttttcctctggcttataagattatccttgttatctttgatgt

SEQ ID NO: 8547 - DNA, 201 bp, Homo sapiens
tatctggcatctttctttaatgtaatatttttgagcatcttccatactatttgagagtatcaaaaacatgctcccttttattgctgaacagtatgccattrtatgactagttcacaaattatttattcattttcttattgattgacattgaaattgtctacagtttggggttataaaaaataaagctgctatgaatattct

SEQ ID NO: 8548 - DNA, 201 bp, Homo sapiens
tcttgaaccctggagttggaggctgcaatcagccgagattgggccattacactcctgcctggcgacagagcgagactctgtcaagaaaaaaaaaaaaaaaagcacagccggtgaggaccccggtggtgggggatcttggagaatgtgctccccttcgttcctcccaggaatgttgctccaacctctcagaatcctcacatt

SEQ ID NO: 8549 - DNA, 201 bp, Homo sapiens
aacagtgggacccaaggcataaagtgagagggctggctagactatgggatctgaaaaggtccaccagctatggagggttcagaaaaacaattgagtaagtragaggcacaggctgggtgctttggctcacgcctgtaatcccagcactttgggaagccaaggcgggtggatcacgaggtcaacagagcgagaccatcttgg

SEQ ID NO: 8550 - DNA, 201 bp, Homo sapiens
ttttgccccttatgggtattagtggggtcttgccttcacctccaacatggaacaattggtgcaggtcagagccagtcagtgatgggttcaggggcaggackgtgacccaagtttgacttctcagagtgggcagactattgttcacataattgggagagtggcctttcttattctttcccggtacagccacagcaccacagc

SEQ ID NO: 8551 - DNA, 201 bp, Homo sapiens
atttatgtgtgtgtggtgggaggggcgggtgttttcctaacaaatggggccaatagtagggcaggttcaaggtggccatgatgaaaagcaggctctggtgsagagggcagccatctcctccccagaagcactcagctcaaaagccattttctgttttttttgcttttttttttccaaatccatattaaggaagcagtttcc

SEQ ID NO: 8552 - DNA, 201 bp, Homo sapiens
gagggtctgtgccccttttaaagacaccatccctcacaaggcactcaacatcccagctctggtccccccagagaaggcactgaagcttccttcccattggytgtccatgacttcaccttcgacttcctgtgcagcatggaagttttctgcatcacaaagattttgcaaatctttttatcccaatgtccgagggtatggttg

SEQ ID NO: 8553 - DNA, 201 bp, Homo sapiens
aaaaagtgataatatattaagtatgagaaatgtgcagagaggattagagattgagagccatttgtcattgtggcaattgtatggtatctcttttgggaatrtttcaaaggcaccagtaatgaccttgttgtagcaaaatatacagtgttcctgcatatgtacccattttttgtgatgtgtattcttttggaatttccagtg

SEQ ID NO: 8554 - DNA, 201 bp, Homo sapiens
acatactccaccactgtcacaggaagaacttgccaagcttggtcatctatgacaccacaccagcatagtcggaccccagaaaactacccaaatgcgtacgyctttgttctttaccataagcgaaggaagggccaatggaagtttctgttagaagagtcatgcttcaaggtgactgctcaggactcaacttggctcagatgc

SEQ ID NO: 8555 - DNA, 201 bp, Homo sapiens
ccttgcgacgtccacggctgtttctgaacaaggtaagaagtctctggccagacaaccacacccttggacgttgggataaaaagagttgcaaaatcttagtratacagaagccttccatgctgcacgggaatctgaatgtggactcagggtcagccaatgggaaggaagcctcagcgccttctctgggggaaccagggctga

SEQ ID NO: 8556 - DNA, 201 bp, Homo sapiens
tgctaccgaggtgatggacagagttatcgaggcacactctccaccactatcacaggaagaacatgtcagtcttggtcgtctatgacaccacattggcatcrgaggatcccattatactatccaaatgcgtatgtctatcatgttagccataaaaggaacaatagtcaactaaaatttctcttagctggcccatgctacaag

SEQ ID NO: 8557 - DNA, 201 bp, Homo sapiens
cagttgccaggtaagaaaagatcaatagatcaaagtcttgtgctctcccgtctcagtctcagtcccttagacgtcagtcccaaagtggcaaattcaggaargttttgtcagtggaagaccccagtctaagtgttgctcagaaactccccagatctgtccctgaatgcatattcagatcatctaaggagacgtcttggggct

SEQ ID NO: 8558 - DNA, 201 bp, Homo sapiens
aggggaaaattcatgtgagctttaagctgccaaccttttaatatgggatgccatccttctcttatccatatgtacattttcccagtaattcaaatcagaarggaacttatgagcatattactcaagcatctgcagtgcttaagtacttagcaaagtctattcaacaaaaccacatcacttagttttttcctgggaaaaaaa

SEQ ID NO: 8559 - DNA, 201 bp, Homo sapiens
gctacttgggaagctgaagtaggaaaatcgcttgaacccagaaggtggaggttgcaatgagccgagatcgcaccactgcactccagcatgggcaagagaaygagattctatctcaaaaaaaaaaaaaaaaaaaaaaaaagtatcttcttcaggaaacatatcttttcctgaaccgggcacttgtttaagcaaagccttttc

SEQ ID NO: 8560 - DNA, 201 bp, Homo sapiens
ctactgtctgtttacagaaaaattcaaattctttgtacagcattcaagacttcatcatttggtgatggcctaactctccaacctcaaattctacagttttyttccttaatattacatatcctgttctacgcccatctccttgcctttacacacgcctacattgccctctctcctgtaccattgggagggagtcacctttca

SEQ ID NO: 8561 - DNA, 201 bp, Homo sapiens
gaaggccggggtggggtggagggctcaagtttctaacagaggaatggcatgattagtttcatgctttggaaagaaactagggctgcagtgagaatagaccrgggaatgcaagactaaaggcagggaccccaagcaagagactgtcagggtaatgcaggaaaaagataatggtggccagactagggcaatgacaccagggat

SEQ ID NO: 8562 - DNA, 201 bp, Homo sapiens
atttctgaaagcatgcaatcacattacatcactgccagtaaagcacagatggtgatttcagttggcctttgcaattgggtctggttcggctggttcaagtyacacctattgaggcacatcacagatgatgctgcagggctgggaatagggaggtgtttgttcaactaaaagaattttacttggatggagagaaaaaggtag

SEQ ID NO: 8563 - DNA, 201 bp, Homo sapiens
ggcctcaggaaactttcaattatggcagaagggcaagatgaagtaggcacatcttttatggccagagaaggaggaaaagagaaagagggagagggactgtcacacacttttaaacaaccagatctcatgagaaatctatcacaagaacagccttaggaggatggtgctaaaccattagaaaccacacccatgatccaatca

SEQ ID NO: 8564 - DNA, 201 bp, Homo sapiens
gaggcctcaggaaactttcaattatggcagaagggcaagatgaagtaggcacatcttttatggccagagaaggaggaaaagagaaagagggagagggactgtcacacacttttaaacaaccagatctcatgagaaatctatcacaagaacagccttaggaggatggtgctaaaccattagaaaccacacccatgatccaat

SEQ ID NO: 8565 - DNA, 201 bp, Homo sapiens
tccccatccctcacccacccaaaccagttgacagggacatgaaaaccaaaaggttatctcaggaacagtcacagagactggggccaacactgttgatccckgcactttgccagaactagcccaatggctcacatctgtcgtcagatgtgcttctgagaaacagcaactagtggcgagactgaaattgatagcagaaggtgc

SEQ ID NO: 8566 - DNA, 201 bp, Homo sapiens
aatgctcatgcttgacctattactattgtttagaaaatatctatactcctccccatgcatcctcccctgtagcatccttcactggaatgggcactgctgctatgtatttactaagatgctggagctagacaatcatgaagtcagctggaagaaaaaggaacctaaggtcaaatgcagacatctctgggcaaatccctttca

SEQ ID NO: 8567 - DNA, 201 bp, Homo sapiens
aaaggcgaatttaataccagcaaaggatggtttgataatttgagaaagaggttttacttaaaaatgtcaagataataggagaagcagcttctgctgaccargaaacagcaaaccagttcccagatgccattaagaaaatcattgagaagaaaggataactgcctgaacagatttttaatgcagacaaaagtgccctactct

SEQ ID NO: 8568 - DNA, 201 bp, Homo sapiens
agaaaggaaaggcttacctatagactctaatgcgatttgaggaaaagtcaagtctccattatgtgatagattaaaggcgaatttaataccagcaaaggatrgtttgataatttgagaaagaggttttacttaaaaatgtcaagataataggagaagcagcttctgctgaccaagaaacagcaaaccagttcccagatgcca

SEQ ID NO: 8569 - DNA, 201 bp, Homo sapiens
cttttcttgtttgcattaagtaattggatagcttgcctaagcttaatgaaacaaataccagtcagtgctgcccttagacctcaagccctagcaacttagcyctttcctcagtatattgtcaatcaggcgagggacttaaggtacaccagcaaaatgaattcctaaaagccagccaaatctcctataataaatattattaca

SEQ ID NO: 8570 - DNA, 201 bp, Homo sapiens
attttgtgttactatttttaaattgctacatcatcctgatactctggaattctcagaaatcaactacaacagaaaaaaaaaagtcaccttgtgagatataktccaaagttatcatccttttcccctaaaaatcaaagctgtgtagttttgtgtcttaaataaaaaaaaagaggactagaaacaagttaaaatctgtatttc

SEQ ID NO: 8571 - DNA, 201 bp, Homo sapiens
ttagcccagggaagtcatagggtcccaaactatcacactgtgtggcagggcacatcaccaacaacgtcaaggtagaaaggaggctttttccctcagagggkgtgtgtgtgtgtgtgtgtgtgtgtgtgtgtgtgtgtgtgtgtgtgtgtgtgcggggtgggctggaagacattcctcaatcaactattgttcttccctacc

SEQ ID NO: 8572 - DNA, 201 bp, Homo sapiens
ctttggtaggtctgacaaggggtacaagatgataaagatgagactattctgcatcttctcaatttctatttataacacatttcttatactatctcccgcacaatatggaaaagatacaagtggagaaataatatttttgtacttcagtttccttcagttgccataatgaacatgcctggaataaaagagctttataaaaaa

SEQ ID NO: 8573 - DNA, 201 bp, Homo sapiens
gagtgacgtctgatgccatatttctcagctatcaaaaatacttgaacaaaggacaggcatggtggctcatgcctgtaatgccagcattttgggaggctgargtggggggatcatttgaggtcaggagttcaagaccagcccgggcaacatgagacctcatctctacaaaagatttaaaaaaaaatcagctgggcatggtgg

SEQ ID NO: 8574 - DNA, 201 bp, Homo sapiens
cttgggtggtcgatgggactgggcgctgtggagcagggggtggcgctcgtcgaggaggctcgggccgcacaggagcccacggagcgggtgggaggctcacrcatggcgggctgcaggtcccgagccttgccccacgggaaggcagctaaggcccggcgagaaatcgagcgcagcgccggtgggctggcactgctgggggac

SEQ ID NO: 8575 - DNA, 201 bp, Homo sapiens
aatgtgtgtataaatcattattatcattaatcttcttatgtggccaatttcacttccaggcattcaatcctagcaaatattaaaatataagagtatttacrtctaagaaaatgcaaccagcattatttaaagcaacaactaagagtgaacaatagatgtttgggtaaataagatataatctgacaataggatattgattat

SEQ ID NO: 8576 - DNA, 201 bp, Homo sapiens
acctgtgatagcttccaatgcttcctctgaagcttccttgcctctttcagccttcgtagaacttaagaaaattagggtcttactctagattaggctgtggyttaagggaatgttgtggctggtctgatattccaccaaaccacgaatctttctccacagcagtaataaagctgtttcactttcttatcattgatgtgttca

SEQ ID NO: 8577 - DNA, 201 bp, Homo sapiens
ttgacatataaaaggtgacacaaatgagtaagacagatttactcattaagaactacggtgtaatcccagcactctgggagggccaaggtgggcagatcacytgaggtcaggagttcgagaccatcctggccaacatggtgaaaccccgtctctactaaaaaatacaaaaattacccgggcatggtggcacacacctgtaat

SEQ ID NO: 8578 - DNA, 201 bp, Homo sapiens
agacatcttataggacccgatcagcacagacttgttccagtaaattgcccctttcttgaaaagagtttcttggcttccataatactacactctcctgtttytcctcccggctctctggctcattgtcttctaactgatccctcaatgttggagttccttggagtgatggtcctggaggtctctttgctcttctctctcccc

SEQ ID NO: 8579 - DNA, 201 bp, Homo sapiens
caaaacccctagagaacacagggggaatatttctcatcaataaggaaacgcctgggtgatgatttgtctcattatttttatccagtacactaagctaatayatattttactagaatagaaatgcaaagcatgttggtggttccctgacttcctactatcctctaaagaacacagacatacagagaaaaaaaaatgtttcaa

SEQ ID NO: 8580 - DNA, 201 bp, Homo sapiens
caggccctataggatagaattaaactcattgacttcaacctacccacccatgagaccctacaagaaacctttatctgaattaatctggtctgtgtgctaaytctaccaggattaccttctactctaacccccctcccatccctcttagcctcaagtttggctcaagttcacttcccctgatgccaggcctgcctgccaaag

SEQ ID NO: 8581 - DNA, 201 bp, Homo sapiens
accttctagaaaaaaggttatcatgattttccagacccagtgattcattcaactgaacaaatacttgtgagactttactatgtgaaaagcaccatgctagktgcatgatttctcttttttttttttttttttttttttttgagacggagtttcgctcttattgcccaggctggagtgcagtggcgcgatcttggctcacca

SEQ ID NO: 8582 - DNA, 201 bp, Homo sapiens
taccaactcagtgggaagtaaaaaggaatataaacacaacaaaccaaaatgttaacagtaactatctctgaattgtagtacattgagtgattttagtatcyctttgtatttattttctaatcttgatccaatgaatatgtatgtcttccataataataaataacaacaataaagggagaaatctggtaaataaattgggaa

SEQ ID NO: 8583 - DNA, 201 bp, Homo sapiens
aatgtacatttcagaaatatattaatctgggcaagttttcaggatacaagcaaactttaaatctgtaatcgcagtcctattcattctttgggatcttaacrtgcagcctaggcaggcaaactgaaacaaaacacgtttctcctttttcactgcagtagcaaacatacctaaagctgccctgctactccacagaaaacttgg

SEQ ID NO: 8584 - DNA, 201 bp, Homo sapiens
atcaaagcaataaaagcacggatacagaaaaggaatacagagctgtgatattcaacactgtgaaaaatttaacatccaatacacgaaaatgaagcaggcgycattgcacatggtatatcacatagtttatcacatggtaaataatattgctgttcaatgtaatactgaattcactaaacctgaggtccatgcacaataggt

SEQ ID NO: 8585 - DNA, 201 bp, Homo sapiens
attttttgttgttgtattgttgtttttttttccaaatatttttaatccatggatgggtgaatttaaaaatgcaaaacccatggatacagaggggtaactgyataggtattttcgttttaacaaaacatcagaatccatcctgtttaccaagaatctctactgagatgtctttttataagcagctctctattatggaataca

SEQ ID NO: 8586 - DNA, 201 bp, Homo sapiens
cgagaccagtaagtgaaaaacaattaaaaagatatgtatgtacttcacaataaagttgcaataacatatctaagtaacaaattatttcccaattgtctcayatgagtatcagcccttttcctccagtatggttctgctgagttctctgcagattatctacattttcaactgttttctttaaaggtcagtgagaactaaaag

SEQ ID NO: 8587 - DNA, 201 bp, Homo sapiens
cagctctaaagaaaagggcagcactcatctgctttatgaagagttgaaaagattcatgtaattttcctggggtcccaagctttctttcttttttttttttkggcattacccataatgtatttgtccatgggataaactgagatgccttcccccaacaattacatttgcttaaaggaaaacacagctgccttccttgaatat

SEQ ID NO: 8588 - DNA, 201 bp, Homo sapiens
ggctgaggcagaatggagtgaacccaggaggtggagcttgcagtgagcggagactgcaccactgcattccagcctgggcgatacagtgagactccatctcaaaaaaaaaaaaaaattgtaatttcctagtgtctctacctttaccctatgcaacacaaacgattatacacacacacacacacacacacacataatctagca

SEQ ID NO: 8589 - DNA, 201 bp, Homo sapiens
aaggttatcatgattttccagacccagtgattcattcaactgaacaaatacttgtgagactttactatgtgaaaagcaccatgctaggtgcatgatttctcttttttttttttttttttttttttttgagacggagtttcgctcttattgcccaggctggagtgcagtggcgcgatcttggctcaccacaacctccacctc

SEQ ID NO: 8590 - DNA, 201 bp, Homo sapiens
ttaattacttacacctagaaattacatgcaggttgaaggtatgtaattttcataactgtgtaatttgtgtctatgacaggaaaacaagtgttcaacactawactaaattaaaagaaagatttttaagacaagtatctatagtctctggtcagtagccaatttcaaagagataatttaagtttttattttaatataatgtag

SEQ ID NO: 8591 - DNA, 201 bp, Homo sapiens
aggcccttcatctaacaactatttcctgcctcagaataccttcttttaattccatttagagctggctttgaagggctcccagctgatcttgtctgttttgygtcatctgaaaaagaaaatggcaaaaagcaaggctgacacaaaaagaccgcccagagtatgaagttttaaacaagggtcaccttcagattcagatggaaa

SEQ ID NO: 8592 - DNA, 201 bp, Homo sapiens
ctttgtacagcattcaagacttcatcatttggtgatggcctaactctccaacctcaaattctacagttttcttccttaatattacatatcctgttctacgyccatctccttgcctttacacacgcctacattgccctctctcctgtaccattgggagggagtcacctttcaagacgcagtctaaacatccaagccttcact

SEQ ID NO: 8593 - DNA, 201 bp, Homo sapiens
cccatcgtggctgaatattttgacagataaattcaatattctagttccaacggcaaattgtcccagcagctaagtttttaattgatttcaaaacatctaartttgtagactaaatgtgatgactgactatcatacaaaaggcaaataaatactaacaacagacactacaagccaaaaacccagcatatcaagcaacacaaa

SEQ ID NO: 8594 - DNA, 201 bp, Homo sapiens
ttttaacctggccctctgcctacctacggcttatgggcccaaaggtgccagctcttaatctgtatcctcttcgctagctctaaatattggcctaaaagtakgaggaatgaccttgggaacattattattagaagacaaaagttcagggcaagtggaaaaaagtataattgtagtagaatccttttttctgcaagtaaatga

SEQ ID NO: 8595 - DNA, 201 bp, Homo sapiens
cacattagtggtttcagttgactttgtggggtactttttttggtatcatttggttttaatccaacaaccccatcaggaagtcaaaatgccctgtaatttayggatttttatgagatttttgttttaatctaaatcaaccttgacaaaatggcaccaagaaacaaggaatttaaaagatccattctgagaagttgtgaagaa

SEQ ID NO: 8596 - DNA, 201 bp, Homo sapiens
tcaactgtcacagtttgaagcacaaacaaaatacagaactgaaaggcatacagcacaaaattaatcaattcttcttcttgattgcttcactggtgcatttsagacaaaaggcaaactggggatgaaaagtgacattttggagaaacagtcgcttaaattttcaaaaactaaatttatgcattcacccatcctttttttttt

SEQ ID NO: 8597 - DNA, 201 bp, Homo sapiens
acatgacttcacagcttctctcatgatgagagtatggagtttacttccccatcccttcagtctgggctgtgtttgtgtcttgctctgggcaccagaatacracaacagtgatggtgtaccagtttcaaacctgggcctctctcttgcaaccctgcacagggccatgtcaatcaccccaggctagcctgcaagcgggagaga

SEQ ID NO: 8598 - DNA, 201 bp, Homo sapiens
agatagagtgaagaaaagctccactctcaagtgtcccagagttttgacaacaggaagagagcagcgggttctactagaaaaggaagccaggggtaacttgktttccaagttagggacctacctctagacaccctaaccaaacctcacctaaaactcctagcctaaaattccaggggacaaaggtactaatgtcagattaac

SEQ ID NO: 8599 - DNA, 201 bp, Homo sapiens
ggtagcagtgagcaaatatggtgccactgcactccagcctgtgtgacagactctatcgccaaaacaaaaaacaaacaaaaaaaggggctcaggatgcagcrtctcacacctgtcatcccagcactttgggaggcctagaaaggaggctcgattgagcccacgagttcaaaatcagcctagacatcatagtgagacctcatc

SEQ ID NO: 8600 - DNA, 201 bp, Homo sapiens
ttaacaaaagcaggaaagggaccatggaggtggtgaatacagatccatccgtggccgactgccatggttactattttgagatcgtcattacagcagttacyattgttactgcttgagaccatcattacaagactgaaggaagggaggaacctagaaatgaaaacttaagacaaaagaaactgttttaaaggaaggggaacc

SEQ ID NO: 8601 - DNA, 201 bp, Homo sapiens
tcccgcgaccttggataaagtacatacccttactgtgtctcactgtacttgtctaaaacatgaggataacactcctagaaagctggaaaggtttaattaartaactcagcattgcagtgctagcaaacacattgacatacatacaagaaaacttgcaataaatgttactcttcattttgaatagcttggtaggattgttag

SEQ ID NO: 8602 - DNA, 201 bp, Homo sapiens
tttggcaaaagtcttaaactgttagaaacaagggtattaaattacattaaaatgttgttaaagtcataccttttaaaaccttaaagccttaaaaggtattrctttttaaagctttataaaagtccaaaaaattatttgaaagtattctaaattacagatgagactaagaaattagagaatagttattcttgaattcagcaa

SEQ ID NO: 8603 - DNA, 201 bp, Homo sapiens
caaacccttctctctccttaaaacgtccacagataaagaaagttactaatacaataatagaaatacattaaagtcaatattccaggttacttaaaatatgyatcatgcacatacagaattttattgcttttactaattttagagtaaatgaatgatgagaaagtataaggcagaaagacttataccaataccctgttatgc

SEQ ID NO: 8604 - DNA, 201 bp, Homo sapiens
ggttaacacagccgtctgtgaaggttttctgagctggccaacatatgctgagacctttagttttataacgaaaagggctttggtgattttgctctttggtkagtccttttaatagactcttgcataagttgcacaaaatgatgagatgtgccagaattaagtctgacccagtacatttttctttagaaatgaaaatttcat

SEQ ID NO: 8605 - DNA, 201 bp, Homo sapiens
gcttcttttctctgcatcccctcagaggaataagacccagttcacagatcctttacaatttccttactttcagcacctttcctatcaatttagcctatacrctatagccgtactaattaactgtatctaatcatgccctgtaataaagctggttcaacttctctttaaacaagattcactattaaataaaacaatgggcgc

SEQ ID NO: 8606 - DNA, 201 bp, Homo sapiens
ctcagttgagaatctgttacttgactctagtggttctaaacaaaaaatgtcaggcccacctccaccaaaaatctttttaaagagggggagggccggactckgtggcttatgcctgtaatctcagcacttagggaggccgaggcaggtagatcacttgaggtcagctcgacatcagccgggcagacatggtgaaatcccatc

SEQ ID NO: 8607 - DNA, 201 bp, Homo sapiens
ttaaagagggggagggccggactcggtggcttatgcctgtaatctcagcacttagggaggccgaggcaggtagatcacttgaggtcagctcgacatcagcygggcagacatggtgaaatcccatctctacaaattagccagtcatggtggtgcacgcttgtaatcccagctactcgggaggctgaggcagcagaatcctga

SEQ ID NO: 8608 - DNA, 201 bp, Homo sapiens
aggccattggtgaggaggaagacagaggcctgggtgcaccagctaagaatcccaggtcaagttactcaatgtctttcagactcaacaaatcaactggttgsctggcaaagaaataccttcccctaatggtttgttctagggatagaatacagtattatgttaactaatttcaagcactgcctagcttataataatccctca

SEQ ID NO: 8609 - DNA, 201 bp, Homo sapiens
tccagttctaaacgttttacgaagacaaattaaattgcagagcatgtgattactgaccatcatcaaacttattctccagatacaaaggcgcactttctacsctatgtaagtaaaccttactgcttcctcacaaaagaatagcaagtcctatagattctttctagagggtcacagaaaccttgaggctctgatggaacagaa

SEQ ID NO: 8610 - DNA, 201 bp, Homo sapiens
cacagaaaccttgaggctctgatggaacagaagatgttgatatctctttcacttgctccttcagcaccatatcttggcaacacttgcgggaagatttgtaragatccacaggagtaatttatccaatttaattaccttcctacttcatttcataaaagggaagaatattctggttcagactttccattggtggcatgctac

SEQ ID NO: 8611 - DNA, 201 bp, Homo sapiens
aactttgaaattggatgtgaagaaaattcaaaggatttagccaatttcaatctcatacgcaggaaacataatgatttcctggctgtaatattcttatcaayagcaagaaaggagctcaaagaaagtaaagtgagtaaataattgtttttcaaataaaacagcctgctgagccttcctaaaatgtaaagaatctttaaaagt

SEQ ID NO: 8612 - DNA, 201 bp, Homo sapiens
ttacaatacgaattaatggattcagcatttttacactgtctaatacaaaagtgtgtgcagaattcctaatagaaatagttagacattgtaattctcactgycatcacaatacagaagaaaatctctttacaatcttttgcattacgcctagaaaatacttcatcattagagacctaaatgtctctcacatattcctggaag

SEQ ID NO: 8613 - DNA, 201 bp, Homo sapiens
acaaaattcaacttgagtactttgagaatgacagtaacaaacaaaaacaggactgtacagaaatgtgcaaaagacacaaggaagttgaataatattaattmtatgattatcgttatcttatacacaatggaaagtaagcaaatattctttcatggcaacagctgatatttgttaagctctttccagctttcaaggggcttt

SEQ ID NO: 8614 - DNA, 201 bp, Homo sapiens
ccccaatcaccatgaagatgagcaaggaacagagtatatccccattttgcagataaagaaccagacaccacaagggattaggtgaattgccgaacagccasatgacaaaagcataccttctgactccttgtctaacattctttcttttacttaatgtggagttatcgagtattaagtaacagcagtgtatatattccacct

SEQ ID NO: 8615 - DNA, 201 bp, Homo sapiens
ctccacattacacagcagggaaatgccaggtcagaaatttgaatccaaggcatctgacatcagagccttgtgctctaaatcagagttctgcccactacaaygagggagccaaatcaggcccagtacctgtttttggttttacatttttaagtggttggaaaaaaatttaagcaaaattttgtgatgtgtgaaaactatatg

SEQ ID NO: 8616 - DNA, 201 bp, Homo sapiens
aatctagataaccaatctactttattgaaaagggcactgataaggtgctcaaactctcattcttaaactcactgccttcttttgtccatctctgtccaatwctagacccatgctgacttgacgccgtatctcttttccttctcctaactcatgtttaacttctgctattcagctcctatctacctctcctgaaggagacat

SEQ ID NO: 8617 - DNA, 201 bp, Homo sapiens
aaggactattcataggttatcttactgttcccagcaaccaccagaatgcaaatgggtcaaggcagacacaagacgctgacaatggacctataaaaaggccyaagggattcaaattacttttcttccttccataaaagtcctgtgagaaagcagaagtttgttgtagaagtgcagaagtagtgatttgggaaaatacaagta

SEQ ID NO: 8618 - DNA, 201 bp, Homo sapiens
tgcaagtctctgcatattaggctcatcctaaaagtaaacagtaaataaacccaatatttatttgaaggaggtatcaacaatcccaattgataggtaaatayactgaaataaagaagagcttgagacctttattaaatacaaaacagaaatatatgacacacacaacaacaacaacaacaacaacaacaacaaaacacaaaa

SEQ ID NO: 8619 - DNA, 201 bp, Homo sapiens
acttgtttcaggtagcctatctgggttgtgggtggatgtcaaaggtacagaagaagttgccttgccttcagcctaaacttaatgggtattgcagaagtgartaaagctggggcacctgatgatttccaccctggcagattaaaggtttagctgaatagcatttcactgggagggacttactggacctaactctccttctct

SEQ ID NO: 8620 - DNA, 201 bp, Homo sapiens
ctctaaaaagctagttatctaaaaggcgtgagtgatcgaaggaaaaaacataatacatttgtcactcccattagcaatattagtgctaatgagaaagtacrtggacaagaacatacacctcctaatttgaatgtgttacaaataaagactagattagtcacagctactcagatgaaattttagcacttaaggttgaaatac

SEQ ID NO: 8621 - DNA, 201 bp, Homo sapiens
ttttgacagaagcatcaattttctaaattgttctctaacaactacaagttaagaaagaagaaaattactcagtgttaataattgcaattctctgaagattytaacagaacccactgtaattttacattattgaatcctgcggctttatacattggaagaattttctgtttctcctgtgtttttatattaaaagaagatatc

SEQ ID NO: 8622 - DNA, 201 bp, Homo sapiens
aagagctcctctatggtgttgctcagtttgctcaagatctgagttaaaactggaatttcatgtcatttggagctccactcagtagggaatggcaaacattmaacttttattgttacaggtcattaagaattaactccaaaaatttatatccaaaaatgatgagtctcctagtctaattttataaaaatatattccattttt

SEQ ID NO: 8623 - DNA, 201 bp, Homo sapiens
aaaataccacctcttcacaaaggagttaggagtgcagtatgaaaattataatattggtaaggctacaaagatcattgtagagtagcacagaatggctagtytagacacaaaaagtagacacaagttagaagctctggcccttccaatggtcagctgtataaacctgaccacatcagctttcctccaggaggttctcagttg

SEQ ID NO: 8624 - DNA, 201 bp, Homo sapiens
tgaaaattataatattggtaaggctacaaagatcattgtagagtagcacagaatggctagtctagacacaaaaagtagacacaagttagaagctctggccyttccaatggtcagctgtataaacctgaccacatcagctttcctccaggaggttctcagttgtgtttaggaatatgggatactttgtgttctgccctcttc

SEQ ID NO: 8625 - DNA, 201 bp, Homo sapiens
tgctatgtggtttcttgattttatcaaaattacatccaagggaatgaaaaccatttgtctacatttaaaattcctcatctctacaactcaatatttttccytgatgcattctaaatgccctagtagaaattattttgaaaagaaaccattaaaggtatgctaatgactctgaattgtgacagatgctagggaaacaggcct

SEQ ID NO: 8626 - DNA, 201 bp, Homo sapiens
atacatacacaaacacacatcagtacagacataaagaagagcgagaagaaaaagtccactcttgctaaaacaatgggcattggttatgacaggcaagtcawgttataaattgtaaaagctttattataattccacataagtacaatataatgtcattataatcacagaatgaggtctatcaatgatcatcattctctgtat

SEQ ID NO: 8627 - DNA, 201 bp, Homo sapiens
cgcagcagcaacctttgttgcaatcagaattgacggaggctttttcacttcaactaaaagatttctgtcagggtgaacatattttaatccaccgcatgcayttgtaccatgtcatttacaaggacaaaacctgactacaccaagagcctgcttttgttgtgtcactctacgggaccagtgtacatgttcctaaggctcaca

SEQ ID NO: 8628 - DNA, 201 bp, Homo sapiens
ggtatgcagcatgatgactttatatatacatatacaatataaaatgactaccacaatcaagttaattaacacatctatcatctcacacctgtgcgtgtgcwcgcacacaatgcatgcgtgcggttaagaacatttaagatccattcccttggcaaatttcaagtatacaatagagtattattaaaaatactgtagaactat

SEQ ID NO: 8629 - DNA, 201 bp, Homo sapiens
cagtatcttttgcaatacagggattcacataagagaatgtttttaaatactgaaatttacagtttgacatgccagaactttttaaatgcaaaatggtttckatggaaatggtagtgctaatatttctcacccacgctggtaaacaaattattctcaatccctgatagcattatgattgtgcatacattatttcactaagca

SEQ ID NO: 8630 - DNA, 201 bp, Homo sapiens
cagttagtaaagaaaagagtgagcaagaaaatgtccaatgtctttatgggtaagggaatagttacaagatacatgaagatagctgccacctgcccccatcsccaaatcaggacacaggtcagaacatcaagaaacacagaaaaagcataactcagtgccatttaggaatcatatcaaagcaataaaagcacggatacagaa

SEQ ID NO: 8631 - DNA, 201 bp, Homo sapiens
tcgtgaatcccctgcacacacacacccacttaaagaacagactatgttctaactgccacaatgattcccactcagcaacttctagtagtgtccccctatcyccacgtttccaagcttttgcctgcaatacctaaggctgtttcatcccactcctcaaccttgggagcaaatcctactcatacttcaagagtcagctcaggg

SEQ ID NO: 8632 - DNA, 201 bp, Homo sapiens
tactggtttggagggtggtgggatacataatctgagaccctaaagcatgtataaaatatatacatatggggaagggagaaagaactttatacctctaaacmttaatgatagatgacagaattataacaatactgattttctttgtaattttttgttttccaagtgttctataatattcttgtattaatttagtaattagtg

SEQ ID NO: 8633 - DNA, 201 bp, Homo sapiens
tataccacacaaccagaatctgtaaataagagatctacaaatcagaatgtacgaggccagtttctcatgcttcaccagctacacaaagcagtaaagacagwcaatagacaagatttattaggtaaaacagaacagactgcagatatgctattccaatcaaaacatgttgcttaatattttagttatgttgagtaacaaatc

SEQ ID NO: 8634 - DNA, 201 bp, Homo sapiens
aaagagaaatgccaaccaaggtattcttctgcccgctggaaactaagagttttgctctcgtaccttcctcaaacatgagcactattaacctcctccactamatccttagcttccaaatttggagactttaatatacatagaaatgacttttcaacccactgacctgatattttttcagcttcctcaaaaaatccttcagct

SEQ ID NO: 8635 - DNA, 201 bp, Homo sapiens
tagaaaaaaataatctcgaggaaaacacacactggtgtaaaccatggttatatcagaaagacagattgatgggtgtcttttaaaccttcttctgtctgttrgtaatacttttaaagacaacaacaaaaacatgtctatgtaatcttttaaaagattaaaaaatattttctttttaaaaaaattatcttagaaaagactgtt

SEQ ID NO: 8636 - DNA, 201 bp, Homo sapiens
atggatcaactactaagcactgtgctaggcactttacaaacatatataaaatgtttattcaaattctattattagttcatgaacataaaatgaattctgtwcaactgaattatcacatctaccacatttggtgtatctaattttaaagtactgtttaaaaattactactttttttttccattttagtttacttatgtatgg

SEQ ID NO: 8637 - DNA, 201 bp, Homo sapiens
ttcaactgaattatcacatctaccacatttggtgtatctaattttaaagtactgtttaaaaattactactttttttttccattttagtttacttatgtatrgcttagattttaattacatatggagttctacatggttcaactttaagaaatacaggatcataaggattttggcaagttaatgaaaaagaagcaaaacatg

SEQ ID NO: 8638 - DNA, 201 bp, Homo sapiens
tcatcttttccaatttttcaccaataaattctgctttatttttatgatctctaaggacttctaaaatcacaaattgactctactaactccagcagctagamcctttcacaagctgcttcctttccctcttgtccatagctccataaggacaacgatttgccctatttttgttcactgctatatcccccatacttataaaag

SEQ ID NO: 8639 - DNA, 201 bp, Homo sapiens
gcacttgatgcagaaaggctatttcaaacactgaaagagaaaaatgagtgacgacaacctcaaaggtcattttaatgctaacaatgaattttattttaacrcatcatattttgtcagaacctgccgaaccagcattcaagatactgtttaccatccatttttaaacagaagagctaagctgggtaattcaatgaagtaatt

SEQ ID NO: 8640 - DNA, 201 bp, Homo sapiens
ttaacgcatcatattttgtcagaacctgccgaaccagcattcaagatactgtttaccatccatttttaaacagaagagctaagctgggtaattcaatgaartaattattagactattaaaaataaggacaaaacacgtatacagtttttgattaataagacttgacaaaaataagggaacagagaagcttaacacttctca

SEQ ID NO: 8641 - DNA, 201 bp, Homo sapiens
ctgccgaaccagcattcaagatactgtttaccatccatttttaaacagaagagctaagctgggtaattcaatgaagtaattattagactattaaaaataakgacaaaacacgtatacagtttttgattaataagacttgacaaaaataagggaacagagaagcttaacacttctcagctcaaatcgtttcaaatcctggaa

SEQ ID NO: 8642 - DNA, 201 bp, Homo sapiens
ccagcataaggactgttgtagaaaaagaaaagaaaattcacgaagccttcaatgcagctatgccagcaggtccaaaacccctgcatgttttgagaaatacyttttaatcttgtattgaaaatacaacttctcggaaaggctcctcctctccctctccctcctctccctctccccacggtctccctctccccacggtctccc

SEQ ID NO: 8643 - DNA, 201 bp, Homo sapiens
cattaagaaaatcattgagaagaaaggataactgcctgaacagatttttaatgcagacaaaagtgccctactctagaaaataaatggcatgaaagacatayattagtaaagaagagaagcaagtacaaagatttaagataggaagggataggctatctctactagttttgtgcaaatgcagttgagtttatggcacaattg

SEQ ID NO: 8644 - DNA, 201 bp, Homo sapiens
cccagctgctcaggaggatgaggtgggaggatcacttgaagccaggagttcagaaccagcctgggcaacatagtgagcccccatctctaacaaaaaaaaawttttttatcagtcaggtgtggtggcacctgcttgtaagtccaagctactagggaggctacagcaggagaatcacttgactgcaggatttggaggctgcac

SEQ ID NO: 8645 - DNA, 201 bp, Homo sapiens
ggcttcctcctgaagacagaaactagggcaataatcctggttccgtgacctgagagacatgggtggggtctcataaagaggaccgtaagctatgaaataaygtgagaatctcagtacacttctgtagacaaaacatacatcatttacattgttttgcacttacgtttctttttcataagggacacgtttttgccaggactc

SEQ ID NO: 8646 - DNA, 201 bp, Homo sapiens
gcttcctcctgaagacagaaactagggcaataatcctggttccgtgacctgagagacatgggtggggtctcataaagaggaccgtaagctatgaaataatrtgagaatctcagtacacttctgtagacaaaacatacatcatttacattgttttgcacttacgtttctttttcataagggacacgtttttgccaggactcg

SEQ ID NO: 8647 - DNA, 201 bp, Homo sapiens
aagaggaccgtaagctatgaaataatgtgagaatctcagtacacttctgtagacaaaacatacatcatttacattgttttgcacttacgtttctttttcayaagggacacgtttttgccaggactcgaattttgaaattatgttcattgataaggctagggaaaccttaggccagacaaagagatgacattaccattgtaa

SEQ ID NO: 8648 - DNA, 201 bp, Homo sapiens
gtggagctgcaatgtccaatacagtccccattagccacatgcggctactgagcccagaaatgtggctagtccaatccaagacttgcttaatcataaaatayacactggattttgaacacttggtatgaaaataaattttatactccttatgttattattttagatatactgagaaaaaaccagaattatttctaccttttt

SEQ ID NO: 8649 - DNA, 201 bp, Homo sapiens
attgatagcagaaggtgcagagatgcttcaagtctccaactcccagaatcctctccatttttaaaatgtctatttcatcttaatgttttaacattaaaggrttacttaaagaattttagggcagagttaataagtaaaaagtgcaagatagggcaatctggggcactgtacattagttcctatggaaataatttccttgta

SEQ ID NO: 8650 - DNA, 201 bp, Homo sapiens
tgaaaaactacttgaaacccactccagcaaaaggataaatcgcctcttaagaatcaaattttatatcattgaacacaatcacaacaattgttattattagstagttaaacataggccttagaaaacaatttccaacagtcttacttctgaataaagatggccctatattttttacctcaactccttacaacctcaaaagaa

SEQ ID NO: 8651 - DNA, 201 bp, Homo sapiens
ttatcccctagaccaagctcatctttctgttgaaagtcaccttggcatacacagagagaccaacagacaacatcagcacccaccatgcctgctccacagcrcattctccttagatcacagcaatcaatttcatgcctctctgacactactcatctgcaaaaaattcattccttgacagatgttttatttctagtattccct

SEQ ID NO: 8652 - DNA, 201 bp, Homo sapiens
taagtttgttaatgtactttgacagagttgcataacatcctaaaatgttttgaacaatgcagtttaggctgcaatgaaatatttatgaatgaataatgttyctgaatataagttttaatatttaatgattccgagtgctgcctggatttgatgcagaagaaaaatgtggtttggaatgactgcacttatcaagggacctga

SEQ ID NO: 8653 - DNA, 201 bp, Homo sapiens
gaagtacctaatctaaaatatcacacagcaaagttggtcaatgagtcaatttaatcaaatcaatgggtaatctgcacagattattggatttgtctcatttrcaaacaatcctgtcttaaaaattagcattaaaacagcaaggagaagaggatttactgacaaatcagttaactaatacccaaaatcacagtgctctgaaga

SEQ ID NO: 8654 - DNA, 201 bp, Homo sapiens
aaaagtgacaaagagaaacaaaactgcttaaaaatttacactgcagaaaacttgatacatttgccaatgacaggtaatactcttcgttcaatatgagaccytaattgccaccagagtcattgagagtcaatttcttctgttaaaccatttaaaagaattgatgctacaatttcaatgaaaaatcattcgtgctgagcacca

SEQ ID NO: 8655 - DNA, 201 bp, Homo sapiens
tctgttaaaccatttaaaagaattgatgctacaatttcaatgaaaaatcattcgtgctgagcaccagtcctaatcctatcaggtaacagtggtatctctgyaaaggtacacagattcagtaattagacttttctcaagtatgagtaactgagacaaaaaggcatatagatgttcatttagaacatttttaccgagcacaat

SEQ ID NO: 8656 - DNA, 201 bp, Homo sapiens
ccaaaacttcaaagcaatacagaggtacatgttacaacttctcatcagttctcgcctcataacatacagctgtgtgactgttaatttctaagatctttatyaaggcatagctttagatggcatctccctcaccaaaaatgatttaatttctctctgcaaggcctgtgtttaacctactattcaatgccctcaatccttgca

SEQ ID NO: 8657 - DNA, 201 bp, Homo sapiens
ctcaccaaaaatgatttaatttctctctgcaaggcctgtgtttaacctactattcaatgccctcaatccttgcatgttaccttctggcatataaatgagarttcttaaaattacatatttgtgtgcaaagccactgactaccttcatttcagggcattaactacattagcagagtcaggtactgctaaccctccggatctc

SEQ ID NO: 8658 - DNA, 201 bp, Homo sapiens
agaaacaaaaatcacaaaagtatacgctatataattttttaagcccaaagctcagtcactgattttcgcttctcatggagttttcatttcaatctacaaakttatttgattttcctttttttgtatgtaacaagcaaaaggcaaacatcaagttatccttcaaaaaaatgaaggaatggtcaaattcaataatcaacaagt

SEQ ID NO: 8659 - DNA, 201 bp, Homo sapiens
cctttacttataagctagcttttctgacactcaccttttgagaccctagcaagcaggtcagtgtccagaaaccaatcctaacggaatggctggccccgcaycagcagtgtgcagaatggcagcagtatcatcactacggctgctcactccaggtccctccaacatttaaagacacaagggtagagagaaactagccactct

SEQ ID NO: 8660 - DNA, 201 bp, Homo sapiens
agacacaagggtagagagaaactagccactctctggacctccttagggatgccctgctacatctctgctgagcctccctgtctcctcccatgctacaatayacgtgtcccaactttctgatttttagcttcctgattaatttacttgccctttgaaaatgtcctctaattcattacagccttcctggaattactctctggc

SEQ ID NO: 8661 - DNA, 201 bp, Homo sapiens
ctgctgagcctccctgtctcctcccatgctacaatacacgtgtcccaactttctgatttttagcttcctgattaatttacttgccctttgaaaatgtcctytaattcattacagccttcctggaattactctctggcttctcaacatctgatattatatgtcccataaacaacaggactattatattaaaaccatgaatta

SEQ ID NO: 8662 - DNA, 201 bp, Homo sapiens
tgtaggcttatgtcagtaaactagaataaacatgttattaaaagagaatcaataggaggctttaaaatatacactaccacaaaaggtcaagccctggtatygattttaatataacattttttgtgcagcttcccaaaggattcttttctaatattgttcttcatttttctctcactttgttccctgactggtgaatttgtt

SEQ ID NO: 8663 - DNA, 201 bp, Homo sapiens
tctgctgagtatgtgtcattcctatgacaagctgctggcaaatgaaaaaacaaaaaagaccaaaaaaaaaaaaaacaacaacaacaaaaaccagaacacamaggtagtcagtgggaggacagatacaagaggccaagaagcaagagataatcttcaactcaaaacgcacaagggctggccacggtggctcacacctgtaat

SEQ ID NO: 8664 - DNA, 201 bp, Homo sapiens
actttcttttattttgagacagggtctcactcttgtcacccaggctaaagtgcagtggcgtgatctcggcttactacaacctctggctcccaggttcaagygattctcgtgcctcagcctcctgagtagctgggactacggatgcctgccaccatacctggctaatttttgtatttttagtagacatagggtttcgtcatg

SEQ ID NO: 8665 - DNA, 201 bp, Homo sapiens
gtttatatgtaaggaagcaattgtaaatagcatataactaacaattgctcccatcgtggctgaatattttgacagataaattcaatattctagttccaacrgcaaattgtcccagcagctaagtttttaattgatttcaaaacatctaagtttgtagactaaatgtgatgactgactatcatacaaaaggcaaataaatac

SEQ ID NO: 8666 - DNA, 201 bp, Homo sapiens
tagtctgttcttgcatcactataaagaaatatctgagactgtgtaatttataaagaaaaggcgtttaattagctcacggttctacaggctgtacaggaagyatggcagcattttgggaggcctcaggaaactttcaattatggcagaagggcaagatgaagtaggcacatcttttatggccagagaaggaggaaaagagaa

SEQ ID NO: 8667 - DNA, 201 bp, Homo sapiens
gatggtgctaaaccattagaaaccacacccatgatccaatcacctcctacaggccccacttccagcactggggattatatttcaacatgagatgtgggtgsggacatagaaccaaaccatataacttggtaagtttcttaccctctctgtttcctcatttataaaatgaggataacagtaatgcctacccagtaggggtgt

SEQ ID NO: 8668 - DNA, 201 bp, Homo sapiens
cagatggcacaagattccaatacctagtacagacacagcacttccaatcaccttccagtgaaaaatactgggtggctaggacgtgttcctactacattcasaactggttaggtctttttatcaattgttaagcagaatcaaatggaaaagtatgagtataaaacaacagcaatgcaataaagcatttaaaaaaacagcaaa

SEQ ID NO: 8669 - DNA, 201 bp, Homo sapiens
catgatgctacccacaaactcctgtttgtttcagaactcttccctcctccttttttctgctttttcttttgcctttttcttgctgcctttttcaaaggcasaacatatgtaataataaaaatcaagataaattatcatatataatgaacttaaacagatggtaccatccctgtaaatttcaccattagtatgagaaactaa

SEQ ID NO: 8670 - DNA, 201 bp, Homo sapiens
ctgaagttcagtcatacacaaataatgagacttatcacaatcattcttctctaaaaatactggtaaatatgacaaaacccaccaaaacctctctctgataycacaaaactcaccgtttctgatcttcggattctttcttggcttgctccaatgccagctcctcagctactcttcttttcaattcttcatcagaaactagaa

SEQ ID NO: 8671 - DNA, 201 bp, Homo sapiens
gtaacaaatttcttttccttataaattacccagttttacgtattctgttataagcaacagaaaagagattaagcagtttggtttttccagctttattaagrtataattgacaaatagaatcatatatattcaaggtgaactatgtgatgatttgatatgaatcatgtaatgattaccacaaatatatcgagcaccacacag

SEQ ID NO: 8672 - DNA, 201 bp, Homo sapiens
gaaagggacaggaacactcccatggccactgaaaaagacatgtccaagtgaccagctggttgacatcacttttggtccataaaggagccaaagcacagctrtctttctaatgccctacctatttccagaaaaggaaaaaaaaaaaaaatcacaacttttgggtcaagtccaaggtcacaactgaaaaagtaattaccttag

SEQ ID NO: 8673 - DNA, 201 bp, Homo sapiens
aaaagttataccttgcttcttagagaaatatcagttcctttgggatttttcctttaatgtatttttctttctggtttcaccatttgctgatataggtcatsgccaattttgtaaagtctattattttcatgtgctagtttaaacacactaaagagaaaccatgaagatcttccaagagaacaaaataaatatatgtacctg

SEQ ID NO: 8674 - DNA, 201 bp, Homo sapiens
tttttctttctggtttcaccatttgctgatataggtcatggccaattttgtaaagtctattattttcatgtgctagtttaaacacactaaagagaaaccaygaagatcttccaagagaacaaaataaatatatgtacctgcataatataagcagcagatttcagataaagactctgattctcccaggattgagatagttga

SEQ ID NO: 8675 - DNA, 201 bp, Homo sapiens
tctcacacagcctccaggaaaataagatctataatttaaattaaaaaataataattacctttggatattgctttctgatacatagcttaatttttttgttwcaaaaatgattatattttgttcactggagataaaactataatacagtgttaactctccaaactaaatgaagtacagaaaccacccaagctcttttccatt

SEQ ID NO: 8676 - DNA, 201 bp, Homo sapiens
ctcacacagcctccaggaaaataagatctataatttaaattaaaaaataataattacctttggatattgctttctgatacatagcttaatttttttgtttyaaaaatgattatattttgttcactggagataaaactataatacagtgttaactctccaaactaaatgaagtacagaaaccacccaagctcttttccattt

SEQ ID NO: 8677 - DNA, 201 bp, Homo sapiens
atgcaaaacatactttctgtttatatataaaacaactaagttctcagccaggtaaataggttttcagctccatgaatctctgatgggacattcagaagttrgagggcacaggacaattcttggagatgggaaactacccccaggcactgctagccatgaagatccctccccgtgccactaaacaccacagcttccctcaaa

SEQ ID NO: 8678 - DNA, 201 bp, Homo sapiens
atacatacatacataaatacatatgccaaaatgatactaatgattacctttatatttgggagaaatggatcattttcctttctctctttatacttcgttgyagtgtttaccaagaacacatttttactttcataatcatttaaaagttatttttaaacaatgcataatgaggcataatttcagtttttaaaaaacaccttt

SEQ ID NO: 8679 - DNA, 201 bp, Homo sapiens
taggttaaataaaaaaaaaaaaaatacctactcagacagaatcacttacttcgtggagacagccatgagctgtggggataaagtcagcgggggagggaaarcgtagtttatatctgcttatatctgctagtactctgacactgggctgggaaaataatatgcacatataacttgaagtgactacaaaacaacaataatttt

SEQ ID NO: 8680 - DNA, 201 bp, Homo sapiens
tgtggtgctgcatgtctgtaatcccagctactcaggagactgaggcacaagaattgcttgaacccgaaaggtggaggttgcagtgagccaagatcttgccmctgtacctaagctgagtaacagaggaggctgtgtcttaaaaaaaaaaaaaaaaaaaaaaaaaaaaaaaaaaatgcagaatgagagtcagcagcttggaag

SEQ ID NO: 8681 - DNA, 201 bp, Homo sapiens
aaggatacttagtgatcacctgctatatttcactcagcacctgtatattttctcatttagtctccatggcaaccatgagaaattggcattagtctccccaytttattctgaagaaaaatgagacaacttgtccatgatcacacaactattaaatggcaaaagccctttgaacactaaatatacaccacatgagctcactct

SEQ ID NO: 8682 - DNA, 201 bp, Homo sapiens
agttggcctttgcaattgggtctggttcggctggttcaagttacacctattgaggcacatcacagatgatgctgcagggctgggaatagggaggtgtttgwtcaactaaaagaattttacttggatggagagaaaaaggtagttctcaatcaaaatataacatagccttaaaaagtttcagttcaggccaggctcaatggc

SEQ ID NO: 8683 - DNA, 201 bp, Homo sapiens
aatccactatcccataattccatttaaagttagtgtccagaatctacagcagcaaaaatggggagcttctttaaaacagcgtcttttttctctgctgtcaktgaaattactaggtcataactcccgagttaacttccagctcctgagtactgtgactccacgacattactatatttctaatctacattatacaacctacct

SEQ ID NO: 8684 - DNA, 201 bp, Homo sapiens
acacgcgcgtggaagggcctggattcttttcccgcacagcgggagcaaggccacgacccccagaagcaaggagaaggcgccggtcctgagctcccgcctcytccggtcacgcgccacaacaaaaacgcctcaggttggtcggcgatgcgaactgcccgcctctgttcggcgagggcgcccggattggttcacccgacccgg

SEQ ID NO: 8685 - DNA, 201 bp, Homo sapiens
gacattgttacagaggacgaactaactacctgctttgcttcttcacttcctggccactttacaaccaggaaaagcagttgaagttctaatttattaatttytaaataaatatacaagaaaacagcagatgtggtaatagaatcaatgataaaaaatagtcataccctctcctccagtctagccagctgttctttgtagaat

SEQ ID NO: 8686 - DNA, 201 bp, Homo sapiens
gtcatccagttttcaatttgcccagtgcccccagtggcctggctggcacacctacctgtttggcatgattgacacagtgcatatactgggtggccagagcrgagcatttgagggtctggtgggtgttctcacggtaacactgaagaattttggcctgcagatcagcacagactggatgagactcatatcgcctgaaaacaa

SEQ ID NO: 8687 - DNA, 201 bp, Homo sapiens
cccagactccagaaatggagctgctattgttggttccaaaaaggatgacactggcgaaggcattcttcctcagcttgtccagtcgctggaacattccagtsatgagattgcagctcatgaaggtctgagtgagttcttcagggaagcgatactctgagtaccacagggaccagccgtccttatcaaagtgctcccagaaat

SEQ ID NO: 8688 - DNA, 201 bp, Homo sapiens; identical to SEQ ID NO: 8687

SEQ ID NO: 8689 - DNA, 201 bp, Homo sapiens
aatatggcagtgccacagagagtgtgtcctcattggagtacttgcgcttaaattcatccaacacaaaggtactcttgggcaggtgagcgaaggggtccttrgccttgggctcagcagccagcgcctgctcacattcatccatctcctcctcaggagcaggggcagccgcctttttctcctccttccgctcagcctggggct

SEQ ID NO: 8690 - DNA, 201 bp, Homo sapiens; identical to SEQ ID NO: 8689

SEQ ID NO: 8691 - DNA, 201 bp, Homo sapiens
gccccgctgtactgagcagcgatgagagccttgaaggccctccagttttcaggatacgtgtacagggtcccagccgccatggtgattccgcaaagaaaggmtggatccagtcttaaaagtgttatcaggtaggggtccttaggggaactgttttaatgaaactagtaattagaataccaacttattctccataaatagtaa

SEQ ID NO: 8692 - DNA, 201 bp, Homo sapiens; identical to SEQ ID NO: 8691

SEQ ID NO: 8693 - DNA, 201 bp, Homo sapiens
ttcagcaattggatccagtcttttttttttttttttttttttcaatgttcagtttcctttaatgacccccatctccctgaagggcaggtgcaggcagctargtgatggcaagagatgttcacttgaagatcttgccgtgattgaaggctttgcccacatgctggaaggccccctcccaggaaaagtactctcgaaccagcg

SEQ ID NO: 8694 - DNA, 201 bp, Homo sapiens; identical to SEQ ID NO: 8693

SEQ ID NO: 8695 - DNA, 201 bp, Homo sapiens
ccttattctgtttctataaaagaggaaaataagcacaaatatgtgggttaaacattttctaatgtctaaactttcattaatgtcatattttgatagttcayaaagtatcttaatttagaaaaggaaattgtcagtgacaatgatctattattcaatttgatattacatgttttaagcattgattaaagtatttaaaaataa

SEQ ID NO: 8696 - DNA, 201 bp, Homo sapiens
aattacatatttgtgtgcaaagccactgactaccttcatttcagggcattaactacattagcagagtcaggtactgctaaccctccggatctcctttcagaatgtcttttttaaaagccaaacacaatgttatccctttctctcacatctaacactgcaacattccagctgcagagatccttggatttttacagagggcct

SEQ ID NO: 8697 - DNA, 201 bp, Homo sapiens
actgactgcaaaggtgagctgtaaaagcaaaaggtaagtgacagcacagctagcttgtaagtaaaggtaaaattcaaatacaagagggatttaaaaccatstagcctagaggtcaggttaactaatgccatggtagaaactcagctttctgagaggccagagcaggaggaccacttaagcccagaagttgtatatccaaag

SEQ ID NO: 8698 - DNA, 201 bp, Homo sapiens
accagtgagaggtatagccagaattaaactcagcccaacttcagagcctgcattcttacagaaaatacacacacacacacacccacacacacacacacacmcacacaaatatacagataccattaaaataagtggcatgggggtagaactttgtcttatataccattgtaatccccacattaaataatacctggcacttgg

SEQ ID NO: 8699 - DNA, 201 bp, Homo sapiens
cagttaatattctttctgttacgaagaaacactgacatttacttatttatttatttatgcctgacatttattgaatggttgattgattaattgagacagartattgctctgccacccaggctggagtgcaatggcgcaatctcggctcactgcaacctcagaaagttgataagggttacagaaagttgatgttaccctcaa

SEQ ID NO: 8700 - DNA, 201 bp, Homo sapiens
aaggcaaataaatactaacaacagacactacaagccaaaaacccagcatatcaagcaacacaaatatataaaataacagaataagccagtcttccattttaaaaaaaaaaaagtctaagaatgaatatagagagaaacgtaaatatttttcccctctgcaatcattaattaaagtaattcctgcacttctttattgcttcc

SEQ ID NO: 8701 - DNA, 201 bp, Homo sapiens
acaggctgtacaggaagcatggcagcattttgggaggcctcaggaaactttcaattatggcagaagggcaagatgaagtaggcacatcttttatggccagagaaggaggaaaagagaaagagggagagggactgtcacacacttttaaacaaccagatctcatgagaaatctatcacaagaacagccttaggaggatggtg

SEQ ID NO: 8702 - DNA, 201 bp, Homo sapiens
caggctgtacaggaagcatggcagcattttgggaggcctcaggaaactttcaattatggcagaagggcaagatgaagtaggcacatcttttatggccagagaaggaggaaaagagaaagagggagagggactgtcacacacttttaaacaaccagatctcatgagaaatctatcacaagaacagccttaggaggatggtgc

SEQ ID NO: 8703 - DNA, 201 bp, Homo sapiens
aggctgtacaggaagcatggcagcattttgggaggcctcaggaaactttcaattatggcagaagggcaagatgaagtaggcacatcttttatggccagagaaggaggaaaagagaaagagggagagggactgtcacacacttttaaacaaccagatctcatgagaaatctatcacaagaacagccttaggaggatggtgct

SEQ ID NO: 8704 - DNA, 201 bp, Homo sapiens
ggaggcctcaggaaactttcaattatggcagaagggcaagatgaagtaggcacatcttttatggccagagaaggaggaaaagagaaagagggagagggactgtcacacacttttaaacaaccagatctcatgagaaatctatcacaagaacagccttaggaggatggtgctaaaccattagaaaccacacccatgatccaa

SEQ ID NO: 8705 - DNA, 201 bp, Homo sapiens
cctcaggaaactttcaattatggcagaagggcaagatgaagtaggcacatcttttatggccagagaaggaggaaaagagaaagagggagagggactgtcayacacttttaaacaaccagatctcatgagaaatctatcacaagaacagccttaggaggatggtgctaaaccattagaaaccacacccatgatccaatcacc

SEQ ID NO: 8706 - DNA, 201 bp, Homo sapiens
caagaggacatttattttggtcatctacatttctgtgtaaatagcattgaaaatggcactcagaatttaagtcaaggtttccttcctttccaaaggaacakagaaaaggtgattttattttaattcacaataaaattttgttgcaatctggaaatatgcctgcatagcttcaaaatgatgcaagagaaaaaaaaaaaactc

SEQ ID NO: 8707 - DNA, 201 bp, Homo sapiens
tttccaaaggaacagagaaaaggtgattttattttaattcacaataaaattttgttgcaatctggaaatatgcctgcatagcttcaaaatgatgcaagagaaaaaaaaaaaactcagcccataactgaaagcctaggactataattatggattacctacagccataatcctaactagctttcatctcccccttccagatga

SEQ ID NO: 8708 - DNA, 201 bp, Homo sapiens
attaagggtggtgcaagatgtgctttgttaaacagatgcttgaaggcagcatgctcgttaagagtcatcaccactccctaatctcaagtacccagggacayaaacactgcggaaggccgcagggtcctctgcctaggaaaaccagagacctttgttcacttatctgctgaccttccctccactattgtcctgtgaccctgc

SEQ ID NO: 8709 - DNA, 201 bp, Homo sapiens
acccttccaactgtatactatgcttctgttttgcctctctcctacttcatagtctatatagcatgagaaaaatataagcctctactttgaaggggtcaaayaaaacttaggaaacccctagaacagaattctgtttgcattcaggcaagtattagagctctttatgaaagtatgaaagatttttaaacgatccaaataaaa

SEQ ID NO: 8710 - DNA, 201 bp, Homo sapiens
aaattgcaacctaaacactccaggtctctgtgagatatcacaagaatgtacagatgccagaaacagattaaaactcatctacccccaaactgtacaaatgttttcattatttagcattcacattttcagattaccgtctttaagagaacaatttcccaaacatcgatttatttcaagctgacacatttcccatcaaaatta

SEQ ID NO: 8711 - DNA, 201 bp, Homo sapiens
cccgtgaacccttctctttccgtggtgtgtcctttttaggctgggtctctgcaaactttttagcatcaaactgggccatcttctcacacagtttcagttcscccaagacagcccggaactggggctggttaatgcaggtgaggaaccagcggttggtattgcgaaaggcccggcggaaagaaggctctagaacctgcttat

SEQ ID NO: 8712 - DNA, 201 bp, Homo sapiens; identical to SEQ ID NO: 8711

SEQ ID NO: 8713 - DNA, 201 bp, Homo sapiens
gcctgtttgttgtggtgcatgatgcccaaggtggggaacacccaggtactggctgggggcactatatcggaatcagcaaagctcacccactgcaccacctkggctgctgcctctggagtacttccccgcagctcctcattgctcacatagtaggcaatggcgttgctctcaaacacacagaatccatcatcaccctcaaat

SEQ ID NO: 8714 - DNA, 201 bp, Homo sapiens; identical to SEQ ID NO: 8713

SEQ ID NO: 8715 - DNA, 201 bp, Homo sapiens
ctattgtcctgtgaccctgccaaatccccctctgcgagaaacacccaagaatgatcaataaaaaaaagaaaaagaaaaagaaaaaagaaaaaaaaaaaaaagaaaatacaacttctatatgagtgctggattgctaagaaaggaaaggcttacctatagactctaatgcgatttgaggaaaagtcaagtctccattatgtg

SEQ ID NO: 8716 - DNA, 201 bp, Homo sapiens
tttttgcttttgtaattgtttattctgttttttaagagcagatccagcaggtggcataaatgtttataaacatgagagaccggtataatctgatgaagtarttcttaacctgggaattcaagagatctgtaaacttggataggaaaaaaaatgcatctttattctcactaacttctaaataaagtatgcatttccttcaaa

SEQ ID NO: 8717 - DNA, 201 bp, Homo sapiens
acgccattgcactccaggctgggcaacaagagcgaaactctgtctcaaaaacaacaacgacaacaacaaaactcccttaggtctgatcctaggttaaataraaaaaaaaaaaatacctactcagacagaatcacttacttcgtggagacagccatgagctgtggggataaagtcagcgggggagggaaagcgtagtttata

SEQ ID NO: 8718 - DNA, 201 bp, Homo sapiens
ttatatatttataattagttgtattatatatttgattataattaattataattatgttatataattataatagttatgttatatagtaatcataattatawttgttatgtatttattataattaattataattatgttatgtaattaattataattgttatatatttattataattaattataatataattgttacatatt

SEQ ID NO: 8719 - DNA, 201 bp, Homo sapiens
gagtacctacaatgtaataaattttaagtgtcatctatcattacttcagtatattgaatcatcatgatcatcacgctaactccgtaacacaggaggtaggaaaaaaaatctacctacaacaaatcatactttagaacaaattccaattttaaatgtatccatatatcatcattctttttttaacaccaagaaaatgtttta

SEQ ID NO: 8720 - DNA, 201 bp, Homo sapiens
ctactcaggaggctgaggcaggagaatggcgtgaacccgggaggcagagcttgcagtgagatcgcgccacagcctgggcaacagagtgagactccgtctcaaaaaaaaaaaaaaaagatcccactcaaacatccctcagcatcactacccagtatctgagtagatgtgggagtaaagcagaagtcatcaaggaagacccca

SEQ ID NO: 8721 - DNA, 201 bp, Homo sapiens
tgaagtaggaaaatcgcttgaacccagaaggtggaggttgcaatgagccgagatcgcaccactgcactccagcatgggcaagagaatgagattctatctcaaaaaaaaaaaaaaaaaaaaaaaaagtatcttcttcaggaaacatatcttttcctgaaccgggcacttgtttaagcaaagccttttcctgtacaatgacct

SEQ ID NO: 8722 - DNA, 201 bp, Homo sapiens
ctttttaaaatgctatctctggtttccctttccctgtccaactaagtgaactctatcaactggtggaagcgttggacagtgactgaacggtggtgttttgttttttttttaacctggccctctgcctacctacggcttatgggcccaaaggtgccagctcttaatctgtatcctcttcgctagctctaaatattggcctaa

SEQ ID NO: 8723 - DNA, 201 bp, Homo sapiens
tttctaccatcacaacacaaaatgccaagcagcctccactgttaccagagaaaggaatgccaacctggacatcacctagctcagtacttagctcaacgaaccagtcacactgagagcagactatgacctgtaatgagggccatactatttaatcaaatagctacagcttgggctttaaaagaaaaggttagctttggctag

SEQ ID NO: 8724 - DNA, 201 bp, Homo sapiens
aacagaaggaagacaggaggaactgggataagttgaggaaagcagaaagatattaggaagcaaaataatctattggaactagaggagaaagggaaggaatmcactcttcccggtggtgggttgctgtgcccagccagtccctctgttttttctccacctgcacgaatctggcaggtggagaaaaaacagagggattggctg

SEQ ID NO: 8725 - DNA, 201 bp, Homo sapiens
tgtagctttgacctcctgggctcaggtgatcctcccacctcagcctcctgagtagctgggactacaggcgtgtaccaccacacttggctaatttttgtgattttttttttttttttgctgagatggggtttcaccatgttgcccaggctggtctcaaacttctgggctcaagtgatctgcccttcttggcctcccaaagta

SEQ ID NO: 8726 - DNA, 201 bp, Homo sapiens
ttgacccaggaggtccacttgacccaggaggtcaaggctgcagtgagctatgatcatgccactgtattccagcctgagtgacagagtgagaccctgtctcaaaaaaaaaataaaaataaaaataaaagaaagaaagaaagaaaaaaggaaagctttggagaaatatgtgctaacccaagcaaaagcaagtgagtcacccat

SEQ ID NO: 8727 - DNA, 201 bp, Homo sapiens
acatctagtcttcttttctgaactgcaggggttaaacgggcttttggggactaatctagacacttagccacactgtcctttttacttctggaaaaaaaaawatatatatggcccaaatgctgagcaagtgactacagaacacgttaggaagaatcttgtttgttcagtatacactaccaacctatcgttgtctagaatctc

SEQ ID NO: 8728 - DNA, 201 bp, Homo sapiens
atgaagagaagtcctaataaacttaaaaagaaatcaggaagaccaggaaccacagacgagagaaaataagcatattttctggtagatgctacagcaaaacytgtagtatattaaacatttgctctttcttacgtctacttcctagatactgtagcatataaaggtagaattttatgacatgaagtacaaatagatgtatca

SEQ ID NO: 8729 - DNA, 201 bp, Homo sapiens
attagtgtcttactgagatacaccatttgatcatttcaaaactgatcaatgagaatcagagataaaacatttatcatgtacatttggtatattagatccattcacacagcactaaagtaggttataagtagacatcaatacgtgttagagaagatgttcaggatacctgtcagctgcagatacaaatacacgtgaaacagc

SEQ ID NO: 8730 - DNA, 201 bp, Homo sapiens
aacctttgcctcctaggctcaggtgatcctcccacctgagcctccctccccagtggctgggactataggcatgcgccaccacacctggttaatttttgtatttttttttttttgtaaagacagggattcaccatgttggacaggctggtctcaaaatcctggggtcaagcaatccacccgcctcggcctccctaagtgctg

SEQ ID NO: 8731 - DNA, 201 bp, Homo sapiens
ttgcccaggctgatcttgaactcctggcctcaagtgatctgcctgcctcagtctcccaaagtgctgggattacaggtgtgagccatcacgcctggcgccaygtctaaactttcaacaactttttttttctcttgcacttgtagagacttcccatctgattgttttttctttttcttcttttaagacataatctcactctgt

SEQ ID NO: 8732 - DNA, 201 bp, Homo sapiens
gccgagttaaaagtcatagataagtgttactggagttcagaaagagtagagatctcctttggcctcagaagacacttttacaaatggacagaactcattcaaaaaaaaaaaaacaaacaacaacaacaaaaaaaaaaaaacaaccaacccaacaaaaaacactcattctgttttccaatgagagaacggataactactggg

SEQ ID NO: 8733 - DNA, 201 bp, Homo sapiens
actggagttcagaaagagtagagatctcctttggcctcagaagacacttttacaaatggacagaactcattcaaaaaaaaaaaaacaaacaacaacaacaaaaaaaaaaaaacaaccaacccaacaaaaaacactcattctgttttccaatgagagaacggataactactgggtattcgtacagtgaaaatctacaaagta

SEQ ID NO: 8734 - DNA, 201 bp, Homo sapiens
ctggagttcagaaagagtagagatctcctttggcctcagaagacacttttacaaatggacagaactcattcaaaaaaaaaaaaacaaacaacaacaacaamaaaaaaaaaacaaccaacccaacaaaaaacactcattctgttttccaatgagagaacggataactactgggtattcgtacagtgaaaatctacaaagtaa

SEQ ID NO: 8735 - DNA, 201 bp, Homo sapiens
taagctgaccttaaagagcaaaagcctgtgttagggtgctgcaatggaataataggtgtctggggctctgatgacactgaagccaccatgccagccttttrttaaacaagaaaaaaatctacttcttatgtcagccattctatttttatgatagacagggtgaaagtaatcaggaatagacctctgtaagccctaagatgt

SEQ ID NO: 8736 - DNA, 201 bp, Homo sapiens
ggaagaattaaaaaatgtcaaagccatgttgaactctagcatcaaatcttaccatctctgagaagtcacatttcatgaaaaccccattatctcctgggtgscttggcaaaattaataaactgcttttataattaccctttcgttccatctttactctttcttatataaagaaacagagctatttagagctgcttctggcat

SEQ ID NO: 8737 - DNA, 201 bp, Homo sapiens
actctttcttatataaagaaacagagctatttagagctgcttctggcatttctagttttattccaggagctttagaaacttcattaattagagtctcaggkttttttttttgtttttttttttttcttgatttggttttctaattagaataggaatcctagattcattgacagccctgccactacacaaggaaaaccttag

SEQ ID NO: 8738 - DNA, 201 bp, Homo sapiens
ggttgtggcgagccaaaattgtgccactgcactccagtctgggtgatggagtgagactcgatctcaaaaataaacagatttttttttatagatagatagakagagagagagagaaagagagagagagagagagaacacaatcccacattgttttttgtttgtttcaatgaacaaacttattcctcttggtcttcctagact

SEQ ID NO: 8739 - DNA, 201 bp, Homo sapiens
aattgtgccactgcactccagtctgggtgatggagtgagactcgatctcaaaaataaacagatttttttttatagatagatagatagagagagagagaaaragagagagagagagagaacacaatcccacattgttttttgtttgtttcaatgaacaaacttattcctcttggtcttcctagactcagtaactggttctat

SEQ ID NO: 8740 - DNA, 201 bp, Homo sapiens
accataaaataatccctatattccttcccactaacctactgtaccttaagaaaaaggaatcatgtctatgaatcttgaaatccagcacttaatgtttgctdatggatggatggatggatggatggatggatggatggatggatgaaatgaaggaaggaaggagggaagaaagaaaggagggaaagaagaaacgaatgaaat

SEQ ID NO: 8741 - DNA, 201 bp, Homo sapiens
caggaccaacagactcctgaaaaatacacattttcctgaagaacacacaacgatccaaactctgatgaaataactatcagaacactttgtcaaaagtaaaaaaaaaaaaaaaaaaaaaaaaaaaaaaggtttgctttctttccagaagatggaaagagatgaaaagatggaaggcagtattaatcaaagtatgagcaagtg

SEQ ID NO: 8742 - DNA, 201 bp, Homo sapiens
ggaggtaactggatcatgggtgtggtttccccaggctgttcttgtgataagtgagagagttctcagatctgatggtttaaaagtagtttcccctgcacgcattctctctctcctgccaccatgtgaaaaaggtgcctgcttccctttcaccttctgccgtaattgtaagtttcctgaggcctccctagccatggagaactg

SEQ ID NO: 8743 - DNA, 201 bp, Homo sapiens
gaggtaactggatcatgggtgtggtttccccaggctgttcttgtgataagtgagagagttctcagatctgatggtttaaaagtagtttcccctgcacgcattctctctctcctgccaccatgtgaaaaaggtgcctgcttccctttcaccttctgccgtaattgtaagtttcctgaggcctccctagccatggagaactgt

SEQ ID NO: 8744 - DNA, 201 bp, Homo sapiens
agggagcaatggaaagaagagaatgcgctcaaagcacgagtcatctgaatagaaagcaacagcgcacacaagataggatggaaatcagccacctcagtgcygggatggaggtgactgaagagagacatgccatcatctgcccattaaagaagccaccctgaggcaaaggcaaaggccacaggagggaggcagggggtcctc

SEQ ID NO: 8745 - DNA, 201 bp, Homo sapiens
atcttggctcactgcaacctctgcctcttgggttgaagtgacactcctgtctcagcctcccgagtagctgggattacagatgcccaccaccatgcctggcgtgtgtgtgtgtgtgtgtgtgtgtgtgtgtgtgtgtgtgtgtgtttagtagagatggggtttcaccatgttggccaggatgatcttaaactcctgacctca

SEQ ID NO: 8746 - DNA, 201 bp, Homo sapiens
tcttggctcactgcaacctctgcctcttgggttgaagtgacactcctgtctcagcctcccgagtagctgggattacagatgcccaccaccatgcctggcgtgtgtgtgtgtgtgtgtgtgtgtgtgtgtgtgtgtgtgtgtgtttagtagagatggggtttcaccatgttggccaggatgatcttaaactcctgacctcat

SEQ ID NO: 8747 - DNA, 201 bp, Homo sapiens
cttggctcactgcaacctctgcctcttgggttgaagtgacactcctgtctcagcctcccgagtagctgggattacagatgcccaccaccatgcctggcgtgtgtgtgtgtgtgtgtgtgtgtgtgtgtgtgtgtgtgtgtgtttagtagagatggggtttcaccatgttggccaggatgatcttaaactcctgacctcatg

SEQ ID NO: 8748 - DNA, 201 bp, Homo sapiens
ttggctcactgcaacctctgcctcttgggttgaagtgacactcctgtctcagcctcccgagtagctgggattacagatgcccaccaccatgcctggcgtgtgtgtgtgtgtgtgtgtgtgtgtgtgtgtgtgtgtgtgtgtttagtagagatggggtttcaccatgttggccaggatgatcttaaactcctgacctcatga

SEQ ID NO: 8749 - DNA, 201 bp, Homo sapiens
ctctagaatgaaaagaacatggtagaaaattacagtagttccccctttatccaaggtcaaccatagtccgaaaataagtgagtactgtacaataagatattgagtgagagagatgatattcacataacttttattacagtatattgttataattgttttaatttattattagttattgctattaatctcttactatgcctt

SEQ ID NO: 8750 - DNA, 201 bp, Homo sapiens
tctagaatgaaaagaacatggtagaaaattacagtagttccccctttatccaaggtcaaccatagtccgaaaataagtgagtactgtacaataagatattgagtgagagagatgatattcacataacttttattacagtatattgttataattgttttaatttattattagttattgctattaatctcttactatgccttt

SEQ ID NO: 8751 - DNA, 201 bp, Homo sapiens
ctagaatgaaaagaacatggtagaaaattacagtagttccccctttatccaaggtcaaccatagtccgaaaataagtgagtactgtacaataagatattgagtgagagagatgatattcacataacttttattacagtatattgttataattgttttaatttattattagttattgctattaatctcttactatgcctttt

SEQ ID NO: 8752 - DNA, 201 bp, Homo sapiens
tagaatgaaaagaacatggtagaaaattacagtagttccccctttatccaaggtcaaccatagtccgaaaataagtgagtactgtacaataagatattgagtgagagagatgatattcacataacttttattacagtatattgttataattgttttaatttattattagttattgctattaatctcttactatgccttttt

SEQ ID NO: 8753 - DNA, 201 bp, Homo sapiens
tgaggcaggagaatgacgtgaactcgggaggcggagcttgcagtgagcaaagatcgcgccactgccctccagcctgggtgacagagtgagactccatctcaaaaaaaaaaaaaaaaaaaaacctttcctattactcatcttttgagcatcaaattatatacataaaagcatgtttaagaggtaaaaacaatatatccattc

SEQ ID NO: 8754 - DNA, 201 bp, Homo sapiens
ccacgaggtagattctgtgaaggtcagataagagcttatactgtatctgaatcatcatcatcattaattttactctaatcctatatagttgggtttattctttttttttttttttttttttttttttgagacggagtcttgctctgtcgcccaggctggagtgcagtggcgcgatctcggctcactgcaagctccgcctcc

SEQ ID NO: 8755 - DNA, 201 bp, Homo sapiens
atttatttgaaggaggtatcaacaatcccaattgataggtaaatatactgaaataaagaagagcttgagacctttattaaatacaaaacagaaatatatgacacacacaacaacaacaacaacaacaacaacaacaaaacacaaaaaaggattaagtcattttctgaggactaaattctaaggcaagtgtttggaattctg

SEQ ID NO: 8756 - DNA, 201 bp, Homo sapiens
tttatttgaaggaggtatcaacaatcccaattgataggtaaatatactgaaataaagaagagcttgagacctttattaaatacaaaacagaaatatatgacacacacaacaacaacaacaacaacaacaacaacaaaacacaaaaaaggattaagtcattttctgaggactaaattctaaggcaagtgtttggaattctga

SEQ ID NO: 8757 - DNA, 201 bp, Homo sapiens
gaaggaggtatcaacaatcccaattgataggtaaatatactgaaataaagaagagcttgagacctttattaaatacaaaacagaaatatatgacacacacaacaacaacaacaacaacaacaacaacaaaacacaaaaaaggattaagtcattttctgaggactaaattctaaggcaagtgtttggaattctgaatgcatt

SEQ ID NO: 8758 - DNA, 201 bp, Homo sapiens
acttggaaatgggtggttccagagtcacttgaaatttaattttggaaatcaacacaggcagcctaggcaagttcttatttaattcaatacacagctaaagtacatcaccatcaaaactcaggagtcccaggtaaactaactactccttataatattgtctaaggaaaagtgcctatcgaatggaaattggaatgcaagaaa

SEQ ID NO: 8759 - DNA, 201 bp, Homo sapiens
cttggaaatgggtggttccagagtcacttgaaatttaattttggaaatcaacacaggcagcctaggcaagttcttatttaattcaatacacagctaaagtacatcaccatcaaaactcaggagtcccaggtaaactaactactccttataatattgtctaaggaaaagtgcctatcgaatggaaattggaatgcaagaaag

SEQ ID NO: 8760 - DNA, 201 bp, Homo sapiens
ttggaaatgggtggttccagagtcacttgaaatttaattttggaaatcaacacaggcagcctaggcaagttcttatttaattcaatacacagctaaagtacatcaccatcaaaactcaggagtcccaggtaaactaactactccttataatattgtctaaggaaaagtgcctatcgaatggaaattggaatgcaagaaagc

SEQ ID NO: 8761 - DNA, 201 bp, Homo sapiens
tggaaatgggtggttccagagtcacttgaaatttaattttggaaatcaacacaggcagcctaggcaagttcttatttaattcaatacacagctaaagtacatcaccatcaaaactcaggagtcccaggtaaactaactactccttataatattgtctaaggaaaagtgcctatcgaatggaaattggaatgcaagaaagct

SEQ ID NO: 8762 - DNA, 201 bp, Homo sapiens
gaaatgggtggttccagagtcacttgaaatttaattttggaaatcaacacaggcagcctaggcaagttcttatttaattcaatacacagctaaagtacatcaccatcaaaactcaggagtcccaggtaaactaactactccttataatattgtctaaggaaaagtgcctatcgaatggaaattggaatgcaagaaagctat

SEQ ID NO: 8763 - DNA, 201 bp, Homo sapiens
aaatgggtggttccagagtcacttgaaatttaattttggaaatcaacacaggcagcctaggcaagttcttatttaattcaatacacagctaaagtacatcaccatcaaaactcaggagtcccaggtaaactaactactccttataatattgtctaaggaaaagtgcctatcgaatggaaattggaatgcaagaaagctatc

SEQ ID NO: 8764 - DNA, 201 bp, Homo sapiens
aatgggtggttccagagtcacttgaaatttaattttggaaatcaacacaggcagcctaggcaagttcttatttaattcaatacacagctaaagtacatcaccatcaaaactcaggagtcccaggtaaactaactactccttataatattgtctaaggaaaagtgcctatcgaatggaaattggaatgcaagaaagctatcc

SEQ ID NO: 8765 - DNA, 201 bp, Homo sapiens
atgggtggttccagagtcacttgaaatttaattttggaaatcaacacaggcagcctaggcaagttcttatttaattcaatacacagctaaagtacatcaccatcaaaactcaggagtcccaggtaaactaactactccttataatattgtctaaggaaaagtgcctatcgaatggaaattggaatgcaagaaagctatccc

SEQ ID NO: 8766 - DNA, 201 bp, Homo sapiens
gggtggttccagagtcacttgaaatttaattttggaaatcaacacaggcagcctaggcaagttcttatttaattcaatacacagctaaagtacatcaccatcaaaactcaggagtcccaggtaaactaactactccttataatattgtctaaggaaaagtgcctatcgaatggaaattggaatgcaagaaagctatcccca

SEQ ID NO: 8767 - DNA, 201 bp, Homo sapiens
gtggttccagagtcacttgaaatttaattttggaaatcaacacaggcagcctaggcaagttcttatttaattcaatacacagctaaagtacatcaccatcaaaactcaggagtcccaggtaaactaactactccttataatattgtctaaggaaaagtgcctatcgaatggaaattggaatgcaagaaagctatccccata

SEQ ID NO: 8768 - DNA, 201 bp, Homo sapiens
tggttccagagtcacttgaaatttaattttggaaatcaacacaggcagcctaggcaagttcttatttaattcaatacacagctaaagtacatcaccatcaaaactcaggagtcccaggtaaactaactactccttataatattgtctaaggaaaagtgcctatcgaatggaaattggaatgcaagaaagctatccccataa

SEQ ID NO: 8769 - DNA, 201 bp, Homo sapiens
ggttccagagtcacttgaaatttaattttggaaatcaacacaggcagcctaggcaagttcttatttaattcaatacacagctaaagtacatcaccatcaaaactcaggagtcccaggtaaactaactactccttataatattgtctaaggaaaagtgcctatcgaatggaaattggaatgcaagaaagctatccccataag

SEQ ID NO: 8770 - DNA, 201 bp, Homo sapiens
ttccagagtcacttgaaatttaattttggaaatcaacacaggcagcctaggcaagttcttatttaattcaatacacagctaaagtacatcaccatcaaaactcaggagtcccaggtaaactaactactccttataatattgtctaaggaaaagtgcctatcgaatggaaattggaatgcaagaaagctatccccataagcc

SEQ ID NO: 8771 - DNA, 201 bp, Homo sapiens
cagagtcacttgaaatttaattttggaaatcaacacaggcagcctaggcaagttcttatttaattcaatacacagctaaagtacatcaccatcaaaactcaggagtcccaggtaaactaactactccttataatattgtctaaggaaaagtgcctatcgaatggaaattggaatgcaagaaagctatccccataagccaca

SEQ ID NO: 8772 - DNA, 201 bp, Homo sapiens
agagtcacttgaaatttaattttggaaatcaacacaggcagcctaggcaagttcttatttaattcaatacacagctaaagtacatcaccatcaaaactcaggagtcccaggtaaactaactactccttataatattgtctaaggaaaagtgcctatcgaatggaaattggaatgcaagaaagctatccccataagccacag

SEQ ID NO: 8773 - DNA, 201 bp, Homo sapiens
gagtcacttgaaatttaattttggaaatcaacacaggcagcctaggcaagttcttatttaattcaatacacagctaaagtacatcaccatcaaaactcaggagtcccaggtaaactaactactccttataatattgtctaaggaaaagtgcctatcgaatggaaattggaatgcaagaaagctatccccataagccacagt

SEQ ID NO: 8774 - DNA, 201 bp, Homo sapiens
gtcacttgaaatttaattttggaaatcaacacaggcagcctaggcaagttcttatttaattcaatacacagctaaagtacatcaccatcaaaactcaggagtcccaggtaaactaactactccttataatattgtctaaggaaaagtgcctatcgaatggaaattggaatgcaagaaagctatccccataagccacagtcc

SEQ ID NO: 8775 - DNA, 201 bp, Homo sapiens
tcacttgaaatttaattttggaaatcaacacaggcagcctaggcaagttcttatttaattcaatacacagctaaagtacatcaccatcaaaactcaggagtcccaggtaaactaactactccttataatattgtctaaggaaaagtgcctatcgaatggaaattggaatgcaagaaagctatccccataagccacagtcca

SEQ ID NO: 8776 - DNA, 201 bp, Homo sapiens
atcatactgatgattactatatttagacttgataagatattctcacgtaaccattaaggaataattcaatttaactaaaaatttacttggcctttatatatgtgtgtgtgtgtgtgtgtatacacacacatatacatataatgtacacacatttctcactgttatatacagacagagagaaagagaaagagaacagtgaaa

SEQ ID NO: 8777 - DNA, 201 bp, Homo sapiens
tcatactgatgattactatatttagacttgataagatattctcacgtaaccattaaggaataattcaatttaactaaaaatttacttggcctttatatatgtgtgtgtgtgtgtgtgtatacacacacatatacatataatgtacacacatttctcactgttatatacagacagagagaaagagaaagagaacagtgaaaa

SEQ ID NO: 8778 - DNA, 201 bp, Homo sapiens
catactgatgattactatatttagacttgataagatattctcacgtaaccattaaggaataattcaatttaactaaaaatttacttggcctttatatatgtgtgtgtgtgtgtgtgtatacacacacatatacatataatgtacacacatttctcactgttatatacagacagagagaaagagaaagagaacagtgaaaaa

SEQ ID NO: 8779 - DNA, 201 bp, Homo sapiens
atactgatgattactatatttagacttgataagatattctcacgtaaccattaaggaataattcaatttaactaaaaatttacttggcctttatatatgtgtgtgtgtgtgtgtgtatacacacacatatacatataatgtacacacatttctcactgttatatacagacagagagaaagagaaagagaacagtgaaaaat

SEQ ID NO: 8780 - DNA, 201 bp, Homo sapiens
cattaagaattaactccaaaaatttatatccaaaaatgatgagtctcctagtctaattttataaaaatatattccatttttaattagagtataaatatatyggtttataattttataaatatggagtaaaacctggtatatatcagactgagctccacagtgatggattctatttttatgcaaacttgcatctttattact

SEQ ID NO: 8781 - DNA, 201 bp, Homo sapiens
gcacatcaccaacaacgtcaaggtagaaaggaggctttttccctcagagggtgtgtgtgtgtgtgtgtgtgtgtgtgtgtgtgtgtgtgtgtgtgtgtgtgtgcggggtgggctggaagacattcctcaatcaactattgttcttccctacctatgcagaaaagacccacaaccatggtcgtgaacaaagcaaacacctct

SEQ ID NO: 8782 - DNA, 201 bp, Homo sapiens
cacatcaccaacaacgtcaaggtagaaaggaggctttttccctcagagggtgtgtgtgtgtgtgtgtgtgtgtgtgtgtgtgtgtgtgtgtgtgtgtgtgtgcggggtgggctggaagacattcctcaatcaactattgttcttccctacctatgcagaaaagacccacaaccatggtcgtgaacaaagcaaacacctcta

SEQ ID NO: 8783 - DNA, 201 bp, Homo sapiens
cagctactcgcgaggctgaggcagaatggagtgaacccaggaggtggagcttgcagtgagcggagactgcaccactgcattccagcctgggcgatacagtragactccatctcaaaaaaaaaaaaaaattgtaatttcctagtgtctctacctttaccctatgcaacacaaacgattatacacacacacacacacacacac

SEQ ID NO: 8784 - DNA, 201 bp, Homo sapiens
gacgcctgtaatcccagcactttgggaggcaaaggagggaggatctcctgagcacaggagtttgagaccagcctgggcaacgtggcaaaatgctgtttcttaaataaataaataaataaataaataaataaataaataaataaaataaaacaaaattagccagacatggtggaatgtgcctccagtcccagctactcagga

SEQ ID NO: 8785 - DNA, 201 bp, Homo sapiens
acgcctgtaatcccagcactttgggaggcaaaggagggaggatctcctgagcacaggagtttgagaccagcctgggcaacgtggcaaaatgctgtttcttaaataaataaataaataaataaataaataaataaataaataaaataaaacaaaattagccagacatggtggaatgtgcctccagtcccagctactcaggag

SEQ ID NO: 8786 - DNA, 201 bp, Homo sapiens
cgcctgtaatcccagcactttgggaggcaaaggagggaggatctcctgagcacaggagtttgagaccagcctgggcaacgtggcaaaatgctgtttcttaaataaataaataaataaataaataaataaataaataaataaaataaaacaaaattagccagacatggtggaatgtgcctccagtcccagctactcaggagg

SEQ ID NO: 8787 - DNA, 201 bp, Homo sapiens
gcctgtaatcccagcactttgggaggcaaaggagggaggatctcctgagcacaggagtttgagaccagcctgggcaacgtggcaaaatgctgtttcttaaataaataaataaataaataaataaataaataaataaataaaataaaacaaaattagccagacatggtggaatgtgcctccagtcccagctactcaggaggt

SEQ ID NO: 8788 - DNA, 201 bp, Homo sapiens
aggcaaactggggatgaaaagtgacattttggagaaacagtcgcttaaattttcaaaaactaaatttatgcattcacccatcctttttttttttactgtgttttttttttttctaaacagtataaggttttacaaattcaaaaattatagcttaagttgggacaaaatacacaaggcaagaataaccttccccacaaacct

SEQ ID NO: 8789 - DNA, 201 bp, Homo sapiens
gagagaaagaagcctacattgctgacccctgaggtttcaaagacaataaaaccaaaggcaaaggacaaaaaaagaagacaggccgggctcggtggctcacrcctgtaatcccagcagtttgggaagccgaggcgggtggatcacatggtcaggagttcaagaccagcctggccaagatagtgaaaccccgtctctactata

SEQ ID NO: 8790 - DNA, 201 bp, Homo sapiens
atgcatgtgtgaatgaatgaatgaataaataaataaatggcatatttctaaccacaaacaaaacaaggaaaacaaactgcaaaagaacacaaggcgatggyatataagaaacaactaacgagacaaactgtatcctccaagggcctagccaccatgttagatgtggcacatctgtgatataatcccaggctacattaaata

SEQ ID NO: 8791 - DNA, 201 bp, Homo sapiens
tttctaaccacaaacaaaacaaggaaaacaaactgcaaaagaacacaaggcgatggcatataagaaacaactaacgagacaaactgtatcctccaagggcytagccaccatgttagatgtggcacatctgtgatataatcccaggctacattaaatagcctacaacaggaggtgccacaacagtccagagcccctccaaca

SEQ ID NO: 8792 - DNA, 201 bp, Homo sapiens
atttttaaaaagttaggtaggtatctatgacactgcatgggtgggactgatatttaacttgagctctacaggacattaactgagcaacatggggaaggagaaagtgtcttaggcagaggaaacatcagttgggtccagaagcaccaagaaaggatttccttcagttagattcctgtgacacttagaagggtctctgaggca

SEQ ID NO: 8793 - DNA, 201 bp, Homo sapiens
gccttcaatgcagctatgccagcaggtccaaaacccctgcatgttttgagaaatactttttaatcttgtattgaaaatacaacttctcggaaaggctcctmctctccctctccctcctctccctctccccacggtctccctctccccacggtctccctctccccacggtctccctctccccacggtctccctctccccacg

SEQ ID NO: 8794 - DNA, 201 bp, Homo sapiens
gcatggatacttataaaacacatgtaaagctactcgtttaaataacagtagagttgttggtatgcggattataattacagagtaaacgttcacagttacarttccttatcatttgatcctttggagaaaattcctaacattttggaaagattctttagattgccattatttggaatctacccttgtaagatcaaaggatgc

SEQ ID NO: 8795 - DNA, 201 bp, Homo sapiens
cttcaaaaaacacataaaaccttgtttcagccactcaagcagtagaagactttcttgtataggtggcatggatacttataaaacacatgtaaagctactcrtttaaataacagtagagttgttggtatgcggattataattacagagtaaacgttcacagttacaattccttatcatttgatcctttggagaaaattccta

SEQ ID NO: 8796 - DNA, 201 bp, Homo sapiens
cagaacacacacgtaacagttatcaattaagttcagctttttatatgggtgtggtctgtggtgtcccaaaacaattacaatagtaacatcaaagatcacaycatagatcaccatagcatatataacaacaaagaaaaagtttgaaatattatgggaactaccaaaatgtggcacagagacactaagtgagcacatgctttg

SEQ ID NO: 8797 - DNA, 201 bp, Homo sapiens
ttgatttctaactgttgttgataaactaataaattccattaataaatgcattcactcgagcttaagacctatctctcagaagcccggtctccacactgaaktgcctaatgaacaccttccttctggcaaaccagaagcacctcacacccaaagtgtccaaaattgatctcacgtttgccgcatatctcctctttctcctgc

SEQ ID NO: 8798 - DNA, 201 bp, Homo sapiens
ccatgactcattgctcaatgaagaccaaacttcacagcccagcagctaatgacccactgacctttccagttttatcttgcaccagtctttctgactcaagmcactgctttgtcacccaccaactacagagcacagttttccttctgaatatctttcccgtccacctactcaatactcttcttaaaggctcaactaaaaagt

SEQ ID NO: 8799 - DNA, 201 bp, Homo sapiens
agtcttaattatagtttttgttataatcctcacccaggaactatgatacataatcagctagatgtaggcaagtatgttttcccaaaggtgagagttaagcrcttggggacccaatttaatgctgcattaattgctgcgcagatacaattccaggcacagaagctctgaaacagttatttactcagtggcatcaggtgttca

SEQ ID NO: 8800 - DNA, 201 bp, Homo sapiens
tacgatctcagctcactgcaacctcagcctcacaggttcaagcaattcgcctgcctcagcctcccgagtagctaggactacaggcacactccaccacgccyggctgatttttgaattttcagtagagatggggtttcaccacattgaccaggctggtcttgaactccagacctcaggtgatccacctgcttcagcctccca

SEQ ID NO: 8801 - DNA, 201 bp, Homo sapiens
ccacttttctccttgacctacacttggtctcttagcgaagctcttccagtctcatggctttaaactcccctcatgggctgacaactcccagatctatatasccagcccagaccttgcctctgattccatactcaatggtccaaatgttttattgaaatcaattgtatcagaaacacctaaaatttaaattgattaaaacac

SEQ ID NO: 8802 - DNA, 201 bp, Homo sapiens
agggtcaaacaggttacatgatttatctaagaataaatagccaataactaggaggtctaatatatgaatccatatccacttgtctatatttgggagggccmccccaacacaaatcaattgcaggaacctaaacagacaaacacccactcacttgcctagaacttatctgatgagataatcataactaggtaaatagtgcca

SEQ ID NO: 8803 - DNA, 201 bp, Homo sapiens
ccctcccatcgtaggtccagaggcctaggaaggaaaaacggttgcctggaccagacccagggcactgctgctgtgtgcagcctcaggacttggtgccctgrgtcccagcagctccagctctagccgtggctaaaagaggccaaggtatagctcaggccactgcttcagagggtgcaagccccaagccttagcagctttcat

SEQ ID NO: 8804 - DNA, 201 bp, Homo sapiens
ggaacgcacatcgtcatcatgcccttctctatccctttattataacatgagtagtccatggagcagggctgtataaatgaatacacaaagaacaagaattrtcactctaatgctggcatcaacaaactatggcccaaatcttgccttttggaaataaagttttatcggaacaaaacccatccattcattactcattttctg

SEQ ID NO: 8805 - DNA, 201 bp, Homo sapiens
gctcatctggtcaaacatcttcccatgactcattgctcaatgaagaccaaacttcacagcccagcagctaatgacccactgacctttccagttttatcttscaccagtctttctgactcaagacactgctttgtcacccaccaactacagagcacagttttccttctgaatatctttcccgtccacctactcaatactctt

SEQ ID NO: 8806 - DNA, 201 bp, Homo sapiens
gcagagttattccccctagctgtccttaaatatgactaattgttgccaagaacatcaatagcattctactcaactgtgctgtcttcttttctaatcactgyccaaaaggccacacagtctgacacagttccttggagaatggcaacaccgtgttgactggataggcccccagagtcttggcagtgagttctccaggaccag

SEQ ID NO: 8807 - DNA, 201 bp, Homo sapiens
gcacaactcctgcctccttccccttcagtccctgtggaggaattccactggactcttgtcttcccttaagaagtaacccccagttcagacctcagggctgytcaaggtccacttttctccttgacctacacttggtctcttagcgaagctcttccagtctcatggctttaaactcccctcatgggctgacaactcccagat

SEQ ID NO: 8808 - DNA, 201 bp, Homo sapiens
tcttctaagtttcctctttcaatggttcctgtaaattctttactgagccaaaaccactttgcaaagaaaaactgcttatgttttcagaaacccccaattaytttcaaagcttcctctctggccccttggttttataccgcatggagctatactattcaacagccatctgcaaaaggtagatgagctgtcaaccaatttttc

SEQ ID NO: 8809 - DNA, 201 bp, Homo sapiens
cttcctctaaagatgatggagaactgcttccctggataaattagcacaactcctgcctccttccccttcagtccctgtggaggaattccactggactcttstcttcccttaagaagtaacccccagttcagacctcagggctgttcaaggtccacttttctccttgacctacacttggtctcttagcgaagctcttccagt

SEQ ID NO: 8810 - DNA, 201 bp, Homo sapiens
tgtatattacaaactgaaacaacaacaacaaaaccagaagaaaagtaacacaggaaaaattggctaacaagtcaatgaacctgtgactttactgatacagsaattataaaggtcaaagcttattttcaccctatgtaaattaaatttaaatgaactcctaaactatatattacaagatccagaattaaatttagattagcc

SEQ ID NO: 8811 - DNA, 201 bp, Homo sapiens
ggtcaaatccaagcagccgagctccagaggtaatatgcttaacagctacagtacagtgatttgcaaatcactgtattaacgtactgatttccagatcactrtattgaatgccttatgaaaagagatcaccatctatacaaaacaattagaaggctttgtgtaggaggtggcatttagcctctaattgaatactattacctt

SEQ ID NO: 8812 - DNA, 201 bp, Homo sapiens
ctgcctcagcctcccgagtagctaggactacaggcacactccaccacgcctggctgatttttgaattttcagtagagatggggtttcaccacattgaccargctggtcttgaactccagacctcaggtgatccacctgcttcagcctcccaaagtgctgggattacaggcatgagcacctggcatcttcacttttttcctc

SEQ ID NO: 8813 - DNA, 201 bp, Homo sapiens
aaggagctaggaagagaggctgtcttattaaatccatgaaactggagctagaatcattgaactttaacgtgtaaagaccttccaggtcatcaaatcctttyccaagaatcttctttacagtatccccgacaagtgattgttctcattgtgcctgaaacactactggtgacagggagactggcaaatctcagaaggcagcct

SEQ ID NO: 8814 - DNA, 201 bp, Homo sapiens
attggataagagactgaagttttctacagggcaaaaaaattaaaatatcagtcaggttgacagctgggaaaatgagggtctctctgcgacaagcttgctgsagtttttggtttagtgaggagctgcaatgttatttcaccacaccaccacttcatatgtaactagaattgtgggctatcatctggtgaactaatattccac

SEQ ID NO: 8815 - DNA, 201 bp, Homo sapiens
ctagcaacacacgtaaagttacacaggtgaacagaaaagtcagtcttaagggttaataatctcagatatgaattggagaaagctcaaaagtggcaaaggaycatcaatctatttcaaagatgtgtttatctttttgtatttcaaaggaaaggcctttttgaaagacttggcagagaaatatgcatgtgaatagaggcacat

SEQ ID NO: 8816 - DNA, 201 bp, Homo sapiens
acctaagaaaaactttcctgaagattgagcaaacctctgaactctttcacaggcatgatacttgctgtgctcctcagcaccagatgagctgtaattccagmagaatcaaatctatttgctcaaaagtaatacctttccagcaccacagaaaatacgcacctctcataaaggatgagtgccacaaacaagctcagtatccca

SEQ ID NO: 8817 - DNA, 201 bp, Homo sapiens
tctgattcagaaaatctacctaagaaaaactttcctgaagattgagcaaacctctgaactctttcacaggcatgatacttgctgtgctcctcagcaccagmtgagctgtaattccagcagaatcaaatctatttgctcaaaagtaatacctttccagcaccacagaaaatacgcacctctcataaaggatgagtgccacaa

SEQ ID NO: 8818 - DNA, 201 bp, Homo sapiens
agcacaggaacctcccattctctcaagggctgtgtgatgtgacacagtcactctccaggtcataagttttccttgggaagtgctcaatgaggtgatgccaygtgcacatttaatagcacatccactggatggctttatacagaacgtgtcacattcgtattgccaacacatctcaggcttgcactccattttacccctggt

SEQ ID NO: 8819 - DNA, 201 bp, Homo sapiens
tttatctttcaggatgactgtatcagtgggactatgtaagttcagtacttggcatagggcctggtttctccttgtggaaggcagtggttctccatcacaayaccattcttgccagcaacccttggctccctaggtaatccaaagagcctggatttccattcatttacctatgcaactctgcatgaacctgaagaacaatca

SEQ ID NO: 8820 - DNA, 201 bp, Homo sapiens
aaagaatattttattactgaaacttcttaaacctatggccttgagtccacttcactggactctctccttttatcccctaccctccgtctttactcaatgcycccaggagaatgctgtcctcagacagaaaaatcaaagctaatttaaatagattgcaaattgccaacatcggttcatattcacagtatatcagatccagta

SEQ ID NO: 8821 - DNA, 201 bp, Homo sapiens
gattagggcatgactatgtaacacatgagggctgaagtacaatttaaattctggtggcctgacactatttcccagaaaagaacaagacgattgcctgtccrttcaaggatggtggcaactccacagatccttagcaccaagagaatggtggcagaaacaagtctggtcctgtaccttcaaggtacaataccacactggctg

SEQ ID NO: 8822 - DNA, 201 bp, Homo sapiens
gttcttttatagaatgcttcatatggagattagggcatgactatgtaacacatgagggctgaagtacaatttaaattctggtggcctgacactatttcccrgaaaagaacaagacgattgcctgtccgttcaaggatggtggcaactccacagatccttagcaccaagagaatggtggcagaaacaagtctggtcctgtac

SEQ ID NO: 8823 - DNA, 201 bp, Homo sapiens
aatttgatcaaaagaaaacatgcacatacacacacagtattcgtgcaatattttctcagattctgaatcttgttttattataactagtatgatcatacccrtcgcatgtacaaaaagaacaaatcaaagaggtcataagaaaaatgtaactggctcttgtcagttcttttatagaatgcttcatatggagattagggcatg

SEQ ID NO: 8824 - DNA, 201 bp, Homo sapiens
agtacaaaacaaagtggttgattttagatgcaagtattccaatatttctttccaatctctccttaaactaatttggggtatgggggggatttacccatctkgtatcttcatccccaagaacaaagtttctagaccgtacggaaggaaacgagaatcaacaagagtgggcatcattcccaagtttctctgggctggccgtgg

SEQ ID NO: 8825 - DNA, 201 bp, Homo sapiens
acatggactttggagccagatggccaaatcatggccctacccttgtgaaactgagtaagttacttaacctcaacagttacttttcctctgtaaaacaggamtagtgtaacaatgattacctaataggattctctggggattaaataaggtaatatatgtaaaactctttgtagcaccagggacttaggaatgtgacctatt

SEQ ID NO: 8826 - DNA, 201 bp, Homo sapiens
ttcatattcactctgcatattgtcctgccccataaacagcagaaaaaatacttgacatgatttgtccaatggtacggttaatgtaaatttgtggcaggtamatgtgatttaattcaaatatcaaaggtgtgatttaataatttctttctttaaaacagaaagtcttattgtttgatataagcataaaacatgttttccatc

SEQ ID NO: 8827 - DNA, 201 bp, Homo sapiens
aggcgggcggatcacttgaggccaggaattcaagaccagccaggataacgtggtgaaacctcatctctactaaaaatacaaattagccagctgtggttgcrggtacctgtagtccctgctactcggctggctgaggtatgagaattgcttgaacccaggagtcagaggttgcagtgagccaagattgtgccactgcactcc

SEQ ID NO: 8828 - DNA, 201 bp, Homo sapiens
tggcgagtcctgcctgcagcaatgattactgtagtgttctgatggtacatagatttctttcgtttttgtttatttgttttaagatggaatctcactctttygcccaggctggagtccagtggcacaatctcggctcactgcaacctccgcctcccaggttcaagtgattctcctgcctcagcctcccgagtagctaggatc

SEQ ID NO: 8829 - DNA, 201 bp, Homo sapiens
gataactactgggtattcgtacagtgaaaatctacaaagtaaaggaatgaattagacaaacatgcagagcaaaaaagtggtagatctgatcagtacgatgyaccttatgccaagattggaaaagtgaaaagtaatgaacaagaatagtaaacaccaagttccactgatgatctccgagtggcagcagtcatgtggtgtggt

SEQ ID NO: 8830 - DNA, 201 bp, Homo sapiens
tctattaaaatgctggctaagcaataacatcttaattaatacttttgcttagtttaagcactggaactgtaatatctggagagagacaggactaagctgamagatctggtttctggttctgttctgtgaccttgagcaggtctttaatctcccccagcttcccttccagtgttcctaacccatcgagtatggatgataata

SEQ ID NO: 8831 - DNA, 201 bp, Homo sapiens
agttactaatcactaacaatagttactctcactaaagatgagaaactcccaaattactctaatgaactgttgagtgggtattatgttactgaactatctaytaaaatgctggctaagcaataacatcttaattaatacttttgcttagtttaagcactggaactgtaatatctggagagagacaggactaagctgacagat

SEQ ID NO: 8832 - DNA, 201 bp, Homo sapiens
taacaatcttggttgtccaatgacagtcacatccaggattcttggatgtagataaaatcaataggtatgtgattagatagcagactcagggtggctagagmcatagacaggtcaccatttgagatgatgaatggctttctatcaacctatagtcccctacgatgctaacatttactataatcttatttgggctacgattta

SEQ ID NO: 8833 - DNA, 201 bp, Homo sapiens
cctaacattttggaaagattctttagattgccattatttggaatctacccttgtaagatcaaaggatgcctgagatcaaaaactgaaattcacacacattygtatttatatattattccattggtgttcctactaggatattaaagatcatttctttctacacaatatttttgtcatcaagatggtatggctcatgcctat

SEQ ID NO: 8834 - DNA, 201 bp, Homo sapiens
ctcaaccaccccaaaactcttccaagtattctagagtgctatataacaaactatgatctgtgcaaaaagcactaaaactgtgctttcatcttgttaagaayagtaaataattataatactattaaaaacttacttgaactttgcttccacctcttcagcagctttctgatattgttcagtggtgactctgtagaactctga

SEQ ID NO: 8835 - DNA, 201 bp, Homo sapiens
ggttttgaacttcaggcctcaagcgatcctcctgcctcagcctctcaaaatgctgggattacaggtgtgaaccaccacagctgaccttatctcattcttcragttcttatttttcatgtctccaactaaacctcacatccactgccaggttacttttccttcaggagcccagaaatcagagtgctcatctggtcaaacatc

SEQ ID NO: 8836 - DNA, 201 bp, Homo sapiens
aaacaacttacgaccattttttagataaggatcaaagacaactttctcagttaacttttaaactttctcagcttatatgccctacagaaggtgacagttayaatttacattttatagatggaagacacaagtcaaagacataataaataacctgcctgaggaattttgtgttctaaataaccgagtccatgtgacagccaa

SEQ ID NO: 8837 - DNA, 201 bp, Homo sapiens
ccacaaacctaagagctgccacaagaatggtttgatcatttacatgtttacacataaaccacttatacgaaaggaaagaagatgcttggtgcaacaccaayaaaccccaactgccacagcaagaacagagaagaatgctccaggtcatggacttacgaaggacgtggccaatctggctgcaccatcagcagcttatttcac

SEQ ID NO: 8838 - DNA, 201 bp, Homo sapiens
ctgtatgaatataaagtagaaaactgcgctttttatccctatattccaatcagctttgccatctctcctgcccctttctgcaggataccactgagttgagyggaatactgtctgttttgtttctccattccctcaatgatgaccattcggattgttgctagtttttgatactatgaataaacctgctatgaacataggtgt

SEQ ID NO: 8839 - DNA, 201 bp, Homo sapiens
cagaaatgctgcttgggtccctttccaatcaaatctcctctattcccaccacaggcaaatgttgcctatttttgaacatcgtttaaatgaaccacataggwagtactgttttgcatctggcttctttgtgtgtaccatgatgtttgagatccatccgtgctgttacatgtatcgatagtttgctcttctctattgctgaat

SEQ ID NO: 8840 - DNA, 201 bp, Homo sapiens
gaagtgtttttgaatttgggttctggaatttggaatatttgcatatgcataaagacatatcttggggatgggaccccaaccaaaatatggaatccatttaygtttcatatatactatacatagcctgaaggtcattttcttcctgaggcacagtcaacagactacatgttgtggacctgcctttgactgtgacctgtcaca

SEQ ID NO: 8841 - DNA, 201 bp, Homo sapiens
tcatcttgttcaagagctctgcttgggaaacaaaggtgtgaggcattgacctcctgcccacagcttgcacaagcacaaaacatggtaacagatcaaggatygatacccttctctcttctcctccttgccaacacacccctttttcagaactgatggcttcatagttggaggcccagcataaagcaggccaagcaagcttct

SEQ ID NO: 8842 - DNA, 201 bp, Homo sapiens
aatggaggtgttacgaatgtaaatcagcgaagcctgatgcagaaaacagcagcatctgggcatgcagcttgcaaagtaatgagactgtgataatgcactascacccagctttgatcacttcatcttgttcaagagctctgcttgggaaacaaaggtgtgaggcattgacctcctgcccacagcttgcacaagcacaaaaca

SEQ ID NO: 8843 - DNA, 201 bp, Homo sapiens
agtgctgggattacaggcatgagccaccacgctcggccaccaagtaggtagaacacttggttgaatctttatgccctattaactctgccttttaaaatacrgcatttcaagttcttcaagtctgactccagtcttgctttgtggtctcatattccactagacctctcccacactgtttcagccattttcactattcaatgc

SEQ ID NO: 8844 - DNA, 201 bp, Homo sapiens
cataaattaaaaattagacatccagataaaacacatctgaataaaccacatacgtttgtctctcacacattcattgcaatgacacaaagaacctggtaccwtgtgaattcttaggacaccattcaaagatatcatagctaggagtaatgaaaactaatcatataccatttcaattggtatgaaaagatgaggctctttttc

SEQ ID NO: 8845 - DNA, 201 bp, Homo sapiens
cttcaaactcccaagtctataattcttagtttttagacaacagtttcctctagtgtaaattcagagctatattagatccctttcagagtaaaaacactctyatttgcacctgtgagtgagttagcccaggcttttaaatccagaatgtagtttaaatgcacacacacgagaaaacgcacttttttttttctttttgctttt

SEQ ID NO: 8846 - DNA, 201 bp, Homo sapiens
tctgaactgaaggaattcccaattaatgacaagtcttaatgtaataaatactccatcatgttttgaattttgctatagtcttaattatcctattgataccrtcaagagaaaagcccagcttctatctggcatgtactagagatgaactctggcaattagctaatgtccaacaaaaatcagccctgtattaacagcctgtaa

SEQ ID NO: 8847 - DNA, 201 bp, Homo sapiens
acgtggcaagactgctccacattacggtggggctgccactaatgcaagcaaggtagtgacccactaggttaatgggacttgacaatcagtccagttttaaytgagccagaaaaaggaatggttctcttatccttaaagtacacaggaattttctcctctatgtcttagtttcatcagtgctttgctcagaaaatgcctata

SEQ ID NO: 8848 - DNA, 201 bp, Homo sapiens
agaggattgcctcccacatttgcacaaaggatttccctagataaagaagatccgagaacggccaaatcttgccagaattcaataaatggcatacaaaagcytgaaaaaaaaccctggaatatcaaaatggaagtaggttcaactatgacaaatgtggctgcctgaaaaacagacaagagacacaaagggcatccctgtctt

SEQ ID NO: 8849 - DNA, 201 bp, Homo sapiens
catcaaatccagccacttttagatctccaatattggttataagtgccaacatttagactgaaagaactgtttaacagatggagcatttccttcttccagtrtttaggagtgaggccatctgactgaagtcttatttccctgcttataaactaaggcctttgcccaggagactatttcaaaaatgtaccaaaggttaatatg

SEQ ID NO: 8850 - DNA, 201 bp, Homo sapiens
gtagagatggggtttcaccatgttggccaggttggtctcaaactcttgacctcaagtgatctacccatctcggcctcccaaaatgctggaattacaggcaygagccaccgcgcctggcctggaatggaccactttgtatttccattgccattatcctagtctgaaccaccataaccacttgcctggactatttcaacagcc

SEQ ID NO: 8851 - DNA, 201 bp, Homo sapiens
atggctgccttatgacagccccttaatactactctccagttgagtatgtctggagaaaaatcacaaaactagggaaactagaatcactataaattcacagrcactaaatcctgccacaatgttatggcacttctttggtaaactcactctccccctattactaggattattcatgccatctgcagcctcctcaaaaatctc

SEQ ID NO: 8852 - DNA, 201 bp, Homo sapiens
cctacttaatattccataaattaaatataaaaactagaagaaaatacaccttcgaagtattttatagctaataaatgtgagaagttcatacgggtgtatargcacactgaactgcacgtacctctgtgaagcatccacacggtaactctgtaatttgaaaattctaacatgtttctctttttgttctgattaaatattcag

SEQ ID NO: 8853 - DNA, 201 bp, Homo sapiens
aggtagtgtgaaaagagtgagttttcaattctttgaaagaaagacaaagaagggcaggcagaaaggagggcatggtccttgcagacctggtgtggttaagraataacacttcgatttcctaagaagggtgtccacagtgaaggatattacaaaatgaggctggtgagatggggaggagtggaaggaaatggtttgctgggt

SEQ ID NO: 8854 - DNA, 201 bp, Homo sapiens
caggtgttgacaagccactggcctttctaaatgagagggtgaagttataaaggtaccatcttgagaaggcggatccagtgtaaaaataaatcagatggatrgaagtggaactccatggcagagaggtcagtggagcagcacccagctataaagatgaaacaagctgatgaagagaatgatccggcaagaatggaggcatgg

SEQ ID NO: 8855 - DNA, 201 bp, Homo sapiens
tagagggttggaagggttgggtagtgctaagaagggaggggccgggatatggacagtctgccaagaagagacagcacacctagagtctatcctgcaggtgwtgacaagccactggcctttctaaatgagagggtgaagttataaaggtaccatcttgagaaggcggatccagtgtaaaaataaatcagatggatagaagtg

SEQ ID NO: 8856 - DNA, 201 bp, Homo sapiens
tttttcacaaagaattgccctttgggatgaattttatatgctcattctcagctgaggggtgactcgggtggtgcgaagtttggtgaaatttcatttgagtmgtccatgcataaaaatacattccagtacccctacctcttccctgccgtgatcaaatttaagagagtgcttttaataccaagagaagtcaagaacagttta

SEQ ID NO: 8857 - DNA, 201 bp, Homo sapiens
agaaatatgttcatcatgagccatatacaatgcatcaatcatagatttttccttaaataactattttcttaaatatctatataatgtattctacttatggkgataccctcgaggctttgtgagttatttccaatccctcatgatgctactttggaatgttcatcaaaattggtcttaggattaaaaacatgagggttggtt

SEQ ID NO: 8858 - DNA, 201 bp, Homo sapiens
aacttttcaattttgcaatatgtttttctttttcaataatattgggtccttggaaatgatggggggcagggtggaaaaacctaggagagcaggactctaayaacatgtggccacgtgacagctggtaggggttggtgtcttctctgtggtgctcaggggagagtaacacaccctgacacgatgggactcccctgctgcctg

SEQ ID NO: 8859 - DNA, 201 bp, Homo sapiens
gcttaaaaaacatggtgaaggacataaattattaactaccatttctgattattaccttaggagactttcctgtaagttaaattaactgatcaaagagaaaygaaaacagttttagcaaaaacaaagccaagggagtattcagaagtcccctcttaagactctataacacagttacactcggttatctgttttaaaactatc

SEQ ID NO: 8860 - DNA, 201 bp, Homo sapiens
attcacctcatgttatggactccttagaaagaggtagtttaagttgtagataagcatgtatcctgggttgagctattagtcatgcaagttaaagtccatgmgttatttatgatttgaaatgtgtcaaaatatacttttatcaccacaaatcaatactactcacttccagggctcttgatttcctgtttggtgatctgttct

SEQ ID NO: 8861 - DNA, 201 bp, Homo sapiens
atgactaatgactaatagctcataggaaagcaaggttacattctatcctagtgttgacaactgatcgtgtctccaatgtgtctcagatttaaaagcagggsgaaggaggtgaggagggaaggctagaacaaccctgaccagatatgcagcccttcctcattaacatacgggaaaagactgtaaaaatgagcatccacacac

SEQ ID NO: 8862 - DNA, 201 bp, Homo sapiens
actttattttccagctatccagataatactaaccctcccgtcggatatttgtagagtataaaaattttacaccaagtgatattattataactacatcaaaytagactgcagaaaggcatgctgtgtaacttaaacactagatttagttgggttagaaggtcaaatctatggagtttgtcagcagaaggaatcaacgtttcc

SEQ ID NO: 8863 - DNA, 201 bp, Homo sapiens
tggcttgttgtcatgtatagtattttccatgtttagcatgtccagcttgttctctggatttaacaggaaacataagaagaaaatgtaagaagttggcccaygaggaactgctaaaataggcagtcgggactacgtatcttgccggagtctcttaacaggggcacagctggggtcatgaggttagcctaaattcacaaggag

SEQ ID NO: 8864 - DNA, 201 bp, Homo sapiens
gagcagtagaaccaagggagggtctggtcacagctgtgagctagccaggggactggggtcacctactgtttcaatgggagcaagagaagaggggaaggggrtctcttttcaaggcttccatccgattcccacatcatcttccaatttgttcttaaggctaaagattcattcctagggttggtctgatgagacctctgccag

SEQ ID NO: 8865 - DNA, 201 bp, Homo sapiens
ccagcatcccagctgggcaattaataaatgtcatcaagcgataatgataaagcagctttcgaacacaataaaaacatgctcctggggggcttcccagaaarttaaccttcttgattatcttcgtgctctctgaaagtggccaccgtgtacatcggggggaccctgatgtgggtcggggagagaagcagggtgactgggagc

SEQ ID NO: 8866 - DNA, 201 bp, Homo sapiens
tcagtcaccctgtgaccagcatcccagctgggcaattaataaatgtcatcaagcgataatgataaagcagctttcgaacacaataaaaacatgctcctggrgggcttcccagaaagttaaccttcttgattatcttcgtgctctctgaaagtggccaccgtgtacatcggggggaccctgatgtgggtcggggagagaagc

SEQ ID NO: 8867 - DNA, 201 bp, Homo sapiens
ttcagagttgctaaaattgagaaggtaataaactaatgtcggcgttgctttgtaaaggtatcagtgcctatgcagtcccccaaattgaatcgttacagaaktggcaatccttccaagccctgtcgctaatcagcaacctaatgtggaagagataagcaaagggaagaggcagcggtgcgatgctgagggagtgtgctcacc

SEQ ID NO: 8868 - DNA, 201 bp, Homo sapiens
gcagaagaaaaatgtggtttggaatgactgcacttatcaagggacctgagaaaaagactgcggacgccaggcaaacctttaacctaaacttggaactgggrtctcaggtgtgaaattgatgcttcaccaactgaatttcgagtgcttatcagtattcacaggatcacaccacttatcaaatgtcattcatcagaaatttta

SEQ ID NO: 8869 - DNA, 201 bp, Homo sapiens
aaatgtggtttggaatgactgcacttatcaagggacctgagaaaaagactgcggacgccaggcaaacctttaacctaaacttggaactggggtctcaggtrtgaaattgatgcttcaccaactgaatttcgagtgcttatcagtattcacaggatcacaccacttatcaaatgtcattcatcagaaattttagaattacta

SEQ ID NO: 8870 - DNA, 201 bp, Homo sapiens
tcatgacattatataatgctactaaattcacctatctcacttttatcagatcagcaattttatcaacaattatttcaaaaagtgacaaagagaaacaaaaytgcttaaaaatttacactgcagaaaacttgatacatttgccaatgacaggtaatactcttcgttcaatatgagaccttaattgccaccagagtcattgag

SEQ ID NO: 8871 - DNA, 201 bp, Homo sapiens
tattcaatgccctcaatccttgcatgttaccttctggcatataaatgagaattcttaaaattacatatttgtgtgcaaagccactgactaccttcatttcrgggcattaactacattagcagagtcaggtactgctaaccctccggatctcctttcagaatgtcttttttaaaagccaaacacaatgttatccctttctct

SEQ ID NO: 8872 - DNA, 201 bp, Homo sapiens
cacttcctaaacactatgaaaatctgaaatgttgggaacgggcttggagtaaaagagaactggatttgaacctgatgctgcctgttgtcaggtcaaggtasttgcccactccaagctacttttgtaaaataaacctgtagaaagcagagctaccacatccaattgctcctcagtttgatggcagagtgggggtcacctagc

SEQ ID NO: 8873 - DNA, 201 bp, Homo sapiens
tggcagtactaattaaatcttgattttttaaattgtaagtcataagccttctctatttcctaagaaaatagcagtcttaatctaaaattcatattctgttstgtatattttgtgtaaattgggagttagtttgtcaaaagaaatattaaataataatttttcacaaccctcattttaaagatgaaatacttaaggctcaaa

SEQ ID NO: 8874 - DNA, 201 bp, Homo sapiens
atattctaaacaaatgctttggctagtccaagggtcttctttaaggtttgcctaggaatcttttgacccacttagccaccaaaatttctgggctataaatytgagttcaggatcaaataagaaagtccaagattcctaaacttatacttgatcctgagtattcttaggaaatgtgaggaaattcttattcctcaaagaaag

SEQ ID NO: 8875 - DNA, 201 bp, Homo sapiens
cgcagcttcagagtcatcccccatgacacaggctcaaggatagttgtgagcctaagacagaaaagactgggtcccaacattagggaatcatcaaattatcyaaaatgttacatgagagaaaaataaaattttaactttttgagccatgtaacttagggtctccattagaacagtggaacctatattcgaccccacatatct

SEQ ID NO: 8876 - DNA, 201 bp, Homo sapiens
cccaagacgttaatctgaagcatcccattcttcaaaatagttggcaattatatgaaaaagaaaaatgcatacataataatgctaagtgtcctaaagaatgrctctggtgataaagtgtcagaaaataactgttttatttaagttacttgatgatgatctcattcaagatttcttgtggttaactgcatgataaataccttc

SEQ ID NO: 8877 - DNA, 201 bp, Homo sapiens
tggaaccaacctaagagaaagaccccttttcctgcttgcctcttagtggacacaggcacttgtacatatcaggcttcattatctgatttgctttagctcaygcattccacaaacatttatgaggcacctaactttataatacggtcactgtggctgagcgtacagaacatgggaagcgaacatacacttctttcaaaggct

SEQ ID NO: 8878 - DNA, 201 bp, Homo sapiens
tgatttgctttagctcacgcattccacaaacatttatgaggcacctaactttataatacggtcactgtggctgagcgtacagaacatgggaagcgaacatwcacttctttcaaaggctcataatcaaatgggaaaaacagacaagtaaacatgtaattgtaacacaatgaagtacatactattacaaggatcagtactaaa

SEQ ID NO: 8879 - DNA, 201 bp, Homo sapiens
ccagagctcaggtcccactgttgggctgccttaagtggaaggatccactaagtggtgggagatgaggcagcctctgctgctgaggcccagtggtatgccascagctgatgagtttgcagccccctcttaagaaaacctggagaaagtctctccccatccctcacccacccaaaccagttgacagggacatgaaaaccaaaa

SEQ ID NO: 8880 - DNA, 201 bp, Homo sapiens
tccaaaggaatatatgctgcaaaactaattttattctgaaaaactacttgaaacccactccagcaaaaggataaatcgcctcttaagaatcaaattttatmtcattgaacacaatcacaacaattgttattattagctagttaaacataggccttagaaaacaatttccaacagtcttacttctgaataaagatggcccta

SEQ ID NO: 8881 - DNA, 201 bp, Homo sapiens
atccgtagtctggtggggtctgtgttattcagctttcaccttataggttctactgtctctgtattggttccgtaagtactgctgttgggctgaatttcaaygctgcataaatttaacactgcataaattaacataggaaattccctaaagaatgagggagaagctttgcaagttataaaaaattgcttccttcatttaagg

SEQ ID NO: 8882 - DNA, 201 bp, Homo sapiens
ctgcataaattaacataggaaattccctaaagaatgagggagaagctttgcaagttataaaaaattgcttccttcatttaaggaactgctaacacttaatyttaatgtggagaaagaaattccttgcttttgctcatcattcacgtatctgggcctgcagaaactccttttataaacagctgggtaaatcaccaaaagaag

SEQ ID NO: 8883 - DNA, 201 bp, Homo sapiens
tataaacagctgggtaaatcaccaaaagaagagagtggttcaggcatgaacactgctcttttcccaagtctttttctcattccagccactgaagaacaacyggcagctcacaaataagaacagcgcccctggagacctgagattgcgtgtcatttccgcttattaaaaccttactaaccatcctaaccgcttgcctcaaat

SEQ ID NO: 8884 - DNA, 201 bp, Homo sapiens
aaagaagagagtggttcaggcatgaacactgctcttttcccaagtctttttctcattccagccactgaagaacaaccggcagctcacaaataagaacagcrcccctggagacctgagattgcgtgtcatttccgcttattaaaaccttactaaccatcctaaccgcttgcctcaaatatttctgttaagcagtaatctcat

SEQ ID NO: 8885 - DNA, 201 bp, Homo sapiens
ctgaagaacaaccggcagctcacaaataagaacagcgcccctggagacctgagattgcgtgtcatttccgcttattaaaaccttactaaccatcctaaccrcttgcctcaaatatttctgttaagcagtaatctcatcaactgatttttgaatcacagctttcttggaggggttgactatcatagcagcatgccagctact

SEQ ID NO: 8886 - DNA, 201 bp, Homo sapiens
tctggtcacagctgtgagctagccaggggactggggtcacctactgtttcaatgggagcaagagaagaggggaagggggtctcttttcaaggcttccatcygattcccacatcatcttccaatttgttcttaaggctaaagattcattcctagggttggtctgatgagacctctgccaggtagctttgacctatagggagt

SEQ ID NO: 8887 - DNA, 201 bp, Homo sapiens
aggtggtatgtcccagggaatggtcccagacgtaatgcagatctgacagcaaaccctttcgacacccttccccttttttaaaaaacagaacttgggcacaktttggtctacccatgagcaaatactattggcttctcattcccgctcctttccatttctcctgtaaggtaggtggtgtgcataagcatgcctgttcatagg

SEQ ID NO: 8888 - DNA, 201 bp, Homo sapiens
ctaacattagaaggccataaaacacaagccatggcaccttccattcaggataaaggtttcaaaacatttccaatatgcattatggtaaaccctccatatawtcatagagtcagcaattgacttttattgactgctttcattcctgctgatggaaaaagcccctattaggcaaaaataatgaaaggcagactttcaagatac

SEQ ID NO: 8889 - DNA, 201 bp, Homo sapiens
ccatagaagtagcccttggttataataattgcaaatttgaagattattctctttgtcctttcaaaagatccacaggtattggaatgaaactgttaaatccraatctccaaaggatatatcaatgtgtgaatgagaccaagtaatcttaacacagaccaaactttttatttgaatatctcaattaggtttcagggtcaagaa

SEQ ID NO: 8890 - DNA, 201 bp, Homo sapiens
ttttcttcattacactagcgtcttttgtattggagaaacactatcaggaaaagacaagaactggttgattatgagcagtatcaaatgagctgtaatggagktgttacgaatgtaaatcagcgaagcctgatgcagaaaacagcagcatctgggcatgcagcttgcaaagtaatgagactgtgataatgcactagcacccag

SEQ ID NO: 8891 - DNA, 201 bp, Homo sapiens
tacaagttttcaagcattctgccaggactcaataaatagtatgaacaaattactgcatatgattattatattgaaaagtaccagtgctactgtacaaatgwttcattcacaaatactgcctttgaaatccctttatcaaaagtaattttcaaaccttatccaagcctacctacaaggtcctaggttgaagaggaggagagt

SEQ ID NO: 8892 - DNA, 201 bp, Homo sapiens
atctggtcaaacatcttcccatgactcattgctcaatgaagaccaaacttcacagcccagcagctaatgacccactgacctttccagttttatcttgcacyagtctttctgactcaagacactgctttgtcacccaccaactacagagcacagttttccttctgaatatctttcccgtccacctactcaatactcttctta

SEQ ID NO: 8893 - DNA, 201 bp, Homo sapiens
ggacactttgatccatcaattacagaacattcatttaaacactccaaggattaagagaggtagcaatttaacatcaccttcataatcaagggccaggtaamgtctatgatttaaagcctttcaaggtacatgtgaagaaatgaaaacagcctaaccacgagaaaggcagatacccaaatttggacatgcccatcattttat

SEQ ID NO: 8894 - DNA, 201 bp, Homo sapiens
aaatttaaatctgtaaaacaaaagcctattcttccattaaccagacattggtgaatgttgctcacactgcttacctgttctgtttttctgttccttaagayggatgggaaatatgaagacaatagtggaccagtgtcaggagcgttaatagctacggaattaactaaccagcccatataaaaaaatcaaaccaataacatt

SEQ ID NO: 8895 - DNA, 201 bp, Homo sapiens
tgccaagacttcccaaggccttgctttttactctatatgtgaatctctaagatgagaactactgttcatgattctcaaactgatttgctcatggagcatcytgagggaagagaatctcctaaaatggtccatgagaaacgccagattaaagaaaagtccaaccacatgtcaatcctgtactttccggcatgcaacttttct

SEQ ID NO: 8896 - DNA, 201 bp, Homo sapiens
tcactcatttatctattggataagagactgaagttttctacagggcaaaaaaattaaaatatcagtcaggttgacagctgggaaaatgagggtctctctgygacaagcttgctgcagtttttggtttagtgaggagctgcaatgttatttcaccacaccaccacttcatatgtaactagaattgtgggctatcatctggtg

SEQ ID NO: 8897 - DNA, 201 bp, Homo sapiens
gctgaagccagagatacaggaatcatctttctttcttacaccatcttatatccagtccagcacatcagacaatccccatgttcaggccttattggcttccyttcttctttaacaggcatgtaatgggtttggattttattctaacggctatggaaaagcatggacggttttcagcaaagaaacgatataatctgactcaag

SEQ ID NO: 8898 - DNA, 201 bp, Homo sapiens
agactgccagggttcacttcctggttttgccacttactattcccgcgaccttggataaagtacatacccttactgtgtctcactgtacttgtctaaaacaygaggataacactcctagaaagctggaaaggtttaattaaataactcagcattgcagtgctagcaaacacattgacatacatacaagaaaacttgcaataa

SEQ ID NO: 8899 - DNA, 201 bp, Homo sapiens
tactgaaggtcattaattactaaagttaattttgaggcagagcctggggaagttgaagttcaaatagttctaggataggagaaacatctctgacctgaaaygagagagttgaaacaagtgcacactcagtcttagaatggaaagtgacagtaaacttgtgtgactaaacctaaatttgcaggaagttatgccccaggattc

SEQ ID NO: 8900 - DNA, 201 bp, Homo sapiens
ccccattcctggacgaacacattaattttaaaaaaatttatccaaggtttattatgtgccaggcactatcacagtgattaaaggggaatgagttccggtcytcaaaggaacttacctatttaatgtttattttcagaaagaactacttgaggcaaccaatgtattggggtcttcatctgataatttaacctgatggatctc

SEQ ID NO: 8901 - DNA, 201 bp, Homo sapiens
gagcccaacactttatgatgcaataaaagacatgtcatctgccataagtgagagacttttaaaaattgctcatttgatgtaagcatgaccttagaatttarttagcaactctctccacaggtgacaaactagtaatatacttttcttcttaatggcaatttatttttcaccattctctttgtattattctcttttgcccag

SEQ ID NO: 8902 - DNA, 201 bp, Homo sapiens
ctactggggcactgcctagtggacctgtgagaagagggccactgtcctctagaccccagaatggtagatccactgacagcttgcacagtgcacctggaaaygtcacaggcactcaatgccagcccatgagagcagcatgggggcagtaccctgcaaaaacacaggggcgaagctatctaaggccatgggagcccacctctt

SEQ ID NO: 8903 - DNA, 201 bp, Homo sapiens
ccacctcttgcatgagggtgaactagacatgagacatggagtcaaaggagattattttagagctttaagacttcatgactgccctgctggatttcagactygcgtggggcctgtagcctccttattttggccaatttctctgatttggaatgagagcgcttacccaatgccagtacccccactttatcttggaagtaactt

SEQ ID NO: 8904 - DNA, 201 bp, Homo sapiens
ttctgggactcctgcctcttgacagcagtgtacttcccattgctctgactttatttcttctcatgctggcttgaagttaagagaagaaaatgtaaaaaatkactaatcaaacatttgtagcaattttcagccctattcaacataaagatttgtttttaaagattttctgcaaccattattgcacactacactaaaaataac

SEQ ID NO: 8905 - DNA, 201 bp, Homo sapiens
aaaataagtgagaactagtctgtaggaagacttaactggctaagaggtctggacttcatcctgtaggccatgggggggccgctaaaggtttttgagcacartggaaacagtattttaggaagattaatcttggtatgtaggatggattagaaagaggggagaatgccagtagggaaaccattaaagggcctgttgaaagga

SEQ ID NO: 8906 - DNA, 201 bp, Homo sapiens
agttccccctttatccaaggtcaaccatagtccgaaaataagtgagtactgtacaataagatattgagtgagagagatgatattcacataacttttattayagtatattgttataattgttttaatttattattagttattgctattaatctcttactatgccttttttaaaaagaaaaggcctcactctgtcactcaggt

SEQ ID NO: 8907 - DNA, 201 bp, Homo sapiens
catttataataaagtctgagtgcatgcaaatgttacagactgaatccaagtttatgactgcattgttgtttttaaaaattacaatcattagatataatggyagaactttggaccctgctgtctagtttattattttgaatctggacagaatctaaaactgttatatacaaccctatggaaaaagattaaacaacagacttt

SEQ ID NO: 8908 - DNA, 201 bp, Homo sapiens
tatgtaaactgaacaatattttcgctcttttattatatttgagtaaattatggctccaatttaaaaaagatttgagggtctatatatacattaagcaaaamgttaaactacactcataatgatactataattttataaatttctctctaccaaagaattcaaaccaattatatatacttgaaatatacttacaccactact

SEQ ID NO: 8909 - DNA, 201 bp, Homo sapiens
ctttccagcaaagtttactactttttaagatgtaaatgttgggagtaaaaatttgtccaggtgccaactttaaatgttaaaattgcacttaattaaatgcyttatttacacgggacacgggtccccatccccacttcatccccaagttacaccttcaggacagtaatgtaaggtttttatttagtttctgttacttacatt

SEQ ID NO: 8910 - DNA, 201 bp, Homo sapiens
cctcgaacctactccctcctcaaatcctgagattttgctccatcaacttattatcacctctttcttacattttttatccttctcttgccattggcttcttwccctcgactctcaaacatattaatacctttaaggaaaaccacccaaaaaaactacttcttcaaggtacataatctttatcacctttctttcaaagcttaa

SEQ ID NO: 8911 - DNA, 201 bp, Homo sapiens
aaagcaagaaaacagccagctgtgagtcagaaatagaacaaaattttgagttgcaaacccaagggaccttcaggtaacattggaagtgctcctgaatgatraatagtttattttttttcagacccactatggacactgcaggatatatttaccatattaatttttaagtttcaaaagcaataaacctgttggtcagatgga

SEQ ID NO: 8912 - DNA, 201 bp, Homo sapiens
catgcttgaagcccccattgcttgcagttaaactaacagtttatattaggctaaacacagtttggtagccattgtcaagaaaattggagttgctcaggcayagcagagttactgatgttatttgtttggaagccttgtgatttagtgaatcactagcaattgttaagcaagtaattaaactataaagccaagacctgtgat

SEQ ID NO: 8913 - DNA, 201 bp, Homo sapiens
gtgtttttatattaaaagaagatatccataagaaatacattgaagagctaaaaataatatgatgggatctagactggtattacagacatgaagatgctctrtgacaacatctataaaacatgaatggagaaaaacatataacacaaatgtcctctgaaaaagcacacaagtaattctctttgttcataatgaaatgaagaa

SEQ ID NO: 8914 - DNA, 201 bp, Homo sapiens
agtctagacacaaaaagtagacacaagttagaagctctggcccttccaatggtcagctgtataaacctgaccacatcagctttcctccaggaggttctcarttgtgtttaggaatatgggatactttgtgttctgccctcttcataattctgttgtaaaacattaaatatgaaaaaatatatcagtagatattaaaaaaga

SEQ ID NO: 8915 - DNA, 201 bp, Homo sapiens
gttgtgtttaggaatatgggatactttgtgttctgccctcttcataattctgttgtaaaacattaaatatgaaaaaatatatcagtagatattaaaaaagwgcatccttagtaaatataactattattcaaataactgtgagaaaagtatacattgatttgcatgtttcaaaagtaaagaggtcatttggcttttttaaag

SEQ ID NO: 8916 - DNA, 201 bp, Homo sapiens
agaatgagatatttatgctatgggatgaaatgaaaggcaaagtttaaaagagggctgagaggtgtggtagaaagcaggggaggatgtcccaggcagagggwcaggcaggagggttagggcagcagcaggcctgccatgtgcttccaaggcacatgggggtccgccttgctctggtgtatatggcagccactctaagcttct

SEQ ID NO: 8917 - DNA, 201 bp, Homo sapiens
gaatgagatatttatgctatgggatgaaatgaaaggcaaagtttaaaagagggctgagaggtgtggtagaaagcaggggaggatgtcccaggcagagggayaggcaggagggttagggcagcagcaggcctgccatgtgcttccaaggcacatgggggtccgccttgctctggtgtatatggcagccactctaagcttctt

SEQ ID NO: 8918 - DNA, 201 bp, Homo sapiens
gtcacctatgtctgattacatggctctgttacaagaggaagctcatggccacgacactagacattttgctggcctgacagtttaggagaatgtggaagaarctgtcagggctggcagaacccacgtcctttgtggacacagggtcagggattatcctcaggcaaccatccagagacaaattttggagcagtggttgagagg

SEQ ID NO: 8919 - DNA, 201 bp, Homo sapiens
cagccctcaacctgggctgtcttcagcatctcaacaaaagacggactctacaatgttcagagacaaggggagcccacagcagcaggcccaattcctcagakggtacaattcccaacattccacaaaatcctgcccagaaaagccaccaggacagcagcagtcccactgaggggccaagtagagcagatatctccattctgt

SEQ ID NO: 8920 - DNA, 201 bp, Homo sapiens
tccatacagcttgccctgacggaggctcattgtggtcctactcagataaagcataagcctgatcacagactgcatgtgtctcaagctccatgaccttgtcytccacaaaattcctcaaaaatggaggccataccatgtaccgcagagatgggtttcctctctgagcaaaaacatcaaggaattgcaaagtgggaagccatc

SEQ ID NO: 8921 - DNA, 201 bp, Homo sapiens
agtttatcacatggtaaataatattgctgttcaatgtaatactgaattcactaaacctgaggtccatgcacaataggttgaaaacaagtcacaagaactgyatcagaactgacagttgtgtgacttgccatgaagacaatctggaaagattgctgtaagaatataaggagctcatctgccttacattctcattcaaaacat

SEQ ID NO: 8922 - DNA, 201 bp, Homo sapiens
ctaatgatctgactaatgttcttgcccagagctgaacaaacaactggtgcagtatctgaggccaggaccctcctcaatgctacactgaagtcagacttcaygctatgcttagcccaggacgttttttacattgattgctaatttttgtatttcaaatgatatgaagttactgatactagaaaccttgcttgtagttaggct

SEQ ID NO: 8923 - DNA, 201 bp, Homo sapiens
agggcttcagtagatgcaatcagtcatttattcaatcaacaaatatgtattgactgcttactgtttgctcagcactggcatatattaggcactcaattacrtgttgaataaataaatgcaaacatagcaattagttaaaagaaagacaaagtcctggctttcccaaaagtgggaatcctcacaagactataagtagcatgg

SEQ ID NO: 8924 - DNA, 201 bp, Homo sapiens
catcagatcagctgaacctagcaaatacatgactaatgactaatagctcataggaaagcaaggttacattctatcctagtgttgacaactgatcgtgtctycaatgtgtctcagatttaaaagcagggcgaaggaggtgaggagggaaggctagaacaaccctgaccagatatgcagcccttcctcattaacatacgggaa

SEQ ID NO: 8925 - DNA, 201 bp, Homo sapiens
gcaaactttttagcatcaaactgggccatcttctcacacagtttcagttcccccaagacagcccggaactggggctggttaatgcaggtgaggaaccagcrgttggtattgcgaaaggcccggcggaaagaaggctctagaacctgcttatagagccacaacagggtgcagacaactgtgatgtcagccaatgtcactcgt

SEQ ID NO: 8926 - DNA, 201 bp, Homo sapiens; identical to SEQ ID NO: 8925

SEQ ID NO: 8927 - DNA, 201 bp, Homo sapiens
ccgaaactaggcaatttgaagataggccacggatatatttaagagatcagtcacgctattctaacataaaattaattaattaaggaaaatataattaatgraagagaaggaaatttgggacaaatcattatgaggtattaggaattgtttgctttaaccatcagtcttggtctgcggttcagaatctggtgtttaagagaa

SEQ ID NO: 8928 - DNA, 201 bp, Homo sapiens
ttcttgcaggttgtaattttaaaatttttgtaaatatccatctataccaagaagggtcatatttcatatagtgcctatatctgaactggtaatgttcacarttatactaagaaaacacatttatactaaagagatggtttggcatagtagcccagagcatgagtctggagccaaactgactggtgactctagacaaatcac

SEQ ID NO: 8929 - DNA, 201 bp, Homo sapiens
gaccttggagaaattccagaactaacagacaccacaccagaggaattaacagaagatggacgacattatggtgatgagtgctttcgaaacagcgccagacratgagaagatgtagaagaagcagtgccagaacacaactgacattagacaatctggcacaagggttcagattatccaagactacaaatgacttattttatg

SEQ ID NO: 8930 - DNA, 201 bp, Homo sapiens
gacaataataatatttagtataacctttgacctagtaattccatttctagggatttaccctaaggaaataacactggatatgtgtaaatttaataataagratatccaatgcagagtgttcataaaagtgaaacattctgaaccatttatttggaaccgtaaatgtctaatagtgaactacaattaagttatttatatatg

SEQ ID NO: 8931 - DNA, 201 bp, Homo sapiens
caacaaaaaccagaacacaaaggtagtcagtgggaggacagatacaagaggccaagaagcaagagataatcttcaactcaaaacgcacaagggctggccayggtggctcacacctgtaatcccagcactttgggaggccaaggcaggtggatcacctgaggccaggagcttgagaccagcctggccaacatgtgacacccc

SEQ ID NO: 8932 - DNA, 201 bp, Homo sapiens
agttagcaggtatttttaccatatttcgtaccacagagaaaatgagaaagaaaaacaatttaaaacagttgttatgcctttatctttacactgtagcataytccaataaaaaagacgttcacccacaattgacaagctaggtttaatccttataatgcccataattttatactgtaacaactgcatacttcagtcatgaac

SEQ ID NO: 8933 - DNA, 201 bp, Homo sapiens
aaatacaaaaataaataaataatatacaaaacttgcaatgtcattatcaaacaagactagttttttgttttgttttcttttgtttttaacaaatatacacmataaactgagatttcctgttttgggatttccttctttgccttccaaaaactcaagaaaaatgggctcactactttacagtcactccccatctctaactca

SEQ ID NO: 8934 - DNA, 201 bp, Homo sapiens
taaggtccaatctaacaatttttgtattttgtttgcttatctcttaagaaaaatcagaagagccagaaataagaatacttgacaagactgaaaccatgagrggtgacttggtaattatacattcaaatgagcaacaagaatacaagtttaaatacaatgtatcctgaaagttctggtttcaattttagtatgtggttttac

SEQ ID NO: 8935 - DNA, 201 bp, Homo sapiens
aacgtagaaggatacaaaatatcaataaatcccttaattgagaaaatggaggccattcaggaggaatcctccctcccttttaaatttgctcaggtcatccytgcttttctccgtctcttaccctgaagcagggttctccttctctttccaaggactatttctaccctcgaacctactccctcctcaaatcctgagattttg

SEQ ID NO: 8936 - DNA, 201 bp, Homo sapiens
tgaagtaagtacctatgctcatttgaaagatgagaaaactgagatacaaagactggactgtgcccaaaggaatatattcagaaagcagtagagctagaaarcaaatcactctaagtcacgtgacttcctgaactatccctgctgggtccctatacaattctaggcctatattcattggctggaaacattcaggagacaaca

SEQ ID NO: 8937 - DNA, 201 bp, Homo sapiens
tggctacaataagttcaaaggtgaataaactaacgtggtttgttaataagaaaagctacatcccatgtgcagcctaccactaggtatctggtttgctgcargaggtctctattgcttacagcatgtccaaccatgcacaagtaataaagggtctggttgcaaacagagagaaaggaacccaagccaacaatgagaagaaaa

SEQ ID NO: 8938 - DNA, 201 bp, Homo sapiens
agtaaaatattatcgtaatttaatataaaatccctttttggtacctactatatgacagacaatgaattttgccctcatagactttcttttattttgagacrgggtctcactcttgtcacccaggctaaagtgcagtggcgtgatctcggcttactacaacctctggctcccaggttcaagtgattctcgtgcctcagcctc

SEQ ID NO: 8939 - DNA, 201 bp, Homo sapiens
caatcccagctactcaggaggctgaggcaggagaatcgcttgaactcgggaggcggaggttgcagtgagccaagatcacatcactgcactccggcctgggygacagagtaagactccatctcacaaaaaaaaaaaaaaagaaaagaaaagaaaaagaagagagagctggactagcatactgagcccctcaccacgtgatgc

SEQ ID NO: 8940 - DNA, 201 bp, Homo sapiens
cttgatttttaagcaaaagctactactatgttttcaggaccccttcatactcaaaatatgtcacagacttaggagcagaatcctggtctaatataaatacrgttcaccggggagatgaaattgtccttcagaaggcggacagaaattgtgccagggcaaattcctccatatgcactgatcttgaggctttgacttaggaag

SEQ ID NO: 8941 - DNA, 201 bp, Homo sapiens
agtaaatattgccttaagtaagtaaattgagacttctttttaacatttagatttaaaaaaaaaagaaaagaagagaaaatactacatagttctgtgatgakaacaagaaatatgtggctgggcatggtggctcacatctataatcccaacaccctgggagaccaaggcagaaggatcacttgagccaggagttcaagatcc

SEQ ID NO: 8942 - DNA, 201 bp, Homo sapiens
gatgaagggcttcaagatggaccttggagaaattccagaactaacagacaccacaccagaggaattaacagaagatggacgacattatggtgatgagtgcyttcgaaacagcgccagacaatgagaagatgtagaagaagcagtgccagaacacaactgacattagacaatctggcacaagggttcagattatccaagact

SEQ ID NO: 8943 - DNA, 201 bp, Homo sapiens
cagaaaagagattaagcagtttggtttttccagctttattaaggtataattgacaaatagaatcatatatattcaaggtgaactatgtgatgatttgataygaatcatgtaatgattaccacaaatatatcgagcaccacacagttaccattggggtggggaacattggggacacttaaaatttgttctcttatgaaattt

SEQ ID NO: 8944 - DNA, 201 bp, Homo sapiens
aaataaggggatgcccaacacaggcagagcaatctgcagagagaacgcaagcatggagatctcctaggaaggaatgctgtggcaggagatggacaagaatstgccatcgaggaaggttaaaagtacggctggcttgagggtagttaattgagtggtacatgtactgaaggtcattaattactaaagttaattttgaggcag

SEQ ID NO: 8945 - DNA, 201 bp, Homo sapiens
gcacttagtacagtgtctggcacatagccagtaataaataaataaatgtttgttggaacaagggcacagaaaaccaaatgaaagccaaagagggtagacaraaagtagttcagttggcaagagtcaatgtggaacaggtaaaaggtggcagtgaagttatggccctggatgcttctgtgttaaagaagaaaaaaagaaaag

SEQ ID NO: 8946 - DNA, 201 bp, Homo sapiens
tgtaatctcggcactttgagaggctgaggcgggcagatcacgaggtcaggagatcgagaccatcctggttaacacggtgaaacccccgtctctactaaaawtacaaaaaattagccgggtgtgttggcgggcgcctgtagtcccagttactcgggaggctgaggcaggagaatgacgtgaactcgggaggcggagcttgca

SEQ ID NO: 8947 - DNA, 201 bp, Homo sapiens
aaaaatacaaaacttcgctgggcgtggtgatacattcctgtaatcccagctacctgggaggctgaggcaggagaactgcttgagcctgggaggtagaggaygcagtgagctgagatcatgccactgcattctagcctgggcgaatgagactccgtttaaaaaaaaaaaaaaaaagcaatctacatgacaaatatttgaagg

SEQ ID NO: 8948 - DNA, 201 bp, Homo sapiens
tagaacaaccctgaccagatatgcagcccttcctcattaacatacgggaaaagactgtaaaaatgagcatccacacactgcatgtcataaagaagacagtktattttttcctttaaaaagtctactcacgatgggataattcacctcatgttatggactccttagaaagaggtagtttaagttgtagataagcatgtatcc

SEQ ID NO: 8949 - DNA, 201 bp, Homo sapiens
aaagatacagaaaatgtggaagcaagtttggaactgggtaatggacagacgttgggacaatttggagatctcagaagatgaaaggaagatatgggaaagtytggaacttctgagagacttgttgaacggttttgaccaaaatgctgatagtgatatggacaatgaagtccaggctgaggtggtctcaagatagatatgagg

SEQ ID NO: 8950 - DNA, 201 bp, Homo sapiens
tttcataatttggatgttattagcactatgacacagtaagaaactcagtgaggagacagaagacttgggtgcccatgttgactcttcggaatcaccacatyaccatgcactgacccagccctgcacccatgttccaaaccactcttggatattacttccagagtctttgccaagtcataccctagctgcttctcctacttt

SEQ ID NO: 8951 - DNA, 201 bp, Homo sapiens
cagctttccactggagtccaaattattggctgcagtaaaaccaaatgctcattacctacaaaaggattttaagtgtccacctttccaatgggagttggccycaaggcactaaagaattatgacaacagggaaggtggcagtaaaatactgcacttttcaaaagacctttgaagtgttctaaagaggtctctcacagccatc

SEQ ID NO: 8952 - DNA, 201 bp, Homo sapiens
agtgctgggattgcaggcgtgagccaccaggcccagccacatgatttcttgtatcatgtattttaaacatgatgctacccacaaactcctgtttgtttcaraactcttccctcctccttttttctgctttttcttttgcctttttcttgctgcctttttcaaaggcagaacatatgtaataataaaaatcaagataaatta

SEQ ID NO: 8953 - DNA, 201 bp, Homo sapiens
cagagaaggtttaaaagggggacttaaaagcacttactgttccctggtagcactgatttggcctaatacagaacactataggagtgactctgaataaaccmgggaggcaggagagggtaaaggaaagaaatgaaatgctgggtcagaccttacttttaaattttttttttttttaacaaggaaaaacaagatcatcaacaa

SEQ ID NO: 8954 - DNA, 201 bp, Homo sapiens
tcaggtattcaggaggctgaagtgggaggattgcttgagcctgggaggcagaggttgcggtgaacagagatcacgccactgtactccagcctgggtgacastgcgagacctatctcaccaaaaaaaaaaaaaaaaagataaatacttcaaatagaattcaacctgtgtttccagattcaatccctctactctattctaggg

SEQ ID NO: 8955 - DNA, 201 bp, Homo sapiens
caccacaactgggagaggaagaaaacatgtacccttctcatccaaatattaaccagcatcttttttgcccgggcaacatatgtgtctatcaatggtggtcytgccaaattaaacacttccagcacacttgcccttaattctatcttgagagagagggaaattaagaatttcaggccaaatagagaagaaaggggaggccat

SEQ ID NO: 8956 - DNA, 201 bp, Homo sapiens
cacagtctctttgaatgtttgctttatcatctctaataggaatcaatgatagatgtcctgcccatatcaaacacccaagaagatagtacagttgaaggctyttagttaaatgaaaaaaaaaaaaaactaaatctaaaaacaaatattgcttttactgtgatgctgcttatcagcaaagctcataagcttcaagacactaac

SEQ ID NO: 8957 - DNA, 201 bp, Homo sapiens
gagttttgctcttgtcacccaggctgcagtacaatggcgcaatctcggttcactgcaacctccgccgtggagcgattctcctgcctcagcctcccaagtarctgggattactggtgcccgccaccatacccagctaatttttgtttttgtttttgtttttcagtagagacggggtttcaccatattggccaggttggtctt

SEQ ID NO: 8958 - DNA, 201 bp, Homo sapiens
ctatacaaacataacacgcacatacacacacaaatattttcttctgaaacacatgacgataaattgcagacatgatgcctttacccctaaatattccaacrtaatttccaaaacacaaggacaatctgttatataactacagcaccatgatcaaattaggacattaacagccataaatactataatgtacagatcatattc

SEQ ID NO: 8959 - DNA, 201 bp, Homo sapiens
ttaatctcttactatgccttttttaaaaagaaaaggcctcactctgtcactcaggttggaatgcagtggtggaatcatggcttactgtggcctcaacctcyggggcttcaagtgatcctcccacctcagcctcctgagtagctgggaccaccagtgtgcaccatcatgcccagctaattttatttttggtagagatggggt

SEQ ID NO: 8960 - DNA, 201 bp, Homo sapiens
agaattttatggcttctcactgtaactaacagggttgtaaaaaaaaaaaaaaaaaaaaaaaaaaaaacagcaagagaccaaatgtgttcacagcaatccaraacaaattttgtcagagaccaatgcttgaactcatcactctcttacactctgcgaatatcaaaagtttcccagttactctatggttcacaggaggtctaa

SEQ ID NO: 8961 - DNA, 201 bp, Homo sapiens
tgcattctggatccctttgttccataatgggaattgcccaagaaagactagtggctttggcacacagctcctatcactctaaacttcctccaaattcacamggcattttctctatatttttctcttggcagtcactgctttttacaatttcttaatagttgcttatttatagctatgttagcccctgtcactcttggacat

SEQ ID NO: 8962 - DNA, 201 bp, Homo sapiens
aaaaatacaaaaaaattagccaggcgtggtggctcatgcctgtaatcccagctactcaggaggctgaggcaggagaatcacttgaacccaggaggtggagrttgcagtgagccaagatcgcgccattgcattccagcctgggcgacagagcaagactccatctcgagaaaaaaaaaaattttttttaatattttataatac

SEQ ID NO: 8963 - DNA, 201 bp, Homo sapiens
ccaaattaaacacttccagcacacttgcccttaattctatcttgagagagagggaaattaagaatttcaggccaaatagagaagaaaggggaggccatgcyaaatgagtgaaaagtctatttttgaaaaggcataacctggcagtagcctcaaatcacaatgttattctacctacacctaactcccaaatgagctctaact

SEQ ID NO: 8964 - DNA, 201 bp, Homo sapiens
gacaaatagaatcatatatattcaaggtgaactatgtgatgatttgatatgaatcatgtaatgattaccacaaatatatcgagcaccacacagttaccatyggggtggggaacattggggacacttaaaatttgttctcttatgaaatttcaagtaaaaaatattattaactaaagtcaccatcttataactgaaagcttg

SEQ ID NO: 8965 - DNA, 201 bp, Homo sapiens
tatttcaagcacagagaatactgctcaatgttcttgaagagttccttcagaaaaagaccacagccaagccagaaagcataacaacaattacacctgctagmtttaaacttctccaaacactgacaaggttcttgtaagccagtgggggcactgcaacattcaagcagccacttcttgaggctgcatttcaaaaggcaggat

SEQ ID NO: 8966 - DNA, 201 bp, Homo sapiens
gtactaatgtcagattaacttcgacccaatggaggaggaaagtgaggagggtagcaggaactgagagcgggagggtccgagaagggaaaatcccaactcamtacagcactcaccaaaacttgtcaagtctacacagatgatttcctttctaaactaaattagtaactaggaggaggacatgaacctccacatcaatgtttc

SEQ ID NO: 8967 - DNA, 201 bp, Homo sapiens
tcacttgaacccaggaggtggaggttgcagtgagccaagatcgcgccattgcattccagcctgggcgacagagcaagactccatctcgagaaaaaaaaaawttttttttaatattttataatacagacaaaaattgtattactcccacctccctccaaaggggttaacaatacaagattttgtttggctagaatataaaag

SEQ ID NO: 8968 - DNA, 201 bp, Homo sapiens
accctgtctctactacaaatacaaaaattagccagacatggtggtgcacacctgcaatcccagctactcaggaggctgaggcaggagaatcgcttgaactygggaggcggaggttgcagtgagccaagatcacatcactgcactccggcctgggcgacagagtaagactccatctcacaaaaaaaaaaaaaaagaaaagaa

SEQ ID NO: 8969 - DNA, 201 bp, Homo sapiens
attggtacaatttacggcaacatgtttcaaatgcctttcgaatgtactctgactcaaaggcttcatgtctggaaatatgtgaaataatcatgaatgtatayaaaaatttagctaaaaatttgttcattgtggagttcatcatactgaaaaatgaaaaacaagtatttagccacagaaaatagctaaagtaactaatagatt

SEQ ID NO: 8970 - DNA, 201 bp, Homo sapiens
aatttcctatgtcaaacctacctggttcggtagaaataatggaagaattgcagaaactctgttgcataagtgtttcttaactagtagacacttgtcacatyagtggtttcagttgactttgtggggtactttttttggtatcatttggttttaatccaacaaccccatcaggaagtcaaaatgccctgtaatttatggatt

SEQ ID NO: 8971 - DNA, 201 bp, Homo sapiens
ataagttagctttcactaaagcatataatattaaactatctagaataaatggtaagaaagcaacaaggatgagtaaaatctaaacatatatgatacttttwaaaaaatgcatctataattcttttcaagtcctttcagcaattggatccagtcttttttttttttttttttttttcaatgttcagtttcctttaatgaccc

SEQ ID NO: 8972 - DNA, 201 bp, Homo sapiens
ggctcacacctgtaatcccagcactttgggaggccaaggcgggcagattacctgacgtcaggagtctgagaccagcctggccatcatggcgaaactccgtstctactaaaaatataaaaattagctgggcgtggtggtgcatgcctgtagtcccacccagctactcgggaggctgaggcaggagaattgcttgaacccggg

SEQ ID NO: 8973 - DNA, 201 bp, Homo sapiens
gggtttcaccgtgttagccaggatggtctcaatctcctgacctcgtgatctgcccgtctcggcctcccaaagttctgggattacaggcgtgagccaccgcrcccggccatattttttgtatttaaaagtaaaatggatccacaggcttcaccagaatgccaaagtgcaacttggcacaaagcaggttaagaacctttaatc

SEQ ID NO: 8974 - DNA, 201 bp, Homo sapiens
cataggcattaaatgtgacctgtgccaagcaaaattactaatatcaccactaatccctgtgctcattaatcatcagtactcagttcaccatttccaaacaycaaatagaacaccagagttttaaaaactgccagtatcccactgcaatgcaactcactcatgtgagtccaggccaggtccattcccatattctgcctactc

SEQ ID NO: 8975 - DNA, 201 bp, Homo sapiens
ccacatgagctcactctctctctctctcctctattcagtggtgatttaactaccacctttccatttcccatgtgaagaactggggttcatttcctctgtarccctatttctgaaagcatgcaatcacattacatcactgccagtaaagcacagatggtgatttcagttggcctttgcaattgggtctggttcggctggttc

SEQ ID NO: 8976 - DNA, 201 bp, Homo sapiens
aattagccgggtgtgttggcgggcgcctgtagtcccagttactcgggaggctgaggcaggagaatgacgtgaactcgggaggcggagcttgcagtgagcaragatcgcgccactgccctccagcctgggtgacagagtgagactccatctcaaaaaaaaaaaaaaaaaaaaacctttcctattactcatcttttgagcatc

SEQ ID NO: 8977 - DNA, 201 bp, Homo sapiens
acaacttagctgtacaatctaataagcctcagtttcctcagttttaaaatttgaaggttgaactactatataatcttatggtcctttgcatataaacattmtaaaaagtctataccttaaacatattattcctcattccataaaaaatcttgaaaaaggtggtggcaggggataaataaaacagaggggcattatattatc

SEQ ID NO: 8978 - DNA, 201 bp, Homo sapiens
atatacttaacacaaactggcaaatctttcttatttttcacaatgacgagaaatttacagagaaacttctacagtgaggatgataataaaagttaggtcayttgtcttgtttttttccagattcatcatttttatctggttgccagtagcttacgaaaacaacaaaacatctcctaatatcatttcctgtctgtttcttca

SEQ ID NO: 8979 - DNA, 201 bp, Homo sapiens
taaaattggccaggcgcggcagctcatgcctgtaatcccagcactttgggaggcaagacgggtggattacctgaggtcaggagttcgagaccagcctagcyaacatggcgaaaccccatctccattaaaaatacaaaaaattagccaggcatggtggtagcgcctgtaatcccagctactcgggaggctgaggcaaggaga

SEQ ID NO: 8980 - DNA, 201 bp, Homo sapiens
aatctatgaaaaggactgtcaacactatggaagagaacccggacagagagaacatcatgaagtctgaaaggattacctcatgaagatgccactgttgttamagaaaaagccatgaaagtcatcaagcccaaaacaacaaactcctcctggaggaaactgtgtccagatattgcacatgatttacaacagagtcaaccaggg

SEQ ID NO: 8981 - DNA, 201 bp, Homo sapiens
aagtatccaggtaataagattgttgtgagaattatatcaccttctgataaataccattacctcattagattacattttagttcccataaacctactttacycaaatccctatataaataacactcaaatttcaaataacaaggaatttatagattgcacatcaatgactaaattacctttcctactctagtaattcttcaa

SEQ ID NO: 8982 - DNA, 201 bp, Homo sapiens
ataaagtttggagatccttctataatgatccacatgggttcccgaggcttttcaaggaatactcaagtacagtgacagctgtcaacaaagtgtcaagtagycctgggggcagagaaggtttaaaagggggacttaaaagcacttactgttccctggtagcactgatttggcctaatacagaacactataggagtgactctg

SEQ ID NO: 8983 - DNA, 201 bp, Homo sapiens
gaagaaaaatattctaaaactatgacaaggttttaggtgagaactatatcatgaactaacaatggctgcattttgtctgagcataccattgcgtatgtatktctaaccacattatgtagttctcatgtagcatattaaaacagaattattattttgagtagtgctgctaactgttggttaataatttgacagaaagcattt

SEQ ID NO: 8984 - DNA, 201 bp, Homo sapiens
ctgccctccagcctgggtgacagagtgagactccatctcaaaaaaaaaaaaaaaaaaaaacctttcctattactcatcttttgagcatcaaattatatacmtaaaagcatgtttaagaggtaaaaacaatatatccattccaagcaggtatgtgagcaaacaaaagagaaaagatcagaacgcagcaaagaaaagacatag

SEQ ID NO: 8985 - DNA, 201 bp, Homo sapiens
aataataaggatatccaatgcagagtgttcataaaagtgaaacattctgaaccatttatttggaaccgtaaatgtctaatagtgaactacaattaagttayttatatatgtactgacaacatatttttatgatatattatgagcaaaaataaagcagctcataaaaatagtaaggacactataataccacttgttattttt

SEQ ID NO: 8986 - DNA, 201 bp, Homo sapiens
gcaccactgcactccaccatgggcgacagagccaaatcctgtctcaaaactaagaaagaaaaggaggagaggggaggggaggggaggggaagagaggggargggaagggaggggaggagaagagaggggaggggaagggaggggaggggaggccaaaccttcaataaccgacatcaaaaggtcagggctgggagtggtgtc

SEQ ID NO: 8987 - DNA, 201 bp, Homo sapiens
aatttctgcaataaccttctttgcaactatttataaattacaagtgaaattcatttgcctgtgtcagttgtgactgcattgagaatatactgactgctaastgatctcataagatcatttcaaaactatgcctttataagccttgatcaatattagttatcaatagtactgattccctgaaaagtttttttaattacttac

SEQ ID NO: 8988 - DNA, 201 bp, Homo sapiens
ctgattcaaacattgatgtacatgtctcatctttcttctttcccctaatgaagcccacccttctgtggacctttatgcagggcactgttacgtgctctgcmatccaactggccctaaagcaactgcaaaagcacacgcagttattgacatcacaaggcaacaagtggctaccaggtgacccagaacgtgtttccactcttt

SEQ ID NO: 8989 - DNA, 201 bp, Homo sapiens
gccataaaaattaatgaactactgatacatgctacaacatgatgaatcttgaaaacactacgctaagggaaagaagtcagacatgaaaggtcacctgctayatccattcatgtgaaatgtccagaatagaaaagtccatagacacagaaagtagattagtagttccctgcagtaggagaaagcagaaaatagagaatgaca

SEQ ID NO: 8990 - DNA, 201 bp, Homo sapiens
gctatgtttctaccagccctttctaaatatcttctaaaggaaaggtataaattctagtgagagggcagtgaactgcagaactgaaaaaaacaaaccacggycaaaaacccagggaaatgtacaagaattaacacaatacataccatgactatgccacagaaaaatctccaaatagaatcaccaccgaaactaggcaatttg

SEQ ID NO: 8991 - DNA, 201 bp, Homo sapiens
tgtggacctttatgcagggcactgttacgtgctctgccatccaactggccctaaagcaactgcaaaagcacacgcagttattgacatcacaaggcaacaastggctaccaggtgacccagaacgtgtttccactctttgtttttccccattcacagagtcctgagcttcaaaaatagtgctaaaaagttatcccaaagtta

SEQ ID NO: 8992 - DNA, 201 bp, Homo sapiens
agtagagatggggtttcaccatgttggtcaggctggtctcaaactcctgacctcaggtgatctgcccacctcagcctcccaaagtgctgggattgcaggcrtgagccaccaggcccagccacatgatttcttgtatcatgtattttaaacatgatgctacccacaaactcctgtttgtttcagaactcttccctcctcctt

SEQ ID NO: 8993 - DNA, 201 bp, Homo sapiens
caagattgaggcattgcactccagcctgggcaacaacagcaaaactccaactcaaaaataaaaaaactcaaaaggataagtctgaggatatacaagaactwcaatatgactagacaaagaagttcaacacaacagacaaaggtctgtctgccagcaaggtcttgtacaaaagcagtatttgggctcaatcccatgagattc

SEQ ID NO: 8994 - DNA, 201 bp, Homo sapiens
attgggcagggcgggcacatcctgaaaaggttggctaagtggggattttatatattcttgaatactaaactgttgcagtgtatacacaatactaagcaaayatactctcttcatttttattgtgaaaaaattttaaagttacagaaaataggcaaaagattcccatctatccttcacctaggttccccttatgtccacatc

SEQ ID NO: 8995 - DNA, 201 bp, Homo sapiens
catggtgaaaccctgtctctactacaaatacaaaaattagccagacatggtggtgcacacctgcaatcccagctactcaggaggctgaggcaggagaatcrcttgaactcgggaggcggaggttgcagtgagccaagatcacatcactgcactccggcctgggcgacagagtaagactccatctcacaaaaaaaaaaaaaa

SEQ ID NO: 8996 - DNA, 201 bp, Homo sapiens
acggacaaacaaaaatgcttatggggctgcttctttacttaactgaagatgaaaatggttttatttagtactatggtggaaaatacatattcttaccactyggatttgtttattggatataaaaatatcaataagaaaaccagcactatatctttacgaataaaaatgttactaatatctgggtatatctgaaggcacaac

SEQ ID NO: 8997 - DNA, 201 bp, Homo sapiens
tgagaatcttctttctataacctgttgggaatatttgttgatcaaccatttggatgaggtgcactgatccagccactgtgggaaacacatatacgaagccmtataactacactttggtcagtgacagactgcatactgaacggtgactgtgcatggttataccatatagcctaggtatgtagggtatgtagtaggatatac

SEQ ID NO: 8998 - DNA, 201 bp, Homo sapiens
atcatgaaagagattgtgaatataaccaaaaaaggtgggagatgaagggcttcaagatggaccttggagaaattccagaactaacagacaccacaccagasgaattaacagaagatggacgacattatggtgatgagtgctttcgaaacagcgccagacaatgagaagatgtagaagaagcagtgccagaacacaactgac

SEQ ID NO: 8999 - DNA, 201 bp, Homo sapiens
tggtaagtatgggtgactgcagatgccgactgcctgcgttcaaattccagctcctctgctttctggctatgtggctataagcaagtgacctctgtgtttcrgctacttcatctacaaagtgaggagactagcaggtcagaacctgccccatagggctgctatgaaggttaaataatcacatgtgcaaagggcttggaccag

SEQ ID NO: 9000 - DNA, 201 bp, Homo sapiens
tgtaatcccagctactcgggaggctgaggcagcagaatcctgaactgaggagatggaggttgcagtgagccgagatcgcaccactgcactccagcctgggygacagagagagattctgtctcaaaaattaaataaataaataaaaatgaagagggggaggatgaaaaggggagtggaatcatatgagactgaaagtgaaaa

SEQ ID NO: 9001 - DNA, 201 bp, Homo sapiens
cacctaccaaagctaattttacttccaaaatatttatcatatcccctgcctcctcacaaggtattacttgtgatgttgcaagaaagagtacccactgaaayttctgttaaaccactattacctattctggcctcaaagtgaaggacagatggtgacatttgcaaggttgttttcaaacacaatctaatatgaaccagtata

SEQ ID NO: 9002 - DNA, 201 bp, Homo sapiens
aatgaatcaagaaatagagtccctggctttacagggaggggtgcaaggagaagggaagtatttagaaagaagcaatagaaacacatcattactctgagaaycttctttctataacctgttgggaatatttgttgatcaaccatttggatgaggtgcactgatccagccactgtgggaaacacatatacgaagccatataac

SEQ ID NO: 9003 - DNA, 201 bp, Homo sapiens
tacacaaggcaagaataaccttccccacaaacctgacacttaacttcagactctgaagaaaagcaaccagatctaattcatctttgcatccctgggaaatrctgcctaggatacagtaggtgtttaataaatatatgacgaaggacaatgcagaaagggacaaaaatacctaatgatctgactaatgttcttgcccagagc

SEQ ID NO: 9004 - DNA, 201 bp, Homo sapiens
aatttagaaaaggaaattgtcagtgacaatgatctattattcaatttgatattacatgttttaagcattgattaaagtatttaaaaataagcacaaatacrtgggttaaacattttctaatgtctaaactttcattaatgtcatattttgatagttcacaaagtatcttaatttagaaaaggaaattgtcagtgacactca

SEQ ID NO: 9005 - DNA, 201 bp, Homo sapiens
ggcaatggcagaaccacgtgacgtgtgctacgagagacgtgcacaggtaccacaggcccacacaggtggggcatctcaccaggactgggtgtcatgaaaartttcctggggtaagtggtttctaggcagggatctgaacaatgagcaggagtttgctagacaaaaggcaggtaagaggtgagatagcagtggggcagggct

SEQ ID NO: 9006 - DNA, 201 bp, Homo sapiens
caccttgtgagatatattccaaagttatcatccttttcccctaaaaatcaaagctgtgtagttttgtgtcttaaataaaaaaaaagaggactagaaacaasttaaaatctgtatttcgaaattctctaatgcaaaagtaacctttgggaaacttcctaagcaataagcacaatgacactcatacaaaccaaatttctctaa

SEQ ID NO: 9007 - DNA, 201 bp, Homo sapiens
gtgtctggcacatagccagtaataaataaataaatgtttgttggaacaagggcacagaaaaccaaatgaaagccaaagagggtagacagaaagtagttcasttggcaagagtcaatgtggaacaggtaaaaggtggcagtgaagttatggccctggatgcttctgtgttaaagaagaaaaaaagaaaaggatacttagtga

SEQ ID NO: 9008 - DNA, 201 bp, Homo sapiens
ggctgtaccaccctctgctctccttaaaggtgacagaaaataaattctttatcaatagtcatttgtccaggttacagctaggctgcccaccccattccacstgagatatgaaattggctttcactggcaccttttattcatctcatctgccctttccctttcatgagccaaggcagagcaaatggaagctgaataatgaag

SEQ ID NO: 9009 - DNA, 201 bp, Homo sapiens
cgctgacaatggacctataaaaaggcccaagggattcaaattacttttcttccttccataaaagtcctgtgagaaagcagaagtttgttgtagaagtgcasaagtagtgatttgggaaaatacaagtagcatgtaccgttatatttaaaacttaccttgggtcatcccaacttcagcctaacttgtattttccagacaaac

SEQ ID NO: 9010 - DNA, 201 bp, Homo sapiens
cttagagacagcaaaggggtttcatccactatgatacaaaaatttgggtcacttaattattttttcccaccggttctttatttttccccagttttactggkgtgtaactgacaagtaaaaattacatatgttttaggtatgcagcatgatgactttatatatacatatacaatataaaatgactaccacaatcaagttaat

SEQ ID NO: 9011 - DNA, 201 bp, Homo sapiens
tgataaaaatattctaaaattgcattgtagtgatgtttgcacaactcagtaaattcatcaagtgttgaattgctactcgggaggctgaggagggaggatcrcttgagcccaggaggtcaaggctgcaatgagccatgatcatgccactgtgctccagcttgggcaacagagcaagaccctatctagaaaaaaaaaaaaaaa

SEQ ID NO: 9012 - DNA, 201 bp, Homo sapiens
ctctctgacactactcatctgcaaaaaattcattccttgacagatgttttatttctagtattccctatgaaatcacactaaaaaaattcaaaaacaaatayattgattttaaagccacactaagcagtatactagattttttaattttcacctcaaaatggtagaaacatgtatagaaagagaaaaaatgtgaaattcagt

SEQ ID NO: 9013 - DNA, 201 bp, Homo sapiens
gtatcctcttcgctagctctaaatattggcctaaaagtatgaggaatgaccttgggaacattattattagaagacaaaagttcagggcaagtggaaaaaaktataattgtagtagaatccttttttctgcaagtaaatgagttgtacataaggaagatatgggctctttgacaatgatcggacacaagttatgccctaatc

SEQ ID NO: 9014 - DNA, 201 bp, Homo sapiens
ttgatgatgtgtaacagtttaatggagtataaaatatattctttttttcatagttagtaaaagttgtggagttcttaatgttgtcatatccacactgagcrtgtatcctacccatccagacttttgacagaagcatcaattttctaaattgttctctaacaactacaagttaagaaagaagaaaattactcagtgttaata

SEQ ID NO: 9015 - DNA, 201 bp, Homo sapiens
gaatcttgtttgttcagtatacactaccaacctatcgttgtctagaatctcaagtgaagaaaaatattctaaaactatgacaaggttttaggtgagaactrtatcatgaactaacaatggctgcattttgtctgagcataccattgcgtatgtatgtctaaccacattatgtagttctcatgtagcatattaaaacagaat

SEQ ID NO: 9016 - DNA, 201 bp, Homo sapiens
acggtggctcacacctgtaatcccagcactttgggaggccaaggcaggtggatcacctgaggccaggagcttgagaccagcctggccaacatgtgacaccycatctctattaaaaaacacagaaattggccaggcacggtggtgtgcacctgtaagcccagctaatcgggaggctgaggcaggagaatcgcttgaacccag

SEQ ID NO: 9017 - DNA, 201 bp, Homo sapiens
cacttgaaccctggagacagaggttgcagtgagccgagatcgtgccactgtactccagcctgggcgacagagcaaaactccgtctcaaaaaaaaaaaaaaraaagaaaaagaaaaagaaaaaataaatgcatgcatgggtttacagctggcatagatcaatttctagttattttacaattattgattagggaactcaaaca

SEQ ID NO: 9018 - DNA, 201 bp, Homo sapiens
tgtaagaaacactgatttctaagaggcagaagtattaagaggtaaatgagcatgtcttctacccatgctcaattgatcccctcccccaaataaaaaaaaawatatatatatatataatatatgtaggcagaaatagaatgataaagtgtggtaaatgcctaaaaacagatgaatcagagtcaagctctttgtactattctt

SEQ ID NO: 9019 - DNA, 201 bp, Homo sapiens
aacccaggaagcagaggttgcagtaagctgagatcacacccctgcactccagcctgggcaacagagcaagactccgcctcaaaaaaaaaaaaaaaaaaaarcattcagacagacatataataggtaacattactgctggatcagaaaataatttagcctctgaaacacagtctgatcgagtgatggtaagtatgggtgact

SEQ ID NO: 9020 - DNA, 201 bp, Homo sapiens
tttgaatttcatagaattgttgtgtcataaaattattcttttgaattttttccccaaccatttaaaaatgtataaattattatcagtttgctgatgcctgrtctatccaaattttaagcctcaggtgtcaaggaatagaaaggtaagaaaatgttaaactggatgattagtataaattgtattaaagaacttatactacca

SEQ ID NO: 9021 - DNA, 201 bp, Homo sapiens
aaataacactggatatgtgtaaatttaataataaggatatccaatgcagagtgttcataaaagtgaaacattctgaaccatttatttggaaccgtaaatgwctaatagtgaactacaattaagttatttatatatgtactgacaacatatttttatgatatattatgagcaaaaataaagcagctcataaaaatagtaagg

SEQ ID NO: 9022 - DNA, 201 bp, Homo sapiens
aacagaagatgttgatatctctttcacttgctccttcagcaccatatcttggcaacacttgcgggaagatttgtagagatccacaggagtaatttatccamtttaattaccttcctacttcatttcataaaagggaagaatattctggttcagactttccattggtggcatgctactgaaacctgcgcctggttcttcagg

SEQ ID NO: 9023 - DNA, 201 bp, Homo sapiens
cccctttccccctttcattcccaatatccattctgtcacgtagtctagtctaaattctaatagatctagaattgaccacttcctttttttcttttcttttyttttttttttttttttttttttttgagatggagtcttgctgtagcccaggctggaatgcagtggtgcaatctcacctcactgcaacctctgcctcctgag

SEQ ID NO: 9024 - DNA, 201 bp, Homo sapiens
tctgttgcccaggctggaaggcagtggtgctatctcagctcactgcaacctttgcctcctaggctcaggtgatcctcccacctgagcctccctccccagtrgctgggactataggcatgcgccaccacacctggttaatttttgtatttttttttttttgtaaagacagggattcaccatgttggacaggctggtctcaaa

SEQ ID NO: 9025 - DNA, 201 bp, Homo sapiens
ccgaaaatatgattatagtaatcatagaaataaccacaggacagagaaaacaaattttaaagattctcataaagaatcagaagaccttgaattattatttytttggaatccaggttgacagaaaaactgagtgaatccagttattacccttcagctaattatcaattaactacagagactcataaccaacaggtgggaaca

SEQ ID NO: 9026 - DNA, 201 bp, Homo sapiens
atggtggtgcacgcttgtaatcccagctactcgggaggctgaggcagcagaatcctgaactgaggagatggaggttgcagtgagccgagatcgcaccactrcactccagcctgggcgacagagagagattctgtctcaaaaattaaataaataaataaaaatgaagagggggaggatgaaaaggggagtggaatcatatga

SEQ ID NO: 9027 - DNA, 201 bp, Homo sapiens
gtggattacctgaggtcaggagttcgagaccagcctagccaacatggcgaaaccccatctccattaaaaatacaaaaaattagccaggcatggtggtagcrcctgtaatcccagctactcgggaggctgaggcaaggagaattgcttaaacccgggaggcagaggttgcagtgagctgagatcacgccattgcactccagc

SEQ ID NO: 9028 - DNA, 201 bp, Homo sapiens
ttccttataaattacccagttttacgtattctgttataagcaacagaaaagagattaagcagtttggtttttccagctttattaaggtataattgacaaayagaatcatatatattcaaggtgaactatgtgatgatttgatatgaatcatgtaatgattaccacaaatatatcgagcaccacacagttaccattggggtg

SEQ ID NO: 9029 - DNA, 201 bp, Homo sapiens
tgtaagcatgcgccaaaggagtatatactaaacctattgaaggcttgataaacatattgtacggctgccttattgagactccacctttctcttgttcttamaatcattcaacaactgtatccttaggcccttccaaagcagcacccatggccatctactgttgcacctctgccaactccaagcactattaccctattccca

SEQ ID NO: 9030 - DNA, 201 bp, Homo sapiens
aagaagaaagtcacaagcataagcccttgtaagtactgggtccaggccaggcaggctcatttagggtcctgtggacacttgaacaaaatggaagacagacrcaaaggaatagatccctgaactcacgagtctggggaaagctgcttctaaataacaaagaagaataataactaatagttgtgtagtactttagaatgttat

SEQ ID NO: 9031 - DNA, 201 bp, Homo sapiens
aatatattaatctgggcaagttttcaggatacaagcaaactttaaatctgtaatcgcagtcctattcattctttgggatcttaacgtgcagcctaggcagkcaaactgaaacaaaacacgtttctcctttttcactgcagtagcaaacatacctaaagctgccctgctactccacagaaaacttggttcacagtctcttca

SEQ ID NO: 9032 - DNA, 201 bp, Homo sapiens
ggctgtttgtcccaacttctatattatgatttattagataatgtcgattatttaactttgaagcagaaacttatttcgcttttaatcatttggatcagatygatggatgagcatcttgtggttgcaaggcaagctgttaaaaaaaaaagttattatttgccactacttatcaccacaaatcaggatcatcgtaacactcaa

SEQ ID NO: 9033 - DNA, 201 bp, Homo sapiens
ggctttcgtccttcttttttccttctctctcttcctcctttctctccccttccccaaccagatccttcctatttctggtttacgcaccgtcagtcaagggktgaacaaatttttatatatgcttctaaagcaggagtagcaaatacaaaggaaaaatgcctactcattcaatgcttaagccagtgacagacatcactaatc

SEQ ID NO: 9034 - DNA, 201 bp, Homo sapiens
agtgtttctcaaatttgtaaggtccatcctattgaccgaaaatatgattatagtaatcatagaaataaccacaggacagagaaaacaaattttaaagattytcataaagaatcagaagaccttgaattattatttctttggaatccaggttgacagaaaaactgagtgaatccagttattacccttcagctaattatcaat

SEQ ID NO: 9035 - DNA, 201 bp, Homo sapiens
actgcactccaccatgggcgacagagccaaatcctgtctcaaaactaagaaagaaaaggaggagaggggaggggaggggaggggaagagaggggaggggargggaggggaggagaagagaggggaggggaagggaggggaggggaggccaaaccttcaataaccgacatcaaaaggtcagggctgggagtggtgtctaacg

SEQ ID NO: 9036 - DNA, 201 bp, Homo sapiens
ctaagtcagatataaggaatgaaaggtaacccggatagcattttctacatcatgcaacaaataccccgcaacattaatagcaaagttctatagagatccayttcctacatgtggcatcactgccacaaaatgtcactacatattggggtgttctagaaaatcactctataaattgtccactttggctatgaaatagagacc

SEQ ID NO: 9037 - DNA, 201 bp, Homo sapiens
tcttcccgcatgcagtaagccatcaagattcctctgggaggggtacccttccagtactggggtgagaaaacagcccttaccaccagacattgagaactggkgctgcaacagacctgaataaatatacttaatgaagtaacccttatcttccactagttttatacacccctctatatatctcagtaactcccctagaaaatt

SEQ ID NO: 9038 - DNA, 201 bp, Homo sapiens
atatccctttgtattatataaacggatttaagcattttacagaggacaggcaagatttagcaaattggcttaacattctagtctgctgctgagactaaaaygaacaagaccaactacgaagtatagaaaacaacaatctaccacacagattctccaaatgattatgatgagtctcatacacgagtatttcagaggtggaat

SEQ ID NO: 9039 - DNA, 201 bp, Homo sapiens
tcagtttgctcaagatctgagttaaaactggaatttcatgtcatttggagctccactcagtagggaatggcaaacattaaacttttattgttacaggtcaytaagaattaactccaaaaatttatatccaaaaatgatgagtctcctagtctaattttataaaaatatattccatttttaattagagtataaatatattgg

SEQ ID NO: 9040 - DNA, 201 bp, Homo sapiens
aattaacaaaccatctaggccaggcgtggtggcagctcacacctgtaatcccagcactttgggagaccaaggcaagtggaccacttgaggtcaggagttcragaccagcctggccaacatggtgaaaccccgtctctactaaaaatacaaaacttcgctgggcgtggtgatacattcctgtaatcccagctacctgggagg

SEQ ID NO: 9041 - DNA, 201 bp, Homo sapiens
gggatactccaggtcctctctgccccccaggctgtactttccactacagcatctaattttacatataaggtaagtatatctaaggcaggaatatatttackcatttactgatgggcttcacctcacacttatactgagtgtccagtacttccagcccaagtcctttcttgctctccaaaacagacgtgcagtaaaatgaat

SEQ ID NO: 9042 - DNA, 201 bp, Homo sapiens
aaattagccaggcatggtaatgggcgcctgtagtcccagctactcgcgaggctgaggcagaatggagtgaacccaggaggtggagcttgcagtgagcggaractgcaccactgcattccagcctgggcgatacagtgagactccatctcaaaaaaaaaaaaaaattgtaatttcctagtgtctctacctttaccctatgca

SEQ ID NO: 9043 - DNA, 201 bp, Homo sapiens
taatgacccaagtgataggatgtcaataagttattacggctaacacacaggacaccactcaacaagaactgccctgaaccaactggtttgcaagtaacttratgaattttcaaaatcacacttagaaaatatgagaacacattctaagcagagttattccccctagctgtccttaaatatgactaattgttgccaagaaca

SEQ ID NO: 9044 - DNA, 201 bp, Homo sapiens
taacgggcaatggcagaaccacgtgacgtgtgctacgagagacgtgcacaggtaccacaggcccacacaggtggggcatctcaccaggactgggtgtcatkaaaagtttcctggggtaagtggtttctaggcagggatctgaacaatgagcaggagtttgctagacaaaaggcaggtaagaggtgagatagcagtggggca

SEQ ID NO: 9045 - DNA, 201 bp, Homo sapiens
ctgatgtcccaagttgctacttaatgtcaaattctcacatcaattcaaaacatttcccagtgggatgtttggttatagttcagtaaacttgtaagcatgcrccaaaggagtatatactaaacctattgaaggcttgataaacatattgtacggctgccttattgagactccacctttctcttgttcttaaaatcattcaac

SEQ ID NO: 9046 - DNA, 201 bp, Homo sapiens
aaaagtaaaactagtggaacacagatttcgctcagccacatgaaccctacaaggccagcactgactctcagtgatttttcagactggaggttgctacctaytattggactattatatcattttagcatatcacactagcatttttaatatgaaaatacaataaaatagaaactttaagaaggcagaaaacaataaatcaca

SEQ ID NO: 9047 - DNA, 201 bp, Homo sapiens
ttggagtgcagtgccgtgatcttggctcactgcaacctccgcctcctgggttcaagtgattctcctgcctcagcctcccgagtagctgggattacaggcaygcgccaccatgcccagctaatttgtgttatttttggtagagacgggatttcaccatgttggccaggctggtctcgaactcctgacctcaggtgatctgtc

SEQ ID NO: 9048 - DNA, 201 bp, Homo sapiens
ctttttgtgttcatctacacgaattctagtgaatgaatagcctgcaaaatgccaatctttcccaggagtcaacagcattcttccttctccctctcctccayctaccaaagctaattttacttccaaaatatttatcatatcccctgcctcctcacaaggtattacttgtgatgttgcaagaaagagtacccactgaaattt

SEQ ID NO: 9049 - DNA, 201 bp, Homo sapiens
ttgtgctgagcattaaaacttacatgtacaatcatcatgtgaaaaacctactcattccccaacatgcaggatctgaaaacggccaagaaggaacaccagamtgaaacagtcacttagaataggaattcaagacaatcagaatattgtcttgctcttataggcacaaagcatacacctttcaaatatatgtcacaacagata

SEQ ID NO: 9050 - DNA, 201 bp, Homo sapiens
aagtattataatctggagagaaaatttacatttgatttacaactgtgttgcccacattcctttttagctcgaggctatattggcaaagctatggaggtcargaggggaaacagggactctctctgaatattctccagtatttccagatcctgcacagaaggacctcacactcttctccagtgttcctaacacagcattacc

SEQ ID NO: 9051 - DNA, 201 bp, Homo sapiens
ccatgctttaagatttcaaacttcagatgtctgtgaatttttctggacacagatttccctaatcctttaccacgaacatcaggatttaaaaggaatcagcygtgcttcaaagagtataggcacagataccactaagtgactaattatagcaagacctgcatctagataaatatcgaataaaatatgattaagcatcagatc
